United States Patent Application Publication US 2017/0175128 A1 - sequence listing, part 2

SEQ ID NO: 19846 - RNA, 22 nt, Artificial Sequence
  Synthetic oligonucleotide: PDCD1-6236
gggaggccuuggccucacucuc

SEQ ID NO: 19847 - RNA, 23 nt, Artificial Sequence
  Synthetic oligonucleotide: PDCD1-6237
ggggaggccuuggccucacucuc

SEQ ID NO: 19848 - RNA, 24 nt, Artificial Sequence
  Synthetic oligonucleotide: PDCD1-6238
gggggaggccuuggccucacucuc

SEQ ID NO: 19849 - RNA, 18 nt, Artificial Sequence
  Synthetic oligonucleotide: PDCD1-6239
ggacaguucuucugucuc

SEQ ID NO: 19850 - RNA, 19 nt, Artificial Sequence
  Synthetic oligonucleotide: PDCD1-6240
aggacaguucuucugucuc

SEQ ID NO: 19851 - RNA, 20 nt, Artificial Sequence
  Synthetic oligonucleotide: PDCD1-1891
gaggacaguucuucugucuc

SEQ ID NO: 19852 - RNA, 21 nt, Artificial Sequence
  Synthetic oligonucleotide: PDCD1-6241
ugaggacaguucuucugucuc

SEQ ID NO: 19853 - RNA, 22 nt, Artificial Sequence
  Synthetic oligonucleotide: PDCD1-6242
gugaggacaguucuucugucuc

SEQ ID NO: 19854 - RNA, 23 nt, Artificial Sequence
  Synthetic oligonucleotide: PDCD1-6243
agugaggacaguucuucugucuc

SEQ ID NO: 19855 - RNA, 24 nt, Artificial Sequence
  Synthetic oligonucleotide: PDCD1-6244
gagugaggacaguucuucugucuc

SEQ ID NO: 19856 - RNA, 18 nt, Artificial Sequence
  Synthetic oligonucleotide: PDCD1-6245
agcccacucgugccaggg

SEQ ID NO: 19857 - RNA, 19 nt, Artificial Sequence
  Synthetic oligonucleotide: PDCD1-6246
cagcccacucgugccaggg

SEQ ID NO: 19858 - RNA, 20 nt, Artificial Sequence
  Synthetic oligonucleotide: PDCD1-2804
ccagcccacucgugccaggg

SEQ ID NO: 19859 - RNA, 21 nt, Artificial Sequence
  Synthetic oligonucleotide: PDCD1-6247
uccagcccacucgugccaggg

SEQ ID NO: 19860 - RNA, 22 nt, Artificial Sequence
  Synthetic oligonucleotide: PDCD1-6248
cuccagcccacucgugccaggg

SEQ ID NO: 19861 - RNA, 23 nt, Artificial Sequence
  Synthetic oligonucleotide: PDCD1-6249
ccuccagcccacucgugccaggg

SEQ ID NO: 19862 - RNA, 24 nt, Artificial Sequence
  Synthetic oligonucleotide: PDCD1-6250
cccuccagcccacucgugccaggg

SEQ ID NO: 19863 - RNA, 18 nt, Artificial Sequence
  Synthetic oligonucleotide: PDCD1-6251
ccccaaaccuuggccgug

SEQ ID NO: 19864 - RNA, 19 nt, Artificial Sequence
  Synthetic oligonucleotide: PDCD1-6252
accccaaaccuuggccgug

SEQ ID NO: 19865 - RNA, 20 nt, Artificial Sequence
  Synthetic oligonucleotide: PDCD1-2225
aaccccaaaccuuggccgug

SEQ ID NO: 19866 - RNA, 21 nt, Artificial Sequence
  Synthetic oligonucleotide: PDCD1-6253
gaaccccaaaccuuggccgug

SEQ ID NO: 19867 - RNA, 22 nt, Artificial Sequence
  Synthetic oligonucleotide: PDCD1-6254
agaaccccaaaccuuggccgug

SEQ ID NO: 19868 - RNA, 23 nt, Artificial Sequence
  Synthetic oligonucleotide: PDCD1-6255
cagaaccccaaaccuuggccgug

SEQ ID NO: 19869 - RNA, 24 nt, Artificial Sequence
  Synthetic oligonucleotide: PDCD1-6256
ccagaaccccaaaccuuggccgug

SEQ ID NO: 19870 - RNA, 18 nt, Artificial Sequence
  Synthetic oligonucleotide: PDCD1-6257
cccagccagccugcaccu

SEQ ID NO: 19871 - RNA, 19 nt, Artificial Sequence
  Synthetic oligonucleotide: PDCD1-6258
gcccagccagccugcaccu

SEQ ID NO: 19872 - RNA, 20 nt, Artificial Sequence
  Synthetic oligonucleotide: PDCD1-2961
ugcccagccagccugcaccu

SEQ ID NO: 19873 - RNA, 21 nt, Artificial Sequence
  Synthetic oligonucleotide: PDCD1-6259
gugcccagccagccugcaccu

SEQ ID NO: 19874 - RNA, 22 nt, Artificial Sequence
  Synthetic oligonucleotide: PDCD1-6260
ugugcccagccagccugcaccu

SEQ ID NO: 19875 - RNA, 23 nt, Artificial Sequence
  Synthetic oligonucleotide: PDCD1-6261
cugugcccagccagccugcaccu

SEQ ID NO: 19876 - RNA, 24 nt, Artificial Sequence
  Synthetic oligonucleotide: PDCD1-6262
ucugugcccagccagccugcaccu

SEQ ID NO: 19877 - RNA, 18 nt, Artificial Sequence
  Synthetic oligonucleotide: PDCD1-6263
ccucacucgaguuuuccu

SEQ ID NO: 19878 - RNA, 19 nt, Artificial Sequence
  Synthetic oligonucleotide: PDCD1-6264
uccucacucgaguuuuccu

SEQ ID NO: 19879 - RNA, 20 nt, Artificial Sequence
  Synthetic oligonucleotide: PDCD1-1901
guccucacucgaguuuuccu

SEQ ID NO: 19880 - RNA, 21 nt, Artificial Sequence
  Synthetic oligonucleotide: PDCD1-6265
gguccucacucgaguuuuccu

SEQ ID NO: 19881 - RNA, 22 nt, Artificial Sequence
  Synthetic oligonucleotide: PDCD1-6266
ugguccucacucgaguuuuccu

SEQ ID NO: 19882 - RNA, 23 nt, Artificial Sequence
  Synthetic oligonucleotide: PDCD1-6267
uugguccucacucgaguuuuccu

SEQ ID NO: 19883 - RNA, 24 nt, Artificial Sequence
  Synthetic oligonucleotide: PDCD1-6268
cuugguccucacucgaguuuuccu

SEQ ID NO: 19884 - RNA, 18 nt, Artificial Sequence
  Synthetic oligonucleotide: PDCD1-6269
ccaggaucccuccugggu

SEQ ID NO: 19885 - RNA, 19 nt, Artificial Sequence
  Synthetic oligonucleotide: PDCD1-6270
uccaggaucccuccugggu

SEQ ID NO: 19886 - RNA, 20 nt, Artificial Sequence
  Synthetic oligonucleotide: PDCD1-2985
cuccaggaucccuccugggu

SEQ ID NO: 19887 - RNA, 21 nt, Artificial Sequence
  Synthetic oligonucleotide: PDCD1-6271
ucuccaggaucccuccugggu

SEQ ID NO: 19888 - RNA, 22 nt, Artificial Sequence
  Synthetic oligonucleotide: PDCD1-6272
gucuccaggaucccuccugggu

SEQ ID NO: 19889 - RNA, 23 nt, Artificial Sequence
  Synthetic oligonucleotide: PDCD1-6273
ugucuccaggaucccuccugggu

SEQ ID NO: 19890 - RNA, 24 nt, Artificial Sequence
  Synthetic oligonucleotide: PDCD1-6274
cugucuccaggaucccuccugggu

SEQ ID NO: 19891 - RNA, 18 nt, Artificial Sequence
  Synthetic oligonucleotide: PDCD1-6275
uauccaaaguguaccugu

SEQ ID NO: 19892 - RNA, 19 nt, Artificial Sequence
  Synthetic oligonucleotide: PDCD1-6276
auauccaaaguguaccugu

SEQ ID NO: 19893 - RNA, 20 nt, Artificial Sequence
  Synthetic oligonucleotide: PDCD1-1894
uauauccaaaguguaccugu

SEQ ID NO: 19894 - RNA, 21 nt, Artificial Sequence
  Synthetic oligonucleotide: PDCD1-6277
uuauauccaaaguguaccugu

SEQ ID NO: 19895 - RNA, 22 nt, Artificial Sequence
  Synthetic oligonucleotide: PDCD1-6278
auuauauccaaaguguaccugu

SEQ ID NO: 19896 - RNA, 23 nt, Artificial Sequence
  Synthetic oligonucleotide: PDCD1-6279
cauuauauccaaaguguaccugu

SEQ ID NO: 19897 - RNA, 24 nt, Artificial Sequence
  Synthetic oligonucleotide: PDCD1-6280
ucauuauauccaaaguguaccugu

SEQ ID NO: 19898 - RNA, 18 nt, Artificial Sequence
  Synthetic oligonucleotide: PDCD1-6281
ccucaaagcuuccaccuu

SEQ ID NO: 19899 - RNA, 19 nt, Artificial Sequence
  Synthetic oligonucleotide: PDCD1-6282
cccucaaagcuuccaccuu

SEQ ID NO: 19900 - RNA, 20 nt, Artificial Sequence
  Synthetic oligonucleotide: PDCD1-1726
ccccucaaagcuuccaccuu

SEQ ID NO: 19901 - RNA, 21 nt, Artificial Sequence
  Synthetic oligonucleotide: PDCD1-6283
cccccucaaagcuuccaccuu

SEQ ID NO: 19902 - RNA, 22 nt, Artificial Sequence
  Synthetic oligonucleotide: PDCD1-6284
ucccccucaaagcuuccaccuu

SEQ ID NO: 19903 - RNA, 23 nt, Artificial Sequence
  Synthetic oligonucleotide: PDCD1-6285
cucccccucaaagcuuccaccuu

SEQ ID NO: 19904 - RNA, 24 nt, Artificial Sequence
  Synthetic oligonucleotide: PDCD1-6286
gcucccccucaaagcuuccaccuu

SEQ ID NO: 19905 - RNA, 18 nt, Artificial Sequence
  Synthetic oligonucleotide: PDCD1-6287
caccugugccccagcgaa

SEQ ID NO: 19906 - RNA, 19 nt, Artificial Sequence
  Synthetic oligonucleotide: PDCD1-6288
ucaccugugccccagcgaa

SEQ ID NO: 19907 - RNA, 20 nt, Artificial Sequence
  Synthetic oligonucleotide: PDCD1-3023
gucaccugugccccagcgaa

SEQ ID NO: 19908 - RNA, 21 nt, Artificial Sequence
  Synthetic oligonucleotide: PDCD1-6289
ggucaccugugccccagcgaa

SEQ ID NO: 19909 - RNA, 22 nt, Artificial Sequence
  Synthetic oligonucleotide: PDCD1-6290
gggucaccugugccccagcgaa

SEQ ID NO: 19910 - RNA, 23 nt, Artificial Sequence
  Synthetic oligonucleotide: PDCD1-6291
agggucaccugugccccagcgaa

SEQ ID NO: 19911 - RNA, 24 nt, Artificial Sequence
  Synthetic oligonucleotide: PDCD1-6292
uagggucaccugugccccagcgaa

SEQ ID NO: 19912 - RNA, 18 nt, Artificial Sequence
  Synthetic oligonucleotide: PDCD1-6293
agaaggucaaggcuggaa

SEQ ID NO: 19913 - RNA, 19 nt, Artificial Sequence
  Synthetic oligonucleotide: PDCD1-6294
aagaaggucaaggcuggaa

SEQ ID NO: 19914 - RNA, 20 nt, Artificial Sequence
  Synthetic oligonucleotide: PDCD1-3044
gaagaaggucaaggcuggaa

SEQ ID NO: 19915 - RNA, 21 nt, Artificial Sequence
  Synthetic oligonucleotide: PDCD1-6295
ggaagaaggucaaggcuggaa

SEQ ID NO: 19916 - RNA, 22 nt, Artificial Sequence
  Synthetic oligonucleotide: PDCD1-6296
gggaagaaggucaaggcuggaa

SEQ ID NO: 19917 - RNA, 23 nt, Artificial Sequence
  Synthetic oligonucleotide: PDCD1-6297
ggggaagaaggucaaggcuggaa

SEQ ID NO: 19918 - RNA, 24 nt, Artificial Sequence
  Synthetic oligonucleotide: PDCD1-6298
cggggaagaaggucaaggcuggaa

SEQ ID NO: 19919 - RNA, 18 nt, Artificial Sequence
  Synthetic oligonucleotide: PDCD1-6299
ccccacggauggucugaa

SEQ ID NO: 19920 - RNA, 19 nt, Artificial Sequence
  Synthetic oligonucleotide: PDCD1-6300
cccccacggauggucugaa

SEQ ID NO: 19921 - RNA, 20 nt, Artificial Sequence
  Synthetic oligonucleotide: PDCD1-1683
ucccccacggauggucugaa

SEQ ID NO: 19922 - RNA, 21 nt, Artificial Sequence
  Synthetic oligonucleotide: PDCD1-6301
cucccccacggauggucugaa

SEQ ID NO: 19923 - RNA, 22 nt, Artificial Sequence
  Synthetic oligonucleotide: PDCD1-6302
ccucccccacggauggucugaa

SEQ ID NO: 19924 - RNA, 23 nt, Artificial Sequence
  Synthetic oligonucleotide: PDCD1-6303
gccucccccacggauggucugaa

SEQ ID NO: 19925 - RNA, 24 nt, Artificial Sequence
  Synthetic oligonucleotide: PDCD1-6304
ggccucccccacggauggucugaa

SEQ ID NO: 19926 - RNA, 18 nt, Artificial Sequence
  Synthetic oligonucleotide: PDCD1-6305
guggucacaguguacaca

SEQ ID NO: 19927 - RNA, 19 nt, Artificial Sequence
  Synthetic oligonucleotide: PDCD1-6306
uguggucacaguguacaca

SEQ ID NO: 19928 - RNA, 20 nt, Artificial Sequence
  Synthetic oligonucleotide: PDCD1-1670
cuguggucacaguguacaca

SEQ ID NO: 19929 - RNA, 21 nt, Artificial Sequence
  Synthetic oligonucleotide: PDCD1-6307
gcuguggucacaguguacaca

SEQ ID NO: 19930 - RNA, 22 nt, Artificial Sequence
  Synthetic oligonucleotide: PDCD1-6308
ggcuguggucacaguguacaca

SEQ ID NO: 19931 - RNA, 23 nt, Artificial Sequence
  Synthetic oligonucleotide: PDCD1-6309
gggcuguggucacaguguacaca

SEQ ID NO: 19932 - RNA, 24 nt, Artificial Sequence
  Synthetic oligonucleotide: PDCD1-6310
cgggcuguggucacaguguacaca

SEQ ID NO: 19933 - RNA, 18 nt, Artificial Sequence
  Synthetic oligonucleotide: PDCD1-6311
gccaagguuagucccaca

SEQ ID NO: 19934 - RNA, 19 nt, Artificial Sequence
  Synthetic oligonucleotide: PDCD1-6312
agccaagguuagucccaca

SEQ ID NO: 19935 - RNA, 20 nt, Artificial Sequence
  Synthetic oligonucleotide: PDCD1-2754
aagccaagguuagucccaca

SEQ ID NO: 19936 - RNA, 21 nt, Artificial Sequence
  Synthetic oligonucleotide: PDCD1-6313
aaagccaagguuagucccaca

SEQ ID NO: 19937 - RNA, 22 nt, Artificial Sequence
  Synthetic oligonucleotide: PDCD1-6314
uaaagccaagguuagucccaca

SEQ ID NO: 19938 - RNA, 23 nt, Artificial Sequence
  Synthetic oligonucleotide: PDCD1-6315
guaaagccaagguuagucccaca

SEQ ID NO: 19939 - RNA, 24 nt, Artificial Sequence
  Synthetic oligonucleotide: PDCD1-6316
cguaaagccaagguuagucccaca

SEQ ID NO: 19940 - RNA, 18 nt, Artificial Sequence
  Synthetic oligonucleotide: PDCD1-6317
gcaggcuggcugggcaca

SEQ ID NO: 19941 - RNA, 19 nt, Artificial Sequence
  Synthetic oligonucleotide: PDCD1-6318
ugcaggcuggcugggcaca

SEQ ID NO: 19942 - RNA, 20 nt, Artificial Sequence
  Synthetic oligonucleotide: PDCD1-1662
gugcaggcuggcugggcaca

SEQ ID NO: 19943 - RNA, 21 nt, Artificial Sequence
  Synthetic oligonucleotide: PDCD1-6319
ggugcaggcuggcugggcaca

SEQ ID NO: 19944 - RNA, 22 nt, Artificial Sequence
  Synthetic oligonucleotide: PDCD1-6320
aggugcaggcuggcugggcaca

SEQ ID NO: 19945 - RNA, 23 nt, Artificial Sequence
  Synthetic oligonucleotide: PDCD1-6321
caggugcaggcuggcugggcaca

SEQ ID NO: 19946 - RNA, 24 nt, Artificial Sequence
  Synthetic oligonucleotide: PDCD1-6322
ccaggugcaggcuggcugggcaca

SEQ ID NO: 19947 - RNA, 18 nt, Artificial Sequence
  Synthetic oligonucleotide: PDCD1-6323
ugcucagcacagaauaca

SEQ ID NO: 19948 - RNA, 19 nt, Artificial Sequence
  Synthetic oligonucleotide: PDCD1-6324
augcucagcacagaauaca

SEQ ID NO: 19949 - RNA, 20 nt, Artificial Sequence
  Synthetic oligonucleotide: PDCD1-3065
aaugcucagcacagaauaca

SEQ ID NO: 19950 - RNA, 21 nt, Artificial Sequence
  Synthetic oligonucleotide: PDCD1-6325
aaaugcucagcacagaauaca

SEQ ID NO: 19951 - RNA, 22 nt, Artificial Sequence
  Synthetic oligonucleotide: PDCD1-6326
aaaaugcucagcacagaauaca

SEQ ID NO: 19952 - RNA, 23 nt, Artificial Sequence
  Synthetic oligonucleotide: PDCD1-6327
uaaaaugcucagcacagaauaca

SEQ ID NO: 19953 - RNA, 24 nt, Artificial Sequence
  Synthetic oligonucleotide: PDCD1-6328
auaaaaugcucagcacagaauaca

SEQ ID NO: 19954 - RNA, 18 nt, Artificial Sequence
  Synthetic oligonucleotide: PDCD1-6329
cuguggucacaguguaca

SEQ ID NO: 19955 - RNA, 19 nt, Artificial Sequence
  Synthetic oligonucleotide: PDCD1-6330
gcuguggucacaguguaca

SEQ ID NO: 19956 - RNA, 20 nt, Artificial Sequence
  Synthetic oligonucleotide: PDCD1-1669
ggcuguggucacaguguaca

SEQ ID NO: 19957 - RNA, 21 nt, Artificial Sequence
  Synthetic oligonucleotide: PDCD1-6331
gggcuguggucacaguguaca

SEQ ID NO: 19958 - RNA, 22 nt, Artificial Sequence
  Synthetic oligonucleotide: PDCD1-6332
cgggcuguggucacaguguaca

SEQ ID NO: 19959 - RNA, 23 nt, Artificial Sequence
  Synthetic oligonucleotide: PDCD1-6333
gcgggcuguggucacaguguaca

SEQ ID NO: 19960 - RNA, 24 nt, Artificial Sequence
  Synthetic oligonucleotide: PDCD1-6334
agcgggcuguggucacaguguaca

SEQ ID NO: 19961 - RNA, 18 nt, Artificial Sequence
  Synthetic oligonucleotide: PDCD1-6335
agggucaccugugcccca

SEQ ID NO: 19962 - RNA, 19 nt, Artificial Sequence
  Synthetic oligonucleotide: PDCD1-6336
uagggucaccugugcccca

SEQ ID NO: 19963 - RNA, 20 nt, Artificial Sequence
  Synthetic oligonucleotide: PDCD1-1927
guagggucaccugugcccca

SEQ ID NO: 19964 - RNA, 21 nt, Artificial Sequence
  Synthetic oligonucleotide: PDCD1-6337
aguagggucaccugugcccca

SEQ ID NO: 19965 - RNA, 22 nt, Artificial Sequence
  Synthetic oligonucleotide: PDCD1-6338
caguagggucaccugugcccca

SEQ ID NO: 19966 - RNA, 23 nt, Artificial Sequence
  Synthetic oligonucleotide: PDCD1-6339
ucaguagggucaccugugcccca

SEQ ID NO: 19967 - RNA, 24 nt, Artificial Sequence
  Synthetic oligonucleotide: PDCD1-6340
uucaguagggucaccugugcccca

SEQ ID NO: 19968 - RNA, 18 nt, Artificial Sequence
  Synthetic oligonucleotide: PDCD1-6341
gccagccaggcccaggca

SEQ ID NO: 19969 - RNA, 19 nt, Artificial Sequence
  Synthetic oligonucleotide: PDCD1-6342
cgccagccaggcccaggca

SEQ ID NO: 19970 - RNA, 20 nt, Artificial Sequence
  Synthetic oligonucleotide: PDCD1-1961
ccgccagccaggcccaggca

SEQ ID NO: 19971 - RNA, 21 nt, Artificial Sequence
  Synthetic oligonucleotide: PDCD1-6343
gccgccagccaggcccaggca

SEQ ID NO: 19972 - RNA, 22 nt, Artificial Sequence
  Synthetic oligonucleotide: PDCD1-6344
ggccgccagccaggcccaggca

SEQ ID NO: 19973 - RNA, 23 nt, Artificial Sequence
  Synthetic oligonucleotide: PDCD1-6345
gggccgccagccaggcccaggca

SEQ ID NO: 19974 - RNA, 24 nt, Artificial Sequence
  Synthetic oligonucleotide: PDCD1-6346
cgggccgccagccaggcccaggca

SEQ ID NO: 19975 - RNA, 18 nt, Artificial Sequence
  Synthetic oligonucleotide: PDCD1-6347
cagagggccagccgggca

SEQ ID NO: 19976 - RNA, 19 nt, Artificial Sequence
  Synthetic oligonucleotide: PDCD1-6348
acagagggccagccgggca

SEQ ID NO: 19977 - RNA, 20 nt, Artificial Sequence
  Synthetic oligonucleotide: PDCD1-1664
cacagagggccagccgggca

SEQ ID NO: 19978 - RNA, 21 nt, Artificial Sequence
  Synthetic oligonucleotide: PDCD1-6349
gcacagagggccagccgggca

SEQ ID NO: 19979 - RNA, 22 nt, Artificial Sequence
  Synthetic oligonucleotide: PDCD1-6350
ggcacagagggccagccgggca

SEQ ID NO: 19980 - RNA, 23 nt, Artificial Sequence
  Synthetic oligonucleotide: PDCD1-6351
gggcacagagggccagccgggca

SEQ ID NO: 19981 - RNA, 24 nt, Artificial Sequence
  Synthetic oligonucleotide: PDCD1-6352
ugggcacagagggccagccgggca

SEQ ID NO: 19982 - RNA, 18 nt, Artificial Sequence
  Synthetic oligonucleotide: PDCD1-6353
gugcaggcuggcugggca

SEQ ID NO: 19983 - RNA, 19 nt, Artificial Sequence
  Synthetic oligonucleotide: PDCD1-6354
ggugcaggcuggcugggca

SEQ ID NO: 19984 - RNA, 20 nt, Artificial Sequence
  Synthetic oligonucleotide: PDCD1-1661
aggugcaggcuggcugggca

SEQ ID NO: 19985 - RNA, 21 nt, Artificial Sequence
  Synthetic oligonucleotide: PDCD1-6355
caggugcaggcuggcugggca

SEQ ID NO: 19986 - RNA, 22 nt, Artificial Sequence
  Synthetic oligonucleotide: PDCD1-6356
ccaggugcaggcuggcugggca

SEQ ID NO: 19987 - RNA, 23 nt, Artificial Sequence
  Synthetic oligonucleotide: PDCD1-6357
cccaggugcaggcuggcugggca

SEQ ID NO: 19988 - RNA, 24 nt, Artificial Sequence
  Synthetic oligonucleotide: PDCD1-6358
ccccaggugcaggcuggcugggca

SEQ ID NO: 19989 - RNA, 18 nt, Artificial Sequence
  Synthetic oligonucleotide: PDCD1-6359
ucuccucgauccgggaga

SEQ ID NO: 19990 - RNA, 19 nt, Artificial Sequence
  Synthetic oligonucleotide: PDCD1-6360
cucuccucgauccgggaga

SEQ ID NO: 19991 - RNA, 20 nt, Artificial Sequence
  Synthetic oligonucleotide: PDCD1-1680
ucucuccucgauccgggaga

SEQ ID NO: 19992 - RNA, 21 nt, Artificial Sequence
  Synthetic oligonucleotide: PDCD1-6361
cucucuccucgauccgggaga

SEQ ID NO: 19993 - RNA, 22 nt, Artificial Sequence
  Synthetic oligonucleotide: PDCD1-6362
ccucucuccucgauccgggaga

SEQ ID NO: 19994 - RNA, 23 nt, Artificial Sequence
  Synthetic oligonucleotide: PDCD1-6363
cccucucuccucgauccgggaga

SEQ ID NO: 19995 - RNA, 24 nt, Artificial Sequence
  Synthetic oligonucleotide: PDCD1-6364
ucccucucuccucgauccgggaga

SEQ ID NO: 19996 - RNA, 18 nt, Artificial Sequence
  Synthetic oligonucleotide: PDCD1-6365
caggagggauccuggaga

SEQ ID NO: 19997 - RNA, 19 nt, Artificial Sequence
  Synthetic oligonucleotide: PDCD1-6366
ccaggagggauccuggaga

SEQ ID NO: 19998 - RNA, 20 nt, Artificial Sequence
  Synthetic oligonucleotide: PDCD1-1700
cccaggagggauccuggaga

SEQ ID NO: 19999 - RNA, 21 nt, Artificial Sequence
  Synthetic oligonucleotide: PDCD1-6367
acccaggagggauccuggaga

SEQ ID NO: 20000 - RNA, 22 nt, Artificial Sequence
  Synthetic oligonucleotide: PDCD1-6368
cacccaggagggauccuggaga

SEQ ID NO: 20001 - RNA, 23 nt, Artificial Sequence
  Synthetic oligonucleotide: PDCD1-6369
ccacccaggagggauccuggaga

SEQ ID NO: 20002 - RNA, 24 nt, Artificial Sequence
  Synthetic oligonucleotide: PDCD1-6370
cccacccaggagggauccuggaga

SEQ ID NO: 20003 - RNA, 18 nt, Artificial Sequence
  Synthetic oligonucleotide: PDCD1-6371
caccccacccuggcacga

SEQ ID NO: 20004 - RNA, 19 nt, Artificial Sequence
  Synthetic oligonucleotide: PDCD1-6372
ccaccccacccuggcacga

SEQ ID NO: 20005 - RNA, 20 nt, Artificial Sequence
  Synthetic oligonucleotide: PDCD1-1958
accaccccacccuggcacga

SEQ ID NO: 20006 - RNA, 21 nt, Artificial Sequence
  Synthetic oligonucleotide: PDCD1-6373
aaccaccccacccuggcacga

SEQ ID NO: 20007 - RNA, 22 nt, Artificial Sequence
  Synthetic oligonucleotide: PDCD1-6374
gaaccaccccacccuggcacga

SEQ ID NO: 20008 - RNA, 23 nt, Artificial Sequence
  Synthetic oligonucleotide: PDCD1-6375
ugaaccaccccacccuggcacga

SEQ ID NO: 20009 - RNA, 24 nt, Artificial Sequence
  Synthetic oligonucleotide: PDCD1-6376
cugaaccaccccacccuggcacga

SEQ ID NO: 20010 - RNA, 18 nt, Artificial Sequence
  Synthetic oligonucleotide: PDCD1-6377
ucaccugugccccagcga

SEQ ID NO: 20011 - RNA, 19 nt, Artificial Sequence
  Synthetic oligonucleotide: PDCD1-6378
gucaccugugccccagcga

SEQ ID NO: 20012 - RNA, 20 nt, Artificial Sequence
  Synthetic oligonucleotide: PDCD1-3024
ggucaccugugccccagcga

SEQ ID NO: 20013 - RNA, 21 nt, Artificial Sequence
  Synthetic oligonucleotide: PDCD1-6379
gggucaccugugccccagcga

SEQ ID NO: 20014 - RNA, 22 nt, Artificial Sequence
  Synthetic oligonucleotide: PDCD1-6380
agggucaccugugccccagcga

SEQ ID NO: 20015 - RNA, 23 nt, Artificial Sequence
  Synthetic oligonucleotide: PDCD1-6381
uagggucaccugugccccagcga

SEQ ID NO: 20016 - RNA, 24 nt, Artificial Sequence
  Synthetic oligonucleotide: PDCD1-6382
guagggucaccugugccccagcga

SEQ ID NO: 20017 - RNA, 18 nt, Artificial Sequence
  Synthetic oligonucleotide: PDCD1-6383
auccuuaggaaaacucga

SEQ ID NO: 20018 - RNA, 19 nt, Artificial Sequence
  Synthetic oligonucleotide: PDCD1-6384
cauccuuaggaaaacucga

SEQ ID NO: 20019 - RNA, 20 nt, Artificial Sequence
  Synthetic oligonucleotide: PDCD1-1711
ccauccuuaggaaaacucga

SEQ ID NO: 20020 - RNA, 21 nt, Artificial Sequence
  Synthetic oligonucleotide: PDCD1-6385
cccauccuuaggaaaacucga

SEQ ID NO: 20021 - RNA, 22 nt, Artificial Sequence
  Synthetic oligonucleotide: PDCD1-6386
ucccauccuuaggaaaacucga

SEQ ID NO: 20022 - RNA, 23 nt, Artificial Sequence
  Synthetic oligonucleotide: PDCD1-6387
aucccauccuuaggaaaacucga

SEQ ID NO: 20023 - RNA, 24 nt, Artificial Sequence
  Synthetic oligonucleotide: PDCD1-6388
caucccauccuuaggaaaacucga

SEQ ID NO: 20024 - RNA, 18 nt, Artificial Sequence
  Synthetic oligonucleotide: PDCD1-6389
ggcacagaggguccagga

SEQ ID NO: 20025 - RNA, 19 nt, Artificial Sequence
  Synthetic oligonucleotide: PDCD1-6390
gggcacagaggguccagga

SEQ ID NO: 20026 - RNA, 20 nt, Artificial Sequence
  Synthetic oligonucleotide: PDCD1-1668
cgggcacagaggguccagga

SEQ ID NO: 20027 - RNA, 21 nt, Artificial Sequence
  Synthetic oligonucleotide: PDCD1-6391
ccgggcacagaggguccagga

SEQ ID NO: 20028 - RNA, 22 nt, Artificial Sequence
  Synthetic oligonucleotide: PDCD1-6392
gccgggcacagaggguccagga

SEQ ID NO: 20029 - RNA, 23 nt, Artificial Sequence
  Synthetic oligonucleotide: PDCD1-6393
agccgggcacagaggguccagga

SEQ ID NO: 20030 - RNA, 24 nt, Artificial Sequence
  Synthetic oligonucleotide: PDCD1-6394
cagccgggcacagaggguccagga

SEQ ID NO: 20031 - RNA, 18 nt, Artificial Sequence
  Synthetic oligonucleotide: PDCD1-6395
aagaaggucaaggcugga

SEQ ID NO: 20032 - RNA, 19 nt, Artificial Sequence
  Synthetic oligonucleotide: PDCD1-6396
gaagaaggucaaggcugga

SEQ ID NO: 20033 - RNA, 20 nt, Artificial Sequence
  Synthetic oligonucleotide: PDCD1-3045
ggaagaaggucaaggcugga

SEQ ID NO: 20034 - RNA, 21 nt, Artificial Sequence
  Synthetic oligonucleotide: PDCD1-6397
gggaagaaggucaaggcugga

SEQ ID NO: 20035 - RNA, 22 nt, Artificial Sequence
  Synthetic oligonucleotide: PDCD1-6398
ggggaagaaggucaaggcugga

SEQ ID NO: 20036 - RNA, 23 nt, Artificial Sequence
  Synthetic oligonucleotide: PDCD1-6399
cggggaagaaggucaaggcugga

SEQ ID NO: 20037 - RNA, 24 nt, Artificial Sequence
  Synthetic oligonucleotide: PDCD1-6400
ccggggaagaaggucaaggcugga

SEQ ID NO: 20038 - RNA, 18 nt, Artificial Sequence
  Synthetic oligonucleotide: PDCD1-6401
acaagguggaagcuuuga

SEQ ID NO: 20039 - RNA, 19 nt, Artificial Sequence
  Synthetic oligonucleotide: PDCD1-6402
cacaagguggaagcuuuga

SEQ ID NO: 20040 - RNA, 20 nt, Artificial Sequence
  Synthetic oligonucleotide: PDCD1-3030
ccacaagguggaagcuuuga

SEQ ID NO: 20041 - RNA, 21 nt, Artificial Sequence
  Synthetic oligonucleotide: PDCD1-6403
uccacaagguggaagcuuuga

SEQ ID NO: 20042 - RNA, 22 nt, Artificial Sequence
  Synthetic oligonucleotide: PDCD1-6404
auccacaagguggaagcuuuga

SEQ ID NO: 20043 - RNA, 23 nt, Artificial Sequence
  Synthetic oligonucleotide: PDCD1-6405
cauccacaagguggaagcuuuga

SEQ ID NO: 20044 - RNA, 24 nt, Artificial Sequence
  Synthetic oligonucleotide: PDCD1-6406
ccauccacaagguggaagcuuuga

SEQ ID NO: 20045 - RNA, 18 nt, Artificial Sequence
  Synthetic oligonucleotide: PDCD1-6407
agguacacuuuggauaua

SEQ ID NO: 20046 - RNA, 19 nt, Artificial Sequence
  Synthetic oligonucleotide: PDCD1-6408
cagguacacuuuggauaua

SEQ ID NO: 20047 - RNA, 20 nt, Artificial Sequence
  Synthetic oligonucleotide: PDCD1-1704
acagguacacuuuggauaua

SEQ ID NO: 20048 - RNA, 21 nt, Artificial Sequence
  Synthetic oligonucleotide: PDCD1-6409
aacagguacacuuuggauaua

SEQ ID NO: 20049 - RNA, 22 nt, Artificial Sequence
  Synthetic oligonucleotide: PDCD1-6410
gaacagguacacuuuggauaua

SEQ ID NO: 20050 - RNA, 23 nt, Artificial Sequence
  Synthetic oligonucleotide: PDCD1-6411
cgaacagguacacuuuggauaua

SEQ ID NO: 20051 - RNA, 24 nt, Artificial Sequence
  Synthetic oligonucleotide: PDCD1-6412
ucgaacagguacacuuuggauaua

SEQ ID NO: 20052 - RNA, 18 nt, Artificial Sequence
  Synthetic oligonucleotide: PDCD1-6413
gccugacccgucauucua

SEQ ID NO: 20053 - RNA, 19 nt, Artificial Sequence
  Synthetic oligonucleotide: PDCD1-6414
agccugacccgucauucua

SEQ ID NO: 20054 - RNA, 20 nt, Artificial Sequence
  Synthetic oligonucleotide: PDCD1-957
cagccugacccgucauucua

SEQ ID NO: 20055 - RNA, 21 nt, Artificial Sequence
  Synthetic oligonucleotide: PDCD1-6415
ccagccugacccgucauucua

SEQ ID NO: 20056 - RNA, 22 nt, Artificial Sequence
  Synthetic oligonucleotide: PDCD1-6416
gccagccugacccgucauucua

SEQ ID NO: 20057 - RNA, 23 nt, Artificial Sequence
  Synthetic oligonucleotide: PDCD1-6417
ggccagccugacccgucauucua

SEQ ID NO: 20058 - RNA, 24 nt, Artificial Sequence
  Synthetic oligonucleotide: PDCD1-6418
uggccagccugacccgucauucua

SEQ ID NO: 20059 - RNA, 18 nt, Artificial Sequence
  Synthetic oligonucleotide: PDCD1-6419
agccaagguuagucccac

SEQ ID NO: 20060 - RNA, 19 nt, Artificial Sequence
  Synthetic oligonucleotide: PDCD1-6420
aagccaagguuagucccac

SEQ ID NO: 20061 - RNA, 20 nt, Artificial Sequence
  Synthetic oligonucleotide: PDCD1-1706
aaagccaagguuagucccac

SEQ ID NO: 20062 - RNA, 21 nt, Artificial Sequence
  Synthetic oligonucleotide: PDCD1-6421
uaaagccaagguuagucccac

SEQ ID NO: 20063 - RNA, 22 nt, Artificial Sequence
  Synthetic oligonucleotide: PDCD1-6422
guaaagccaagguuagucccac

SEQ ID NO: 20064 - RNA, 23 nt, Artificial Sequence
  Synthetic oligonucleotide: PDCD1-6423
cguaaagccaagguuagucccac

SEQ ID NO: 20065 - RNA, 24 nt, Artificial Sequence
  Synthetic oligonucleotide: PDCD1-6424
ucguaaagccaagguuagucccac

SEQ ID NO: 20066 - RNA, 18 nt, Artificial Sequence
  Synthetic oligonucleotide: PDCD1-6425
cagaagaacuguccucac

SEQ ID NO: 20067 - RNA, 19 nt, Artificial Sequence
  Synthetic oligonucleotide: PDCD1-6426
acagaagaacuguccucac

SEQ ID NO: 20068 - RNA, 20 nt, Artificial Sequence
  Synthetic oligonucleotide: PDCD1-1702
gacagaagaacuguccucac

SEQ ID NO: 20069 - RNA, 21 nt, Artificial Sequence
  Synthetic oligonucleotide: PDCD1-6427
agacagaagaacuguccucac

SEQ ID NO: 20070 - RNA, 22 nt, Artificial Sequence
  Synthetic oligonucleotide: PDCD1-6428
gagacagaagaacuguccucac

SEQ ID NO: 20071 - RNA, 23 nt, Artificial Sequence
  Synthetic oligonucleotide: PDCD1-6429
ggagacagaagaacuguccucac

SEQ ID NO: 20072 - RNA, 24 nt, Artificial Sequence
  Synthetic oligonucleotide: PDCD1-6430
uggagacagaagaacuguccucac

SEQ ID NO: 20073 - RNA, 18 nt, Artificial Sequence
  Synthetic oligonucleotide: PDCD1-6431
augcucagcacagaauac

SEQ ID NO: 20074 - RNA, 19 nt, Artificial Sequence
  Synthetic oligonucleotide: PDCD1-6432
aaugcucagcacagaauac

SEQ ID NO: 20075 - RNA, 20 nt, Artificial Sequence
  Synthetic oligonucleotide: PDCD1-1964
aaaugcucagcacagaauac

SEQ ID NO: 20076 - RNA, 21 nt, Artificial Sequence
  Synthetic oligonucleotide: PDCD1-6433
aaaaugcucagcacagaauac

SEQ ID NO: 20077 - RNA, 22 nt, Artificial Sequence
  Synthetic oligonucleotide: PDCD1-6434
uaaaaugcucagcacagaauac

SEQ ID NO: 20078 - RNA, 23 nt, Artificial Sequence
  Synthetic oligonucleotide: PDCD1-6435
auaaaaugcucagcacagaauac

SEQ ID NO: 20079 - RNA, 24 nt, Artificial Sequence
  Synthetic oligonucleotide: PDCD1-6436
aauaaaaugcucagcacagaauac

SEQ ID NO: 20080 - RNA, 18 nt, Artificial Sequence
  Synthetic oligonucleotide: PDCD1-6437
gcgggcacaauccccacc

SEQ ID NO: 20081 - RNA, 19 nt, Artificial Sequence
  Synthetic oligonucleotide: PDCD1-6438
ggcgggcacaauccccacc

SEQ ID NO: 20082 - RNA, 20 nt, Artificial Sequence
  Synthetic oligonucleotide: PDCD1-1694
aggcgggcacaauccccacc

SEQ ID NO: 20083 - RNA, 21 nt, Artificial Sequence
  Synthetic oligonucleotide: PDCD1-6439
caggcgggcacaauccccacc

SEQ ID NO: 20084 - RNA, 22 nt, Artificial Sequence
  Synthetic oligonucleotide: PDCD1-6440
ccaggcgggcacaauccccacc

SEQ ID NO: 20085 - RNA, 23 nt, Artificial Sequence
  Synthetic oligonucleotide: PDCD1-6441
cccaggcgggcacaauccccacc

SEQ ID NO: 20086 - RNA, 24 nt, Artificial Sequence
  Synthetic oligonucleotide: PDCD1-6442
acccaggcgggcacaauccccacc

SEQ ID NO: 20087 - RNA, 18 nt, Artificial Sequence
  Synthetic oligonucleotide: PDCD1-6443
cgggcacaauccccaccc

SEQ ID NO: 20088 - RNA, 19 nt, Artificial Sequence
  Synthetic oligonucleotide: PDCD1-6444
gcgggcacaauccccaccc

SEQ ID NO: 20089 - RNA, 20 nt, Artificial Sequence
  Synthetic oligonucleotide: PDCD1-2747
ggcgggcacaauccccaccc

SEQ ID NO: 20090 - RNA, 21 nt, Artificial Sequence
  Synthetic oligonucleotide: PDCD1-6445
aggcgggcacaauccccaccc

SEQ ID NO: 20091 - RNA, 22 nt, Artificial Sequence
  Synthetic oligonucleotide: PDCD1-6446
caggcgggcacaauccccaccc

SEQ ID NO: 20092 - RNA, 23 nt, Artificial Sequence
  Synthetic oligonucleotide: PDCD1-6447
ccaggcgggcacaauccccaccc

SEQ ID NO: 20093 - RNA, 24 nt, Artificial Sequence
  Synthetic oligonucleotide: PDCD1-6448
cccaggcgggcacaauccccaccc

SEQ ID NO: 20094 - RNA, 18 nt, Artificial Sequence
  Synthetic oligonucleotide: PDCD1-6449
gcccaggcacuggacccc

SEQ ID NO: 20095 - RNA, 19 nt, Artificial Sequence
  Synthetic oligonucleotide: PDCD1-6450
ggcccaggcacuggacccc

SEQ ID NO: 20096 - RNA, 20 nt, Artificial Sequence
  Synthetic oligonucleotide: PDCD1-1960
aggcccaggcacuggacccc

SEQ ID NO: 20097 - RNA, 21 nt, Artificial Sequence
  Synthetic oligonucleotide: PDCD1-6451
caggcccaggcacuggacccc

SEQ ID NO: 20098 - RNA, 22 nt, Artificial Sequence
  Synthetic oligonucleotide: PDCD1-6452
ccaggcccaggcacuggacccc

SEQ ID NO: 20099 - RNA, 23 nt, Artificial Sequence
  Synthetic oligonucleotide: PDCD1-6453
gccaggcccaggcacuggacccc

SEQ ID NO: 20100 - RNA, 24 nt, Artificial Sequence
  Synthetic oligonucleotide: PDCD1-6454
agccaggcccaggcacuggacccc

SEQ ID NO: 20101 - RNA, 18 nt, Artificial Sequence
  Synthetic oligonucleotide: PDCD1-6455
gcuggagggcagggcccc

SEQ ID NO: 20102 - RNA, 19 nt, Artificial Sequence
  Synthetic oligonucleotide: PDCD1-6456
ggcuggagggcagggcccc

SEQ ID NO: 20103 - RNA, 20 nt, Artificial Sequence
  Synthetic oligonucleotide: PDCD1-3050
gggcuggagggcagggcccc

SEQ ID NO: 20104 - RNA, 21 nt, Artificial Sequence
  Synthetic oligonucleotide: PDCD1-6457
ugggcuggagggcagggcccc

SEQ ID NO: 20105 - RNA, 22 nt, Artificial Sequence
  Synthetic oligonucleotide: PDCD1-6458
gugggcuggagggcagggcccc

SEQ ID NO: 20106 - RNA, 23 nt, Artificial Sequence
  Synthetic oligonucleotide: PDCD1-6459
agugggcuggagggcagggcccc

SEQ ID NO: 20107 - RNA, 24 nt, Artificial Sequence
  Synthetic oligonucleotide: PDCD1-6460
gagugggcuggagggcagggcccc

SEQ ID NO: 20108 - RNA, 18 nt, Artificial Sequence
  Synthetic oligonucleotide: PDCD1-6461
cagggucacgggcagccc

SEQ ID NO: 20109 - RNA, 19 nt, Artificial Sequence
  Synthetic oligonucleotide: PDCD1-6462
ccagggucacgggcagccc

SEQ ID NO: 20110 - RNA, 20 nt, Artificial Sequence
  Synthetic oligonucleotide: PDCD1-2728
cccagggucacgggcagccc

SEQ ID NO: 20111 - RNA, 21 nt, Artificial Sequence
  Synthetic oligonucleotide: PDCD1-6463
gcccagggucacgggcagccc

SEQ ID NO: 20112 - RNA, 22 nt, Artificial Sequence
  Synthetic oligonucleotide: PDCD1-6464
ggcccagggucacgggcagccc

SEQ ID NO: 20113 - RNA, 23 nt, Artificial Sequence
  Synthetic oligonucleotide: PDCD1-6465
gggcccagggucacgggcagccc

SEQ ID NO: 20114 - RNA, 24 nt, Artificial Sequence
  Synthetic oligonucleotide: PDCD1-6466
agggcccagggucacgggcagccc

SEQ ID NO: 20115 - RNA, 18 nt, Artificial Sequence
  Synthetic oligonucleotide: PDCD1-6467
ggcuggagggcagggccc

SEQ ID NO: 20116 - RNA, 19 nt, Artificial Sequence
  Synthetic oligonucleotide: PDCD1-6468
gggcuggagggcagggccc

SEQ ID NO: 20117 - RNA, 20 nt, Artificial Sequence
  Synthetic oligonucleotide: PDCD1-3051
ugggcuggagggcagggccc

SEQ ID NO: 20118 - RNA, 21 nt, Artificial Sequence
  Synthetic oligonucleotide: PDCD1-6469
gugggcuggagggcagggccc

SEQ ID NO: 20119 - RNA, 22 nt, Artificial Sequence
  Synthetic oligonucleotide: PDCD1-6470
agugggcuggagggcagggccc

SEQ ID NO: 20120 - RNA, 23 nt, Artificial Sequence
  Synthetic oligonucleotide: PDCD1-6471
gagugggcuggagggcagggccc

SEQ ID NO: 20121 - RNA, 24 nt, Artificial Sequence
  Synthetic oligonucleotide: PDCD1-6472
cgagugggcuggagggcagggccc

SEQ ID NO: 20122 - RNA, 18 nt, Artificial Sequence
  Synthetic oligonucleotide: PDCD1-6473
ccagggucacgggcagcc

SEQ ID NO: 20123 - RNA, 19 nt, Artificial Sequence
  Synthetic oligonucleotide: PDCD1-6474
cccagggucacgggcagcc

SEQ ID NO: 20124 - RNA, 20 nt, Artificial Sequence
  Synthetic oligonucleotide: PDCD1-1673
gcccagggucacgggcagcc

SEQ ID NO: 20125 - RNA, 21 nt, Artificial Sequence
  Synthetic oligonucleotide: PDCD1-6475
ggcccagggucacgggcagcc

SEQ ID NO: 20126 - RNA, 22 nt, Artificial Sequence
  Synthetic oligonucleotide: PDCD1-6476
gggcccagggucacgggcagcc

SEQ ID NO: 20127 - RNA, 23 nt, Artificial Sequence
  Synthetic oligonucleotide: PDCD1-6477
agggcccagggucacgggcagcc

SEQ ID NO: 20128 - RNA, 24 nt, Artificial Sequence
  Synthetic oligonucleotide: PDCD1-6478
gagggcccagggucacgggcagcc

SEQ ID NO: 20129 - RNA, 18 nt, Artificial Sequence
  Synthetic oligonucleotide: PDCD1-6479
cagggcucggggagagcc

SEQ ID NO: 20130 - RNA, 19 nt, Artificial Sequence
  Synthetic oligonucleotide: PDCD1-6480
acagggcucggggagagcc

SEQ ID NO: 20131 - RNA, 20 nt, Artificial Sequence
  Synthetic oligonucleotide: PDCD1-1689
aacagggcucggggagagcc

SEQ ID NO: 20132 - RNA, 21 nt, Artificial Sequence
  Synthetic oligonucleotide: PDCD1-6481
gaacagggcucggggagagcc

SEQ ID NO: 20133 - RNA, 22 nt, Artificial Sequence
  Synthetic oligonucleotide: PDCD1-6482
ugaacagggcucggggagagcc

SEQ ID NO: 20134 - RNA, 23 nt, Artificial Sequence
  Synthetic oligonucleotide: PDCD1-6483
cugaacagggcucggggagagcc

SEQ ID NO: 20135 - RNA, 24 nt, Artificial Sequence
  Synthetic oligonucleotide: PDCD1-6484
ucugaacagggcucggggagagcc

SEQ ID NO: 20136 - RNA, 18 nt, Artificial Sequence
  Synthetic oligonucleotide: PDCD1-6485
agggggagccgauuagcc

SEQ ID NO: 20137 - RNA, 19 nt, Artificial Sequence
  Synthetic oligonucleotide: PDCD1-6486
gagggggagccgauuagcc

SEQ ID NO: 20138 - RNA, 20 nt, Artificial Sequence
  Synthetic oligonucleotide: PDCD1-1929
ugagggggagccgauuagcc

SEQ ID NO: 20139 - RNA, 21 nt, Artificial Sequence
  Synthetic oligonucleotide: PDCD1-6487
uugagggggagccgauuagcc

SEQ ID NO: 20140 - RNA, 22 nt, Artificial Sequence
  Synthetic oligonucleotide: PDCD1-6488
uuugagggggagccgauuagcc

SEQ ID NO: 20141 - RNA, 23 nt, Artificial Sequence
  Synthetic oligonucleotide: PDCD1-6489
cuuugagggggagccgauuagcc

SEQ ID NO: 20142 - RNA, 24 nt, Artificial Sequence
  Synthetic oligonucleotide: PDCD1-6490
gcuuugagggggagccgauuagcc

SEQ ID NO: 20143 - RNA, 18 nt, Artificial Sequence
  Synthetic oligonucleotide: PDCD1-6491
gggcuggagggcagggcc

SEQ ID NO: 20144 - RNA, 19 nt, Artificial Sequence
  Synthetic oligonucleotide: PDCD1-6492
ugggcuggagggcagggcc

SEQ ID NO: 20145 - RNA, 20 nt, Artificial Sequence
  Synthetic oligonucleotide: PDCD1-1953
gugggcuggagggcagggcc

SEQ ID NO: 20146 - RNA, 21 nt, Artificial Sequence
  Synthetic oligonucleotide: PDCD1-6493
agugggcuggagggcagggcc

SEQ ID NO: 20147 - RNA, 22 nt, Artificial Sequence
  Synthetic oligonucleotide: PDCD1-6494
gagugggcuggagggcagggcc

SEQ ID NO: 20148 - RNA, 23 nt, Artificial Sequence
  Synthetic oligonucleotide: PDCD1-6495
cgagugggcuggagggcagggcc

SEQ ID NO: 20149 - RNA, 24 nt, Artificial Sequence
  Synthetic oligonucleotide: PDCD1-6496
acgagugggcuggagggcagggcc

SEQ ID NO: 20150 - RNA, 18 nt, Artificial Sequence
  Synthetic oligonucleotide: PDCD1-6497
agcgaagggggaugggcc

SEQ ID NO: 20151 - RNA, 19 nt, Artificial Sequence
  Synthetic oligonucleotide: PDCD1-6498
cagcgaagggggaugggcc

SEQ ID NO: 20152 - RNA, 20 nt, Artificial Sequence
  Synthetic oligonucleotide: PDCD1-3017
ccagcgaagggggaugggcc

SEQ ID NO: 20153 - RNA, 21 nt, Artificial Sequence
  Synthetic oligonucleotide: PDCD1-6499
cccagcgaagggggaugggcc

SEQ ID NO: 20154 - RNA, 22 nt, Artificial Sequence
  Synthetic oligonucleotide: PDCD1-6500
ccccagcgaagggggaugggcc

SEQ ID NO: 20155 - RNA, 23 nt, Artificial Sequence
  Synthetic oligonucleotide: PDCD1-6501
gccccagcgaagggggaugggcc

SEQ ID NO: 20156 - RNA, 24 nt, Artificial Sequence
  Synthetic oligonucleotide: PDCD1-6502
ugccccagcgaagggggaugggcc

SEQ ID NO: 20157 - RNA, 18 nt, Artificial Sequence
  Synthetic oligonucleotide: PDCD1-6503
ucccucucuccucgaucc

SEQ ID NO: 20158 - RNA, 19 nt, Artificial Sequence
  Synthetic oligonucleotide: PDCD1-6504
cucccucucuccucgaucc

SEQ ID NO: 20159 - RNA, 20 nt, Artificial Sequence
  Synthetic oligonucleotide: PDCD1-2731
gcucccucucuccucgaucc

SEQ ID NO: 20160 - RNA, 21 nt, Artificial Sequence
  Synthetic oligonucleotide: PDCD1-6505
ggcucccucucuccucgaucc

SEQ ID NO: 20161 - RNA, 22 nt, Artificial Sequence
  Synthetic oligonucleotide: PDCD1-6506
aggcucccucucuccucgaucc

SEQ ID NO: 20162 - RNA, 23 nt, Artificial Sequence
  Synthetic oligonucleotide: PDCD1-6507
gaggcucccucucuccucgaucc

SEQ ID NO: 20163 - RNA, 24 nt, Artificial Sequence
  Synthetic oligonucleotide: PDCD1-6508
agaggcucccucucuccucgaucc

SEQ ID NO: 20164 - RNA, 18 nt, Artificial Sequence
  Synthetic oligonucleotide: PDCD1-6509
cccacccaggagggaucc

SEQ ID NO: 20165 - RNA, 19 nt, Artificial Sequence
  Synthetic oligonucleotide: PDCD1-6510
ccccacccaggagggaucc

SEQ ID NO: 20166 - RNA, 20 nt, Artificial Sequence
  Synthetic oligonucleotide: PDCD1-2750
uccccacccaggagggaucc

SEQ ID NO: 20167 - RNA, 21 nt, Artificial Sequence
  Synthetic oligonucleotide: PDCD1-6511
auccccacccaggagggaucc

SEQ ID NO: 20168 - RNA, 22 nt, Artificial Sequence
  Synthetic oligonucleotide: PDCD1-6512
aauccccacccaggagggaucc

SEQ ID NO: 20169 - RNA, 23 nt, Artificial Sequence
  Synthetic oligonucleotide: PDCD1-6513
caauccccacccaggagggaucc

SEQ ID NO: 20170 - RNA, 24 nt, Artificial Sequence
  Synthetic oligonucleotide: PDCD1-6514
acaauccccacccaggagggaucc

SEQ ID NO: 20171 - RNA, 18 nt, Artificial Sequence
  Synthetic oligonucleotide: PDCD1-6515
gccgggcacagagggucc

SEQ ID NO: 20172 - RNA, 19 nt, Artificial Sequence
  Synthetic oligonucleotide: PDCD1-6516
agccgggcacagagggucc

SEQ ID NO: 20173 - RNA, 20 nt, Artificial Sequence
  Synthetic oligonucleotide: PDCD1-2718
cagccgggcacagagggucc

SEQ ID NO: 20174 - RNA, 21 nt, Artificial Sequence
  Synthetic oligonucleotide: PDCD1-6517
ccagccgggcacagagggucc

SEQ ID NO: 20175 - RNA, 22 nt, Artificial Sequence
  Synthetic oligonucleotide: PDCD1-6518
gccagccgggcacagagggucc

SEQ ID NO: 20176 - RNA, 23 nt, Artificial Sequence
  Synthetic oligonucleotide: PDCD1-6519
ggccagccgggcacagagggucc

SEQ ID NO: 20177 - RNA, 24 nt, Artificial Sequence
  Synthetic oligonucleotide: PDCD1-6520
gggccagccgggcacagagggucc

SEQ ID NO: 20178 - RNA, 18 nt, Artificial Sequence
  Synthetic oligonucleotide: PDCD1-6521
caggcaccugcccccagc

SEQ ID NO: 20179 - RNA, 19 nt, Artificial Sequence
  Synthetic oligonucleotide: PDCD1-6522
ccaggcaccugcccccagc

SEQ ID NO: 20180 - RNA, 20 nt, Artificial Sequence
  Synthetic oligonucleotide: PDCD1-3013
gccaggcaccugcccccagc

SEQ ID NO: 20181 - RNA, 21 nt, Artificial Sequence
  Synthetic oligonucleotide: PDCD1-6523
ggccaggcaccugcccccagc

SEQ ID NO: 20182 - RNA, 22 nt, Artificial Sequence
  Synthetic oligonucleotide: PDCD1-6524
aggccaggcaccugcccccagc

SEQ ID NO: 20183 - RNA, 23 nt, Artificial Sequence
  Synthetic oligonucleotide: PDCD1-6525
gaggccaggcaccugcccccagc

SEQ ID NO: 20184 - RNA, 24 nt, Artificial Sequence
  Synthetic oligonucleotide: PDCD1-6526
agaggccaggcaccugcccccagc

SEQ ID NO: 20185 - RNA, 18 nt, Artificial Sequence
  Synthetic oligonucleotide: PDCD1-6527
ggggaagaaggucaaggc

SEQ ID NO: 20186 - RNA, 19 nt, Artificial Sequence
  Synthetic oligonucleotide: PDCD1-6528
cggggaagaaggucaaggc

SEQ ID NO: 20187 - RNA, 20 nt, Artificial Sequence
  Synthetic oligonucleotide: PDCD1-3046
ccggggaagaaggucaaggc

SEQ ID NO: 20188 - RNA, 21 nt, Artificial Sequence
  Synthetic oligonucleotide: PDCD1-6529
cccggggaagaaggucaaggc

SEQ ID NO: 20189 - RNA, 22 nt, Artificial Sequence
  Synthetic oligonucleotide: PDCD1-6530
ccccggggaagaaggucaaggc

SEQ ID NO: 20190 - RNA, 23 nt, Artificial Sequence
  Synthetic oligonucleotide: PDCD1-6531
gccccggggaagaaggucaaggc

SEQ ID NO: 20191 - RNA, 24 nt, Artificial Sequence
  Synthetic oligonucleotide: PDCD1-6532
ggccccggggaagaaggucaaggc

SEQ ID NO: 20192 - RNA, 18 nt, Artificial Sequence
  Synthetic oligonucleotide: PDCD1-6533
ggauggucugaacagggc

SEQ ID NO: 20193 - RNA, 19 nt, Artificial Sequence
  Synthetic oligonucleotide: PDCD1-6534
cggauggucugaacagggc

SEQ ID NO: 20194 - RNA, 20 nt, Artificial Sequence
  Synthetic oligonucleotide: PDCD1-1684
acggauggucugaacagggc

SEQ ID NO: 20195 - RNA, 21 nt, Artificial Sequence
  Synthetic oligonucleotide: PDCD1-6535
cacggauggucugaacagggc

SEQ ID NO: 20196 - RNA, 22 nt, Artificial Sequence
  Synthetic oligonucleotide: PDCD1-6536
ccacggauggucugaacagggc

SEQ ID NO: 20197 - RNA, 23 nt, Artificial Sequence
  Synthetic oligonucleotide: PDCD1-6537
cccacggauggucugaacagggc

SEQ ID NO: 20198 - RNA, 24 nt, Artificial Sequence
  Synthetic oligonucleotide: PDCD1-6538
ccccacggauggucugaacagggc

SEQ ID NO: 20199 - RNA, 18 nt, Artificial Sequence
  Synthetic oligonucleotide: PDCD1-6539
cagcgaagggggaugggc

SEQ ID NO: 20200 - RNA, 19 nt, Artificial Sequence
  Synthetic oligonucleotide: PDCD1-6540
ccagcgaagggggaugggc

SEQ ID NO: 20201 - RNA, 20 nt, Artificial Sequence
  Synthetic oligonucleotide: PDCD1-3018
cccagcgaagggggaugggc

SEQ ID NO: 20202 - RNA, 21 nt, Artificial Sequence
  Synthetic oligonucleotide: PDCD1-6541
ccccagcgaagggggaugggc

SEQ ID NO: 20203 - RNA, 22 nt, Artificial Sequence
  Synthetic oligonucleotide: PDCD1-6542
gccccagcgaagggggaugggc

SEQ ID NO: 20204 - RNA, 23 nt, Artificial Sequence
  Synthetic oligonucleotide: PDCD1-6543
ugccccagcgaagggggaugggc

SEQ ID NO: 20205 - RNA, 24 nt, Artificial Sequence
  Synthetic oligonucleotide: PDCD1-6544
gugccccagcgaagggggaugggc

SEQ ID NO: 20206 - RNA, 18 nt, Artificial Sequence
  Synthetic oligonucleotide: PDCD1-6545
acccuggcacgagugggc

SEQ ID NO: 20207 - RNA, 19 nt, Artificial Sequence
  Synthetic oligonucleotide: PDCD1-6546
cacccuggcacgagugggc

SEQ ID NO: 20208 - RNA, 20 nt, Artificial Sequence
  Synthetic oligonucleotide: PDCD1-3056
ccacccuggcacgagugggc

SEQ ID NO: 20209 - RNA, 21 nt, Artificial Sequence
  Synthetic oligonucleotide: PDCD1-6547
cccacccuggcacgagugggc

SEQ ID NO: 20210 - RNA, 22 nt, Artificial Sequence
  Synthetic oligonucleotide: PDCD1-6548
ccccacccuggcacgagugggc

SEQ ID NO: 20211 - RNA, 23 nt, Artificial Sequence
  Synthetic oligonucleotide: PDCD1-6549
accccacccuggcacgagugggc

SEQ ID NO: 20212 - RNA, 24 nt, Artificial Sequence
  Synthetic oligonucleotide: PDCD1-6550
caccccacccuggcacgagugggc

SEQ ID NO: 20213 - RNA, 18 nt, Artificial Sequence
  Synthetic oligonucleotide: PDCD1-6551
agugaggaccaaggaugc

SEQ ID NO: 20214 - RNA, 19 nt, Artificial Sequence
  Synthetic oligonucleotide: PDCD1-6552
gagugaggaccaaggaugc

SEQ ID NO: 20215 - RNA, 20 nt, Artificial Sequence
  Synthetic oligonucleotide: PDCD1-1714
cgagugaggaccaaggaugc

SEQ ID NO: 20216 - RNA, 21 nt, Artificial Sequence
  Synthetic oligonucleotide: PDCD1-6553
ucgagugaggaccaaggaugc

SEQ ID NO: 20217 - RNA, 22 nt, Artificial Sequence
  Synthetic oligonucleotide: PDCD1-6554
cucgagugaggaccaaggaugc

SEQ ID NO: 20218 - RNA, 23 nt, Artificial Sequence
  Synthetic oligonucleotide: PDCD1-6555
acucgagugaggaccaaggaugc

SEQ ID NO: 20219 - RNA, 24 nt, Artificial Sequence
  Synthetic oligonucleotide: PDCD1-6556
aacucgagugaggaccaaggaugc

SEQ ID NO: 20220 - RNA, 18 nt, Artificial Sequence
  Synthetic oligonucleotide: PDCD1-6557
ucacacgguggaaagauc

SEQ ID NO: 20221 - RNA, 19 nt, Artificial Sequence
  Synthetic oligonucleotide: PDCD1-6558
aucacacgguggaaagauc

SEQ ID NO: 20222 - RNA, 20 nt, Artificial Sequence
  Synthetic oligonucleotide: PDCD1-3037
caucacacgguggaaagauc

SEQ ID NO: 20223 - RNA, 21 nt, Artificial Sequence
  Synthetic oligonucleotide: PDCD1-6559
gcaucacacgguggaaagauc

SEQ ID NO: 20224 - RNA, 22 nt, Artificial Sequence
  Synthetic oligonucleotide: PDCD1-6560
ggcaucacacgguggaaagauc

SEQ ID NO: 20225 - RNA, 23 nt, Artificial Sequence
  Synthetic oligonucleotide: PDCD1-6561
aggcaucacacgguggaaagauc

SEQ ID NO: 20226 - RNA, 24 nt, Artificial Sequence
  Synthetic oligonucleotide: PDCD1-6562
caggcaucacacgguggaaagauc

SEQ ID NO: 20227 - RNA, 18 nt, Artificial Sequence
  Synthetic oligonucleotide: PDCD1-6563
cucccucucuccucgauc

SEQ ID NO: 20228 - RNA, 19 nt, Artificial Sequence
  Synthetic oligonucleotide: PDCD1-6564
gcucccucucuccucgauc

SEQ ID NO: 20229 - RNA, 20 nt, Artificial Sequence
  Synthetic oligonucleotide: PDCD1-2730
ggcucccucucuccucgauc

SEQ ID NO: 20230 - RNA, 21 nt, Artificial Sequence
  Synthetic oligonucleotide: PDCD1-6565
aggcucccucucuccucgauc

SEQ ID NO: 20231 - RNA, 22 nt, Artificial Sequence
  Synthetic oligonucleotide: PDCD1-6566
gaggcucccucucuccucgauc

SEQ ID NO: 20232 - RNA, 23 nt, Artificial Sequence
  Synthetic oligonucleotide: PDCD1-6567
agaggcucccucucuccucgauc

SEQ ID NO: 20233 - RNA, 24 nt, Artificial Sequence
  Synthetic oligonucleotide: PDCD1-6568
aagaggcucccucucuccucgauc

SEQ ID NO: 20234 - RNA, 18 nt, Artificial Sequence
  Synthetic oligonucleotide: PDCD1-6569
ccccacccaggagggauc

SEQ ID NO: 20235 - RNA, 19 nt, Artificial Sequence
  Synthetic oligonucleotide: PDCD1-6570
uccccacccaggagggauc

SEQ ID NO: 20236 - RNA, 20 nt, Artificial Sequence
  Synthetic oligonucleotide: PDCD1-1698
auccccacccaggagggauc

SEQ ID NO: 20237 - RNA, 21 nt, Artificial Sequence
  Synthetic oligonucleotide: PDCD1-6571
aauccccacccaggagggauc

SEQ ID NO: 20238 - RNA, 22 nt, Artificial Sequence
  Synthetic oligonucleotide: PDCD1-6572
caauccccacccaggagggauc

SEQ ID NO: 20239 - RNA, 23 nt, Artificial Sequence
  Synthetic oligonucleotide: PDCD1-6573
acaauccccacccaggagggauc

SEQ ID NO: 20240 - RNA, 24 nt, Artificial Sequence
  Synthetic oligonucleotide: PDCD1-6574
cacaauccccacccaggagggauc

SEQ ID NO: 20241 - RNA, 18 nt, Artificial Sequence
  Synthetic oligonucleotide: PDCD1-6575
auggucugaacagggcuc

SEQ ID NO: 20242 - RNA, 19 nt, Artificial Sequence
  Synthetic oligonucleotide: PDCD1-6576
gauggucugaacagggcuc

SEQ ID NO: 20243 - RNA, 20 nt, Artificial Sequence
  Synthetic oligonucleotide: PDCD1-2739
ggauggucugaacagggcuc

SEQ ID NO: 20244 - RNA, 21 nt, Artificial Sequence
  Synthetic oligonucleotide: PDCD1-6577
cggauggucugaacagggcuc

SEQ ID NO: 20245 - RNA, 22 nt, Artificial Sequence
  Synthetic oligonucleotide: PDCD1-6578
acggauggucugaacagggcuc

SEQ ID NO: 20246 - RNA, 23 nt, Artificial Sequence
  Synthetic oligonucleotide: PDCD1-6579
cacggauggucugaacagggcuc

SEQ ID NO: 20247 - RNA, 24 nt, Artificial Sequence
  Synthetic oligonucleotide: PDCD1-6580
ccacggauggucugaacagggcuc

SEQ ID NO: 20248 - RNA, 18 nt, Artificial Sequence
  Synthetic oligonucleotide: PDCD1-6581
cacagagggcccaggguc

SEQ ID NO: 20249 - RNA, 19 nt, Artificial Sequence
  Synthetic oligonucleotide: PDCD1-6582
acacagagggcccaggguc

SEQ ID NO: 20250 - RNA, 20 nt, Artificial Sequence
  Synthetic oligonucleotide: PDCD1-1672
uacacagagggcccaggguc

SEQ ID NO: 20251 - RNA, 21 nt, Artificial Sequence
  Synthetic oligonucleotide: PDCD1-6583
guacacagagggcccaggguc

SEQ ID NO: 20252 - RNA, 22 nt, Artificial Sequence
  Synthetic oligonucleotide: PDCD1-6584
uguacacagagggcccaggguc

SEQ ID NO: 20253 - RNA, 23 nt, Artificial Sequence
  Synthetic oligonucleotide: PDCD1-6585
guguacacagagggcccaggguc

SEQ ID NO: 20254 - RNA, 24 nt, Artificial Sequence
  Synthetic oligonucleotide: PDCD1-6586
aguguacacagagggcccaggguc

SEQ ID NO: 20255 - RNA, 18 nt, Artificial Sequence
  Synthetic oligonucleotide: PDCD1-6587
agccgggcacagaggguc

SEQ ID NO: 20256 - RNA, 19 nt, Artificial Sequence
  Synthetic oligonucleotide: PDCD1-6588
cagccgggcacagaggguc

SEQ ID NO: 20257 - RNA, 20 nt, Artificial Sequence
  Synthetic oligonucleotide: PDCD1-1666
ccagccgggcacagaggguc

SEQ ID NO: 20258 - RNA, 21 nt, Artificial Sequence
  Synthetic oligonucleotide: PDCD1-6589
gccagccgggcacagaggguc

SEQ ID NO: 20259 - RNA, 22 nt, Artificial Sequence
  Synthetic oligonucleotide: PDCD1-6590
ggccagccgggcacagaggguc

SEQ ID NO: 20260 - RNA, 23 nt, Artificial Sequence
  Synthetic oligonucleotide: PDCD1-6591
gggccagccgggcacagaggguc

SEQ ID NO: 20261 - RNA, 24 nt, Artificial Sequence
  Synthetic oligonucleotide: PDCD1-6592
agggccagccgggcacagaggguc

SEQ ID NO: 20262 - RNA, 18 nt, Artificial Sequence
  Synthetic oligonucleotide: PDCD1-6593
ugugaggccauccacaag

SEQ ID NO: 20263 - RNA, 19 nt, Artificial Sequence
  Synthetic oligonucleotide: PDCD1-6594
gugugaggccauccacaag

SEQ ID NO: 20264 - RNA, 20 nt, Artificial Sequence
  Synthetic oligonucleotide: PDCD1-1937
ggugugaggccauccacaag

SEQ ID NO: 20265 - RNA, 21 nt, Artificial Sequence
  Synthetic oligonucleotide: PDCD1-6595
uggugugaggccauccacaag

SEQ ID NO: 20266 - RNA, 22 nt, Artificial Sequence
  Synthetic oligonucleotide: PDCD1-6596
auggugugaggccauccacaag

SEQ ID NO: 20267 - RNA, 23 nt, Artificial Sequence
  Synthetic oligonucleotide: PDCD1-6597
cauggugugaggccauccacaag

SEQ ID NO: 20268 - RNA, 24 nt, Artificial Sequence
  Synthetic oligonucleotide: PDCD1-6598
ccauggugugaggccauccacaag

SEQ ID NO: 20269 - RNA, 18 nt, Artificial Sequence
  Synthetic oligonucleotide: PDCD1-6599
gaaggucaaggcuggaag

SEQ ID NO: 20270 - RNA, 19 nt, Artificial Sequence
  Synthetic oligonucleotide: PDCD1-6600
agaaggucaaggcuggaag

SEQ ID NO: 20271 - RNA, 20 nt, Artificial Sequence
  Synthetic oligonucleotide: PDCD1-3043
aagaaggucaaggcuggaag

SEQ ID NO: 20272 - RNA, 21 nt, Artificial Sequence
  Synthetic oligonucleotide: PDCD1-6601
gaagaaggucaaggcuggaag

SEQ ID NO: 20273 - RNA, 22 nt, Artificial Sequence
  Synthetic oligonucleotide: PDCD1-6602
ggaagaaggucaaggcuggaag

SEQ ID NO: 20274 - RNA, 23 nt, Artificial Sequence
  Synthetic oligonucleotide: PDCD1-6603
gggaagaaggucaaggcuggaag

SEQ ID NO: 20275 - RNA, 24 nt, Artificial Sequence
  Synthetic oligonucleotide: PDCD1-6604
ggggaagaaggucaaggcuggaag

SEQ ID NO: 20276 - RNA, 18 nt, Artificial Sequence
  Synthetic oligonucleotide: PDCD1-6605
gagggauccuggagacag

SEQ ID NO: 20277 - RNA, 19 nt, Artificial Sequence
  Synthetic oligonucleotide: PDCD1-6606
ggagggauccuggagacag

SEQ ID NO: 20278 - RNA, 20 nt, Artificial Sequence
  Synthetic oligonucleotide: PDCD1-1701
aggagggauccuggagacag

SEQ ID NO: 20279 - RNA, 21 nt, Artificial Sequence
  Synthetic oligonucleotide: PDCD1-6607
caggagggauccuggagacag

SEQ ID NO: 20280 - RNA, 22 nt, Artificial Sequence
  Synthetic oligonucleotide: PDCD1-6608
ccaggagggauccuggagacag

SEQ ID NO: 20281 - RNA, 23 nt, Artificial Sequence
  Synthetic oligonucleotide: PDCD1-6609
cccaggagggauccuggagacag

SEQ ID NO: 20282 - RNA, 24 nt, Artificial Sequence
  Synthetic oligonucleotide: PDCD1-6610
acccaggagggauccuggagacag

SEQ ID NO: 20283 - RNA, 18 nt, Artificial Sequence
  Synthetic oligonucleotide: PDCD1-6611
ggcacaauccccacccag

SEQ ID NO: 20284 - RNA, 19 nt, Artificial Sequence
  Synthetic oligonucleotide: PDCD1-6612
gggcacaauccccacccag

SEQ ID NO: 20285 - RNA, 20 nt, Artificial Sequence
  Synthetic oligonucleotide: PDCD1-1696
cgggcacaauccccacccag

SEQ ID NO: 20286 - RNA, 21 nt, Artificial Sequence
  Synthetic oligonucleotide: PDCD1-6613
gcgggcacaauccccacccag

SEQ ID NO: 20287 - RNA, 22 nt, Artificial Sequence
  Synthetic oligonucleotide: PDCD1-6614
ggcgggcacaauccccacccag

SEQ ID NO: 20288 - RNA, 23 nt, Artificial Sequence
  Synthetic oligonucleotide: PDCD1-6615
aggcgggcacaauccccacccag

SEQ ID NO: 20289 - RNA, 24 nt, Artificial Sequence
  Synthetic oligonucleotide: PDCD1-6616
caggcgggcacaauccccacccag

SEQ ID NO: 20290 - RNA, 18 nt, Artificial Sequence
  Synthetic oligonucleotide: PDCD1-6617
aucugggcagagacccag

SEQ ID NO: 20291 - RNA, 19 nt, Artificial Sequence
  Synthetic oligonucleotide: PDCD1-6618
aaucugggcagagacccag

SEQ ID NO: 20292 - RNA, 20 nt, Artificial Sequence
  Synthetic oligonucleotide: PDCD1-1693
gaaucugggcagagacccag

SEQ ID NO: 20293 - RNA, 21 nt, Artificial Sequence
  Synthetic oligonucleotide: PDCD1-6619
ggaaucugggcagagacccag

SEQ ID NO: 20294 - RNA, 22 nt, Artificial Sequence
  Synthetic oligonucleotide: PDCD1-6620
uggaaucugggcagagacccag

SEQ ID NO: 20295 - RNA, 23 nt, Artificial Sequence
  Synthetic oligonucleotide: PDCD1-6621
cuggaaucugggcagagacccag

SEQ ID NO: 20296 - RNA, 24 nt, Artificial Sequence
  Synthetic oligonucleotide: PDCD1-6622
ccuggaaucugggcagagacccag

SEQ ID NO: 20297 - RNA, 18 nt, Artificial Sequence
  Synthetic oligonucleotide: PDCD1-6623
ccaggcaccugcccccag

SEQ ID NO: 20298 - RNA, 19 nt, Artificial Sequence
  Synthetic oligonucleotide: PDCD1-6624
gccaggcaccugcccccag

SEQ ID NO: 20299 - RNA, 20 nt, Artificial Sequence
  Synthetic oligonucleotide: PDCD1-1917
ggccaggcaccugcccccag

SEQ ID NO: 20300 - RNA, 21 nt, Artificial Sequence
  Synthetic oligonucleotide: PDCD1-6625
aggccaggcaccugcccccag

SEQ ID NO: 20301 - RNA, 22 nt, Artificial Sequence
  Synthetic oligonucleotide: PDCD1-6626
gaggccaggcaccugcccccag

SEQ ID NO: 20302 - RNA, 23 nt, Artificial Sequence
  Synthetic oligonucleotide: PDCD1-6627
agaggccaggcaccugcccccag

SEQ ID NO: 20303 - RNA, 24 nt, Artificial Sequence
  Synthetic oligonucleotide: PDCD1-6628
cagaggccaggcaccugcccccag

SEQ ID NO: 20304 - RNA, 18 nt, Artificial Sequence
  Synthetic oligonucleotide: PDCD1-6629
cugggcacagagggccag

SEQ ID NO: 20305 - RNA, 19 nt, Artificial Sequence
  Synthetic oligonucleotide: PDCD1-6630
gcugggcacagagggccag

SEQ ID NO: 20306 - RNA, 20 nt, Artificial Sequence
  Synthetic oligonucleotide: PDCD1-1663
ggcugggcacagagggccag

SEQ ID NO: 20307 - RNA, 21 nt, Artificial Sequence
  Synthetic oligonucleotide: PDCD1-6631
uggcugggcacagagggccag

SEQ ID NO: 20308 - RNA, 22 nt, Artificial Sequence
  Synthetic oligonucleotide: PDCD1-6632
cuggcugggcacagagggccag

SEQ ID NO: 20309 - RNA, 23 nt, Artificial Sequence
  Synthetic oligonucleotide: PDCD1-6633
gcuggcugggcacagagggccag

SEQ ID NO: 20310 - RNA, 24 nt, Artificial Sequence
  Synthetic oligonucleotide: PDCD1-6634
ggcuggcugggcacagagggccag

SEQ ID NO: 20311 - RNA, 18 nt, Artificial Sequence
  Synthetic oligonucleotide: PDCD1-6635
caagguggaagcuuugag

SEQ ID NO: 20312 - RNA, 19 nt, Artificial Sequence
  Synthetic oligonucleotide: PDCD1-6636
acaagguggaagcuuugag

SEQ ID NO: 20313 - RNA, 20 nt, Artificial Sequence
  Synthetic oligonucleotide: PDCD1-3029
cacaagguggaagcuuugag

SEQ ID NO: 20314 - RNA, 21 nt, Artificial Sequence
  Synthetic oligonucleotide: PDCD1-6637
ccacaagguggaagcuuugag

SEQ ID NO: 20315 - RNA, 22 nt, Artificial Sequence
  Synthetic oligonucleotide: PDCD1-6638
uccacaagguggaagcuuugag

SEQ ID NO: 20316 - RNA, 23 nt, Artificial Sequence
  Synthetic oligonucleotide: PDCD1-6639
auccacaagguggaagcuuugag

SEQ ID NO: 20317 - RNA, 24 nt, Artificial Sequence
  Synthetic oligonucleotide: PDCD1-6640
cauccacaagguggaagcuuugag

SEQ ID NO: 20318 - RNA, 18 nt, Artificial Sequence
  Synthetic oligonucleotide: PDCD1-6641
caagccauuucacaaacg

SEQ ID NO: 20319 - RNA, 19 nt, Artificial Sequence
  Synthetic oligonucleotide: PDCD1-6642
gcaagccauuucacaaacg

SEQ ID NO: 20320 - RNA, 20 nt, Artificial Sequence
  Synthetic oligonucleotide: PDCD1-1962
agcaagccauuucacaaacg

SEQ ID NO: 20321 - RNA, 21 nt, Artificial Sequence
  Synthetic oligonucleotide: PDCD1-6643
aagcaagccauuucacaaacg

SEQ ID NO: 20322 - RNA, 22 nt, Artificial Sequence
  Synthetic oligonucleotide: PDCD1-6644
uaagcaagccauuucacaaacg

SEQ ID NO: 20323 - RNA, 23 nt, Artificial Sequence
  Synthetic oligonucleotide: PDCD1-6645
auaagcaagccauuucacaaacg

SEQ ID NO: 20324 - RNA, 24 nt, Artificial Sequence
  Synthetic oligonucleotide: PDCD1-6646
gauaagcaagccauuucacaaacg

SEQ ID NO: 20325 - RNA, 18 nt, Artificial Sequence
  Synthetic oligonucleotide: PDCD1-6647
uguugcaggcaucacacg

SEQ ID NO: 20326 - RNA, 19 nt, Artificial Sequence
  Synthetic oligonucleotide: PDCD1-6648
cuguugcaggcaucacacg

SEQ ID NO: 20327 - RNA, 20 nt, Artificial Sequence
  Synthetic oligonucleotide: PDCD1-1942
gcuguugcaggcaucacacg

SEQ ID NO: 20328 - RNA, 21 nt, Artificial Sequence
  Synthetic oligonucleotide: PDCD1-6649
ggcuguugcaggcaucacacg

SEQ ID NO: 20329 - RNA, 22 nt, Artificial Sequence
  Synthetic oligonucleotide: PDCD1-6650
aggcuguugcaggcaucacacg

SEQ ID NO: 20330 - RNA, 23 nt, Artificial Sequence
  Synthetic oligonucleotide: PDCD1-6651
caggcuguugcaggcaucacacg

SEQ ID NO: 20331 - RNA, 24 nt, Artificial Sequence
  Synthetic oligonucleotide: PDCD1-6652
ucaggcuguugcaggcaucacacg

SEQ ID NO: 20332 - RNA, 18 nt, Artificial Sequence
  Synthetic oligonucleotide: PDCD1-6653
cuggagggcagggccccg

SEQ ID NO: 20333 - RNA, 19 nt, Artificial Sequence
  Synthetic oligonucleotide: PDCD1-6654
gcuggagggcagggccccg

SEQ ID NO: 20334 - RNA, 20 nt, Artificial Sequence
  Synthetic oligonucleotide: PDCD1-3049
ggcuggagggcagggccccg

SEQ ID NO: 20335 - RNA, 21 nt, Artificial Sequence
  Synthetic oligonucleotide: PDCD1-6655
gggcuggagggcagggccccg

SEQ ID NO: 20336 - RNA, 22 nt, Artificial Sequence
  Synthetic oligonucleotide: PDCD1-6656
ugggcuggagggcagggccccg

SEQ ID NO: 20337 - RNA, 23 nt, Artificial Sequence
  Synthetic oligonucleotide: PDCD1-6657
gugggcuggagggcagggccccg

SEQ ID NO: 20338 - RNA, 24 nt, Artificial Sequence
  Synthetic oligonucleotide: PDCD1-6658
agugggcuggagggcagggccccg

SEQ ID NO: 20339 - RNA, 18 nt, Artificial Sequence
  Synthetic oligonucleotide: PDCD1-6659
gucaccugugccccagcg

SEQ ID NO: 20340 - RNA, 19 nt, Artificial Sequence
  Synthetic oligonucleotide: PDCD1-6660
ggucaccugugccccagcg

SEQ ID NO: 20341 - RNA, 20 nt, Artificial Sequence
  Synthetic oligonucleotide: PDCD1-1926
gggucaccugugccccagcg

SEQ ID NO: 20342 - RNA, 21 nt, Artificial Sequence
  Synthetic oligonucleotide: PDCD1-6661
agggucaccugugccccagcg

SEQ ID NO: 20343 - RNA, 22 nt, Artificial Sequence
  Synthetic oligonucleotide: PDCD1-6662
uagggucaccugugccccagcg

SEQ ID NO: 20344 - RNA, 23 nt, Artificial Sequence
  Synthetic oligonucleotide: PDCD1-6663
guagggucaccugugccccagcg

SEQ ID NO: 20345 - RNA, 24 nt, Artificial Sequence
  Synthetic oligonucleotide: PDCD1-6664
aguagggucaccugugccccagcg

SEQ ID NO: 20346 - RNA, 18 nt, Artificial Sequence
  Synthetic oligonucleotide: PDCD1-6665
uggucugaacagggcucg

SEQ ID NO: 20347 - RNA, 19 nt, Artificial Sequence
  Synthetic oligonucleotide: PDCD1-6666
auggucugaacagggcucg

SEQ ID NO: 20348 - RNA, 20 nt, Artificial Sequence
  Synthetic oligonucleotide: PDCD1-2740
gauggucugaacagggcucg

SEQ ID NO: 20349 - RNA, 21 nt, Artificial Sequence
  Synthetic oligonucleotide: PDCD1-6667
ggauggucugaacagggcucg

SEQ ID NO: 20350 - RNA, 22 nt, Artificial Sequence
  Synthetic oligonucleotide: PDCD1-6668
cggauggucugaacagggcucg

SEQ ID NO: 20351 - RNA, 23 nt, Artificial Sequence
  Synthetic oligonucleotide: PDCD1-6669
acggauggucugaacagggcucg

SEQ ID NO: 20352 - RNA, 24 nt, Artificial Sequence
  Synthetic oligonucleotide: PDCD1-6670
cacggauggucugaacagggcucg

SEQ ID NO: 20353 - RNA, 18 nt, Artificial Sequence
  Synthetic oligonucleotide: PDCD1-6671
gugaggccauccacaagg

SEQ ID NO: 20354 - RNA, 19 nt, Artificial Sequence
  Synthetic oligonucleotide: PDCD1-6672
ugugaggccauccacaagg

SEQ ID NO: 20355 - RNA, 20 nt, Artificial Sequence
  Synthetic oligonucleotide: PDCD1-3032
gugugaggccauccacaagg

SEQ ID NO: 20356 - RNA, 21 nt, Artificial Sequence
  Synthetic oligonucleotide: PDCD1-6673
ggugugaggccauccacaagg

SEQ ID NO: 20357 - RNA, 22 nt, Artificial Sequence
  Synthetic oligonucleotide: PDCD1-6674
uggugugaggccauccacaagg

SEQ ID NO: 20358 - RNA, 23 nt, Artificial Sequence
  Synthetic oligonucleotide: PDCD1-6675
auggugugaggccauccacaagg

SEQ ID NO: 20359 - RNA, 24 nt, Artificial Sequence
  Synthetic oligonucleotide: PDCD1-6676
cauggugugaggccauccacaagg

SEQ ID NO: 20360 - RNA, 18 nt, Artificial Sequence
  Synthetic oligonucleotide: PDCD1-6677
aaggaugccugggcaagg

SEQ ID NO: 20361 - RNA, 19 nt, Artificial Sequence
  Synthetic oligonucleotide: PDCD1-6678
caaggaugccugggcaagg

SEQ ID NO: 20362 - RNA, 20 nt, Artificial Sequence
  Synthetic oligonucleotide: PDCD1-6679
ccaaggaugccugggcaagg

SEQ ID NO: 20363 - RNA, 21 nt, Artificial Sequence
  Synthetic oligonucleotide: PDCD1-6680
accaaggaugccugggcaagg

SEQ ID NO: 20364 - RNA, 22 nt, Artificial Sequence
  Synthetic oligonucleotide: PDCD1-6681
gaccaaggaugccugggcaagg

SEQ ID NO: 20365 - RNA, 23 nt, Artificial Sequence
  Synthetic oligonucleotide: PDCD1-6682
ggaccaaggaugccugggcaagg

SEQ ID NO: 20366 - RNA, 24 nt, Artificial Sequence
  Synthetic oligonucleotide: PDCD1-6683
aggaccaaggaugccugggcaagg

SEQ ID NO: 20367 - RNA, 18 nt, Artificial Sequence
  Synthetic oligonucleotide: PDCD1-6684
cggggaagaaggucaagg

SEQ ID NO: 20368 - RNA, 19 nt, Artificial Sequence
  Synthetic oligonucleotide: PDCD1-6685
ccggggaagaaggucaagg

SEQ ID NO: 20369 - RNA, 20 nt, Artificial Sequence
  Synthetic oligonucleotide: PDCD1-1948
cccggggaagaaggucaagg

SEQ ID NO: 20370 - RNA, 21 nt, Artificial Sequence
  Synthetic oligonucleotide: PDCD1-6686
ccccggggaagaaggucaagg

SEQ ID NO: 20371 - RNA, 22 nt, Artificial Sequence
  Synthetic oligonucleotide: PDCD1-6687
gccccggggaagaaggucaagg

SEQ ID NO: 20372 - RNA, 23 nt, Artificial Sequence
  Synthetic oligonucleotide: PDCD1-6688
ggccccggggaagaaggucaagg

SEQ ID NO: 20373 - RNA, 24 nt, Artificial Sequence
  Synthetic oligonucleotide: PDCD1-6689
gggccccggggaagaaggucaagg

SEQ ID NO: 20374 - RNA, 18 nt, Artificial Sequence
  Synthetic oligonucleotide: PDCD1-6690
ggggaugggccgggaagg

SEQ ID NO: 20375 - RNA, 19 nt, Artificial Sequence
  Synthetic oligonucleotide: PDCD1-6691
gggggaugggccgggaagg

SEQ ID NO: 20376 - RNA, 20 nt, Artificial Sequence
  Synthetic oligonucleotide: PDCD1-1918
agggggaugggccgggaagg

SEQ ID NO: 20377 - RNA, 21 nt, Artificial Sequence
  Synthetic oligonucleotide: PDCD1-6692
aagggggaugggccgggaagg

SEQ ID NO: 20378 - RNA, 22 nt, Artificial Sequence
  Synthetic oligonucleotide: PDCD1-6693
gaagggggaugggccgggaagg

SEQ ID NO: 20379 - RNA, 23 nt, Artificial Sequence
  Synthetic oligonucleotide: PDCD1-6694
cgaagggggaugggccgggaagg

SEQ ID NO: 20380 - RNA, 24 nt, Artificial Sequence
  Synthetic oligonucleotide: PDCD1-6695
gcgaagggggaugggccgggaagg

SEQ ID NO: 20381 - RNA, 18 nt, Artificial Sequence
  Synthetic oligonucleotide: PDCD1-6696
ggucacgggcagcccagg

SEQ ID NO: 20382 - RNA, 19 nt, Artificial Sequence
  Synthetic oligonucleotide: PDCD1-6697
gggucacgggcagcccagg

SEQ ID NO: 20383 - RNA, 20 nt, Artificial Sequence
  Synthetic oligonucleotide: PDCD1-1675
agggucacgggcagcccagg

SEQ ID NO: 20384 - RNA, 21 nt, Artificial Sequence
  Synthetic oligonucleotide: PDCD1-6698
cagggucacgggcagcccagg

SEQ ID NO: 20385 - RNA, 22 nt, Artificial Sequence
  Synthetic oligonucleotide: PDCD1-6699
ccagggucacgggcagcccagg

SEQ ID NO: 20386 - RNA, 23 nt, Artificial Sequence
  Synthetic oligonucleotide: PDCD1-6700
cccagggucacgggcagcccagg

SEQ ID NO: 20387 - RNA, 24 nt, Artificial Sequence
  Synthetic oligonucleotide: PDCD1-6701
gcccagggucacgggcagcccagg

SEQ ID NO: 20388 - RNA, 18 nt, Artificial Sequence
  Synthetic oligonucleotide: PDCD1-6702
aagguggaagcuuugagg

SEQ ID NO: 20389 - RNA, 19 nt, Artificial Sequence
  Synthetic oligonucleotide: PDCD1-6703
caagguggaagcuuugagg

SEQ ID NO: 20390 - RNA, 20 nt, Artificial Sequence
  Synthetic oligonucleotide: PDCD1-3028
acaagguggaagcuuugagg

SEQ ID NO: 20391 - RNA, 21 nt, Artificial Sequence
  Synthetic oligonucleotide: PDCD1-6704
cacaagguggaagcuuugagg

SEQ ID NO: 20392 - RNA, 22 nt, Artificial Sequence
  Synthetic oligonucleotide: PDCD1-6705
ccacaagguggaagcuuugagg

SEQ ID NO: 20393 - RNA, 23 nt, Artificial Sequence
  Synthetic oligonucleotide: PDCD1-6706
uccacaagguggaagcuuugagg

SEQ ID NO: 20394 - RNA, 24 nt, Artificial Sequence
  Synthetic oligonucleotide: PDCD1-6707
auccacaagguggaagcuuugagg

SEQ ID NO: 20395 - RNA, 18 nt, Artificial Sequence
  Synthetic oligonucleotide: PDCD1-6708
guugcaggcaucacacgg

SEQ ID NO: 20396 - RNA, 19 nt, Artificial Sequence
  Synthetic oligonucleotide: PDCD1-6709
uguugcaggcaucacacgg

SEQ ID NO: 20397 - RNA, 20 nt, Artificial Sequence
  Synthetic oligonucleotide: PDCD1-3038
cuguugcaggcaucacacgg

SEQ ID NO: 20398 - RNA, 21 nt, Artificial Sequence
  Synthetic oligonucleotide: PDCD1-6710
gcuguugcaggcaucacacgg

SEQ ID NO: 20399 - RNA, 22 nt, Artificial Sequence
  Synthetic oligonucleotide: PDCD1-6711
ggcuguugcaggcaucacacgg

SEQ ID NO: 20400 - RNA, 23 nt, Artificial Sequence
  Synthetic oligonucleotide: PDCD1-6712
aggcuguugcaggcaucacacgg

SEQ ID NO: 20401 - RNA, 24 nt, Artificial Sequence
  Synthetic oligonucleotide: PDCD1-6713
caggcuguugcaggcaucacacgg

SEQ ID NO: 20402 - RNA, 18 nt, Artificial Sequence
  Synthetic oligonucleotide: PDCD1-6714
cacgagugggcuggaggg

SEQ ID NO: 20403 - RNA, 19 nt, Artificial Sequence
  Synthetic oligonucleotide: PDCD1-6715
gcacgagugggcuggaggg

SEQ ID NO: 20404 - RNA, 20 nt, Artificial Sequence
  Synthetic oligonucleotide: PDCD1-1954
ggcacgagugggcuggaggg

SEQ ID NO: 20405 - RNA, 21 nt, Artificial Sequence
  Synthetic oligonucleotide: PDCD1-6716
uggcacgagugggcuggaggg

SEQ ID NO: 20406 - RNA, 22 nt, Artificial Sequence
  Synthetic oligonucleotide: PDCD1-6717
cuggcacgagugggcuggaggg

SEQ ID NO: 20407 - RNA, 23 nt, Artificial Sequence
  Synthetic oligonucleotide: PDCD1-6718
ccuggcacgagugggcuggaggg

SEQ ID NO: 20408 - RNA, 24 nt, Artificial Sequence
  Synthetic oligonucleotide: PDCD1-6719
cccuggcacgagugggcuggaggg

SEQ ID NO: 20409 - RNA, 18 nt, Artificial Sequence
  Synthetic oligonucleotide: PDCD1-6720
gucugaacagggcucggg

SEQ ID NO: 20410 - RNA, 19 nt, Artificial Sequence
  Synthetic oligonucleotide: PDCD1-6721
ggucugaacagggcucggg

SEQ ID NO: 20411 - RNA, 20 nt, Artificial Sequence
  Synthetic oligonucleotide: PDCD1-1688
uggucugaacagggcucggg

SEQ ID NO: 20412 - RNA, 21 nt, Artificial Sequence
  Synthetic oligonucleotide: PDCD1-6722
auggucugaacagggcucggg

SEQ ID NO: 20413 - RNA, 22 nt, Artificial Sequence
  Synthetic oligonucleotide: PDCD1-6723
gauggucugaacagggcucggg

SEQ ID NO: 20414 - RNA, 23 nt, Artificial Sequence
  Synthetic oligonucleotide: PDCD1-6724
ggauggucugaacagggcucggg

SEQ ID NO: 20415 - RNA, 24 nt, Artificial Sequence
  Synthetic oligonucleotide: PDCD1-6725
cggauggucugaacagggcucggg

SEQ ID NO: 20416 - RNA, 18 nt, Artificial Sequence
  Synthetic oligonucleotide: PDCD1-6726
gagggcagggccccgggg

SEQ ID NO: 20417 - RNA, 19 nt, Artificial Sequence
  Synthetic oligonucleotide: PDCD1-6727
ggagggcagggccccgggg

SEQ ID NO: 20418 - RNA, 20 nt, Artificial Sequence
  Synthetic oligonucleotide: PDCD1-1949
uggagggcagggccccgggg

SEQ ID NO: 20419 - RNA, 21 nt, Artificial Sequence
  Synthetic oligonucleotide: PDCD1-6728
cuggagggcagggccccgggg

SEQ ID NO: 20420 - RNA, 22 nt, Artificial Sequence
  Synthetic oligonucleotide: PDCD1-6729
gcuggagggcagggccccgggg

SEQ ID NO: 20421 - RNA, 23 nt, Artificial Sequence
  Synthetic oligonucleotide: PDCD1-6730
ggcuggagggcagggccccgggg

SEQ ID NO: 20422 - RNA, 24 nt, Artificial Sequence
  Synthetic oligonucleotide: PDCD1-6731
gggcuggagggcagggccccgggg

SEQ ID NO: 20423 - RNA, 18 nt, Artificial Sequence
  Synthetic oligonucleotide: PDCD1-6732
gugccccagcgaaggggg

SEQ ID NO: 20424 - RNA, 19 nt, Artificial Sequence
  Synthetic oligonucleotide: PDCD1-6733
ugugccccagcgaaggggg

SEQ ID NO: 20425 - RNA, 20 nt, Artificial Sequence
  Synthetic oligonucleotide: PDCD1-1922
cugugccccagcgaaggggg

SEQ ID NO: 20426 - RNA, 21 nt, Artificial Sequence
  Synthetic oligonucleotide: PDCD1-6734
ccugugccccagcgaaggggg

SEQ ID NO: 20427 - RNA, 22 nt, Artificial Sequence
  Synthetic oligonucleotide: PDCD1-6735
accugugccccagcgaaggggg

SEQ ID NO: 20428 - RNA, 23 nt, Artificial Sequence
  Synthetic oligonucleotide: PDCD1-6736
caccugugccccagcgaaggggg

SEQ ID NO: 20429 - RNA, 24 nt, Artificial Sequence
  Synthetic oligonucleotide: PDCD1-6737
ucaccugugccccagcgaaggggg

SEQ ID NO: 20430 - RNA, 18 nt, Artificial Sequence
  Synthetic oligonucleotide: PDCD1-6738
ccagcgaagggggauggg

SEQ ID NO: 20431 - RNA, 19 nt, Artificial Sequence
  Synthetic oligonucleotide: PDCD1-6739
cccagcgaagggggauggg

SEQ ID NO: 20432 - RNA, 20 nt, Artificial Sequence
  Synthetic oligonucleotide: PDCD1-1921
ccccagcgaagggggauggg

SEQ ID NO: 20433 - RNA, 21 nt, Artificial Sequence
  Synthetic oligonucleotide: PDCD1-6740
gccccagcgaagggggauggg

SEQ ID NO: 20434 - RNA, 22 nt, Artificial Sequence
  Synthetic oligonucleotide: PDCD1-6741
ugccccagcgaagggggauggg

SEQ ID NO: 20435 - RNA, 23 nt, Artificial Sequence
  Synthetic oligonucleotide: PDCD1-6742
gugccccagcgaagggggauggg

SEQ ID NO: 20436 - RNA, 24 nt, Artificial Sequence
  Synthetic oligonucleotide: PDCD1-6743
ugugccccagcgaagggggauggg

SEQ ID NO: 20437 - RNA, 18 nt, Artificial Sequence
  Synthetic oligonucleotide: PDCD1-6744
agagcccuggaaucuggg

SEQ ID NO: 20438 - RNA, 19 nt, Artificial Sequence
  Synthetic oligonucleotide: PDCD1-6745
gagagcccuggaaucuggg

SEQ ID NO: 20439 - RNA, 20 nt, Artificial Sequence
  Synthetic oligonucleotide: PDCD1-1692
ggagagcccuggaaucuggg

SEQ ID NO: 20440 - RNA, 21 nt, Artificial Sequence
  Synthetic oligonucleotide: PDCD1-6746
gggagagcccuggaaucuggg

SEQ ID NO: 20441 - RNA, 22 nt, Artificial Sequence
  Synthetic oligonucleotide: PDCD1-6747
ggggagagcccuggaaucuggg

SEQ ID NO: 20442 - RNA, 23 nt, Artificial Sequence
  Synthetic oligonucleotide: PDCD1-6748
cggggagagcccuggaaucuggg

SEQ ID NO: 20443 - RNA, 24 nt, Artificial Sequence
  Synthetic oligonucleotide: PDCD1-6749
ucggggagagcccuggaaucuggg

SEQ ID NO: 20444 - RNA, 18 nt, Artificial Sequence
  Synthetic oligonucleotide: PDCD1-6750
cacccuggcacgaguggg

SEQ ID NO: 20445 - RNA, 19 nt, Artificial Sequence
  Synthetic oligonucleotide: PDCD1-6751
ccacccuggcacgaguggg

SEQ ID NO: 20446 - RNA, 20 nt, Artificial Sequence
  Synthetic oligonucleotide: PDCD1-1957
cccacccuggcacgaguggg

SEQ ID NO: 20447 - RNA, 21 nt, Artificial Sequence
  Synthetic oligonucleotide: PDCD1-6752
ccccacccuggcacgaguggg

SEQ ID NO: 20448 - RNA, 22 nt, Artificial Sequence
  Synthetic oligonucleotide: PDCD1-6753
accccacccuggcacgaguggg

SEQ ID NO: 20449 - RNA, 23 nt, Artificial Sequence
  Synthetic oligonucleotide: PDCD1-6754
caccccacccuggcacgaguggg

SEQ ID NO: 20450 - RNA, 24 nt, Artificial Sequence
  Synthetic oligonucleotide: PDCD1-6755
ccaccccacccuggcacgaguggg

SEQ ID NO: 20451 - RNA, 18 nt, Artificial Sequence
  Synthetic oligonucleotide: PDCD1-6756
gaagaaggucaaggcugg

SEQ ID NO: 20452 - RNA, 19 nt, Artificial Sequence
  Synthetic oligonucleotide: PDCD1-6757
ggaagaaggucaaggcugg

SEQ ID NO: 20453 - RNA, 20 nt, Artificial Sequence
  Synthetic oligonucleotide: PDCD1-1946
gggaagaaggucaaggcugg

SEQ ID NO: 20454 - RNA, 21 nt, Artificial Sequence
  Synthetic oligonucleotide: PDCD1-6758
ggggaagaaggucaaggcugg

SEQ ID NO: 20455 - RNA, 22 nt, Artificial Sequence
  Synthetic oligonucleotide: PDCD1-6759
cggggaagaaggucaaggcugg

SEQ ID NO: 20456 - RNA, 23 nt, Artificial Sequence
  Synthetic oligonucleotide: PDCD1-6760
ccggggaagaaggucaaggcugg

SEQ ID NO: 20457 - RNA, 24 nt, Artificial Sequence
  Synthetic oligonucleotide: PDCD1-6761
cccggggaagaaggucaaggcugg

SEQ ID NO: 20458 - RNA, 18 nt, Artificial Sequence
  Synthetic oligonucleotide: PDCD1-6762
uccccaggugcaggcugg

SEQ ID NO: 20459 - RNA, 19 nt, Artificial Sequence
  Synthetic oligonucleotide: PDCD1-6763
auccccaggugcaggcugg

SEQ ID NO: 20460 - RNA, 20 nt, Artificial Sequence
  Synthetic oligonucleotide: PDCD1-1660
cauccccaggugcaggcugg

SEQ ID NO: 20461 - RNA, 21 nt, Artificial Sequence
  Synthetic oligonucleotide: PDCD1-6764
gcauccccaggugcaggcugg

SEQ ID NO: 20462 - RNA, 22 nt, Artificial Sequence
  Synthetic oligonucleotide: PDCD1-6765
ggcauccccaggugcaggcugg

SEQ ID NO: 20463 - RNA, 23 nt, Artificial Sequence
  Synthetic oligonucleotide: PDCD1-6766
uggcauccccaggugcaggcugg

SEQ ID NO: 20464 - RNA, 24 nt, Artificial Sequence
  Synthetic oligonucleotide: PDCD1-6767
uuggcauccccaggugcaggcugg

SEQ ID NO: 20465 - RNA, 18 nt, Artificial Sequence
  Synthetic oligonucleotide: PDCD1-6768
uucgguuauuuuaagcug

SEQ ID NO: 20466 - RNA, 19 nt, Artificial Sequence
  Synthetic oligonucleotide: PDCD1-6769
cuucgguuauuuuaagcug

SEQ ID NO: 20467 - RNA, 20 nt, Artificial Sequence
  Synthetic oligonucleotide: PDCD1-6770
gcuucgguuauuuuaagcug

SEQ ID NO: 20468 - RNA, 21 nt, Artificial Sequence
  Synthetic oligonucleotide: PDCD1-6771
cgcuucgguuauuuuaagcug

SEQ ID NO: 20469 - RNA, 22 nt, Artificial Sequence
  Synthetic oligonucleotide: PDCD1-6772
ucgcuucgguuauuuuaagcug

SEQ ID NO: 20470 - RNA, 23 nt, Artificial Sequence
  Synthetic oligonucleotide: PDCD1-6773
cucgcuucgguuauuuuaagcug

SEQ ID NO: 20471 - RNA, 24 nt, Artificial Sequence
  Synthetic oligonucleotide: PDCD1-6774
ccucgcuucgguuauuuuaagcug

SEQ ID NO: 20472 - RNA, 18 nt, Artificial Sequence
  Synthetic oligonucleotide: PDCD1-6775
ccuggcacgagugggcug

SEQ ID NO: 20473 - RNA, 19 nt, Artificial Sequence
  Synthetic oligonucleotide: PDCD1-6776
cccuggcacgagugggcug

SEQ ID NO: 20474 - RNA, 20 nt, Artificial Sequence
  Synthetic oligonucleotide: PDCD1-1955
acccuggcacgagugggcug

SEQ ID NO: 20475 - RNA, 21 nt, Artificial Sequence
  Synthetic oligonucleotide: PDCD1-6777
cacccuggcacgagugggcug

SEQ ID NO: 20476 - RNA, 22 nt, Artificial Sequence
  Synthetic oligonucleotide: PDCD1-6778
ccacccuggcacgagugggcug

SEQ ID NO: 20477 - RNA, 23 nt, Artificial Sequence
  Synthetic oligonucleotide: PDCD1-6779
cccacccuggcacgagugggcug

SEQ ID NO: 20478 - RNA, 24 nt, Artificial Sequence
  Synthetic oligonucleotide: PDCD1-6780
ccccacccuggcacgagugggcug

SEQ ID NO: 20479 - RNA, 18 nt, Artificial Sequence
  Synthetic oligonucleotide: PDCD1-6781
cacaagguggaagcuuug

SEQ ID NO: 20480 - RNA, 19 nt, Artificial Sequence
  Synthetic oligonucleotide: PDCD1-6782
ccacaagguggaagcuuug

SEQ ID NO: 20481 - RNA, 20 nt, Artificial Sequence
  Synthetic oligonucleotide: PDCD1-3031
uccacaagguggaagcuuug

SEQ ID NO: 20482 - RNA, 21 nt, Artificial Sequence
  Synthetic oligonucleotide: PDCD1-6783
auccacaagguggaagcuuug

SEQ ID NO: 20483 - RNA, 22 nt, Artificial Sequence
  Synthetic oligonucleotide: PDCD1-6784
cauccacaagguggaagcuuug

SEQ ID NO: 20484 - RNA, 23 nt, Artificial Sequence
  Synthetic oligonucleotide: PDCD1-6785
ccauccacaagguggaagcuuug

SEQ ID NO: 20485 - RNA, 24 nt, Artificial Sequence
  Synthetic oligonucleotide: PDCD1-6786
gccauccacaagguggaagcuuug

SEQ ID NO: 20486 - RNA, 18 nt, Artificial Sequence
  Synthetic oligonucleotide: PDCD1-6787
cggggagagcccuggaau

SEQ ID NO: 20487 - RNA, 19 nt, Artificial Sequence
  Synthetic oligonucleotide: PDCD1-6788
ucggggagagcccuggaau

SEQ ID NO: 20488 - RNA, 20 nt, Artificial Sequence
  Synthetic oligonucleotide: PDCD1-1691
cucggggagagcccuggaau

SEQ ID NO: 20489 - RNA, 21 nt, Artificial Sequence
  Synthetic oligonucleotide: PDCD1-6789
gcucggggagagcccuggaau

SEQ ID NO: 20490 - RNA, 22 nt, Artificial Sequence
  Synthetic oligonucleotide: PDCD1-6790
ggcucggggagagcccuggaau

SEQ ID NO: 20491 - RNA, 23 nt, Artificial Sequence
  Synthetic oligonucleotide: PDCD1-6791
gggcucggggagagcccuggaau

SEQ ID NO: 20492 - RNA, 24 nt, Artificial Sequence
  Synthetic oligonucleotide: PDCD1-6792
agggcucggggagagcccuggaau

SEQ ID NO: 20493 - RNA, 18 nt, Artificial Sequence
  Synthetic oligonucleotide: PDCD1-6793
guacacuuuggauauaau

SEQ ID NO: 20494 - RNA, 19 nt, Artificial Sequence
  Synthetic oligonucleotide: PDCD1-6794
gguacacuuuggauauaau

SEQ ID NO: 20495 - RNA, 20 nt, Artificial Sequence
  Synthetic oligonucleotide: PDCD1-1705
agguacacuuuggauauaau

SEQ ID NO: 20496 - RNA, 21 nt, Artificial Sequence
  Synthetic oligonucleotide: PDCD1-6795
cagguacacuuuggauauaau

SEQ ID NO: 20497 - RNA, 22 nt, Artificial Sequence
  Synthetic oligonucleotide: PDCD1-6796
acagguacacuuuggauauaau

SEQ ID NO: 20498 - RNA, 23 nt, Artificial Sequence
  Synthetic oligonucleotide: PDCD1-6797
aacagguacacuuuggauauaau

SEQ ID NO: 20499 - RNA, 24 nt, Artificial Sequence
  Synthetic oligonucleotide: PDCD1-6798
gaacagguacacuuuggauauaau

SEQ ID NO: 20500 - RNA, 18 nt, Artificial Sequence
  Synthetic oligonucleotide: PDCD1-6799
aucacacgguggaaagau

SEQ ID NO: 20501 - RNA, 19 nt, Artificial Sequence
  Synthetic oligonucleotide: PDCD1-6800
caucacacgguggaaagau

SEQ ID NO: 20502 - RNA, 20 nt, Artificial Sequence
  Synthetic oligonucleotide: PDCD1-1940
gcaucacacgguggaaagau

SEQ ID NO: 20503 - RNA, 21 nt, Artificial Sequence
  Synthetic oligonucleotide: PDCD1-6801
ggcaucacacgguggaaagau

SEQ ID NO: 20504 - RNA, 22 nt, Artificial Sequence
  Synthetic oligonucleotide: PDCD1-6802
aggcaucacacgguggaaagau

SEQ ID NO: 20505 - RNA, 23 nt, Artificial Sequence
  Synthetic oligonucleotide: PDCD1-6803
caggcaucacacgguggaaagau

SEQ ID NO: 20506 - RNA, 24 nt, Artificial Sequence
  Synthetic oligonucleotide: PDCD1-6804
gcaggcaucacacgguggaaagau

SEQ ID NO: 20507 - RNA, 18 nt, Artificial Sequence
  Synthetic oligonucleotide: PDCD1-6805
gcucccucucuccucgau

SEQ ID NO: 20508 - RNA, 19 nt, Artificial Sequence
  Synthetic oligonucleotide: PDCD1-6806
ggcucccucucuccucgau

SEQ ID NO: 20509 - RNA, 20 nt, Artificial Sequence
  Synthetic oligonucleotide: PDCD1-1676
aggcucccucucuccucgau

SEQ ID NO: 20510 - RNA, 21 nt, Artificial Sequence
  Synthetic oligonucleotide: PDCD1-6807
gaggcucccucucuccucgau

SEQ ID NO: 20511 - RNA, 22 nt, Artificial Sequence
  Synthetic oligonucleotide: PDCD1-6808
agaggcucccucucuccucgau

SEQ ID NO: 20512 - RNA, 23 nt, Artificial Sequence
  Synthetic oligonucleotide: PDCD1-6809
aagaggcucccucucuccucgau

SEQ ID NO: 20513 - RNA, 24 nt, Artificial Sequence
  Synthetic oligonucleotide: PDCD1-6810
gaagaggcucccucucuccucgau

SEQ ID NO: 20514 - RNA, 18 nt, Artificial Sequence
  Synthetic oligonucleotide: PDCD1-6811
uggggcucaucccauccu

SEQ ID NO: 20515 - RNA, 19 nt, Artificial Sequence
  Synthetic oligonucleotide: PDCD1-6812
auggggcucaucccauccu

SEQ ID NO: 20516 - RNA, 20 nt, Artificial Sequence
  Synthetic oligonucleotide: PDCD1-1708
cauggggcucaucccauccu

SEQ ID NO: 20517 - RNA, 21 nt, Artificial Sequence
  Synthetic oligonucleotide: PDCD1-6813
acauggggcucaucccauccu

SEQ ID NO: 20518 - RNA, 22 nt, Artificial Sequence
  Synthetic oligonucleotide: PDCD1-6814
cacauggggcucaucccauccu

SEQ ID NO: 20519 - RNA, 23 nt, Artificial Sequence
  Synthetic oligonucleotide: PDCD1-6815
ccacauggggcucaucccauccu

SEQ ID NO: 20520 - RNA, 24 nt, Artificial Sequence
  Synthetic oligonucleotide: PDCD1-6816
cccacauggggcucaucccauccu

SEQ ID NO: 20521 - RNA, 18 nt, Artificial Sequence
  Synthetic oligonucleotide: PDCD1-6817
auccacaagguggaagcu

SEQ ID NO: 20522 - RNA, 19 nt, Artificial Sequence
  Synthetic oligonucleotide: PDCD1-6818
cauccacaagguggaagcu

SEQ ID NO: 20523 - RNA, 20 nt, Artificial Sequence
  Synthetic oligonucleotide: PDCD1-1935
ccauccacaagguggaagcu

SEQ ID NO: 20524 - RNA, 21 nt, Artificial Sequence
  Synthetic oligonucleotide: PDCD1-6819
gccauccacaagguggaagcu

SEQ ID NO: 20525 - RNA, 22 nt, Artificial Sequence
  Synthetic oligonucleotide: PDCD1-6820
ggccauccacaagguggaagcu

SEQ ID NO: 20526 - RNA, 23 nt, Artificial Sequence
  Synthetic oligonucleotide: PDCD1-6821
aggccauccacaagguggaagcu

SEQ ID NO: 20527 - RNA, 24 nt, Artificial Sequence
  Synthetic oligonucleotide: PDCD1-6822
gaggccauccacaagguggaagcu

SEQ ID NO: 20528 - RNA, 18 nt, Artificial Sequence
  Synthetic oligonucleotide: PDCD1-6823
gauggucugaacagggcu

SEQ ID NO: 20529 - RNA, 19 nt, Artificial Sequence
  Synthetic oligonucleotide: PDCD1-6824
ggauggucugaacagggcu

SEQ ID NO: 20530 - RNA, 20 nt, Artificial Sequence
  Synthetic oligonucleotide: PDCD1-2738
cggauggucugaacagggcu

SEQ ID NO: 20531 - RNA, 21 nt, Artificial Sequence
  Synthetic oligonucleotide: PDCD1-6825
acggauggucugaacagggcu

SEQ ID NO: 20532 - RNA, 22 nt, Artificial Sequence
  Synthetic oligonucleotide: PDCD1-6826
cacggauggucugaacagggcu

SEQ ID NO: 20533 - RNA, 23 nt, Artificial Sequence
  Synthetic oligonucleotide: PDCD1-6827
ccacggauggucugaacagggcu

SEQ ID NO: 20534 - RNA, 24 nt, Artificial Sequence
  Synthetic oligonucleotide: PDCD1-6828
cccacggauggucugaacagggcu

SEQ ID NO: 20535 - RNA, 18 nt, Artificial Sequence
  Synthetic oligonucleotide: PDCD1-6829
ccuuaggaaaacucgagu

SEQ ID NO: 20536 - RNA, 19 nt, Artificial Sequence
  Synthetic oligonucleotide: PDCD1-6830
uccuuaggaaaacucgagu

SEQ ID NO: 20537 - RNA, 20 nt, Artificial Sequence
  Synthetic oligonucleotide: PDCD1-1712
auccuuaggaaaacucgagu

SEQ ID NO: 20538 - RNA, 21 nt, Artificial Sequence
  Synthetic oligonucleotide: PDCD1-6831
cauccuuaggaaaacucgagu

SEQ ID NO: 20539 - RNA, 22 nt, Artificial Sequence
  Synthetic oligonucleotide: PDCD1-6832
ccauccuuaggaaaacucgagu

SEQ ID NO: 20540 - RNA, 23 nt, Artificial Sequence
  Synthetic oligonucleotide: PDCD1-6833
cccauccuuaggaaaacucgagu

SEQ ID NO: 20541 - RNA, 24 nt, Artificial Sequence
  Synthetic oligonucleotide: PDCD1-6834
ucccauccuuaggaaaacucgagu

SEQ ID NO: 20542 - RNA, 18 nt, Artificial Sequence
  Synthetic oligonucleotide: PDCD1-6835
acuccccacggccaaggu

SEQ ID NO: 20543 - RNA, 19 nt, Artificial Sequence
  Synthetic oligonucleotide: PDCD1-6836
gacuccccacggccaaggu

SEQ ID NO: 20544 - RNA, 20 nt, Artificial Sequence
  Synthetic oligonucleotide: PDCD1-955
agacuccccacggccaaggu

SEQ ID NO: 20545 - RNA, 21 nt, Artificial Sequence
  Synthetic oligonucleotide: PDCD1-6837
cagacuccccacggccaaggu

SEQ ID NO: 20546 - RNA, 22 nt, Artificial Sequence
  Synthetic oligonucleotide: PDCD1-6838
gcagacuccccacggccaaggu

SEQ ID NO: 20547 - RNA, 23 nt, Artificial Sequence
  Synthetic oligonucleotide: PDCD1-6839
cgcagacuccccacggccaaggu

SEQ ID NO: 20548 - RNA, 24 nt, Artificial Sequence
  Synthetic oligonucleotide: PDCD1-6840
acgcagacuccccacggccaaggu

SEQ ID NO: 20549 - RNA, 18 nt, Artificial Sequence
  Synthetic oligonucleotide: PDCD1-6841
uggaacuguggccauggu

SEQ ID NO: 20550 - RNA, 19 nt, Artificial Sequence
  Synthetic oligonucleotide: PDCD1-6842
cuggaacuguggccauggu

SEQ ID NO: 20551 - RNA, 20 nt, Artificial Sequence
  Synthetic oligonucleotide: PDCD1-1938
ucuggaacuguggccauggu

SEQ ID NO: 20552 - RNA, 21 nt, Artificial Sequence
  Synthetic oligonucleotide: PDCD1-6843
aucuggaacuguggccauggu

SEQ ID NO: 20553 - RNA, 22 nt, Artificial Sequence
  Synthetic oligonucleotide: PDCD1-6844
gaucuggaacuguggccauggu

SEQ ID NO: 20554 - RNA, 23 nt, Artificial Sequence
  Synthetic oligonucleotide: PDCD1-6845
agaucuggaacuguggccauggu

SEQ ID NO: 20555 - RNA, 24 nt, Artificial Sequence
  Synthetic oligonucleotide: PDCD1-6846
aagaucuggaacuguggccauggu

SEQ ID NO: 20556 - RNA, 18 nt, Artificial Sequence
  Synthetic oligonucleotide: PDCD1-6847
gccucccccacggauggu

SEQ ID NO: 20557 - RNA, 19 nt, Artificial Sequence
  Synthetic oligonucleotide: PDCD1-6848
ggccucccccacggauggu

SEQ ID NO: 20558 - RNA, 20 nt, Artificial Sequence
  Synthetic oligonucleotide: PDCD1-1682
aggccucccccacggauggu

SEQ ID NO: 20559 - RNA, 21 nt, Artificial Sequence
  Synthetic oligonucleotide: PDCD1-6849
aaggccucccccacggauggu

SEQ ID NO: 20560 - RNA, 22 nt, Artificial Sequence
  Synthetic oligonucleotide: PDCD1-6850
caaggccucccccacggauggu

SEQ ID NO: 20561 - RNA, 23 nt, Artificial Sequence
  Synthetic oligonucleotide: PDCD1-6851
ccaaggccucccccacggauggu

SEQ ID NO: 20562 - RNA, 24 nt, Artificial Sequence
  Synthetic oligonucleotide: PDCD1-6852
gccaaggccucccccacggauggu

SEQ ID NO: 20563 - RNA, 18 nt, Artificial Sequence
  Synthetic oligonucleotide: PDCD1-6853
ggggcucaucccauccuu

SEQ ID NO: 20564 - RNA, 19 nt, Artificial Sequence
  Synthetic oligonucleotide: PDCD1-6854
uggggcucaucccauccuu

SEQ ID NO: 20565 - RNA, 20 nt, Artificial Sequence
  Synthetic oligonucleotide: PDCD1-2757
auggggcucaucccauccuu

SEQ ID NO: 20566 - RNA, 21 nt, Artificial Sequence
  Synthetic oligonucleotide: PDCD1-6855
cauggggcucaucccauccuu

SEQ ID NO: 20567 - RNA, 22 nt, Artificial Sequence
  Synthetic oligonucleotide: PDCD1-6856
acauggggcucaucccauccuu

SEQ ID NO: 20568 - RNA, 23 nt, Artificial Sequence
  Synthetic oligonucleotide: PDCD1-6857
cacauggggcucaucccauccuu

SEQ ID NO: 20569 - RNA, 24 nt, Artificial Sequence
  Synthetic oligonucleotide: PDCD1-6858
ccacauggggcucaucccauccuu

SEQ ID NO: 20570 - RNA, 18 nt, Artificial Sequence
  Synthetic oligonucleotide: PDCD1-6859
ccacaagguggaagcuuu

SEQ ID NO: 20571 - RNA, 19 nt, Artificial Sequence
  Synthetic oligonucleotide: PDCD1-6860
uccacaagguggaagcuuu

SEQ ID NO: 20572 - RNA, 20 nt, Artificial Sequence
  Synthetic oligonucleotide: PDCD1-1934
auccacaagguggaagcuuu

SEQ ID NO: 20573 - RNA, 21 nt, Artificial Sequence
  Synthetic oligonucleotide: PDCD1-6861
cauccacaagguggaagcuuu

SEQ ID NO: 20574 - RNA, 22 nt, Artificial Sequence
  Synthetic oligonucleotide: PDCD1-6862
ccauccacaagguggaagcuuu

SEQ ID NO: 20575 - RNA, 23 nt, Artificial Sequence
  Synthetic oligonucleotide: PDCD1-6863
gccauccacaagguggaagcuuu

SEQ ID NO: 20576 - RNA, 24 nt, Artificial Sequence
  Synthetic oligonucleotide: PDCD1-6864
ggccauccacaagguggaagcuuu

SEQ ID NO: 20577 - RNA, 18 nt, Artificial Sequence
  Synthetic oligonucleotide: PDCD1-6865
auuacagcgaauggaaaa

SEQ ID NO: 20578 - RNA, 19 nt, Artificial Sequence
  Synthetic oligonucleotide: PDCD1-6866
uauuacagcgaauggaaaa

SEQ ID NO: 20579 - RNA, 20 nt, Artificial Sequence
  Synthetic oligonucleotide: PDCD1-1751
uuauuacagcgaauggaaaa

SEQ ID NO: 20580 - RNA, 21 nt, Artificial Sequence
  Synthetic oligonucleotide: PDCD1-6867
uuuauuacagcgaauggaaaa

SEQ ID NO: 20581 - RNA, 22 nt, Artificial Sequence
  Synthetic oligonucleotide: PDCD1-6868
uuuuauuacagcgaauggaaaa

SEQ ID NO: 20582 - RNA, 23 nt, Artificial Sequence
  Synthetic oligonucleotide: PDCD1-6869
auuuuauuacagcgaauggaaaa

SEQ ID NO: 20583 - RNA, 24 nt, Artificial Sequence
  Synthetic oligonucleotide: PDCD1-6870
cauuuuauuacagcgaauggaaaa

SEQ ID NO: 20584 - RNA, 18 nt, Artificial Sequence
  Synthetic oligonucleotide: PDCD1-6871
gaauggaaaacaggagaa

SEQ ID NO: 20585 - RNA, 19 nt, Artificial Sequence
  Synthetic oligonucleotide: PDCD1-6872
cgaauggaaaacaggagaa

SEQ ID NO: 20586 - RNA, 20 nt, Artificial Sequence
  Synthetic oligonucleotide: PDCD1-1754
gcgaauggaaaacaggagaa

SEQ ID NO: 20587 - RNA, 21 nt, Artificial Sequence
  Synthetic oligonucleotide: PDCD1-6873
agcgaauggaaaacaggagaa

SEQ ID NO: 20588 - RNA, 22 nt, Artificial Sequence
  Synthetic oligonucleotide: PDCD1-6874
cagcgaauggaaaacaggagaa

SEQ ID NO: 20589 - RNA, 23 nt, Artificial Sequence
  Synthetic oligonucleotide: PDCD1-6875
acagcgaauggaaaacaggagaa

SEQ ID NO: 20590 - RNA, 24 nt, Artificial Sequence
  Synthetic oligonucleotide: PDCD1-6876
uacagcgaauggaaaacaggagaa

SEQ ID NO: 20591 - RNA, 18 nt, Artificial Sequence
  Synthetic oligonucleotide: PDCD1-6877
cagcuuaaaauaaccgaa

SEQ ID NO: 20592 - RNA, 19 nt, Artificial Sequence
  Synthetic oligonucleotide: PDCD1-6878
ucagcuuaaaauaaccgaa

SEQ ID NO: 20593 - RNA, 20 nt, Artificial Sequence
  Synthetic oligonucleotide: PDCD1-6879
aucagcuuaaaauaaccgaa

SEQ ID NO: 20594 - RNA, 21 nt, Artificial Sequence
  Synthetic oligonucleotide: PDCD1-6880
caucagcuuaaaauaaccgaa

SEQ ID NO: 20595 - RNA, 22 nt, Artificial Sequence
  Synthetic oligonucleotide: PDCD1-6881
ucaucagcuuaaaauaaccgaa

SEQ ID NO: 20596 - RNA, 23 nt, Artificial Sequence
  Synthetic oligonucleotide: PDCD1-6882
cucaucagcuuaaaauaaccgaa

SEQ ID NO: 20597 - RNA, 24 nt, Artificial Sequence
  Synthetic oligonucleotide: PDCD1-6883
gcucaucagcuuaaaauaaccgaa

SEQ ID NO: 20598 - RNA, 18 nt, Artificial Sequence
  Synthetic oligonucleotide: PDCD1-6884
gcauuuuauuacagcgaa

SEQ ID NO: 20599 - RNA, 19 nt, Artificial Sequence
  Synthetic oligonucleotide: PDCD1-6885
agcauuuuauuacagcgaa

SEQ ID NO: 20600 - RNA, 20 nt, Artificial Sequence
  Synthetic oligonucleotide: PDCD1-2819
gagcauuuuauuacagcgaa

SEQ ID NO: 20601 - RNA, 21 nt, Artificial Sequence
  Synthetic oligonucleotide: PDCD1-6886
ugagcauuuuauuacagcgaa

SEQ ID NO: 20602 - RNA, 22 nt, Artificial Sequence
  Synthetic oligonucleotide: PDCD1-6887
cugagcauuuuauuacagcgaa

SEQ ID NO: 20603 - RNA, 23 nt, Artificial Sequence
  Synthetic oligonucleotide: PDCD1-6888
gcugagcauuuuauuacagcgaa

SEQ ID NO: 20604 - RNA, 24 nt, Artificial Sequence
  Synthetic oligonucleotide: PDCD1-6889
ugcugagcauuuuauuacagcgaa

SEQ ID NO: 20605 - RNA, 18 nt, Artificial Sequence
  Synthetic oligonucleotide: PDCD1-6890
cucaucagcuuaaaauaa

SEQ ID NO: 20606 - RNA, 19 nt, Artificial Sequence
  Synthetic oligonucleotide: PDCD1-6891
gcucaucagcuuaaaauaa

SEQ ID NO: 20607 - RNA, 20 nt, Artificial Sequence
  Synthetic oligonucleotide: PDCD1-6892
ggcucaucagcuuaaaauaa

SEQ ID NO: 20608 - RNA, 21 nt, Artificial Sequence
  Synthetic oligonucleotide: PDCD1-6893
aggcucaucagcuuaaaauaa

SEQ ID NO: 20609 - RNA, 22 nt, Artificial Sequence
  Synthetic oligonucleotide: PDCD1-6894
caggcucaucagcuuaaaauaa

SEQ ID NO: 20610 - RNA, 23 nt, Artificial Sequence
  Synthetic oligonucleotide: PDCD1-6895
ucaggcucaucagcuuaaaauaa

SEQ ID NO: 20611 - RNA, 24 nt, Artificial Sequence
  Synthetic oligonucleotide: PDCD1-6896
gucaggcucaucagcuuaaaauaa

SEQ ID NO: 20612 - RNA, 18 nt, Artificial Sequence
  Synthetic oligonucleotide: PDCD1-6897
ucccggaucgaggagaga

SEQ ID NO: 20613 - RNA, 19 nt, Artificial Sequence
  Synthetic oligonucleotide: PDCD1-6898
cucccggaucgaggagaga

SEQ ID NO: 20614 - RNA, 20 nt, Artificial Sequence
  Synthetic oligonucleotide: PDCD1-2970
ucucccggaucgaggagaga

SEQ ID NO: 20615 - RNA, 21 nt, Artificial Sequence
  Synthetic oligonucleotide: PDCD1-6899
cucucccggaucgaggagaga

SEQ ID NO: 20616 - RNA, 22 nt, Artificial Sequence
  Synthetic oligonucleotide: PDCD1-6900
acucucccggaucgaggagaga

SEQ ID NO: 20617 - RNA, 23 nt, Artificial Sequence
  Synthetic oligonucleotide: PDCD1-6901
cacucucccggaucgaggagaga

SEQ ID NO: 20618 - RNA, 24 nt, Artificial Sequence
  Synthetic oligonucleotide: PDCD1-6902
ucacucucccggaucgaggagaga

SEQ ID NO: 20619 - RNA, 18 nt, Artificial Sequence
  Synthetic oligonucleotide: PDCD1-6903
ucucccggaucgaggaga

SEQ ID NO: 20620 - RNA, 19 nt, Artificial Sequence
  Synthetic oligonucleotide: PDCD1-6904
cucucccggaucgaggaga

SEQ ID NO: 20621 - RNA, 20 nt, Artificial Sequence
  Synthetic oligonucleotide: PDCD1-1872
acucucccggaucgaggaga

SEQ ID NO: 20622 - RNA, 21 nt, Artificial Sequence
  Synthetic oligonucleotide: PDCD1-6905
cacucucccggaucgaggaga

SEQ ID NO: 20623 - RNA, 22 nt, Artificial Sequence
  Synthetic oligonucleotide: PDCD1-6906
ucacucucccggaucgaggaga

SEQ ID NO: 20624 - RNA, 23 nt, Artificial Sequence
  Synthetic oligonucleotide: PDCD1-6907
cucacucucccggaucgaggaga

SEQ ID NO: 20625 - RNA, 24 nt, Artificial Sequence
  Synthetic oligonucleotide: PDCD1-6908
ccucacucucccggaucgaggaga

SEQ ID NO: 20626 - RNA, 18 nt, Artificial Sequence
  Synthetic oligonucleotide: PDCD1-6909
agcauuuuauuacagcga

SEQ ID NO: 20627 - RNA, 19 nt, Artificial Sequence
  Synthetic oligonucleotide: PDCD1-6910
gagcauuuuauuacagcga

SEQ ID NO: 20628 - RNA, 20 nt, Artificial Sequence
  Synthetic oligonucleotide: PDCD1-1749
ugagcauuuuauuacagcga

SEQ ID NO: 20629 - RNA, 21 nt, Artificial Sequence
  Synthetic oligonucleotide: PDCD1-6911
cugagcauuuuauuacagcga

SEQ ID NO: 20630 - RNA, 22 nt, Artificial Sequence
  Synthetic oligonucleotide: PDCD1-6912
gcugagcauuuuauuacagcga

SEQ ID NO: 20631 - RNA, 23 nt, Artificial Sequence
  Synthetic oligonucleotide: PDCD1-6913
ugcugagcauuuuauuacagcga

SEQ ID NO: 20632 - RNA, 24 nt, Artificial Sequence
  Synthetic oligonucleotide: PDCD1-6914
gugcugagcauuuuauuacagcga

SEQ ID NO: 20633 - RNA, 18 nt, Artificial Sequence
  Synthetic oligonucleotide: PDCD1-6915
caaaguguaccuguucga

SEQ ID NO: 20634 - RNA, 19 nt, Artificial Sequence
  Synthetic oligonucleotide: PDCD1-6916
ccaaaguguaccuguucga

SEQ ID NO: 20635 - RNA, 20 nt, Artificial Sequence
  Synthetic oligonucleotide: PDCD1-1893
uccaaaguguaccuguucga

SEQ ID NO: 20636 - RNA, 21 nt, Artificial Sequence
  Synthetic oligonucleotide: PDCD1-6917
auccaaaguguaccuguucga

SEQ ID NO: 20637 - RNA, 22 nt, Artificial Sequence
  Synthetic oligonucleotide: PDCD1-6918
uauccaaaguguaccuguucga

SEQ ID NO: 20638 - RNA, 23 nt, Artificial Sequence
  Synthetic oligonucleotide: PDCD1-6919
auauccaaaguguaccuguucga

SEQ ID NO: 20639 - RNA, 24 nt, Artificial Sequence
  Synthetic oligonucleotide: PDCD1-6920
uauauccaaaguguaccuguucga

SEQ ID NO: 20640 - RNA, 18 nt, Artificial Sequence
  Synthetic oligonucleotide: PDCD1-6921
acucucccggaucgagga

SEQ ID NO: 20641 - RNA, 19 nt, Artificial Sequence
  Synthetic oligonucleotide: PDCD1-6922
cacucucccggaucgagga

SEQ ID NO: 20642 - RNA, 20 nt, Artificial Sequence
  Synthetic oligonucleotide: PDCD1-1873
ucacucucccggaucgagga

SEQ ID NO: 20643 - RNA, 21 nt, Artificial Sequence
  Synthetic oligonucleotide: PDCD1-6923
cucacucucccggaucgagga

SEQ ID NO: 20644 - RNA, 22 nt, Artificial Sequence
  Synthetic oligonucleotide: PDCD1-6924
ccucacucucccggaucgagga

SEQ ID NO: 20645 - RNA, 23 nt, Artificial Sequence
  Synthetic oligonucleotide: PDCD1-6925
gccucacucucccggaucgagga

SEQ ID NO: 20646 - RNA, 24 nt, Artificial Sequence
  Synthetic oligonucleotide: PDCD1-6926
ggccucacucucccggaucgagga

SEQ ID NO: 20647 - RNA, 18 nt, Artificial Sequence
  Synthetic oligonucleotide: PDCD1-6927
uggccucacucucccgga

SEQ ID NO: 20648 - RNA, 19 nt, Artificial Sequence
  Synthetic oligonucleotide: PDCD1-6928
uuggccucacucucccgga

SEQ ID NO: 20649 - RNA, 20 nt, Artificial Sequence
  Synthetic oligonucleotide: PDCD1-1877
cuuggccucacucucccgga

SEQ ID NO: 20650 - RNA, 21 nt, Artificial Sequence
  Synthetic oligonucleotide: PDCD1-6929
ccuuggccucacucucccgga

SEQ ID NO: 20651 - RNA, 22 nt, Artificial Sequence
  Synthetic oligonucleotide: PDCD1-6930
gccuuggccucacucucccgga

SEQ ID NO: 20652 - RNA, 23 nt, Artificial Sequence
  Synthetic oligonucleotide: PDCD1-6931
ggccuuggccucacucucccgga

SEQ ID NO: 20653 - RNA, 24 nt, Artificial Sequence
  Synthetic oligonucleotide: PDCD1-6932
aggccuuggccucacucucccgga

SEQ ID NO: 20654 - RNA, 18 nt, Artificial Sequence
  Synthetic oligonucleotide: PDCD1-6933
augccugcaacagccuga

SEQ ID NO: 20655 - RNA, 19 nt, Artificial Sequence
  Synthetic oligonucleotide: PDCD1-6934
gaugccugcaacagccuga

SEQ ID NO: 20656 - RNA, 20 nt, Artificial Sequence
  Synthetic oligonucleotide: PDCD1-2783
ugaugccugcaacagccuga

SEQ ID NO: 20657 - RNA, 21 nt, Artificial Sequence
  Synthetic oligonucleotide: PDCD1-6935
gugaugccugcaacagccuga

SEQ ID NO: 20658 - RNA, 22 nt, Artificial Sequence
  Synthetic oligonucleotide: PDCD1-6936
ugugaugccugcaacagccuga

SEQ ID NO: 20659 - RNA, 23 nt, Artificial Sequence
  Synthetic oligonucleotide: PDCD1-6937
gugugaugccugcaacagccuga

SEQ ID NO: 20660 - RNA, 24 nt, Artificial Sequence
  Synthetic oligonucleotide: PDCD1-6938
cgugugaugccugcaacagccuga

SEQ ID NO: 20661 - RNA, 18 nt, Artificial Sequence
  Synthetic oligonucleotide: PDCD1-6939
uuacagcgaauggaaaac

SEQ ID NO: 20662 - RNA, 19 nt, Artificial Sequence
  Synthetic oligonucleotide: PDCD1-6940
auuacagcgaauggaaaac

SEQ ID NO: 20663 - RNA, 20 nt, Artificial Sequence
  Synthetic oligonucleotide: PDCD1-2820
uauuacagcgaauggaaaac

SEQ ID NO: 20664 - RNA, 21 nt, Artificial Sequence
  Synthetic oligonucleotide: PDCD1-6941
uuauuacagcgaauggaaaac

SEQ ID NO: 20665 - RNA, 22 nt, Artificial Sequence
  Synthetic oligonucleotide: PDCD1-6942
uuuauuacagcgaauggaaaac

SEQ ID NO: 20666 - RNA, 23 nt, Artificial Sequence
  Synthetic oligonucleotide: PDCD1-6943
uuuuauuacagcgaauggaaaac

SEQ ID NO: 20667 - RNA, 24 nt, Artificial Sequence
  Synthetic oligonucleotide: PDCD1-6944
auuuuauuacagcgaauggaaaac

SEQ ID NO: 20668 - RNA, 18 nt, Artificial Sequence
  Synthetic oligonucleotide: PDCD1-6945
ugcccagccagccugcac

SEQ ID NO: 20669 - RNA, 19 nt, Artificial Sequence
  Synthetic oligonucleotide: PDCD1-6946
gugcccagccagccugcac

SEQ ID NO: 20670 - RNA, 20 nt, Artificial Sequence
  Synthetic oligonucleotide: PDCD1-1866
ugugcccagccagccugcac

SEQ ID NO: 20671 - RNA, 21 nt, Artificial Sequence
  Synthetic oligonucleotide: PDCD1-6947
cugugcccagccagccugcac

SEQ ID NO: 20672 - RNA, 22 nt, Artificial Sequence
  Synthetic oligonucleotide: PDCD1-6948
ucugugcccagccagccugcac

SEQ ID NO: 20673 - RNA, 23 nt, Artificial Sequence
  Synthetic oligonucleotide: PDCD1-6949
cucugugcccagccagccugcac

SEQ ID NO: 20674 - RNA, 24 nt, Artificial Sequence
  Synthetic oligonucleotide: PDCD1-6950
ccucugugcccagccagccugcac

SEQ ID NO: 20675 - RNA, 18 nt, Artificial Sequence
  Synthetic oligonucleotide: PDCD1-6951
ugccugcaacagccugac

SEQ ID NO: 20676 - RNA, 19 nt, Artificial Sequence
  Synthetic oligonucleotide: PDCD1-6952
augccugcaacagccugac

SEQ ID NO: 20677 - RNA, 20 nt, Artificial Sequence
  Synthetic oligonucleotide: PDCD1-2784
gaugccugcaacagccugac

SEQ ID NO: 20678 - RNA, 21 nt, Artificial Sequence
  Synthetic oligonucleotide: PDCD1-6953
ugaugccugcaacagccugac

SEQ ID NO: 20679 - RNA, 22 nt, Artificial Sequence
  Synthetic oligonucleotide: PDCD1-6954
gugaugccugcaacagccugac

SEQ ID NO: 20680 - RNA, 23 nt, Artificial Sequence
  Synthetic oligonucleotide: PDCD1-6955
ugugaugccugcaacagccugac

SEQ ID NO: 20681 - RNA, 24 nt, Artificial Sequence
  Synthetic oligonucleotide: PDCD1-6956
gugugaugccugcaacagccugac

SEQ ID NO: 20682 - RNA, 18 nt, Artificial Sequence
  Synthetic oligonucleotide: PDCD1-6957
gcccagccagccugcacc

SEQ ID NO: 20683 - RNA, 19 nt, Artificial Sequence
  Synthetic oligonucleotide: PDCD1-6958
ugcccagccagccugcacc

SEQ ID NO: 20684 - RNA, 20 nt, Artificial Sequence
  Synthetic oligonucleotide: PDCD1-2962
gugcccagccagccugcacc

SEQ ID NO: 20685 - RNA, 21 nt, Artificial Sequence
  Synthetic oligonucleotide: PDCD1-6959
ugugcccagccagccugcacc

SEQ ID NO: 20686 - RNA, 22 nt, Artificial Sequence
  Synthetic oligonucleotide: PDCD1-6960
cugugcccagccagccugcacc

SEQ ID NO: 20687 - RNA, 23 nt, Artificial Sequence
  Synthetic oligonucleotide: PDCD1-6961
ucugugcccagccagccugcacc

SEQ ID NO: 20688 - RNA, 24 nt, Artificial Sequence
  Synthetic oligonucleotide: PDCD1-6962
cucugugcccagccagccugcacc

SEQ ID NO: 20689 - RNA, 18 nt, Artificial Sequence
  Synthetic oligonucleotide: PDCD1-6963
ccugggcugcccgugacc

SEQ ID NO: 20690 - RNA, 19 nt, Artificial Sequence
  Synthetic oligonucleotide: PDCD1-6964
uccugggcugcccgugacc

SEQ ID NO: 20691 - RNA, 20 nt, Artificial Sequence
  Synthetic oligonucleotide: PDCD1-1868
uuccugggcugcccgugacc

SEQ ID NO: 20692 - RNA, 21 nt, Artificial Sequence
  Synthetic oligonucleotide: PDCD1-6965
cuuccugggcugcccgugacc

SEQ ID NO: 20693 - RNA, 22 nt, Artificial Sequence
  Synthetic oligonucleotide: PDCD1-6966
ucuuccugggcugcccgugacc

SEQ ID NO: 20694 - RNA, 23 nt, Artificial Sequence
  Synthetic oligonucleotide: PDCD1-6967
cucuuccugggcugcccgugacc

SEQ ID NO: 20695 - RNA, 24 nt, Artificial Sequence
  Synthetic oligonucleotide: PDCD1-6968
ccucuuccugggcugcccgugacc

SEQ ID NO: 20696 - RNA, 18 nt, Artificial Sequence
  Synthetic oligonucleotide: PDCD1-6969
agccuugaccuucuuccc

SEQ ID NO: 20697 - RNA, 19 nt, Artificial Sequence
  Synthetic oligonucleotide: PDCD1-6970
cagccuugaccuucuuccc

SEQ ID NO: 20698 - RNA, 20 nt, Artificial Sequence
  Synthetic oligonucleotide: PDCD1-2799
ccagccuugaccuucuuccc

SEQ ID NO: 20699 - RNA, 21 nt, Artificial Sequence
  Synthetic oligonucleotide: PDCD1-6971
uccagccuugaccuucuuccc

SEQ ID NO: 20700 - RNA, 22 nt, Artificial Sequence
  Synthetic oligonucleotide: PDCD1-6972
uuccagccuugaccuucuuccc

SEQ ID NO: 20701 - RNA, 23 nt, Artificial Sequence
  Synthetic oligonucleotide: PDCD1-6973
cuuccagccuugaccuucuuccc

SEQ ID NO: 20702 - RNA, 24 nt, Artificial Sequence
  Synthetic oligonucleotide: PDCD1-6974
ccuuccagccuugaccuucuuccc

SEQ ID NO: 20703 - RNA, 18 nt, Artificial Sequence
  Synthetic oligonucleotide: PDCD1-6975
gaaccccaaaccuuggcc

SEQ ID NO: 20704 - RNA, 19 nt, Artificial Sequence
  Synthetic oligonucleotide: PDCD1-6976
agaaccccaaaccuuggcc

SEQ ID NO: 20705 - RNA, 20 nt, Artificial Sequence
  Synthetic oligonucleotide: PDCD1-1402
cagaaccccaaaccuuggcc

SEQ ID NO: 20706 - RNA, 21 nt, Artificial Sequence
  Synthetic oligonucleotide: PDCD1-6977
ccagaaccccaaaccuuggcc

SEQ ID NO: 20707 - RNA, 22 nt, Artificial Sequence
  Synthetic oligonucleotide: PDCD1-6978
gccagaaccccaaaccuuggcc

SEQ ID NO: 20708 - RNA, 23 nt, Artificial Sequence
  Synthetic oligonucleotide: PDCD1-6979
ggccagaaccccaaaccuuggcc

SEQ ID NO: 20709 - RNA, 24 nt, Artificial Sequence
  Synthetic oligonucleotide: PDCD1-6980
uggccagaaccccaaaccuuggcc

SEQ ID NO: 20710 - RNA, 18 nt, Artificial Sequence
  Synthetic oligonucleotide: PDCD1-6981
gcccuguucagaccaucc

SEQ ID NO: 20711 - RNA, 19 nt, Artificial Sequence
  Synthetic oligonucleotide: PDCD1-6982
agcccuguucagaccaucc

SEQ ID NO: 20712 - RNA, 20 nt, Artificial Sequence
  Synthetic oligonucleotide: PDCD1-1883
gagcccuguucagaccaucc

SEQ ID NO: 20713 - RNA, 21 nt, Artificial Sequence
  Synthetic oligonucleotide: PDCD1-6983
cgagcccuguucagaccaucc

SEQ ID NO: 20714 - RNA, 22 nt, Artificial Sequence
  Synthetic oligonucleotide: PDCD1-6984
ccgagcccuguucagaccaucc

SEQ ID NO: 20715 - RNA, 23 nt, Artificial Sequence
  Synthetic oligonucleotide: PDCD1-6985
cccgagcccuguucagaccaucc

SEQ ID NO: 20716 - RNA, 24 nt, Artificial Sequence
  Synthetic oligonucleotide: PDCD1-6986
ccccgagcccuguucagaccaucc

SEQ ID NO: 20717 - RNA, 18 nt, Artificial Sequence
  Synthetic oligonucleotide: PDCD1-6987
cagauuccagggcucucc

SEQ ID NO: 20718 - RNA, 19 nt, Artificial Sequence
  Synthetic oligonucleotide: PDCD1-6988
ccagauuccagggcucucc

SEQ ID NO: 20719 - RNA, 20 nt, Artificial Sequence
  Synthetic oligonucleotide: PDCD1-1884
cccagauuccagggcucucc

SEQ ID NO: 20720 - RNA, 21 nt, Artificial Sequence
  Synthetic oligonucleotide: PDCD1-6989
gcccagauuccagggcucucc

SEQ ID NO: 20721 - RNA, 22 nt, Artificial Sequence
  Synthetic oligonucleotide: PDCD1-6990
ugcccagauuccagggcucucc

SEQ ID NO: 20722 - RNA, 23 nt, Artificial Sequence
  Synthetic oligonucleotide: PDCD1-6991
cugcccagauuccagggcucucc

SEQ ID NO: 20723 - RNA, 24 nt, Artificial Sequence
  Synthetic oligonucleotide: PDCD1-6992
ucugcccagauuccagggcucucc

SEQ ID NO: 20724 - RNA, 18 nt, Artificial Sequence
  Synthetic oligonucleotide: PDCD1-6993
cagccuugaccuucuucc

SEQ ID NO: 20725 - RNA, 19 nt, Artificial Sequence
  Synthetic oligonucleotide: PDCD1-6994
ccagccuugaccuucuucc

SEQ ID NO: 20726 - RNA, 20 nt, Artificial Sequence
  Synthetic oligonucleotide: PDCD1-1737
uccagccuugaccuucuucc

SEQ ID NO: 20727 - RNA, 21 nt, Artificial Sequence
  Synthetic oligonucleotide: PDCD1-6995
uuccagccuugaccuucuucc

SEQ ID NO: 20728 - RNA, 22 nt, Artificial Sequence
  Synthetic oligonucleotide: PDCD1-6996
cuuccagccuugaccuucuucc

SEQ ID NO: 20729 - RNA, 23 nt, Artificial Sequence
  Synthetic oligonucleotide: PDCD1-6997
ccuuccagccuugaccuucuucc

SEQ ID NO: 20730 - RNA, 24 nt, Artificial Sequence
  Synthetic oligonucleotide: PDCD1-6998
cccuuccagccuugaccuucuucc

SEQ ID NO: 20731 - RNA, 18 nt, Artificial Sequence
  Synthetic oligonucleotide: PDCD1-6999
cggcccaucccccuucgc

SEQ ID NO: 20732 - RNA, 19 nt, Artificial Sequence
  Synthetic oligonucleotide: PDCD1-7000
ccggcccaucccccuucgc

SEQ ID NO: 20733 - RNA, 20 nt, Artificial Sequence
  Synthetic oligonucleotide: PDCD1-2774
cccggcccaucccccuucgc

SEQ ID NO: 20734 - RNA, 21 nt, Artificial Sequence
  Synthetic oligonucleotide: PDCD1-7001
ucccggcccaucccccuucgc

SEQ ID NO: 20735 - RNA, 22 nt, Artificial Sequence
  Synthetic oligonucleotide: PDCD1-7002
uucccggcccaucccccuucgc

SEQ ID NO: 20736 - RNA, 23 nt, Artificial Sequence
  Synthetic oligonucleotide: PDCD1-7003
cuucccggcccaucccccuucgc

SEQ ID NO: 20737 - RNA, 24 nt, Artificial Sequence
  Synthetic oligonucleotide: PDCD1-7004
ccuucccggcccaucccccuucgc

SEQ ID NO: 20738 - RNA, 18 nt, Artificial Sequence
  Synthetic oligonucleotide: PDCD1-7005
aaauaaccgaagcgaggc

SEQ ID NO: 20739 - RNA, 19 nt, Artificial Sequence
  Synthetic oligonucleotide: PDCD1-7006
aaaauaaccgaagcgaggc

SEQ ID NO: 20740 - RNA, 20 nt, Artificial Sequence
  Synthetic oligonucleotide: PDCD1-7007
uaaaauaaccgaagcgaggc

SEQ ID NO: 20741 - RNA, 21 nt, Artificial Sequence
  Synthetic oligonucleotide: PDCD1-7008
uuaaaauaaccgaagcgaggc

SEQ ID NO: 20742 - RNA, 22 nt, Artificial Sequence
  Synthetic oligonucleotide: PDCD1-7009
cuuaaaauaaccgaagcgaggc

SEQ ID NO: 20743 - RNA, 23 nt, Artificial Sequence
  Synthetic oligonucleotide: PDCD1-7010
gcuuaaaauaaccgaagcgaggc

SEQ ID NO: 20744 - RNA, 24 nt, Artificial Sequence
  Synthetic oligonucleotide: PDCD1-7011
agcuuaaaauaaccgaagcgaggc

SEQ ID NO: 20745 - RNA, 18 nt, Artificial Sequence
  Synthetic oligonucleotide: PDCD1-7012
acagccugacgggggggc

SEQ ID NO: 20746 - RNA, 19 nt, Artificial Sequence
  Synthetic oligonucleotide: PDCD1-7013
aacagccugacgggggggc

SEQ ID NO: 20747 - RNA, 20 nt, Artificial Sequence
  Synthetic oligonucleotide: PDCD1-2789
caacagccugacgggggggc

SEQ ID NO: 20748 - RNA, 21 nt, Artificial Sequence
  Synthetic oligonucleotide: PDCD1-7014
gcaacagccugacgggggggc

SEQ ID NO: 20749 - RNA, 22 nt, Artificial Sequence
  Synthetic oligonucleotide: PDCD1-7015
ugcaacagccugacgggggggc

SEQ ID NO: 20750 - RNA, 23 nt, Artificial Sequence
  Synthetic oligonucleotide: PDCD1-7016
cugcaacagccugacgggggggc

SEQ ID NO: 20751 - RNA, 24 nt, Artificial Sequence
  Synthetic oligonucleotide: PDCD1-7017
ccugcaacagccugacgggggggc

SEQ ID NO: 20752 - RNA, 18 nt, Artificial Sequence
  Synthetic oligonucleotide: PDCD1-7018
augacgggucaggcuggc

SEQ ID NO: 20753 - RNA, 19 nt, Artificial Sequence
  Synthetic oligonucleotide: PDCD1-7019
aaugacgggucaggcuggc

SEQ ID NO: 20754 - RNA, 20 nt, Artificial Sequence
  Synthetic oligonucleotide: PDCD1-1403
gaaugacgggucaggcuggc

SEQ ID NO: 20755 - RNA, 21 nt, Artificial Sequence
  Synthetic oligonucleotide: PDCD1-7020
agaaugacgggucaggcuggc

SEQ ID NO: 20756 - RNA, 22 nt, Artificial Sequence
  Synthetic oligonucleotide: PDCD1-7021
uagaaugacgggucaggcuggc

SEQ ID NO: 20757 - RNA, 23 nt, Artificial Sequence
  Synthetic oligonucleotide: PDCD1-7022
guagaaugacgggucaggcuggc

SEQ ID NO: 20758 - RNA, 24 nt, Artificial Sequence
  Synthetic oligonucleotide: PDCD1-7023
uguagaaugacgggucaggcuggc

SEQ ID NO: 20759 - RNA, 18 nt, Artificial Sequence
  Synthetic oligonucleotide: PDCD1-7024
gggggcuggggcgguggc

SEQ ID NO: 20760 - RNA, 19 nt, Artificial Sequence
  Synthetic oligonucleotide: PDCD1-7025
ggggggcuggggcgguggc

SEQ ID NO: 20761 - RNA, 20 nt, Artificial Sequence
  Synthetic oligonucleotide: PDCD1-2794
gggggggcuggggcgguggc

SEQ ID NO: 20762 - RNA, 21 nt, Artificial Sequence
  Synthetic oligonucleotide: PDCD1-7026
cgggggggcuggggcgguggc

SEQ ID NO: 20763 - RNA, 22 nt, Artificial Sequence
  Synthetic oligonucleotide: PDCD1-7027
acgggggggcuggggcgguggc

SEQ ID NO: 20764 - RNA, 23 nt, Artificial Sequence
  Synthetic oligonucleotide: PDCD1-7028
gacgggggggcuggggcgguggc

SEQ ID NO: 20765 - RNA, 24 nt, Artificial Sequence
  Synthetic oligonucleotide: PDCD1-7029
ugacgggggggcuggggcgguggc

SEQ ID NO: 20766 - RNA, 18 nt, Artificial Sequence
  Synthetic oligonucleotide: PDCD1-7030
guucaggggguccagugc

SEQ ID NO: 20767 - RNA, 19 nt, Artificial Sequence
  Synthetic oligonucleotide: PDCD1-7031
gguucaggggguccagugc

SEQ ID NO: 20768 - RNA, 20 nt, Artificial Sequence
  Synthetic oligonucleotide: PDCD1-1745
ugguucaggggguccagugc

SEQ ID NO: 20769 - RNA, 21 nt, Artificial Sequence
  Synthetic oligonucleotide: PDCD1-7032
gugguucaggggguccagugc

SEQ ID NO: 20770 - RNA, 22 nt, Artificial Sequence
  Synthetic oligonucleotide: PDCD1-7033
ggugguucaggggguccagugc

SEQ ID NO: 20771 - RNA, 23 nt, Artificial Sequence
  Synthetic oligonucleotide: PDCD1-7034
gggugguucaggggguccagugc

SEQ ID NO: 20772 - RNA, 24 nt, Artificial Sequence
  Synthetic oligonucleotide: PDCD1-7035
ggggugguucaggggguccagugc

SEQ ID NO: 20773 - RNA, 18 nt, Artificial Sequence
  Synthetic oligonucleotide: PDCD1-7036
gccucacucucccggauc

SEQ ID NO: 20774 - RNA, 19 nt, Artificial Sequence
  Synthetic oligonucleotide: PDCD1-7037
ggccucacucucccggauc

SEQ ID NO: 20775 - RNA, 20 nt, Artificial Sequence
  Synthetic oligonucleotide: PDCD1-1876
uggccucacucucccggauc

SEQ ID NO: 20776 - RNA, 21 nt, Artificial Sequence
  Synthetic oligonucleotide: PDCD1-7038
uuggccucacucucccggauc

SEQ ID NO: 20777 - RNA, 22 nt, Artificial Sequence
  Synthetic oligonucleotide: PDCD1-7039
cuuggccucacucucccggauc

SEQ ID NO: 20778 - RNA, 23 nt, Artificial Sequence
  Synthetic oligonucleotide: PDCD1-7040
ccuuggccucacucucccggauc

SEQ ID NO: 20779 - RNA, 24 nt, Artificial Sequence
  Synthetic oligonucleotide: PDCD1-7041
gccuuggccucacucucccggauc

SEQ ID NO: 20780 - RNA, 18 nt, Artificial Sequence
  Synthetic oligonucleotide: PDCD1-7042
ugugaccacagcccgcuc

SEQ ID NO: 20781 - RNA, 19 nt, Artificial Sequence
  Synthetic oligonucleotide: PDCD1-7043
cugugaccacagcccgcuc

SEQ ID NO: 20782 - RNA, 20 nt, Artificial Sequence
  Synthetic oligonucleotide: PDCD1-1867
acugugaccacagcccgcuc

SEQ ID NO: 20783 - RNA, 21 nt, Artificial Sequence
  Synthetic oligonucleotide: PDCD1-7044
cacugugaccacagcccgcuc

SEQ ID NO: 20784 - RNA, 22 nt, Artificial Sequence
  Synthetic oligonucleotide: PDCD1-7045
acacugugaccacagcccgcuc

SEQ ID NO: 20785 - RNA, 23 nt, Artificial Sequence
  Synthetic oligonucleotide: PDCD1-7046
uacacugugaccacagcccgcuc

SEQ ID NO: 20786 - RNA, 24 nt, Artificial Sequence
  Synthetic oligonucleotide: PDCD1-7047
guacacugugaccacagcccgcuc

SEQ ID NO: 20787 - RNA, 18 nt, Artificial Sequence
  Synthetic oligonucleotide: PDCD1-7048
gggucucugcccagauuc

SEQ ID NO: 20788 - RNA, 19 nt, Artificial Sequence
  Synthetic oligonucleotide: PDCD1-7049
ugggucucugcccagauuc

SEQ ID NO: 20789 - RNA, 20 nt, Artificial Sequence
  Synthetic oligonucleotide: PDCD1-1885
cugggucucugcccagauuc

SEQ ID NO: 20790 - RNA, 21 nt, Artificial Sequence
  Synthetic oligonucleotide: PDCD1-7050
ccugggucucugcccagauuc

SEQ ID NO: 20791 - RNA, 22 nt, Artificial Sequence
  Synthetic oligonucleotide: PDCD1-7051
gccugggucucugcccagauuc

SEQ ID NO: 20792 - RNA, 23 nt, Artificial Sequence
  Synthetic oligonucleotide: PDCD1-7052
cgccugggucucugcccagauuc

SEQ ID NO: 20793 - RNA, 24 nt, Artificial Sequence
  Synthetic oligonucleotide: PDCD1-7053
ccgccugggucucugcccagauuc

SEQ ID NO: 20794 - RNA, 18 nt, Artificial Sequence
  Synthetic oligonucleotide: PDCD1-7054
gagagagggagccucuuc

SEQ ID NO: 20795 - RNA, 19 nt, Artificial Sequence
  Synthetic oligonucleotide: PDCD1-7055
ggagagagggagccucuuc

SEQ ID NO: 20796 - RNA, 20 nt, Artificial Sequence
  Synthetic oligonucleotide: PDCD1-1869
aggagagagggagccucuuc

SEQ ID NO: 20797 - RNA, 21 nt, Artificial Sequence
  Synthetic oligonucleotide: PDCD1-7056
gaggagagagggagccucuuc

SEQ ID NO: 20798 - RNA, 22 nt, Artificial Sequence
  Synthetic oligonucleotide: PDCD1-7057
cgaggagagagggagccucuuc

SEQ ID NO: 20799 - RNA, 23 nt, Artificial Sequence
  Synthetic oligonucleotide: PDCD1-7058
ucgaggagagagggagccucuuc

SEQ ID NO: 20800 - RNA, 24 nt, Artificial Sequence
  Synthetic oligonucleotide: PDCD1-7059
aucgaggagagagggagccucuuc

SEQ ID NO: 20801 - RNA, 18 nt, Artificial Sequence
  Synthetic oligonucleotide: PDCD1-7060
gccaggguggggugguuc

SEQ ID NO: 20802 - RNA, 19 nt, Artificial Sequence
  Synthetic oligonucleotide: PDCD1-7061
ugccaggguggggugguuc

SEQ ID NO: 20803 - RNA, 20 nt, Artificial Sequence
  Synthetic oligonucleotide: PDCD1-2808
gugccaggguggggugguuc

SEQ ID NO: 20804 - RNA, 21 nt, Artificial Sequence
  Synthetic oligonucleotide: PDCD1-7062
cgugccaggguggggugguuc

SEQ ID NO: 20805 - RNA, 22 nt, Artificial Sequence
  Synthetic oligonucleotide: PDCD1-7063
ucgugccaggguggggugguuc

SEQ ID NO: 20806 - RNA, 23 nt, Artificial Sequence
  Synthetic oligonucleotide: PDCD1-7064
cucgugccaggguggggugguuc

SEQ ID NO: 20807 - RNA, 24 nt, Artificial Sequence
  Synthetic oligonucleotide: PDCD1-7065
acucgugccaggguggggugguuc

SEQ ID NO: 20808 - RNA, 18 nt, Artificial Sequence
  Synthetic oligonucleotide: PDCD1-7066
acagcgaauggaaaacag

SEQ ID NO: 20809 - RNA, 19 nt, Artificial Sequence
  Synthetic oligonucleotide: PDCD1-7067
uacagcgaauggaaaacag

SEQ ID NO: 20810 - RNA, 20 nt, Artificial Sequence
  Synthetic oligonucleotide: PDCD1-1753
uuacagcgaauggaaaacag

SEQ ID NO: 20811 - RNA, 21 nt, Artificial Sequence
  Synthetic oligonucleotide: PDCD1-7068
auuacagcgaauggaaaacag

SEQ ID NO: 20812 - RNA, 22 nt, Artificial Sequence
  Synthetic oligonucleotide: PDCD1-7069
uauuacagcgaauggaaaacag

SEQ ID NO: 20813 - RNA, 23 nt, Artificial Sequence
  Synthetic oligonucleotide: PDCD1-7070
uuauuacagcgaauggaaaacag

SEQ ID NO: 20814 - RNA, 24 nt, Artificial Sequence
  Synthetic oligonucleotide: PDCD1-7071
uuuauuacagcgaauggaaaacag

SEQ ID NO: 20815 - RNA, 18 nt, Artificial Sequence
  Synthetic oligonucleotide: PDCD1-7072
cucccggaucgaggagag

SEQ ID NO: 20816 - RNA, 19 nt, Artificial Sequence
  Synthetic oligonucleotide: PDCD1-7073
ucucccggaucgaggagag

SEQ ID NO: 20817 - RNA, 20 nt, Artificial Sequence
  Synthetic oligonucleotide: PDCD1-2971
cucucccggaucgaggagag

SEQ ID NO: 20818 - RNA, 21 nt, Artificial Sequence
  Synthetic oligonucleotide: PDCD1-7074
acucucccggaucgaggagag

SEQ ID NO: 20819 - RNA, 22 nt, Artificial Sequence
  Synthetic oligonucleotide: PDCD1-7075
cacucucccggaucgaggagag

SEQ ID NO: 20820 - RNA, 23 nt, Artificial Sequence
  Synthetic oligonucleotide: PDCD1-7076
ucacucucccggaucgaggagag

SEQ ID NO: 20821 - RNA, 24 nt, Artificial Sequence
  Synthetic oligonucleotide: PDCD1-7077
cucacucucccggaucgaggagag

SEQ ID NO: 20822 - RNA, 18 nt, Artificial Sequence
  Synthetic oligonucleotide: PDCD1-7078
ucacucucccggaucgag

SEQ ID NO: 20823 - RNA, 19 nt, Artificial Sequence
  Synthetic oligonucleotide: PDCD1-7079
cucacucucccggaucgag

SEQ ID NO: 20824 - RNA, 20 nt, Artificial Sequence
  Synthetic oligonucleotide: PDCD1-1874
ccucacucucccggaucgag

SEQ ID NO: 20825 - RNA, 21 nt, Artificial Sequence
  Synthetic oligonucleotide: PDCD1-7080
gccucacucucccggaucgag

SEQ ID NO: 20826 - RNA, 22 nt, Artificial Sequence
  Synthetic oligonucleotide: PDCD1-7081
ggccucacucucccggaucgag

SEQ ID NO: 20827 - RNA, 23 nt, Artificial Sequence
  Synthetic oligonucleotide: PDCD1-7082
uggccucacucucccggaucgag

SEQ ID NO: 20828 - RNA, 24 nt, Artificial Sequence
  Synthetic oligonucleotide: PDCD1-7083
uuggccucacucucccggaucgag

SEQ ID NO: 20829 - RNA, 18 nt, Artificial Sequence
  Synthetic oligonucleotide: PDCD1-7084
uacgacgucaaaguuuag

SEQ ID NO: 20830 - RNA, 19 nt, Artificial Sequence
  Synthetic oligonucleotide: PDCD1-7085
uuacgacgucaaaguuuag

SEQ ID NO: 20831 - RNA, 20 nt, Artificial Sequence
  Synthetic oligonucleotide: PDCD1-1895
uuuacgacgucaaaguuuag

SEQ ID NO: 20832 - RNA, 21 nt, Artificial Sequence
  Synthetic oligonucleotide: PDCD1-7086
cuuuacgacgucaaaguuuag

SEQ ID NO: 20833 - RNA, 22 nt, Artificial Sequence
  Synthetic oligonucleotide: PDCD1-7087
gcuuuacgacgucaaaguuuag

SEQ ID NO: 20834 - RNA, 23 nt, Artificial Sequence
  Synthetic oligonucleotide: PDCD1-7088
ggcuuuacgacgucaaaguuuag

SEQ ID NO: 20835 - RNA, 24 nt, Artificial Sequence
  Synthetic oligonucleotide: PDCD1-7089
uggcuuuacgacgucaaaguuuag

SEQ ID NO: 20836 - RNA, 18 nt, Artificial Sequence
  Synthetic oligonucleotide: PDCD1-7090
gccugcaacagccugacg

SEQ ID NO: 20837 - RNA, 19 nt, Artificial Sequence
  Synthetic oligonucleotide: PDCD1-7091
ugccugcaacagccugacg

SEQ ID NO: 20838 - RNA, 20 nt, Artificial Sequence
  Synthetic oligonucleotide: PDCD1-2785
augccugcaacagccugacg

SEQ ID NO: 20839 - RNA, 21 nt, Artificial Sequence
  Synthetic oligonucleotide: PDCD1-7092
gaugccugcaacagccugacg

SEQ ID NO: 20840 - RNA, 22 nt, Artificial Sequence
  Synthetic oligonucleotide: PDCD1-7093
ugaugccugcaacagccugacg

SEQ ID NO: 20841 - RNA, 23 nt, Artificial Sequence
  Synthetic oligonucleotide: PDCD1-7094
gugaugccugcaacagccugacg

SEQ ID NO: 20842 - RNA, 24 nt, Artificial Sequence
  Synthetic oligonucleotide: PDCD1-7095
ugugaugccugcaacagccugacg

SEQ ID NO: 20843 - RNA, 18 nt, Artificial Sequence
  Synthetic oligonucleotide: PDCD1-7096
aaccccaaaccuuggccg

SEQ ID NO: 20844 - RNA, 19 nt, Artificial Sequence
  Synthetic oligonucleotide: PDCD1-7097
gaaccccaaaccuuggccg

SEQ ID NO: 20845 - RNA, 20 nt, Artificial Sequence
  Synthetic oligonucleotide: PDCD1-2223
agaaccccaaaccuuggccg

SEQ ID NO: 20846 - RNA, 21 nt, Artificial Sequence
  Synthetic oligonucleotide: PDCD1-7098
cagaaccccaaaccuuggccg

SEQ ID NO: 20847 - RNA, 22 nt, Artificial Sequence
  Synthetic oligonucleotide: PDCD1-7099
ccagaaccccaaaccuuggccg

SEQ ID NO: 20848 - RNA, 23 nt, Artificial Sequence
  Synthetic oligonucleotide: PDCD1-7100
gccagaaccccaaaccuuggccg

SEQ ID NO: 20849 - RNA, 24 nt, Artificial Sequence
  Synthetic oligonucleotide: PDCD1-7101
ggccagaaccccaaaccuuggccg

SEQ ID NO: 20850 - RNA, 18 nt, Artificial Sequence
  Synthetic oligonucleotide: PDCD1-7102
cccuguucagaccauccg

SEQ ID NO: 20851 - RNA, 19 nt, Artificial Sequence
  Synthetic oligonucleotide: PDCD1-7103
gcccuguucagaccauccg

SEQ ID NO: 20852 - RNA, 20 nt, Artificial Sequence
  Synthetic oligonucleotide: PDCD1-2979
agcccuguucagaccauccg

SEQ ID NO: 20853 - RNA, 21 nt, Artificial Sequence
  Synthetic oligonucleotide: PDCD1-7104
gagcccuguucagaccauccg

SEQ ID NO: 20854 - RNA, 22 nt, Artificial Sequence
  Synthetic oligonucleotide: PDCD1-7105
cgagcccuguucagaccauccg

SEQ ID NO: 20855 - RNA, 23 nt, Artificial Sequence
  Synthetic oligonucleotide: PDCD1-7106
ccgagcccuguucagaccauccg

SEQ ID NO: 20856 - RNA, 24 nt, Artificial Sequence
  Synthetic oligonucleotide: PDCD1-7107
cccgagcccuguucagaccauccg

SEQ ID NO: 20857 - RNA, 18 nt, Artificial Sequence
  Synthetic oligonucleotide: PDCD1-7108
ccucacucucccggaucg

SEQ ID NO: 20858 - RNA, 19 nt, Artificial Sequence
  Synthetic oligonucleotide: PDCD1-7109
gccucacucucccggaucg

SEQ ID NO: 20859 - RNA, 20 nt, Artificial Sequence
  Synthetic oligonucleotide: PDCD1-2972
ggccucacucucccggaucg

SEQ ID NO: 20860 - RNA, 21 nt, Artificial Sequence
  Synthetic oligonucleotide: PDCD1-7110
uggccucacucucccggaucg

SEQ ID NO: 20861 - RNA, 22 nt, Artificial Sequence
  Synthetic oligonucleotide: PDCD1-7111
uuggccucacucucccggaucg

SEQ ID NO: 20862 - RNA, 23 nt, Artificial Sequence
  Synthetic oligonucleotide: PDCD1-7112
cuuggccucacucucccggaucg

SEQ ID NO: 20863 - RNA, 24 nt, Artificial Sequence
  Synthetic oligonucleotide: PDCD1-7113
ccuuggccucacucucccggaucg

SEQ ID NO: 20864 - RNA, 18 nt, Artificial Sequence
  Synthetic oligonucleotide: PDCD1-7114
ccggcccaucccccuucg

SEQ ID NO: 20865 - RNA, 19 nt, Artificial Sequence
  Synthetic oligonucleotide: PDCD1-7115
cccggcccaucccccuucg

SEQ ID NO: 20866 - RNA, 20 nt, Artificial Sequence
  Synthetic oligonucleotide: PDCD1-1723
ucccggcccaucccccuucg

SEQ ID NO: 20867 - RNA, 21 nt, Artificial Sequence
  Synthetic oligonucleotide: PDCD1-7116
uucccggcccaucccccuucg

SEQ ID NO: 20868 - RNA, 22 nt, Artificial Sequence
  Synthetic oligonucleotide: PDCD1-7117
cuucccggcccaucccccuucg

SEQ ID NO: 20869 - RNA, 23 nt, Artificial Sequence
  Synthetic oligonucleotide: PDCD1-7118
ccuucccggcccaucccccuucg

SEQ ID NO: 20870 - RNA, 24 nt, Artificial Sequence
  Synthetic oligonucleotide: PDCD1-7119
gccuucccggcccaucccccuucg

SEQ ID NO: 20871 - RNA, 18 nt, Artificial Sequence
  Synthetic oligonucleotide: PDCD1-7120
acucgaguuuuccuaagg

SEQ ID NO: 20872 - RNA, 19 nt, Artificial Sequence
  Synthetic oligonucleotide: PDCD1-7121
cacucgaguuuuccuaagg

SEQ ID NO: 20873 - RNA, 20 nt, Artificial Sequence
  Synthetic oligonucleotide: PDCD1-1900
ucacucgaguuuuccuaagg

SEQ ID NO: 20874 - RNA, 21 nt, Artificial Sequence
  Synthetic oligonucleotide: PDCD1-7122
cucacucgaguuuuccuaagg

SEQ ID NO: 20875 - RNA, 22 nt, Artificial Sequence
  Synthetic oligonucleotide: PDCD1-7123
ccucacucgaguuuuccuaagg

SEQ ID NO: 20876 - RNA, 23 nt, Artificial Sequence
  Synthetic oligonucleotide: PDCD1-7124
uccucacucgaguuuuccuaagg

SEQ ID NO: 20877 - RNA, 24 nt, Artificial Sequence
  Synthetic oligonucleotide: PDCD1-7125
guccucacucgaguuuuccuaagg

SEQ ID NO: 20878 - RNA, 18 nt, Artificial Sequence
  Synthetic oligonucleotide: PDCD1-7126
cagcccacucgugccagg

SEQ ID NO: 20879 - RNA, 19 nt, Artificial Sequence
  Synthetic oligonucleotide: PDCD1-7127
ccagcccacucgugccagg

SEQ ID NO: 20880 - RNA, 20 nt, Artificial Sequence
  Synthetic oligonucleotide: PDCD1-1740
uccagcccacucgugccagg

SEQ ID NO: 20881 - RNA, 21 nt, Artificial Sequence
  Synthetic oligonucleotide: PDCD1-7128
cuccagcccacucgugccagg

SEQ ID NO: 20882 - RNA, 22 nt, Artificial Sequence
  Synthetic oligonucleotide: PDCD1-7129
ccuccagcccacucgugccagg

SEQ ID NO: 20883 - RNA, 23 nt, Artificial Sequence
  Synthetic oligonucleotide: PDCD1-7130
cccuccagcccacucgugccagg

SEQ ID NO: 20884 - RNA, 24 nt, Artificial Sequence
  Synthetic oligonucleotide: PDCD1-7131
gcccuccagcccacucgugccagg

SEQ ID NO: 20885 - RNA, 18 nt, Artificial Sequence
  Synthetic oligonucleotide: PDCD1-7132
ccugcaacagccugacgg

SEQ ID NO: 20886 - RNA, 19 nt, Artificial Sequence
  Synthetic oligonucleotide: PDCD1-7133
gccugcaacagccugacgg

SEQ ID NO: 20887 - RNA, 20 nt, Artificial Sequence
  Synthetic oligonucleotide: PDCD1-2786
ugccugcaacagccugacgg

SEQ ID NO: 20888 - RNA, 21 nt, Artificial Sequence
  Synthetic oligonucleotide: PDCD1-7134
augccugcaacagccugacgg

SEQ ID NO: 20889 - RNA, 22 nt, Artificial Sequence
  Synthetic oligonucleotide: PDCD1-7135
gaugccugcaacagccugacgg

SEQ ID NO: 20890 - RNA, 23 nt, Artificial Sequence
  Synthetic oligonucleotide: PDCD1-7136
ugaugccugcaacagccugacgg

SEQ ID NO: 20891 - RNA, 24 nt, Artificial Sequence
  Synthetic oligonucleotide: PDCD1-7137
gugaugccugcaacagccugacgg

SEQ ID NO: 20892 - RNA, 18 nt, Artificial Sequence
  Synthetic oligonucleotide: PDCD1-7138
aacagccugacggggggg

SEQ ID NO: 20893 - RNA, 19 nt, Artificial Sequence
  Synthetic oligonucleotide: PDCD1-7139
caacagccugacggggggg

SEQ ID NO: 20894 - RNA, 20 nt, Artificial Sequence
  Synthetic oligonucleotide: PDCD1-1732
gcaacagccugacggggggg

SEQ ID NO: 20895 - RNA, 21 nt, Artificial Sequence
  Synthetic oligonucleotide: PDCD1-7140
ugcaacagccugacggggggg

SEQ ID NO: 20896 - RNA, 22 nt, Artificial Sequence
  Synthetic oligonucleotide: PDCD1-7141
cugcaacagccugacggggggg

SEQ ID NO: 20897 - RNA, 23 nt, Artificial Sequence
  Synthetic oligonucleotide: PDCD1-7142
ccugcaacagccugacggggggg

SEQ ID NO: 20898 - RNA, 24 nt, Artificial Sequence
  Synthetic oligonucleotide: PDCD1-7143
gccugcaacagccugacggggggg

SEQ ID NO: 20899 - RNA, 18 nt, Artificial Sequence
  Synthetic oligonucleotide: PDCD1-7144
aguuuuccuaaggauggg

SEQ ID NO: 20900 - RNA, 19 nt, Artificial Sequence
  Synthetic oligonucleotide: PDCD1-7145
gaguuuuccuaaggauggg

SEQ ID NO: 20901 - RNA, 20 nt, Artificial Sequence
  Synthetic oligonucleotide: PDCD1-1898
cgaguuuuccuaaggauggg

SEQ ID NO: 20902 - RNA, 21 nt, Artificial Sequence
  Synthetic oligonucleotide: PDCD1-7146
ucgaguuuuccuaaggauggg

SEQ ID NO: 20903 - RNA, 22 nt, Artificial Sequence
  Synthetic oligonucleotide: PDCD1-7147
cucgaguuuuccuaaggauggg

SEQ ID NO: 20904 - RNA, 23 nt, Artificial Sequence
  Synthetic oligonucleotide: PDCD1-7148
acucgaguuuuccuaaggauggg

SEQ ID NO: 20905 - RNA, 24 nt, Artificial Sequence
  Synthetic oligonucleotide: PDCD1-7149
cacucgaguuuuccuaaggauggg

SEQ ID NO: 20906 - RNA, 18 nt, Artificial Sequence
  Synthetic oligonucleotide: PDCD1-7150
uccaggaucccuccuggg

SEQ ID NO: 20907 - RNA, 19 nt, Artificial Sequence
  Synthetic oligonucleotide: PDCD1-7151
cuccaggaucccuccuggg

SEQ ID NO: 20908 - RNA, 20 nt, Artificial Sequence
  Synthetic oligonucleotide: PDCD1-2986
ucuccaggaucccuccuggg

SEQ ID NO: 20909 - RNA, 21 nt, Artificial Sequence
  Synthetic oligonucleotide: PDCD1-7152
gucuccaggaucccuccuggg

SEQ ID NO: 20910 - RNA, 22 nt, Artificial Sequence
  Synthetic oligonucleotide: PDCD1-7153
ugucuccaggaucccuccuggg

SEQ ID NO: 20911 - RNA, 23 nt, Artificial Sequence
  Synthetic oligonucleotide: PDCD1-7154
cugucuccaggaucccuccuggg

SEQ ID NO: 20912 - RNA, 24 nt, Artificial Sequence
  Synthetic oligonucleotide: PDCD1-7155
ucugucuccaggaucccuccuggg

SEQ ID NO: 20913 - RNA, 18 nt, Artificial Sequence
  Synthetic oligonucleotide: PDCD1-7156
cuccaggaucccuccugg

SEQ ID NO: 20914 - RNA, 19 nt, Artificial Sequence
  Synthetic oligonucleotide: PDCD1-7157
ucuccaggaucccuccugg

SEQ ID NO: 20915 - RNA, 20 nt, Artificial Sequence
  Synthetic oligonucleotide: PDCD1-1889
gucuccaggaucccuccugg

SEQ ID NO: 20916 - RNA, 21 nt, Artificial Sequence
  Synthetic oligonucleotide: PDCD1-7158
ugucuccaggaucccuccugg

SEQ ID NO: 20917 - RNA, 22 nt, Artificial Sequence
  Synthetic oligonucleotide: PDCD1-7159
cugucuccaggaucccuccugg

SEQ ID NO: 20918 - RNA, 23 nt, Artificial Sequence
  Synthetic oligonucleotide: PDCD1-7160
ucugucuccaggaucccuccugg

SEQ ID NO: 20919 - RNA, 24 nt, Artificial Sequence
  Synthetic oligonucleotide: PDCD1-7161
uucugucuccaggaucccuccugg

SEQ ID NO: 20920 - RNA, 18 nt, Artificial Sequence
  Synthetic oligonucleotide: PDCD1-7162
uguucagaccauccgugg

SEQ ID NO: 20921 - RNA, 19 nt, Artificial Sequence
  Synthetic oligonucleotide: PDCD1-7163
cuguucagaccauccgugg

SEQ ID NO: 20922 - RNA, 20 nt, Artificial Sequence
  Synthetic oligonucleotide: PDCD1-2976
ccuguucagaccauccgugg

SEQ ID NO: 20923 - RNA, 21 nt, Artificial Sequence
  Synthetic oligonucleotide: PDCD1-7164
cccuguucagaccauccgugg

SEQ ID NO: 20924 - RNA, 22 nt, Artificial Sequence
  Synthetic oligonucleotide: PDCD1-7165
gcccuguucagaccauccgugg

SEQ ID NO: 20925 - RNA, 23 nt, Artificial Sequence
  Synthetic oligonucleotide: PDCD1-7166
agcccuguucagaccauccgugg

SEQ ID NO: 20926 - RNA, 24 nt, Artificial Sequence
  Synthetic oligonucleotide: PDCD1-7167
gagcccuguucagaccauccgugg

SEQ ID NO: 20927 - RNA, 18 nt, Artificial Sequence
  Synthetic oligonucleotide: PDCD1-7168
ggggggcuggggcggugg

SEQ ID NO: 20928 - RNA, 19 nt, Artificial Sequence
  Synthetic oligonucleotide: PDCD1-7169
gggggggcuggggcggugg

SEQ ID NO: 20929 - RNA, 20 nt, Artificial Sequence
  Synthetic oligonucleotide: PDCD1-1734
cgggggggcuggggcggugg

SEQ ID NO: 20930 - RNA, 21 nt, Artificial Sequence
  Synthetic oligonucleotide: PDCD1-7170
acgggggggcuggggcggugg

SEQ ID NO: 20931 - RNA, 22 nt, Artificial Sequence
  Synthetic oligonucleotide: PDCD1-7171
gacgggggggcuggggcggugg

SEQ ID NO: 20932 - RNA, 23 nt, Artificial Sequence
  Synthetic oligonucleotide: PDCD1-7172
ugacgggggggcuggggcggugg

SEQ ID NO: 20933 - RNA, 24 nt, Artificial Sequence
  Synthetic oligonucleotide: PDCD1-7173
cugacgggggggcuggggcggugg

SEQ ID NO: 20934 - RNA, 18 nt, Artificial Sequence
  Synthetic oligonucleotide: PDCD1-7174
gaugggaugagccccaug

SEQ ID NO: 20935 - RNA, 19 nt, Artificial Sequence
  Synthetic oligonucleotide: PDCD1-7175
ggaugggaugagccccaug

SEQ ID NO: 20936 - RNA, 20 nt, Artificial Sequence
  Synthetic oligonucleotide: PDCD1-2994
aggaugggaugagccccaug

SEQ ID NO: 20937 - RNA, 21 nt, Artificial Sequence
  Synthetic oligonucleotide: PDCD1-7176
aaggaugggaugagccccaug

SEQ ID NO: 20938 - RNA, 22 nt, Artificial Sequence
  Synthetic oligonucleotide: PDCD1-7177
uaaggaugggaugagccccaug

SEQ ID NO: 20939 - RNA, 23 nt, Artificial Sequence
  Synthetic oligonucleotide: PDCD1-7178
cuaaggaugggaugagccccaug

SEQ ID NO: 20940 - RNA, 24 nt, Artificial Sequence
  Synthetic oligonucleotide: PDCD1-7179
ccuaaggaugggaugagccccaug

SEQ ID NO: 20941 - RNA, 18 nt, Artificial Sequence
  Synthetic oligonucleotide: PDCD1-7180
gaugccugcaacagccug

SEQ ID NO: 20942 - RNA, 19 nt, Artificial Sequence
  Synthetic oligonucleotide: PDCD1-7181
ugaugccugcaacagccug

SEQ ID NO: 20943 - RNA, 20 nt, Artificial Sequence
  Synthetic oligonucleotide: PDCD1-1727
gugaugccugcaacagccug

SEQ ID NO: 20944 - RNA, 21 nt, Artificial Sequence
  Synthetic oligonucleotide: PDCD1-7182
ugugaugccugcaacagccug

SEQ ID NO: 20945 - RNA, 22 nt, Artificial Sequence
  Synthetic oligonucleotide: PDCD1-7183
gugugaugccugcaacagccug

SEQ ID NO: 20946 - RNA, 23 nt, Artificial Sequence
  Synthetic oligonucleotide: PDCD1-7184
cgugugaugccugcaacagccug

SEQ ID NO: 20947 - RNA, 24 nt, Artificial Sequence
  Synthetic oligonucleotide: PDCD1-7185
ccgugugaugccugcaacagccug

SEQ ID NO: 20948 - RNA, 18 nt, Artificial Sequence
  Synthetic oligonucleotide: PDCD1-7186
aaacugcugauauuagug

SEQ ID NO: 20949 - RNA, 19 nt, Artificial Sequence
  Synthetic oligonucleotide: PDCD1-7187
gaaacugcugauauuagug

SEQ ID NO: 20950 - RNA, 20 nt, Artificial Sequence
  Synthetic oligonucleotide: PDCD1-7188
ugaaacugcugauauuagug

SEQ ID NO: 20951 - RNA, 21 nt, Artificial Sequence
  Synthetic oligonucleotide: PDCD1-7189
augaaacugcugauauuagug

SEQ ID NO: 20952 - RNA, 22 nt, Artificial Sequence
  Synthetic oligonucleotide: PDCD1-7190
aaugaaacugcugauauuagug

SEQ ID NO: 20953 - RNA, 23 nt, Artificial Sequence
  Synthetic oligonucleotide: PDCD1-7191
aaaugaaacugcugauauuagug

SEQ ID NO: 20954 - RNA, 24 nt, Artificial Sequence
  Synthetic oligonucleotide: PDCD1-7192
gaaaugaaacugcugauauuagug

SEQ ID NO: 20955 - RNA, 18 nt, Artificial Sequence
  Synthetic oligonucleotide: PDCD1-7193
cuguucagaccauccgug

SEQ ID NO: 20956 - RNA, 19 nt, Artificial Sequence
  Synthetic oligonucleotide: PDCD1-7194
ccuguucagaccauccgug

SEQ ID NO: 20957 - RNA, 20 nt, Artificial Sequence
  Synthetic oligonucleotide: PDCD1-2977
cccuguucagaccauccgug

SEQ ID NO: 20958 - RNA, 21 nt, Artificial Sequence
  Synthetic oligonucleotide: PDCD1-7195
gcccuguucagaccauccgug

SEQ ID NO: 20959 - RNA, 22 nt, Artificial Sequence
  Synthetic oligonucleotide: PDCD1-7196
agcccuguucagaccauccgug

SEQ ID NO: 20960 - RNA, 23 nt, Artificial Sequence
  Synthetic oligonucleotide: PDCD1-7197
gagcccuguucagaccauccgug

SEQ ID NO: 20961 - RNA, 24 nt, Artificial Sequence
  Synthetic oligonucleotide: PDCD1-7198
cgagcccuguucagaccauccgug

SEQ ID NO: 20962 - RNA, 18 nt, Artificial Sequence
  Synthetic oligonucleotide: PDCD1-7199
aucuccuuguauucugug

SEQ ID NO: 20963 - RNA, 19 nt, Artificial Sequence
  Synthetic oligonucleotide: PDCD1-7200
uaucuccuuguauucugug

SEQ ID NO: 20964 - RNA, 20 nt, Artificial Sequence
  Synthetic oligonucleotide: PDCD1-1747
uuaucuccuuguauucugug

SEQ ID NO: 20965 - RNA, 21 nt, Artificial Sequence
  Synthetic oligonucleotide: PDCD1-7201
cuuaucuccuuguauucugug

SEQ ID NO: 20966 - RNA, 22 nt, Artificial Sequence
  Synthetic oligonucleotide: PDCD1-7202
gcuuaucuccuuguauucugug

SEQ ID NO: 20967 - RNA, 23 nt, Artificial Sequence
  Synthetic oligonucleotide: PDCD1-7203
ugcuuaucuccuuguauucugug

SEQ ID NO: 20968 - RNA, 24 nt, Artificial Sequence
  Synthetic oligonucleotide: PDCD1-7204
uugcuuaucuccuuguauucugug

SEQ ID NO: 20969 - RNA, 18 nt, Artificial Sequence
  Synthetic oligonucleotide: PDCD1-7205
ggaugggaugagccccau

SEQ ID NO: 20970 - RNA, 19 nt, Artificial Sequence
  Synthetic oligonucleotide: PDCD1-7206
aggaugggaugagccccau

SEQ ID NO: 20971 - RNA, 20 nt, Artificial Sequence
  Synthetic oligonucleotide: PDCD1-1897
aaggaugggaugagccccau

SEQ ID NO: 20972 - RNA, 21 nt, Artificial Sequence
  Synthetic oligonucleotide: PDCD1-7207
uaaggaugggaugagccccau

SEQ ID NO: 20973 - RNA, 22 nt, Artificial Sequence
  Synthetic oligonucleotide: PDCD1-7208
cuaaggaugggaugagccccau

SEQ ID NO: 20974 - RNA, 23 nt, Artificial Sequence
  Synthetic oligonucleotide: PDCD1-7209
ccuaaggaugggaugagccccau

SEQ ID NO: 20975 - RNA, 24 nt, Artificial Sequence
  Synthetic oligonucleotide: PDCD1-7210
uccuaaggaugggaugagccccau

SEQ ID NO: 20976 - RNA, 18 nt, Artificial Sequence
  Synthetic oligonucleotide: PDCD1-7211
cgguggcaggggcuggcu

SEQ ID NO: 20977 - RNA, 19 nt, Artificial Sequence
  Synthetic oligonucleotide: PDCD1-7212
gcgguggcaggggcuggcu

SEQ ID NO: 20978 - RNA, 20 nt, Artificial Sequence
  Synthetic oligonucleotide: PDCD1-1736
ggcgguggcaggggcuggcu

SEQ ID NO: 20979 - RNA, 21 nt, Artificial Sequence
  Synthetic oligonucleotide: PDCD1-7213
gggcgguggcaggggcuggcu

SEQ ID NO: 20980 - RNA, 22 nt, Artificial Sequence
  Synthetic oligonucleotide: PDCD1-7214
ggggcgguggcaggggcuggcu

SEQ ID NO: 20981 - RNA, 23 nt, Artificial Sequence
  Synthetic oligonucleotide: PDCD1-7215
uggggcgguggcaggggcuggcu

SEQ ID NO: 20982 - RNA, 24 nt, Artificial Sequence
  Synthetic oligonucleotide: PDCD1-7216
cuggggcgguggcaggggcuggcu

SEQ ID NO: 20983 - RNA, 18 nt, Artificial Sequence
  Synthetic oligonucleotide: PDCD1-7217
aaguguaccuguucgagu

SEQ ID NO: 20984 - RNA, 19 nt, Artificial Sequence
  Synthetic oligonucleotide: PDCD1-7218
aaaguguaccuguucgagu

SEQ ID NO: 20985 - RNA, 20 nt, Artificial Sequence
  Synthetic oligonucleotide: PDCD1-1892
caaaguguaccuguucgagu

SEQ ID NO: 20986 - RNA, 21 nt, Artificial Sequence
  Synthetic oligonucleotide: PDCD1-7219
ccaaaguguaccuguucgagu

SEQ ID NO: 20987 - RNA, 22 nt, Artificial Sequence
  Synthetic oligonucleotide: PDCD1-7220
uccaaaguguaccuguucgagu

SEQ ID NO: 20988 - RNA, 23 nt, Artificial Sequence
  Synthetic oligonucleotide: PDCD1-7221
auccaaaguguaccuguucgagu

SEQ ID NO: 20989 - RNA, 24 nt, Artificial Sequence
  Synthetic oligonucleotide: PDCD1-7222
uauccaaaguguaccuguucgagu

SEQ ID NO: 20990 - RNA, 18 nt, Artificial Sequence
  Synthetic oligonucleotide: PDCD1-7223
accccaaaccuuggccgu

SEQ ID NO: 20991 - RNA, 19 nt, Artificial Sequence
  Synthetic oligonucleotide: PDCD1-7224
aaccccaaaccuuggccgu

SEQ ID NO: 20992 - RNA, 20 nt, Artificial Sequence
  Synthetic oligonucleotide: PDCD1-2224
gaaccccaaaccuuggccgu

SEQ ID NO: 20993 - RNA, 21 nt, Artificial Sequence
  Synthetic oligonucleotide: PDCD1-7225
agaaccccaaaccuuggccgu

SEQ ID NO: 20994 - RNA, 22 nt, Artificial Sequence
  Synthetic oligonucleotide: PDCD1-7226
cagaaccccaaaccuuggccgu

SEQ ID NO: 20995 - RNA, 23 nt, Artificial Sequence
  Synthetic oligonucleotide: PDCD1-7227
ccagaaccccaaaccuuggccgu

SEQ ID NO: 20996 - RNA, 24 nt, Artificial Sequence
  Synthetic oligonucleotide: PDCD1-7228
gccagaaccccaaaccuuggccgu

SEQ ID NO: 20997 - RNA, 18 nt, Artificial Sequence
  Synthetic oligonucleotide: PDCD1-7229
ccuguucagaccauccgu

SEQ ID NO: 20998 - RNA, 19 nt, Artificial Sequence
  Synthetic oligonucleotide: PDCD1-7230
cccuguucagaccauccgu

SEQ ID NO: 20999 - RNA, 20 nt, Artificial Sequence
  Synthetic oligonucleotide: PDCD1-2978
gcccuguucagaccauccgu

SEQ ID NO: 21000 - RNA, 21 nt, Artificial Sequence
  Synthetic oligonucleotide: PDCD1-7231
agcccuguucagaccauccgu

SEQ ID NO: 21001 - RNA, 22 nt, Artificial Sequence
  Synthetic oligonucleotide: PDCD1-7232
gagcccuguucagaccauccgu

SEQ ID NO: 21002 - RNA, 23 nt, Artificial Sequence
  Synthetic oligonucleotide: PDCD1-7233
cgagcccuguucagaccauccgu

SEQ ID NO: 21003 - RNA, 24 nt, Artificial Sequence
  Synthetic oligonucleotide: PDCD1-7234
ccgagcccuguucagaccauccgu

SEQ ID NO: 21004 - RNA, 18 nt, Artificial Sequence
  Synthetic oligonucleotide: PDCD1-7235
ugccaggguggggugguu

SEQ ID NO: 21005 - RNA, 19 nt, Artificial Sequence
  Synthetic oligonucleotide: PDCD1-7236
gugccaggguggggugguu

SEQ ID NO: 21006 - RNA, 20 nt, Artificial Sequence
  Synthetic oligonucleotide: PDCD1-1742
cgugccaggguggggugguu

SEQ ID NO: 21007 - RNA, 21 nt, Artificial Sequence
  Synthetic oligonucleotide: PDCD1-7237
ucgugccaggguggggugguu

SEQ ID NO: 21008 - RNA, 22 nt, Artificial Sequence
  Synthetic oligonucleotide: PDCD1-7238
cucgugccaggguggggugguu

SEQ ID NO: 21009 - RNA, 23 nt, Artificial Sequence
  Synthetic oligonucleotide: PDCD1-7239
acucgugccaggguggggugguu

SEQ ID NO: 21010 - RNA, 24 nt, Artificial Sequence
  Synthetic oligonucleotide: PDCD1-7240
cacucgugccaggguggggugguu

SEQ ID NO: 21011 - RNA, 18 nt, Artificial Sequence
  Synthetic oligonucleotide: PDCD1-7241
gcuggcggcccggcguuu

SEQ ID NO: 21012 - RNA, 19 nt, Artificial Sequence
  Synthetic oligonucleotide: PDCD1-7242
ggcuggcggcccggcguuu

SEQ ID NO: 21013 - RNA, 20 nt, Artificial Sequence
  Synthetic oligonucleotide: PDCD1-1746
uggcuggcggcccggcguuu

SEQ ID NO: 21014 - RNA, 21 nt, Artificial Sequence
  Synthetic oligonucleotide: PDCD1-7243
cuggcuggcggcccggcguuu

SEQ ID NO: 21015 - RNA, 22 nt, Artificial Sequence
  Synthetic oligonucleotide: PDCD1-7244
ccuggcuggcggcccggcguuu

SEQ ID NO: 21016 - RNA, 23 nt, Artificial Sequence
  Synthetic oligonucleotide: PDCD1-7245
gccuggcuggcggcccggcguuu

SEQ ID NO: 21017 - RNA, 24 nt, Artificial Sequence
  Synthetic oligonucleotide: PDCD1-7246
ggccuggcuggcggcccggcguuu

SEQ ID NO: 21018 - RNA, 17 nt, Artificial Sequence
  Synthetic oligonucleotide: PDCD1-7247
ccccuuacccugagcug

SEQ ID NO: 21019 - RNA, 20 nt, Artificial Sequence
  Synthetic oligonucleotide: PDCD1-7248
cugccccuuacccugagcug

SEQ ID NO: 21020 - RNA, 17 nt, Artificial Sequence
  Synthetic oligonucleotide: PDCD1-7249
cggcccggcguuuguga

SEQ ID NO: 21021 - RNA, 17 nt, Artificial Sequence
  Synthetic oligonucleotide: PDCD1-7250
ccccaugugggacuaac

SEQ ID NO: 21022 - RNA, 17 nt, Artificial Sequence
  Synthetic oligonucleotide: PDCD1-7251
ugagaugcgucaggcuc

SEQ ID NO: 21023 - RNA, 17 nt, Artificial Sequence
  Synthetic oligonucleotide: PDCD1-2082
uggaagcuuugaggggg

SEQ ID NO: 21024 - RNA, 17 nt, Artificial Sequence
  Synthetic oligonucleotide: PDCD1-3107
ccaggaucccuccuggg

SEQ ID NO: 21025 - RNA, 17 nt, Artificial Sequence
  Synthetic oligonucleotide: PDCD1-7252
ccggcguuugugaaaug

SEQ ID NO: 21026 - RNA, 17 nt, Artificial Sequence
  Synthetic oligonucleotide: PDCD1-2080
gcccgccugggucucug

SEQ ID NO: 21027 - RNA, 17 nt, Artificial Sequence
  Synthetic oligonucleotide: PDCD1-7253
gcuaaucggcucccccu

SEQ ID NO: 21028 - RNA, 17 nt, Artificial Sequence
  Synthetic oligonucleotide: PDCD1-7254
gaggccauccacaaggu

SEQ ID NO: 21029 - RNA, 20 nt, Artificial Sequence
  Synthetic oligonucleotide: PDCD1-7255
uggcggcccggcguuuguga

SEQ ID NO: 21030 - RNA, 20 nt, Artificial Sequence
  Synthetic oligonucleotide: PDCD1-7256
gagccccaugugggacuaac

SEQ ID NO: 21031 - RNA, 20 nt, Artificial Sequence
  Synthetic oligonucleotide: PDCD1-7257
ugaugagaugcgucaggcuc

SEQ ID NO: 21032 - RNA, 20 nt, Artificial Sequence
  Synthetic oligonucleotide: PDCD1-2079
agguggaagcuuugaggggg

SEQ ID NO: 21033 - RNA, 20 nt, Artificial Sequence
  Synthetic oligonucleotide: PDCD1-2986
ucuccaggaucccuccuggg

SEQ ID NO: 21034 - RNA, 20 nt, Artificial Sequence
  Synthetic oligonucleotide: PDCD1-7258
ggcccggcguuugugaaaug

SEQ ID NO: 21035 - RNA, 20 nt, Artificial Sequence
  Synthetic oligonucleotide: PDCD1-2077
ugugcccgccugggucucug

SEQ ID NO: 21036 - RNA, 20 nt, Artificial Sequence
  Synthetic oligonucleotide: PDCD1-7259
auggcuaaucggcucccccu

SEQ ID NO: 21037 - RNA, 20 nt, Artificial Sequence
  Synthetic oligonucleotide: PDCD1-7260
ugugaggccauccacaaggu

SEQ ID NO: 21038 - RNA, 17 nt, Artificial Sequence
  Synthetic oligonucleotide: Ptpn6-34
cccagucgcaagaacca

SEQ ID NO: 21039 - RNA, 17 nt, Artificial Sequence
  Synthetic oligonucleotide: Ptpn6-9
guccugcaggaccgcga

SEQ ID NO: 21040 - RNA, 17 nt, Artificial Sequence
  Synthetic oligonucleotide: Ptpn6-52
aguucuggauccgaaua

SEQ ID NO: 21041 - RNA, 17 nt, Artificial Sequence
  Synthetic oligonucleotide: Ptpn6-1086
gcccgggacuuacccac

SEQ ID NO: 21042 - RNA, 17 nt, Artificial Sequence
  Synthetic oligonucleotide: Ptpn6-8
gcccagucgcaagaacc

SEQ ID NO: 21043 - RNA, 17 nt, Artificial Sequence
  Synthetic oligonucleotide: Ptpn6-1087
ggaccccgauggugccc

SEQ ID NO: 21044 - RNA, 17 nt, Artificial Sequence
  Synthetic oligonucleotide: Ptpn6-1258
ucccguggguaaguccc

SEQ ID NO: 21045 - RNA, 17 nt, Artificial Sequence
  Synthetic oligonucleotide: Ptpn6-2371
ugcgagguaaggcagcc

SEQ ID NO: 21046 - RNA, 17 nt, Artificial Sequence
  Synthetic oligonucleotide: Ptpn6-55
ugcgacugggccgagcc

SEQ ID NO: 21047 - RNA, 17 nt, Artificial Sequence
  Synthetic oligonucleotide: Ptpn6-2372
cgacuggccucaccgcc

SEQ ID NO: 21048 - RNA, 17 nt, Artificial Sequence
  Synthetic oligonucleotide: Ptpn6-44
acgcacaagaaacgucc

SEQ ID NO: 21049 - RNA, 17 nt, Artificial Sequence
  Synthetic oligonucleotide: Ptpn6-32
uguccacgguagcuucc

SEQ ID NO: 21050 - RNA, 17 nt, Artificial Sequence
  Synthetic oligonucleotide: Ptpn6-12
gaucggagcaguucagc

SEQ ID NO: 21051 - RNA, 17 nt, Artificial Sequence
  Synthetic oligonucleotide: Ptpn6-88
gcacgaagucuccaggc

SEQ ID NO: 21052 - RNA, 17 nt, Artificial Sequence
  Synthetic oligonucleotide: Ptpn6-126
ccgagaccucagugggc

SEQ ID NO: 21053 - RNA, 17 nt, Artificial Sequence
  Synthetic oligonucleotide: Ptpn6-51
ugccgucgcgguccugc

SEQ ID NO: 21054 - RNA, 17 nt, Artificial Sequence
  Synthetic oligonucleotide: Ptpn6-1261
aagucccgggcaccauc

SEQ ID NO: 21055 - RNA, 17 nt, Artificial Sequence
  Synthetic oligonucleotide: Ptpn6-29
uuucaccgagaccucag

SEQ ID NO: 21056 - RNA, 17 nt, Artificial Sequence
  Synthetic oligonucleotide: Ptpn6-2373
ccgaucccacuagugag

SEQ ID NO: 21057 - RNA, 17 nt, Artificial Sequence
  Synthetic oligonucleotide: Ptpn6-13
ggaugauggugccgucg

SEQ ID NO: 21058 - RNA, 17 nt, Artificial Sequence
  Synthetic oligonucleotide: Ptpn6-2374
gcucuccgucagguagg

SEQ ID NO: 21059 - RNA, 17 nt, Artificial Sequence
  Synthetic oligonucleotide: Ptpn6-2375
aaugcccgggguugcgg

SEQ ID NO: 21060 - RNA, 17 nt, Artificial Sequence
  Synthetic oligonucleotide: Ptpn6-49
aguucagcggguacuug

SEQ ID NO: 21061 - RNA, 17 nt, Artificial Sequence
  Synthetic oligonucleotide: Ptpn6-14
guucuggauccgaauau

SEQ ID NO: 21062 - RNA, 17 nt, Artificial Sequence
  Synthetic oligonucleotide: Ptpn6-54
cccugguucuugcgacu

SEQ ID NO: 21063 - RNA, 17 nt, Artificial Sequence
  Synthetic oligonucleotide: Ptpn6-2376
ucucggugaaaccaccu

SEQ ID NO: 21064 - RNA, 17 nt, Artificial Sequence
  Synthetic oligonucleotide: Ptpn6-30
uucaccgagaccucagu

SEQ ID NO: 21065 - RNA, 20 nt, Artificial Sequence
  Synthetic oligonucleotide: Ptpn6-61
gaugcagagacccugcucaa

SEQ ID NO: 21066 - RNA, 20 nt, Artificial Sequence
  Synthetic oligonucleotide: Ptpn6-17
cggcccagucgcaagaacca

SEQ ID NO: 21067 - RNA, 20 nt, Artificial Sequence
  Synthetic oligonucleotide: Ptpn6-71
gcccgccagacauguggcca

SEQ ID NO: 21068 - RNA, 20 nt, Artificial Sequence
  Synthetic oligonucleotide: Ptpn6-20
ucacgcacaagaaacgucca

SEQ ID NO: 21069 - RNA, 20 nt, Artificial Sequence
  Synthetic oligonucleotide: Ptpn6-92
cucaagggccgaggugucca

SEQ ID NO: 21070 - RNA, 20 nt, Artificial Sequence
  Synthetic oligonucleotide: Ptpn6-75
gacaccucggcccuugagca

SEQ ID NO: 21071 - RNA, 20 nt, Artificial Sequence
  Synthetic oligonucleotide: Ptpn6-24
cggguacuugagguggauga

SEQ ID NO: 21072 - RNA, 20 nt, Artificial Sequence
  Synthetic oligonucleotide: Ptpn6-26
cugaguucuggauccgaaua

SEQ ID NO: 21073 - RNA, 20 nt, Artificial Sequence
  Synthetic oligonucleotide: Ptpn6-1025
ggugcccgggacuuacccac

SEQ ID NO: 21074 - RNA, 20 nt, Artificial Sequence
  Synthetic oligonucleotide: Ptpn6-6
gucacccugguucuugcgac

SEQ ID NO: 21075 - RNA, 20 nt, Artificial Sequence
  Synthetic oligonucleotide: Ptpn6-16
ucggcccagucgcaagaacc

SEQ ID NO: 21076 - RNA, 20 nt, Artificial Sequence
  Synthetic oligonucleotide: Ptpn6-2377
gaggucucggugaaaccacc

SEQ ID NO: 21077 - RNA, 20 nt, Artificial Sequence
  Synthetic oligonucleotide: Ptpn6-1197
cugggaccccgauggugccc

SEQ ID NO: 21078 - RNA, 20 nt, Artificial Sequence
  Synthetic oligonucleotide: Ptpn6-973
cugucccguggguaaguccc

SEQ ID NO: 21079 - RNA, 20 nt, Artificial Sequence
  Synthetic oligonucleotide: Ptpn6-2378
augugcgagguaaggcagcc

SEQ ID NO: 21080 - RNA, 20 nt, Artificial Sequence
  Synthetic oligonucleotide: Ptpn6-28
ucuugcgacugggccgagcc

SEQ ID NO: 21081 - RNA, 20 nt, Artificial Sequence
  Synthetic oligonucleotide: Ptpn6-1187
acugggaccccgauggugcc

SEQ ID NO: 21082 - RNA, 20 nt, Artificial Sequence
  Synthetic oligonucleotide: Ptpn6-19
cucacgcacaagaaacgucc

SEQ ID NO: 21083 - RNA, 20 nt, Artificial Sequence
  Synthetic oligonucleotide: Ptpn6-93
agguguccacgguagcuucc

SEQ ID NO: 21084 - RNA, 20 nt, Artificial Sequence
  Synthetic oligonucleotide: Ptpn6-64
ggaguacuacacucagcagc

SEQ ID NO: 21085 - RNA, 20 nt, Artificial Sequence
  Synthetic oligonucleotide: Ptpn6-3
guuugcgacucugacagagc

SEQ ID NO: 21086 - RNA, 20 nt, Artificial Sequence
  Synthetic oligonucleotide: Ptpn6-7
ggacaccucggcccuugagc

SEQ ID NO: 21087 - RNA, 20 nt, Artificial Sequence
  Synthetic oligonucleotide: Ptpn6-116
aaagcacgaagucuccaggc

SEQ ID NO: 21088 - RNA, 20 nt, Artificial Sequence
  Synthetic oligonucleotide: Ptpn6-91
ucaccgagaccucagugggc

SEQ ID NO: 21089 - RNA, 20 nt, Artificial Sequence
  Synthetic oligonucleotide: Ptpn6-25
uggugccgucgcgguccugc

SEQ ID NO: 21090 - RNA, 20 nt, Artificial Sequence
  Synthetic oligonucleotide: Ptpn6-95
cauauucggauccagaacuc

SEQ ID NO: 21091 - RNA, 20 nt, Artificial Sequence
  Synthetic oligonucleotide: Ptpn6-2379
gugacuucucgcucuccguc

SEQ ID NO: 21092 - RNA, 20 nt, Artificial Sequence
  Synthetic oligonucleotide: Ptpn6-121
cauagaaauccccugaguuc

SEQ ID NO: 21093 - RNA, 20 nt, Artificial Sequence
  Synthetic oligonucleotide: Ptpn6-15
ugguuucaccgagaccucag

SEQ ID NO: 21094 - RNA, 20 nt, Artificial Sequence
  Synthetic oligonucleotide: Ptpn6-2380
gcuccgaucccacuagugag

SEQ ID NO: 21095 - RNA, 20 nt, Artificial Sequence
  Synthetic oligonucleotide: Ptpn6-73
gccgagccaggaagcuaccg

SEQ ID NO: 21096 - RNA, 20 nt, Artificial Sequence
  Synthetic oligonucleotide: Ptpn6-1151
uacagagagaugcugucccg

SEQ ID NO: 21097 - RNA, 20 nt, Artificial Sequence
  Synthetic oligonucleotide: Ptpn6-2381
ccacaucaaggucaugugcg

SEQ ID NO: 21098 - RNA, 20 nt, Artificial Sequence
  Synthetic oligonucleotide: Ptpn6-72
gguggaugauggugccgucg

SEQ ID NO: 21099 - RNA, 20 nt, Artificial Sequence
  Synthetic oligonucleotide: Ptpn6-2382
cucgcucuccgucagguagg

SEQ ID NO: 21100 - RNA, 20 nt, Artificial Sequence
  Synthetic oligonucleotide: Ptpn6-2383
ucucggugaaaccaccuggg

SEQ ID NO: 21101 - RNA, 20 nt, Artificial Sequence
  Synthetic oligonucleotide: Ptpn6-2384
ccucgcacaugaccuugaug

SEQ ID NO: 21102 - RNA, 20 nt, Artificial Sequence
  Synthetic oligonucleotide: Ptpn6-119
agcaguucagcggguacuug

SEQ ID NO: 21103 - RNA, 20 nt, Artificial Sequence
  Synthetic oligonucleotide: Ptpn6-122
ugaguucuggauccgaauau

SEQ ID NO: 21104 - RNA, 20 nt, Artificial Sequence
  Synthetic oligonucleotide: Ptpn6-27
ucacccugguucuugcgacu

SEQ ID NO: 21105 - RNA, 20 nt, Artificial Sequence
  Synthetic oligonucleotide: Ptpn6-74
ggaagcuaccguggacaccu

SEQ ID NO: 21106 - RNA, 20 nt, Artificial Sequence
  Synthetic oligonucleotide: Ptpn6-2385
aggucucggugaaaccaccu

SEQ ID NO: 21107 - RNA, 20 nt, Artificial Sequence
  Synthetic oligonucleotide: Ptpn6-21
aaacguccagggcucgcccu

SEQ ID NO: 21108 - RNA, 20 nt, Artificial Sequence
  Synthetic oligonucleotide: Ptpn6-94
uccacgguagcuuccuggcu

SEQ ID NO: 21109 - RNA, 20 nt, Artificial Sequence
  Synthetic oligonucleotide: Ptpn6-2386
ucgcucuccgucagguaggu

SEQ ID NO: 21110 - RNA, 20 nt, Artificial Sequence
  Synthetic oligonucleotide: Ptpn6-416
cucgcacaugaccuugaugu

SEQ ID NO: 21111 - RNA, 20 nt, Artificial Sequence
  Synthetic oligonucleotide: Ptpn6-1190
acgggacagcaucucucugu

SEQ ID NO: 21112 - RNA, 20 nt, Artificial Sequence
  Synthetic oligonucleotide: Ptpn6-2
gggaucaggugacccauauu

SEQ ID NO: 21113 - RNA, 17 nt, Artificial Sequence
  Synthetic oligonucleotide: Ptpn6-133
acgcugcugcaggccaa

SEQ ID NO: 21114 - RNA, 17 nt, Artificial Sequence
  Synthetic oligonucleotide: Ptpn6-76
gcagagacccugcucaa

SEQ ID NO: 21115 - RNA, 17 nt, Artificial Sequence
  Synthetic oligonucleotide: Ptpn6-2387
agguaagagugguacca

SEQ ID NO: 21116 - RNA, 17 nt, Artificial Sequence
  Synthetic oligonucleotide: Ptpn6-1322
ugcccgggacuuaccca

SEQ ID NO: 21117 - RNA, 17 nt, Artificial Sequence
  Synthetic oligonucleotide: Ptpn6-84
gcucagugaccagccca

SEQ ID NO: 21118 - RNA, 17 nt, Artificial Sequence
  Synthetic oligonucleotide: Ptpn6-1377
uagggagggggaagcca

SEQ ID NO: 21119 - RNA, 17 nt, Artificial Sequence
  Synthetic oligonucleotide: Ptpn6-82
gacgcugcugcaggcca

SEQ ID NO: 21120 - RNA, 17 nt, Artificial Sequence
  Synthetic oligonucleotide: Ptpn6-48
cgccagacauguggcca

SEQ ID NO: 21121 - RNA, 17 nt, Artificial Sequence
  Synthetic oligonucleotide: Ptpn6-45
cgcacaagaaacgucca

SEQ ID NO: 21122 - RNA, 17 nt, Artificial Sequence
  Synthetic oligonucleotide: Ptpn6-128
aagggccgaggugucca

SEQ ID NO: 21123 - RNA, 17 nt, Artificial Sequence
  Synthetic oligonucleotide: Ptpn6-129
uacuacacucagcagca

SEQ ID NO: 21124 - RNA, 17 nt, Artificial Sequence
  Synthetic oligonucleotide: Ptpn6-58
accucggcccuugagca

SEQ ID NO: 21125 - RNA, 17 nt, Artificial Sequence
  Synthetic oligonucleotide: Ptpn6-2388
ccugggcggcccaggca

SEQ ID NO: 21126 - RNA, 17 nt, Artificial Sequence
  Synthetic oligonucleotide: Ptpn6-2389
ugaucccccacccugca

SEQ ID NO: 21127 - RNA, 17 nt, Artificial Sequence
  Synthetic oligonucleotide: Ptpn6-2390
ccgccuggugcccugca

SEQ ID NO: 21128 - RNA, 17 nt, Artificial Sequence
  Synthetic oligonucleotide: Ptpn6-2391
cagggucacccacauca

SEQ ID NO: 21129 - RNA, 17 nt, Artificial Sequence
  Synthetic oligonucleotide: Ptpn6-37
uucggauccagaacuca

SEQ ID NO: 21130 - RNA, 17 nt, Artificial Sequence
  Synthetic oligonucleotide: Ptpn6-137
cccaggcuccccgcuca

SEQ ID NO: 21131 - RNA, 17 nt, Artificial Sequence
  Synthetic oligonucleotide: Ptpn6-127
ugcagagacccugcuca

SEQ ID NO: 21132 - RNA, 17 nt, Artificial Sequence
  Synthetic oligonucleotide: Ptpn6-2392
uagagaaggcagcguca

SEQ ID NO: 21133 - RNA, 17 nt, Artificial Sequence
  Synthetic oligonucleotide: Ptpn6-2393
gaaggcagcgucaggga

SEQ ID NO: 21134 - RNA, 17 nt, Artificial Sequence
  Synthetic oligonucleotide: Ptpn6-1105
gcaucucucuguaggga

SEQ ID NO: 21135 - RNA, 17 nt, Artificial Sequence
  Synthetic oligonucleotide: Ptpn6-40
ucuaugaccuguaugga

SEQ ID NO: 21136 - RNA, 17 nt, Artificial Sequence
  Synthetic oligonucleotide: Ptpn6-89
guacuugagguggauga

SEQ ID NO: 21137 - RNA, 17 nt, Artificial Sequence
  Synthetic oligonucleotide: Ptpn6-2394
ggggcccaccuaccuga

SEQ ID NO: 21138 - RNA, 17 nt, Artificial Sequence
  Synthetic oligonucleotide: Ptpn6-2395
ccacuagugagagguga

SEQ ID NO: 21139 - RNA, 17 nt, Artificial Sequence
  Synthetic oligonucleotide: Ptpn6-2396
aggucaugugcgaggua

SEQ ID NO: 21140 - RNA, 17 nt, Artificial Sequence
  Synthetic oligonucleotide: Ptpn6-77
gauuucuaugaccugua

SEQ ID NO: 21141 - RNA, 17 nt, Artificial Sequence
  Synthetic oligonucleotide: Ptpn6-1113
gacagcaucucucugua

SEQ ID NO: 21142 - RNA, 17 nt, Artificial Sequence
  Synthetic oligonucleotide: Ptpn6-53
acccugguucuugcgac

SEQ ID NO: 21143 - RNA, 17 nt, Artificial Sequence
  Synthetic oligonucleotide: Ptpn6-142
acuucuccccuccauac

SEQ ID NO: 21144 - RNA, 17 nt, Artificial Sequence
  Synthetic oligonucleotide: Ptpn6-2397
gucucggugaaaccacc

SEQ ID NO: 21145 - RNA, 17 nt, Artificial Sequence
  Synthetic oligonucleotide: Ptpn6-2398
ccacccugcagggcacc

SEQ ID NO: 21146 - RNA, 17 nt, Artificial Sequence
  Synthetic oligonucleotide: Ptpn6-2399
ugggccccccgcaaccc

SEQ ID NO: 21147 - RNA, 17 nt, Artificial Sequence
  Synthetic oligonucleotide: Ptpn6-144
agagcgagaagucaccc

SEQ ID NO: 21148 - RNA, 17 nt, Artificial Sequence
  Synthetic oligonucleotide: Ptpn6-2400
gggccccccgcaacccc

SEQ ID NO: 21149 - RNA, 17 nt, Artificial Sequence
  Synthetic oligonucleotide: Ptpn6-134
aggccaagggcgagccc

SEQ ID NO: 21150 - RNA, 17 nt, Artificial Sequence
  Synthetic oligonucleotide: Ptpn6-2401
cccugccugggccgccc

SEQ ID NO: 21151 - RNA, 17 nt, Artificial Sequence
  Synthetic oligonucleotide: Ptpn6-2402
aaccaccugggcggccc

SEQ ID NO: 21152 - RNA, 17 nt, Artificial Sequence
  Synthetic oligonucleotide: Ptpn6-136
cagcccaaggcuggccc

SEQ ID NO: 21153 - RNA, 17 nt, Artificial Sequence
  Synthetic oligonucleotide: Ptpn6-83
gagagccucagccagcc

SEQ ID NO: 21154 - RNA, 17 nt, Artificial Sequence
  Synthetic oligonucleotide: Ptpn6-138
acccugagcggggagcc

SEQ ID NO: 21155 - RNA, 17 nt, Artificial Sequence
  Synthetic oligonucleotide: Ptpn6-2403
gaggcucccccgccgcc

SEQ ID NO: 21156 - RNA, 17 nt, Artificial Sequence
  Synthetic oligonucleotide: Ptpn6-2404
cuccucacugcccugcc

SEQ ID NO: 21157 - RNA, 17 nt, Artificial Sequence
  Synthetic oligonucleotide: Ptpn6-1088
gggaccccgauggugcc

SEQ ID NO: 21158 - RNA, 17 nt, Artificial Sequence
  Synthetic oligonucleotide: Ptpn6-10
gaaagcacgaagucucc

SEQ ID NO: 21159 - RNA, 17 nt, Artificial Sequence
  Synthetic oligonucleotide: Ptpn6-964
gucccguggguaagucc

SEQ ID NO: 21160 - RNA, 17 nt, Artificial Sequence
  Synthetic oligonucleotide: Ptpn6-79
guacuacacucagcagc

SEQ ID NO: 21161 - RNA, 17 nt, Artificial Sequence
  Synthetic oligonucleotide: Ptpn6-42
ugcgacucugacagagc

SEQ ID NO: 21162 - RNA, 17 nt, Artificial Sequence
  Synthetic oligonucleotide: Ptpn6-2405
ugugggugacccugagc

SEQ ID NO: 21163 - RNA, 17 nt, Artificial Sequence
  Synthetic oligonucleotide: Ptpn6-57
caccucggcccuugagc

SEQ ID NO: 21164 - RNA, 17 nt, Artificial Sequence
  Synthetic oligonucleotide: Ptpn6-135
agugaccagcccaaggc

SEQ ID NO: 21165 - RNA, 17 nt, Artificial Sequence
  Synthetic oligonucleotide: Ptpn6-2406
accugggcggcccaggc

SEQ ID NO: 21166 - RNA, 17 nt, Artificial Sequence
  Synthetic oligonucleotide: Ptpn6-2407
uaaggcagccaggcggc

SEQ ID NO: 21167 - RNA, 17 nt, Artificial Sequence
  Synthetic oligonucleotide: Ptpn6-43
ccacaugucuggcgggc

SEQ ID NO: 21168 - RNA, 17 nt, Artificial Sequence
  Synthetic oligonucleotide: Ptpn6-140
cugggccagccuugggc

SEQ ID NO: 21169 - RNA, 17 nt, Artificial Sequence
  Synthetic oligonucleotide: Ptpn6-132
auggccacaugucuggc

SEQ ID NO: 21170 - RNA, 17 nt, Artificial Sequence
  Synthetic oligonucleotide: Ptpn6-2408
cugaucccccacccugc

SEQ ID NO: 21171 - RNA, 17 nt, Artificial Sequence
  Synthetic oligonucleotide: Ptpn6-2409
accgccuggugcccugc

SEQ ID NO: 21172 - RNA, 17 nt, Artificial Sequence
  Synthetic oligonucleotide: Ptpn6-80
gcagcaggguguccugc

SEQ ID NO: 21173 - RNA, 17 nt, Artificial Sequence
  Synthetic oligonucleotide: Ptpn6-81
ggcagagacgcugcugc

SEQ ID NO: 21174 - RNA, 17 nt, Artificial Sequence
  Synthetic oligonucleotide: Ptpn6-2410
cugcagggugggggauc

SEQ ID NO: 21175 - RNA, 17 nt, Artificial Sequence
  Synthetic oligonucleotide: Ptpn6-36
auucggauccagaacuc

SEQ ID NO: 21176 - RNA, 17 nt, Artificial Sequence
  Synthetic oligonucleotide: Ptpn6-85
gcccaggcuccccgcuc

SEQ ID NO: 21177 - RNA, 17 nt, Artificial Sequence
  Synthetic oligonucleotide: Ptpn6-2411
acuucucgcucuccguc

SEQ ID NO: 21178 - RNA, 17 nt, Artificial Sequence
  Synthetic oligonucleotide: Ptpn6-2412
cuagagaaggcagcguc

SEQ ID NO: 21179 - RNA, 17 nt, Artificial Sequence
  Synthetic oligonucleotide: Ptpn6-130
uaccauggccacauguc

SEQ ID NO: 21180 - RNA, 17 nt, Artificial Sequence
  Synthetic oligonucleotide: Ptpn6-143
agaaauccccugaguuc

SEQ ID NO: 21181 - RNA, 17 nt, Artificial Sequence
  Synthetic oligonucleotide: Ptpn6-38
ucggauccagaacucag

SEQ ID NO: 21182 - RNA, 17 nt, Artificial Sequence
  Synthetic oligonucleotide: Ptpn6-11
ggaucggagcaguucag

SEQ ID NO: 21183 - RNA, 17 nt, Artificial Sequence
  Synthetic oligonucleotide: Ptpn6-2413
gucagggaagguaagag

SEQ ID NO: 21184 - RNA, 17 nt, Artificial Sequence
  Synthetic oligonucleotide: Ptpn6-1357
caucucucuguagggag

SEQ ID NO: 21185 - RNA, 17 nt, Artificial Sequence
  Synthetic oligonucleotide: Ptpn6-41
cuaugaccuguauggag

SEQ ID NO: 21186 - RNA, 17 nt, Artificial Sequence
  Synthetic oligonucleotide: Ptpn6-2414
augugggugacccugag

SEQ ID NO: 21187 - RNA, 17 nt, Artificial Sequence
  Synthetic oligonucleotide: Ptpn6-2415
cccucaccucucacuag

SEQ ID NO: 21188 - RNA, 17 nt, Artificial Sequence
  Synthetic oligonucleotide: Ptpn6-90
gagccaggaagcuaccg

SEQ ID NO: 21189 - RNA, 17 nt, Artificial Sequence
  Synthetic oligonucleotide: Ptpn6-1281
agagagaugcugucccg

SEQ ID NO: 21190 - RNA, 17 nt, Artificial Sequence
  Synthetic oligonucleotide: Ptpn6-31
acccugcucaagggccg

SEQ ID NO: 21191 - RNA, 17 nt, Artificial Sequence
  Synthetic oligonucleotide: Ptpn6-2416
gugggugacccugagcg

SEQ ID NO: 21192 - RNA, 17 nt, Artificial Sequence
  Synthetic oligonucleotide: Ptpn6-2417
aaggcagccaggcggcg

SEQ ID NO: 21193 - RNA, 17 nt, Artificial Sequence
  Synthetic oligonucleotide: Ptpn6-2418
caucaaggucaugugcg

SEQ ID NO: 21194 - RNA, 17 nt, Artificial Sequence
  Synthetic oligonucleotide: Ptpn6-1259
agucccgggcaccaucg

SEQ ID NO: 21195 - RNA, 17 nt, Artificial Sequence
  Synthetic oligonucleotide: Ptpn6-2419
cccugcagggcaccagg

SEQ ID NO: 21196 - RNA, 17 nt, Artificial Sequence
  Synthetic oligonucleotide: Ptpn6-2420
ugccugggccgcccagg

SEQ ID NO: 21197 - RNA, 17 nt, Artificial Sequence
  Synthetic oligonucleotide: Ptpn6-2421
gagguaaggcagccagg

SEQ ID NO: 21198 - RNA, 17 nt, Artificial Sequence
  Synthetic oligonucleotide: Ptpn6-1351
aucucucuguagggagg

SEQ ID NO: 21199 - RNA, 17 nt, Artificial Sequence
  Synthetic oligonucleotide: Ptpn6-2422
caggcagggcagugagg

SEQ ID NO: 21200 - RNA, 17 nt, Artificial Sequence
  Synthetic oligonucleotide: Ptpn6-50
ucagcggguacuugagg

SEQ ID NO: 21201 - RNA, 17 nt, Artificial Sequence
  Synthetic oligonucleotide: Ptpn6-2423
guaaggcagccaggcgg

SEQ ID NO: 21202 - RNA, 17 nt, Artificial Sequence
  Synthetic oligonucleotide: Ptpn6-2424
aggcagccaggcggcgg

SEQ ID NO: 21203 - RNA, 17 nt, Artificial Sequence
  Synthetic oligonucleotide: Ptpn6-2425
ccuggugcccugcaggg

SEQ ID NO: 21204 - RNA, 17 nt, Artificial Sequence
  Synthetic oligonucleotide: Ptpn6-1347
agcaucucucuguaggg

SEQ ID NO: 21205 - RNA, 17 nt, Artificial Sequence
  Synthetic oligonucleotide: Ptpn6-2426
augcccgggguugcggg

SEQ ID NO: 21206 - RNA, 17 nt, Artificial Sequence
  Synthetic oligonucleotide: Ptpn6-2427
cggugaaaccaccuggg

SEQ ID NO: 21207 - RNA, 17 nt, Artificial Sequence
  Synthetic oligonucleotide: Ptpn6-39
uucuaugaccuguaugg

SEQ ID NO: 21208 - RNA, 17 nt, Artificial Sequence
  Synthetic oligonucleotide: Ptpn6-78
gacucugacagagcugg

SEQ ID NO: 21209 - RNA, 17 nt, Artificial Sequence
  Synthetic oligonucleotide: Ptpn6-131
cauggccacaugucugg

SEQ ID NO: 21210 - RNA, 17 nt, Artificial Sequence
  Synthetic oligonucleotide: Ptpn6-2428
ggugcccugcagggugg

SEQ ID NO: 21211 - RNA, 17 nt, Artificial Sequence
  Synthetic oligonucleotide: Ptpn6-47
ccugcccgccagacaug

SEQ ID NO: 21212 - RNA, 17 nt, Artificial Sequence
  Synthetic oligonucleotide: Ptpn6-499
cgcacaugaccuugaug

SEQ ID NO: 21213 - RNA, 17 nt, Artificial Sequence
  Synthetic oligonucleotide: Ptpn6-145
cugcauccagcccacug

SEQ ID NO: 21214 - RNA, 17 nt, Artificial Sequence
  Synthetic oligonucleotide: Ptpn6-141
agucuccaggcuggcug

SEQ ID NO: 21215 - RNA, 17 nt, Artificial Sequence
  Synthetic oligonucleotide: Ptpn6-2429
gcccaggcagggcagug

SEQ ID NO: 21216 - RNA, 17 nt, Artificial Sequence
  Synthetic oligonucleotide: Ptpn6-2430
cccacuagugagaggug

SEQ ID NO: 21217 - RNA, 17 nt, Artificial Sequence
  Synthetic oligonucleotide: Ptpn6-2431
cagggcaccaggcggug

SEQ ID NO: 21218 - RNA, 17 nt, Artificial Sequence
  Synthetic oligonucleotide: Ptpn6-2432
uggugcccugcagggug

SEQ ID NO: 21219 - RNA, 17 nt, Artificial Sequence
  Synthetic oligonucleotide: Ptpn6-2433
ugggaauggcgggggug

SEQ ID NO: 21220 - RNA, 17 nt, Artificial Sequence
  Synthetic oligonucleotide: Ptpn6-1260
uaagucccgggcaccau

SEQ ID NO: 21221 - RNA, 17 nt, Artificial Sequence
  Synthetic oligonucleotide: Ptpn6-2434
ccucucacuagugggau

SEQ ID NO: 21222 - RNA, 17 nt, Artificial Sequence
  Synthetic oligonucleotide: Ptpn6-56
agcuaccguggacaccu

SEQ ID NO: 21223 - RNA, 17 nt, Artificial Sequence
  Synthetic oligonucleotide: Ptpn6-46
cguccagggcucgcccu

SEQ ID NO: 21224 - RNA, 17 nt, Artificial Sequence
  Synthetic oligonucleotide: Ptpn6-86
ggagccugggccagccu

SEQ ID NO: 21225 - RNA, 17 nt, Artificial Sequence
  Synthetic oligonucleotide: Ptpn6-139
cccugagcggggagccu

SEQ ID NO: 21226 - RNA, 17 nt, Artificial Sequence
  Synthetic oligonucleotide: Ptpn6-2435
uccucacugcccugccu

SEQ ID NO: 21227 - RNA, 17 nt, Artificial Sequence
  Synthetic oligonucleotide: Ptpn6-33
acgguagcuuccuggcu

SEQ ID NO: 21228 - RNA, 17 nt, Artificial Sequence
  Synthetic oligonucleotide: Ptpn6-146
ccagcccacugaggucu

SEQ ID NO: 21229 - RNA, 17 nt, Artificial Sequence
  Synthetic oligonucleotide: Ptpn6-2436
ccucaccucucacuagu

SEQ ID NO: 21230 - RNA, 17 nt, Artificial Sequence
  Synthetic oligonucleotide: Ptpn6-1065
gagagaugcugucccgu

SEQ ID NO: 21231 - RNA, 17 nt, Artificial Sequence
  Synthetic oligonucleotide: Ptpn6-2437
cucgcucuccgucaggu

SEQ ID NO: 21232 - RNA, 17 nt, Artificial Sequence
  Synthetic oligonucleotide: Ptpn6-2438
cucuccgucagguaggu

SEQ ID NO: 21233 - RNA, 17 nt, Artificial Sequence
  Synthetic oligonucleotide: Ptpn6-2439
cuggugcccugcagggu

SEQ ID NO: 21234 - RNA, 17 nt, Artificial Sequence
  Synthetic oligonucleotide: Ptpn6-500
gcacaugaccuugaugu

SEQ ID NO: 21235 - RNA, 17 nt, Artificial Sequence
  Synthetic oligonucleotide: Ptpn6-1112
ggacagcaucucucugu

SEQ ID NO: 21236 - RNA, 17 nt, Artificial Sequence
  Synthetic oligonucleotide: Ptpn6-35
aucaggugacccauauu

SEQ ID NO: 21237 - RNA, 17 nt, Artificial Sequence
  Synthetic oligonucleotide: Ptpn6-87
gagccugggccagccuu

SEQ ID NO: 21238 - RNA, 20 nt, Artificial Sequence
  Synthetic oligonucleotide: Ptpn6-67
gagacgcugcugcaggccaa

SEQ ID NO: 21239 - RNA, 20 nt, Artificial Sequence
  Synthetic oligonucleotide: Ptpn6-2440
ggaagguaagagugguacca

SEQ ID NO: 21240 - RNA, 20 nt, Artificial Sequence
  Synthetic oligonucleotide: Ptpn6-995
uggugcccgggacuuaccca

SEQ ID NO: 21241 - RNA, 20 nt, Artificial Sequence
  Synthetic oligonucleotide: Ptpn6-108
ugugcucagugaccagccca

SEQ ID NO: 21242 - RNA, 20 nt, Artificial Sequence
  Synthetic oligonucleotide: Ptpn6-1245
cuguagggagggggaagcca

SEQ ID NO: 21243 - RNA, 20 nt, Artificial Sequence
  Synthetic oligonucleotide: Ptpn6-105
agagacgcugcugcaggcca

SEQ ID NO: 21244 - RNA, 20 nt, Artificial Sequence
  Synthetic oligonucleotide: Ptpn6-4
gaguacuacacucagcagca

SEQ ID NO: 21245 - RNA, 20 nt, Artificial Sequence
  Synthetic oligonucleotide: Ptpn6-2441
ccaccugggcggcccaggca

SEQ ID NO: 21246 - RNA, 20 nt, Artificial Sequence
  Synthetic oligonucleotide: Ptpn6-2442
accugaucccccacccugca

SEQ ID NO: 21247 - RNA, 20 nt, Artificial Sequence
  Synthetic oligonucleotide: Ptpn6-2443
ucaccgccuggugcccugca

SEQ ID NO: 21248 - RNA, 20 nt, Artificial Sequence
  Synthetic oligonucleotide: Ptpn6-2444
gcucagggucacccacauca

SEQ ID NO: 21249 - RNA, 20 nt, Artificial Sequence
  Synthetic oligonucleotide: Ptpn6-96
auauucggauccagaacuca

SEQ ID NO: 21250 - RNA, 20 nt, Artificial Sequence
  Synthetic oligonucleotide: Ptpn6-111
uggcccaggcuccccgcuca

SEQ ID NO: 21251 - RNA, 20 nt, Artificial Sequence
  Synthetic oligonucleotide: Ptpn6-60
ggaugcagagacccugcuca

SEQ ID NO: 21252 - RNA, 20 nt, Artificial Sequence
  Synthetic oligonucleotide: Ptpn6-65
gguguccugcaggaccgcga

SEQ ID NO: 21253 - RNA, 20 nt, Artificial Sequence
  Synthetic oligonucleotide: Ptpn6-2445
agagaaggcagcgucaggga

SEQ ID NO: 21254 - RNA, 20 nt, Artificial Sequence
  Synthetic oligonucleotide: Ptpn6-1215
acagcaucucucuguaggga

SEQ ID NO: 21255 - RNA, 20 nt, Artificial Sequence
  Synthetic oligonucleotide: Ptpn6-98
auuucuaugaccuguaugga

SEQ ID NO: 21256 - RNA, 20 nt, Artificial Sequence
  Synthetic oligonucleotide: Ptpn6-2446
cggggggcccaccuaccuga

SEQ ID NO: 21257 - RNA, 20 nt, Artificial Sequence
  Synthetic oligonucleotide: Ptpn6-2447
aucccacuagugagagguga

SEQ ID NO: 21258 - RNA, 20 nt, Artificial Sequence
  Synthetic oligonucleotide: Ptpn6-2448
ucaaggucaugugcgaggua

SEQ ID NO: 21259 - RNA, 20 nt, Artificial Sequence
  Synthetic oligonucleotide: Ptpn6-59
ggggauuucuaugaccugua

SEQ ID NO: 21260 - RNA, 20 nt, Artificial Sequence
  Synthetic oligonucleotide: Ptpn6-987
cgggacagcaucucucugua

SEQ ID NO: 21261 - RNA, 20 nt, Artificial Sequence
  Synthetic oligonucleotide: Ptpn6-120
caaacuucuccccuccauac

SEQ ID NO: 21262 - RNA, 20 nt, Artificial Sequence
  Synthetic oligonucleotide: Ptpn6-2449
cccccacccugcagggcacc

SEQ ID NO: 21263 - RNA, 20 nt, Artificial Sequence
  Synthetic oligonucleotide: Ptpn6-2450
aggugggccccccgcaaccc

SEQ ID NO: 21264 - RNA, 20 nt, Artificial Sequence
  Synthetic oligonucleotide: Ptpn6-123
cggagagcgagaagucaccc

SEQ ID NO: 21265 - RNA, 20 nt, Artificial Sequence
  Synthetic oligonucleotide: Ptpn6-2451
ggugggccccccgcaacccc

SEQ ID NO: 21266 - RNA, 20 nt, Artificial Sequence
  Synthetic oligonucleotide: Ptpn6-106
ugcaggccaagggcgagccc

SEQ ID NO: 21267 - RNA, 20 nt, Artificial Sequence
  Synthetic oligonucleotide: Ptpn6-2452
cugcccugccugggccgccc

SEQ ID NO: 21268 - RNA, 20 nt, Artificial Sequence
  Synthetic oligonucleotide: Ptpn6-2453
ugaaaccaccugggcggccc

SEQ ID NO: 21269 - RNA, 20 nt, Artificial Sequence
  Synthetic oligonucleotide: Ptpn6-68
gaccagcccaaggcuggccc

SEQ ID NO: 21270 - RNA, 20 nt, Artificial Sequence
  Synthetic oligonucleotide: Ptpn6-107
cgugagagccucagccagcc

SEQ ID NO: 21271 - RNA, 20 nt, Artificial Sequence
  Synthetic oligonucleotide: Ptpn6-69
gugacccugagcggggagcc

SEQ ID NO: 21272 - RNA, 20 nt, Artificial Sequence
  Synthetic oligonucleotide: Ptpn6-115
acagaaagcacgaagucucc

SEQ ID NO: 21273 - RNA, 20 nt, Artificial Sequence
  Synthetic oligonucleotide: Ptpn6-1007
gcugucccguggguaagucc

SEQ ID NO: 21274 - RNA, 20 nt, Artificial Sequence
  Synthetic oligonucleotide: Ptpn6-22
ugggaucggagcaguucagc

SEQ ID NO: 21275 - RNA, 20 nt, Artificial Sequence
  Synthetic oligonucleotide: Ptpn6-2454
ugaugugggugacccugagc

SEQ ID NO: 21276 - RNA, 20 nt, Artificial Sequence
  Synthetic oligonucleotide: Ptpn6-109
cucagugaccagcccaaggc

SEQ ID NO: 21277 - RNA, 20 nt, Artificial Sequence
  Synthetic oligonucleotide: Ptpn6-2455
accaccugggcggcccaggc

SEQ ID NO: 21278 - RNA, 20 nt, Artificial Sequence
  Synthetic oligonucleotide: Ptpn6-2456
agguaaggcagccaggcggc

SEQ ID NO: 21279 - RNA, 20 nt, Artificial Sequence
  Synthetic oligonucleotide: Ptpn6-104
uggccacaugucuggcgggc

SEQ ID NO: 21280 - RNA, 20 nt, Artificial Sequence
  Synthetic oligonucleotide: Ptpn6-114
agccugggccagccuugggc

SEQ ID NO: 21281 - RNA, 20 nt, Artificial Sequence
  Synthetic oligonucleotide: Ptpn6-103
accauggccacaugucuggc

SEQ ID NO: 21282 - RNA, 20 nt, Artificial Sequence
  Synthetic oligonucleotide: Ptpn6-2457
caccugaucccccacccugc

SEQ ID NO: 21283 - RNA, 20 nt, Artificial Sequence
  Synthetic oligonucleotide: Ptpn6-2458
cucaccgccuggugcccugc

SEQ ID NO: 21284 - RNA, 20 nt, Artificial Sequence
  Synthetic oligonucleotide: Ptpn6-101
ucagcagcaggguguccugc

SEQ ID NO: 21285 - RNA, 20 nt, Artificial Sequence
  Synthetic oligonucleotide: Ptpn6-66
gcaggcagagacgcugcugc

SEQ ID NO: 21286 - RNA, 20 nt, Artificial Sequence
  Synthetic oligonucleotide: Ptpn6-955
gguaagucccgggcaccauc

SEQ ID NO: 21287 - RNA, 20 nt, Artificial Sequence
  Synthetic oligonucleotide: Ptpn6-2459
gcccugcagggugggggauc

SEQ ID NO: 21288 - RNA, 20 nt, Artificial Sequence
  Synthetic oligonucleotide: Ptpn6-110
cuggcccaggcuccccgcuc

SEQ ID NO: 21289 - RNA, 20 nt, Artificial Sequence
  Synthetic oligonucleotide: Ptpn6-102
ugguaccauggccacauguc

SEQ ID NO: 21290 - RNA, 20 nt, Artificial Sequence
  Synthetic oligonucleotide: Ptpn6-97
uauucggauccagaacucag

SEQ ID NO: 21291 - RNA, 20 nt, Artificial Sequence
  Synthetic oligonucleotide: Ptpn6-5
gugggaucggagcaguucag

SEQ ID NO: 21292 - RNA, 20 nt, Artificial Sequence
  Synthetic oligonucleotide: Ptpn6-2460
agcgucagggaagguaagag

SEQ ID NO: 21293 - RNA, 20 nt, Artificial Sequence
  Synthetic oligonucleotide: Ptpn6-1228
cagcaucucucuguagggag

SEQ ID NO: 21294 - RNA, 20 nt, Artificial Sequence
  Synthetic oligonucleotide: Ptpn6-99
uuucuaugaccuguauggag

SEQ ID NO: 21295 - RNA, 20 nt, Artificial Sequence
  Synthetic oligonucleotide: Ptpn6-2461
uugaugugggugacccugag

SEQ ID NO: 21296 - RNA, 20 nt, Artificial Sequence
  Synthetic oligonucleotide: Ptpn6-2462
gagcccucaccucucacuag

SEQ ID NO: 21297 - RNA, 20 nt, Artificial Sequence
  Synthetic oligonucleotide: Ptpn6-62
gagacccugcucaagggccg

SEQ ID NO: 21298 - RNA, 20 nt, Artificial Sequence
  Synthetic oligonucleotide: Ptpn6-2463
gaugugggugacccugagcg

SEQ ID NO: 21299 - RNA, 20 nt, Artificial Sequence
  Synthetic oligonucleotide: Ptpn6-2464
gguaaggcagccaggcggcg

SEQ ID NO: 21300 - RNA, 20 nt, Artificial Sequence
  Synthetic oligonucleotide: Ptpn6-1005
guaagucccgggcaccaucg

SEQ ID NO: 21301 - RNA, 20 nt, Artificial Sequence
  Synthetic oligonucleotide: Ptpn6-2465
ccacccugcagggcaccagg

SEQ ID NO: 21302 - RNA, 20 nt, Artificial Sequence
  Synthetic oligonucleotide: Ptpn6-2466
cccugccugggccgcccagg

SEQ ID NO: 21303 - RNA, 20 nt, Artificial Sequence
  Synthetic oligonucleotide: Ptpn6-2467
ugcgagguaaggcagccagg

SEQ ID NO: 21304 - RNA, 20 nt, Artificial Sequence
  Synthetic oligonucleotide: Ptpn6-1222
agcaucucucuguagggagg

SEQ ID NO: 21305 - RNA, 20 nt, Artificial Sequence
  Synthetic oligonucleotide: Ptpn6-2468
gcccaggcagggcagugagg

SEQ ID NO: 21306 - RNA, 20 nt, Artificial Sequence
  Synthetic oligonucleotide: Ptpn6-23
aguucagcggguacuugagg

SEQ ID NO: 21307 - RNA, 20 nt, Artificial Sequence
  Synthetic oligonucleotide: Ptpn6-2469
gagguaaggcagccaggcgg

SEQ ID NO: 21308 - RNA, 20 nt, Artificial Sequence
  Synthetic oligonucleotide: Ptpn6-2470
guaaggcagccaggcggcgg

SEQ ID NO: 21309 - RNA, 20 nt, Artificial Sequence
  Synthetic oligonucleotide: Ptpn6-2471
ccgccuggugcccugcaggg

SEQ ID NO: 21310 - RNA, 20 nt, Artificial Sequence
  Synthetic oligonucleotide: Ptpn6-1043
gacagcaucucucuguaggg

SEQ ID NO: 21311 - RNA, 20 nt, Artificial Sequence
  Synthetic oligonucleotide: Ptpn6-63
gauuucuaugaccuguaugg

SEQ ID NO: 21312 - RNA, 20 nt, Artificial Sequence
  Synthetic oligonucleotide: Ptpn6-100
ugcgacucugacagagcugg

SEQ ID NO: 21313 - RNA, 20 nt, Artificial Sequence
  Synthetic oligonucleotide: Ptpn6-18
uaccauggccacaugucugg

SEQ ID NO: 21314 - RNA, 20 nt, Artificial Sequence
  Synthetic oligonucleotide: Ptpn6-2472
ccuggugcccugcagggugg

SEQ ID NO: 21315 - RNA, 20 nt, Artificial Sequence
  Synthetic oligonucleotide: Ptpn6-118
cugccugcccgccagacaug

SEQ ID NO: 21316 - RNA, 20 nt, Artificial Sequence
  Synthetic oligonucleotide: Ptpn6-124
ucucugcauccagcccacug

SEQ ID NO: 21317 - RNA, 20 nt, Artificial Sequence
  Synthetic oligonucleotide: Ptpn6-117
cgaagucuccaggcuggcug

SEQ ID NO: 21318 - RNA, 20 nt, Artificial Sequence
  Synthetic oligonucleotide: Ptpn6-2473
gcggcccaggcagggcagug

SEQ ID NO: 21319 - RNA, 20 nt, Artificial Sequence
  Synthetic oligonucleotide: Ptpn6-2474
gaucccacuagugagaggug

SEQ ID NO: 21320 - RNA, 20 nt, Artificial Sequence
  Synthetic oligonucleotide: Ptpn6-2475
cugcagggcaccaggcggug

SEQ ID NO: 21321 - RNA, 20 nt, Artificial Sequence
  Synthetic oligonucleotide: Ptpn6-2476
gccuggugcccugcagggug

SEQ ID NO: 21322 - RNA, 20 nt, Artificial Sequence
  Synthetic oligonucleotide: Ptpn6-954
ggguaagucccgggcaccau

SEQ ID NO: 21323 - RNA, 20 nt, Artificial Sequence
  Synthetic oligonucleotide: Ptpn6-2477
ucaccucucacuagugggau

SEQ ID NO: 21324 - RNA, 20 nt, Artificial Sequence
  Synthetic oligonucleotide: Ptpn6-113
cggggagccugggccagccu

SEQ ID NO: 21325 - RNA, 20 nt, Artificial Sequence
  Synthetic oligonucleotide: Ptpn6-112
ugacccugagcggggagccu

SEQ ID NO: 21326 - RNA, 20 nt, Artificial Sequence
  Synthetic oligonucleotide: Ptpn6-125
cauccagcccacugaggucu

SEQ ID NO: 21327 - RNA, 20 nt, Artificial Sequence
  Synthetic oligonucleotide: Ptpn6-1
gguuucaccgagaccucagu

SEQ ID NO: 21328 - RNA, 20 nt, Artificial Sequence
  Synthetic oligonucleotide: Ptpn6-2478
agcccucaccucucacuagu

SEQ ID NO: 21329 - RNA, 20 nt, Artificial Sequence
  Synthetic oligonucleotide: Ptpn6-971
acagagagaugcugucccgu

SEQ ID NO: 21330 - RNA, 20 nt, Artificial Sequence
  Synthetic oligonucleotide: Ptpn6-2479
cuucucgcucuccgucaggu

SEQ ID NO: 21331 - RNA, 20 nt, Artificial Sequence
  Synthetic oligonucleotide: Ptpn6-2480
cgccuggugcccugcagggu

SEQ ID NO: 21332 - RNA, 20 nt, Artificial Sequence
  Synthetic oligonucleotide: Ptpn6-70
ggggagccugggccagccuu

SEQ ID NO: 21333 - RNA, 17 nt, Artificial Sequence
  Synthetic oligonucleotide: Ptpn6-268
cagcggccagagaacaa

SEQ ID NO: 21334 - RNA, 17 nt, Artificial Sequence
  Synthetic oligonucleotide: Ptpn6-494
cugccgcagguagacaa

SEQ ID NO: 21335 - RNA, 17 nt, Artificial Sequence
  Synthetic oligonucleotide: Ptpn6-2481
gagaacaucuccaccaa

SEQ ID NO: 21336 - RNA, 17 nt, Artificial Sequence
  Synthetic oligonucleotide: Ptpn6-337
gacaaggagaagagcaa

SEQ ID NO: 21337 - RNA, 17 nt, Artificial Sequence
  Synthetic oligonucleotide: Ptpn6-2482
gaaggugguucgcagaa

SEQ ID NO: 21338 - RNA, 17 nt, Artificial Sequence
  Synthetic oligonucleotide: Ptpn6-286
acccgagagguggagaa

SEQ ID NO: 21339 - RNA, 17 nt, Artificial Sequence
  Synthetic oligonucleotide: Ptpn6-265
ugcaccagcgucuggaa

SEQ ID NO: 21340 - RNA, 17 nt, Artificial Sequence
  Synthetic oligonucleotide: Ptpn6-267
gcagcggccagagaaca

SEQ ID NO: 21341 - RNA, 17 nt, Artificial Sequence
  Synthetic oligonucleotide: Ptpn6-2483
gggcaaguacagacaca

SEQ ID NO: 21342 - RNA, 17 nt, Artificial Sequence
  Synthetic oligonucleotide: Ptpn6-2484
cagccugggugcucaca

SEQ ID NO: 21343 - RNA, 17 nt, Artificial Sequence
  Synthetic oligonucleotide: Ptpn6-335
gcagcggucagcagaca

SEQ ID NO: 21344 - RNA, 17 nt, Artificial Sequence
  Synthetic oligonucleotide: Ptpn6-471
uggucaugacgaugaca

SEQ ID NO: 21345 - RNA, 17 nt, Artificial Sequence
  Synthetic oligonucleotide: Ptpn6-315
ggagaacaucuccacca

SEQ ID NO: 21346 - RNA, 17 nt, Artificial Sequence
  Synthetic oligonucleotide: Ptpn6-301
cugagcuggcccgacca

SEQ ID NO: 21347 - RNA, 17 nt, Artificial Sequence
  Synthetic oligonucleotide: Ptpn6-452
gcucacuggggacccca

SEQ ID NO: 21348 - RNA, 17 nt, Artificial Sequence
  Synthetic oligonucleotide: Ptpn6-2485
uaauuuggcucccccca

SEQ ID NO: 21349 - RNA, 17 nt, Artificial Sequence
  Synthetic oligonucleotide: Ptpn6-258
guccgaggauacagcca

SEQ ID NO: 21350 - RNA, 17 nt, Artificial Sequence
  Synthetic oligonucleotide: Ptpn6-276
accuacaucgccagcca

SEQ ID NO: 21351 - RNA, 17 nt, Artificial Sequence
  Synthetic oligonucleotide: Ptpn6-279
ggguugucuggaggcca

SEQ ID NO: 21352 - RNA, 17 nt, Artificial Sequence
  Synthetic oligonucleotide: Ptpn6-2486
cuguccucagguggcca

SEQ ID NO: 21353 - RNA, 17 nt, Artificial Sequence
  Synthetic oligonucleotide: Ptpn6-330
gaagaaugcccaugcca

SEQ ID NO: 21354 - RNA, 17 nt, Artificial Sequence
  Synthetic oligonucleotide: Ptpn6-336
agacaaggagaagagca

SEQ ID NO: 21355 - RNA, 17 nt, Artificial Sequence
  Synthetic oligonucleotide: Ptpn6-2487
caggugcgugcagagca

SEQ ID NO: 21356 - RNA, 17 nt, Artificial Sequence
  Synthetic oligonucleotide: Ptpn6-312
aaagucugccucacgca

SEQ ID NO: 21357 - RNA, 17 nt, Artificial Sequence
  Synthetic oligonucleotide: Ptpn6-2488
caugguggggaccggca

SEQ ID NO: 21358 - RNA, 17 nt, Artificial Sequence
  Synthetic oligonucleotide: Ptpn6-321
ggcgcagcgcucgggca

SEQ ID NO: 21359 - RNA, 17 nt, Artificial Sequence
  Synthetic oligonucleotide: Ptpn6-421
ugcgggaggccuuggca

SEQ ID NO: 21360 - RNA, 17 nt, Artificial Sequence
  Synthetic oligonucleotide: Ptpn6-270
agccgagugauccugca

SEQ ID NO: 21361 - RNA, 17 nt, Artificial Sequence
  Synthetic oligonucleotide: Ptpn6-2489
gaggaguuugaggugca

SEQ ID NO: 21362 - RNA, 17 nt, Artificial Sequence
  Synthetic oligonucleotide: Ptpn6-2490
caaugccaacuacauca

SEQ ID NO: 21363 - RNA, 17 nt, Artificial Sequence
  Synthetic oligonucleotide: Ptpn6-477
ucuuagcguucucauca

SEQ ID NO: 21364 - RNA, 17 nt, Artificial Sequence
  Synthetic oligonucleotide: Ptpn6-244
gaccuucgacagccuca

SEQ ID NO: 21365 - RNA, 17 nt, Artificial Sequence
  Synthetic oligonucleotide: Ptpn6-314
ugucaucgacaugcuca

SEQ ID NO: 21366 - RNA, 17 nt, Artificial Sequence
  Synthetic oligonucleotide: Ptpn6-2491
ccgggcaguggcaguca

SEQ ID NO: 21367 - RNA, 17 nt, Artificial Sequence
  Synthetic oligonucleotide: Ptpn6-2492
cuaccugcggcagguca

SEQ ID NO: 21368 - RNA, 17 nt, Artificial Sequence
  Synthetic oligonucleotide: Ptpn6-423
ggcaugggcauucuuca

SEQ ID NO: 21369 - RNA, 17 nt, Artificial Sequence
  Synthetic oligonucleotide: Ptpn6-332
gcacacuaagaacaaga

SEQ ID NO: 21370 - RNA, 17 nt, Artificial Sequence
  Synthetic oligonucleotide: Ptpn6-247
ggagcauuucaagaaga

SEQ ID NO: 21371 - RNA, 17 nt, Artificial Sequence
  Synthetic oligonucleotide: Ptpn6-316
ccagaagaccauccaga

SEQ ID NO: 21372 - RNA, 17 nt, Artificial Sequence
  Synthetic oligonucleotide: Ptpn6-2493
ggaaggugguucgcaga

SEQ ID NO: 21373 - RNA, 17 nt, Artificial Sequence
  Synthetic oligonucleotide: Ptpn6-281
caaugacuucuggcaga

SEQ ID NO: 21374 - RNA, 17 nt, Artificial Sequence
  Synthetic oligonucleotide: Ptpn6-322
cucgggcauggugcaga

SEQ ID NO: 21375 - RNA, 17 nt, Artificial Sequence
  Synthetic oligonucleotide: Ptpn6-2494
gcggagaggaggcgaga

SEQ ID NO: 21376 - RNA, 17 nt, Artificial Sequence
  Synthetic oligonucleotide: Ptpn6-2495
accguacuaugccacga

SEQ ID NO: 21377 - RNA, 17 nt, Artificial Sequence
  Synthetic oligonucleotide: Ptpn6-433
uucaaugaacugggcga

SEQ ID NO: 21378 - RNA, 17 nt, Artificial Sequence
  Synthetic oligonucleotide: Ptpn6-498
guccgugaggcugucga

SEQ ID NO: 21379 - RNA, 17 nt, Artificial Sequence
  Synthetic oligonucleotide: Ptpn6-271
gagugauccugcaggga

SEQ ID NO: 21380 - RNA, 17 nt, Artificial Sequence
  Synthetic oligonucleotide: Ptpn6-2496
gcagagggacaguggga

SEQ ID NO: 21381 - RNA, 17 nt, Artificial Sequence
  Synthetic oligonucleotide: Ptpn6-435
cgcccgcaccaucugga

SEQ ID NO: 21382 - RNA, 17 nt, Artificial Sequence
  Synthetic oligonucleotide: Ptpn6-264
uugcaccagcgucugga

SEQ ID NO: 21383 - RNA, 17 nt, Artificial Sequence
  Synthetic oligonucleotide: Ptpn6-438
caugucgaugacaauga

SEQ ID NO: 21384 - RNA, 17 nt, Artificial Sequence
  Synthetic oligonucleotide: Ptpn6-2497
ccugcagugcacgauga

SEQ ID NO: 21385 - RNA, 17 nt, Artificial Sequence
  Synthetic oligonucleotide: Ptpn6-2498
gaggaugauaauccuga

SEQ ID NO: 21386 - RNA, 17 nt, Artificial Sequence
  Synthetic oligonucleotide: Ptpn6-2499
augccggcggccucuga

SEQ ID NO: 21387 - RNA, 17 nt, Artificial Sequence
  Synthetic oligonucleotide: Ptpn6-2500
aucuccaccaaggguga

SEQ ID NO: 21388 - RNA, 17 nt, Artificial Sequence
  Synthetic oligonucleotide: Ptpn6-2501
cgcucacuuccucuuga

SEQ ID NO: 21389 - RNA, 17 nt, Artificial Sequence
  Synthetic oligonucleotide: Ptpn6-466
cccaccucgggccagua

SEQ ID NO: 21390 - RNA, 17 nt, Artificial Sequence
  Synthetic oligonucleotide: Ptpn6-463
caguuggucacagagua

SEQ ID NO: 21391 - RNA, 17 nt, Artificial Sequence
  Synthetic oligonucleotide: Ptpn6-328
ggccaggagucggagua

SEQ ID NO: 21392 - RNA, 17 nt, Artificial Sequence
  Synthetic oligonucleotide: Ptpn6-493
acccucguggcauagua

SEQ ID NO: 21393 - RNA, 17 nt, Artificial Sequence
  Synthetic oligonucleotide: Ptpn6-459
gggagaccuguaaggua

SEQ ID NO: 21394 - RNA, 17 nt, Artificial Sequence
  Synthetic oligonucleotide: Ptpn6-2502
uggagaaaggccgggua

SEQ ID NO: 21395 - RNA, 17 nt, Artificial Sequence
  Synthetic oligonucleotide: Ptpn6-458
cagcggggagaccugua

SEQ ID NO: 21396 - RNA, 17 nt, Artificial Sequence
  Synthetic oligonucleotide: Ptpn6-292
ggcaugcagcgugcuua

SEQ ID NO: 21397 - RNA, 17 nt, Artificial Sequence
  Synthetic oligonucleotide: Ptpn6-431
uagugguuucaaugaac

SEQ ID NO: 21398 - RNA, 17 nt, Artificial Sequence
  Synthetic oligonucleotide: Ptpn6-313
gccggcaucggccgcac

SEQ ID NO: 21399 - RNA, 17 nt, Artificial Sequence
  Synthetic oligonucleotide: Ptpn6-449
gacacccccaggcucac

SEQ ID NO: 21400 - RNA, 17 nt, Artificial Sequence
  Synthetic oligonucleotide: Ptpn6-2503
gcagccugggugcucac

SEQ ID NO: 21401 - RNA, 17 nt, Artificial Sequence
  Synthetic oligonucleotide: Ptpn6-248
gagcauuucaagaagac

SEQ ID NO: 21402 - RNA, 17 nt, Artificial Sequence
  Synthetic oligonucleotide: Ptpn6-272
agugauccugcagggac

SEQ ID NO: 21403 - RNA, 17 nt, Artificial Sequence
  Synthetic oligonucleotide: Ptpn6-2504
aggugcaugguggggac

SEQ ID NO: 21404 - RNA, 17 nt, Artificial Sequence
  Synthetic oligonucleotide: Ptpn6-288
acaaaugcgucccauac

SEQ ID NO: 21405 - RNA, 17 nt, Artificial Sequence
  Synthetic oligonucleotide: Ptpn6-329
gccaggagucggaguac

SEQ ID NO: 21406 - RNA, 17 nt, Artificial Sequence
  Synthetic oligonucleotide: Ptpn6-456
cgggccagcucagguac

SEQ ID NO: 21407 - RNA, 17 nt, Artificial Sequence
  Synthetic oligonucleotide: Ptpn6-297
caaacuccguaccuuac

SEQ ID NO: 21408 - RNA, 17 nt, Artificial Sequence
  Synthetic oligonucleotide: Ptpn6-496
ucuugaaaugcuccacc

SEQ ID NO: 21409 - RNA, 17 nt, Artificial Sequence
  Synthetic oligonucleotide: Ptpn6-2505
caagggugaggggcacc

SEQ ID NO: 21410 - RNA, 17 nt, Artificial Sequence
  Synthetic oligonucleotide: Ptpn6-2506
acuugccccccugcacc

SEQ ID NO: 21411 - RNA, 17 nt, Artificial Sequence
  Synthetic oligonucleotide: Ptpn6-245
cgacagccucacggacc

SEQ ID NO: 21412 - RNA, 17 nt, Artificial Sequence
  Synthetic oligonucleotide: Ptpn6-480
auugauguagucggacc

SEQ ID NO: 21413 - RNA, 17 nt, Artificial Sequence
  Synthetic oligonucleotide: Ptpn6-2507
agggggggcgcccuacc

SEQ ID NO: 21414 - RNA, 17 nt, Artificial Sequence
  Synthetic oligonucleotide: Ptpn6-473
uggccuccagacaaccc

SEQ ID NO: 21415 - RNA, 17 nt, Artificial Sequence
  Synthetic oligonucleotide: Ptpn6-2508
cuguguagcguccaccc

SEQ ID NO: 21416 - RNA, 17 nt, Artificial Sequence
  Synthetic oligonucleotide: Ptpn6-2509
cuccccugugagcaccc

SEQ ID NO: 21417 - RNA, 17 nt, Artificial Sequence
  Synthetic oligonucleotide: Ptpn6-481
uugauguagucggaccc

SEQ ID NO: 21418 - RNA, 17 nt, Artificial Sequence
  Synthetic oligonucleotide: Ptpn6-2510
cccacccccaaaccccc

SEQ ID NO: 21419 - RNA, 17 nt, Artificial Sequence
  Synthetic oligonucleotide: Ptpn6-448
aagcugaggacaccccc

SEQ ID NO: 21420 - RNA, 17 nt, Artificial Sequence
  Synthetic oligonucleotide: Ptpn6-2511
cuaauuuggcucccccc

SEQ ID NO: 21421 - RNA, 17 nt, Artificial Sequence
  Synthetic oligonucleotide: Ptpn6-2512
cauagggucagugcccc

SEQ ID NO: 21422 - RNA, 17 nt, Artificial Sequence
  Synthetic oligonucleotide: Ptpn6-274
gggacaguaacaucccc

SEQ ID NO: 21423 - RNA, 17 nt, Artificial Sequence
  Synthetic oligonucleotide: Ptpn6-273
cgggacaguaacauccc

SEQ ID NO: 21424 - RNA, 17 nt, Artificial Sequence
  Synthetic oligonucleotide: Ptpn6-275
gaccuacaucgccagcc

SEQ ID NO: 21425 - RNA, 17 nt, Artificial Sequence
  Synthetic oligonucleotide: Ptpn6-2513
gggugaauggggcagcc

SEQ ID NO: 21426 - RNA, 17 nt, Artificial Sequence
  Synthetic oligonucleotide: Ptpn6-304
gggguccccagugagcc

SEQ ID NO: 21427 - RNA, 17 nt, Artificial Sequence
  Synthetic oligonucleotide: Ptpn6-2514
caaaccucagguccgcc

SEQ ID NO: 21428 - RNA, 17 nt, Artificial Sequence
  Synthetic oligonucleotide: Ptpn6-2515
agagguggagaaaggcc

SEQ ID NO: 21429 - RNA, 17 nt, Artificial Sequence
  Synthetic oligonucleotide: Ptpn6-2516
ugguucgcagaagggcc

SEQ ID NO: 21430 - RNA, 17 nt, Artificial Sequence
  Synthetic oligonucleotide: Ptpn6-2517
gcgugcagagcagggcc

SEQ ID NO: 21431 - RNA, 17 nt, Artificial Sequence
  Synthetic oligonucleotide: Ptpn6-2518
cccugacugccacugcc

SEQ ID NO: 21432 - RNA, 17 nt, Artificial Sequence
  Synthetic oligonucleotide: Ptpn6-429
ucccguacuccgacucc

SEQ ID NO: 21433 - RNA, 17 nt, Artificial Sequence
  Synthetic oligonucleotide: Ptpn6-2519
ucccgaaucaggucucc

SEQ ID NO: 21434 - RNA, 17 nt, Artificial Sequence
  Synthetic oligonucleotide: Ptpn6-437
ugucaaugucacagucc

SEQ ID NO: 21435 - RNA, 17 nt, Artificial Sequence
  Synthetic oligonucleotide: Ptpn6-446
gcugguugaucuggucc

SEQ ID NO: 21436 - RNA, 17 nt, Artificial Sequence
  Synthetic oligonucleotide: Ptpn6-308
ggguguccucagcuucc

SEQ ID NO: 21437 - RNA, 17 nt, Artificial Sequence
  Synthetic oligonucleotide: Ptpn6-256
ggaacugaacaagaagc

SEQ ID NO: 21438 - RNA, 17 nt, Artificial Sequence
  Synthetic oligonucleotide: Ptpn6-325
aaccacuaagaagaagc

SEQ ID NO: 21439 - RNA, 17 nt, Artificial Sequence
  Synthetic oligonucleotide: Ptpn6-2520
ucagaguuugcagaagc

SEQ ID NO: 21440 - RNA, 17 nt, Artificial Sequence
  Synthetic oligonucleotide: Ptpn6-2521
cacucacauuguccagc

SEQ ID NO: 21441 - RNA, 17 nt, Artificial Sequence
  Synthetic oligonucleotide: Ptpn6-478
caucagggccuagcagc

SEQ ID NO: 21442 - RNA, 17 nt, Artificial Sequence
  Synthetic oligonucleotide: Ptpn6-2522
gcaggugcgugcagagc

SEQ ID NO: 21443 - RNA, 17 nt, Artificial Sequence
  Synthetic oligonucleotide: Ptpn6-300
auuaccaguaccugagc

SEQ ID NO: 21444 - RNA, 17 nt, Artificial Sequence
  Synthetic oligonucleotide: Ptpn6-311
gaaagucugccucacgc

SEQ ID NO: 21445 - RNA, 17 nt, Artificial Sequence
  Synthetic oligonucleotide: Ptpn6-488
gcugcccuuccagacgc

SEQ ID NO: 21446 - RNA, 17 nt, Artificial Sequence
  Synthetic oligonucleotide: Ptpn6-298
cuuacaggucuccccgc

SEQ ID NO: 21447 - RNA, 17 nt, Artificial Sequence
  Synthetic oligonucleotide: Ptpn6-2523
gugccaucagaggccgc

SEQ ID NO: 21448 - RNA, 17 nt, Artificial Sequence
  Synthetic oligonucleotide: Ptpn6-2524
caccccugaccugccgc

SEQ ID NO: 21449 - RNA, 17 nt, Artificial Sequence
  Synthetic oligonucleotide: Ptpn6-444
gcagacuuuccugccgc

SEQ ID NO: 21450 - RNA, 17 nt, Artificial Sequence
  Synthetic oligonucleotide: Ptpn6-287
gagagguggagaaaggc

SEQ ID NO: 21451 - RNA, 17 nt, Artificial Sequence
  Synthetic oligonucleotide: Ptpn6-259
gaggauacagccaaggc

SEQ ID NO: 21452 - RNA, 17 nt, Artificial Sequence
  Synthetic oligonucleotide: Ptpn6-2525
gcaugguggggaccggc

SEQ ID NO: 21453 - RNA, 17 nt, Artificial Sequence
  Synthetic oligonucleotide: Ptpn6-310
ccagaucaaccagcggc

SEQ ID NO: 21454 - RNA, 17 nt, Artificial Sequence
  Synthetic oligonucleotide: Ptpn6-2526
cuuugucuaccugcggc

SEQ ID NO: 21455 - RNA, 17 nt, Artificial Sequence
  Synthetic oligonucleotide: Ptpn6-2527
guggggaccggcagggc

SEQ ID NO: 21456 - RNA, 17 nt, Artificial Sequence
  Synthetic oligonucleotide: Ptpn6-424
ugggcauucuucauggc

SEQ ID NO: 21457 - RNA, 17 nt, Artificial Sequence
  Synthetic oligonucleotide: Ptpn6-474
cuccagacaacccuggc

SEQ ID NO: 21458 - RNA, 17 nt, Artificial Sequence
  Synthetic oligonucleotide: Ptpn6-283
cuggcagauggcguggc

SEQ ID NO: 21459 - RNA, 17 nt, Artificial Sequence
  Synthetic oligonucleotide: Ptpn6-440
gccugugcggccgaugc

SEQ ID NO: 21460 - RNA, 17 nt, Artificial Sequence
  Synthetic oligonucleotide: Ptpn6-295
acucugugaccaacugc

SEQ ID NO: 21461 - RNA, 17 nt, Artificial Sequence
  Synthetic oligonucleotide: Ptpn6-2528
ccaucaucgugcacugc

SEQ ID NO: 21462 - RNA, 17 nt, Artificial Sequence
  Synthetic oligonucleotide: Ptpn6-2529
gcucugcacgcaccugc

SEQ ID NO: 21463 - RNA, 17 nt, Artificial Sequence
  Synthetic oligonucleotide: Ptpn6-483
uacugucccgucccugc

SEQ ID NO: 21464 - RNA, 17 nt, Artificial Sequence
  Synthetic oligonucleotide: Ptpn6-269
cagccgagugauccugc

SEQ ID NO: 21465 - RNA, 17 nt, Artificial Sequence
  Synthetic oligonucleotide: Ptpn6-2530
gaagcuggagguccugc

SEQ ID NO: 21466 - RNA, 17 nt, Artificial Sequence
  Synthetic oligonucleotide: Ptpn6-2531
ucacuuggacgaggugc

SEQ ID NO: 21467 - RNA, 17 nt, Artificial Sequence
  Synthetic oligonucleotide: Ptpn6-318
gaccauccagauggugc

SEQ ID NO: 21468 - RNA, 17 nt, Artificial Sequence
  Synthetic oligonucleotide: Ptpn6-419
ucuuguucuuagugugc

SEQ ID NO: 21469 - RNA, 17 nt, Artificial Sequence
  Synthetic oligonucleotide: Ptpn6-457
gccagaucucccgaauc

SEQ ID NO: 21470 - RNA, 17 nt, Artificial Sequence
  Synthetic oligonucleotide: Ptpn6-434
gcugcgcccgcaccauc

SEQ ID NO: 21471 - RNA, 17 nt, Artificial Sequence
  Synthetic oligonucleotide: Ptpn6-476
gucuuagcguucucauc

SEQ ID NO: 21472 - RNA, 17 nt, Artificial Sequence
  Synthetic oligonucleotide: Ptpn6-299
accugauucgggagauc

SEQ ID NO: 21473 - RNA, 17 nt, Artificial Sequence
  Synthetic oligonucleotide: Ptpn6-445
ccugccgcugguugauc

SEQ ID NO: 21474 - RNA, 17 nt, Artificial Sequence
  Synthetic oligonucleotide: Ptpn6-2532
gggggcagucaaaccuc

SEQ ID NO: 21475 - RNA, 17 nt, Artificial Sequence
  Synthetic oligonucleotide: Ptpn6-465
cgcugcaugcccaccuc

SEQ ID NO: 21476 - RNA, 17 nt, Artificial Sequence
  Synthetic oligonucleotide: Ptpn6-252
gggauugaggaggccuc

SEQ ID NO: 21477 - RNA, 17 nt, Artificial Sequence
  Synthetic oligonucleotide: Ptpn6-2533
ugagcggugcuguccuc

SEQ ID NO: 21478 - RNA, 17 nt, Artificial Sequence
  Synthetic oligonucleotide: Ptpn6-455
cauggucgggccagcuc

SEQ ID NO: 21479 - RNA, 17 nt, Artificial Sequence
  Synthetic oligonucleotide: Ptpn6-320
gugcgggcgcagcgcuc

SEQ ID NO: 21480 - RNA, 17 nt, Artificial Sequence
  Synthetic oligonucleotide: Ptpn6-469
gccuuucuccaccucuc

SEQ ID NO: 21481 - RNA, 17 nt, Artificial Sequence
  Synthetic oligonucleotide: Ptpn6-2534
cucccgaaucaggucuc

SEQ ID NO: 21482 - RNA, 17 nt, Artificial Sequence
  Synthetic oligonucleotide: Ptpn6-487
uucuugcccuuguucuc

SEQ ID NO: 21483 - RNA, 17 nt, Artificial Sequence
  Synthetic oligonucleotide: Ptpn6-2535
gccgggcaguggcaguc

SEQ ID NO: 21484 - RNA, 17 nt, Artificial Sequence
  Synthetic oligonucleotide: Ptpn6-263
gaacuugcaccagcguc

SEQ ID NO: 21485 - RNA, 17 nt, Artificial Sequence
  Synthetic oligonucleotide: Ptpn6-2536
ucuaccugcggcagguc

SEQ ID NO: 21486 - RNA, 17 nt, Artificial Sequence
  Synthetic oligonucleotide: Ptpn6-454
cuggggaccccaugguc

SEQ ID NO: 21487 - RNA, 17 nt, Artificial Sequence
  Synthetic oligonucleotide: Ptpn6-277
cgccagccaggguuguc

SEQ ID NO: 21488 - RNA, 17 nt, Artificial Sequence
  Synthetic oligonucleotide: Ptpn6-2537
ccccggagaccugauuc

SEQ ID NO: 21489 - RNA, 17 nt, Artificial Sequence
  Synthetic oligonucleotide: Ptpn6-280
ccacggucaaugacuuc

SEQ ID NO: 21490 - RNA, 17 nt, Artificial Sequence
  Synthetic oligonucleotide: Ptpn6-260
cagccaaggcuggcuuc

SEQ ID NO: 21491 - RNA, 17 nt, Artificial Sequence
  Synthetic oligonucleotide: Ptpn6-436
ccaucuggauggucuuc

SEQ ID NO: 21492 - RNA, 17 nt, Artificial Sequence
  Synthetic oligonucleotide: Ptpn6-331
ugcacacuaagaacaag

SEQ ID NO: 21493 - RNA, 17 nt, Artificial Sequence
  Synthetic oligonucleotide: Ptpn6-338
gcaaggguucccucaag

SEQ ID NO: 21494 - RNA, 17 nt, Artificial Sequence
  Synthetic oligonucleotide: Ptpn6-2538
ggguggacgcuacacag

SEQ ID NO: 21495 - RNA, 17 nt, Artificial Sequence
  Synthetic oligonucleotide: Ptpn6-2539
agccugggugcucacag

SEQ ID NO: 21496 - RNA, 17 nt, Artificial Sequence
  Synthetic oligonucleotide: Ptpn6-2540
ugugggcagagggacag

SEQ ID NO: 21497 - RNA, 17 nt, Artificial Sequence
  Synthetic oligonucleotide: Ptpn6-309
uggaccagaucaaccag

SEQ ID NO: 21498 - RNA, 17 nt, Artificial Sequence
  Synthetic oligonucleotide: Ptpn6-2541
ccacucacauuguccag

SEQ ID NO: 21499 - RNA, 17 nt, Artificial Sequence
  Synthetic oligonucleotide: Ptpn6-334
agaaagugaagaagcag

SEQ ID NO: 21500 - RNA, 17 nt, Artificial Sequence
  Synthetic oligonucleotide: Ptpn6-266
agcgucuggaagggcag

SEQ ID NO: 21501 - RNA, 17 nt, Artificial Sequence
  Synthetic oligonucleotide: Ptpn6-2542
gacgggggugccaucag

SEQ ID NO: 21502 - RNA, 17 nt, Artificial Sequence
  Synthetic oligonucleotide: Ptpn6-2543
uaccugcggcaggucag

SEQ ID NO: 21503 - RNA, 17 nt, Artificial Sequence
  Synthetic oligonucleotide: Ptpn6-284
cgucaugaccacccgag

SEQ ID NO: 21504 - RNA, 17 nt, Artificial Sequence
  Synthetic oligonucleotide: Ptpn6-2544
caccucguccaagugag

SEQ ID NO: 21505 - RNA, 17 nt, Artificial Sequence
  Synthetic oligonucleotide: Ptpn6-2545
ccucaagaggaagugag

SEQ ID NO: 21506 - RNA, 17 nt, Artificial Sequence
  Synthetic oligonucleotide: Ptpn6-2546
ucuccaccaagggugag

SEQ ID NO: 21507 - RNA, 17 nt, Artificial Sequence
  Synthetic oligonucleotide: Ptpn6-2547
ccgcuggacaaugugag

SEQ ID NO: 21508 - RNA, 17 nt, Artificial Sequence
  Synthetic oligonucleotide: Ptpn6-486
ggagaauguucuuguag

SEQ ID NO: 21509 - RNA, 17 nt, Artificial Sequence
  Synthetic oligonucleotide: Ptpn6-430
cuccagcuucuucuuag

SEQ ID NO: 21510 - RNA, 17 nt, Artificial Sequence
  Synthetic oligonucleotide: Ptpn6-2548
cagcagugugggccacg

SEQ ID NO: 21511 - RNA, 17 nt, Artificial Sequence
  Synthetic oligonucleotide: Ptpn6-2549
aaccguacuaugccacg

SEQ ID NO: 21512 - RNA, 17 nt, Artificial Sequence
  Synthetic oligonucleotide: Ptpn6-249
agcauuucaagaagacg

SEQ ID NO: 21513 - RNA, 17 nt, Artificial Sequence
  Synthetic oligonucleotide: Ptpn6-2550
ggccacucacuuggacg

SEQ ID NO: 21514 - RNA, 17 nt, Artificial Sequence
  Synthetic oligonucleotide: Ptpn6-324
guacaaguucaucuacg

SEQ ID NO: 21515 - RNA, 17 nt, Artificial Sequence
  Synthetic oligonucleotide: Ptpn6-472
ccagaagucauugaccg

SEQ ID NO: 21516 - RNA, 17 nt, Artificial Sequence
  Synthetic oligonucleotide: Ptpn6-482
ugauguagucggacccg

SEQ ID NO: 21517 - RNA, 17 nt, Artificial Sequence
  Synthetic oligonucleotide: Ptpn6-289
cgucccauacuggcccg

SEQ ID NO: 21518 - RNA, 17 nt, Artificial Sequence
  Synthetic oligonucleotide: Ptpn6-2551
cccgaaucaggucuccg

SEQ ID NO: 21519 - RNA, 17 nt, Artificial Sequence
  Synthetic oligonucleotide: Ptpn6-257
caagaagcaggaguccg

SEQ ID NO: 21520 - RNA, 17 nt, Artificial Sequence
  Synthetic oligonucleotide: Ptpn6-2552
acucacauuguccagcg

SEQ ID NO: 21521 - RNA, 17 nt, Artificial Sequence
  Synthetic oligonucleotide: Ptpn6-282
acuucuggcagauggcg

SEQ ID NO: 21522 - RNA, 17 nt, Artificial Sequence
  Synthetic oligonucleotide: Ptpn6-296
cucugugaccaacugcg

SEQ ID NO: 21523 - RNA, 17 nt, Artificial Sequence
  Synthetic oligonucleotide: Ptpn6-492
agccgcauucacccucg

SEQ ID NO: 21524 - RNA, 17 nt, Artificial Sequence
  Synthetic oligonucleotide: Ptpn6-2553
caaguacagacacaagg

SEQ ID NO: 21525 - RNA, 17 nt, Artificial Sequence
  Synthetic oligonucleotide: Ptpn6-2554
ggcggaugcggggaagg

SEQ ID NO: 21526 - RNA, 17 nt, Artificial Sequence
  Synthetic oligonucleotide: Ptpn6-2555
gagggacagugggaagg

SEQ ID NO: 21527 - RNA, 17 nt, Artificial Sequence
  Synthetic oligonucleotide: Ptpn6-2556
caaugucacaguccagg

SEQ ID NO: 21528 - RNA, 17 nt, Artificial Sequence
  Synthetic oligonucleotide: Ptpn6-2557
gaguuugcagaagcagg

SEQ ID NO: 21529 - RNA, 17 nt, Artificial Sequence
  Synthetic oligonucleotide: Ptpn6-2558
cugcagccgggugcagg

SEQ ID NO: 21530 - RNA, 17 nt, Artificial Sequence
  Synthetic oligonucleotide: Ptpn6-2559
gcggugcuguccucagg

SEQ ID NO: 21531 - RNA, 17 nt, Artificial Sequence
  Synthetic oligonucleotide: Ptpn6-285
caugaccacccgagagg

SEQ ID NO: 21532 - RNA, 17 nt, Artificial Sequence
  Synthetic oligonucleotide: Ptpn6-2560
gggagugggcggagagg

SEQ ID NO: 21533 - RNA, 17 nt, Artificial Sequence
  Synthetic oligonucleotide: Ptpn6-290
cccauacuggcccgagg

SEQ ID NO: 21534 - RNA, 17 nt, Artificial Sequence
  Synthetic oligonucleotide: Ptpn6-251
gaagacggggauugagg

SEQ ID NO: 21535 - RNA, 17 nt, Artificial Sequence
  Synthetic oligonucleotide: Ptpn6-323
gggcauggugcagacgg

SEQ ID NO: 21536 - RNA, 17 nt, Artificial Sequence
  Synthetic oligonucleotide: Ptpn6-2561
ugugcggccgaugccgg

SEQ ID NO: 21537 - RNA, 17 nt, Artificial Sequence
  Synthetic oligonucleotide: Ptpn6-2562
ccgaaucaggucuccgg

SEQ ID NO: 21538 - RNA, 17 nt, Artificial Sequence
  Synthetic oligonucleotide: Ptpn6-2563
gcggaugcggggaaggg

SEQ ID NO: 21539 - RNA, 17 nt, Artificial Sequence
  Synthetic oligonucleotide: Ptpn6-2564
uuuggcuccccccaggg

SEQ ID NO: 21540 - RNA, 17 nt, Artificial Sequence
  Synthetic oligonucleotide: Ptpn6-2565
ugcagccgggugcaggg

SEQ ID NO: 21541 - RNA, 17 nt, Artificial Sequence
  Synthetic oligonucleotide: Ptpn6-333
cacuaagaacaagaggg

SEQ ID NO: 21542 - RNA, 17 nt, Artificial Sequence
  Synthetic oligonucleotide: Ptpn6-2566
cuuggacgaggugcggg

SEQ ID NO: 21543 - RNA, 17 nt, Artificial Sequence
  Synthetic oligonucleotide: Ptpn6-470
uuucuccaccucucggg

SEQ ID NO: 21544 - RNA, 17 nt, Artificial Sequence
  Synthetic oligonucleotide: Ptpn6-2567
ggaaagggagggucggg

SEQ ID NO: 21545 - RNA, 17 nt, Artificial Sequence
  Synthetic oligonucleotide: Ptpn6-2568
cggaugcggggaagggg

SEQ ID NO: 21546 - RNA, 17 nt, Artificial Sequence
  Synthetic oligonucleotide: Ptpn6-2569
cugcggcaggucagggg

SEQ ID NO: 21547 - RNA, 17 nt, Artificial Sequence
  Synthetic oligonucleotide: Ptpn6-2570
agcagggccuggggggg

SEQ ID NO: 21548 - RNA, 17 nt, Artificial Sequence
  Synthetic oligonucleotide: Ptpn6-2571
gagcagggccugggggg

SEQ ID NO: 21549 - RNA, 17 nt, Artificial Sequence
  Synthetic oligonucleotide: Ptpn6-2572
agagcagggccuggggg

SEQ ID NO: 21550 - RNA, 17 nt, Artificial Sequence
  Synthetic oligonucleotide: Ptpn6-2573
accuggggguuuggggg

SEQ ID NO: 21551 - RNA, 17 nt, Artificial Sequence
  Synthetic oligonucleotide: Ptpn6-2574
cagagcagggccugggg

SEQ ID NO: 21552 - RNA, 17 nt, Artificial Sequence
  Synthetic oligonucleotide: Ptpn6-2575
guagcguccacccuggg

SEQ ID NO: 21553 - RNA, 17 nt, Artificial Sequence
  Synthetic oligonucleotide: Ptpn6-2576
gcagagcagggccuggg

SEQ ID NO: 21554 - RNA, 17 nt, Artificial Sequence
  Synthetic oligonucleotide: Ptpn6-262
caaggcuggcuucuggg

SEQ ID NO: 21555 - RNA, 17 nt, Artificial Sequence
  Synthetic oligonucleotide: Ptpn6-242
ggacgcuacacaguggg

SEQ ID NO: 21556 - RNA, 17 nt, Artificial Sequence
  Synthetic oligonucleotide: Ptpn6-2577
agugugggccacguggg

SEQ ID NO: 21557 - RNA, 17 nt, Artificial Sequence
  Synthetic oligonucleotide: Ptpn6-2578
aaacucugagauguggg

SEQ ID NO: 21558 - RNA, 17 nt, Artificial Sequence
  Synthetic oligonucleotide: Ptpn6-2579
gaguuugaggugcaugg

SEQ ID NO: 21559 - RNA, 17 nt, Artificial Sequence
  Synthetic oligonucleotide: Ptpn6-2580
gggugaggggcaccugg

SEQ ID NO: 21560 - RNA, 17 nt, Artificial Sequence
  Synthetic oligonucleotide: Ptpn6-246
cagccucacggaccugg

SEQ ID NO: 21561 - RNA, 17 nt, Artificial Sequence
  Synthetic oligonucleotide: Ptpn6-2581
uguagcguccacccugg

SEQ ID NO: 21562 - RNA, 17 nt, Artificial Sequence
  Synthetic oligonucleotide: Ptpn6-307
guccccagugagccugg

SEQ ID NO: 21563 - RNA, 17 nt, Artificial Sequence
  Synthetic oligonucleotide: Ptpn6-2582
ugcagagcagggccugg

SEQ ID NO: 21564 - RNA, 17 nt, Artificial Sequence
  Synthetic oligonucleotide: Ptpn6-326
cacuaagaagaagcugg

SEQ ID NO: 21565 - RNA, 17 nt, Artificial Sequence
  Synthetic oligonucleotide: Ptpn6-427
gcauucuucauggcugg

SEQ ID NO: 21566 - RNA, 17 nt, Artificial Sequence
  Synthetic oligonucleotide: Ptpn6-278
cagccaggguugucugg

SEQ ID NO: 21567 - RNA, 17 nt, Artificial Sequence
  Synthetic oligonucleotide: Ptpn6-2583
aauggggcagggcgugg

SEQ ID NO: 21568 - RNA, 17 nt, Artificial Sequence
  Synthetic oligonucleotide: Ptpn6-2584
gugccccucacccuugg

SEQ ID NO: 21569 - RNA, 17 nt, Artificial Sequence
  Synthetic oligonucleotide: Ptpn6-2585
ggcaccuggggguuugg

SEQ ID NO: 21570 - RNA, 17 nt, Artificial Sequence
  Synthetic oligonucleotide: Ptpn6-254
ugccacgagggugaaug

SEQ ID NO: 21571 - RNA, 17 nt, Artificial Sequence
  Synthetic oligonucleotide: Ptpn6-303
gagcuggcccgaccaug

SEQ ID NO: 21572 - RNA, 17 nt, Artificial Sequence
  Synthetic oligonucleotide: Ptpn6-2586
cugcaaacucugagaug

SEQ ID NO: 21573 - RNA, 17 nt, Artificial Sequence
  Synthetic oligonucleotide: Ptpn6-2587
agggucggguggggaug

SEQ ID NO: 21574 - RNA, 17 nt, Artificial Sequence
  Synthetic oligonucleotide: Ptpn6-294
uacucugugaccaacug

SEQ ID NO: 21575 - RNA, 17 nt, Artificial Sequence
  Synthetic oligonucleotide: Ptpn6-451
cacccccaggcucacug

SEQ ID NO: 21576 - RNA, 17 nt, Artificial Sequence
  Synthetic oligonucleotide: Ptpn6-2588
uguaccauggccaccug

SEQ ID NO: 21577 - RNA, 17 nt, Artificial Sequence
  Synthetic oligonucleotide: Ptpn6-2589
agggugaggggcaccug

SEQ ID NO: 21578 - RNA, 17 nt, Artificial Sequence
  Synthetic oligonucleotide: Ptpn6-2590
caguccaggcggaccug

SEQ ID NO: 21579 - RNA, 17 nt, Artificial Sequence
  Synthetic oligonucleotide: Ptpn6-253
gcgccuuugucuaccug

SEQ ID NO: 21580 - RNA, 17 nt, Artificial Sequence
  Synthetic oligonucleotide: Ptpn6-2591
guguagcguccacccug

SEQ ID NO: 21581 - RNA, 17 nt, Artificial Sequence
  Synthetic oligonucleotide: Ptpn6-306
gguccccagugagccug

SEQ ID NO: 21582 - RNA, 17 nt, Artificial Sequence
  Synthetic oligonucleotide: Ptpn6-495
guagacaaaggcgccug

SEQ ID NO: 21583 - RNA, 17 nt, Artificial Sequence
  Synthetic oligonucleotide: Ptpn6-2592
gugcagagcagggccug

SEQ ID NO: 21584 - RNA, 17 nt, Artificial Sequence
  Synthetic oligonucleotide: Ptpn6-447
ucugguccaggaagcug

SEQ ID NO: 21585 - RNA, 17 nt, Artificial Sequence
  Synthetic oligonucleotide: Ptpn6-485
gcaggaucacucggcug

SEQ ID NO: 21586 - RNA, 17 nt, Artificial Sequence
  Synthetic oligonucleotide: Ptpn6-2593
ggggaccggcagggcug

SEQ ID NO: 21587 - RNA, 17 nt, Artificial Sequence
  Synthetic oligonucleotide: Ptpn6-426
ggcauucuucauggcug

SEQ ID NO: 21588 - RNA, 17 nt, Artificial Sequence
  Synthetic oligonucleotide: Ptpn6-2594
caucaaggucagcagug

SEQ ID NO: 21589 - RNA, 17 nt, Artificial Sequence
  Synthetic oligonucleotide: Ptpn6-497
gcuccaccagguccgug

SEQ ID NO: 21590 - RNA, 17 nt, Artificial Sequence
  Synthetic oligonucleotide: Ptpn6-2595
gaauggggcagggcgug

SEQ ID NO: 21591 - RNA, 17 nt, Artificial Sequence
  Synthetic oligonucleotide: Ptpn6-443
augaugggcccugcgug

SEQ ID NO: 21592 - RNA, 17 nt, Artificial Sequence
  Synthetic oligonucleotide: Ptpn6-2596
aucgugcacugcaggug

SEQ ID NO: 21593 - RNA, 17 nt, Artificial Sequence
  Synthetic oligonucleotide: Ptpn6-2597
cucacuuggacgaggug

SEQ ID NO: 21594 - RNA, 17 nt, Artificial Sequence
  Synthetic oligonucleotide: Ptpn6-2598
caucuccaccaagggug

SEQ ID NO: 21595 - RNA, 17 nt, Artificial Sequence
  Synthetic oligonucleotide: Ptpn6-2599
aaagggagggucgggug

SEQ ID NO: 21596 - RNA, 17 nt, Artificial Sequence
  Synthetic oligonucleotide: Ptpn6-2600
acucugagaugugggug

SEQ ID NO: 21597 - RNA, 17 nt, Artificial Sequence
  Synthetic oligonucleotide: Ptpn6-2601
guuugaggugcauggug

SEQ ID NO: 21598 - RNA, 17 nt, Artificial Sequence
  Synthetic oligonucleotide: Ptpn6-317
agaccauccagauggug

SEQ ID NO: 21599 - RNA, 17 nt, Artificial Sequence
  Synthetic oligonucleotide: Ptpn6-439
caaugauggugccugug

SEQ ID NO: 21600 - RNA, 17 nt, Artificial Sequence
  Synthetic oligonucleotide: Ptpn6-250
caagaagacggggauug

SEQ ID NO: 21601 - RNA, 17 nt, Artificial Sequence
  Synthetic oligonucleotide: Ptpn6-2602
ccgcucacuuccucuug

SEQ ID NO: 21602 - RNA, 17 nt, Artificial Sequence
  Synthetic oligonucleotide: Ptpn6-2603
cuucugggaggaguuug

SEQ ID NO: 21603 - RNA, 17 nt, Artificial Sequence
  Synthetic oligonucleotide: Ptpn6-2604
gggcaccuggggguuug

SEQ ID NO: 21604 - RNA, 17 nt, Artificial Sequence
  Synthetic oligonucleotide: Ptpn6-2605
gccuagcagcugguuug

SEQ ID NO: 21605 - RNA, 17 nt, Artificial Sequence
  Synthetic oligonucleotide: Ptpn6-302
ugagcuggcccgaccau

SEQ ID NO: 21606 - RNA, 17 nt, Artificial Sequence
  Synthetic oligonucleotide: Ptpn6-2606
ucagaggccgccggcau

SEQ ID NO: 21607 - RNA, 17 nt, Artificial Sequence
  Synthetic oligonucleotide: Ptpn6-422
gcgggaggccuuggcau

SEQ ID NO: 21608 - RNA, 17 nt, Artificial Sequence
  Synthetic oligonucleotide: Ptpn6-428
cuucauggcugggggau

SEQ ID NO: 21609 - RNA, 17 nt, Artificial Sequence
  Synthetic oligonucleotide: Ptpn6-442
cugcagugcacgaugau

SEQ ID NO: 21610 - RNA, 17 nt, Artificial Sequence
  Synthetic oligonucleotide: Ptpn6-467
ccaccucgggccaguau

SEQ ID NO: 21611 - RNA, 17 nt, Artificial Sequence
  Synthetic oligonucleotide: Ptpn6-293
gcaugcagcgugcuuau

SEQ ID NO: 21612 - RNA, 17 nt, Artificial Sequence
  Synthetic oligonucleotide: Ptpn6-432
agugguuucaaugaacu

SEQ ID NO: 21613 - RNA, 17 nt, Artificial Sequence
  Synthetic oligonucleotide: Ptpn6-491
uguucaguuccaacacu

SEQ ID NO: 21614 - RNA, 17 nt, Artificial Sequence
  Synthetic oligonucleotide: Ptpn6-484
gucccugcaggaucacu

SEQ ID NO: 21615 - RNA, 17 nt, Artificial Sequence
  Synthetic oligonucleotide: Ptpn6-2607
agucagggccacucacu

SEQ ID NO: 21616 - RNA, 17 nt, Artificial Sequence
  Synthetic oligonucleotide: Ptpn6-450
acacccccaggcucacu

SEQ ID NO: 21617 - RNA, 17 nt, Artificial Sequence
  Synthetic oligonucleotide: Ptpn6-464
acgcugcaugcccaccu

SEQ ID NO: 21618 - RNA, 17 nt, Artificial Sequence
  Synthetic oligonucleotide: Ptpn6-2608
aagggugaggggcaccu

SEQ ID NO: 21619 - RNA, 17 nt, Artificial Sequence
  Synthetic oligonucleotide: Ptpn6-2609
uguguagcguccacccu

SEQ ID NO: 21620 - RNA, 17 nt, Artificial Sequence
  Synthetic oligonucleotide: Ptpn6-2610
caggugccccucacccu

SEQ ID NO: 21621 - RNA, 17 nt, Artificial Sequence
  Synthetic oligonucleotide: Ptpn6-489
cucccagaagccagccu

SEQ ID NO: 21622 - RNA, 17 nt, Artificial Sequence
  Synthetic oligonucleotide: Ptpn6-2611
ggugaauggggcagccu

SEQ ID NO: 21623 - RNA, 17 nt, Artificial Sequence
  Synthetic oligonucleotide: Ptpn6-305
ggguccccagugagccu

SEQ ID NO: 21624 - RNA, 17 nt, Artificial Sequence
  Synthetic oligonucleotide: Ptpn6-420
cgaggugcgggaggccu

SEQ ID NO: 21625 - RNA, 17 nt, Artificial Sequence
  Synthetic oligonucleotide: Ptpn6-2612
cgugcagagcagggccu

SEQ ID NO: 21626 - RNA, 17 nt, Artificial Sequence
  Synthetic oligonucleotide: Ptpn6-490
agccuuggcuguauccu

SEQ ID NO: 21627 - RNA, 17 nt, Artificial Sequence
  Synthetic oligonucleotide: Ptpn6-2613
cacugacccuauguccu

SEQ ID NO: 21628 - RNA, 17 nt, Artificial Sequence
  Synthetic oligonucleotide: Ptpn6-319
ggugcgggcgcagcgcu

SEQ ID NO: 21629 - RNA, 17 nt, Artificial Sequence
  Synthetic oligonucleotide: Ptpn6-2614
uggggaccggcagggcu

SEQ ID NO: 21630 - RNA, 17 nt, Artificial Sequence
  Synthetic oligonucleotide: Ptpn6-425
gggcauucuucauggcu

SEQ ID NO: 21631 - RNA, 17 nt, Artificial Sequence
  Synthetic oligonucleotide: Ptpn6-2615
accccaaaccagcugcu

SEQ ID NO: 21632 - RNA, 17 nt, Artificial Sequence
  Synthetic oligonucleotide: Ptpn6-468
ggccuuucuccaccucu

SEQ ID NO: 21633 - RNA, 17 nt, Artificial Sequence
  Synthetic oligonucleotide: Ptpn6-261
agccaaggcuggcuucu

SEQ ID NO: 21634 - RNA, 17 nt, Artificial Sequence
  Synthetic oligonucleotide: Ptpn6-241
gguggacgcuacacagu

SEQ ID NO: 21635 - RNA, 17 nt, Artificial Sequence
  Synthetic oligonucleotide: Ptpn6-2616
gugggcagagggacagu

SEQ ID NO: 21636 - RNA, 17 nt, Artificial Sequence
  Synthetic oligonucleotide: Ptpn6-461
gucaugcuccccgcagu

SEQ ID NO: 21637 - RNA, 17 nt, Artificial Sequence
  Synthetic oligonucleotide: Ptpn6-462
gcaguuggucacagagu

SEQ ID NO: 21638 - RNA, 17 nt, Artificial Sequence
  Synthetic oligonucleotide: Ptpn6-327
gcagaagggccaggagu

SEQ ID NO: 21639 - RNA, 17 nt, Artificial Sequence
  Synthetic oligonucleotide: Ptpn6-479
guuggcauugauguagu

SEQ ID NO: 21640 - RNA, 17 nt, Artificial Sequence
  Synthetic oligonucleotide: Ptpn6-2617
gcugaccuugauguagu

SEQ ID NO: 21641 - RNA, 17 nt, Artificial Sequence
  Synthetic oligonucleotide: Ptpn6-2618
agcagugugggccacgu

SEQ ID NO: 21642 - RNA, 17 nt, Artificial Sequence
  Synthetic oligonucleotide: Ptpn6-2619
ggaauggggcagggcgu

SEQ ID NO: 21643 - RNA, 17 nt, Artificial Sequence
  Synthetic oligonucleotide: Ptpn6-291
ccauacuggcccgaggu

SEQ ID NO: 21644 - RNA, 17 nt, Artificial Sequence
  Synthetic oligonucleotide: Ptpn6-2620
guggagaaaggccgggu

SEQ ID NO: 21645 - RNA, 17 nt, Artificial Sequence
  Synthetic oligonucleotide: Ptpn6-2621
gaaagggagggucgggu

SEQ ID NO: 21646 - RNA, 17 nt, Artificial Sequence
  Synthetic oligonucleotide: Ptpn6-2622
ugcggcaggucaggggu

SEQ ID NO: 21647 - RNA, 17 nt, Artificial Sequence
  Synthetic oligonucleotide: Ptpn6-2623
ccuggggguuugggggu

SEQ ID NO: 21648 - RNA, 17 nt, Artificial Sequence
  Synthetic oligonucleotide: Ptpn6-2624
aacucugagaugugggu

SEQ ID NO: 21649 - RNA, 17 nt, Artificial Sequence
  Synthetic oligonucleotide: Ptpn6-453
acuggggaccccauggu

SEQ ID NO: 21650 - RNA, 17 nt, Artificial Sequence
  Synthetic oligonucleotide: Ptpn6-2625
aguuugaggugcauggu

SEQ ID NO: 21651 - RNA, 17 nt, Artificial Sequence
  Synthetic oligonucleotide: Ptpn6-2626
ugcaaacucugagaugu

SEQ ID NO: 21652 - RNA, 17 nt, Artificial Sequence
  Synthetic oligonucleotide: Ptpn6-475
acccuggcuggcgaugu

SEQ ID NO: 21653 - RNA, 17 nt, Artificial Sequence
  Synthetic oligonucleotide: Ptpn6-2627
aucaaggucagcagugu

SEQ ID NO: 21654 - RNA, 17 nt, Artificial Sequence
  Synthetic oligonucleotide: Ptpn6-255
cauugagaaccgagugu

SEQ ID NO: 21655 - RNA, 17 nt, Artificial Sequence
  Synthetic oligonucleotide: Ptpn6-2628
cuggggggagccaaauu

SEQ ID NO: 21656 - RNA, 17 nt, Artificial Sequence
  Synthetic oligonucleotide: Ptpn6-2629
cugugaauggccuaauu

SEQ ID NO: 21657 - RNA, 17 nt, Artificial Sequence
  Synthetic oligonucleotide: Ptpn6-2630
cccccggagaccugauu

SEQ ID NO: 21658 - RNA, 17 nt, Artificial Sequence
  Synthetic oligonucleotide: Ptpn6-460
gguacggaguuuguauu

SEQ ID NO: 21659 - RNA, 17 nt, Artificial Sequence
  Synthetic oligonucleotide: Ptpn6-2631
aggggcaccuggggguu

SEQ ID NO: 21660 - RNA, 17 nt, Artificial Sequence
  Synthetic oligonucleotide: Ptpn6-2632
gggccuagcagcugguu

SEQ ID NO: 21661 - RNA, 17 nt, Artificial Sequence
  Synthetic oligonucleotide: Ptpn6-243
cuacacagugggugguu

SEQ ID NO: 21662 - RNA, 17 nt, Artificial Sequence
  Synthetic oligonucleotide: Ptpn6-2633
ggggcaccuggggguuu

SEQ ID NO: 21663 - RNA, 17 nt, Artificial Sequence
  Synthetic oligonucleotide: Ptpn6-2634
ggccuagcagcugguuu

SEQ ID NO: 21664 - RNA, 20 nt, Artificial Sequence
  Synthetic oligonucleotide: Ptpn6-173
gggcagcggccagagaacaa

SEQ ID NO: 21665 - RNA, 20 nt, Artificial Sequence
  Synthetic oligonucleotide: Ptpn6-2635
gaccugccgcagguagacaa

SEQ ID NO: 21666 - RNA, 20 nt, Artificial Sequence
  Synthetic oligonucleotide: Ptpn6-2636
auggagaacaucuccaccaa

SEQ ID NO: 21667 - RNA, 20 nt, Artificial Sequence
  Synthetic oligonucleotide: Ptpn6-239
gcagacaaggagaagagcaa

SEQ ID NO: 21668 - RNA, 20 nt, Artificial Sequence
  Synthetic oligonucleotide: Ptpn6-2637
ugggaaggugguucgcagaa

SEQ ID NO: 21669 - RNA, 20 nt, Artificial Sequence
  Synthetic oligonucleotide: Ptpn6-191
accacccgagagguggagaa

SEQ ID NO: 21670 - RNA, 20 nt, Artificial Sequence
  Synthetic oligonucleotide: Ptpn6-170
acuugcaccagcgucuggaa

SEQ ID NO: 21671 - RNA, 20 nt, Artificial Sequence
  Synthetic oligonucleotide: Ptpn6-172
agggcagcggccagagaaca

SEQ ID NO: 21672 - RNA, 20 nt, Artificial Sequence
  Synthetic oligonucleotide: Ptpn6-2638
ggggggcaaguacagacaca

SEQ ID NO: 21673 - RNA, 20 nt, Artificial Sequence
  Synthetic oligonucleotide: Ptpn6-2639
gggcagccugggugcucaca

SEQ ID NO: 21674 - RNA, 20 nt, Artificial Sequence
  Synthetic oligonucleotide: Ptpn6-237
gaagcagcggucagcagaca

SEQ ID NO: 21675 - RNA, 20 nt, Artificial Sequence
  Synthetic oligonucleotide: Ptpn6-388
ggguggucaugacgaugaca

SEQ ID NO: 21676 - RNA, 20 nt, Artificial Sequence
  Synthetic oligonucleotide: Ptpn6-218
cauggagaacaucuccacca

SEQ ID NO: 21677 - RNA, 20 nt, Artificial Sequence
  Synthetic oligonucleotide: Ptpn6-205
uaccugagcuggcccgacca

SEQ ID NO: 21678 - RNA, 20 nt, Artificial Sequence
  Synthetic oligonucleotide: Ptpn6-370
caggcucacuggggacccca

SEQ ID NO: 21679 - RNA, 20 nt, Artificial Sequence
  Synthetic oligonucleotide: Ptpn6-2640
gccuaauuuggcucccccca

SEQ ID NO: 21680 - RNA, 20 nt, Artificial Sequence
  Synthetic oligonucleotide: Ptpn6-163
ggaguccgaggauacagcca

SEQ ID NO: 21681 - RNA, 20 nt, Artificial Sequence
  Synthetic oligonucleotide: Ptpn6-181
aagaccuacaucgccagcca

SEQ ID NO: 21682 - RNA, 20 nt, Artificial Sequence
  Synthetic oligonucleotide: Ptpn6-184
ccaggguugucuggaggcca

SEQ ID NO: 21683 - RNA, 20 nt, Artificial Sequence
  Synthetic oligonucleotide: Ptpn6-2641
gugcuguccucagguggcca

SEQ ID NO: 21684 - RNA, 20 nt, Artificial Sequence
  Synthetic oligonucleotide: Ptpn6-232
caugaagaaugcccaugcca

SEQ ID NO: 21685 - RNA, 20 nt, Artificial Sequence
  Synthetic oligonucleotide: Ptpn6-238
agcagacaaggagaagagca

SEQ ID NO: 21686 - RNA, 20 nt, Artificial Sequence
  Synthetic oligonucleotide: Ptpn6-2642
cugcaggugcgugcagagca

SEQ ID NO: 21687 - RNA, 20 nt, Artificial Sequence
  Synthetic oligonucleotide: Ptpn6-216
aggaaagucugccucacgca

SEQ ID NO: 21688 - RNA, 20 nt, Artificial Sequence
  Synthetic oligonucleotide: Ptpn6-2643
gugcaugguggggaccggca

SEQ ID NO: 21689 - RNA, 20 nt, Artificial Sequence
  Synthetic oligonucleotide: Ptpn6-224
gcgggcgcagcgcucgggca

SEQ ID NO: 21690 - RNA, 20 nt, Artificial Sequence
  Synthetic oligonucleotide: Ptpn6-341
aggugcgggaggccuuggca

SEQ ID NO: 21691 - RNA, 20 nt, Artificial Sequence
  Synthetic oligonucleotide: Ptpn6-175
cacagccgagugauccugca

SEQ ID NO: 21692 - RNA, 20 nt, Artificial Sequence
  Synthetic oligonucleotide: Ptpn6-2644
ugggaggaguuugaggugca

SEQ ID NO: 21693 - RNA, 20 nt, Artificial Sequence
  Synthetic oligonucleotide: Ptpn6-2645
caucaaugccaacuacauca

SEQ ID NO: 21694 - RNA, 20 nt, Artificial Sequence
  Synthetic oligonucleotide: Ptpn6-394
aggucuuagcguucucauca

SEQ ID NO: 21695 - RNA, 20 nt, Artificial Sequence
  Synthetic oligonucleotide: Ptpn6-149
ggagaccuucgacagccuca

SEQ ID NO: 21696 - RNA, 20 nt, Artificial Sequence
  Synthetic oligonucleotide: Ptpn6-217
cauugucaucgacaugcuca

SEQ ID NO: 21697 - RNA, 20 nt, Artificial Sequence
  Synthetic oligonucleotide: Ptpn6-2646
ugucuaccugcggcagguca

SEQ ID NO: 21698 - RNA, 20 nt, Artificial Sequence
  Synthetic oligonucleotide: Ptpn6-343
cuuggcaugggcauucuuca

SEQ ID NO: 21699 - RNA, 20 nt, Artificial Sequence
  Synthetic oligonucleotide: Ptpn6-234
ccugcacacuaagaacaaga

SEQ ID NO: 21700 - RNA, 20 nt, Artificial Sequence
  Synthetic oligonucleotide: Ptpn6-152
gguggagcauuucaagaaga

SEQ ID NO: 21701 - RNA, 20 nt, Artificial Sequence
  Synthetic oligonucleotide: Ptpn6-219
cauccagaagaccauccaga

SEQ ID NO: 21702 - RNA, 20 nt, Artificial Sequence
  Synthetic oligonucleotide: Ptpn6-2647
gugggaaggugguucgcaga

SEQ ID NO: 21703 - RNA, 20 nt, Artificial Sequence
  Synthetic oligonucleotide: Ptpn6-186
ggucaaugacuucuggcaga

SEQ ID NO: 21704 - RNA, 20 nt, Artificial Sequence
  Synthetic oligonucleotide: Ptpn6-225
gcgcucgggcauggugcaga

SEQ ID NO: 21705 - RNA, 20 nt, Artificial Sequence
  Synthetic oligonucleotide: Ptpn6-2648
ugggcggagaggaggcgaga

SEQ ID NO: 21706 - RNA, 20 nt, Artificial Sequence
  Synthetic oligonucleotide: Ptpn6-2649
gcaaccguacuaugccacga

SEQ ID NO: 21707 - RNA, 20 nt, Artificial Sequence
  Synthetic oligonucleotide: Ptpn6-353
gguuucaaugaacugggcga

SEQ ID NO: 21708 - RNA, 20 nt, Artificial Sequence
  Synthetic oligonucleotide: Ptpn6-414
cagguccgugaggcugucga

SEQ ID NO: 21709 - RNA, 20 nt, Artificial Sequence
  Synthetic oligonucleotide: Ptpn6-176
gccgagugauccugcaggga

SEQ ID NO: 21710 - RNA, 20 nt, Artificial Sequence
  Synthetic oligonucleotide: Ptpn6-2650
ugggcagagggacaguggga

SEQ ID NO: 21711 - RNA, 20 nt, Artificial Sequence
  Synthetic oligonucleotide: Ptpn6-355
cugcgcccgcaccaucugga

SEQ ID NO: 21712 - RNA, 20 nt, Artificial Sequence
  Synthetic oligonucleotide: Ptpn6-169
aacuugcaccagcgucugga

SEQ ID NO: 21713 - RNA, 20 nt, Artificial Sequence
  Synthetic oligonucleotide: Ptpn6-358
gagcaugucgaugacaauga

SEQ ID NO: 21714 - RNA, 20 nt, Artificial Sequence
  Synthetic oligonucleotide: Ptpn6-2651
ucaccugcagugcacgauga

SEQ ID NO: 21715 - RNA, 20 nt, Artificial Sequence
  Synthetic oligonucleotide: Ptpn6-2652
ggugaggaugauaauccuga

SEQ ID NO: 21716 - RNA, 20 nt, Artificial Sequence
  Synthetic oligonucleotide: Ptpn6-2653
ccgaugccggcggccucuga

SEQ ID NO: 21717 - RNA, 20 nt, Artificial Sequence
  Synthetic oligonucleotide: Ptpn6-2654
aacaucuccaccaaggguga

SEQ ID NO: 21718 - RNA, 20 nt, Artificial Sequence
  Synthetic oligonucleotide: Ptpn6-2655
caccgcucacuuccucuuga

SEQ ID NO: 21719 - RNA, 20 nt, Artificial Sequence
  Synthetic oligonucleotide: Ptpn6-384
augcccaccucgggccagua

SEQ ID NO: 21720 - RNA, 20 nt, Artificial Sequence
  Synthetic oligonucleotide: Ptpn6-381
ccgcaguuggucacagagua

SEQ ID NO: 21721 - RNA, 20 nt, Artificial Sequence
  Synthetic oligonucleotide: Ptpn6-230
aagggccaggagucggagua

SEQ ID NO: 21722 - RNA, 20 nt, Artificial Sequence
  Synthetic oligonucleotide: Ptpn6-410
uucacccucguggcauagua

SEQ ID NO: 21723 - RNA, 20 nt, Artificial Sequence
  Synthetic oligonucleotide: Ptpn6-377
gcggggagaccuguaaggua

SEQ ID NO: 21724 - RNA, 20 nt, Artificial Sequence
  Synthetic oligonucleotide: Ptpn6-2656
agguggagaaaggccgggua

SEQ ID NO: 21725 - RNA, 20 nt, Artificial Sequence
  Synthetic oligonucleotide: Ptpn6-376
guccagcggggagaccugua

SEQ ID NO: 21726 - RNA, 20 nt, Artificial Sequence
  Synthetic oligonucleotide: Ptpn6-196
gugggcaugcagcgugcuua

SEQ ID NO: 21727 - RNA, 20 nt, Artificial Sequence
  Synthetic oligonucleotide: Ptpn6-351
ucuuagugguuucaaugaac

SEQ ID NO: 21728 - RNA, 20 nt, Artificial Sequence
  Synthetic oligonucleotide: Ptpn6-2657
gccgccggcaucggccgcac

SEQ ID NO: 21729 - RNA, 20 nt, Artificial Sequence
  Synthetic oligonucleotide: Ptpn6-367
gaggacacccccaggcucac

SEQ ID NO: 21730 - RNA, 20 nt, Artificial Sequence
  Synthetic oligonucleotide: Ptpn6-2658
ggggcagccugggugcucac

SEQ ID NO: 21731 - RNA, 20 nt, Artificial Sequence
  Synthetic oligonucleotide: Ptpn6-153
guggagcauuucaagaagac

SEQ ID NO: 21732 - RNA, 20 nt, Artificial Sequence
  Synthetic oligonucleotide: Ptpn6-177
ccgagugauccugcagggac

SEQ ID NO: 21733 - RNA, 20 nt, Artificial Sequence
  Synthetic oligonucleotide: Ptpn6-2659
uugaggugcaugguggggac

SEQ ID NO: 21734 - RNA, 20 nt, Artificial Sequence
  Synthetic oligonucleotide: Ptpn6-2660
ggaacaaaugcgucccauac

SEQ ID NO: 21735 - RNA, 20 nt, Artificial Sequence
  Synthetic oligonucleotide: Ptpn6-231
agggccaggagucggaguac

SEQ ID NO: 21736 - RNA, 20 nt, Artificial Sequence
  Synthetic oligonucleotide: Ptpn6-374
ggucgggccagcucagguac

SEQ ID NO: 21737 - RNA, 20 nt, Artificial Sequence
  Synthetic oligonucleotide: Ptpn6-201
auacaaacuccguaccuuac

SEQ ID NO: 21738 - RNA, 20 nt, Artificial Sequence
  Synthetic oligonucleotide: Ptpn6-412
ucuucuugaaaugcuccacc

SEQ ID NO: 21739 - RNA, 20 nt, Artificial Sequence
  Synthetic oligonucleotide: Ptpn6-2661
caccaagggugaggggcacc

SEQ ID NO: 21740 - RNA, 20 nt, Artificial Sequence
  Synthetic oligonucleotide: Ptpn6-2662
uguacuugccccccugcacc

SEQ ID NO: 21741 - RNA, 20 nt, Artificial Sequence
  Synthetic oligonucleotide: Ptpn6-150
cuucgacagccucacggacc

SEQ ID NO: 21742 - RNA, 20 nt, Artificial Sequence
  Synthetic oligonucleotide: Ptpn6-397
ggcauugauguagucggacc

SEQ ID NO: 21743 - RNA, 20 nt, Artificial Sequence
  Synthetic oligonucleotide: Ptpn6-2663
ggaagggggggcgcccuacc

SEQ ID NO: 21744 - RNA, 20 nt, Artificial Sequence
  Synthetic oligonucleotide: Ptpn6-390
ccguggccuccagacaaccc

SEQ ID NO: 21745 - RNA, 20 nt, Artificial Sequence
  Synthetic oligonucleotide: Ptpn6-2664
ccacuguguagcguccaccc

SEQ ID NO: 21746 - RNA, 20 nt, Artificial Sequence
  Synthetic oligonucleotide: Ptpn6-2665
auucuccccugugagcaccc

SEQ ID NO: 21747 - RNA, 20 nt, Artificial Sequence
  Synthetic oligonucleotide: Ptpn6-398
gcauugauguagucggaccc

SEQ ID NO: 21748 - RNA, 20 nt, Artificial Sequence
  Synthetic oligonucleotide: Ptpn6-366
aggaagcugaggacaccccc

SEQ ID NO: 21749 - RNA, 20 nt, Artificial Sequence
  Synthetic oligonucleotide: Ptpn6-2666
ggccuaauuuggcucccccc

SEQ ID NO: 21750 - RNA, 20 nt, Artificial Sequence
  Synthetic oligonucleotide: Ptpn6-2667
ggacauagggucagugcccc

SEQ ID NO: 21751 - RNA, 20 nt, Artificial Sequence
  Synthetic oligonucleotide: Ptpn6-179
gacgggacaguaacaucccc

SEQ ID NO: 21752 - RNA, 20 nt, Artificial Sequence
  Synthetic oligonucleotide: Ptpn6-178
ggacgggacaguaacauccc

SEQ ID NO: 21753 - RNA, 20 nt, Artificial Sequence
  Synthetic oligonucleotide: Ptpn6-180
uaagaccuacaucgccagcc

SEQ ID NO: 21754 - RNA, 20 nt, Artificial Sequence
  Synthetic oligonucleotide: Ptpn6-208
caugggguccccagugagcc

SEQ ID NO: 21755 - RNA, 20 nt, Artificial Sequence
  Synthetic oligonucleotide: Ptpn6-2668
agucaaaccucagguccgcc

SEQ ID NO: 21756 - RNA, 20 nt, Artificial Sequence
  Synthetic oligonucleotide: Ptpn6-2669
ccgagagguggagaaaggcc

SEQ ID NO: 21757 - RNA, 20 nt, Artificial Sequence
  Synthetic oligonucleotide: Ptpn6-2670
aggugguucgcagaagggcc

SEQ ID NO: 21758 - RNA, 20 nt, Artificial Sequence
  Synthetic oligonucleotide: Ptpn6-2671
ggugcgugcagagcagggcc

SEQ ID NO: 21759 - RNA, 20 nt, Artificial Sequence
  Synthetic oligonucleotide: Ptpn6-2672
uggcccugacugccacugcc

SEQ ID NO: 21760 - RNA, 20 nt, Artificial Sequence
  Synthetic oligonucleotide: Ptpn6-349
uguucccguacuccgacucc

SEQ ID NO: 21761 - RNA, 20 nt, Artificial Sequence
  Synthetic oligonucleotide: Ptpn6-2673
aucucccgaaucaggucucc

SEQ ID NO: 21762 - RNA, 20 nt, Artificial Sequence
  Synthetic oligonucleotide: Ptpn6-357
ggaugucaaugucacagucc

SEQ ID NO: 21763 - RNA, 20 nt, Artificial Sequence
  Synthetic oligonucleotide: Ptpn6-364
gccgcugguugaucuggucc

SEQ ID NO: 21764 - RNA, 20 nt, Artificial Sequence
  Synthetic oligonucleotide: Ptpn6-212
uggggguguccucagcuucc

SEQ ID NO: 21765 - RNA, 20 nt, Artificial Sequence
  Synthetic oligonucleotide: Ptpn6-161
guuggaacugaacaagaagc

SEQ ID NO: 21766 - RNA, 20 nt, Artificial Sequence
  Synthetic oligonucleotide: Ptpn6-228
ugaaaccacuaagaagaagc

SEQ ID NO: 21767 - RNA, 20 nt, Artificial Sequence
  Synthetic oligonucleotide: Ptpn6-2674
aucucagaguuugcagaagc

SEQ ID NO: 21768 - RNA, 20 nt, Artificial Sequence
  Synthetic oligonucleotide: Ptpn6-2675
ggccacucacauuguccagc

SEQ ID NO: 21769 - RNA, 20 nt, Artificial Sequence
  Synthetic oligonucleotide: Ptpn6-395
ucucaucagggccuagcagc

SEQ ID NO: 21770 - RNA, 20 nt, Artificial Sequence
  Synthetic oligonucleotide: Ptpn6-2676
ccugcaggugcgugcagagc

SEQ ID NO: 21771 - RNA, 20 nt, Artificial Sequence
  Synthetic oligonucleotide: Ptpn6-204
ggcauuaccaguaccugagc

SEQ ID NO: 21772 - RNA, 20 nt, Artificial Sequence
  Synthetic oligonucleotide: Ptpn6-215
caggaaagucugccucacgc

SEQ ID NO: 21773 - RNA, 20 nt, Artificial Sequence
  Synthetic oligonucleotide: Ptpn6-405
gccgcugcccuuccagacgc

SEQ ID NO: 21774 - RNA, 20 nt, Artificial Sequence
  Synthetic oligonucleotide: Ptpn6-202
uaccuuacaggucuccccgc

SEQ ID NO: 21775 - RNA, 20 nt, Artificial Sequence
  Synthetic oligonucleotide: Ptpn6-2677
ggggugccaucagaggccgc

SEQ ID NO: 21776 - RNA, 20 nt, Artificial Sequence
  Synthetic oligonucleotide: Ptpn6-2678
gcccaccccugaccugccgc

SEQ ID NO: 21777 - RNA, 20 nt, Artificial Sequence
  Synthetic oligonucleotide: Ptpn6-362
gaggcagacuuuccugccgc

SEQ ID NO: 21778 - RNA, 20 nt, Artificial Sequence
  Synthetic oligonucleotide: Ptpn6-192
cccgagagguggagaaaggc

SEQ ID NO: 21779 - RNA, 20 nt, Artificial Sequence
  Synthetic oligonucleotide: Ptpn6-164
uccgaggauacagccaaggc

SEQ ID NO: 21780 - RNA, 20 nt, Artificial Sequence
  Synthetic oligonucleotide: Ptpn6-2679
ggugcaugguggggaccggc

SEQ ID NO: 21781 - RNA, 20 nt, Artificial Sequence
  Synthetic oligonucleotide: Ptpn6-214
ggaccagaucaaccagcggc

SEQ ID NO: 21782 - RNA, 20 nt, Artificial Sequence
  Synthetic oligonucleotide: Ptpn6-2680
cgccuuugucuaccugcggc

SEQ ID NO: 21783 - RNA, 20 nt, Artificial Sequence
  Synthetic oligonucleotide: Ptpn6-2681
augguggggaccggcagggc

SEQ ID NO: 21784 - RNA, 20 nt, Artificial Sequence
  Synthetic oligonucleotide: Ptpn6-344
gcaugggcauucuucauggc

SEQ ID NO: 21785 - RNA, 20 nt, Artificial Sequence
  Synthetic oligonucleotide: Ptpn6-391
ggccuccagacaacccuggc

SEQ ID NO: 21786 - RNA, 20 nt, Artificial Sequence
  Synthetic oligonucleotide: Ptpn6-188
cuucuggcagauggcguggc

SEQ ID NO: 21787 - RNA, 20 nt, Artificial Sequence
  Synthetic oligonucleotide: Ptpn6-360
ggugccugugcggccgaugc

SEQ ID NO: 21788 - RNA, 20 nt, Artificial Sequence
  Synthetic oligonucleotide: Ptpn6-199
ccuacucugugaccaacugc

SEQ ID NO: 21789 - RNA, 20 nt, Artificial Sequence
  Synthetic oligonucleotide: Ptpn6-2682
ggcccaucaucgugcacugc

SEQ ID NO: 21790 - RNA, 20 nt, Artificial Sequence
  Synthetic oligonucleotide: Ptpn6-2683
ccugcucugcacgcaccugc

SEQ ID NO: 21791 - RNA, 20 nt, Artificial Sequence
  Synthetic oligonucleotide: Ptpn6-400
uguuacugucccgucccugc

SEQ ID NO: 21792 - RNA, 20 nt, Artificial Sequence
  Synthetic oligonucleotide: Ptpn6-174
ccacagccgagugauccugc

SEQ ID NO: 21793 - RNA, 20 nt, Artificial Sequence
  Synthetic oligonucleotide: Ptpn6-2684
gaagaagcuggagguccugc

SEQ ID NO: 21794 - RNA, 20 nt, Artificial Sequence
  Synthetic oligonucleotide: Ptpn6-2685
cacucacuuggacgaggugc

SEQ ID NO: 21795 - RNA, 20 nt, Artificial Sequence
  Synthetic oligonucleotide: Ptpn6-221
gaagaccauccagauggugc

SEQ ID NO: 21796 - RNA, 20 nt, Artificial Sequence
  Synthetic oligonucleotide: Ptpn6-339
cccucuuguucuuagugugc

SEQ ID NO: 21797 - RNA, 20 nt, Artificial Sequence
  Synthetic oligonucleotide: Ptpn6-375
aaugccagaucucccgaauc

SEQ ID NO: 21798 - RNA, 20 nt, Artificial Sequence
  Synthetic oligonucleotide: Ptpn6-354
agcgcugcgcccgcaccauc

SEQ ID NO: 21799 - RNA, 20 nt, Artificial Sequence
  Synthetic oligonucleotide: Ptpn6-393
uaggucuuagcguucucauc

SEQ ID NO: 21800 - RNA, 20 nt, Artificial Sequence
  Synthetic oligonucleotide: Ptpn6-203
gagaccugauucgggagauc

SEQ ID NO: 21801 - RNA, 20 nt, Artificial Sequence
  Synthetic oligonucleotide: Ptpn6-363
uuuccugccgcugguugauc

SEQ ID NO: 21802 - RNA, 20 nt, Artificial Sequence
  Synthetic oligonucleotide: Ptpn6-2686
guggggggcagucaaaccuc

SEQ ID NO: 21803 - RNA, 20 nt, Artificial Sequence
  Synthetic oligonucleotide: Ptpn6-383
gcacgcugcaugcccaccuc

SEQ ID NO: 21804 - RNA, 20 nt, Artificial Sequence
  Synthetic oligonucleotide: Ptpn6-157
acggggauugaggaggccuc

SEQ ID NO: 21805 - RNA, 20 nt, Artificial Sequence
  Synthetic oligonucleotide: Ptpn6-2687
aagugagcggugcuguccuc

SEQ ID NO: 21806 - RNA, 20 nt, Artificial Sequence
  Synthetic oligonucleotide: Ptpn6-373
ccccauggucgggccagcuc

SEQ ID NO: 21807 - RNA, 20 nt, Artificial Sequence
  Synthetic oligonucleotide: Ptpn6-223
auggugcgggcgcagcgcuc

SEQ ID NO: 21808 - RNA, 20 nt, Artificial Sequence
  Synthetic oligonucleotide: Ptpn6-386
ccggccuuucuccaccucuc

SEQ ID NO: 21809 - RNA, 20 nt, Artificial Sequence
  Synthetic oligonucleotide: Ptpn6-2688
gaucucccgaaucaggucuc

SEQ ID NO: 21810 - RNA, 20 nt, Artificial Sequence
  Synthetic oligonucleotide: Ptpn6-404
cgguucuugcccuuguucuc

SEQ ID NO: 21811 - RNA, 20 nt, Artificial Sequence
  Synthetic oligonucleotide: Ptpn6-168
gaagaacuugcaccagcguc

SEQ ID NO: 21812 - RNA, 20 nt, Artificial Sequence
  Synthetic oligonucleotide: Ptpn6-2689
uugucuaccugcggcagguc

SEQ ID NO: 21813 - RNA, 20 nt, Artificial Sequence
  Synthetic oligonucleotide: Ptpn6-372
ucacuggggaccccaugguc

SEQ ID NO: 21814 - RNA, 20 nt, Artificial Sequence
  Synthetic oligonucleotide: Ptpn6-182
caucgccagccaggguuguc

SEQ ID NO: 21815 - RNA, 20 nt, Artificial Sequence
  Synthetic oligonucleotide: Ptpn6-2690
ugcccccggagaccugauuc

SEQ ID NO: 21816 - RNA, 20 nt, Artificial Sequence
  Synthetic oligonucleotide: Ptpn6-185
aggccacggucaaugacuuc

SEQ ID NO: 21817 - RNA, 20 nt, Artificial Sequence
  Synthetic oligonucleotide: Ptpn6-165
auacagccaaggcuggcuuc

SEQ ID NO: 21818 - RNA, 20 nt, Artificial Sequence
  Synthetic oligonucleotide: Ptpn6-356
gcaccaucuggauggucuuc

SEQ ID NO: 21819 - RNA, 20 nt, Artificial Sequence
  Synthetic oligonucleotide: Ptpn6-233
accugcacacuaagaacaag

SEQ ID NO: 21820 - RNA, 20 nt, Artificial Sequence
  Synthetic oligonucleotide: Ptpn6-240
agagcaaggguucccucaag

SEQ ID NO: 21821 - RNA, 20 nt, Artificial Sequence
  Synthetic oligonucleotide: Ptpn6-2691
ccaggguggacgcuacacag

SEQ ID NO: 21822 - RNA, 20 nt, Artificial Sequence
  Synthetic oligonucleotide: Ptpn6-2692
ggcagccugggugcucacag

SEQ ID NO: 21823 - RNA, 20 nt, Artificial Sequence
  Synthetic oligonucleotide: Ptpn6-213
uccuggaccagaucaaccag

SEQ ID NO: 21824 - RNA, 20 nt, Artificial Sequence
  Synthetic oligonucleotide: Ptpn6-2693
gggccacucacauuguccag

SEQ ID NO: 21825 - RNA, 20 nt, Artificial Sequence
  Synthetic oligonucleotide: Ptpn6-236
aggagaaagugaagaagcag

SEQ ID NO: 21826 - RNA, 20 nt, Artificial Sequence
  Synthetic oligonucleotide: Ptpn6-171
accagcgucuggaagggcag

SEQ ID NO: 21827 - RNA, 20 nt, Artificial Sequence
  Synthetic oligonucleotide: Ptpn6-2694
aaagacgggggugccaucag

SEQ ID NO: 21828 - RNA, 20 nt, Artificial Sequence
  Synthetic oligonucleotide: Ptpn6-2695
gucuaccugcggcaggucag

SEQ ID NO: 21829 - RNA, 20 nt, Artificial Sequence
  Synthetic oligonucleotide: Ptpn6-189
caucgucaugaccacccgag

SEQ ID NO: 21830 - RNA, 20 nt, Artificial Sequence
  Synthetic oligonucleotide: Ptpn6-2696
ccgcaccucguccaagugag

SEQ ID NO: 21831 - RNA, 20 nt, Artificial Sequence
  Synthetic oligonucleotide: Ptpn6-2697
uucccucaagaggaagugag

SEQ ID NO: 21832 - RNA, 20 nt, Artificial Sequence
  Synthetic oligonucleotide: Ptpn6-2698
acaucuccaccaagggugag

SEQ ID NO: 21833 - RNA, 20 nt, Artificial Sequence
  Synthetic oligonucleotide: Ptpn6-2699
uccccgcuggacaaugugag

SEQ ID NO: 21834 - RNA, 20 nt, Artificial Sequence
  Synthetic oligonucleotide: Ptpn6-403
aggggagaauguucuuguag

SEQ ID NO: 21835 - RNA, 20 nt, Artificial Sequence
  Synthetic oligonucleotide: Ptpn6-350
gaccuccagcuucuucuuag

SEQ ID NO: 21836 - RNA, 20 nt, Artificial Sequence
  Synthetic oligonucleotide: Ptpn6-2700
ggucagcagugugggccacg

SEQ ID NO: 21837 - RNA, 20 nt, Artificial Sequence
  Synthetic oligonucleotide: Ptpn6-2701
agcaaccguacuaugccacg

SEQ ID NO: 21838 - RNA, 20 nt, Artificial Sequence
  Synthetic oligonucleotide: Ptpn6-154
uggagcauuucaagaagacg

SEQ ID NO: 21839 - RNA, 20 nt, Artificial Sequence
  Synthetic oligonucleotide: Ptpn6-2702
cagggccacucacuuggacg

SEQ ID NO: 21840 - RNA, 20 nt, Artificial Sequence
  Synthetic oligonucleotide: Ptpn6-227
gcaguacaaguucaucuacg

SEQ ID NO: 21841 - RNA, 20 nt, Artificial Sequence
  Synthetic oligonucleotide: Ptpn6-389
cugccagaagucauugaccg

SEQ ID NO: 21842 - RNA, 20 nt, Artificial Sequence
  Synthetic oligonucleotide: Ptpn6-399
cauugauguagucggacccg

SEQ ID NO: 21843 - RNA, 20 nt, Artificial Sequence
  Synthetic oligonucleotide: Ptpn6-193
augcgucccauacuggcccg

SEQ ID NO: 21844 - RNA, 20 nt, Artificial Sequence
  Synthetic oligonucleotide: Ptpn6-2703
ucucccgaaucaggucuccg

SEQ ID NO: 21845 - RNA, 20 nt, Artificial Sequence
  Synthetic oligonucleotide: Ptpn6-162
gaacaagaagcaggaguccg

SEQ ID NO: 21846 - RNA, 20 nt, Artificial Sequence
  Synthetic oligonucleotide: Ptpn6-2704
gccacucacauuguccagcg

SEQ ID NO: 21847 - RNA, 20 nt, Artificial Sequence
  Synthetic oligonucleotide: Ptpn6-187
augacuucuggcagauggcg

SEQ ID NO: 21848 - RNA, 20 nt, Artificial Sequence
  Synthetic oligonucleotide: Ptpn6-200
cuacucugugaccaacugcg

SEQ ID NO: 21849 - RNA, 20 nt, Artificial Sequence
  Synthetic oligonucleotide: Ptpn6-409
gucagccgcauucacccucg

SEQ ID NO: 21850 - RNA, 20 nt, Artificial Sequence
  Synthetic oligonucleotide: Ptpn6-2705
gggcaaguacagacacaagg

SEQ ID NO: 21851 - RNA, 20 nt, Artificial Sequence
  Synthetic oligonucleotide: Ptpn6-2706
gcagagggacagugggaagg

SEQ ID NO: 21852 - RNA, 20 nt, Artificial Sequence
  Synthetic oligonucleotide: Ptpn6-2707
ugucaaugucacaguccagg

SEQ ID NO: 21853 - RNA, 20 nt, Artificial Sequence
  Synthetic oligonucleotide: Ptpn6-2708
ucagaguuugcagaagcagg

SEQ ID NO: 21854 - RNA, 20 nt, Artificial Sequence
  Synthetic oligonucleotide: Ptpn6-2709
ugagcggugcuguccucagg

SEQ ID NO: 21855 - RNA, 20 nt, Artificial Sequence
  Synthetic oligonucleotide: Ptpn6-190
cgucaugaccacccgagagg

SEQ ID NO: 21856 - RNA, 20 nt, Artificial Sequence
  Synthetic oligonucleotide: Ptpn6-194
cgucccauacuggcccgagg

SEQ ID NO: 21857 - RNA, 20 nt, Artificial Sequence
  Synthetic oligonucleotide: Ptpn6-156
caagaagacggggauugagg

SEQ ID NO: 21858 - RNA, 20 nt, Artificial Sequence
  Synthetic oligonucleotide: Ptpn6-226
cucgggcauggugcagacgg

SEQ ID NO: 21859 - RNA, 20 nt, Artificial Sequence
  Synthetic oligonucleotide: Ptpn6-2710
gccugugcggccgaugccgg

SEQ ID NO: 21860 - RNA, 20 nt, Artificial Sequence
  Synthetic oligonucleotide: Ptpn6-2711
cucccgaaucaggucuccgg

SEQ ID NO: 21861 - RNA, 20 nt, Artificial Sequence
  Synthetic oligonucleotide: Ptpn6-2712
uaauuuggcuccccccaggg

SEQ ID NO: 21862 - RNA, 20 nt, Artificial Sequence
  Synthetic oligonucleotide: Ptpn6-235
gcacacuaagaacaagaggg

SEQ ID NO: 21863 - RNA, 20 nt, Artificial Sequence
  Synthetic oligonucleotide: Ptpn6-2713
ucacuuggacgaggugcggg

SEQ ID NO: 21864 - RNA, 20 nt, Artificial Sequence
  Synthetic oligonucleotide: Ptpn6-387
gccuuucuccaccucucggg

SEQ ID NO: 21865 - RNA, 20 nt, Artificial Sequence
  Synthetic oligonucleotide: Ptpn6-2714
uaccugcggcaggucagggg

SEQ ID NO: 21866 - RNA, 20 nt, Artificial Sequence
  Synthetic oligonucleotide: Ptpn6-2715
cagagcagggccuggggggg

SEQ ID NO: 21867 - RNA, 20 nt, Artificial Sequence
  Synthetic oligonucleotide: Ptpn6-2716
gcagagcagggccugggggg

SEQ ID NO: 21868 - RNA, 20 nt, Artificial Sequence
  Synthetic oligonucleotide: Ptpn6-2717
ugcagagcagggccuggggg

SEQ ID NO: 21869 - RNA, 20 nt, Artificial Sequence
  Synthetic oligonucleotide: Ptpn6-2718
ggcaccuggggguuuggggg

SEQ ID NO: 21870 - RNA, 20 nt, Artificial Sequence
  Synthetic oligonucleotide: Ptpn6-2719
gugcagagcagggccugggg

SEQ ID NO: 21871 - RNA, 20 nt, Artificial Sequence
  Synthetic oligonucleotide: Ptpn6-2720
uguguagcguccacccuggg

SEQ ID NO: 21872 - RNA, 20 nt, Artificial Sequence
  Synthetic oligonucleotide: Ptpn6-2721
cgugcagagcagggccuggg

SEQ ID NO: 21873 - RNA, 20 nt, Artificial Sequence
  Synthetic oligonucleotide: Ptpn6-167
agccaaggcuggcuucuggg

SEQ ID NO: 21874 - RNA, 20 nt, Artificial Sequence
  Synthetic oligonucleotide: Ptpn6-147
gguggacgcuacacaguggg

SEQ ID NO: 21875 - RNA, 20 nt, Artificial Sequence
  Synthetic oligonucleotide: Ptpn6-2722
agcagugugggccacguggg

SEQ ID NO: 21876 - RNA, 20 nt, Artificial Sequence
  Synthetic oligonucleotide: Ptpn6-2723
ugcaaacucugagauguggg

SEQ ID NO: 21877 - RNA, 20 nt, Artificial Sequence
  Synthetic oligonucleotide: Ptpn6-2724
gaggaguuugaggugcaugg

SEQ ID NO: 21878 - RNA, 20 nt, Artificial Sequence
  Synthetic oligonucleotide: Ptpn6-2725
caagggugaggggcaccugg

SEQ ID NO: 21879 - RNA, 20 nt, Artificial Sequence
  Synthetic oligonucleotide: Ptpn6-151
cgacagccucacggaccugg

SEQ ID NO: 21880 - RNA, 20 nt, Artificial Sequence
  Synthetic oligonucleotide: Ptpn6-2726
cuguguagcguccacccugg

SEQ ID NO: 21881 - RNA, 20 nt, Artificial Sequence
  Synthetic oligonucleotide: Ptpn6-211
gggguccccagugagccugg

SEQ ID NO: 21882 - RNA, 20 nt, Artificial Sequence
  Synthetic oligonucleotide: Ptpn6-2727
gcgugcagagcagggccugg

SEQ ID NO: 21883 - RNA, 20 nt, Artificial Sequence
  Synthetic oligonucleotide: Ptpn6-229
aaccacuaagaagaagcugg

SEQ ID NO: 21884 - RNA, 20 nt, Artificial Sequence
  Synthetic oligonucleotide: Ptpn6-347
ugggcauucuucauggcugg

SEQ ID NO: 21885 - RNA, 20 nt, Artificial Sequence
  Synthetic oligonucleotide: Ptpn6-183
cgccagccaggguugucugg

SEQ ID NO: 21886 - RNA, 20 nt, Artificial Sequence
  Synthetic oligonucleotide: Ptpn6-2728
caggugccccucacccuugg

SEQ ID NO: 21887 - RNA, 20 nt, Artificial Sequence
  Synthetic oligonucleotide: Ptpn6-2729
aggggcaccuggggguuugg

SEQ ID NO: 21888 - RNA, 20 nt, Artificial Sequence
  Synthetic oligonucleotide: Ptpn6-159
cuaugccacgagggugaaug

SEQ ID NO: 21889 - RNA, 20 nt, Artificial Sequence
  Synthetic oligonucleotide: Ptpn6-207
ccugagcuggcccgaccaug

SEQ ID NO: 21890 - RNA, 20 nt, Artificial Sequence
  Synthetic oligonucleotide: Ptpn6-2730
cuucugcaaacucugagaug

SEQ ID NO: 21891 - RNA, 20 nt, Artificial Sequence
  Synthetic oligonucleotide: Ptpn6-2731
gggagggucggguggggaug

SEQ ID NO: 21892 - RNA, 20 nt, Artificial Sequence
  Synthetic oligonucleotide: Ptpn6-198
cccuacucugugaccaacug

SEQ ID NO: 21893 - RNA, 20 nt, Artificial Sequence
  Synthetic oligonucleotide: Ptpn6-369
ggacacccccaggcucacug

SEQ ID NO: 21894 - RNA, 20 nt, Artificial Sequence
  Synthetic oligonucleotide: Ptpn6-2732
ccaagggugaggggcaccug

SEQ ID NO: 21895 - RNA, 20 nt, Artificial Sequence
  Synthetic oligonucleotide: Ptpn6-2733
ucacaguccaggcggaccug

SEQ ID NO: 21896 - RNA, 20 nt, Artificial Sequence
  Synthetic oligonucleotide: Ptpn6-158
caggcgccuuugucuaccug

SEQ ID NO: 21897 - RNA, 20 nt, Artificial Sequence
  Synthetic oligonucleotide: Ptpn6-2734
acuguguagcguccacccug

SEQ ID NO: 21898 - RNA, 20 nt, Artificial Sequence
  Synthetic oligonucleotide: Ptpn6-210
ugggguccccagugagccug

SEQ ID NO: 21899 - RNA, 20 nt, Artificial Sequence
  Synthetic oligonucleotide: Ptpn6-411
cagguagacaaaggcgccug

SEQ ID NO: 21900 - RNA, 20 nt, Artificial Sequence
  Synthetic oligonucleotide: Ptpn6-2735
ugcgugcagagcagggccug

SEQ ID NO: 21901 - RNA, 20 nt, Artificial Sequence
  Synthetic oligonucleotide: Ptpn6-365
ugaucugguccaggaagcug

SEQ ID NO: 21902 - RNA, 20 nt, Artificial Sequence
  Synthetic oligonucleotide: Ptpn6-402
ccugcaggaucacucggcug

SEQ ID NO: 21903 - RNA, 20 nt, Artificial Sequence
  Synthetic oligonucleotide: Ptpn6-2736
gguggggaccggcagggcug

SEQ ID NO: 21904 - RNA, 20 nt, Artificial Sequence
  Synthetic oligonucleotide: Ptpn6-346
augggcauucuucauggcug

SEQ ID NO: 21905 - RNA, 20 nt, Artificial Sequence
  Synthetic oligonucleotide: Ptpn6-2737
cuacaucaaggucagcagug

SEQ ID NO: 21906 - RNA, 20 nt, Artificial Sequence
  Synthetic oligonucleotide: Ptpn6-413
aaugcuccaccagguccgug

SEQ ID NO: 21907 - RNA, 20 nt, Artificial Sequence
  Synthetic oligonucleotide: Ptpn6-361
acgaugaugggcccugcgug

SEQ ID NO: 21908 - RNA, 20 nt, Artificial Sequence
  Synthetic oligonucleotide: Ptpn6-2738
aucaucgugcacugcaggug

SEQ ID NO: 21909 - RNA, 20 nt, Artificial Sequence
  Synthetic oligonucleotide: Ptpn6-2739
ccacucacuuggacgaggug

SEQ ID NO: 21910 - RNA, 20 nt, Artificial Sequence
  Synthetic oligonucleotide: Ptpn6-2740
gaacaucuccaccaagggug

SEQ ID NO: 21911 - RNA, 20 nt, Artificial Sequence
  Synthetic oligonucleotide: Ptpn6-2741
uggaaagggagggucgggug

SEQ ID NO: 21912 - RNA, 20 nt, Artificial Sequence
  Synthetic oligonucleotide: Ptpn6-2742
caaacucugagaugugggug

SEQ ID NO: 21913 - RNA, 20 nt, Artificial Sequence
  Synthetic oligonucleotide: Ptpn6-2743
ggaguuugaggugcauggug

SEQ ID NO: 21914 - RNA, 20 nt, Artificial Sequence
  Synthetic oligonucleotide: Ptpn6-220
agaagaccauccagauggug

SEQ ID NO: 21915 - RNA, 20 nt, Artificial Sequence
  Synthetic oligonucleotide: Ptpn6-359
ugacaaugauggugccugug

SEQ ID NO: 21916 - RNA, 20 nt, Artificial Sequence
  Synthetic oligonucleotide: Ptpn6-155
uuucaagaagacggggauug

SEQ ID NO: 21917 - RNA, 20 nt, Artificial Sequence
  Synthetic oligonucleotide: Ptpn6-2744
gcaccgcucacuuccucuug

SEQ ID NO: 21918 - RNA, 20 nt, Artificial Sequence
  Synthetic oligonucleotide: Ptpn6-2745
uggcuucugggaggaguuug

SEQ ID NO: 21919 - RNA, 20 nt, Artificial Sequence
  Synthetic oligonucleotide: Ptpn6-2746
gaggggcaccuggggguuug

SEQ ID NO: 21920 - RNA, 20 nt, Artificial Sequence
  Synthetic oligonucleotide: Ptpn6-2747
agggccuagcagcugguuug

SEQ ID NO: 21921 - RNA, 20 nt, Artificial Sequence
  Synthetic oligonucleotide: Ptpn6-206
accugagcuggcccgaccau

SEQ ID NO: 21922 - RNA, 20 nt, Artificial Sequence
  Synthetic oligonucleotide: Ptpn6-2748
ccaucagaggccgccggcau

SEQ ID NO: 21923 - RNA, 20 nt, Artificial Sequence
  Synthetic oligonucleotide: Ptpn6-342
ggugcgggaggccuuggcau

SEQ ID NO: 21924 - RNA, 20 nt, Artificial Sequence
  Synthetic oligonucleotide: Ptpn6-348
auucuucauggcugggggau

SEQ ID NO: 21925 - RNA, 20 nt, Artificial Sequence
  Synthetic oligonucleotide: Ptpn6-2749
caccugcagugcacgaugau

SEQ ID NO: 21926 - RNA, 20 nt, Artificial Sequence
  Synthetic oligonucleotide: Ptpn6-385
ugcccaccucgggccaguau

SEQ ID NO: 21927 - RNA, 20 nt, Artificial Sequence
  Synthetic oligonucleotide: Ptpn6-197
ugggcaugcagcgugcuuau

SEQ ID NO: 21928 - RNA, 20 nt, Artificial Sequence
  Synthetic oligonucleotide: Ptpn6-352
cuuagugguuucaaugaacu

SEQ ID NO: 21929 - RNA, 20 nt, Artificial Sequence
  Synthetic oligonucleotide: Ptpn6-408
ucuuguucaguuccaacacu

SEQ ID NO: 21930 - RNA, 20 nt, Artificial Sequence
  Synthetic oligonucleotide: Ptpn6-401
cccgucccugcaggaucacu

SEQ ID NO: 21931 - RNA, 20 nt, Artificial Sequence
  Synthetic oligonucleotide: Ptpn6-2750
ggcagucagggccacucacu

SEQ ID NO: 21932 - RNA, 20 nt, Artificial Sequence
  Synthetic oligonucleotide: Ptpn6-368
aggacacccccaggcucacu

SEQ ID NO: 21933 - RNA, 20 nt, Artificial Sequence
  Synthetic oligonucleotide: Ptpn6-382
agcacgcugcaugcccaccu

SEQ ID NO: 21934 - RNA, 20 nt, Artificial Sequence
  Synthetic oligonucleotide: Ptpn6-2751
accaagggugaggggcaccu

SEQ ID NO: 21935 - RNA, 20 nt, Artificial Sequence
  Synthetic oligonucleotide: Ptpn6-2752
cacuguguagcguccacccu

SEQ ID NO: 21936 - RNA, 20 nt, Artificial Sequence
  Synthetic oligonucleotide: Ptpn6-2753
ccccaggugccccucacccu

SEQ ID NO: 21937 - RNA, 20 nt, Artificial Sequence
  Synthetic oligonucleotide: Ptpn6-406
cuccucccagaagccagccu

SEQ ID NO: 21938 - RNA, 20 nt, Artificial Sequence
  Synthetic oligonucleotide: Ptpn6-2754
cugggugaauggggcagccu

SEQ ID NO: 21939 - RNA, 20 nt, Artificial Sequence
  Synthetic oligonucleotide: Ptpn6-209
augggguccccagugagccu

SEQ ID NO: 21940 - RNA, 20 nt, Artificial Sequence
  Synthetic oligonucleotide: Ptpn6-340
ggacgaggugcgggaggccu

SEQ ID NO: 21941 - RNA, 20 nt, Artificial Sequence
  Synthetic oligonucleotide: Ptpn6-2755
gugcgugcagagcagggccu

SEQ ID NO: 21942 - RNA, 20 nt, Artificial Sequence
  Synthetic oligonucleotide: Ptpn6-407
gccagccuuggcuguauccu

SEQ ID NO: 21943 - RNA, 20 nt, Artificial Sequence
  Synthetic oligonucleotide: Ptpn6-2756
gggcacugacccuauguccu

SEQ ID NO: 21944 - RNA, 20 nt, Artificial Sequence
  Synthetic oligonucleotide: Ptpn6-222
gauggugcgggcgcagcgcu

SEQ ID NO: 21945 - RNA, 20 nt, Artificial Sequence
  Synthetic oligonucleotide: Ptpn6-2757
ugguggggaccggcagggcu

SEQ ID NO: 21946 - RNA, 20 nt, Artificial Sequence
  Synthetic oligonucleotide: Ptpn6-345
caugggcauucuucauggcu

SEQ ID NO: 21947 - RNA, 20 nt, Artificial Sequence
  Synthetic oligonucleotide: Ptpn6-2758
cgcaccccaaaccagcugcu

SEQ ID NO: 21948 - RNA, 20 nt, Artificial Sequence
  Synthetic oligonucleotide: Ptpn6-2759
cccggccuuucuccaccucu

SEQ ID NO: 21949 - RNA, 20 nt, Artificial Sequence
  Synthetic oligonucleotide: Ptpn6-166
uacagccaaggcuggcuucu

SEQ ID NO: 21950 - RNA, 20 nt, Artificial Sequence
  Synthetic oligonucleotide: Ptpn6-2760
caggguggacgcuacacagu

SEQ ID NO: 21951 - RNA, 20 nt, Artificial Sequence
  Synthetic oligonucleotide: Ptpn6-379
ugugucaugcuccccgcagu

SEQ ID NO: 21952 - RNA, 20 nt, Artificial Sequence
  Synthetic oligonucleotide: Ptpn6-380
cccgcaguuggucacagagu

SEQ ID NO: 21953 - RNA, 20 nt, Artificial Sequence
  Synthetic oligonucleotide: Ptpn6-2761
uucgcagaagggccaggagu

SEQ ID NO: 21954 - RNA, 20 nt, Artificial Sequence
  Synthetic oligonucleotide: Ptpn6-396
guaguuggcauugauguagu

SEQ ID NO: 21955 - RNA, 20 nt, Artificial Sequence
  Synthetic oligonucleotide: Ptpn6-2762
acugcugaccuugauguagu

SEQ ID NO: 21956 - RNA, 20 nt, Artificial Sequence
  Synthetic oligonucleotide: Ptpn6-2763
gucagcagugugggccacgu

SEQ ID NO: 21957 - RNA, 20 nt, Artificial Sequence
  Synthetic oligonucleotide: Ptpn6-195
gucccauacuggcccgaggu

SEQ ID NO: 21958 - RNA, 20 nt, Artificial Sequence
  Synthetic oligonucleotide: Ptpn6-2764
gagguggagaaaggccgggu

SEQ ID NO: 21959 - RNA, 20 nt, Artificial Sequence
  Synthetic oligonucleotide: Ptpn6-2765
cuggaaagggagggucgggu

SEQ ID NO: 21960 - RNA, 20 nt, Artificial Sequence
  Synthetic oligonucleotide: Ptpn6-2766
accugcggcaggucaggggu

SEQ ID NO: 21961 - RNA, 20 nt, Artificial Sequence
  Synthetic oligonucleotide: Ptpn6-2767
gcaccuggggguuugggggu

SEQ ID NO: 21962 - RNA, 20 nt, Artificial Sequence
  Synthetic oligonucleotide: Ptpn6-2768
gcaaacucugagaugugggu

SEQ ID NO: 21963 - RNA, 20 nt, Artificial Sequence
  Synthetic oligonucleotide: Ptpn6-371
cucacuggggaccccauggu

SEQ ID NO: 21964 - RNA, 20 nt, Artificial Sequence
  Synthetic oligonucleotide: Ptpn6-2769
aggaguuugaggugcauggu

SEQ ID NO: 21965 - RNA, 20 nt, Artificial Sequence
  Synthetic oligonucleotide: Ptpn6-2770
uucugcaaacucugagaugu

SEQ ID NO: 21966 - RNA, 20 nt, Artificial Sequence
  Synthetic oligonucleotide: Ptpn6-392
acaacccuggcuggcgaugu

SEQ ID NO: 21967 - RNA, 20 nt, Artificial Sequence
  Synthetic oligonucleotide: Ptpn6-2771
uacaucaaggucagcagugu

SEQ ID NO: 21968 - RNA, 20 nt, Artificial Sequence
  Synthetic oligonucleotide: Ptpn6-160
ugacauugagaaccgagugu

SEQ ID NO: 21969 - RNA, 20 nt, Artificial Sequence
  Synthetic oligonucleotide: Ptpn6-2772
acccuggggggagccaaauu

SEQ ID NO: 21970 - RNA, 20 nt, Artificial Sequence
  Synthetic oligonucleotide: Ptpn6-2773
gugcccccggagaccugauu

SEQ ID NO: 21971 - RNA, 20 nt, Artificial Sequence
  Synthetic oligonucleotide: Ptpn6-378
uaagguacggaguuuguauu

SEQ ID NO: 21972 - RNA, 20 nt, Artificial Sequence
  Synthetic oligonucleotide: Ptpn6-2774
gugaggggcaccuggggguu

SEQ ID NO: 21973 - RNA, 20 nt, Artificial Sequence
  Synthetic oligonucleotide: Ptpn6-2775
ucagggccuagcagcugguu

SEQ ID NO: 21974 - RNA, 20 nt, Artificial Sequence
  Synthetic oligonucleotide: Ptpn6-148
acgcuacacagugggugguu

SEQ ID NO: 21975 - RNA, 20 nt, Artificial Sequence
  Synthetic oligonucleotide: Ptpn6-2776
ugaggggcaccuggggguuu

SEQ ID NO: 21976 - RNA, 20 nt, Artificial Sequence
  Synthetic oligonucleotide: Ptpn6-2777
cagggccuagcagcugguuu

SEQ ID NO: 21977 - RNA, 18 nt, Artificial Sequence
  Synthetic oligonucleotide: Ptpn6-2778
ugggaucggagcaguuca

SEQ ID NO: 21978 - RNA, 19 nt, Artificial Sequence
  Synthetic oligonucleotide: Ptpn6-2779
gugggaucggagcaguuca

SEQ ID NO: 21979 - RNA, 20 nt, Artificial Sequence
  Synthetic oligonucleotide: Ptpn6-584
agugggaucggagcaguuca

SEQ ID NO: 21980 - RNA, 21 nt, Artificial Sequence
  Synthetic oligonucleotide: Ptpn6-2780
uagugggaucggagcaguuca

SEQ ID NO: 21981 - RNA, 22 nt, Artificial Sequence
  Synthetic oligonucleotide: Ptpn6-2781
cuagugggaucggagcaguuca

SEQ ID NO: 21982 - RNA, 23 nt, Artificial Sequence
  Synthetic oligonucleotide: Ptpn6-2782
acuagugggaucggagcaguuca

SEQ ID NO: 21983 - RNA, 24 nt, Artificial Sequence
  Synthetic oligonucleotide: Ptpn6-2783
cacuagugggaucggagcaguuca

SEQ ID NO: 21984 - RNA, 21 nt, Artificial Sequence
  Synthetic oligonucleotide: Ptpn6-2784
cauacaggucauagaaauccc

SEQ ID NO: 21985 - RNA, 22 nt, Artificial Sequence
  Synthetic oligonucleotide: Ptpn6-2785
ccauacaggucauagaaauccc

SEQ ID NO: 21986 - RNA, 23 nt, Artificial Sequence
  Synthetic oligonucleotide: Ptpn6-2786
uccauacaggucauagaaauccc

SEQ ID NO: 21987 - RNA, 24 nt, Artificial Sequence
  Synthetic oligonucleotide: Ptpn6-2787
cuccauacaggucauagaaauccc

SEQ ID NO: 21988 - RNA, 21 nt, Artificial Sequence
  Synthetic oligonucleotide: Ptpn6-2788
gcaguucagcggguacuugag

SEQ ID NO: 21989 - RNA, 22 nt, Artificial Sequence
  Synthetic oligonucleotide: Ptpn6-2789
agcaguucagcggguacuugag

SEQ ID NO: 21990 - RNA, 23 nt, Artificial Sequence
  Synthetic oligonucleotide: Ptpn6-2790
gagcaguucagcggguacuugag

SEQ ID NO: 21991 - RNA, 24 nt, Artificial Sequence
  Synthetic oligonucleotide: Ptpn6-2791
ggagcaguucagcggguacuugag

SEQ ID NO: 21992 - RNA, 18 nt, Artificial Sequence
  Synthetic oligonucleotide: Ptpn6-2792
gacaccucggcccuugag

SEQ ID NO: 21993 - RNA, 19 nt, Artificial Sequence
  Synthetic oligonucleotide: Ptpn6-2793
ggacaccucggcccuugag

SEQ ID NO: 21994 - RNA, 20 nt, Artificial Sequence
  Synthetic oligonucleotide: Ptpn6-601
uggacaccucggcccuugag

SEQ ID NO: 21995 - RNA, 21 nt, Artificial Sequence
  Synthetic oligonucleotide: Ptpn6-2794
ggagcccucaccucucacuag

SEQ ID NO: 21996 - RNA, 22 nt, Artificial Sequence
  Synthetic oligonucleotide: Ptpn6-2795
cggagcccucaccucucacuag

SEQ ID NO: 21997 - RNA, 23 nt, Artificial Sequence
  Synthetic oligonucleotide: Ptpn6-2796
gcggagcccucaccucucacuag

SEQ ID NO: 21998 - RNA, 24 nt, Artificial Sequence
  Synthetic oligonucleotide: Ptpn6-2797
ugcggagcccucaccucucacuag

SEQ ID NO: 21999 - RNA, 21 nt, Artificial Sequence
  Synthetic oligonucleotide: Ptpn6-2798
cccugaguucuggauccgaau

SEQ ID NO: 22000 - RNA, 22 nt, Artificial Sequence
  Synthetic oligonucleotide: Ptpn6-2799
ccccugaguucuggauccgaau

SEQ ID NO: 22001 - RNA, 23 nt, Artificial Sequence
  Synthetic oligonucleotide: Ptpn6-2800
uccccugaguucuggauccgaau

SEQ ID NO: 22002 - RNA, 24 nt, Artificial Sequence
  Synthetic oligonucleotide: Ptpn6-2801
auccccugaguucuggauccgaau

SEQ ID NO: 22003 - RNA, 21 nt, Artificial Sequence
  Synthetic oligonucleotide: Ptpn6-2802
gaaauccccugaguucuggau

SEQ ID NO: 22004 - RNA, 22 nt, Artificial Sequence
  Synthetic oligonucleotide: Ptpn6-2803
agaaauccccugaguucuggau

SEQ ID NO: 22005 - RNA, 23 nt, Artificial Sequence
  Synthetic oligonucleotide: Ptpn6-2804
uagaaauccccugaguucuggau

SEQ ID NO: 22006 - RNA, 24 nt, Artificial Sequence
  Synthetic oligonucleotide: Ptpn6-2805
auagaaauccccugaguucuggau

SEQ ID NO: 22007 - RNA, 18 nt, Artificial Sequence
  Synthetic oligonucleotide: Ptpn6-2806
cucgcacaugaccuugau

SEQ ID NO: 22008 - RNA, 19 nt, Artificial Sequence
  Synthetic oligonucleotide: Ptpn6-2807
ccucgcacaugaccuugau

SEQ ID NO: 22009 - RNA, 20 nt, Artificial Sequence
  Synthetic oligonucleotide: Ptpn6-2808
accucgcacaugaccuugau

SEQ ID NO: 22010 - RNA, 21 nt, Artificial Sequence
  Synthetic oligonucleotide: Ptpn6-2809
uaccucgcacaugaccuugau

SEQ ID NO: 22011 - RNA, 22 nt, Artificial Sequence
  Synthetic oligonucleotide: Ptpn6-2810
uuaccucgcacaugaccuugau

SEQ ID NO: 22012 - RNA, 23 nt, Artificial Sequence
  Synthetic oligonucleotide: Ptpn6-2811
cuuaccucgcacaugaccuugau

SEQ ID NO: 22013 - RNA, 24 nt, Artificial Sequence
  Synthetic oligonucleotide: Ptpn6-2812
ccuuaccucgcacaugaccuugau

SEQ ID NO: 22014 - RNA, 18 nt, Artificial Sequence
  Synthetic oligonucleotide: Ptpn6-2813
guacuccaccagcucugu

SEQ ID NO: 22015 - RNA, 19 nt, Artificial Sequence
  Synthetic oligonucleotide: Ptpn6-2814
aguacuccaccagcucugu

SEQ ID NO: 22016 - RNA, 20 nt, Artificial Sequence
  Synthetic oligonucleotide: Ptpn6-589
uaguacuccaccagcucugu

SEQ ID NO: 22017 - RNA, 21 nt, Artificial Sequence
  Synthetic oligonucleotide: Ptpn6-2815
guaguacuccaccagcucugu

SEQ ID NO: 22018 - RNA, 22 nt, Artificial Sequence
  Synthetic oligonucleotide: Ptpn6-2816
uguaguacuccaccagcucugu

SEQ ID NO: 22019 - RNA, 23 nt, Artificial Sequence
  Synthetic oligonucleotide: Ptpn6-2817
guguaguacuccaccagcucugu

SEQ ID NO: 22020 - RNA, 24 nt, Artificial Sequence
  Synthetic oligonucleotide: Ptpn6-2818
aguguaguacuccaccagcucugu

SEQ ID NO: 22021 - RNA, 18 nt, Artificial Sequence
  Synthetic oligonucleotide: Ptpn6-2819
auagaaauccccugaguu

SEQ ID NO: 22022 - RNA, 19 nt, Artificial Sequence
  Synthetic oligonucleotide: Ptpn6-2820
cauagaaauccccugaguu

SEQ ID NO: 22023 - RNA, 20 nt, Artificial Sequence
  Synthetic oligonucleotide: Ptpn6-592
ucauagaaauccccugaguu

SEQ ID NO: 22024 - RNA, 21 nt, Artificial Sequence
  Synthetic oligonucleotide: Ptpn6-2821
gucauagaaauccccugaguu

SEQ ID NO: 22025 - RNA, 22 nt, Artificial Sequence
  Synthetic oligonucleotide: Ptpn6-2822
ggucauagaaauccccugaguu

SEQ ID NO: 22026 - RNA, 23 nt, Artificial Sequence
  Synthetic oligonucleotide: Ptpn6-2823
aggucauagaaauccccugaguu

SEQ ID NO: 22027 - RNA, 24 nt, Artificial Sequence
  Synthetic oligonucleotide: Ptpn6-2824
caggucauagaaauccccugaguu

SEQ ID NO: 22028 - RNA, 18 nt, Artificial Sequence
  Synthetic oligonucleotide: Ptpn6-2825
auucggauccagaacuca

SEQ ID NO: 22029 - RNA, 19 nt, Artificial Sequence
  Synthetic oligonucleotide: Ptpn6-2826
uauucggauccagaacuca

SEQ ID NO: 22030 - RNA, 20 nt, Artificial Sequence
  Synthetic oligonucleotide: Ptpn6-96
auauucggauccagaacuca

SEQ ID NO: 22031 - RNA, 21 nt, Artificial Sequence
  Synthetic oligonucleotide: Ptpn6-2827
cauauucggauccagaacuca

SEQ ID NO: 22032 - RNA, 22 nt, Artificial Sequence
  Synthetic oligonucleotide: Ptpn6-2828
ccauauucggauccagaacuca

SEQ ID NO: 22033 - RNA, 23 nt, Artificial Sequence
  Synthetic oligonucleotide: Ptpn6-2829
cccauauucggauccagaacuca

SEQ ID NO: 22034 - RNA, 24 nt, Artificial Sequence
  Synthetic oligonucleotide: Ptpn6-2830
acccauauucggauccagaacuca

SEQ ID NO: 22035 - RNA, 18 nt, Artificial Sequence
  Synthetic oligonucleotide: Ptpn6-2831
cggcccagucgcaagaac

SEQ ID NO: 22036 - RNA, 19 nt, Artificial Sequence
  Synthetic oligonucleotide: Ptpn6-2832
ucggcccagucgcaagaac

SEQ ID NO: 22037 - RNA, 20 nt, Artificial Sequence
  Synthetic oligonucleotide: Ptpn6-510
cucggcccagucgcaagaac

SEQ ID NO: 22038 - RNA, 21 nt, Artificial Sequence
  Synthetic oligonucleotide: Ptpn6-2833
gcucggcccagucgcaagaac

SEQ ID NO: 22039 - RNA, 22 nt, Artificial Sequence
  Synthetic oligonucleotide: Ptpn6-2834
ggcucggcccagucgcaagaac

SEQ ID NO: 22040 - RNA, 23 nt, Artificial Sequence
  Synthetic oligonucleotide: Ptpn6-2835
uggcucggcccagucgcaagaac

SEQ ID NO: 22041 - RNA, 24 nt, Artificial Sequence
  Synthetic oligonucleotide: Ptpn6-2836
cuggcucggcccagucgcaagaac

SEQ ID NO: 22042 - RNA, 21 nt, Artificial Sequence
  Synthetic oligonucleotide: Ptpn6-2837
ccuacagagagaugcuguccc

SEQ ID NO: 22043 - RNA, 22 nt, Artificial Sequence
  Synthetic oligonucleotide: Ptpn6-2838
cccuacagagagaugcuguccc

SEQ ID NO: 22044 - RNA, 23 nt, Artificial Sequence
  Synthetic oligonucleotide: Ptpn6-2839
ucccuacagagagaugcuguccc

SEQ ID NO: 22045 - RNA, 24 nt, Artificial Sequence
  Synthetic oligonucleotide: Ptpn6-2840
cucccuacagagagaugcuguccc

SEQ ID NO: 22046 - RNA, 18 nt, Artificial Sequence
  Synthetic oligonucleotide: Ptpn6-2841
gaguacuacacucagcag

SEQ ID NO: 22047 - RNA, 19 nt, Artificial Sequence
  Synthetic oligonucleotide: Ptpn6-2842
ggaguacuacacucagcag

SEQ ID NO: 22048 - RNA, 20 nt, Artificial Sequence
  Synthetic oligonucleotide: Ptpn6-525
uggaguacuacacucagcag

SEQ ID NO: 22049 - RNA, 21 nt, Artificial Sequence
  Synthetic oligonucleotide: Ptpn6-2843
guggaguacuacacucagcag

SEQ ID NO: 22050 - RNA, 22 nt, Artificial Sequence
  Synthetic oligonucleotide: Ptpn6-2844
gguggaguacuacacucagcag

SEQ ID NO: 22051 - RNA, 23 nt, Artificial Sequence
  Synthetic oligonucleotide: Ptpn6-2845
ugguggaguacuacacucagcag

SEQ ID NO: 22052 - RNA, 24 nt, Artificial Sequence
  Synthetic oligonucleotide: Ptpn6-2846
cugguggaguacuacacucagcag

SEQ ID NO: 22053 - RNA, 18 nt, Artificial Sequence
  Synthetic oligonucleotide: Ptpn6-2847
caccgagaccucaguggg

SEQ ID NO: 22054 - RNA, 19 nt, Artificial Sequence
  Synthetic oligonucleotide: Ptpn6-2848
ucaccgagaccucaguggg

SEQ ID NO: 22055 - RNA, 20 nt, Artificial Sequence
  Synthetic oligonucleotide: Ptpn6-505
uucaccgagaccucaguggg

SEQ ID NO: 22056 - RNA, 18 nt, Artificial Sequence
  Synthetic oligonucleotide: Ptpn6-2849
cgacucugacagagcugg

SEQ ID NO: 22057 - RNA, 19 nt, Artificial Sequence
  Synthetic oligonucleotide: Ptpn6-2850
gcgacucugacagagcugg

SEQ ID NO: 22058 - RNA, 20 nt, Artificial Sequence
  Synthetic oligonucleotide: Ptpn6-100
ugcgacucugacagagcugg

SEQ ID NO: 22059 - RNA, 21 nt, Artificial Sequence
  Synthetic oligonucleotide: Ptpn6-2851
uugcgacucugacagagcugg

SEQ ID NO: 22060 - RNA, 22 nt, Artificial Sequence
  Synthetic oligonucleotide: Ptpn6-2852
uuugcgacucugacagagcugg

SEQ ID NO: 22061 - RNA, 23 nt, Artificial Sequence
  Synthetic oligonucleotide: Ptpn6-2853
guuugcgacucugacagagcugg

SEQ ID NO: 22062 - RNA, 24 nt, Artificial Sequence
  Synthetic oligonucleotide: Ptpn6-2854
aguuugcgacucugacagagcugg

SEQ ID NO: 22063 - RNA, 18 nt, Artificial Sequence
  Synthetic oligonucleotide: Ptpn6-2855
ggaucaggugacccauau

SEQ ID NO: 22064 - RNA, 19 nt, Artificial Sequence
  Synthetic oligonucleotide: Ptpn6-2856
gggaucaggugacccauau

SEQ ID NO: 22065 - RNA, 20 nt, Artificial Sequence
  Synthetic oligonucleotide: Ptpn6-503
ggggaucaggugacccauau

SEQ ID NO: 22066 - RNA, 21 nt, Artificial Sequence
  Synthetic oligonucleotide: Ptpn6-2857
gggggaucaggugacccauau

SEQ ID NO: 22067 - RNA, 22 nt, Artificial Sequence
  Synthetic oligonucleotide: Ptpn6-2858
ugggggaucaggugacccauau

SEQ ID NO: 22068 - RNA, 23 nt, Artificial Sequence
  Synthetic oligonucleotide: Ptpn6-2859
gugggggaucaggugacccauau

SEQ ID NO: 22069 - RNA, 24 nt, Artificial Sequence
  Synthetic oligonucleotide: Ptpn6-2860
ggugggggaucaggugacccauau

SEQ ID NO: 22070 - RNA, 21 nt, Artificial Sequence
  Synthetic oligonucleotide: Ptpn6-2861
ggcuggcccaggcuccccgcu

SEQ ID NO: 22071 - RNA, 22 nt, Artificial Sequence
  Synthetic oligonucleotide: Ptpn6-2862
aggcuggcccaggcuccccgcu

SEQ ID NO: 22072 - RNA, 23 nt, Artificial Sequence
  Synthetic oligonucleotide: Ptpn6-2863
aaggcuggcccaggcuccccgcu

SEQ ID NO: 22073 - RNA, 24 nt, Artificial Sequence
  Synthetic oligonucleotide: Ptpn6-2864
caaggcuggcccaggcuccccgcu

SEQ ID NO: 22074 - RNA, 21 nt, Artificial Sequence
  Synthetic oligonucleotide: Ptpn6-2865
gaaggcagcgucagggaaggu

SEQ ID NO: 22075 - RNA, 22 nt, Artificial Sequence
  Synthetic oligonucleotide: Ptpn6-2866
agaaggcagcgucagggaaggu

SEQ ID NO: 22076 - RNA, 23 nt, Artificial Sequence
  Synthetic oligonucleotide: Ptpn6-2867
gagaaggcagcgucagggaaggu

SEQ ID NO: 22077 - RNA, 24 nt, Artificial Sequence
  Synthetic oligonucleotide: Ptpn6-2868
agagaaggcagcgucagggaaggu

SEQ ID NO: 22078 - RNA, 18 nt, Artificial Sequence
  Synthetic oligonucleotide: Ptpn6-2869
acaggucauagaaauccc

SEQ ID NO: 22079 - RNA, 19 nt, Artificial Sequence
  Synthetic oligonucleotide: Ptpn6-2870
uacaggucauagaaauccc

SEQ ID NO: 22080 - RNA, 20 nt, Artificial Sequence
  Synthetic oligonucleotide: Ptpn6-591
auacaggucauagaaauccc

SEQ ID NO: 22081 - RNA, 18 nt, Artificial Sequence
  Synthetic oligonucleotide: Ptpn6-2871
guucagcggguacuugag

SEQ ID NO: 22082 - RNA, 19 nt, Artificial Sequence
  Synthetic oligonucleotide: Ptpn6-2872
aguucagcggguacuugag

SEQ ID NO: 22083 - RNA, 20 nt, Artificial Sequence
  Synthetic oligonucleotide: Ptpn6-586
caguucagcggguacuugag

SEQ ID NO: 22084 - RNA, 21 nt, Artificial Sequence
  Synthetic oligonucleotide: Ptpn6-2873
guggacaccucggcccuugag

SEQ ID NO: 22085 - RNA, 22 nt, Artificial Sequence
  Synthetic oligonucleotide: Ptpn6-2874
cguggacaccucggcccuugag

SEQ ID NO: 22086 - RNA, 23 nt, Artificial Sequence
  Synthetic oligonucleotide: Ptpn6-2875
ccguggacaccucggcccuugag

SEQ ID NO: 22087 - RNA, 24 nt, Artificial Sequence
  Synthetic oligonucleotide: Ptpn6-2876
accguggacaccucggcccuugag

SEQ ID NO: 22088 - RNA, 18 nt, Artificial Sequence
  Synthetic oligonucleotide: Ptpn6-2877
gcccucaccucucacuag

SEQ ID NO: 22089 - RNA, 19 nt, Artificial Sequence
  Synthetic oligonucleotide: Ptpn6-2878
agcccucaccucucacuag

SEQ ID NO: 22090 - RNA, 20 nt, Artificial Sequence
  Synthetic oligonucleotide: Ptpn6-2462
gagcccucaccucucacuag

SEQ ID NO: 22091 - RNA, 18 nt, Artificial Sequence
  Synthetic oligonucleotide: Ptpn6-2879
cugcaggacacccugcug

SEQ ID NO: 22092 - RNA, 19 nt, Artificial Sequence
  Synthetic oligonucleotide: Ptpn6-2880
ccugcaggacacccugcug

SEQ ID NO: 22093 - RNA, 20 nt, Artificial Sequence
  Synthetic oligonucleotide: Ptpn6-588
uccugcaggacacccugcug

SEQ ID NO: 22094 - RNA, 21 nt, Artificial Sequence
  Synthetic oligonucleotide: Ptpn6-2881
guccugcaggacacccugcug

SEQ ID NO: 22095 - RNA, 22 nt, Artificial Sequence
  Synthetic oligonucleotide: Ptpn6-2882
gguccugcaggacacccugcug

SEQ ID NO: 22096 - RNA, 23 nt, Artificial Sequence
  Synthetic oligonucleotide: Ptpn6-2883
cgguccugcaggacacccugcug

SEQ ID NO: 22097 - RNA, 24 nt, Artificial Sequence
  Synthetic oligonucleotide: Ptpn6-2884
gcgguccugcaggacacccugcug

SEQ ID NO: 22098 - RNA, 18 nt, Artificial Sequence
  Synthetic oligonucleotide: Ptpn6-2885
ugaguucuggauccgaau

SEQ ID NO: 22099 - RNA, 19 nt, Artificial Sequence
  Synthetic oligonucleotide: Ptpn6-2886
cugaguucuggauccgaau

SEQ ID NO: 22100 - RNA, 20 nt, Artificial Sequence
  Synthetic oligonucleotide: Ptpn6-594
ccugaguucuggauccgaau

SEQ ID NO: 22101 - RNA, 18 nt, Artificial Sequence
  Synthetic oligonucleotide: Ptpn6-2887
auccccugaguucuggau

SEQ ID NO: 22102 - RNA, 19 nt, Artificial Sequence
  Synthetic oligonucleotide: Ptpn6-2888
aauccccugaguucuggau

SEQ ID NO: 22103 - RNA, 20 nt, Artificial Sequence
  Synthetic oligonucleotide: Ptpn6-593
aaauccccugaguucuggau

SEQ ID NO: 22104 - RNA, 18 nt, Artificial Sequence
  Synthetic oligonucleotide: Ptpn6-2889
acagagagaugcuguccc

SEQ ID NO: 22105 - RNA, 19 nt, Artificial Sequence
  Synthetic oligonucleotide: Ptpn6-2890
uacagagagaugcuguccc

SEQ ID NO: 22106 - RNA, 20 nt, Artificial Sequence
  Synthetic oligonucleotide: Ptpn6-1690
cuacagagagaugcuguccc

SEQ ID NO: 22107 - RNA, 21 nt, Artificial Sequence
  Synthetic oligonucleotide: Ptpn6-2891
uuucaccgagaccucaguggg

SEQ ID NO: 22108 - RNA, 22 nt, Artificial Sequence
  Synthetic oligonucleotide: Ptpn6-2892
guuucaccgagaccucaguggg

SEQ ID NO: 22109 - RNA, 23 nt, Artificial Sequence
  Synthetic oligonucleotide: Ptpn6-2893
gguuucaccgagaccucaguggg

SEQ ID NO: 22110 - RNA, 24 nt, Artificial Sequence
  Synthetic oligonucleotide: Ptpn6-2894
ugguuucaccgagaccucaguggg

SEQ ID NO: 22111 - RNA, 18 nt, Artificial Sequence
  Synthetic oligonucleotide: Ptpn6-2895
ucaccgccuggugcccug

SEQ ID NO: 22112 - RNA, 19 nt, Artificial Sequence
  Synthetic oligonucleotide: Ptpn6-2896
cucaccgccuggugcccug

SEQ ID NO: 22113 - RNA, 20 nt, Artificial Sequence
  Synthetic oligonucleotide: Ptpn6-2897
ccucaccgccuggugcccug

SEQ ID NO: 22114 - RNA, 21 nt, Artificial Sequence
  Synthetic oligonucleotide: Ptpn6-2898
gccucaccgccuggugcccug

SEQ ID NO: 22115 - RNA, 22 nt, Artificial Sequence
  Synthetic oligonucleotide: Ptpn6-2899
ggccucaccgccuggugcccug

SEQ ID NO: 22116 - RNA, 23 nt, Artificial Sequence
  Synthetic oligonucleotide: Ptpn6-2900
uggccucaccgccuggugcccug

SEQ ID NO: 22117 - RNA, 24 nt, Artificial Sequence
  Synthetic oligonucleotide: Ptpn6-2901
cuggccucaccgccuggugcccug

SEQ ID NO: 22118 - RNA, 18 nt, Artificial Sequence
  Synthetic oligonucleotide: Ptpn6-2902
cuggugcccugcagggug

SEQ ID NO: 22119 - RNA, 19 nt, Artificial Sequence
  Synthetic oligonucleotide: Ptpn6-2903
ccuggugcccugcagggug

SEQ ID NO: 22120 - RNA, 20 nt, Artificial Sequence
  Synthetic oligonucleotide: Ptpn6-2476
gccuggugcccugcagggug

SEQ ID NO: 22121 - RNA, 21 nt, Artificial Sequence
  Synthetic oligonucleotide: Ptpn6-2904
cgccuggugcccugcagggug

SEQ ID NO: 22122 - RNA, 22 nt, Artificial Sequence
  Synthetic oligonucleotide: Ptpn6-2905
ccgccuggugcccugcagggug

SEQ ID NO: 22123 - RNA, 23 nt, Artificial Sequence
  Synthetic oligonucleotide: Ptpn6-2906
accgccuggugcccugcagggug

SEQ ID NO: 22124 - RNA, 24 nt, Artificial Sequence
  Synthetic oligonucleotide: Ptpn6-2907
caccgccuggugcccugcagggug

SEQ ID NO: 22125 - RNA, 18 nt, Artificial Sequence
  Synthetic oligonucleotide: Ptpn6-2908
guaagucccgggcaccau

SEQ ID NO: 22126 - RNA, 19 nt, Artificial Sequence
  Synthetic oligonucleotide: Ptpn6-2909
gguaagucccgggcaccau

SEQ ID NO: 22127 - RNA, 20 nt, Artificial Sequence
  Synthetic oligonucleotide: Ptpn6-954
ggguaagucccgggcaccau

SEQ ID NO: 22128 - RNA, 21 nt, Artificial Sequence
  Synthetic oligonucleotide: Ptpn6-2910
uggguaagucccgggcaccau

SEQ ID NO: 22129 - RNA, 22 nt, Artificial Sequence
  Synthetic oligonucleotide: Ptpn6-2911
guggguaagucccgggcaccau

SEQ ID NO: 22130 - RNA, 23 nt, Artificial Sequence
  Synthetic oligonucleotide: Ptpn6-2912
cguggguaagucccgggcaccau

SEQ ID NO: 22131 - RNA, 24 nt, Artificial Sequence
  Synthetic oligonucleotide: Ptpn6-2913
ccguggguaagucccgggcaccau

SEQ ID NO: 22132 - RNA, 18 nt, Artificial Sequence
  Synthetic oligonucleotide: Ptpn6-2914
uggcccaggcuccccgcu

SEQ ID NO: 22133 - RNA, 19 nt, Artificial Sequence
  Synthetic oligonucleotide: Ptpn6-2915
cuggcccaggcuccccgcu

SEQ ID NO: 22134 - RNA, 20 nt, Artificial Sequence
  Synthetic oligonucleotide: Ptpn6-539
gcuggcccaggcuccccgcu

SEQ ID NO: 22135 - RNA, 18 nt, Artificial Sequence
  Synthetic oligonucleotide: Ptpn6-2916
ggcagcgucagggaaggu

SEQ ID NO: 22136 - RNA, 19 nt, Artificial Sequence
  Synthetic oligonucleotide: Ptpn6-2917
aggcagcgucagggaaggu

SEQ ID NO: 22137 - RNA, 20 nt, Artificial Sequence
  Synthetic oligonucleotide: Ptpn6-2918
aaggcagcgucagggaaggu

SEQ ID NO: 22138 - RNA, 18 nt, Artificial Sequence
  Synthetic oligonucleotide: Ptpn6-2919
gugcccgggacuuaccca

SEQ ID NO: 22139 - RNA, 19 nt, Artificial Sequence
  Synthetic oligonucleotide: Ptpn6-2920
ggugcccgggacuuaccca

SEQ ID NO: 22140 - RNA, 20 nt, Artificial Sequence
  Synthetic oligonucleotide: Ptpn6-995
uggugcccgggacuuaccca

SEQ ID NO: 22141 - RNA, 21 nt, Artificial Sequence
  Synthetic oligonucleotide: Ptpn6-2921
auggugcccgggacuuaccca

SEQ ID NO: 22142 - RNA, 22 nt, Artificial Sequence
  Synthetic oligonucleotide: Ptpn6-2922
gauggugcccgggacuuaccca

SEQ ID NO: 22143 - RNA, 23 nt, Artificial Sequence
  Synthetic oligonucleotide: Ptpn6-2923
cgauggugcccgggacuuaccca

SEQ ID NO: 22144 - RNA, 24 nt, Artificial Sequence
  Synthetic oligonucleotide: Ptpn6-2924
ccgauggugcccgggacuuaccca

SEQ ID NO: 22145 - RNA, 18 nt, Artificial Sequence
  Synthetic oligonucleotide: Ptpn6-2925
gucucugcauccagccca

SEQ ID NO: 22146 - RNA, 19 nt, Artificial Sequence
  Synthetic oligonucleotide: Ptpn6-2926
ggucucugcauccagccca

SEQ ID NO: 22147 - RNA, 20 nt, Artificial Sequence
  Synthetic oligonucleotide: Ptpn6-602
gggucucugcauccagccca

SEQ ID NO: 22148 - RNA, 21 nt, Artificial Sequence
  Synthetic oligonucleotide: Ptpn6-2927
agggucucugcauccagccca

SEQ ID NO: 22149 - RNA, 22 nt, Artificial Sequence
  Synthetic oligonucleotide: Ptpn6-2928
cagggucucugcauccagccca

SEQ ID NO: 22150 - RNA, 23 nt, Artificial Sequence
  Synthetic oligonucleotide: Ptpn6-2929
gcagggucucugcauccagccca

SEQ ID NO: 22151 - RNA, 24 nt, Artificial Sequence
  Synthetic oligonucleotide: Ptpn6-2930
agcagggucucugcauccagccca

SEQ ID NO: 22152 - RNA, 18 nt, Artificial Sequence
  Synthetic oligonucleotide: Ptpn6-2931
ugggcuggucacugagca

SEQ ID NO: 22153 - RNA, 19 nt, Artificial Sequence
  Synthetic oligonucleotide: Ptpn6-2932
uugggcuggucacugagca

SEQ ID NO: 22154 - RNA, 20 nt, Artificial Sequence
  Synthetic oligonucleotide: Ptpn6-579
cuugggcuggucacugagca

SEQ ID NO: 22155 - RNA, 21 nt, Artificial Sequence
  Synthetic oligonucleotide: Ptpn6-2933
ccuugggcuggucacugagca

SEQ ID NO: 22156 - RNA, 22 nt, Artificial Sequence
  Synthetic oligonucleotide: Ptpn6-2934
gccuugggcuggucacugagca

SEQ ID NO: 22157 - RNA, 23 nt, Artificial Sequence
  Synthetic oligonucleotide: Ptpn6-2935
agccuugggcuggucacugagca

SEQ ID NO: 22158 - RNA, 24 nt, Artificial Sequence
  Synthetic oligonucleotide: Ptpn6-2936
cagccuugggcuggucacugagca

SEQ ID NO: 22159 - RNA, 18 nt, Artificial Sequence
  Synthetic oligonucleotide: Ptpn6-2937
ggcggcccaggcagggca

SEQ ID NO: 22160 - RNA, 19 nt, Artificial Sequence
  Synthetic oligonucleotide: Ptpn6-2938
gggcggcccaggcagggca

SEQ ID NO: 22161 - RNA, 20 nt, Artificial Sequence
  Synthetic oligonucleotide: Ptpn6-2939
ugggcggcccaggcagggca

SEQ ID NO: 22162 - RNA, 21 nt, Artificial Sequence
  Synthetic oligonucleotide: Ptpn6-2940
cugggcggcccaggcagggca

SEQ ID NO: 22163 - RNA, 22 nt, Artificial Sequence
  Synthetic oligonucleotide: Ptpn6-2941
ccugggcggcccaggcagggca

SEQ ID NO: 22164 - RNA, 23 nt, Artificial Sequence
  Synthetic oligonucleotide: Ptpn6-2942
accugggcggcccaggcagggca

SEQ ID NO: 22165 - RNA, 24 nt, Artificial Sequence
  Synthetic oligonucleotide: Ptpn6-2943
caccugggcggcccaggcagggca

SEQ ID NO: 22166 - RNA, 18 nt, Artificial Sequence
  Synthetic oligonucleotide: Ptpn6-2944
uccccuccauacagguca

SEQ ID NO: 22167 - RNA, 19 nt, Artificial Sequence
  Synthetic oligonucleotide: Ptpn6-2945
cuccccuccauacagguca

SEQ ID NO: 22168 - RNA, 20 nt, Artificial Sequence
  Synthetic oligonucleotide: Ptpn6-590
ucuccccuccauacagguca

SEQ ID NO: 22169 - RNA, 21 nt, Artificial Sequence
  Synthetic oligonucleotide: Ptpn6-2946
uucuccccuccauacagguca

SEQ ID NO: 22170 - RNA, 22 nt, Artificial Sequence
  Synthetic oligonucleotide: Ptpn6-2947
cuucuccccuccauacagguca

SEQ ID NO: 22171 - RNA, 23 nt, Artificial Sequence
  Synthetic oligonucleotide: Ptpn6-2948
acuucuccccuccauacagguca

SEQ ID NO: 22172 - RNA, 24 nt, Artificial Sequence
  Synthetic oligonucleotide: Ptpn6-2949
aacuucuccccuccauacagguca

SEQ ID NO: 22173 - RNA, 18 nt, Artificial Sequence
  Synthetic oligonucleotide: Ptpn6-2950
ccagccuugggcugguca

SEQ ID NO: 22174 - RNA, 19 nt, Artificial Sequence
  Synthetic oligonucleotide: Ptpn6-2951
gccagccuugggcugguca

SEQ ID NO: 22175 - RNA, 20 nt, Artificial Sequence
  Synthetic oligonucleotide: Ptpn6-578
ggccagccuugggcugguca

SEQ ID NO: 22176 - RNA, 21 nt, Artificial Sequence
  Synthetic oligonucleotide: Ptpn6-2952
gggccagccuugggcugguca

SEQ ID NO: 22177 - RNA, 22 nt, Artificial Sequence
  Synthetic oligonucleotide: Ptpn6-2953
ugggccagccuugggcugguca

SEQ ID NO: 22178 - RNA, 23 nt, Artificial Sequence
  Synthetic oligonucleotide: Ptpn6-2954
cugggccagccuugggcugguca

SEQ ID NO: 22179 - RNA, 24 nt, Artificial Sequence
  Synthetic oligonucleotide: Ptpn6-2955
ccugggccagccuugggcugguca

SEQ ID NO: 22180 - RNA, 18 nt, Artificial Sequence
  Synthetic oligonucleotide: Ptpn6-2956
ccaccuaccugacggaga

SEQ ID NO: 22181 - RNA, 19 nt, Artificial Sequence
  Synthetic oligonucleotide: Ptpn6-2957
cccaccuaccugacggaga

SEQ ID NO: 22182 - RNA, 20 nt, Artificial Sequence
  Synthetic oligonucleotide: Ptpn6-2958
gcccaccuaccugacggaga

SEQ ID NO: 22183 - RNA, 21 nt, Artificial Sequence
  Synthetic oligonucleotide: Ptpn6-2959
ggcccaccuaccugacggaga

SEQ ID NO: 22184 - RNA, 22 nt, Artificial Sequence
  Synthetic oligonucleotide: Ptpn6-2960
gggcccaccuaccugacggaga

SEQ ID NO: 22185 - RNA, 23 nt, Artificial Sequence
  Synthetic oligonucleotide: Ptpn6-2961
ggggcccaccuaccugacggaga

SEQ ID NO: 22186 - RNA, 24 nt, Artificial Sequence
  Synthetic oligonucleotide: Ptpn6-2962
gggggcccaccuaccugacggaga

SEQ ID NO: 22187 - RNA, 18 nt, Artificial Sequence
  Synthetic oligonucleotide: Ptpn6-2963
ucacccugguucuugcga

SEQ ID NO: 22188 - RNA, 19 nt, Artificial Sequence
  Synthetic oligonucleotide: Ptpn6-2964
gucacccugguucuugcga

SEQ ID NO: 22189 - RNA, 20 nt, Artificial Sequence
  Synthetic oligonucleotide: Ptpn6-595
agucacccugguucuugcga

SEQ ID NO: 22190 - RNA, 21 nt, Artificial Sequence
  Synthetic oligonucleotide: Ptpn6-2965
aagucacccugguucuugcga

SEQ ID NO: 22191 - RNA, 22 nt, Artificial Sequence
  Synthetic oligonucleotide: Ptpn6-2966
gaagucacccugguucuugcga

SEQ ID NO: 22192 - RNA, 23 nt, Artificial Sequence
  Synthetic oligonucleotide: Ptpn6-2967
agaagucacccugguucuugcga

SEQ ID NO: 22193 - RNA, 24 nt, Artificial Sequence
  Synthetic oligonucleotide: Ptpn6-2968
gagaagucacccugguucuugcga

SEQ ID NO: 22194 - RNA, 18 nt, Artificial Sequence
  Synthetic oligonucleotide: Ptpn6-2969
agcaucucucuguaggga

SEQ ID NO: 22195 - RNA, 19 nt, Artificial Sequence
  Synthetic oligonucleotide: Ptpn6-2970
cagcaucucucuguaggga

SEQ ID NO: 22196 - RNA, 20 nt, Artificial Sequence
  Synthetic oligonucleotide: Ptpn6-1215
acagcaucucucuguaggga

SEQ ID NO: 22197 - RNA, 21 nt, Artificial Sequence
  Synthetic oligonucleotide: Ptpn6-2971
gacagcaucucucuguaggga

SEQ ID NO: 22198 - RNA, 22 nt, Artificial Sequence
  Synthetic oligonucleotide: Ptpn6-2972
ggacagcaucucucuguaggga

SEQ ID NO: 22199 - RNA, 23 nt, Artificial Sequence
  Synthetic oligonucleotide: Ptpn6-2973
gggacagcaucucucuguaggga

SEQ ID NO: 22200 - RNA, 24 nt, Artificial Sequence
  Synthetic oligonucleotide: Ptpn6-2974
cgggacagcaucucucuguaggga

SEQ ID NO: 22201 - RNA, 18 nt, Artificial Sequence
  Synthetic oligonucleotide: Ptpn6-2975
caccucucacuaguggga

SEQ ID NO: 22202 - RNA, 19 nt, Artificial Sequence
  Synthetic oligonucleotide: Ptpn6-2976
ucaccucucacuaguggga

SEQ ID NO: 22203 - RNA, 20 nt, Artificial Sequence
  Synthetic oligonucleotide: Ptpn6-2977
cucaccucucacuaguggga

SEQ ID NO: 22204 - RNA, 21 nt, Artificial Sequence
  Synthetic oligonucleotide: Ptpn6-2978
ccucaccucucacuaguggga

SEQ ID NO: 22205 - RNA, 22 nt, Artificial Sequence
  Synthetic oligonucleotide: Ptpn6-2979
cccucaccucucacuaguggga

SEQ ID NO: 22206 - RNA, 23 nt, Artificial Sequence
  Synthetic oligonucleotide: Ptpn6-2980
gcccucaccucucacuaguggga

SEQ ID NO: 22207 - RNA, 24 nt, Artificial Sequence
  Synthetic oligonucleotide: Ptpn6-2981
agcccucaccucucacuaguggga

SEQ ID NO: 22208 - RNA, 18 nt, Artificial Sequence
  Synthetic oligonucleotide: Ptpn6-2982
gggggcccaccuaccuga

SEQ ID NO: 22209 - RNA, 19 nt, Artificial Sequence
  Synthetic oligonucleotide: Ptpn6-2983
ggggggcccaccuaccuga

SEQ ID NO: 22210 - RNA, 20 nt, Artificial Sequence
  Synthetic oligonucleotide: Ptpn6-2446
cggggggcccaccuaccuga

SEQ ID NO: 22211 - RNA, 21 nt, Artificial Sequence
  Synthetic oligonucleotide: Ptpn6-2984
gcggggggcccaccuaccuga

SEQ ID NO: 22212 - RNA, 22 nt, Artificial Sequence
  Synthetic oligonucleotide: Ptpn6-2985
ugcggggggcccaccuaccuga

SEQ ID NO: 22213 - RNA, 23 nt, Artificial Sequence
  Synthetic oligonucleotide: Ptpn6-2986
uugcggggggcccaccuaccuga

SEQ ID NO: 22214 - RNA, 24 nt, Artificial Sequence
  Synthetic oligonucleotide: Ptpn6-2987
guugcggggggcccaccuaccuga

SEQ ID NO: 22215 - RNA, 18 nt, Artificial Sequence
  Synthetic oligonucleotide: Ptpn6-2988
ugaugugggugacccuga

SEQ ID NO: 22216 - RNA, 19 nt, Artificial Sequence
  Synthetic oligonucleotide: Ptpn6-2989
uugaugugggugacccuga

SEQ ID NO: 22217 - RNA, 20 nt, Artificial Sequence
  Synthetic oligonucleotide: Ptpn6-2990
cuugaugugggugacccuga

SEQ ID NO: 22218 - RNA, 21 nt, Artificial Sequence
  Synthetic oligonucleotide: Ptpn6-2991
ccuugaugugggugacccuga

SEQ ID NO: 22219 - RNA, 22 nt, Artificial Sequence
  Synthetic oligonucleotide: Ptpn6-2992
accuugaugugggugacccuga

SEQ ID NO: 22220 - RNA, 23 nt, Artificial Sequence
  Synthetic oligonucleotide: Ptpn6-2993
gaccuugaugugggugacccuga

SEQ ID NO: 22221 - RNA, 24 nt, Artificial Sequence
  Synthetic oligonucleotide: Ptpn6-2994
ugaccuugaugugggugacccuga

SEQ ID NO: 22222 - RNA, 18 nt, Artificial Sequence
  Synthetic oligonucleotide: Ptpn6-2995
agcccucaccucucacua

SEQ ID NO: 22223 - RNA, 19 nt, Artificial Sequence
  Synthetic oligonucleotide: Ptpn6-2996
gagcccucaccucucacua

SEQ ID NO: 22224 - RNA, 20 nt, Artificial Sequence
  Synthetic oligonucleotide: Ptpn6-2997
ggagcccucaccucucacua

SEQ ID NO: 22225 - RNA, 21 nt, Artificial Sequence
  Synthetic oligonucleotide: Ptpn6-2998
cggagcccucaccucucacua

SEQ ID NO: 22226 - RNA, 22 nt, Artificial Sequence
  Synthetic oligonucleotide: Ptpn6-2999
gcggagcccucaccucucacua

SEQ ID NO: 22227 - RNA, 23 nt, Artificial Sequence
  Synthetic oligonucleotide: Ptpn6-3000
ugcggagcccucaccucucacua

SEQ ID NO: 22228 - RNA, 24 nt, Artificial Sequence
  Synthetic oligonucleotide: Ptpn6-3001
gugcggagcccucaccucucacua

SEQ ID NO: 22229 - RNA, 18 nt, Artificial Sequence
  Synthetic oligonucleotide: Ptpn6-3002
ggacagcaucucucugua

SEQ ID NO: 22230 - RNA, 19 nt, Artificial Sequence
  Synthetic oligonucleotide: Ptpn6-3003
gggacagcaucucucugua

SEQ ID NO: 22231 - RNA, 20 nt, Artificial Sequence
  Synthetic oligonucleotide: Ptpn6-987
cgggacagcaucucucugua

SEQ ID NO: 22232 - RNA, 21 nt, Artificial Sequence
  Synthetic oligonucleotide: Ptpn6-3004
acgggacagcaucucucugua

SEQ ID NO: 22233 - RNA, 22 nt, Artificial Sequence
  Synthetic oligonucleotide: Ptpn6-3005
cacgggacagcaucucucugua

SEQ ID NO: 22234 - RNA, 23 nt, Artificial Sequence
  Synthetic oligonucleotide: Ptpn6-3006
ccacgggacagcaucucucugua

SEQ ID NO: 22235 - RNA, 24 nt, Artificial Sequence
  Synthetic oligonucleotide: Ptpn6-3007
cccacgggacagcaucucucugua

SEQ ID NO: 22236 - RNA, 18 nt, Artificial Sequence
  Synthetic oligonucleotide: Ptpn6-3008
aggucucggugaaaccac

SEQ ID NO: 22237 - RNA, 19 nt, Artificial Sequence
  Synthetic oligonucleotide: Ptpn6-3009
gaggucucggugaaaccac

SEQ ID NO: 22238 - RNA, 20 nt, Artificial Sequence
  Synthetic oligonucleotide: Ptpn6-3010
ugaggucucggugaaaccac

SEQ ID NO: 22239 - RNA, 21 nt, Artificial Sequence
  Synthetic oligonucleotide: Ptpn6-3011
cugaggucucggugaaaccac

SEQ ID NO: 22240 - RNA, 22 nt, Artificial Sequence
  Synthetic oligonucleotide: Ptpn6-3012
acugaggucucggugaaaccac

SEQ ID NO: 22241 - RNA, 23 nt, Artificial Sequence
  Synthetic oligonucleotide: Ptpn6-3013
cacugaggucucggugaaaccac

SEQ ID NO: 22242 - RNA, 24 nt, Artificial Sequence
  Synthetic oligonucleotide: Ptpn6-3014
ccacugaggucucggugaaaccac

SEQ ID NO: 22243 - RNA, 18 nt, Artificial Sequence
  Synthetic oligonucleotide: Ptpn6-3015
gcugaggcucucacgcac

SEQ ID NO: 22244 - RNA, 19 nt, Artificial Sequence
  Synthetic oligonucleotide: Ptpn6-3016
ggcugaggcucucacgcac

SEQ ID NO: 22245 - RNA, 20 nt, Artificial Sequence
  Synthetic oligonucleotide: Ptpn6-582
uggcugaggcucucacgcac

SEQ ID NO: 22246 - RNA, 21 nt, Artificial Sequence
  Synthetic oligonucleotide: Ptpn6-3017
cuggcugaggcucucacgcac

SEQ ID NO: 22247 - RNA, 22 nt, Artificial Sequence
  Synthetic oligonucleotide: Ptpn6-3018
gcuggcugaggcucucacgcac

SEQ ID NO: 22248 - RNA, 23 nt, Artificial Sequence
  Synthetic oligonucleotide: Ptpn6-3019
ggcuggcugaggcucucacgcac

SEQ ID NO: 22249 - RNA, 24 nt, Artificial Sequence
  Synthetic oligonucleotide: Ptpn6-3020
aggcuggcugaggcucucacgcac

SEQ ID NO: 22250 - RNA, 18 nt, Artificial Sequence
  Synthetic oligonucleotide: Ptpn6-3021
gagcaguucagcggguac

SEQ ID NO: 22251 - RNA, 19 nt, Artificial Sequence
  Synthetic oligonucleotide: Ptpn6-3022
ggagcaguucagcggguac

SEQ ID NO: 22252 - RNA, 20 nt, Artificial Sequence
  Synthetic oligonucleotide: Ptpn6-585
cggagcaguucagcggguac

SEQ ID NO: 22253 - RNA, 21 nt, Artificial Sequence
  Synthetic oligonucleotide: Ptpn6-3023
ucggagcaguucagcggguac

SEQ ID NO: 22254 - RNA, 22 nt, Artificial Sequence
  Synthetic oligonucleotide: Ptpn6-3024
aucggagcaguucagcggguac

SEQ ID NO: 22255 - RNA, 23 nt, Artificial Sequence
  Synthetic oligonucleotide: Ptpn6-3025
gaucggagcaguucagcggguac

SEQ ID NO: 22256 - RNA, 24 nt, Artificial Sequence
  Synthetic oligonucleotide: Ptpn6-3026
ggaucggagcaguucagcggguac

SEQ ID NO: 22257 - RNA, 18 nt, Artificial Sequence
  Synthetic oligonucleotide: Ptpn6-3027
accuugaugugggugacc

SEQ ID NO: 22258 - RNA, 19 nt, Artificial Sequence
  Synthetic oligonucleotide: Ptpn6-3028
gaccuugaugugggugacc

SEQ ID NO: 22259 - RNA, 20 nt, Artificial Sequence
  Synthetic oligonucleotide: Ptpn6-3029
ugaccuugaugugggugacc

SEQ ID NO: 22260 - RNA, 21 nt, Artificial Sequence
  Synthetic oligonucleotide: Ptpn6-3030
augaccuugaugugggugacc

SEQ ID NO: 22261 - RNA, 22 nt, Artificial Sequence
  Synthetic oligonucleotide: Ptpn6-3031
caugaccuugaugugggugacc

SEQ ID NO: 22262 - RNA, 23 nt, Artificial Sequence
  Synthetic oligonucleotide: Ptpn6-3032
acaugaccuugaugugggugacc

SEQ ID NO: 22263 - RNA, 24 nt, Artificial Sequence
  Synthetic oligonucleotide: Ptpn6-3033
cacaugaccuugaugugggugacc

SEQ ID NO: 22264 - RNA, 18 nt, Artificial Sequence
  Synthetic oligonucleotide: Ptpn6-3034
ccgagccaggaagcuacc

SEQ ID NO: 22265 - RNA, 19 nt, Artificial Sequence
  Synthetic oligonucleotide: Ptpn6-3035
gccgagccaggaagcuacc

SEQ ID NO: 22266 - RNA, 20 nt, Artificial Sequence
  Synthetic oligonucleotide: Ptpn6-599
ggccgagccaggaagcuacc

SEQ ID NO: 22267 - RNA, 21 nt, Artificial Sequence
  Synthetic oligonucleotide: Ptpn6-3036
gggccgagccaggaagcuacc

SEQ ID NO: 22268 - RNA, 22 nt, Artificial Sequence
  Synthetic oligonucleotide: Ptpn6-3037
ugggccgagccaggaagcuacc

SEQ ID NO: 22269 - RNA, 23 nt, Artificial Sequence
  Synthetic oligonucleotide: Ptpn6-3038
cugggccgagccaggaagcuacc

SEQ ID NO: 22270 - RNA, 24 nt, Artificial Sequence
  Synthetic oligonucleotide: Ptpn6-3039
acugggccgagccaggaagcuacc

SEQ ID NO: 22271 - RNA, 18 nt, Artificial Sequence
  Synthetic oligonucleotide: Ptpn6-3040
ggugcccgggacuuaccc

SEQ ID NO: 22272 - RNA, 19 nt, Artificial Sequence
  Synthetic oligonucleotide: Ptpn6-3041
uggugcccgggacuuaccc

SEQ ID NO: 22273 - RNA, 20 nt, Artificial Sequence
  Synthetic oligonucleotide: Ptpn6-1861
auggugcccgggacuuaccc

SEQ ID NO: 22274 - RNA, 21 nt, Artificial Sequence
  Synthetic oligonucleotide: Ptpn6-3042
gauggugcccgggacuuaccc

SEQ ID NO: 22275 - RNA, 22 nt, Artificial Sequence
  Synthetic oligonucleotide: Ptpn6-3043
cgauggugcccgggacuuaccc

SEQ ID NO: 22276 - RNA, 23 nt, Artificial Sequence
  Synthetic oligonucleotide: Ptpn6-3044
ccgauggugcccgggacuuaccc

SEQ ID NO: 22277 - RNA, 24 nt, Artificial Sequence
  Synthetic oligonucleotide: Ptpn6-3045
cccgauggugcccgggacuuaccc

SEQ ID NO: 22278 - RNA, 18 nt, Artificial Sequence
  Synthetic oligonucleotide: Ptpn6-3046
ccguggacaccucggccc

SEQ ID NO: 22279 - RNA, 19 nt, Artificial Sequence
  Synthetic oligonucleotide: Ptpn6-3047
accguggacaccucggccc

SEQ ID NO: 22280 - RNA, 20 nt, Artificial Sequence
  Synthetic oligonucleotide: Ptpn6-600
uaccguggacaccucggccc

SEQ ID NO: 22281 - RNA, 21 nt, Artificial Sequence
  Synthetic oligonucleotide: Ptpn6-3048
cuaccguggacaccucggccc

SEQ ID NO: 22282 - RNA, 22 nt, Artificial Sequence
  Synthetic oligonucleotide: Ptpn6-3049
gcuaccguggacaccucggccc

SEQ ID NO: 22283 - RNA, 23 nt, Artificial Sequence
  Synthetic oligonucleotide: Ptpn6-3050
agcuaccguggacaccucggccc

SEQ ID NO: 22284 - RNA, 24 nt, Artificial Sequence
  Synthetic oligonucleotide: Ptpn6-3051
aagcuaccguggacaccucggccc

SEQ ID NO: 22285 - RNA, 18 nt, Artificial Sequence
  Synthetic oligonucleotide: Ptpn6-3052
ggggagccugggccagcc

SEQ ID NO: 22286 - RNA, 19 nt, Artificial Sequence
  Synthetic oligonucleotide: Ptpn6-3053
cggggagccugggccagcc

SEQ ID NO: 22287 - RNA, 20 nt, Artificial Sequence
  Synthetic oligonucleotide: Ptpn6-577
gcggggagccugggccagcc

SEQ ID NO: 22288 - RNA, 21 nt, Artificial Sequence
  Synthetic oligonucleotide: Ptpn6-3054
agcggggagccugggccagcc

SEQ ID NO: 22289 - RNA, 22 nt, Artificial Sequence
  Synthetic oligonucleotide: Ptpn6-3055
gagcggggagccugggccagcc

SEQ ID NO: 22290 - RNA, 23 nt, Artificial Sequence
  Synthetic oligonucleotide: Ptpn6-3056
ugagcggggagccugggccagcc

SEQ ID NO: 22291 - RNA, 24 nt, Artificial Sequence
  Synthetic oligonucleotide: Ptpn6-3057
cugagcggggagccugggccagcc

SEQ ID NO: 22292 - RNA, 18 nt, Artificial Sequence
  Synthetic oligonucleotide: Ptpn6-3058
uugcgacugggccgagcc

SEQ ID NO: 22293 - RNA, 19 nt, Artificial Sequence
  Synthetic oligonucleotide: Ptpn6-3059
cuugcgacugggccgagcc

SEQ ID NO: 22294 - RNA, 20 nt, Artificial Sequence
  Synthetic oligonucleotide: Ptpn6-28
ucuugcgacugggccgagcc

SEQ ID NO: 22295 - RNA, 21 nt, Artificial Sequence
  Synthetic oligonucleotide: Ptpn6-3060
uucuugcgacugggccgagcc

SEQ ID NO: 22296 - RNA, 22 nt, Artificial Sequence
  Synthetic oligonucleotide: Ptpn6-3061
guucuugcgacugggccgagcc

SEQ ID NO: 22297 - RNA, 23 nt, Artificial Sequence
  Synthetic oligonucleotide: Ptpn6-3062
gguucuugcgacugggccgagcc

SEQ ID NO: 22298 - RNA, 24 nt, Artificial Sequence
  Synthetic oligonucleotide: Ptpn6-3063
ugguucuugcgacugggccgagcc

SEQ ID NO: 22299 - RNA, 18 nt, Artificial Sequence
  Synthetic oligonucleotide: Ptpn6-3064
ugggaccccgauggugcc

SEQ ID NO: 22300 - RNA, 19 nt, Artificial Sequence
  Synthetic oligonucleotide: Ptpn6-3065
cugggaccccgauggugcc

SEQ ID NO: 22301 - RNA, 20 nt, Artificial Sequence
  Synthetic oligonucleotide: Ptpn6-1187
acugggaccccgauggugcc

SEQ ID NO: 22302 - RNA, 18 nt, Artificial Sequence
  Synthetic oligonucleotide: Ptpn6-3066
ucacugagcacagaaagc

SEQ ID NO: 22303 - RNA, 19 nt, Artificial Sequence
  Synthetic oligonucleotide: Ptpn6-3067
gucacugagcacagaaagc

SEQ ID NO: 22304 - RNA, 20 nt, Artificial Sequence
  Synthetic oligonucleotide: Ptpn6-580
ggucacugagcacagaaagc

SEQ ID NO: 22305 - RNA, 21 nt, Artificial Sequence
  Synthetic oligonucleotide: Ptpn6-3068
uggucacugagcacagaaagc

SEQ ID NO: 22306 - RNA, 22 nt, Artificial Sequence
  Synthetic oligonucleotide: Ptpn6-3069
cuggucacugagcacagaaagc

SEQ ID NO: 22307 - RNA, 23 nt, Artificial Sequence
  Synthetic oligonucleotide: Ptpn6-3070
gcuggucacugagcacagaaagc

SEQ ID NO: 22308 - RNA, 24 nt, Artificial Sequence
  Synthetic oligonucleotide: Ptpn6-3071
ggcuggucacugagcacagaaagc

SEQ ID NO: 22309 - RNA, 18 nt, Artificial Sequence
  Synthetic oligonucleotide: Ptpn6-3072
accuaccugacggagagc

SEQ ID NO: 22310 - RNA, 19 nt, Artificial Sequence
  Synthetic oligonucleotide: Ptpn6-3073
caccuaccugacggagagc

SEQ ID NO: 22311 - RNA, 20 nt, Artificial Sequence
  Synthetic oligonucleotide: Ptpn6-3074
ccaccuaccugacggagagc

SEQ ID NO: 22312 - RNA, 21 nt, Artificial Sequence
  Synthetic oligonucleotide: Ptpn6-3075
cccaccuaccugacggagagc

SEQ ID NO: 22313 - RNA, 22 nt, Artificial Sequence
  Synthetic oligonucleotide: Ptpn6-3076
gcccaccuaccugacggagagc

SEQ ID NO: 22314 - RNA, 23 nt, Artificial Sequence
  Synthetic oligonucleotide: Ptpn6-3077
ggcccaccuaccugacggagagc

SEQ ID NO: 22315 - RNA, 24 nt, Artificial Sequence
  Synthetic oligonucleotide: Ptpn6-3078
gggcccaccuaccugacggagagc

SEQ ID NO: 22316 - RNA, 18 nt, Artificial Sequence
  Synthetic oligonucleotide: Ptpn6-3079
cuugcgacugggccgagc

SEQ ID NO: 22317 - RNA, 19 nt, Artificial Sequence
  Synthetic oligonucleotide: Ptpn6-3080
ucuugcgacugggccgagc

SEQ ID NO: 22318 - RNA, 20 nt, Artificial Sequence
  Synthetic oligonucleotide: Ptpn6-597
uucuugcgacugggccgagc

SEQ ID NO: 22319 - RNA, 21 nt, Artificial Sequence
  Synthetic oligonucleotide: Ptpn6-3081
guucuugcgacugggccgagc

SEQ ID NO: 22320 - RNA, 22 nt, Artificial Sequence
  Synthetic oligonucleotide: Ptpn6-3082
gguucuugcgacugggccgagc

SEQ ID NO: 22321 - RNA, 23 nt, Artificial Sequence
  Synthetic oligonucleotide: Ptpn6-3083
ugguucuugcgacugggccgagc

SEQ ID NO: 22322 - RNA, 24 nt, Artificial Sequence
  Synthetic oligonucleotide: Ptpn6-3084
cugguucuugcgacugggccgagc

SEQ ID NO: 22323 - RNA, 18 nt, Artificial Sequence
  Synthetic oligonucleotide: Ptpn6-3085
ugacccugagcggggagc

SEQ ID NO: 22324 - RNA, 19 nt, Artificial Sequence
  Synthetic oligonucleotide: Ptpn6-3086
gugacccugagcggggagc

SEQ ID NO: 22325 - RNA, 20 nt, Artificial Sequence
  Synthetic oligonucleotide: Ptpn6-3087
ggugacccugagcggggagc

SEQ ID NO: 22326 - RNA, 21 nt, Artificial Sequence
  Synthetic oligonucleotide: Ptpn6-3088
gggugacccugagcggggagc

SEQ ID NO: 22327 - RNA, 22 nt, Artificial Sequence
  Synthetic oligonucleotide: Ptpn6-3089
ugggugacccugagcggggagc

SEQ ID NO: 22328 - RNA, 23 nt, Artificial Sequence
  Synthetic oligonucleotide: Ptpn6-3090
gugggugacccugagcggggagc

SEQ ID NO: 22329 - RNA, 24 nt, Artificial Sequence
  Synthetic oligonucleotide: Ptpn6-3091
ugugggugacccugagcggggagc

SEQ ID NO: 22330 - RNA, 18 nt, Artificial Sequence
  Synthetic oligonucleotide: Ptpn6-3092
augugggugacccugagc

SEQ ID NO: 22331 - RNA, 19 nt, Artificial Sequence
  Synthetic oligonucleotide: Ptpn6-3093
gaugugggugacccugagc

SEQ ID NO: 22332 - RNA, 20 nt, Artificial Sequence
  Synthetic oligonucleotide: Ptpn6-2454
ugaugugggugacccugagc

SEQ ID NO: 22333 - RNA, 21 nt, Artificial Sequence
  Synthetic oligonucleotide: Ptpn6-3094
uugaugugggugacccugagc

SEQ ID NO: 22334 - RNA, 22 nt, Artificial Sequence
  Synthetic oligonucleotide: Ptpn6-3095
cuugaugugggugacccugagc

SEQ ID NO: 22335 - RNA, 23 nt, Artificial Sequence
  Synthetic oligonucleotide: Ptpn6-3096
ccuugaugugggugacccugagc

SEQ ID NO: 22336 - RNA, 24 nt, Artificial Sequence
  Synthetic oligonucleotide: Ptpn6-3097
accuugaugugggugacccugagc

SEQ ID NO: 22337 - RNA, 18 nt, Artificial Sequence
  Synthetic oligonucleotide: Ptpn6-3098
ucacgcacaagaaacguc

SEQ ID NO: 22338 - RNA, 19 nt, Artificial Sequence
  Synthetic oligonucleotide: Ptpn6-3099
cucacgcacaagaaacguc

SEQ ID NO: 22339 - RNA, 20 nt, Artificial Sequence
  Synthetic oligonucleotide: Ptpn6-583
ucucacgcacaagaaacguc

SEQ ID NO: 22340 - RNA, 21 nt, Artificial Sequence
  Synthetic oligonucleotide: Ptpn6-3100
cucucacgcacaagaaacguc

SEQ ID NO: 22341 - RNA, 22 nt, Artificial Sequence
  Synthetic oligonucleotide: Ptpn6-3101
gcucucacgcacaagaaacguc

SEQ ID NO: 22342 - RNA, 23 nt, Artificial Sequence
  Synthetic oligonucleotide: Ptpn6-3102
ggcucucacgcacaagaaacguc

SEQ ID NO: 22343 - RNA, 24 nt, Artificial Sequence
  Synthetic oligonucleotide: Ptpn6-3103
aggcucucacgcacaagaaacguc

SEQ ID NO: 22344 - RNA, 18 nt, Artificial Sequence
  Synthetic oligonucleotide: Ptpn6-3104
gcaucucucuguagggag

SEQ ID NO: 22345 - RNA, 19 nt, Artificial Sequence
  Synthetic oligonucleotide: Ptpn6-3105
agcaucucucuguagggag

SEQ ID NO: 22346 - RNA, 20 nt, Artificial Sequence
  Synthetic oligonucleotide: Ptpn6-1228
cagcaucucucuguagggag

SEQ ID NO: 22347 - RNA, 21 nt, Artificial Sequence
  Synthetic oligonucleotide: Ptpn6-3106
acagcaucucucuguagggag

SEQ ID NO: 22348 - RNA, 22 nt, Artificial Sequence
  Synthetic oligonucleotide: Ptpn6-3107
gacagcaucucucuguagggag

SEQ ID NO: 22349 - RNA, 23 nt, Artificial Sequence
  Synthetic oligonucleotide: Ptpn6-3108
ggacagcaucucucuguagggag

SEQ ID NO: 22350 - RNA, 24 nt, Artificial Sequence
  Synthetic oligonucleotide: Ptpn6-3109
gggacagcaucucucuguagggag

SEQ ID NO: 22351 - RNA, 18 nt, Artificial Sequence
  Synthetic oligonucleotide: Ptpn6-3110
gaugugggugacccugag

SEQ ID NO: 22352 - RNA, 19 nt, Artificial Sequence
  Synthetic oligonucleotide: Ptpn6-3111
ugaugugggugacccugag

SEQ ID NO: 22353 - RNA, 20 nt, Artificial Sequence
  Synthetic oligonucleotide: Ptpn6-2461
uugaugugggugacccugag

SEQ ID NO: 22354 - RNA, 21 nt, Artificial Sequence
  Synthetic oligonucleotide: Ptpn6-3112
cuugaugugggugacccugag

SEQ ID NO: 22355 - RNA, 22 nt, Artificial Sequence
  Synthetic oligonucleotide: Ptpn6-3113
ccuugaugugggugacccugag

SEQ ID NO: 22356 - RNA, 23 nt, Artificial Sequence
  Synthetic oligonucleotide: Ptpn6-3114
accuugaugugggugacccugag

SEQ ID NO: 22357 - RNA, 24 nt, Artificial Sequence
  Synthetic oligonucleotide: Ptpn6-3115
gaccuugaugugggugacccugag

SEQ ID NO: 22358 - RNA, 18 nt, Artificial Sequence
  Synthetic oligonucleotide: Ptpn6-3116
gggcccaccuaccugacg

SEQ ID NO: 22359 - RNA, 19 nt, Artificial Sequence
  Synthetic oligonucleotide: Ptpn6-3117
ggggcccaccuaccugacg

SEQ ID NO: 22360 - RNA, 20 nt, Artificial Sequence
  Synthetic oligonucleotide: Ptpn6-3118
gggggcccaccuaccugacg

SEQ ID NO: 22361 - RNA, 21 nt, Artificial Sequence
  Synthetic oligonucleotide: Ptpn6-3119
ggggggcccaccuaccugacg

SEQ ID NO: 22362 - RNA, 22 nt, Artificial Sequence
  Synthetic oligonucleotide: Ptpn6-3120
cggggggcccaccuaccugacg

SEQ ID NO: 22363 - RNA, 23 nt, Artificial Sequence
  Synthetic oligonucleotide: Ptpn6-3121
gcggggggcccaccuaccugacg

SEQ ID NO: 22364 - RNA, 24 nt, Artificial Sequence
  Synthetic oligonucleotide: Ptpn6-3122
ugcggggggcccaccuaccugacg

SEQ ID NO: 22365 - RNA, 18 nt, Artificial Sequence
  Synthetic oligonucleotide: Ptpn6-3123
ugugggugacccugagcg

SEQ ID NO: 22366 - RNA, 19 nt, Artificial Sequence
  Synthetic oligonucleotide: Ptpn6-3124
augugggugacccugagcg

SEQ ID NO: 22367 - RNA, 20 nt, Artificial Sequence
  Synthetic oligonucleotide: Ptpn6-2463
gaugugggugacccugagcg

SEQ ID NO: 22368 - RNA, 21 nt, Artificial Sequence
  Synthetic oligonucleotide: Ptpn6-3125
ugaugugggugacccugagcg

SEQ ID NO: 22369 - RNA, 22 nt, Artificial Sequence
  Synthetic oligonucleotide: Ptpn6-3126
uugaugugggugacccugagcg

SEQ ID NO: 22370 - RNA, 23 nt, Artificial Sequence
  Synthetic oligonucleotide: Ptpn6-3127
cuugaugugggugacccugagcg

SEQ ID NO: 22371 - RNA, 24 nt, Artificial Sequence
  Synthetic oligonucleotide: Ptpn6-3128
ccuugaugugggugacccugagcg

SEQ ID NO: 22372 - RNA, 18 nt, Artificial Sequence
  Synthetic oligonucleotide: Ptpn6-3129
ccugcagggcaccaggcg

SEQ ID NO: 22373 - RNA, 19 nt, Artificial Sequence
  Synthetic oligonucleotide: Ptpn6-3130
cccugcagggcaccaggcg

SEQ ID NO: 22374 - RNA, 20 nt, Artificial Sequence
  Synthetic oligonucleotide: Ptpn6-3131
acccugcagggcaccaggcg

SEQ ID NO: 22375 - RNA, 21 nt, Artificial Sequence
  Synthetic oligonucleotide: Ptpn6-3132
cacccugcagggcaccaggcg

SEQ ID NO: 22376 - RNA, 22 nt, Artificial Sequence
  Synthetic oligonucleotide: Ptpn6-3133
ccacccugcagggcaccaggcg

SEQ ID NO: 22377 - RNA, 23 nt, Artificial Sequence
  Synthetic oligonucleotide: Ptpn6-3134
cccacccugcagggcaccaggcg

SEQ ID NO: 22378 - RNA, 24 nt, Artificial Sequence
  Synthetic oligonucleotide: Ptpn6-3135
ccccacccugcagggcaccaggcg

SEQ ID NO: 22379 - RNA, 18 nt, Artificial Sequence
  Synthetic oligonucleotide: Ptpn6-3136
cagcccacugaggucucg

SEQ ID NO: 22380 - RNA, 19 nt, Artificial Sequence
  Synthetic oligonucleotide: Ptpn6-3137
ccagcccacugaggucucg

SEQ ID NO: 22381 - RNA, 20 nt, Artificial Sequence
  Synthetic oligonucleotide: Ptpn6-603
uccagcccacugaggucucg

SEQ ID NO: 22382 - RNA, 21 nt, Artificial Sequence
  Synthetic oligonucleotide: Ptpn6-3138
auccagcccacugaggucucg

SEQ ID NO: 22383 - RNA, 22 nt, Artificial Sequence
  Synthetic oligonucleotide: Ptpn6-3139
cauccagcccacugaggucucg

SEQ ID NO: 22384 - RNA, 23 nt, Artificial Sequence
  Synthetic oligonucleotide: Ptpn6-3140
gcauccagcccacugaggucucg

SEQ ID NO: 22385 - RNA, 24 nt, Artificial Sequence
  Synthetic oligonucleotide: Ptpn6-3141
ugcauccagcccacugaggucucg

SEQ ID NO: 22386 - RNA, 18 nt, Artificial Sequence
  Synthetic oligonucleotide: Ptpn6-3142
ccaccugggcggcccagg

SEQ ID NO: 22387 - RNA, 19 nt, Artificial Sequence
  Synthetic oligonucleotide: Ptpn6-3143
accaccugggcggcccagg

SEQ ID NO: 22388 - RNA, 20 nt, Artificial Sequence
  Synthetic oligonucleotide: Ptpn6-3144
aaccaccugggcggcccagg

SEQ ID NO: 22389 - RNA, 21 nt, Artificial Sequence
  Synthetic oligonucleotide: Ptpn6-3145
aaaccaccugggcggcccagg

SEQ ID NO: 22390 - RNA, 22 nt, Artificial Sequence
  Synthetic oligonucleotide: Ptpn6-3146
gaaaccaccugggcggcccagg

SEQ ID NO: 22391 - RNA, 23 nt, Artificial Sequence
  Synthetic oligonucleotide: Ptpn6-3147
ugaaaccaccugggcggcccagg

SEQ ID NO: 22392 - RNA, 24 nt, Artificial Sequence
  Synthetic oligonucleotide: Ptpn6-3148
gugaaaccaccugggcggcccagg

SEQ ID NO: 22393 - RNA, 18 nt, Artificial Sequence
  Synthetic oligonucleotide: Ptpn6-3149
caucucucuguagggagg

SEQ ID NO: 22394 - RNA, 19 nt, Artificial Sequence
  Synthetic oligonucleotide: Ptpn6-3150
gcaucucucuguagggagg

SEQ ID NO: 22395 - RNA, 20 nt, Artificial Sequence
  Synthetic oligonucleotide: Ptpn6-1222
agcaucucucuguagggagg

SEQ ID NO: 22396 - RNA, 21 nt, Artificial Sequence
  Synthetic oligonucleotide: Ptpn6-3151
cagcaucucucuguagggagg

SEQ ID NO: 22397 - RNA, 22 nt, Artificial Sequence
  Synthetic oligonucleotide: Ptpn6-3152
acagcaucucucuguagggagg

SEQ ID NO: 22398 - RNA, 23 nt, Artificial Sequence
  Synthetic oligonucleotide: Ptpn6-3153
gacagcaucucucuguagggagg

SEQ ID NO: 22399 - RNA, 24 nt, Artificial Sequence
  Synthetic oligonucleotide: Ptpn6-3154
ggacagcaucucucuguagggagg

SEQ ID NO: 22400 - RNA, 18 nt, Artificial Sequence
  Synthetic oligonucleotide: Ptpn6-3155
acagcaucucucuguagg

SEQ ID NO: 22401 - RNA, 19 nt, Artificial Sequence
  Synthetic oligonucleotide: Ptpn6-3156
gacagcaucucucuguagg

SEQ ID NO: 22402 - RNA, 20 nt, Artificial Sequence
  Synthetic oligonucleotide: Ptpn6-1866
ggacagcaucucucuguagg

SEQ ID NO: 22403 - RNA, 21 nt, Artificial Sequence
  Synthetic oligonucleotide: Ptpn6-3157
gggacagcaucucucuguagg

SEQ ID NO: 22404 - RNA, 22 nt, Artificial Sequence
  Synthetic oligonucleotide: Ptpn6-3158
cgggacagcaucucucuguagg

SEQ ID NO: 22405 - RNA, 23 nt, Artificial Sequence
  Synthetic oligonucleotide: Ptpn6-3159
acgggacagcaucucucuguagg

SEQ ID NO: 22406 - RNA, 24 nt, Artificial Sequence
  Synthetic oligonucleotide: Ptpn6-3160
cacgggacagcaucucucuguagg

SEQ ID NO: 22407 - RNA, 18 nt, Artificial Sequence
  Synthetic oligonucleotide: Ptpn6-3161
cagcaucucucuguaggg

SEQ ID NO: 22408 - RNA, 19 nt, Artificial Sequence
  Synthetic oligonucleotide: Ptpn6-3162
acagcaucucucuguaggg

SEQ ID NO: 22409 - RNA, 20 nt, Artificial Sequence
  Synthetic oligonucleotide: Ptpn6-1043
gacagcaucucucuguaggg

SEQ ID NO: 22410 - RNA, 21 nt, Artificial Sequence
  Synthetic oligonucleotide: Ptpn6-3163
ggacagcaucucucuguaggg

SEQ ID NO: 22411 - RNA, 22 nt, Artificial Sequence
  Synthetic oligonucleotide: Ptpn6-3164
gggacagcaucucucuguaggg

SEQ ID NO: 22412 - RNA, 23 nt, Artificial Sequence
  Synthetic oligonucleotide: Ptpn6-3165
cgggacagcaucucucuguaggg

SEQ ID NO: 22413 - RNA, 24 nt, Artificial Sequence
  Synthetic oligonucleotide: Ptpn6-3166
acgggacagcaucucucuguaggg

SEQ ID NO: 22414 - RNA, 18 nt, Artificial Sequence
  Synthetic oligonucleotide: Ptpn6-3167
cugguucuugcgacuggg

SEQ ID NO: 22415 - RNA, 19 nt, Artificial Sequence
  Synthetic oligonucleotide: Ptpn6-3168
ccugguucuugcgacuggg

SEQ ID NO: 22416 - RNA, 20 nt, Artificial Sequence
  Synthetic oligonucleotide: Ptpn6-596
cccugguucuugcgacuggg

SEQ ID NO: 22417 - RNA, 21 nt, Artificial Sequence
  Synthetic oligonucleotide: Ptpn6-3169
acccugguucuugcgacuggg

SEQ ID NO: 22418 - RNA, 22 nt, Artificial Sequence
  Synthetic oligonucleotide: Ptpn6-3170
cacccugguucuugcgacuggg

SEQ ID NO: 22419 - RNA, 23 nt, Artificial Sequence
  Synthetic oligonucleotide: Ptpn6-3171
ucacccugguucuugcgacuggg

SEQ ID NO: 22420 - RNA, 24 nt, Artificial Sequence
  Synthetic oligonucleotide: Ptpn6-3172
gucacccugguucuugcgacuggg

SEQ ID NO: 22421 - RNA, 18 nt, Artificial Sequence
  Synthetic oligonucleotide: Ptpn6-3173
acgaagucuccaggcugg

SEQ ID NO: 22422 - RNA, 19 nt, Artificial Sequence
  Synthetic oligonucleotide: Ptpn6-3174
cacgaagucuccaggcugg

SEQ ID NO: 22423 - RNA, 20 nt, Artificial Sequence
  Synthetic oligonucleotide: Ptpn6-581
gcacgaagucuccaggcugg

SEQ ID NO: 22424 - RNA, 21 nt, Artificial Sequence
  Synthetic oligonucleotide: Ptpn6-3175
agcacgaagucuccaggcugg

SEQ ID NO: 22425 - RNA, 22 nt, Artificial Sequence
  Synthetic oligonucleotide: Ptpn6-3176
aagcacgaagucuccaggcugg

SEQ ID NO: 22426 - RNA, 23 nt, Artificial Sequence
  Synthetic oligonucleotide: Ptpn6-3177
aaagcacgaagucuccaggcugg

SEQ ID NO: 22427 - RNA, 24 nt, Artificial Sequence
  Synthetic oligonucleotide: Ptpn6-3178
gaaagcacgaagucuccaggcugg

SEQ ID NO: 22428 - RNA, 18 nt, Artificial Sequence
  Synthetic oligonucleotide: Ptpn6-3179
ggggggcccaccuaccug

SEQ ID NO: 22429 - RNA, 19 nt, Artificial Sequence
  Synthetic oligonucleotide: Ptpn6-3180
cggggggcccaccuaccug

SEQ ID NO: 22430 - RNA, 20 nt, Artificial Sequence
  Synthetic oligonucleotide: Ptpn6-3181
gcggggggcccaccuaccug

SEQ ID NO: 22431 - RNA, 21 nt, Artificial Sequence
  Synthetic oligonucleotide: Ptpn6-3182
ugcggggggcccaccuaccug

SEQ ID NO: 22432 - RNA, 22 nt, Artificial Sequence
  Synthetic oligonucleotide: Ptpn6-3183
uugcggggggcccaccuaccug

SEQ ID NO: 22433 - RNA, 23 nt, Artificial Sequence
  Synthetic oligonucleotide: Ptpn6-3184
guugcggggggcccaccuaccug

SEQ ID NO: 22434 - RNA, 24 nt, Artificial Sequence
  Synthetic oligonucleotide: Ptpn6-3185
gguugcggggggcccaccuaccug

SEQ ID NO: 22435 - RNA, 18 nt, Artificial Sequence
  Synthetic oligonucleotide: Ptpn6-3186
accugaucccccacccug

SEQ ID NO: 22436 - RNA, 19 nt, Artificial Sequence
  Synthetic oligonucleotide: Ptpn6-3187
caccugaucccccacccug

SEQ ID NO: 22437 - RNA, 20 nt, Artificial Sequence
  Synthetic oligonucleotide: Ptpn6-3188
ucaccugaucccccacccug

SEQ ID NO: 22438 - RNA, 21 nt, Artificial Sequence
  Synthetic oligonucleotide: Ptpn6-3189
gucaccugaucccccacccug

SEQ ID NO: 22439 - RNA, 22 nt, Artificial Sequence
  Synthetic oligonucleotide: Ptpn6-3190
ggucaccugaucccccacccug

SEQ ID NO: 22440 - RNA, 23 nt, Artificial Sequence
  Synthetic oligonucleotide: Ptpn6-3191
gggucaccugaucccccacccug

SEQ ID NO: 22441 - RNA, 24 nt, Artificial Sequence
  Synthetic oligonucleotide: Ptpn6-3192
ugggucaccugaucccccacccug

SEQ ID NO: 22442 - RNA, 18 nt, Artificial Sequence
  Synthetic oligonucleotide: Ptpn6-3193
ggugccgucgcgguccug

SEQ ID NO: 22443 - RNA, 19 nt, Artificial Sequence
  Synthetic oligonucleotide: Ptpn6-3194
uggugccgucgcgguccug

SEQ ID NO: 22444 - RNA, 20 nt, Artificial Sequence
  Synthetic oligonucleotide: Ptpn6-587
auggugccgucgcgguccug

SEQ ID NO: 22445 - RNA, 21 nt, Artificial Sequence
  Synthetic oligonucleotide: Ptpn6-3195
gauggugccgucgcgguccug

SEQ ID NO: 22446 - RNA, 22 nt, Artificial Sequence
  Synthetic oligonucleotide: Ptpn6-3196
ugauggugccgucgcgguccug

SEQ ID NO: 22447 - RNA, 23 nt, Artificial Sequence
  Synthetic oligonucleotide: Ptpn6-3197
augauggugccgucgcgguccug

SEQ ID NO: 22448 - RNA, 24 nt, Artificial Sequence
  Synthetic oligonucleotide: Ptpn6-3198
gaugauggugccgucgcgguccug

SEQ ID NO: 22449 - RNA, 18 nt, Artificial Sequence
  Synthetic oligonucleotide: Ptpn6-3199
cgggacagcaucucucug

SEQ ID NO: 22450 - RNA, 19 nt, Artificial Sequence
  Synthetic oligonucleotide: Ptpn6-3200
acgggacagcaucucucug

SEQ ID NO: 22451 - RNA, 20 nt, Artificial Sequence
  Synthetic oligonucleotide: Ptpn6-1863
cacgggacagcaucucucug

SEQ ID NO: 22452 - RNA, 21 nt, Artificial Sequence
  Synthetic oligonucleotide: Ptpn6-3201
ccacgggacagcaucucucug

SEQ ID NO: 22453 - RNA, 22 nt, Artificial Sequence
  Synthetic oligonucleotide: Ptpn6-3202
cccacgggacagcaucucucug

SEQ ID NO: 22454 - RNA, 23 nt, Artificial Sequence
  Synthetic oligonucleotide: Ptpn6-3203
acccacgggacagcaucucucug

SEQ ID NO: 22455 - RNA, 24 nt, Artificial Sequence
  Synthetic oligonucleotide: Ptpn6-3204
uacccacgggacagcaucucucug

SEQ ID NO: 22456 - RNA, 18 nt, Artificial Sequence
  Synthetic oligonucleotide: Ptpn6-3205
ggcccaggcagggcagug

SEQ ID NO: 22457 - RNA, 19 nt, Artificial Sequence
  Synthetic oligonucleotide: Ptpn6-3206
cggcccaggcagggcagug

SEQ ID NO: 22458 - RNA, 20 nt, Artificial Sequence
  Synthetic oligonucleotide: Ptpn6-2473
gcggcccaggcagggcagug

SEQ ID NO: 22459 - RNA, 21 nt, Artificial Sequence
  Synthetic oligonucleotide: Ptpn6-3207
ggcggcccaggcagggcagug

SEQ ID NO: 22460 - RNA, 22 nt, Artificial Sequence
  Synthetic oligonucleotide: Ptpn6-3208
gggcggcccaggcagggcagug

SEQ ID NO: 22461 - RNA, 23 nt, Artificial Sequence
  Synthetic oligonucleotide: Ptpn6-3209
ugggcggcccaggcagggcagug

SEQ ID NO: 22462 - RNA, 24 nt, Artificial Sequence
  Synthetic oligonucleotide: Ptpn6-3210
cugggcggcccaggcagggcagug

SEQ ID NO: 22463 - RNA, 18 nt, Artificial Sequence
  Synthetic oligonucleotide: Ptpn6-3211
accucucacuagugggau

SEQ ID NO: 22464 - RNA, 19 nt, Artificial Sequence
  Synthetic oligonucleotide: Ptpn6-3212
caccucucacuagugggau

SEQ ID NO: 22465 - RNA, 20 nt, Artificial Sequence
  Synthetic oligonucleotide: Ptpn6-2477
ucaccucucacuagugggau

SEQ ID NO: 22466 - RNA, 21 nt, Artificial Sequence
  Synthetic oligonucleotide: Ptpn6-3213
cucaccucucacuagugggau

SEQ ID NO: 22467 - RNA, 22 nt, Artificial Sequence
  Synthetic oligonucleotide: Ptpn6-3214
ccucaccucucacuagugggau

SEQ ID NO: 22468 - RNA, 23 nt, Artificial Sequence
  Synthetic oligonucleotide: Ptpn6-3215
cccucaccucucacuagugggau

SEQ ID NO: 22469 - RNA, 24 nt, Artificial Sequence
  Synthetic oligonucleotide: Ptpn6-3216
gcccucaccucucacuagugggau

SEQ ID NO: 22470 - RNA, 18 nt, Artificial Sequence
  Synthetic oligonucleotide: Ptpn6-3217
cggcccaggcagggcagu

SEQ ID NO: 22471 - RNA, 19 nt, Artificial Sequence
  Synthetic oligonucleotide: Ptpn6-3218
gcggcccaggcagggcagu

SEQ ID NO: 22472 - RNA, 20 nt, Artificial Sequence
  Synthetic oligonucleotide: Ptpn6-3219
ggcggcccaggcagggcagu

SEQ ID NO: 22473 - RNA, 21 nt, Artificial Sequence
  Synthetic oligonucleotide: Ptpn6-3220
gggcggcccaggcagggcagu

SEQ ID NO: 22474 - RNA, 22 nt, Artificial Sequence
  Synthetic oligonucleotide: Ptpn6-3221
ugggcggcccaggcagggcagu

SEQ ID NO: 22475 - RNA, 23 nt, Artificial Sequence
  Synthetic oligonucleotide: Ptpn6-3222
cugggcggcccaggcagggcagu

SEQ ID NO: 22476 - RNA, 24 nt, Artificial Sequence
  Synthetic oligonucleotide: Ptpn6-3223
ccugggcggcccaggcagggcagu

SEQ ID NO: 22477 - RNA, 18 nt, Artificial Sequence
  Synthetic oligonucleotide: Ptpn6-3224
gggacagcaucucucugu

SEQ ID NO: 22478 - RNA, 19 nt, Artificial Sequence
  Synthetic oligonucleotide: Ptpn6-3225
cgggacagcaucucucugu

SEQ ID NO: 22479 - RNA, 20 nt, Artificial Sequence
  Synthetic oligonucleotide: Ptpn6-1190
acgggacagcaucucucugu

SEQ ID NO: 22480 - RNA, 21 nt, Artificial Sequence
  Synthetic oligonucleotide: Ptpn6-3226
cacgggacagcaucucucugu

SEQ ID NO: 22481 - RNA, 22 nt, Artificial Sequence
  Synthetic oligonucleotide: Ptpn6-3227
ccacgggacagcaucucucugu

SEQ ID NO: 22482 - RNA, 23 nt, Artificial Sequence
  Synthetic oligonucleotide: Ptpn6-3228
cccacgggacagcaucucucugu

SEQ ID NO: 22483 - RNA, 24 nt, Artificial Sequence
  Synthetic oligonucleotide: Ptpn6-3229
acccacgggacagcaucucucugu

SEQ ID NO: 22484 - RNA, 18 nt, Artificial Sequence
  Synthetic oligonucleotide: Ptpn6-3230
ggcuucccccucccuaca

SEQ ID NO: 22485 - RNA, 19 nt, Artificial Sequence
  Synthetic oligonucleotide: Ptpn6-3231
uggcuucccccucccuaca

SEQ ID NO: 22486 - RNA, 20 nt, Artificial Sequence
  Synthetic oligonucleotide: Ptpn6-1689
guggcuucccccucccuaca

SEQ ID NO: 22487 - RNA, 21 nt, Artificial Sequence
  Synthetic oligonucleotide: Ptpn6-3232
cguggcuucccccucccuaca

SEQ ID NO: 22488 - RNA, 22 nt, Artificial Sequence
  Synthetic oligonucleotide: Ptpn6-3233
ccguggcuucccccucccuaca

SEQ ID NO: 22489 - RNA, 23 nt, Artificial Sequence
  Synthetic oligonucleotide: Ptpn6-3234
gccguggcuucccccucccuaca

SEQ ID NO: 22490 - RNA, 24 nt, Artificial Sequence
  Synthetic oligonucleotide: Ptpn6-3235
ugccguggcuucccccucccuaca

SEQ ID NO: 22491 - RNA, 18 nt, Artificial Sequence
  Synthetic oligonucleotide: Ptpn6-3236
gguaagucccgggcacca

SEQ ID NO: 22492 - RNA, 19 nt, Artificial Sequence
  Synthetic oligonucleotide: Ptpn6-3237
ggguaagucccgggcacca

SEQ ID NO: 22493 - RNA, 20 nt, Artificial Sequence
  Synthetic oligonucleotide: Ptpn6-1692
uggguaagucccgggcacca

SEQ ID NO: 22494 - RNA, 21 nt, Artificial Sequence
  Synthetic oligonucleotide: Ptpn6-3238
guggguaagucccgggcacca

SEQ ID NO: 22495 - RNA, 22 nt, Artificial Sequence
  Synthetic oligonucleotide: Ptpn6-3239
cguggguaagucccgggcacca

SEQ ID NO: 22496 - RNA, 23 nt, Artificial Sequence
  Synthetic oligonucleotide: Ptpn6-3240
ccguggguaagucccgggcacca

SEQ ID NO: 22497 - RNA, 24 nt, Artificial Sequence
  Synthetic oligonucleotide: Ptpn6-3241
cccguggguaagucccgggcacca

SEQ ID NO: 22498 - RNA, 18 nt, Artificial Sequence
  Synthetic oligonucleotide: Ptpn6-3242
gguuucaccgagaccuca

SEQ ID NO: 22499 - RNA, 19 nt, Artificial Sequence
  Synthetic oligonucleotide: Ptpn6-3243
ugguuucaccgagaccuca

SEQ ID NO: 22500 - RNA, 20 nt, Artificial Sequence
  Synthetic oligonucleotide: Ptpn6-504
gugguuucaccgagaccuca

SEQ ID NO: 22501 - RNA, 21 nt, Artificial Sequence
  Synthetic oligonucleotide: Ptpn6-3244
ggugguuucaccgagaccuca

SEQ ID NO: 22502 - RNA, 22 nt, Artificial Sequence
  Synthetic oligonucleotide: Ptpn6-3245
aggugguuucaccgagaccuca

SEQ ID NO: 22503 - RNA, 23 nt, Artificial Sequence
  Synthetic oligonucleotide: Ptpn6-3246
caggugguuucaccgagaccuca

SEQ ID NO: 22504 - RNA, 24 nt, Artificial Sequence
  Synthetic oligonucleotide: Ptpn6-3247
ccaggugguuucaccgagaccuca

SEQ ID NO: 22505 - RNA, 18 nt, Artificial Sequence
  Synthetic oligonucleotide: Ptpn6-3248
gccgcccaggugguuuca

SEQ ID NO: 22506 - RNA, 19 nt, Artificial Sequence
  Synthetic oligonucleotide: Ptpn6-3249
ggccgcccaggugguuuca

SEQ ID NO: 22507 - RNA, 20 nt, Artificial Sequence
  Synthetic oligonucleotide: Ptpn6-3250
gggccgcccaggugguuuca

SEQ ID NO: 22508 - RNA, 21 nt, Artificial Sequence
  Synthetic oligonucleotide: Ptpn6-3251
ugggccgcccaggugguuuca

SEQ ID NO: 22509 - RNA, 22 nt, Artificial Sequence
  Synthetic oligonucleotide: Ptpn6-3252
cugggccgcccaggugguuuca

SEQ ID NO: 22510 - RNA, 23 nt, Artificial Sequence
  Synthetic oligonucleotide: Ptpn6-3253
ccugggccgcccaggugguuuca

SEQ ID NO: 22511 - RNA, 24 nt, Artificial Sequence
  Synthetic oligonucleotide: Ptpn6-3254
gccugggccgcccaggugguuuca

SEQ ID NO: 22512 - RNA, 18 nt, Artificial Sequence
  Synthetic oligonucleotide: Ptpn6-3255
uucuaugaccuguaugga

SEQ ID NO: 22513 - RNA, 19 nt, Artificial Sequence
  Synthetic oligonucleotide: Ptpn6-3256
uuucuaugaccuguaugga

SEQ ID NO: 22514 - RNA, 20 nt, Artificial Sequence
  Synthetic oligonucleotide: Ptpn6-98
auuucuaugaccuguaugga

SEQ ID NO: 22515 - RNA, 21 nt, Artificial Sequence
  Synthetic oligonucleotide: Ptpn6-3257
gauuucuaugaccuguaugga

SEQ ID NO: 22516 - RNA, 22 nt, Artificial Sequence
  Synthetic oligonucleotide: Ptpn6-3258
ggauuucuaugaccuguaugga

SEQ ID NO: 22517 - RNA, 23 nt, Artificial Sequence
  Synthetic oligonucleotide: Ptpn6-3259
gggauuucuaugaccuguaugga

SEQ ID NO: 22518 - RNA, 24 nt, Artificial Sequence
  Synthetic oligonucleotide: Ptpn6-3260
ggggauuucuaugaccuguaugga

SEQ ID NO: 22519 - RNA, 18 nt, Artificial Sequence
  Synthetic oligonucleotide: Ptpn6-3261
agaaguuugcgacucuga

SEQ ID NO: 22520 - RNA, 19 nt, Artificial Sequence
  Synthetic oligonucleotide: Ptpn6-3262
gagaaguuugcgacucuga

SEQ ID NO: 22521 - RNA, 20 nt, Artificial Sequence
  Synthetic oligonucleotide: Ptpn6-522
ggagaaguuugcgacucuga

SEQ ID NO: 22522 - RNA, 21 nt, Artificial Sequence
  Synthetic oligonucleotide: Ptpn6-3263
gggagaaguuugcgacucuga

SEQ ID NO: 22523 - RNA, 22 nt, Artificial Sequence
  Synthetic oligonucleotide: Ptpn6-3264
ggggagaaguuugcgacucuga

SEQ ID NO: 22524 - RNA, 23 nt, Artificial Sequence
  Synthetic oligonucleotide: Ptpn6-3265
aggggagaaguuugcgacucuga

SEQ ID NO: 22525 - RNA, 24 nt, Artificial Sequence
  Synthetic oligonucleotide: Ptpn6-3266
gaggggagaaguuugcgacucuga

SEQ ID NO: 22526 - RNA, 18 nt, Artificial Sequence
  Synthetic oligonucleotide: Ptpn6-3267
acugcuccgaucccacua

SEQ ID NO: 22527 - RNA, 19 nt, Artificial Sequence
  Synthetic oligonucleotide: Ptpn6-3268
aacugcuccgaucccacua

SEQ ID NO: 22528 - RNA, 20 nt, Artificial Sequence
  Synthetic oligonucleotide: Ptpn6-528
gaacugcuccgaucccacua

SEQ ID NO: 22529 - RNA, 21 nt, Artificial Sequence
  Synthetic oligonucleotide: Ptpn6-3269
ugaacugcuccgaucccacua

SEQ ID NO: 22530 - RNA, 22 nt, Artificial Sequence
  Synthetic oligonucleotide: Ptpn6-3270
cugaacugcuccgaucccacua

SEQ ID NO: 22531 - RNA, 23 nt, Artificial Sequence
  Synthetic oligonucleotide: Ptpn6-3271
gcugaacugcuccgaucccacua

SEQ ID NO: 22532 - RNA, 24 nt, Artificial Sequence
  Synthetic oligonucleotide: Ptpn6-3272
cgcugaacugcuccgaucccacua

SEQ ID NO: 22533 - RNA, 18 nt, Artificial Sequence
  Synthetic oligonucleotide: Ptpn6-3273
guggcuucccccucccua

SEQ ID NO: 22534 - RNA, 19 nt, Artificial Sequence
  Synthetic oligonucleotide: Ptpn6-3274
cguggcuucccccucccua

SEQ ID NO: 22535 - RNA, 20 nt, Artificial Sequence
  Synthetic oligonucleotide: Ptpn6-1688
ccguggcuucccccucccua

SEQ ID NO: 22536 - RNA, 18 nt, Artificial Sequence
  Synthetic oligonucleotide: Ptpn6-3275
ggauuucuaugaccugua

SEQ ID NO: 22537 - RNA, 19 nt, Artificial Sequence
  Synthetic oligonucleotide: Ptpn6-3276
gggauuucuaugaccugua

SEQ ID NO: 22538 - RNA, 20 nt, Artificial Sequence
  Synthetic oligonucleotide: Ptpn6-59
ggggauuucuaugaccugua

SEQ ID NO: 22539 - RNA, 21 nt, Artificial Sequence
  Synthetic oligonucleotide: Ptpn6-3277
aggggauuucuaugaccugua

SEQ ID NO: 22540 - RNA, 22 nt, Artificial Sequence
  Synthetic oligonucleotide: Ptpn6-3278
caggggauuucuaugaccugua

SEQ ID NO: 22541 - RNA, 23 nt, Artificial Sequence
  Synthetic oligonucleotide: Ptpn6-3279
ucaggggauuucuaugaccugua

SEQ ID NO: 22542 - RNA, 24 nt, Artificial Sequence
  Synthetic oligonucleotide: Ptpn6-3280
cucaggggauuucuaugaccugua

SEQ ID NO: 22543 - RNA, 18 nt, Artificial Sequence
  Synthetic oligonucleotide: Ptpn6-3281
ggugggccccccgcaacc

SEQ ID NO: 22544 - RNA, 19 nt, Artificial Sequence
  Synthetic oligonucleotide: Ptpn6-3282
aggugggccccccgcaacc

SEQ ID NO: 22545 - RNA, 20 nt, Artificial Sequence
  Synthetic oligonucleotide: Ptpn6-3283
uaggugggccccccgcaacc

SEQ ID NO: 22546 - RNA, 21 nt, Artificial Sequence
  Synthetic oligonucleotide: Ptpn6-3284
guaggugggccccccgcaacc

SEQ ID NO: 22547 - RNA, 22 nt, Artificial Sequence
  Synthetic oligonucleotide: Ptpn6-3285
gguaggugggccccccgcaacc

SEQ ID NO: 22548 - RNA, 23 nt, Artificial Sequence
  Synthetic oligonucleotide: Ptpn6-3286
agguaggugggccccccgcaacc

SEQ ID NO: 22549 - RNA, 24 nt, Artificial Sequence
  Synthetic oligonucleotide: Ptpn6-3287
cagguaggugggccccccgcaacc

SEQ ID NO: 22550 - RNA, 18 nt, Artificial Sequence
  Synthetic oligonucleotide: Ptpn6-3288
ugagagccucagccagcc

SEQ ID NO: 22551 - RNA, 19 nt, Artificial Sequence
  Synthetic oligonucleotide: Ptpn6-3289
gugagagccucagccagcc

SEQ ID NO: 22552 - RNA, 20 nt, Artificial Sequence
  Synthetic oligonucleotide: Ptpn6-107
cgugagagccucagccagcc

SEQ ID NO: 22553 - RNA, 21 nt, Artificial Sequence
  Synthetic oligonucleotide: Ptpn6-3290
gcgugagagccucagccagcc

SEQ ID NO: 22554 - RNA, 22 nt, Artificial Sequence
  Synthetic oligonucleotide: Ptpn6-3291
ugcgugagagccucagccagcc

SEQ ID NO: 22555 - RNA, 23 nt, Artificial Sequence
  Synthetic oligonucleotide: Ptpn6-3292
gugcgugagagccucagccagcc

SEQ ID NO: 22556 - RNA, 24 nt, Artificial Sequence
  Synthetic oligonucleotide: Ptpn6-3293
ugugcgugagagccucagccagcc

SEQ ID NO: 22557 - RNA, 18 nt, Artificial Sequence
  Synthetic oligonucleotide: Ptpn6-3294
gcaggccaagggcgagcc

SEQ ID NO: 22558 - RNA, 19 nt, Artificial Sequence
  Synthetic oligonucleotide: Ptpn6-3295
ugcaggccaagggcgagcc

SEQ ID NO: 22559 - RNA, 20 nt, Artificial Sequence
  Synthetic oligonucleotide: Ptpn6-534
cugcaggccaagggcgagcc

SEQ ID NO: 22560 - RNA, 21 nt, Artificial Sequence
  Synthetic oligonucleotide: Ptpn6-3296
gcugcaggccaagggcgagcc

SEQ ID NO: 22561 - RNA, 22 nt, Artificial Sequence
  Synthetic oligonucleotide: Ptpn6-3297
ugcugcaggccaagggcgagcc

SEQ ID NO: 22562 - RNA, 23 nt, Artificial Sequence
  Synthetic oligonucleotide: Ptpn6-3298
cugcugcaggccaagggcgagcc

SEQ ID NO: 22563 - RNA, 24 nt, Artificial Sequence
  Synthetic oligonucleotide: Ptpn6-3299
gcugcugcaggccaagggcgagcc

SEQ ID NO: 22564 - RNA, 18 nt, Artificial Sequence
  Synthetic oligonucleotide: Ptpn6-3300
gagacgcugcugcaggcc

SEQ ID NO: 22565 - RNA, 19 nt, Artificial Sequence
  Synthetic oligonucleotide: Ptpn6-3301
agagacgcugcugcaggcc

SEQ ID NO: 22566 - RNA, 20 nt, Artificial Sequence
  Synthetic oligonucleotide: Ptpn6-532
cagagacgcugcugcaggcc

SEQ ID NO: 22567 - RNA, 21 nt, Artificial Sequence
  Synthetic oligonucleotide: Ptpn6-3302
gcagagacgcugcugcaggcc

SEQ ID NO: 22568 - RNA, 22 nt, Artificial Sequence
  Synthetic oligonucleotide: Ptpn6-3303
ggcagagacgcugcugcaggcc

SEQ ID NO: 22569 - RNA, 23 nt, Artificial Sequence
  Synthetic oligonucleotide: Ptpn6-3304
aggcagagacgcugcugcaggcc

SEQ ID NO: 22570 - RNA, 24 nt, Artificial Sequence
  Synthetic oligonucleotide: Ptpn6-3305
caggcagagacgcugcugcaggcc

SEQ ID NO: 22571 - RNA, 18 nt, Artificial Sequence
  Synthetic oligonucleotide: Ptpn6-3306
gugagagccucagccagc

SEQ ID NO: 22572 - RNA, 19 nt, Artificial Sequence
  Synthetic oligonucleotide: Ptpn6-3307
cgugagagccucagccagc

SEQ ID NO: 22573 - RNA, 20 nt, Artificial Sequence
  Synthetic oligonucleotide: Ptpn6-537
gcgugagagccucagccagc

SEQ ID NO: 22574 - RNA, 21 nt, Artificial Sequence
  Synthetic oligonucleotide: Ptpn6-3308
ugcgugagagccucagccagc

SEQ ID NO: 22575 - RNA, 22 nt, Artificial Sequence
  Synthetic oligonucleotide: Ptpn6-3309
gugcgugagagccucagccagc

SEQ ID NO: 22576 - RNA, 23 nt, Artificial Sequence
  Synthetic oligonucleotide: Ptpn6-3310
ugugcgugagagccucagccagc

SEQ ID NO: 22577 - RNA, 24 nt, Artificial Sequence
  Synthetic oligonucleotide: Ptpn6-3311
uugugcgugagagccucagccagc

SEQ ID NO: 22578 - RNA, 18 nt, Artificial Sequence
  Synthetic oligonucleotide: Ptpn6-3312
cuggcucggcccagucgc

SEQ ID NO: 22579 - RNA, 19 nt, Artificial Sequence
  Synthetic oligonucleotide: Ptpn6-3313
ccuggcucggcccagucgc

SEQ ID NO: 22580 - RNA, 20 nt, Artificial Sequence
  Synthetic oligonucleotide: Ptpn6-509
uccuggcucggcccagucgc

SEQ ID NO: 22581 - RNA, 21 nt, Artificial Sequence
  Synthetic oligonucleotide: Ptpn6-3314
uuccuggcucggcccagucgc

SEQ ID NO: 22582 - RNA, 22 nt, Artificial Sequence
  Synthetic oligonucleotide: Ptpn6-3315
cuuccuggcucggcccagucgc

SEQ ID NO: 22583 - RNA, 23 nt, Artificial Sequence
  Synthetic oligonucleotide: Ptpn6-3316
gcuuccuggcucggcccagucgc

SEQ ID NO: 22584 - RNA, 24 nt, Artificial Sequence
  Synthetic oligonucleotide: Ptpn6-3317
agcuuccuggcucggcccagucgc

SEQ ID NO: 22585 - RNA, 18 nt, Artificial Sequence
  Synthetic oligonucleotide: Ptpn6-3318
guaaggcagccaggcggc

SEQ ID NO: 22586 - RNA, 19 nt, Artificial Sequence
  Synthetic oligonucleotide: Ptpn6-3319
gguaaggcagccaggcggc

SEQ ID NO: 22587 - RNA, 20 nt, Artificial Sequence
  Synthetic oligonucleotide: Ptpn6-2456
agguaaggcagccaggcggc

SEQ ID NO: 22588 - RNA, 21 nt, Artificial Sequence
  Synthetic oligonucleotide: Ptpn6-3320
gagguaaggcagccaggcggc

SEQ ID NO: 22589 - RNA, 22 nt, Artificial Sequence
  Synthetic oligonucleotide: Ptpn6-3321
cgagguaaggcagccaggcggc

SEQ ID NO: 22590 - RNA, 23 nt, Artificial Sequence
  Synthetic oligonucleotide: Ptpn6-3322
gcgagguaaggcagccaggcggc

SEQ ID NO: 22591 - RNA, 24 nt, Artificial Sequence
  Synthetic oligonucleotide: Ptpn6-3323
ugcgagguaaggcagccaggcggc

SEQ ID NO: 22592 - RNA, 18 nt, Artificial Sequence
  Synthetic oligonucleotide: Ptpn6-3324
ccuggacguuucuugugc

SEQ ID NO: 22593 - RNA, 19 nt, Artificial Sequence
  Synthetic oligonucleotide: Ptpn6-3325
cccuggacguuucuugugc

SEQ ID NO: 22594 - RNA, 20 nt, Artificial Sequence
  Synthetic oligonucleotide: Ptpn6-535
gcccuggacguuucuugugc

SEQ ID NO: 22595 - RNA, 21 nt, Artificial Sequence
  Synthetic oligonucleotide: Ptpn6-3326
agcccuggacguuucuugugc

SEQ ID NO: 22596 - RNA, 22 nt, Artificial Sequence
  Synthetic oligonucleotide: Ptpn6-3327
gagcccuggacguuucuugugc

SEQ ID NO: 22597 - RNA, 23 nt, Artificial Sequence
  Synthetic oligonucleotide: Ptpn6-3328
cgagcccuggacguuucuugugc

SEQ ID NO: 22598 - RNA, 24 nt, Artificial Sequence
  Synthetic oligonucleotide: Ptpn6-3329
gcgagcccuggacguuucuugugc

SEQ ID NO: 22599 - RNA, 18 nt, Artificial Sequence
  Synthetic oligonucleotide: Ptpn6-3330
gugacccauauucggauc

SEQ ID NO: 22600 - RNA, 19 nt, Artificial Sequence
  Synthetic oligonucleotide: Ptpn6-3331
ggugacccauauucggauc

SEQ ID NO: 22601 - RNA, 20 nt, Artificial Sequence
  Synthetic oligonucleotide: Ptpn6-511
aggugacccauauucggauc

SEQ ID NO: 22602 - RNA, 21 nt, Artificial Sequence
  Synthetic oligonucleotide: Ptpn6-3332
caggugacccauauucggauc

SEQ ID NO: 22603 - RNA, 22 nt, Artificial Sequence
  Synthetic oligonucleotide: Ptpn6-3333
ucaggugacccauauucggauc

SEQ ID NO: 22604 - RNA, 23 nt, Artificial Sequence
  Synthetic oligonucleotide: Ptpn6-3334
aucaggugacccauauucggauc

SEQ ID NO: 22605 - RNA, 24 nt, Artificial Sequence
  Synthetic oligonucleotide: Ptpn6-3335
gaucaggugacccauauucggauc

SEQ ID NO: 22606 - RNA, 18 nt, Artificial Sequence
  Synthetic oligonucleotide: Ptpn6-3336
uauucggauccagaacuc

SEQ ID NO: 22607 - RNA, 19 nt, Artificial Sequence
  Synthetic oligonucleotide: Ptpn6-3337
auauucggauccagaacuc

SEQ ID NO: 22608 - RNA, 20 nt, Artificial Sequence
  Synthetic oligonucleotide: Ptpn6-95
cauauucggauccagaacuc

SEQ ID NO: 22609 - RNA, 21 nt, Artificial Sequence
  Synthetic oligonucleotide: Ptpn6-3338
ccauauucggauccagaacuc

SEQ ID NO: 22610 - RNA, 22 nt, Artificial Sequence
  Synthetic oligonucleotide: Ptpn6-3339
cccauauucggauccagaacuc

SEQ ID NO: 22611 - RNA, 23 nt, Artificial Sequence
  Synthetic oligonucleotide: Ptpn6-3340
acccauauucggauccagaacuc

SEQ ID NO: 22612 - RNA, 24 nt, Artificial Sequence
  Synthetic oligonucleotide: Ptpn6-3341
gacccauauucggauccagaacuc

SEQ ID NO: 22613 - RNA, 18 nt, Artificial Sequence
  Synthetic oligonucleotide: Ptpn6-3342
gaugcagagacccugcuc

SEQ ID NO: 22614 - RNA, 19 nt, Artificial Sequence
  Synthetic oligonucleotide: Ptpn6-3343
ggaugcagagacccugcuc

SEQ ID NO: 22615 - RNA, 20 nt, Artificial Sequence
  Synthetic oligonucleotide: Ptpn6-507
uggaugcagagacccugcuc

SEQ ID NO: 22616 - RNA, 21 nt, Artificial Sequence
  Synthetic oligonucleotide: Ptpn6-3344
cuggaugcagagacccugcuc

SEQ ID NO: 22617 - RNA, 22 nt, Artificial Sequence
  Synthetic oligonucleotide: Ptpn6-3345
gcuggaugcagagacccugcuc

SEQ ID NO: 22618 - RNA, 23 nt, Artificial Sequence
  Synthetic oligonucleotide: Ptpn6-3346
ggcuggaugcagagacccugcuc

SEQ ID NO: 22619 - RNA, 24 nt, Artificial Sequence
  Synthetic oligonucleotide: Ptpn6-3347
gggcuggaugcagagacccugcuc

SEQ ID NO: 22620 - RNA, 18 nt, Artificial Sequence
  Synthetic oligonucleotide: Ptpn6-3348
cugucccguggguaaguc

SEQ ID NO: 22621 - RNA, 19 nt, Artificial Sequence
  Synthetic oligonucleotide: Ptpn6-3349
gcugucccguggguaaguc

SEQ ID NO: 22622 - RNA, 20 nt, Artificial Sequence
  Synthetic oligonucleotide: Ptpn6-1691
ugcugucccguggguaaguc

SEQ ID NO: 22623 - RNA, 21 nt, Artificial Sequence
  Synthetic oligonucleotide: Ptpn6-3350
augcugucccguggguaaguc

SEQ ID NO: 22624 - RNA, 22 nt, Artificial Sequence
  Synthetic oligonucleotide: Ptpn6-3351
gaugcugucccguggguaaguc

SEQ ID NO: 22625 - RNA, 23 nt, Artificial Sequence
  Synthetic oligonucleotide: Ptpn6-3352
agaugcugucccguggguaaguc

SEQ ID NO: 22626 - RNA, 24 nt, Artificial Sequence
  Synthetic oligonucleotide: Ptpn6-3353
gagaugcugucccguggguaaguc

SEQ ID NO: 22627 - RNA, 18 nt, Artificial Sequence
  Synthetic oligonucleotide: Ptpn6-3354
cgaucccacuagugagag

SEQ ID NO: 22628 - RNA, 19 nt, Artificial Sequence
  Synthetic oligonucleotide: Ptpn6-3355
ccgaucccacuagugagag

SEQ ID NO: 22629 - RNA, 20 nt, Artificial Sequence
  Synthetic oligonucleotide: Ptpn6-3356
uccgaucccacuagugagag

SEQ ID NO: 22630 - RNA, 21 nt, Artificial Sequence
  Synthetic oligonucleotide: Ptpn6-3357
cuccgaucccacuagugagag

SEQ ID NO: 22631 - RNA, 22 nt, Artificial Sequence
  Synthetic oligonucleotide: Ptpn6-3358
gcuccgaucccacuagugagag

SEQ ID NO: 22632 - RNA, 23 nt, Artificial Sequence
  Synthetic oligonucleotide: Ptpn6-3359
ugcuccgaucccacuagugagag

SEQ ID NO: 22633 - RNA, 24 nt, Artificial Sequence
  Synthetic oligonucleotide: Ptpn6-3360
cugcuccgaucccacuagugagag

SEQ ID NO: 22634 - RNA, 18 nt, Artificial Sequence
  Synthetic oligonucleotide: Ptpn6-3361
ucuaugaccuguauggag

SEQ ID NO: 22635 - RNA, 19 nt, Artificial Sequence
  Synthetic oligonucleotide: Ptpn6-3362
uucuaugaccuguauggag

SEQ ID NO: 22636 - RNA, 20 nt, Artificial Sequence
  Synthetic oligonucleotide: Ptpn6-99
uuucuaugaccuguauggag

SEQ ID NO: 22637 - RNA, 21 nt, Artificial Sequence
  Synthetic oligonucleotide: Ptpn6-3363
auuucuaugaccuguauggag

SEQ ID NO: 22638 - RNA, 22 nt, Artificial Sequence
  Synthetic oligonucleotide: Ptpn6-3364
gauuucuaugaccuguauggag

SEQ ID NO: 22639 - RNA, 23 nt, Artificial Sequence
  Synthetic oligonucleotide: Ptpn6-3365
ggauuucuaugaccuguauggag

SEQ ID NO: 22640 - RNA, 24 nt, Artificial Sequence
  Synthetic oligonucleotide: Ptpn6-3366
gggauuucuaugaccuguauggag

SEQ ID NO: 22641 - RNA, 18 nt, Artificial Sequence
  Synthetic oligonucleotide: Ptpn6-3367
ucgcucuccgucagguag

SEQ ID NO: 22642 - RNA, 19 nt, Artificial Sequence
  Synthetic oligonucleotide: Ptpn6-3368
cucgcucuccgucagguag

SEQ ID NO: 22643 - RNA, 20 nt, Artificial Sequence
  Synthetic oligonucleotide: Ptpn6-3369
ucucgcucuccgucagguag

SEQ ID NO: 22644 - RNA, 21 nt, Artificial Sequence
  Synthetic oligonucleotide: Ptpn6-3370
uucucgcucuccgucagguag

SEQ ID NO: 22645 - RNA, 22 nt, Artificial Sequence
  Synthetic oligonucleotide: Ptpn6-3371
cuucucgcucuccgucagguag

SEQ ID NO: 22646 - RNA, 23 nt, Artificial Sequence
  Synthetic oligonucleotide: Ptpn6-3372
acuucucgcucuccgucagguag

SEQ ID NO: 22647 - RNA, 24 nt, Artificial Sequence
  Synthetic oligonucleotide: Ptpn6-3373
gacuucucgcucuccgucagguag

SEQ ID NO: 22648 - RNA, 18 nt, Artificial Sequence
  Synthetic oligonucleotide: Ptpn6-3374
auccaccucaaguacccg

SEQ ID NO: 22649 - RNA, 19 nt, Artificial Sequence
  Synthetic oligonucleotide: Ptpn6-3375
cauccaccucaaguacccg

SEQ ID NO: 22650 - RNA, 20 nt, Artificial Sequence
  Synthetic oligonucleotide: Ptpn6-527
ucauccaccucaaguacccg

SEQ ID NO: 22651 - RNA, 21 nt, Artificial Sequence
  Synthetic oligonucleotide: Ptpn6-3376
aucauccaccucaaguacccg

SEQ ID NO: 22652 - RNA, 22 nt, Artificial Sequence
  Synthetic oligonucleotide: Ptpn6-3377
caucauccaccucaaguacccg

SEQ ID NO: 22653 - RNA, 23 nt, Artificial Sequence
  Synthetic oligonucleotide: Ptpn6-3378
ccaucauccaccucaaguacccg

SEQ ID NO: 22654 - RNA, 24 nt, Artificial Sequence
  Synthetic oligonucleotide: Ptpn6-3379
accaucauccaccucaaguacccg

SEQ ID NO: 22655 - RNA, 18 nt, Artificial Sequence
  Synthetic oligonucleotide: Ptpn6-3380
agguaaggcagccaggcg

SEQ ID NO: 22656 - RNA, 19 nt, Artificial Sequence
  Synthetic oligonucleotide: Ptpn6-3381
gagguaaggcagccaggcg

SEQ ID NO: 22657 - RNA, 20 nt, Artificial Sequence
  Synthetic oligonucleotide: Ptpn6-3382
cgagguaaggcagccaggcg

SEQ ID NO: 22658 - RNA, 21 nt, Artificial Sequence
  Synthetic oligonucleotide: Ptpn6-3383
gcgagguaaggcagccaggcg

SEQ ID NO: 22659 - RNA, 22 nt, Artificial Sequence
  Synthetic oligonucleotide: Ptpn6-3384
ugcgagguaaggcagccaggcg

SEQ ID NO: 22660 - RNA, 23 nt, Artificial Sequence
  Synthetic oligonucleotide: Ptpn6-3385
gugcgagguaaggcagccaggcg

SEQ ID NO: 22661 - RNA, 24 nt, Artificial Sequence
  Synthetic oligonucleotide: Ptpn6-3386
ugugcgagguaaggcagccaggcg

SEQ ID NO: 22662 - RNA, 18 nt, Artificial Sequence
  Synthetic oligonucleotide: Ptpn6-3387
uaaggcagccaggcggcg

SEQ ID NO: 22663 - RNA, 19 nt, Artificial Sequence
  Synthetic oligonucleotide: Ptpn6-3388
guaaggcagccaggcggcg

SEQ ID NO: 22664 - RNA, 20 nt, Artificial Sequence
  Synthetic oligonucleotide: Ptpn6-2464
gguaaggcagccaggcggcg

SEQ ID NO: 22665 - RNA, 21 nt, Artificial Sequence
  Synthetic oligonucleotide: Ptpn6-3389
agguaaggcagccaggcggcg

SEQ ID NO: 22666 - RNA, 22 nt, Artificial Sequence
  Synthetic oligonucleotide: Ptpn6-3390
gagguaaggcagccaggcggcg

SEQ ID NO: 22667 - RNA, 23 nt, Artificial Sequence
  Synthetic oligonucleotide: Ptpn6-3391
cgagguaaggcagccaggcggcg

SEQ ID NO: 22668 - RNA, 24 nt, Artificial Sequence
  Synthetic oligonucleotide: Ptpn6-3392
gcgagguaaggcagccaggcggcg

SEQ ID NO: 22669 - RNA, 18 nt, Artificial Sequence
  Synthetic oligonucleotide: Ptpn6-3393
cgcugcugcaggccaagg

SEQ ID NO: 22670 - RNA, 19 nt, Artificial Sequence
  Synthetic oligonucleotide: Ptpn6-3394
acgcugcugcaggccaagg

SEQ ID NO: 22671 - RNA, 20 nt, Artificial Sequence
  Synthetic oligonucleotide: Ptpn6-533
gacgcugcugcaggccaagg

SEQ ID NO: 22672 - RNA, 21 nt, Artificial Sequence
  Synthetic oligonucleotide: Ptpn6-3395
agacgcugcugcaggccaagg

SEQ ID NO: 22673 - RNA, 22 nt, Artificial Sequence
  Synthetic oligonucleotide: Ptpn6-3396
gagacgcugcugcaggccaagg

SEQ ID NO: 22674 - RNA, 23 nt, Artificial Sequence
  Synthetic oligonucleotide: Ptpn6-3397
agagacgcugcugcaggccaagg

SEQ ID NO: 22675 - RNA, 24 nt, Artificial Sequence
  Synthetic oligonucleotide: Ptpn6-3398
cagagacgcugcugcaggccaagg

SEQ ID NO: 22676 - RNA, 18 nt, Artificial Sequence
  Synthetic oligonucleotide: Ptpn6-3399
acaugucuggcgggcagg

SEQ ID NO: 22677 - RNA, 19 nt, Artificial Sequence
  Synthetic oligonucleotide: Ptpn6-3400
cacaugucuggcgggcagg

SEQ ID NO: 22678 - RNA, 20 nt, Artificial Sequence
  Synthetic oligonucleotide: Ptpn6-531
ccacaugucuggcgggcagg

SEQ ID NO: 22679 - RNA, 21 nt, Artificial Sequence
  Synthetic oligonucleotide: Ptpn6-3401
gccacaugucuggcgggcagg

SEQ ID NO: 22680 - RNA, 22 nt, Artificial Sequence
  Synthetic oligonucleotide: Ptpn6-3402
ggccacaugucuggcgggcagg

SEQ ID NO: 22681 - RNA, 23 nt, Artificial Sequence
  Synthetic oligonucleotide: Ptpn6-3403
uggccacaugucuggcgggcagg

SEQ ID NO: 22682 - RNA, 24 nt, Artificial Sequence
  Synthetic oligonucleotide: Ptpn6-3404
auggccacaugucuggcgggcagg

SEQ ID NO: 22683 - RNA, 18 nt, Artificial Sequence
  Synthetic oligonucleotide: Ptpn6-3405
cgccuggugcccugcagg

SEQ ID NO: 22684 - RNA, 19 nt, Artificial Sequence
  Synthetic oligonucleotide: Ptpn6-3406
ccgccuggugcccugcagg

SEQ ID NO: 22685 - RNA, 20 nt, Artificial Sequence
  Synthetic oligonucleotide: Ptpn6-3407
accgccuggugcccugcagg

SEQ ID NO: 22686 - RNA, 21 nt, Artificial Sequence
  Synthetic oligonucleotide: Ptpn6-3408
caccgccuggugcccugcagg

SEQ ID NO: 22687 - RNA, 22 nt, Artificial Sequence
  Synthetic oligonucleotide: Ptpn6-3409
ucaccgccuggugcccugcagg

SEQ ID NO: 22688 - RNA, 23 nt, Artificial Sequence
  Synthetic oligonucleotide: Ptpn6-3410
cucaccgccuggugcccugcagg

SEQ ID NO: 22689 - RNA, 24 nt, Artificial Sequence
  Synthetic oligonucleotide: Ptpn6-3411
ccucaccgccuggugcccugcagg

SEQ ID NO: 22690 - RNA, 18 nt, Artificial Sequence
  Synthetic oligonucleotide: Ptpn6-3412
gguaaggcagccaggcgg

SEQ ID NO: 22691 - RNA, 19 nt, Artificial Sequence
  Synthetic oligonucleotide: Ptpn6-3413
agguaaggcagccaggcgg

SEQ ID NO: 22692 - RNA, 20 nt, Artificial Sequence
  Synthetic oligonucleotide: Ptpn6-2469
gagguaaggcagccaggcgg

SEQ ID NO: 22693 - RNA, 21 nt, Artificial Sequence
  Synthetic oligonucleotide: Ptpn6-3414
cgagguaaggcagccaggcgg

SEQ ID NO: 22694 - RNA, 22 nt, Artificial Sequence
  Synthetic oligonucleotide: Ptpn6-3415
gcgagguaaggcagccaggcgg

SEQ ID NO: 22695 - RNA, 23 nt, Artificial Sequence
  Synthetic oligonucleotide: Ptpn6-3416
ugcgagguaaggcagccaggcgg

SEQ ID NO: 22696 - RNA, 24 nt, Artificial Sequence
  Synthetic oligonucleotide: Ptpn6-3417
gugcgagguaaggcagccaggcgg

SEQ ID NO: 22697 - RNA, 18 nt, Artificial Sequence
  Synthetic oligonucleotide: Ptpn6-3418
aaggcagccaggcggcgg

SEQ ID NO: 22698 - RNA, 19 nt, Artificial Sequence
  Synthetic oligonucleotide: Ptpn6-3419
uaaggcagccaggcggcgg

SEQ ID NO: 22699 - RNA, 20 nt, Artificial Sequence
  Synthetic oligonucleotide: Ptpn6-2470
guaaggcagccaggcggcgg

SEQ ID NO: 22700 - RNA, 21 nt, Artificial Sequence
  Synthetic oligonucleotide: Ptpn6-3420
gguaaggcagccaggcggcgg

SEQ ID NO: 22701 - RNA, 22 nt, Artificial Sequence
  Synthetic oligonucleotide: Ptpn6-3421
agguaaggcagccaggcggcgg

SEQ ID NO: 22702 - RNA, 23 nt, Artificial Sequence
  Synthetic oligonucleotide: Ptpn6-3422
gagguaaggcagccaggcggcgg

SEQ ID NO: 22703 - RNA, 24 nt, Artificial Sequence
  Synthetic oligonucleotide: Ptpn6-3423
cgagguaaggcagccaggcggcgg

SEQ ID NO: 22704 - RNA, 18 nt, Artificial Sequence
  Synthetic oligonucleotide: Ptpn6-3424
agagacccugcucaaggg

SEQ ID NO: 22705 - RNA, 19 nt, Artificial Sequence
  Synthetic oligonucleotide: Ptpn6-3425
cagagacccugcucaaggg

SEQ ID NO: 22706 - RNA, 20 nt, Artificial Sequence
  Synthetic oligonucleotide: Ptpn6-508
gcagagacccugcucaaggg

SEQ ID NO: 22707 - RNA, 21 nt, Artificial Sequence
  Synthetic oligonucleotide: Ptpn6-3426
ugcagagacccugcucaaggg

SEQ ID NO: 22708 - RNA, 22 nt, Artificial Sequence
  Synthetic oligonucleotide: Ptpn6-3427
augcagagacccugcucaaggg

SEQ ID NO: 22709 - RNA, 23 nt, Artificial Sequence
  Synthetic oligonucleotide: Ptpn6-3428
gaugcagagacccugcucaaggg

SEQ ID NO: 22710 - RNA, 24 nt, Artificial Sequence
  Synthetic oligonucleotide: Ptpn6-3429
ggaugcagagacccugcucaaggg

SEQ ID NO: 22711 - RNA, 18 nt, Artificial Sequence
  Synthetic oligonucleotide: Ptpn6-3430
gccuggugcccugcaggg

SEQ ID NO: 22712 - RNA, 19 nt, Artificial Sequence
  Synthetic oligonucleotide: Ptpn6-3431
cgccuggugcccugcaggg

SEQ ID NO: 22713 - RNA, 20 nt, Artificial Sequence
  Synthetic oligonucleotide: Ptpn6-2471
ccgccuggugcccugcaggg

SEQ ID NO: 22714 - RNA, 21 nt, Artificial Sequence
  Synthetic oligonucleotide: Ptpn6-3432
accgccuggugcccugcaggg

SEQ ID NO: 22715 - RNA, 22 nt, Artificial Sequence
  Synthetic oligonucleotide: Ptpn6-3433
caccgccuggugcccugcaggg

SEQ ID NO: 22716 - RNA, 23 nt, Artificial Sequence
  Synthetic oligonucleotide: Ptpn6-3434
ucaccgccuggugcccugcaggg

SEQ ID NO: 22717 - RNA, 24 nt, Artificial Sequence
  Synthetic oligonucleotide: Ptpn6-3435
cucaccgccuggugcccugcaggg

SEQ ID NO: 22718 - RNA, 18 nt, Artificial Sequence
  Synthetic oligonucleotide: Ptpn6-3436
uaugaccuguauggaggg

SEQ ID NO: 22719 - RNA, 19 nt, Artificial Sequence
  Synthetic oligonucleotide: Ptpn6-3437
cuaugaccuguauggaggg

SEQ ID NO: 22720 - RNA, 20 nt, Artificial Sequence
  Synthetic oligonucleotide: Ptpn6-521
ucuaugaccuguauggaggg

SEQ ID NO: 22721 - RNA, 21 nt, Artificial Sequence
  Synthetic oligonucleotide: Ptpn6-3438
uucuaugaccuguauggaggg

SEQ ID NO: 22722 - RNA, 22 nt, Artificial Sequence
  Synthetic oligonucleotide: Ptpn6-3439
uuucuaugaccuguauggaggg

SEQ ID NO: 22723 - RNA, 23 nt, Artificial Sequence
  Synthetic oligonucleotide: Ptpn6-3440
auuucuaugaccuguauggaggg

SEQ ID NO: 22724 - RNA, 24 nt, Artificial Sequence
  Synthetic oligonucleotide: Ptpn6-3441
gauuucuaugaccuguauggaggg

SEQ ID NO: 22725 - RNA, 18 nt, Artificial Sequence
  Synthetic oligonucleotide: Ptpn6-3442
uuucuaugaccuguaugg

SEQ ID NO: 22726 - RNA, 19 nt, Artificial Sequence
  Synthetic oligonucleotide: Ptpn6-3443
auuucuaugaccuguaugg

SEQ ID NO: 22727 - RNA, 20 nt, Artificial Sequence
  Synthetic oligonucleotide: Ptpn6-63
gauuucuaugaccuguaugg

SEQ ID NO: 22728 - RNA, 21 nt, Artificial Sequence
  Synthetic oligonucleotide: Ptpn6-3444
ggauuucuaugaccuguaugg

SEQ ID NO: 22729 - RNA, 22 nt, Artificial Sequence
  Synthetic oligonucleotide: Ptpn6-3445
gggauuucuaugaccuguaugg

SEQ ID NO: 22730 - RNA, 23 nt, Artificial Sequence
  Synthetic oligonucleotide: Ptpn6-3446
ggggauuucuaugaccuguaugg

SEQ ID NO: 22731 - RNA, 24 nt, Artificial Sequence
  Synthetic oligonucleotide: Ptpn6-3447
aggggauuucuaugaccuguaugg

SEQ ID NO: 22732 - RNA, 18 nt, Artificial Sequence
  Synthetic oligonucleotide: Ptpn6-3448
accucagugggcuggaug

SEQ ID NO: 22733 - RNA, 19 nt, Artificial Sequence
  Synthetic oligonucleotide: Ptpn6-3449
gaccucagugggcuggaug

SEQ ID NO: 22734 - RNA, 20 nt, Artificial Sequence
  Synthetic oligonucleotide: Ptpn6-506
agaccucagugggcuggaug

SEQ ID NO: 22735 - RNA, 21 nt, Artificial Sequence
  Synthetic oligonucleotide: Ptpn6-3450
gagaccucagugggcuggaug

SEQ ID NO: 22736 - RNA, 22 nt, Artificial Sequence
  Synthetic oligonucleotide: Ptpn6-3451
cgagaccucagugggcuggaug

SEQ ID NO: 22737 - RNA, 23 nt, Artificial Sequence
  Synthetic oligonucleotide: Ptpn6-3452
ccgagaccucagugggcuggaug

SEQ ID NO: 22738 - RNA, 24 nt, Artificial Sequence
  Synthetic oligonucleotide: Ptpn6-3453
accgagaccucagugggcuggaug

SEQ ID NO: 22739 - RNA, 18 nt, Artificial Sequence
  Synthetic oligonucleotide: Ptpn6-3454
auuucuaugaccuguaug

SEQ ID NO: 22740 - RNA, 19 nt, Artificial Sequence
  Synthetic oligonucleotide: Ptpn6-3455
gauuucuaugaccuguaug

SEQ ID NO: 22741 - RNA, 20 nt, Artificial Sequence
  Synthetic oligonucleotide: Ptpn6-517
ggauuucuaugaccuguaug

SEQ ID NO: 22742 - RNA, 21 nt, Artificial Sequence
  Synthetic oligonucleotide: Ptpn6-3456
gggauuucuaugaccuguaug

SEQ ID NO: 22743 - RNA, 22 nt, Artificial Sequence
  Synthetic oligonucleotide: Ptpn6-3457
ggggauuucuaugaccuguaug

SEQ ID NO: 22744 - RNA, 23 nt, Artificial Sequence
  Synthetic oligonucleotide: Ptpn6-3458
aggggauuucuaugaccuguaug

SEQ ID NO: 22745 - RNA, 24 nt, Artificial Sequence
  Synthetic oligonucleotide: Ptpn6-3459
caggggauuucuaugaccuguaug

SEQ ID NO: 22746 - RNA, 18 nt, Artificial Sequence
  Synthetic oligonucleotide: Ptpn6-3460
cagcagcaggguguccug

SEQ ID NO: 22747 - RNA, 19 nt, Artificial Sequence
  Synthetic oligonucleotide: Ptpn6-3461
ucagcagcaggguguccug

SEQ ID NO: 22748 - RNA, 20 nt, Artificial Sequence
  Synthetic oligonucleotide: Ptpn6-526
cucagcagcaggguguccug

SEQ ID NO: 22749 - RNA, 21 nt, Artificial Sequence
  Synthetic oligonucleotide: Ptpn6-3462
acucagcagcaggguguccug

SEQ ID NO: 22750 - RNA, 22 nt, Artificial Sequence
  Synthetic oligonucleotide: Ptpn6-3463
cacucagcagcaggguguccug

SEQ ID NO: 22751 - RNA, 23 nt, Artificial Sequence
  Synthetic oligonucleotide: Ptpn6-3464
acacucagcagcaggguguccug

SEQ ID NO: 22752 - RNA, 24 nt, Artificial Sequence
  Synthetic oligonucleotide: Ptpn6-3465
uacacucagcagcaggguguccug

SEQ ID NO: 22753 - RNA, 18 nt, Artificial Sequence
  Synthetic oligonucleotide: Ptpn6-3466
gcgacucugacagagcug

SEQ ID NO: 22754 - RNA, 19 nt, Artificial Sequence
  Synthetic oligonucleotide: Ptpn6-3467
ugcgacucugacagagcug

SEQ ID NO: 22755 - RNA, 20 nt, Artificial Sequence
  Synthetic oligonucleotide: Ptpn6-523
uugcgacucugacagagcug

SEQ ID NO: 22756 - RNA, 21 nt, Artificial Sequence
  Synthetic oligonucleotide: Ptpn6-3468
uuugcgacucugacagagcug

SEQ ID NO: 22757 - RNA, 22 nt, Artificial Sequence
  Synthetic oligonucleotide: Ptpn6-3469
guuugcgacucugacagagcug

SEQ ID NO: 22758 - RNA, 23 nt, Artificial Sequence
  Synthetic oligonucleotide: Ptpn6-3470
aguuugcgacucugacagagcug

SEQ ID NO: 22759 - RNA, 24 nt, Artificial Sequence
  Synthetic oligonucleotide: Ptpn6-3471
aaguuugcgacucugacagagcug

SEQ ID NO: 22760 - RNA, 18 nt, Artificial Sequence
  Synthetic oligonucleotide: Ptpn6-3472
accauggccacaugucug

SEQ ID NO: 22761 - RNA, 19 nt, Artificial Sequence
  Synthetic oligonucleotide: Ptpn6-3473
uaccauggccacaugucug

SEQ ID NO: 22762 - RNA, 20 nt, Artificial Sequence
  Synthetic oligonucleotide: Ptpn6-530
guaccauggccacaugucug

SEQ ID NO: 22763 - RNA, 21 nt, Artificial Sequence
  Synthetic oligonucleotide: Ptpn6-3474
gguaccauggccacaugucug

SEQ ID NO: 22764 - RNA, 22 nt, Artificial Sequence
  Synthetic oligonucleotide: Ptpn6-3475
ugguaccauggccacaugucug

SEQ ID NO: 22765 - RNA, 23 nt, Artificial Sequence
  Synthetic oligonucleotide: Ptpn6-3476
gugguaccauggccacaugucug

SEQ ID NO: 22766 - RNA, 24 nt, Artificial Sequence
  Synthetic oligonucleotide: Ptpn6-3477
agugguaccauggccacaugucug

SEQ ID NO: 22767 - RNA, 18 nt, Artificial Sequence
  Synthetic oligonucleotide: Ptpn6-3478
auauucggauccagaacu

SEQ ID NO: 22768 - RNA, 19 nt, Artificial Sequence
  Synthetic oligonucleotide: Ptpn6-3479
cauauucggauccagaacu

SEQ ID NO: 22769 - RNA, 20 nt, Artificial Sequence
  Synthetic oligonucleotide: Ptpn6-512
ccauauucggauccagaacu

SEQ ID NO: 22770 - RNA, 21 nt, Artificial Sequence
  Synthetic oligonucleotide: Ptpn6-3480
cccauauucggauccagaacu

SEQ ID NO: 22771 - RNA, 22 nt, Artificial Sequence
  Synthetic oligonucleotide: Ptpn6-3481
acccauauucggauccagaacu

SEQ ID NO: 22772 - RNA, 23 nt, Artificial Sequence
  Synthetic oligonucleotide: Ptpn6-3482
gacccauauucggauccagaacu

SEQ ID NO: 22773 - RNA, 24 nt, Artificial Sequence
  Synthetic oligonucleotide: Ptpn6-3483
ugacccauauucggauccagaacu

SEQ ID NO: 22774 - RNA, 18 nt, Artificial Sequence
  Synthetic oligonucleotide: Ptpn6-3484
ugcuccgaucccacuagu

SEQ ID NO: 22775 - RNA, 19 nt, Artificial Sequence
  Synthetic oligonucleotide: Ptpn6-3485
cugcuccgaucccacuagu

SEQ ID NO: 22776 - RNA, 20 nt, Artificial Sequence
  Synthetic oligonucleotide: Ptpn6-529
acugcuccgaucccacuagu

SEQ ID NO: 22777 - RNA, 21 nt, Artificial Sequence
  Synthetic oligonucleotide: Ptpn6-3486
aacugcuccgaucccacuagu

SEQ ID NO: 22778 - RNA, 22 nt, Artificial Sequence
  Synthetic oligonucleotide: Ptpn6-3487
gaacugcuccgaucccacuagu

SEQ ID NO: 22779 - RNA, 23 nt, Artificial Sequence
  Synthetic oligonucleotide: Ptpn6-3488
ugaacugcuccgaucccacuagu

SEQ ID NO: 22780 - RNA, 24 nt, Artificial Sequence
  Synthetic oligonucleotide: Ptpn6-3489
cugaacugcuccgaucccacuagu

SEQ ID NO: 22781 - RNA, 18 nt, Artificial Sequence
  Synthetic oligonucleotide: Ptpn6-3490
uggacguuucuugugcgu

SEQ ID NO: 22782 - RNA, 19 nt, Artificial Sequence
  Synthetic oligonucleotide: Ptpn6-3491
cuggacguuucuugugcgu

SEQ ID NO: 22783 - RNA, 20 nt, Artificial Sequence
  Synthetic oligonucleotide: Ptpn6-536
ccuggacguuucuugugcgu

SEQ ID NO: 22784 - RNA, 21 nt, Artificial Sequence
  Synthetic oligonucleotide: Ptpn6-3492
cccuggacguuucuugugcgu

SEQ ID NO: 22785 - RNA, 22 nt, Artificial Sequence
  Synthetic oligonucleotide: Ptpn6-3493
gcccuggacguuucuugugcgu

SEQ ID NO: 22786 - RNA, 23 nt, Artificial Sequence
  Synthetic oligonucleotide: Ptpn6-3494
agcccuggacguuucuugugcgu

SEQ ID NO: 22787 - RNA, 24 nt, Artificial Sequence
  Synthetic oligonucleotide: Ptpn6-3495
gagcccuggacguuucuugugcgu

SEQ ID NO: 22788 - RNA, 18 nt, Artificial Sequence
  Synthetic oligonucleotide: Ptpn6-3496
aucccacuagugagaggu

SEQ ID NO: 22789 - RNA, 19 nt, Artificial Sequence
  Synthetic oligonucleotide: Ptpn6-3497
gaucccacuagugagaggu

SEQ ID NO: 22790 - RNA, 20 nt, Artificial Sequence
  Synthetic oligonucleotide: Ptpn6-3498
cgaucccacuagugagaggu

SEQ ID NO: 22791 - RNA, 21 nt, Artificial Sequence
  Synthetic oligonucleotide: Ptpn6-3499
ccgaucccacuagugagaggu

SEQ ID NO: 22792 - RNA, 22 nt, Artificial Sequence
  Synthetic oligonucleotide: Ptpn6-3500
uccgaucccacuagugagaggu

SEQ ID NO: 22793 - RNA, 23 nt, Artificial Sequence
  Synthetic oligonucleotide: Ptpn6-3501
cuccgaucccacuagugagaggu

SEQ ID NO: 22794 - RNA, 24 nt, Artificial Sequence
  Synthetic oligonucleotide: Ptpn6-3502
gcuccgaucccacuagugagaggu

SEQ ID NO: 22795 - RNA, 18 nt, Artificial Sequence
  Synthetic oligonucleotide: Ptpn6-3503
ccuggugcccugcagggu

SEQ ID NO: 22796 - RNA, 19 nt, Artificial Sequence
  Synthetic oligonucleotide: Ptpn6-3504
gccuggugcccugcagggu

SEQ ID NO: 22797 - RNA, 20 nt, Artificial Sequence
  Synthetic oligonucleotide: Ptpn6-2480
cgccuggugcccugcagggu

SEQ ID NO: 22798 - RNA, 21 nt, Artificial Sequence
  Synthetic oligonucleotide: Ptpn6-3505
ccgccuggugcccugcagggu

SEQ ID NO: 22799 - RNA, 22 nt, Artificial Sequence
  Synthetic oligonucleotide: Ptpn6-3506
accgccuggugcccugcagggu

SEQ ID NO: 22800 - RNA, 23 nt, Artificial Sequence
  Synthetic oligonucleotide: Ptpn6-3507
caccgccuggugcccugcagggu

SEQ ID NO: 22801 - RNA, 24 nt, Artificial Sequence
  Synthetic oligonucleotide: Ptpn6-3508
ucaccgccuggugcccugcagggu

SEQ ID NO: 22802 - RNA, 18 nt, Artificial Sequence
  Synthetic oligonucleotide: Ptpn6-3509
cccacaucaaggucaugu

SEQ ID NO: 22803 - RNA, 19 nt, Artificial Sequence
  Synthetic oligonucleotide: Ptpn6-3510
acccacaucaaggucaugu

SEQ ID NO: 22804 - RNA, 20 nt, Artificial Sequence
  Synthetic oligonucleotide: Ptpn6-3511
cacccacaucaaggucaugu

SEQ ID NO: 22805 - RNA, 21 nt, Artificial Sequence
  Synthetic oligonucleotide: Ptpn6-3512
ucacccacaucaaggucaugu

SEQ ID NO: 22806 - RNA, 22 nt, Artificial Sequence
  Synthetic oligonucleotide: Ptpn6-3513
gucacccacaucaaggucaugu

SEQ ID NO: 22807 - RNA, 23 nt, Artificial Sequence
  Synthetic oligonucleotide: Ptpn6-3514
ggucacccacaucaaggucaugu

SEQ ID NO: 22808 - RNA, 24 nt, Artificial Sequence
  Synthetic oligonucleotide: Ptpn6-3515
gggucacccacaucaaggucaugu

SEQ ID NO: 22809 - RNA, 18 nt, Artificial Sequence
  Synthetic oligonucleotide: Ptpn6-3516
gggauuucuaugaccugu

SEQ ID NO: 22810 - RNA, 19 nt, Artificial Sequence
  Synthetic oligonucleotide: Ptpn6-3517
ggggauuucuaugaccugu

SEQ ID NO: 22811 - RNA, 20 nt, Artificial Sequence
  Synthetic oligonucleotide: Ptpn6-515
aggggauuucuaugaccugu

SEQ ID NO: 22812 - RNA, 21 nt, Artificial Sequence
  Synthetic oligonucleotide: Ptpn6-3518
caggggauuucuaugaccugu

SEQ ID NO: 22813 - RNA, 22 nt, Artificial Sequence
  Synthetic oligonucleotide: Ptpn6-3519
ucaggggauuucuaugaccugu

SEQ ID NO: 22814 - RNA, 23 nt, Artificial Sequence
  Synthetic oligonucleotide: Ptpn6-3520
cucaggggauuucuaugaccugu

SEQ ID NO: 22815 - RNA, 24 nt, Artificial Sequence
  Synthetic oligonucleotide: Ptpn6-3521
acucaggggauuucuaugaccugu

SEQ ID NO: 22816 - RNA, 18 nt, Artificial Sequence
  Synthetic oligonucleotide: Ptpn6-3522
gcuccccgcaguugguca

SEQ ID NO: 22817 - RNA, 19 nt, Artificial Sequence
  Synthetic oligonucleotide: Ptpn6-3523
ugcuccccgcaguugguca

SEQ ID NO: 22818 - RNA, 20 nt, Artificial Sequence
  Synthetic oligonucleotide: Ptpn6-884
augcuccccgcaguugguca

SEQ ID NO: 22819 - RNA, 21 nt, Artificial Sequence
  Synthetic oligonucleotide: Ptpn6-3524
caugcuccccgcaguugguca

SEQ ID NO: 22820 - RNA, 22 nt, Artificial Sequence
  Synthetic oligonucleotide: Ptpn6-3525
ucaugcuccccgcaguugguca

SEQ ID NO: 22821 - RNA, 23 nt, Artificial Sequence
  Synthetic oligonucleotide: Ptpn6-3526
gucaugcuccccgcaguugguca

SEQ ID NO: 22822 - RNA, 24 nt, Artificial Sequence
  Synthetic oligonucleotide: Ptpn6-3527
ugucaugcuccccgcaguugguca

SEQ ID NO: 22823 - RNA, 18 nt, Artificial Sequence
  Synthetic oligonucleotide: Ptpn6-3528
ggggagaccuguaaggua

SEQ ID NO: 22824 - RNA, 19 nt, Artificial Sequence
  Synthetic oligonucleotide: Ptpn6-3529
cggggagaccuguaaggua

SEQ ID NO: 22825 - RNA, 20 nt, Artificial Sequence
  Synthetic oligonucleotide: Ptpn6-377
gcggggagaccuguaaggua

SEQ ID NO: 22826 - RNA, 21 nt, Artificial Sequence
  Synthetic oligonucleotide: Ptpn6-3530
agcggggagaccuguaaggua

SEQ ID NO: 22827 - RNA, 22 nt, Artificial Sequence
  Synthetic oligonucleotide: Ptpn6-3531
cagcggggagaccuguaaggua

SEQ ID NO: 22828 - RNA, 23 nt, Artificial Sequence
  Synthetic oligonucleotide: Ptpn6-3532
ccagcggggagaccuguaaggua

SEQ ID NO: 22829 - RNA, 24 nt, Artificial Sequence
  Synthetic oligonucleotide: Ptpn6-3533
uccagcggggagaccuguaaggua

SEQ ID NO: 22830 - RNA, 18 nt, Artificial Sequence
  Synthetic oligonucleotide: Ptpn6-3534
auugauguagucggaccc

SEQ ID NO: 22831 - RNA, 19 nt, Artificial Sequence
  Synthetic oligonucleotide: Ptpn6-3535
cauugauguagucggaccc

SEQ ID NO: 22832 - RNA, 20 nt, Artificial Sequence
  Synthetic oligonucleotide: Ptpn6-398
gcauugauguagucggaccc

SEQ ID NO: 22833 - RNA, 21 nt, Artificial Sequence
  Synthetic oligonucleotide: Ptpn6-3536
ggcauugauguagucggaccc

SEQ ID NO: 22834 - RNA, 22 nt, Artificial Sequence
  Synthetic oligonucleotide: Ptpn6-3537
uggcauugauguagucggaccc

SEQ ID NO: 22835 - RNA, 23 nt, Artificial Sequence
  Synthetic oligonucleotide: Ptpn6-3538
uuggcauugauguagucggaccc

SEQ ID NO: 22836 - RNA, 24 nt, Artificial Sequence
  Synthetic oligonucleotide: Ptpn6-3539
guuggcauugauguagucggaccc

SEQ ID NO: 22837 - RNA, 18 nt, Artificial Sequence
  Synthetic oligonucleotide: Ptpn6-3540
ccggccuuucuccaccuc

SEQ ID NO: 22838 - RNA, 19 nt, Artificial Sequence
  Synthetic oligonucleotide: Ptpn6-3541
cccggccuuucuccaccuc

SEQ ID NO: 22839 - RNA, 20 nt, Artificial Sequence
  Synthetic oligonucleotide: Ptpn6-3542
acccggccuuucuccaccuc

SEQ ID NO: 22840 - RNA, 21 nt, Artificial Sequence
  Synthetic oligonucleotide: Ptpn6-3543
uacccggccuuucuccaccuc

SEQ ID NO: 22841 - RNA, 22 nt, Artificial Sequence
  Synthetic oligonucleotide: Ptpn6-3544
cuacccggccuuucuccaccuc

SEQ ID NO: 22842 - RNA, 23 nt, Artificial Sequence
  Synthetic oligonucleotide: Ptpn6-3545
ccuacccggccuuucuccaccuc

SEQ ID NO: 22843 - RNA, 24 nt, Artificial Sequence
  Synthetic oligonucleotide: Ptpn6-3546
cccuacccggccuuucuccaccuc

SEQ ID NO: 22844 - RNA, 18 nt, Artificial Sequence
  Synthetic oligonucleotide: Ptpn6-3547
cugguaaugccagaucuc

SEQ ID NO: 22845 - RNA, 19 nt, Artificial Sequence
  Synthetic oligonucleotide: Ptpn6-3548
acugguaaugccagaucuc

SEQ ID NO: 22846 - RNA, 20 nt, Artificial Sequence
  Synthetic oligonucleotide: Ptpn6-881
uacugguaaugccagaucuc

SEQ ID NO: 22847 - RNA, 21 nt, Artificial Sequence
  Synthetic oligonucleotide: Ptpn6-3549
guacugguaaugccagaucuc

SEQ ID NO: 22848 - RNA, 22 nt, Artificial Sequence
  Synthetic oligonucleotide: Ptpn6-3550
gguacugguaaugccagaucuc

SEQ ID NO: 22849 - RNA, 23 nt, Artificial Sequence
  Synthetic oligonucleotide: Ptpn6-3551
agguacugguaaugccagaucuc

SEQ ID NO: 22850 - RNA, 24 nt, Artificial Sequence
  Synthetic oligonucleotide: Ptpn6-3552
cagguacugguaaugccagaucuc

SEQ ID NO: 22851 - RNA, 18 nt, Artificial Sequence
  Synthetic oligonucleotide: Ptpn6-3553
gccugggugcucacaggg

SEQ ID NO: 22852 - RNA, 19 nt, Artificial Sequence
  Synthetic oligonucleotide: Ptpn6-3554
agccugggugcucacaggg

SEQ ID NO: 22853 - RNA, 20 nt, Artificial Sequence
  Synthetic oligonucleotide: Ptpn6-3555
cagccugggugcucacaggg

SEQ ID NO: 22854 - RNA, 21 nt, Artificial Sequence
  Synthetic oligonucleotide: Ptpn6-3556
gcagccugggugcucacaggg

SEQ ID NO: 22855 - RNA, 22 nt, Artificial Sequence
  Synthetic oligonucleotide: Ptpn6-3557
ggcagccugggugcucacaggg

SEQ ID NO: 22856 - RNA, 23 nt, Artificial Sequence
  Synthetic oligonucleotide: Ptpn6-3558
gggcagccugggugcucacaggg

SEQ ID NO: 22857 - RNA, 24 nt, Artificial Sequence
  Synthetic oligonucleotide: Ptpn6-3559
ggggcagccugggugcucacaggg

SEQ ID NO: 22858 - RNA, 18 nt, Artificial Sequence
  Synthetic oligonucleotide: Ptpn6-3560
guuacugucccgucccug

SEQ ID NO: 22859 - RNA, 19 nt, Artificial Sequence
  Synthetic oligonucleotide: Ptpn6-3561
uguuacugucccgucccug

SEQ ID NO: 22860 - RNA, 20 nt, Artificial Sequence
  Synthetic oligonucleotide: Ptpn6-896
auguuacugucccgucccug

SEQ ID NO: 22861 - RNA, 21 nt, Artificial Sequence
  Synthetic oligonucleotide: Ptpn6-3562
gauguuacugucccgucccug

SEQ ID NO: 22862 - RNA, 22 nt, Artificial Sequence
  Synthetic oligonucleotide: Ptpn6-3563
ggauguuacugucccgucccug

SEQ ID NO: 22863 - RNA, 23 nt, Artificial Sequence
  Synthetic oligonucleotide: Ptpn6-3564
gggauguuacugucccgucccug

SEQ ID NO: 22864 - RNA, 24 nt, Artificial Sequence
  Synthetic oligonucleotide: Ptpn6-3565
ggggauguuacugucccgucccug

SEQ ID NO: 22865 - RNA, 18 nt, Artificial Sequence
  Synthetic oligonucleotide: Ptpn6-3566
gggcauucuucauggcug

SEQ ID NO: 22866 - RNA, 19 nt, Artificial Sequence
  Synthetic oligonucleotide: Ptpn6-3567
ugggcauucuucauggcug

SEQ ID NO: 22867 - RNA, 20 nt, Artificial Sequence
  Synthetic oligonucleotide: Ptpn6-346
augggcauucuucauggcug

SEQ ID NO: 22868 - RNA, 21 nt, Artificial Sequence
  Synthetic oligonucleotide: Ptpn6-3568
caugggcauucuucauggcug

SEQ ID NO: 22869 - RNA, 22 nt, Artificial Sequence
  Synthetic oligonucleotide: Ptpn6-3569
gcaugggcauucuucauggcug

SEQ ID NO: 22870 - RNA, 23 nt, Artificial Sequence
  Synthetic oligonucleotide: Ptpn6-3570
ggcaugggcauucuucauggcug

SEQ ID NO: 22871 - RNA, 24 nt, Artificial Sequence
  Synthetic oligonucleotide: Ptpn6-3571
uggcaugggcauucuucauggcug

SEQ ID NO: 22872 - RNA, 18 nt, Artificial Sequence
  Synthetic oligonucleotide: Ptpn6-3572
gcgcugcgcccgcaccau

SEQ ID NO: 22873 - RNA, 19 nt, Artificial Sequence
  Synthetic oligonucleotide: Ptpn6-3573
agcgcugcgcccgcaccau

SEQ ID NO: 22874 - RNA, 20 nt, Artificial Sequence
  Synthetic oligonucleotide: Ptpn6-869
gagcgcugcgcccgcaccau

SEQ ID NO: 22875 - RNA, 21 nt, Artificial Sequence
  Synthetic oligonucleotide: Ptpn6-3574
cgagcgcugcgcccgcaccau

SEQ ID NO: 22876 - RNA, 22 nt, Artificial Sequence
  Synthetic oligonucleotide: Ptpn6-3575
ccgagcgcugcgcccgcaccau

SEQ ID NO: 22877 - RNA, 23 nt, Artificial Sequence
  Synthetic oligonucleotide: Ptpn6-3576
cccgagcgcugcgcccgcaccau

SEQ ID NO: 22878 - RNA, 24 nt, Artificial Sequence
  Synthetic oligonucleotide: Ptpn6-3577
gcccgagcgcugcgcccgcaccau

SEQ ID NO: 22879 - RNA, 18 nt, Artificial Sequence
  Synthetic oligonucleotide: Ptpn6-3578
uucugcaaacucugagau

SEQ ID NO: 22880 - RNA, 19 nt, Artificial Sequence
  Synthetic oligonucleotide: Ptpn6-3579
cuucugcaaacucugagau

SEQ ID NO: 22881 - RNA, 20 nt, Artificial Sequence
  Synthetic oligonucleotide: Ptpn6-3580
gcuucugcaaacucugagau

SEQ ID NO: 22882 - RNA, 21 nt, Artificial Sequence
  Synthetic oligonucleotide: Ptpn6-3581
ugcuucugcaaacucugagau

SEQ ID NO: 22883 - RNA, 22 nt, Artificial Sequence
  Synthetic oligonucleotide: Ptpn6-3582
cugcuucugcaaacucugagau

SEQ ID NO: 22884 - RNA, 23 nt, Artificial Sequence
  Synthetic oligonucleotide: Ptpn6-3583
ccugcuucugcaaacucugagau

SEQ ID NO: 22885 - RNA, 24 nt, Artificial Sequence
  Synthetic oligonucleotide: Ptpn6-3584
uccugcuucugcaaacucugagau

SEQ ID NO: 22886 - RNA, 18 nt, Artificial Sequence
  Synthetic oligonucleotide: Ptpn6-3585
caccaucuggauggucuu

SEQ ID NO: 22887 - RNA, 19 nt, Artificial Sequence
  Synthetic oligonucleotide: Ptpn6-3586
gcaccaucuggauggucuu

SEQ ID NO: 22888 - RNA, 20 nt, Artificial Sequence
  Synthetic oligonucleotide: Ptpn6-870
cgcaccaucuggauggucuu

SEQ ID NO: 22889 - RNA, 21 nt, Artificial Sequence
  Synthetic oligonucleotide: Ptpn6-3587
ccgcaccaucuggauggucuu

SEQ ID NO: 22890 - RNA, 22 nt, Artificial Sequence
  Synthetic oligonucleotide: Ptpn6-3588
cccgcaccaucuggauggucuu

SEQ ID NO: 22891 - RNA, 23 nt, Artificial Sequence
  Synthetic oligonucleotide: Ptpn6-3589
gcccgcaccaucuggauggucuu

SEQ ID NO: 22892 - RNA, 24 nt, Artificial Sequence
  Synthetic oligonucleotide: Ptpn6-3590
cgcccgcaccaucuggauggucuu

SEQ ID NO: 22893 - RNA, 18 nt, Artificial Sequence
  Synthetic oligonucleotide: Ptpn6-3591
agggccuagcagcugguu

SEQ ID NO: 22894 - RNA, 19 nt, Artificial Sequence
  Synthetic oligonucleotide: Ptpn6-3592
cagggccuagcagcugguu

SEQ ID NO: 22895 - RNA, 20 nt, Artificial Sequence
  Synthetic oligonucleotide: Ptpn6-2775
ucagggccuagcagcugguu

SEQ ID NO: 22896 - RNA, 21 nt, Artificial Sequence
  Synthetic oligonucleotide: Ptpn6-3593
aucagggccuagcagcugguu

SEQ ID NO: 22897 - RNA, 22 nt, Artificial Sequence
  Synthetic oligonucleotide: Ptpn6-3594
caucagggccuagcagcugguu

SEQ ID NO: 22898 - RNA, 23 nt, Artificial Sequence
  Synthetic oligonucleotide: Ptpn6-3595
ucaucagggccuagcagcugguu

SEQ ID NO: 22899 - RNA, 24 nt, Artificial Sequence
  Synthetic oligonucleotide: Ptpn6-3596
cucaucagggccuagcagcugguu

SEQ ID NO: 22900 - RNA, 18 nt, Artificial Sequence
  Synthetic oligonucleotide: Ptpn6-3597
gcggggagcaugacacaa

SEQ ID NO: 22901 - RNA, 19 nt, Artificial Sequence
  Synthetic oligonucleotide: Ptpn6-3598
ugcggggagcaugacacaa

SEQ ID NO: 22902 - RNA, 20 nt, Artificial Sequence
  Synthetic oligonucleotide: Ptpn6-693
cugcggggagcaugacacaa

SEQ ID NO: 22903 - RNA, 21 nt, Artificial Sequence
  Synthetic oligonucleotide: Ptpn6-3599
acugcggggagcaugacacaa

SEQ ID NO: 22904 - RNA, 22 nt, Artificial Sequence
  Synthetic oligonucleotide: Ptpn6-3600
aacugcggggagcaugacacaa

SEQ ID NO: 22905 - RNA, 23 nt, Artificial Sequence
  Synthetic oligonucleotide: Ptpn6-3601
caacugcggggagcaugacacaa

SEQ ID NO: 22906 - RNA, 24 nt, Artificial Sequence
  Synthetic oligonucleotide: Ptpn6-3602
ccaacugcggggagcaugacacaa

SEQ ID NO: 22907 - RNA, 18 nt, Artificial Sequence
  Synthetic oligonucleotide: Ptpn6-3603
cucccgcaccucguccaa

SEQ ID NO: 22908 - RNA, 19 nt, Artificial Sequence
  Synthetic oligonucleotide: Ptpn6-3604
ccucccgcaccucguccaa

SEQ ID NO: 22909 - RNA, 20 nt, Artificial Sequence
  Synthetic oligonucleotide: Ptpn6-3605
gccucccgcaccucguccaa

SEQ ID NO: 22910 - RNA, 21 nt, Artificial Sequence
  Synthetic oligonucleotide: Ptpn6-3606
ggccucccgcaccucguccaa

SEQ ID NO: 22911 - RNA, 22 nt, Artificial Sequence
  Synthetic oligonucleotide: Ptpn6-3607
aggccucccgcaccucguccaa

SEQ ID NO: 22912 - RNA, 23 nt, Artificial Sequence
  Synthetic oligonucleotide: Ptpn6-3608
aaggccucccgcaccucguccaa

SEQ ID NO: 22913 - RNA, 24 nt, Artificial Sequence
  Synthetic oligonucleotide: Ptpn6-3609
caaggccucccgcaccucguccaa

SEQ ID NO: 22914 - RNA, 18 nt, Artificial Sequence
  Synthetic oligonucleotide: Ptpn6-3610
ugcggcugacauugagaa

SEQ ID NO: 22915 - RNA, 19 nt, Artificial Sequence
  Synthetic oligonucleotide: Ptpn6-3611
augcggcugacauugagaa

SEQ ID NO: 22916 - RNA, 20 nt, Artificial Sequence
  Synthetic oligonucleotide: Ptpn6-645
aaugcggcugacauugagaa

SEQ ID NO: 22917 - RNA, 21 nt, Artificial Sequence
  Synthetic oligonucleotide: Ptpn6-3612
gaaugcggcugacauugagaa

SEQ ID NO: 22918 - RNA, 22 nt, Artificial Sequence
  Synthetic oligonucleotide: Ptpn6-3613
ugaaugcggcugacauugagaa

SEQ ID NO: 22919 - RNA, 23 nt, Artificial Sequence
  Synthetic oligonucleotide: Ptpn6-3614
gugaaugcggcugacauugagaa

SEQ ID NO: 22920 - RNA, 24 nt, Artificial Sequence
  Synthetic oligonucleotide: Ptpn6-3615
ggugaaugcggcugacauugagaa

SEQ ID NO: 22921 - RNA, 18 nt, Artificial Sequence
  Synthetic oligonucleotide: Ptpn6-3616
caggguggacgcuacaca

SEQ ID NO: 22922 - RNA, 19 nt, Artificial Sequence
  Synthetic oligonucleotide: Ptpn6-3617
ccaggguggacgcuacaca

SEQ ID NO: 22923 - RNA, 20 nt, Artificial Sequence
  Synthetic oligonucleotide: Ptpn6-3618
cccaggguggacgcuacaca

SEQ ID NO: 22924 - RNA, 21 nt, Artificial Sequence
  Synthetic oligonucleotide: Ptpn6-3619
ccccaggguggacgcuacaca

SEQ ID NO: 22925 - RNA, 22 nt, Artificial Sequence
  Synthetic oligonucleotide: Ptpn6-3620
cccccaggguggacgcuacaca

SEQ ID NO: 22926 - RNA, 23 nt, Artificial Sequence
  Synthetic oligonucleotide: Ptpn6-3621
ccccccaggguggacgcuacaca

SEQ ID NO: 22927 - RNA, 24 nt, Artificial Sequence
  Synthetic oligonucleotide: Ptpn6-3622
uccccccaggguggacgcuacaca

SEQ ID NO: 22928 - RNA, 18 nt, Artificial Sequence
  Synthetic oligonucleotide: Ptpn6-3623
ccugagcuggcccgacca

SEQ ID NO: 22929 - RNA, 19 nt, Artificial Sequence
  Synthetic oligonucleotide: Ptpn6-3624
accugagcuggcccgacca

SEQ ID NO: 22930 - RNA, 20 nt, Artificial Sequence
  Synthetic oligonucleotide: Ptpn6-205
uaccugagcuggcccgacca

SEQ ID NO: 22931 - RNA, 21 nt, Artificial Sequence
  Synthetic oligonucleotide: Ptpn6-3625
guaccugagcuggcccgacca

SEQ ID NO: 22932 - RNA, 22 nt, Artificial Sequence
  Synthetic oligonucleotide: Ptpn6-3626
aguaccugagcuggcccgacca

SEQ ID NO: 22933 - RNA, 23 nt, Artificial Sequence
  Synthetic oligonucleotide: Ptpn6-3627
caguaccugagcuggcccgacca

SEQ ID NO: 22934 - RNA, 24 nt, Artificial Sequence
  Synthetic oligonucleotide: Ptpn6-3628
ccaguaccugagcuggcccgacca

SEQ ID NO: 22935 - RNA, 18 nt, Artificial Sequence
  Synthetic oligonucleotide: Ptpn6-3629
gcaaccguacuaugccac

SEQ ID NO: 22936 - RNA, 19 nt, Artificial Sequence
  Synthetic oligonucleotide: Ptpn6-3630
agcaaccguacuaugccac

SEQ ID NO: 22937 - RNA, 20 nt, Artificial Sequence
  Synthetic oligonucleotide: Ptpn6-3631
cagcaaccguacuaugccac

SEQ ID NO: 22938 - RNA, 21 nt, Artificial Sequence
  Synthetic oligonucleotide: Ptpn6-3632
ucagcaaccguacuaugccac

SEQ ID NO: 22939 - RNA, 22 nt, Artificial Sequence
  Synthetic oligonucleotide: Ptpn6-3633
gucagcaaccguacuaugccac

SEQ ID NO: 22940 - RNA, 23 nt, Artificial Sequence
  Synthetic oligonucleotide: Ptpn6-3634
agucagcaaccguacuaugccac

SEQ ID NO: 22941 - RNA, 24 nt, Artificial Sequence
  Synthetic oligonucleotide: Ptpn6-3635
aagucagcaaccguacuaugccac

SEQ ID NO: 22942 - RNA, 18 nt, Artificial Sequence
  Synthetic oligonucleotide: Ptpn6-3636
ggagcauuucaagaagac

SEQ ID NO: 22943 - RNA, 19 nt, Artificial Sequence
  Synthetic oligonucleotide: Ptpn6-3637
uggagcauuucaagaagac

SEQ ID NO: 22944 - RNA, 20 nt, Artificial Sequence
  Synthetic oligonucleotide: Ptpn6-153
guggagcauuucaagaagac

SEQ ID NO: 22945 - RNA, 21 nt, Artificial Sequence
  Synthetic oligonucleotide: Ptpn6-3638
gguggagcauuucaagaagac

SEQ ID NO: 22946 - RNA, 22 nt, Artificial Sequence
  Synthetic oligonucleotide: Ptpn6-3639
ugguggagcauuucaagaagac

SEQ ID NO: 22947 - RNA, 23 nt, Artificial Sequence
  Synthetic oligonucleotide: Ptpn6-3640
cugguggagcauuucaagaagac

SEQ ID NO: 22948 - RNA, 24 nt, Artificial Sequence
  Synthetic oligonucleotide: Ptpn6-3641
ccugguggagcauuucaagaagac

SEQ ID NO: 22949 - RNA, 18 nt, Artificial Sequence
  Synthetic oligonucleotide: Ptpn6-3642
auggagaacaucuccacc

SEQ ID NO: 22950 - RNA, 19 nt, Artificial Sequence
  Synthetic oligonucleotide: Ptpn6-3643
cauggagaacaucuccacc

SEQ ID NO: 22951 - RNA, 20 nt, Artificial Sequence
  Synthetic oligonucleotide: Ptpn6-3644
ucauggagaacaucuccacc

SEQ ID NO: 22952 - RNA, 21 nt, Artificial Sequence
  Synthetic oligonucleotide: Ptpn6-3645
cucauggagaacaucuccacc

SEQ ID NO: 22953 - RNA, 22 nt, Artificial Sequence
  Synthetic oligonucleotide: Ptpn6-3646
gcucauggagaacaucuccacc

SEQ ID NO: 22954 - RNA, 23 nt, Artificial Sequence
  Synthetic oligonucleotide: Ptpn6-3647
ugcucauggagaacaucuccacc

SEQ ID NO: 22955 - RNA, 24 nt, Artificial Sequence
  Synthetic oligonucleotide: Ptpn6-3648
augcucauggagaacaucuccacc

SEQ ID NO: 22956 - RNA, 18 nt, Artificial Sequence
  Synthetic oligonucleotide: Ptpn6-3649
gccuaauuuggcuccccc

SEQ ID NO: 22957 - RNA, 19 nt, Artificial Sequence
  Synthetic oligonucleotide: Ptpn6-3650
ggccuaauuuggcuccccc

SEQ ID NO: 22958 - RNA, 20 nt, Artificial Sequence
  Synthetic oligonucleotide: Ptpn6-3651
uggccuaauuuggcuccccc

SEQ ID NO: 22959 - RNA, 21 nt, Artificial Sequence
  Synthetic oligonucleotide: Ptpn6-3652
auggccuaauuuggcuccccc

SEQ ID NO: 22960 - RNA, 22 nt, Artificial Sequence
  Synthetic oligonucleotide: Ptpn6-3653
aauggccuaauuuggcuccccc

SEQ ID NO: 22961 - RNA, 23 nt, Artificial Sequence
  Synthetic oligonucleotide: Ptpn6-3654
gaauggccuaauuuggcuccccc

SEQ ID NO: 22962 - RNA, 24 nt, Artificial Sequence
  Synthetic oligonucleotide: Ptpn6-3655
ugaauggccuaauuuggcuccccc

SEQ ID NO: 22963 - RNA, 18 nt, Artificial Sequence
  Synthetic oligonucleotide: Ptpn6-3656
gugguucgcagaagggcc

SEQ ID NO: 22964 - RNA, 19 nt, Artificial Sequence
  Synthetic oligonucleotide: Ptpn6-3657
ggugguucgcagaagggcc

SEQ ID NO: 22965 - RNA, 20 nt, Artificial Sequence
  Synthetic oligonucleotide: Ptpn6-2670
aggugguucgcagaagggcc

SEQ ID NO: 22966 - RNA, 21 nt, Artificial Sequence
  Synthetic oligonucleotide: Ptpn6-3658
aaggugguucgcagaagggcc

SEQ ID NO: 22967 - RNA, 22 nt, Artificial Sequence
  Synthetic oligonucleotide: Ptpn6-3659
gaaggugguucgcagaagggcc

SEQ ID NO: 22968 - RNA, 23 nt, Artificial Sequence
  Synthetic oligonucleotide: Ptpn6-3660
ggaaggugguucgcagaagggcc

SEQ ID NO: 22969 - RNA, 24 nt, Artificial Sequence
  Synthetic oligonucleotide: Ptpn6-3661
gggaaggugguucgcagaagggcc

SEQ ID NO: 22970 - RNA, 18 nt, Artificial Sequence
  Synthetic oligonucleotide: Ptpn6-3662
gacgggacaguaacaucc

SEQ ID NO: 22971 - RNA, 19 nt, Artificial Sequence
  Synthetic oligonucleotide: Ptpn6-3663
ggacgggacaguaacaucc

SEQ ID NO: 22972 - RNA, 20 nt, Artificial Sequence
  Synthetic oligonucleotide: Ptpn6-673
gggacgggacaguaacaucc

SEQ ID NO: 22973 - RNA, 21 nt, Artificial Sequence
  Synthetic oligonucleotide: Ptpn6-3664
agggacgggacaguaacaucc

SEQ ID NO: 22974 - RNA, 22 nt, Artificial Sequence
  Synthetic oligonucleotide: Ptpn6-3665
cagggacgggacaguaacaucc

SEQ ID NO: 22975 - RNA, 23 nt, Artificial Sequence
  Synthetic oligonucleotide: Ptpn6-3666
gcagggacgggacaguaacaucc

SEQ ID NO: 22976 - RNA, 24 nt, Artificial Sequence
  Synthetic oligonucleotide: Ptpn6-3667
ugcagggacgggacaguaacaucc

SEQ ID NO: 22977 - RNA, 18 nt, Artificial Sequence
  Synthetic oligonucleotide: Ptpn6-3668
aacaagaagcaggagucc

SEQ ID NO: 22978 - RNA, 19 nt, Artificial Sequence
  Synthetic oligonucleotide: Ptpn6-3669
gaacaagaagcaggagucc

SEQ ID NO: 22979 - RNA, 20 nt, Artificial Sequence
  Synthetic oligonucleotide: Ptpn6-653
ugaacaagaagcaggagucc

SEQ ID NO: 22980 - RNA, 21 nt, Artificial Sequence
  Synthetic oligonucleotide: Ptpn6-3670
cugaacaagaagcaggagucc

SEQ ID NO: 22981 - RNA, 22 nt, Artificial Sequence
  Synthetic oligonucleotide: Ptpn6-3671
acugaacaagaagcaggagucc

SEQ ID NO: 22982 - RNA, 23 nt, Artificial Sequence
  Synthetic oligonucleotide: Ptpn6-3672
aacugaacaagaagcaggagucc

SEQ ID NO: 22983 - RNA, 24 nt, Artificial Sequence
  Synthetic oligonucleotide: Ptpn6-3673
gaacugaacaagaagcaggagucc

SEQ ID NO: 22984 - RNA, 18 nt, Artificial Sequence
  Synthetic oligonucleotide: Ptpn6-3674
uggaacugaacaagaagc

SEQ ID NO: 22985 - RNA, 19 nt, Artificial Sequence
  Synthetic oligonucleotide: Ptpn6-3675
uuggaacugaacaagaagc

SEQ ID NO: 22986 - RNA, 20 nt, Artificial Sequence
  Synthetic oligonucleotide: Ptpn6-161
guuggaacugaacaagaagc

SEQ ID NO: 22987 - RNA, 21 nt, Artificial Sequence
  Synthetic oligonucleotide: Ptpn6-3676
uguuggaacugaacaagaagc

SEQ ID NO: 22988 - RNA, 22 nt, Artificial Sequence
  Synthetic oligonucleotide: Ptpn6-3677
guguuggaacugaacaagaagc

SEQ ID NO: 22989 - RNA, 23 nt, Artificial Sequence
  Synthetic oligonucleotide: Ptpn6-3678
aguguuggaacugaacaagaagc

SEQ ID NO: 22990 - RNA, 24 nt, Artificial Sequence
  Synthetic oligonucleotide: Ptpn6-3679
gaguguuggaacugaacaagaagc

SEQ ID NO: 22991 - RNA, 18 nt, Artificial Sequence
  Synthetic oligonucleotide: Ptpn6-3680
aagaccuacaucgccagc

SEQ ID NO: 22992 - RNA, 19 nt, Artificial Sequence
  Synthetic oligonucleotide: Ptpn6-3681
uaagaccuacaucgccagc

SEQ ID NO: 22993 - RNA, 20 nt, Artificial Sequence
  Synthetic oligonucleotide: Ptpn6-675
cuaagaccuacaucgccagc

SEQ ID NO: 22994 - RNA, 21 nt, Artificial Sequence
  Synthetic oligonucleotide: Ptpn6-3682
gcuaagaccuacaucgccagc

SEQ ID NO: 22995 - RNA, 22 nt, Artificial Sequence
  Synthetic oligonucleotide: Ptpn6-3683
cgcuaagaccuacaucgccagc

SEQ ID NO: 22996 - RNA, 23 nt, Artificial Sequence
  Synthetic oligonucleotide: Ptpn6-3684
acgcuaagaccuacaucgccagc

SEQ ID NO: 22997 - RNA, 24 nt, Artificial Sequence
  Synthetic oligonucleotide: Ptpn6-3685
aacgcuaagaccuacaucgccagc

SEQ ID NO: 22998 - RNA, 18 nt, Artificial Sequence
  Synthetic oligonucleotide: Ptpn6-3686
gcagacaaggagaagagc

SEQ ID NO: 22999 - RNA, 19 nt, Artificial Sequence
  Synthetic oligonucleotide: Ptpn6-3687
agcagacaaggagaagagc

SEQ ID NO: 23000 - RNA, 20 nt, Artificial Sequence
  Synthetic oligonucleotide: Ptpn6-738
cagcagacaaggagaagagc

SEQ ID NO: 23001 - RNA, 21 nt, Artificial Sequence
  Synthetic oligonucleotide: Ptpn6-3688
ucagcagacaaggagaagagc

SEQ ID NO: 23002 - RNA, 22 nt, Artificial Sequence
  Synthetic oligonucleotide: Ptpn6-3689
gucagcagacaaggagaagagc

SEQ ID NO: 23003 - RNA, 23 nt, Artificial Sequence
  Synthetic oligonucleotide: Ptpn6-3690
ggucagcagacaaggagaagagc

SEQ ID NO: 23004 - RNA, 24 nt, Artificial Sequence
  Synthetic oligonucleotide: Ptpn6-3691
cggucagcagacaaggagaagagc

SEQ ID NO: 23005 - RNA, 18 nt, Artificial Sequence
  Synthetic oligonucleotide: Ptpn6-3692
gucuaccugcggcagguc

SEQ ID NO: 23006 - RNA, 19 nt, Artificial Sequence
  Synthetic oligonucleotide: Ptpn6-3693
ugucuaccugcggcagguc

SEQ ID NO: 23007 - RNA, 20 nt, Artificial Sequence
  Synthetic oligonucleotide: Ptpn6-2689
uugucuaccugcggcagguc

SEQ ID NO: 23008 - RNA, 21 nt, Artificial Sequence
  Synthetic oligonucleotide: Ptpn6-3694
uuugucuaccugcggcagguc

SEQ ID NO: 23009 - RNA, 22 nt, Artificial Sequence
  Synthetic oligonucleotide: Ptpn6-3695
cuuugucuaccugcggcagguc

SEQ ID NO: 23010 - RNA, 23 nt, Artificial Sequence
  Synthetic oligonucleotide: Ptpn6-3696
ccuuugucuaccugcggcagguc

SEQ ID NO: 23011 - RNA, 24 nt, Artificial Sequence
  Synthetic oligonucleotide: Ptpn6-3697
gccuuugucuaccugcggcagguc

SEQ ID NO: 23012 - RNA, 18 nt, Artificial Sequence
  Synthetic oligonucleotide: Ptpn6-3698
ggcaaguacagacacaag

SEQ ID NO: 23013 - RNA, 19 nt, Artificial Sequence
  Synthetic oligonucleotide: Ptpn6-3699
gggcaaguacagacacaag

SEQ ID NO: 23014 - RNA, 20 nt, Artificial Sequence
  Synthetic oligonucleotide: Ptpn6-3700
ggggcaaguacagacacaag

SEQ ID NO: 23015 - RNA, 21 nt, Artificial Sequence
  Synthetic oligonucleotide: Ptpn6-3701
gggggcaaguacagacacaag

SEQ ID NO: 23016 - RNA, 22 nt, Artificial Sequence
  Synthetic oligonucleotide: Ptpn6-3702
ggggggcaaguacagacacaag

SEQ ID NO: 23017 - RNA, 23 nt, Artificial Sequence
  Synthetic oligonucleotide: Ptpn6-3703
aggggggcaaguacagacacaag

SEQ ID NO: 23018 - RNA, 24 nt, Artificial Sequence
  Synthetic oligonucleotide: Ptpn6-3704
caggggggcaaguacagacacaag

SEQ ID NO: 23019 - RNA, 18 nt, Artificial Sequence
  Synthetic oligonucleotide: Ptpn6-3705
cgagaugguugaccacag

SEQ ID NO: 23020 - RNA, 19 nt, Artificial Sequence
  Synthetic oligonucleotide: Ptpn6-3706
gcgagaugguugaccacag

SEQ ID NO: 23021 - RNA, 20 nt, Artificial Sequence
  Synthetic oligonucleotide: Ptpn6-3707
ggcgagaugguugaccacag

SEQ ID NO: 23022 - RNA, 21 nt, Artificial Sequence
  Synthetic oligonucleotide: Ptpn6-3708
aggcgagaugguugaccacag

SEQ ID NO: 23023 - RNA, 22 nt, Artificial Sequence
  Synthetic oligonucleotide: Ptpn6-3709
gaggcgagaugguugaccacag

SEQ ID NO: 23024 - RNA, 23 nt, Artificial Sequence
  Synthetic oligonucleotide: Ptpn6-3710
ggaggcgagaugguugaccacag

SEQ ID NO: 23025 - RNA, 24 nt, Artificial Sequence
  Synthetic oligonucleotide: Ptpn6-3711
aggaggcgagaugguugaccacag

SEQ ID NO: 23026 - RNA, 18 nt, Artificial Sequence
  Synthetic oligonucleotide: Ptpn6-3712
ccgagagguggagaaagg

SEQ ID NO: 23027 - RNA, 19 nt, Artificial Sequence
  Synthetic oligonucleotide: Ptpn6-3713
cccgagagguggagaaagg

SEQ ID NO: 23028 - RNA, 20 nt, Artificial Sequence
  Synthetic oligonucleotide: Ptpn6-3714
acccgagagguggagaaagg

SEQ ID NO: 23029 - RNA, 21 nt, Artificial Sequence
  Synthetic oligonucleotide: Ptpn6-3715
cacccgagagguggagaaagg

SEQ ID NO: 23030 - RNA, 22 nt, Artificial Sequence
  Synthetic oligonucleotide: Ptpn6-3716
ccacccgagagguggagaaagg

SEQ ID NO: 23031 - RNA, 23 nt, Artificial Sequence
  Synthetic oligonucleotide: Ptpn6-3717
accacccgagagguggagaaagg

SEQ ID NO: 23032 - RNA, 24 nt, Artificial Sequence
  Synthetic oligonucleotide: Ptpn6-3718
gaccacccgagagguggagaaagg

SEQ ID NO: 23033 - RNA, 18 nt, Artificial Sequence
  Synthetic oligonucleotide: Ptpn6-3719
ccguacuaugccacgagg

SEQ ID NO: 23034 - RNA, 19 nt, Artificial Sequence
  Synthetic oligonucleotide: Ptpn6-3720
accguacuaugccacgagg

SEQ ID NO: 23035 - RNA, 20 nt, Artificial Sequence
  Synthetic oligonucleotide: Ptpn6-3721
aaccguacuaugccacgagg

SEQ ID NO: 23036 - RNA, 21 nt, Artificial Sequence
  Synthetic oligonucleotide: Ptpn6-3722
caaccguacuaugccacgagg

SEQ ID NO: 23037 - RNA, 22 nt, Artificial Sequence
  Synthetic oligonucleotide: Ptpn6-3723
gcaaccguacuaugccacgagg

SEQ ID NO: 23038 - RNA, 23 nt, Artificial Sequence
  Synthetic oligonucleotide: Ptpn6-3724
agcaaccguacuaugccacgagg

SEQ ID NO: 23039 - RNA, 24 nt, Artificial Sequence
  Synthetic oligonucleotide: Ptpn6-3725
cagcaaccguacuaugccacgagg

SEQ ID NO: 23040 - RNA, 18 nt, Artificial Sequence
  Synthetic oligonucleotide: Ptpn6-3726
ccaaggcuggcuucuggg

SEQ ID NO: 23041 - RNA, 19 nt, Artificial Sequence
  Synthetic oligonucleotide: Ptpn6-3727
gccaaggcuggcuucuggg

SEQ ID NO: 23042 - RNA, 20 nt, Artificial Sequence
  Synthetic oligonucleotide: Ptpn6-167
agccaaggcuggcuucuggg

SEQ ID NO: 23043 - RNA, 21 nt, Artificial Sequence
  Synthetic oligonucleotide: Ptpn6-3728
cagccaaggcuggcuucuggg

SEQ ID NO: 23044 - RNA, 22 nt, Artificial Sequence
  Synthetic oligonucleotide: Ptpn6-3729
acagccaaggcuggcuucuggg

SEQ ID NO: 23045 - RNA, 23 nt, Artificial Sequence
  Synthetic oligonucleotide: Ptpn6-3730
uacagccaaggcuggcuucuggg

SEQ ID NO: 23046 - RNA, 24 nt, Artificial Sequence
  Synthetic oligonucleotide: Ptpn6-3731
auacagccaaggcuggcuucuggg

SEQ ID NO: 23047 - RNA, 18 nt, Artificial Sequence
  Synthetic oligonucleotide: Ptpn6-3732
accuaucccccagccaug

SEQ ID NO: 23048 - RNA, 19 nt, Artificial Sequence
  Synthetic oligonucleotide: Ptpn6-3733
caccuaucccccagccaug

SEQ ID NO: 23049 - RNA, 20 nt, Artificial Sequence
  Synthetic oligonucleotide: Ptpn6-723
ucaccuaucccccagccaug

SEQ ID NO: 23050 - RNA, 21 nt, Artificial Sequence
  Synthetic oligonucleotide: Ptpn6-3734
aucaccuaucccccagccaug

SEQ ID NO: 23051 - RNA, 22 nt, Artificial Sequence
  Synthetic oligonucleotide: Ptpn6-3735
caucaccuaucccccagccaug

SEQ ID NO: 23052 - RNA, 23 nt, Artificial Sequence
  Synthetic oligonucleotide: Ptpn6-3736
acaucaccuaucccccagccaug

SEQ ID NO: 23053 - RNA, 24 nt, Artificial Sequence
  Synthetic oligonucleotide: Ptpn6-3737
aacaucaccuaucccccagccaug

SEQ ID NO: 23054 - RNA, 18 nt, Artificial Sequence
  Synthetic oligonucleotide: Ptpn6-3738
gucuccccgcuggacaau

SEQ ID NO: 23055 - RNA, 19 nt, Artificial Sequence
  Synthetic oligonucleotide: Ptpn6-3739
ggucuccccgcuggacaau

SEQ ID NO: 23056 - RNA, 20 nt, Artificial Sequence
  Synthetic oligonucleotide: Ptpn6-3740
aggucuccccgcuggacaau

SEQ ID NO: 23057 - RNA, 21 nt, Artificial Sequence
  Synthetic oligonucleotide: Ptpn6-3741
caggucuccccgcuggacaau

SEQ ID NO: 23058 - RNA, 22 nt, Artificial Sequence
  Synthetic oligonucleotide: Ptpn6-3742
acaggucuccccgcuggacaau

SEQ ID NO: 23059 - RNA, 23 nt, Artificial Sequence
  Synthetic oligonucleotide: Ptpn6-3743
uacaggucuccccgcuggacaau

SEQ ID NO: 23060 - RNA, 24 nt, Artificial Sequence
  Synthetic oligonucleotide: Ptpn6-3744
uuacaggucuccccgcuggacaau

SEQ ID NO: 23061 - RNA, 18 nt, Artificial Sequence
  Synthetic oligonucleotide: Ptpn6-3745
caagggugaggggcaccu

SEQ ID NO: 23062 - RNA, 19 nt, Artificial Sequence
  Synthetic oligonucleotide: Ptpn6-3746
ccaagggugaggggcaccu

SEQ ID NO: 23063 - RNA, 20 nt, Artificial Sequence
  Synthetic oligonucleotide: Ptpn6-2751
accaagggugaggggcaccu

SEQ ID NO: 23064 - RNA, 21 nt, Artificial Sequence
  Synthetic oligonucleotide: Ptpn6-3747
caccaagggugaggggcaccu

SEQ ID NO: 23065 - RNA, 22 nt, Artificial Sequence
  Synthetic oligonucleotide: Ptpn6-3748
ccaccaagggugaggggcaccu

SEQ ID NO: 23066 - RNA, 23 nt, Artificial Sequence
  Synthetic oligonucleotide: Ptpn6-3749
uccaccaagggugaggggcaccu

SEQ ID NO: 23067 - RNA, 24 nt, Artificial Sequence
  Synthetic oligonucleotide: Ptpn6-3750
cuccaccaagggugaggggcaccu

SEQ ID NO: 23068 - RNA, 18 nt, Artificial Sequence
  Synthetic oligonucleotide: Ptpn6-3751
gggguccccagugagccu

SEQ ID NO: 23069 - RNA, 19 nt, Artificial Sequence
  Synthetic oligonucleotide: Ptpn6-3752
ugggguccccagugagccu

SEQ ID NO: 23070 - RNA, 20 nt, Artificial Sequence
  Synthetic oligonucleotide: Ptpn6-209
augggguccccagugagccu

SEQ ID NO: 23071 - RNA, 21 nt, Artificial Sequence
  Synthetic oligonucleotide: Ptpn6-3753
caugggguccccagugagccu

SEQ ID NO: 23072 - RNA, 22 nt, Artificial Sequence
  Synthetic oligonucleotide: Ptpn6-3754
ccaugggguccccagugagccu

SEQ ID NO: 23073 - RNA, 23 nt, Artificial Sequence
  Synthetic oligonucleotide: Ptpn6-3755
accaugggguccccagugagccu

SEQ ID NO: 23074 - RNA, 24 nt, Artificial Sequence
  Synthetic oligonucleotide: Ptpn6-3756
gaccaugggguccccagugagccu

SEQ ID NO: 23075 - RNA, 18 nt, Artificial Sequence
  Synthetic oligonucleotide: Ptpn6-3757
auuuccccacccacaucu

SEQ ID NO: 23076 - RNA, 19 nt, Artificial Sequence
  Synthetic oligonucleotide: Ptpn6-3758
cauuuccccacccacaucu

SEQ ID NO: 23077 - RNA, 20 nt, Artificial Sequence
  Synthetic oligonucleotide: Ptpn6-3759
ucauuuccccacccacaucu

SEQ ID NO: 23078 - RNA, 21 nt, Artificial Sequence
  Synthetic oligonucleotide: Ptpn6-3760
cucauuuccccacccacaucu

SEQ ID NO: 23079 - RNA, 22 nt, Artificial Sequence
  Synthetic oligonucleotide: Ptpn6-3761
gcucauuuccccacccacaucu

SEQ ID NO: 23080 - RNA, 23 nt, Artificial Sequence
  Synthetic oligonucleotide: Ptpn6-3762
ugcucauuuccccacccacaucu

SEQ ID NO: 23081 - RNA, 24 nt, Artificial Sequence
  Synthetic oligonucleotide: Ptpn6-3763
augcucauuuccccacccacaucu

SEQ ID NO: 23082 - RNA, 18 nt, Artificial Sequence
  Synthetic oligonucleotide: Ptpn6-3764
cgcagaagggccaggagu

SEQ ID NO: 23083 - RNA, 19 nt, Artificial Sequence
  Synthetic oligonucleotide: Ptpn6-3765
ucgcagaagggccaggagu

SEQ ID NO: 23084 - RNA, 20 nt, Artificial Sequence
  Synthetic oligonucleotide: Ptpn6-2761
uucgcagaagggccaggagu

SEQ ID NO: 23085 - RNA, 21 nt, Artificial Sequence
  Synthetic oligonucleotide: Ptpn6-3766
guucgcagaagggccaggagu

SEQ ID NO: 23086 - RNA, 22 nt, Artificial Sequence
  Synthetic oligonucleotide: Ptpn6-3767
gguucgcagaagggccaggagu

SEQ ID NO: 23087 - RNA, 23 nt, Artificial Sequence
  Synthetic oligonucleotide: Ptpn6-3768
ugguucgcagaagggccaggagu

SEQ ID NO: 23088 - RNA, 24 nt, Artificial Sequence
  Synthetic oligonucleotide: Ptpn6-3769
gugguucgcagaagggccaggagu

SEQ ID NO: 23089 - RNA, 18 nt, Artificial Sequence
  Synthetic oligonucleotide: Ptpn6-3770
ucaucgugcacugcaggu

SEQ ID NO: 23090 - RNA, 19 nt, Artificial Sequence
  Synthetic oligonucleotide: Ptpn6-3771
aucaucgugcacugcaggu

SEQ ID NO: 23091 - RNA, 20 nt, Artificial Sequence
  Synthetic oligonucleotide: Ptpn6-3772
caucaucgugcacugcaggu

SEQ ID NO: 23092 - RNA, 21 nt, Artificial Sequence
  Synthetic oligonucleotide: Ptpn6-3773
ccaucaucgugcacugcaggu

SEQ ID NO: 23093 - RNA, 22 nt, Artificial Sequence
  Synthetic oligonucleotide: Ptpn6-3774
cccaucaucgugcacugcaggu

SEQ ID NO: 23094 - RNA, 23 nt, Artificial Sequence
  Synthetic oligonucleotide: Ptpn6-3775
gcccaucaucgugcacugcaggu

SEQ ID NO: 23095 - RNA, 24 nt, Artificial Sequence
  Synthetic oligonucleotide: Ptpn6-3776
ggcccaucaucgugcacugcaggu

SEQ ID NO: 23096 - RNA, 18 nt, Artificial Sequence
  Synthetic oligonucleotide: Ptpn6-3777
ggaaagggagggucgggu

SEQ ID NO: 23097 - RNA, 19 nt, Artificial Sequence
  Synthetic oligonucleotide: Ptpn6-3778
uggaaagggagggucgggu

SEQ ID NO: 23098 - RNA, 20 nt, Artificial Sequence
  Synthetic oligonucleotide: Ptpn6-2765
cuggaaagggagggucgggu

SEQ ID NO: 23099 - RNA, 18 nt, Artificial Sequence
  Synthetic oligonucleotide: Ptpn6-3779
aggggcaccuggggguuu

SEQ ID NO: 23100 - RNA, 19 nt, Artificial Sequence
  Synthetic oligonucleotide: Ptpn6-3780
gaggggcaccuggggguuu

SEQ ID NO: 23101 - RNA, 20 nt, Artificial Sequence
  Synthetic oligonucleotide: Ptpn6-2776
ugaggggcaccuggggguuu

SEQ ID NO: 23102 - RNA, 21 nt, Artificial Sequence
  Synthetic oligonucleotide: Ptpn6-3781
gugaggggcaccuggggguuu

SEQ ID NO: 23103 - RNA, 22 nt, Artificial Sequence
  Synthetic oligonucleotide: Ptpn6-3782
ggugaggggcaccuggggguuu

SEQ ID NO: 23104 - RNA, 23 nt, Artificial Sequence
  Synthetic oligonucleotide: Ptpn6-3783
gggugaggggcaccuggggguuu

SEQ ID NO: 23105 - RNA, 24 nt, Artificial Sequence
  Synthetic oligonucleotide: Ptpn6-3784
agggugaggggcaccuggggguuu

SEQ ID NO: 23106 - RNA, 18 nt, Artificial Sequence
  Synthetic oligonucleotide: Ptpn6-3785
ugagauguggguggggaa

SEQ ID NO: 23107 - RNA, 19 nt, Artificial Sequence
  Synthetic oligonucleotide: Ptpn6-3786
cugagauguggguggggaa

SEQ ID NO: 23108 - RNA, 20 nt, Artificial Sequence
  Synthetic oligonucleotide: Ptpn6-3787
ucugagauguggguggggaa

SEQ ID NO: 23109 - RNA, 21 nt, Artificial Sequence
  Synthetic oligonucleotide: Ptpn6-3788
cucugagauguggguggggaa

SEQ ID NO: 23110 - RNA, 22 nt, Artificial Sequence
  Synthetic oligonucleotide: Ptpn6-3789
acucugagauguggguggggaa

SEQ ID NO: 23111 - RNA, 23 nt, Artificial Sequence
  Synthetic oligonucleotide: Ptpn6-3790
aacucugagauguggguggggaa

SEQ ID NO: 23112 - RNA, 24 nt, Artificial Sequence
  Synthetic oligonucleotide: Ptpn6-3791
aaacucugagauguggguggggaa

SEQ ID NO: 23113 - RNA, 18 nt, Artificial Sequence
  Synthetic oligonucleotide: Ptpn6-3792
cuuagugguuucaaugaa

SEQ ID NO: 23114 - RNA, 19 nt, Artificial Sequence
  Synthetic oligonucleotide: Ptpn6-3793
ucuuagugguuucaaugaa

SEQ ID NO: 23115 - RNA, 20 nt, Artificial Sequence
  Synthetic oligonucleotide: Ptpn6-866
uucuuagugguuucaaugaa

SEQ ID NO: 23116 - RNA, 21 nt, Artificial Sequence
  Synthetic oligonucleotide: Ptpn6-3794
cuucuuagugguuucaaugaa

SEQ ID NO: 23117 - RNA, 22 nt, Artificial Sequence
  Synthetic oligonucleotide: Ptpn6-3795
ucuucuuagugguuucaaugaa

SEQ ID NO: 23118 - RNA, 23 nt, Artificial Sequence
  Synthetic oligonucleotide: Ptpn6-3796
uucuucuuagugguuucaaugaa

SEQ ID NO: 23119 - RNA, 24 nt, Artificial Sequence
  Synthetic oligonucleotide: Ptpn6-3797
cuucuucuuagugguuucaaugaa

SEQ ID NO: 23120 - RNA, 18 nt, Artificial Sequence
  Synthetic oligonucleotide: Ptpn6-3798
gcagccugggugcucaca

SEQ ID NO: 23121 - RNA, 19 nt, Artificial Sequence
  Synthetic oligonucleotide: Ptpn6-3799
ggcagccugggugcucaca

SEQ ID NO: 23122 - RNA, 20 nt, Artificial Sequence
  Synthetic oligonucleotide: Ptpn6-2639
gggcagccugggugcucaca

SEQ ID NO: 23123 - RNA, 21 nt, Artificial Sequence
  Synthetic oligonucleotide: Ptpn6-3800
ggggcagccugggugcucaca

SEQ ID NO: 23124 - RNA, 22 nt, Artificial Sequence
  Synthetic oligonucleotide: Ptpn6-3801
uggggcagccugggugcucaca

SEQ ID NO: 23125 - RNA, 23 nt, Artificial Sequence
  Synthetic oligonucleotide: Ptpn6-3802
auggggcagccugggugcucaca

SEQ ID NO: 23126 - RNA, 24 nt, Artificial Sequence
  Synthetic oligonucleotide: Ptpn6-3803
aauggggcagccugggugcucaca

SEQ ID NO: 23127 - RNA, 18 nt, Artificial Sequence
  Synthetic oligonucleotide: Ptpn6-3804
ggccacucacauugucca

SEQ ID NO: 23128 - RNA, 19 nt, Artificial Sequence
  Synthetic oligonucleotide: Ptpn6-3805
gggccacucacauugucca

SEQ ID NO: 23129 - RNA, 20 nt, Artificial Sequence
  Synthetic oligonucleotide: Ptpn6-3806
ggggccacucacauugucca

SEQ ID NO: 23130 - RNA, 21 nt, Artificial Sequence
  Synthetic oligonucleotide: Ptpn6-3807
gggggccacucacauugucca

SEQ ID NO: 23131 - RNA, 22 nt, Artificial Sequence
  Synthetic oligonucleotide: Ptpn6-3808
ugggggccacucacauugucca

SEQ ID NO: 23132 - RNA, 23 nt, Artificial Sequence
  Synthetic oligonucleotide: Ptpn6-3809
gugggggccacucacauugucca

SEQ ID NO: 23133 - RNA, 24 nt, Artificial Sequence
  Synthetic oligonucleotide: Ptpn6-3810
cgugggggccacucacauugucca

SEQ ID NO: 23134 - RNA, 18 nt, Artificial Sequence
  Synthetic oligonucleotide: Ptpn6-3811
aggacacccccaggcuca

SEQ ID NO: 23135 - RNA, 19 nt, Artificial Sequence
  Synthetic oligonucleotide: Ptpn6-3812
gaggacacccccaggcuca

SEQ ID NO: 23136 - RNA, 20 nt, Artificial Sequence
  Synthetic oligonucleotide: Ptpn6-877
ugaggacacccccaggcuca

SEQ ID NO: 23137 - RNA, 21 nt, Artificial Sequence
  Synthetic oligonucleotide: Ptpn6-3813
cugaggacacccccaggcuca

SEQ ID NO: 23138 - RNA, 22 nt, Artificial Sequence
  Synthetic oligonucleotide: Ptpn6-3814
gcugaggacacccccaggcuca

SEQ ID NO: 23139 - RNA, 23 nt, Artificial Sequence
  Synthetic oligonucleotide: Ptpn6-3815
agcugaggacacccccaggcuca

SEQ ID NO: 23140 - RNA, 24 nt, Artificial Sequence
  Synthetic oligonucleotide: Ptpn6-3816
aagcugaggacacccccaggcuca

SEQ ID NO: 23141 - RNA, 18 nt, Artificial Sequence
  Synthetic oligonucleotide: Ptpn6-3817
gggcagccugggugcuca

SEQ ID NO: 23142 - RNA, 19 nt, Artificial Sequence
  Synthetic oligonucleotide: Ptpn6-3818
ggggcagccugggugcuca

SEQ ID NO: 23143 - RNA, 20 nt, Artificial Sequence
  Synthetic oligonucleotide: Ptpn6-3819
uggggcagccugggugcuca

SEQ ID NO: 23144 - RNA, 21 nt, Artificial Sequence
  Synthetic oligonucleotide: Ptpn6-3820
auggggcagccugggugcuca

SEQ ID NO: 23145 - RNA, 22 nt, Artificial Sequence
  Synthetic oligonucleotide: Ptpn6-3821
aauggggcagccugggugcuca

SEQ ID NO: 23146 - RNA, 23 nt, Artificial Sequence
  Synthetic oligonucleotide: Ptpn6-3822
gaauggggcagccugggugcuca

SEQ ID NO: 23147 - RNA, 24 nt, Artificial Sequence
  Synthetic oligonucleotide: Ptpn6-3823
ugaauggggcagccugggugcuca

SEQ ID NO: 23148 - RNA, 18 nt, Artificial Sequence
  Synthetic oligonucleotide: Ptpn6-3824
uucuucuuagugguuuca

SEQ ID NO: 23149 - RNA, 19 nt, Artificial Sequence
  Synthetic oligonucleotide: Ptpn6-3825
cuucuucuuagugguuuca

SEQ ID NO: 23150 - RNA, 20 nt, Artificial Sequence
  Synthetic oligonucleotide: Ptpn6-865
gcuucuucuuagugguuuca

SEQ ID NO: 23151 - RNA, 21 nt, Artificial Sequence
  Synthetic oligonucleotide: Ptpn6-3826
agcuucuucuuagugguuuca

SEQ ID NO: 23152 - RNA, 22 nt, Artificial Sequence
  Synthetic oligonucleotide: Ptpn6-3827
cagcuucuucuuagugguuuca

SEQ ID NO: 23153 - RNA, 23 nt, Artificial Sequence
  Synthetic oligonucleotide: Ptpn6-3828
ccagcuucuucuuagugguuuca

SEQ ID NO: 23154 - RNA, 24 nt, Artificial Sequence
  Synthetic oligonucleotide: Ptpn6-3829
uccagcuucuucuuagugguuuca

SEQ ID NO: 23155 - RNA, 18 nt, Artificial Sequence
  Synthetic oligonucleotide: Ptpn6-3830
ccgcucacuuccucuuga

SEQ ID NO: 23156 - RNA, 19 nt, Artificial Sequence
  Synthetic oligonucleotide: Ptpn6-3831
accgcucacuuccucuuga

SEQ ID NO: 23157 - RNA, 20 nt, Artificial Sequence
  Synthetic oligonucleotide: Ptpn6-2655
caccgcucacuuccucuuga

SEQ ID NO: 23158 - RNA, 21 nt, Artificial Sequence
  Synthetic oligonucleotide: Ptpn6-3832
gcaccgcucacuuccucuuga

SEQ ID NO: 23159 - RNA, 22 nt, Artificial Sequence
  Synthetic oligonucleotide: Ptpn6-3833
agcaccgcucacuuccucuuga

SEQ ID NO: 23160 - RNA, 23 nt, Artificial Sequence
  Synthetic oligonucleotide: Ptpn6-3834
cagcaccgcucacuuccucuuga

SEQ ID NO: 23161 - RNA, 24 nt, Artificial Sequence
  Synthetic oligonucleotide: Ptpn6-3835
acagcaccgcucacuuccucuuga

SEQ ID NO: 23162 - RNA, 18 nt, Artificial Sequence
  Synthetic oligonucleotide: Ptpn6-3836
gcccaccucgggccagua

SEQ ID NO: 23163 - RNA, 19 nt, Artificial Sequence
  Synthetic oligonucleotide: Ptpn6-3837
ugcccaccucgggccagua

SEQ ID NO: 23164 - RNA, 20 nt, Artificial Sequence
  Synthetic oligonucleotide: Ptpn6-384
augcccaccucgggccagua

SEQ ID NO: 23165 - RNA, 21 nt, Artificial Sequence
  Synthetic oligonucleotide: Ptpn6-3838
caugcccaccucgggccagua

SEQ ID NO: 23166 - RNA, 22 nt, Artificial Sequence
  Synthetic oligonucleotide: Ptpn6-3839
gcaugcccaccucgggccagua

SEQ ID NO: 23167 - RNA, 23 nt, Artificial Sequence
  Synthetic oligonucleotide: Ptpn6-3840
ugcaugcccaccucgggccagua

SEQ ID NO: 23168 - RNA, 24 nt, Artificial Sequence
  Synthetic oligonucleotide: Ptpn6-3841
cugcaugcccaccucgggccagua

SEQ ID NO: 23169 - RNA, 18 nt, Artificial Sequence
  Synthetic oligonucleotide: Ptpn6-3842
gcagucagggccacucac

SEQ ID NO: 23170 - RNA, 19 nt, Artificial Sequence
  Synthetic oligonucleotide: Ptpn6-3843
ggcagucagggccacucac

SEQ ID NO: 23171 - RNA, 20 nt, Artificial Sequence
  Synthetic oligonucleotide: Ptpn6-3844
uggcagucagggccacucac

SEQ ID NO: 23172 - RNA, 21 nt, Artificial Sequence
  Synthetic oligonucleotide: Ptpn6-3845
guggcagucagggccacucac

SEQ ID NO: 23173 - RNA, 22 nt, Artificial Sequence
  Synthetic oligonucleotide: Ptpn6-3846
aguggcagucagggccacucac

SEQ ID NO: 23174 - RNA, 23 nt, Artificial Sequence
  Synthetic oligonucleotide: Ptpn6-3847
caguggcagucagggccacucac

SEQ ID NO: 23175 - RNA, 24 nt, Artificial Sequence
  Synthetic oligonucleotide: Ptpn6-3848
gcaguggcagucagggccacucac

SEQ ID NO: 23176 - RNA, 18 nt, Artificial Sequence
  Synthetic oligonucleotide: Ptpn6-3849
ggacacccccaggcucac

SEQ ID NO: 23177 - RNA, 19 nt, Artificial Sequence
  Synthetic oligonucleotide: Ptpn6-3850
aggacacccccaggcucac

SEQ ID NO: 23178 - RNA, 20 nt, Artificial Sequence
  Synthetic oligonucleotide: Ptpn6-367
gaggacacccccaggcucac

SEQ ID NO: 23179 - RNA, 21 nt, Artificial Sequence
  Synthetic oligonucleotide: Ptpn6-3851
ugaggacacccccaggcucac

SEQ ID NO: 23180 - RNA, 22 nt, Artificial Sequence
  Synthetic oligonucleotide: Ptpn6-3852
cugaggacacccccaggcucac

SEQ ID NO: 23181 - RNA, 23 nt, Artificial Sequence
  Synthetic oligonucleotide: Ptpn6-3853
gcugaggacacccccaggcucac

SEQ ID NO: 23182 - RNA, 24 nt, Artificial Sequence
  Synthetic oligonucleotide: Ptpn6-3854
agcugaggacacccccaggcucac

SEQ ID NO: 23183 - RNA, 18 nt, Artificial Sequence
  Synthetic oligonucleotide: Ptpn6-3855
ggcagccugggugcucac

SEQ ID NO: 23184 - RNA, 19 nt, Artificial Sequence
  Synthetic oligonucleotide: Ptpn6-3856
gggcagccugggugcucac

SEQ ID NO: 23185 - RNA, 20 nt, Artificial Sequence
  Synthetic oligonucleotide: Ptpn6-2658
ggggcagccugggugcucac

SEQ ID NO: 23186 - RNA, 21 nt, Artificial Sequence
  Synthetic oligonucleotide: Ptpn6-3857
uggggcagccugggugcucac

SEQ ID NO: 23187 - RNA, 22 nt, Artificial Sequence
  Synthetic oligonucleotide: Ptpn6-3858
auggggcagccugggugcucac

SEQ ID NO: 23188 - RNA, 23 nt, Artificial Sequence
  Synthetic oligonucleotide: Ptpn6-3859
aauggggcagccugggugcucac

SEQ ID NO: 23189 - RNA, 24 nt, Artificial Sequence
  Synthetic oligonucleotide: Ptpn6-3860
gaauggggcagccugggugcucac

SEQ ID NO: 23190 - RNA, 18 nt, Artificial Sequence
  Synthetic oligonucleotide: Ptpn6-3861
gucacaguccaggcggac

SEQ ID NO: 23191 - RNA, 19 nt, Artificial Sequence
  Synthetic oligonucleotide: Ptpn6-3862
ugucacaguccaggcggac

SEQ ID NO: 23192 - RNA, 20 nt, Artificial Sequence
  Synthetic oligonucleotide: Ptpn6-3863
augucacaguccaggcggac

SEQ ID NO: 23193 - RNA, 21 nt, Artificial Sequence
  Synthetic oligonucleotide: Ptpn6-3864
aaugucacaguccaggcggac

SEQ ID NO: 23194 - RNA, 22 nt, Artificial Sequence
  Synthetic oligonucleotide: Ptpn6-3865
caaugucacaguccaggcggac

SEQ ID NO: 23195 - RNA, 23 nt, Artificial Sequence
  Synthetic oligonucleotide: Ptpn6-3866
ucaaugucacaguccaggcggac

SEQ ID NO: 23196 - RNA, 24 nt, Artificial Sequence
  Synthetic oligonucleotide: Ptpn6-3867
gucaaugucacaguccaggcggac

SEQ ID NO: 23197 - RNA, 18 nt, Artificial Sequence
  Synthetic oligonucleotide: Ptpn6-3868
gcauugauguagucggac

SEQ ID NO: 23198 - RNA, 19 nt, Artificial Sequence
  Synthetic oligonucleotide: Ptpn6-3869
ggcauugauguagucggac

SEQ ID NO: 23199 - RNA, 20 nt, Artificial Sequence
  Synthetic oligonucleotide: Ptpn6-893
uggcauugauguagucggac

SEQ ID NO: 23200 - RNA, 21 nt, Artificial Sequence
  Synthetic oligonucleotide: Ptpn6-3870
uuggcauugauguagucggac

SEQ ID NO: 23201 - RNA, 22 nt, Artificial Sequence
  Synthetic oligonucleotide: Ptpn6-3871
guuggcauugauguagucggac

SEQ ID NO: 23202 - RNA, 23 nt, Artificial Sequence
  Synthetic oligonucleotide: Ptpn6-3872
aguuggcauugauguagucggac

SEQ ID NO: 23203 - RNA, 24 nt, Artificial Sequence
  Synthetic oligonucleotide: Ptpn6-3873
uaguuggcauugauguagucggac

SEQ ID NO: 23204 - RNA, 18 nt, Artificial Sequence
  Synthetic oligonucleotide: Ptpn6-3874
gcacgcugcaugcccacc

SEQ ID NO: 23205 - RNA, 19 nt, Artificial Sequence
  Synthetic oligonucleotide: Ptpn6-3875
agcacgcugcaugcccacc

SEQ ID NO: 23206 - RNA, 20 nt, Artificial Sequence
  Synthetic oligonucleotide: Ptpn6-886
aagcacgcugcaugcccacc

SEQ ID NO: 23207 - RNA, 21 nt, Artificial Sequence
  Synthetic oligonucleotide: Ptpn6-3876
uaagcacgcugcaugcccacc

SEQ ID NO: 23208 - RNA, 22 nt, Artificial Sequence
  Synthetic oligonucleotide: Ptpn6-3877
auaagcacgcugcaugcccacc

SEQ ID NO: 23209 - RNA, 23 nt, Artificial Sequence
  Synthetic oligonucleotide: Ptpn6-3878
cauaagcacgcugcaugcccacc

SEQ ID NO: 23210 - RNA, 24 nt, Artificial Sequence
  Synthetic oligonucleotide: Ptpn6-3879
ccauaagcacgcugcaugcccacc

SEQ ID NO: 23211 - RNA, 18 nt, Artificial Sequence
  Synthetic oligonucleotide: Ptpn6-3880
cacuguguagcguccacc

SEQ ID NO: 23212 - RNA, 19 nt, Artificial Sequence
  Synthetic oligonucleotide: Ptpn6-3881
ccacuguguagcguccacc

SEQ ID NO: 23213 - RNA, 20 nt, Artificial Sequence
  Synthetic oligonucleotide: Ptpn6-3882
cccacuguguagcguccacc

SEQ ID NO: 23214 - RNA, 21 nt, Artificial Sequence
  Synthetic oligonucleotide: Ptpn6-3883
acccacuguguagcguccacc

SEQ ID NO: 23215 - RNA, 22 nt, Artificial Sequence
  Synthetic oligonucleotide: Ptpn6-3884
cacccacuguguagcguccacc

SEQ ID NO: 23216 - RNA, 23 nt, Artificial Sequence
  Synthetic oligonucleotide: Ptpn6-3885
ccacccacuguguagcguccacc

SEQ ID NO: 23217 - RNA, 24 nt, Artificial Sequence
  Synthetic oligonucleotide: Ptpn6-3886
accacccacuguguagcguccacc

SEQ ID NO: 23218 - RNA, 18 nt, Artificial Sequence
  Synthetic oligonucleotide: Ptpn6-3887
cauugauguagucggacc

SEQ ID NO: 23219 - RNA, 19 nt, Artificial Sequence
  Synthetic oligonucleotide: Ptpn6-3888
gcauugauguagucggacc

SEQ ID NO: 23220 - RNA, 20 nt, Artificial Sequence
  Synthetic oligonucleotide: Ptpn6-397
ggcauugauguagucggacc

SEQ ID NO: 23221 - RNA, 21 nt, Artificial Sequence
  Synthetic oligonucleotide: Ptpn6-3889
uggcauugauguagucggacc

SEQ ID NO: 23222 - RNA, 22 nt, Artificial Sequence
  Synthetic oligonucleotide: Ptpn6-3890
uuggcauugauguagucggacc

SEQ ID NO: 23223 - RNA, 23 nt, Artificial Sequence
  Synthetic oligonucleotide: Ptpn6-3891
guuggcauugauguagucggacc

SEQ ID NO: 23224 - RNA, 24 nt, Artificial Sequence
  Synthetic oligonucleotide: Ptpn6-3892
aguuggcauugauguagucggacc

SEQ ID NO: 23225 - RNA, 18 nt, Artificial Sequence
  Synthetic oligonucleotide: Ptpn6-3893
acuguguagcguccaccc

SEQ ID NO: 23226 - RNA, 19 nt, Artificial Sequence
  Synthetic oligonucleotide: Ptpn6-3894
cacuguguagcguccaccc

SEQ ID NO: 23227 - RNA, 20 nt, Artificial Sequence
  Synthetic oligonucleotide: Ptpn6-2664
ccacuguguagcguccaccc

SEQ ID NO: 23228 - RNA, 21 nt, Artificial Sequence
  Synthetic oligonucleotide: Ptpn6-3895
cccacuguguagcguccaccc

SEQ ID NO: 23229 - RNA, 22 nt, Artificial Sequence
  Synthetic oligonucleotide: Ptpn6-3896
acccacuguguagcguccaccc

SEQ ID NO: 23230 - RNA, 23 nt, Artificial Sequence
  Synthetic oligonucleotide: Ptpn6-3897
cacccacuguguagcguccaccc

SEQ ID NO: 23231 - RNA, 24 nt, Artificial Sequence
  Synthetic oligonucleotide: Ptpn6-3898
ccacccacuguguagcguccaccc

SEQ ID NO: 23232 - RNA, 18 nt, Artificial Sequence
  Synthetic oligonucleotide: Ptpn6-3899
ccagccuuggcuguaucc

SEQ ID NO: 23233 - RNA, 19 nt, Artificial Sequence
  Synthetic oligonucleotide: Ptpn6-3900
gccagccuuggcuguaucc

SEQ ID NO: 23234 - RNA, 20 nt, Artificial Sequence
  Synthetic oligonucleotide: Ptpn6-897
agccagccuuggcuguaucc

SEQ ID NO: 23235 - RNA, 21 nt, Artificial Sequence
  Synthetic oligonucleotide: Ptpn6-3901
aagccagccuuggcuguaucc

SEQ ID NO: 23236 - RNA, 22 nt, Artificial Sequence
  Synthetic oligonucleotide: Ptpn6-3902
gaagccagccuuggcuguaucc

SEQ ID NO: 23237 - RNA, 23 nt, Artificial Sequence
  Synthetic oligonucleotide: Ptpn6-3903
agaagccagccuuggcuguaucc

SEQ ID NO: 23238 - RNA, 24 nt, Artificial Sequence
  Synthetic oligonucleotide: Ptpn6-3904
cagaagccagccuuggcuguaucc

SEQ ID NO: 23239 - RNA, 18 nt, Artificial Sequence
  Synthetic oligonucleotide: Ptpn6-3905
ugcaccucaaacuccucc

SEQ ID NO: 23240 - RNA, 19 nt, Artificial Sequence
  Synthetic oligonucleotide: Ptpn6-3906
augcaccucaaacuccucc

SEQ ID NO: 23241 - RNA, 20 nt, Artificial Sequence
  Synthetic oligonucleotide: Ptpn6-3907
caugcaccucaaacuccucc

SEQ ID NO: 23242 - RNA, 21 nt, Artificial Sequence
  Synthetic oligonucleotide: Ptpn6-3908
ccaugcaccucaaacuccucc

SEQ ID NO: 23243 - RNA, 22 nt, Artificial Sequence
  Synthetic oligonucleotide: Ptpn6-3909
accaugcaccucaaacuccucc

SEQ ID NO: 23244 - RNA, 23 nt, Artificial Sequence
  Synthetic oligonucleotide: Ptpn6-3910
caccaugcaccucaaacuccucc

SEQ ID NO: 23245 - RNA, 24 nt, Artificial Sequence
  Synthetic oligonucleotide: Ptpn6-3911
ccaccaugcaccucaaacuccucc

SEQ ID NO: 23246 - RNA, 18 nt, Artificial Sequence
  Synthetic oligonucleotide: Ptpn6-3912
cucccgaaucaggucucc

SEQ ID NO: 23247 - RNA, 19 nt, Artificial Sequence
  Synthetic oligonucleotide: Ptpn6-3913
ucucccgaaucaggucucc

SEQ ID NO: 23248 - RNA, 20 nt, Artificial Sequence
  Synthetic oligonucleotide: Ptpn6-2673
aucucccgaaucaggucucc

SEQ ID NO: 23249 - RNA, 21 nt, Artificial Sequence
  Synthetic oligonucleotide: Ptpn6-3914
gaucucccgaaucaggucucc

SEQ ID NO: 23250 - RNA, 22 nt, Artificial Sequence
  Synthetic oligonucleotide: Ptpn6-3915
agaucucccgaaucaggucucc

SEQ ID NO: 23251 - RNA, 23 nt, Artificial Sequence
  Synthetic oligonucleotide: Ptpn6-3916
cagaucucccgaaucaggucucc

SEQ ID NO: 23252 - RNA, 24 nt, Artificial Sequence
  Synthetic oligonucleotide: Ptpn6-3917
ccagaucucccgaaucaggucucc

SEQ ID NO: 23253 - RNA, 18 nt, Artificial Sequence
  Synthetic oligonucleotide: Ptpn6-3918
uugguggagauguucucc

SEQ ID NO: 23254 - RNA, 19 nt, Artificial Sequence
  Synthetic oligonucleotide: Ptpn6-3919
cuugguggagauguucucc

SEQ ID NO: 23255 - RNA, 20 nt, Artificial Sequence
  Synthetic oligonucleotide: Ptpn6-871
ccuugguggagauguucucc

SEQ ID NO: 23256 - RNA, 21 nt, Artificial Sequence
  Synthetic oligonucleotide: Ptpn6-3920
cccuugguggagauguucucc

SEQ ID NO: 23257 - RNA, 22 nt, Artificial Sequence
  Synthetic oligonucleotide: Ptpn6-3921
acccuugguggagauguucucc

SEQ ID NO: 23258 - RNA, 23 nt, Artificial Sequence
  Synthetic oligonucleotide: Ptpn6-3922
cacccuugguggagauguucucc

SEQ ID NO: 23259 - RNA, 24 nt, Artificial Sequence
  Synthetic oligonucleotide: Ptpn6-3923
ucacccuugguggagauguucucc

SEQ ID NO: 23260 - RNA, 18 nt, Artificial Sequence
  Synthetic oligonucleotide: Ptpn6-3924
aaaugcuccaccaggucc

SEQ ID NO: 23261 - RNA, 19 nt, Artificial Sequence
  Synthetic oligonucleotide: Ptpn6-3925
gaaaugcuccaccaggucc

SEQ ID NO: 23262 - RNA, 20 nt, Artificial Sequence
  Synthetic oligonucleotide: Ptpn6-900
ugaaaugcuccaccaggucc

SEQ ID NO: 23263 - RNA, 21 nt, Artificial Sequence
  Synthetic oligonucleotide: Ptpn6-3926
uugaaaugcuccaccaggucc

SEQ ID NO: 23264 - RNA, 22 nt, Artificial Sequence
  Synthetic oligonucleotide: Ptpn6-3927
cuugaaaugcuccaccaggucc

SEQ ID NO: 23265 - RNA, 23 nt, Artificial Sequence
  Synthetic oligonucleotide: Ptpn6-3928
ucuugaaaugcuccaccaggucc

SEQ ID NO: 23266 - RNA, 24 nt, Artificial Sequence
  Synthetic oligonucleotide: Ptpn6-3929
uucuugaaaugcuccaccaggucc

SEQ ID NO: 23267 - RNA, 18 nt, Artificial Sequence
  Synthetic oligonucleotide: Ptpn6-3930
cgcugguugaucuggucc

SEQ ID NO: 23268 - RNA, 19 nt, Artificial Sequence
  Synthetic oligonucleotide: Ptpn6-3931
ccgcugguugaucuggucc

SEQ ID NO: 23269 - RNA, 20 nt, Artificial Sequence
  Synthetic oligonucleotide: Ptpn6-364
gccgcugguugaucuggucc

SEQ ID NO: 23270 - RNA, 21 nt, Artificial Sequence
  Synthetic oligonucleotide: Ptpn6-3932
ugccgcugguugaucuggucc

SEQ ID NO: 23271 - RNA, 22 nt, Artificial Sequence
  Synthetic oligonucleotide: Ptpn6-3933
cugccgcugguugaucuggucc

SEQ ID NO: 23272 - RNA, 23 nt, Artificial Sequence
  Synthetic oligonucleotide: Ptpn6-3934
ccugccgcugguugaucuggucc

SEQ ID NO: 23273 - RNA, 24 nt, Artificial Sequence
  Synthetic oligonucleotide: Ptpn6-3935
uccugccgcugguugaucuggucc

SEQ ID NO: 23274 - RNA, 18 nt, Artificial Sequence
  Synthetic oligonucleotide: Ptpn6-3936
ccacucacauuguccagc

SEQ ID NO: 23275 - RNA, 19 nt, Artificial Sequence
  Synthetic oligonucleotide: Ptpn6-3937
gccacucacauuguccagc

SEQ ID NO: 23276 - RNA, 20 nt, Artificial Sequence
  Synthetic oligonucleotide: Ptpn6-2675
ggccacucacauuguccagc

SEQ ID NO: 23277 - RNA, 21 nt, Artificial Sequence
  Synthetic oligonucleotide: Ptpn6-3938
gggccacucacauuguccagc

SEQ ID NO: 23278 - RNA, 22 nt, Artificial Sequence
  Synthetic oligonucleotide: Ptpn6-3939
ggggccacucacauuguccagc

SEQ ID NO: 23279 - RNA, 23 nt, Artificial Sequence
  Synthetic oligonucleotide: Ptpn6-3940
gggggccacucacauuguccagc

SEQ ID NO: 23280 - RNA, 24 nt, Artificial Sequence
  Synthetic oligonucleotide: Ptpn6-3941
ugggggccacucacauuguccagc

SEQ ID NO: 23281 - RNA, 18 nt, Artificial Sequence
  Synthetic oligonucleotide: Ptpn6-3942
gcagguagacaaaggcgc

SEQ ID NO: 23282 - RNA, 19 nt, Artificial Sequence
  Synthetic oligonucleotide: Ptpn6-3943
cgcagguagacaaaggcgc

SEQ ID NO: 23283 - RNA, 20 nt, Artificial Sequence
  Synthetic oligonucleotide: Ptpn6-898
ccgcagguagacaaaggcgc

SEQ ID NO: 23284 - RNA, 21 nt, Artificial Sequence
  Synthetic oligonucleotide: Ptpn6-3944
gccgcagguagacaaaggcgc

SEQ ID NO: 23285 - RNA, 22 nt, Artificial Sequence
  Synthetic oligonucleotide: Ptpn6-3945
ugccgcagguagacaaaggcgc

SEQ ID NO: 23286 - RNA, 23 nt, Artificial Sequence
  Synthetic oligonucleotide: Ptpn6-3946
cugccgcagguagacaaaggcgc

SEQ ID NO: 23287 - RNA, 24 nt, Artificial Sequence
  Synthetic oligonucleotide: Ptpn6-3947
ccugccgcagguagacaaaggcgc

SEQ ID NO: 23288 - RNA, 18 nt, Artificial Sequence
  Synthetic oligonucleotide: Ptpn6-3948
augggcauucuucauggc

SEQ ID NO: 23289 - RNA, 19 nt, Artificial Sequence
  Synthetic oligonucleotide: Ptpn6-3949
caugggcauucuucauggc

SEQ ID NO: 23290 - RNA, 20 nt, Artificial Sequence
  Synthetic oligonucleotide: Ptpn6-344
gcaugggcauucuucauggc

SEQ ID NO: 23291 - RNA, 21 nt, Artificial Sequence
  Synthetic oligonucleotide: Ptpn6-3950
ggcaugggcauucuucauggc

SEQ ID NO: 23292 - RNA, 22 nt, Artificial Sequence
  Synthetic oligonucleotide: Ptpn6-3951
uggcaugggcauucuucauggc

SEQ ID NO: 23293 - RNA, 23 nt, Artificial Sequence
  Synthetic oligonucleotide: Ptpn6-3952
uuggcaugggcauucuucauggc

SEQ ID NO: 23294 - RNA, 24 nt, Artificial Sequence
  Synthetic oligonucleotide: Ptpn6-3953
cuuggcaugggcauucuucauggc

SEQ ID NO: 23295 - RNA, 18 nt, Artificial Sequence
  Synthetic oligonucleotide: Ptpn6-3954
ggugcgggaggccuuggc

SEQ ID NO: 23296 - RNA, 19 nt, Artificial Sequence
  Synthetic oligonucleotide: Ptpn6-3955
aggugcgggaggccuuggc

SEQ ID NO: 23297 - RNA, 20 nt, Artificial Sequence
  Synthetic oligonucleotide: Ptpn6-860
gaggugcgggaggccuuggc

SEQ ID NO: 23298 - RNA, 21 nt, Artificial Sequence
  Synthetic oligonucleotide: Ptpn6-3956
cgaggugcgggaggccuuggc

SEQ ID NO: 23299 - RNA, 22 nt, Artificial Sequence
  Synthetic oligonucleotide: Ptpn6-3957
acgaggugcgggaggccuuggc

SEQ ID NO: 23300 - RNA, 23 nt, Artificial Sequence
  Synthetic oligonucleotide: Ptpn6-3958
gacgaggugcgggaggccuuggc

SEQ ID NO: 23301 - RNA, 24 nt, Artificial Sequence
  Synthetic oligonucleotide: Ptpn6-3959
ggacgaggugcgggaggccuuggc

SEQ ID NO: 23302 - RNA, 18 nt, Artificial Sequence
  Synthetic oligonucleotide: Ptpn6-3960
ccuccgucugcaccaugc

SEQ ID NO: 23303 - RNA, 19 nt, Artificial Sequence
  Synthetic oligonucleotide: Ptpn6-3961
gccuccgucugcaccaugc

SEQ ID NO: 23304 - RNA, 20 nt, Artificial Sequence
  Synthetic oligonucleotide: Ptpn6-868
cgccuccgucugcaccaugc

SEQ ID NO: 23305 - RNA, 21 nt, Artificial Sequence
  Synthetic oligonucleotide: Ptpn6-3962
gcgccuccgucugcaccaugc

SEQ ID NO: 23306 - RNA, 22 nt, Artificial Sequence
  Synthetic oligonucleotide: Ptpn6-3963
ugcgccuccgucugcaccaugc

SEQ ID NO: 23307 - RNA, 23 nt, Artificial Sequence
  Synthetic oligonucleotide: Ptpn6-3964
cugcgccuccgucugcaccaugc

SEQ ID NO: 23308 - RNA, 24 nt, Artificial Sequence
  Synthetic oligonucleotide: Ptpn6-3965
acugcgccuccgucugcaccaugc

SEQ ID NO: 23309 - RNA, 18 nt, Artificial Sequence
  Synthetic oligonucleotide: Ptpn6-3966
cacgaugaugggcccugc

SEQ ID NO: 23310 - RNA, 19 nt, Artificial Sequence
  Synthetic oligonucleotide: Ptpn6-3967
gcacgaugaugggcccugc

SEQ ID NO: 23311 - RNA, 20 nt, Artificial Sequence
  Synthetic oligonucleotide: Ptpn6-872
ugcacgaugaugggcccugc

SEQ ID NO: 23312 - RNA, 21 nt, Artificial Sequence
  Synthetic oligonucleotide: Ptpn6-3968
gugcacgaugaugggcccugc

SEQ ID NO: 23313 - RNA, 22 nt, Artificial Sequence
  Synthetic oligonucleotide: Ptpn6-3969
agugcacgaugaugggcccugc

SEQ ID NO: 23314 - RNA, 23 nt, Artificial Sequence
  Synthetic oligonucleotide: Ptpn6-3970
cagugcacgaugaugggcccugc

SEQ ID NO: 23315 - RNA, 24 nt, Artificial Sequence
  Synthetic oligonucleotide: Ptpn6-3971
gcagugcacgaugaugggcccugc

SEQ ID NO: 23316 - RNA, 18 nt, Artificial Sequence
  Synthetic oligonucleotide: Ptpn6-3972
uccugccacgccaucugc

SEQ ID NO: 23317 - RNA, 19 nt, Artificial Sequence
  Synthetic oligonucleotide: Ptpn6-3973
cuccugccacgccaucugc

SEQ ID NO: 23318 - RNA, 20 nt, Artificial Sequence
  Synthetic oligonucleotide: Ptpn6-890
ucuccugccacgccaucugc

SEQ ID NO: 23319 - RNA, 21 nt, Artificial Sequence
  Synthetic oligonucleotide: Ptpn6-3974
uucuccugccacgccaucugc

SEQ ID NO: 23320 - RNA, 22 nt, Artificial Sequence
  Synthetic oligonucleotide: Ptpn6-3975
guucuccugccacgccaucugc

SEQ ID NO: 23321 - RNA, 23 nt, Artificial Sequence
  Synthetic oligonucleotide: Ptpn6-3976
uguucuccugccacgccaucugc

SEQ ID NO: 23322 - RNA, 24 nt, Artificial Sequence
  Synthetic oligonucleotide: Ptpn6-3977
cuguucuccugccacgccaucugc

SEQ ID NO: 23323 - RNA, 18 nt, Artificial Sequence
  Synthetic oligonucleotide: Ptpn6-3978
cucacuuggacgaggugc

SEQ ID NO: 23324 - RNA, 19 nt, Artificial Sequence
  Synthetic oligonucleotide: Ptpn6-3979
acucacuuggacgaggugc

SEQ ID NO: 23325 - RNA, 20 nt, Artificial Sequence
  Synthetic oligonucleotide: Ptpn6-2685
cacucacuuggacgaggugc

SEQ ID NO: 23326 - RNA, 21 nt, Artificial Sequence
  Synthetic oligonucleotide: Ptpn6-3980
ccacucacuuggacgaggugc

SEQ ID NO: 23327 - RNA, 22 nt, Artificial Sequence
  Synthetic oligonucleotide: Ptpn6-3981
gccacucacuuggacgaggugc

SEQ ID NO: 23328 - RNA, 23 nt, Artificial Sequence
  Synthetic oligonucleotide: Ptpn6-3982
ggccacucacuuggacgaggugc

SEQ ID NO: 23329 - RNA, 24 nt, Artificial Sequence
  Synthetic oligonucleotide: Ptpn6-3983
gggccacucacuuggacgaggugc

SEQ ID NO: 23330 - RNA, 18 nt, Artificial Sequence
  Synthetic oligonucleotide: Ptpn6-3984
agcaccgcucacuuccuc

SEQ ID NO: 23331 - RNA, 19 nt, Artificial Sequence
  Synthetic oligonucleotide: Ptpn6-3985
cagcaccgcucacuuccuc

SEQ ID NO: 23332 - RNA, 20 nt, Artificial Sequence
  Synthetic oligonucleotide: Ptpn6-3986
acagcaccgcucacuuccuc

SEQ ID NO: 23333 - RNA, 21 nt, Artificial Sequence
  Synthetic oligonucleotide: Ptpn6-3987
gacagcaccgcucacuuccuc

SEQ ID NO: 23334 - RNA, 22 nt, Artificial Sequence
  Synthetic oligonucleotide: Ptpn6-3988
ggacagcaccgcucacuuccuc

SEQ ID NO: 23335 - RNA, 23 nt, Artificial Sequence
  Synthetic oligonucleotide: Ptpn6-3989
aggacagcaccgcucacuuccuc

SEQ ID NO: 23336 - RNA, 24 nt, Artificial Sequence
  Synthetic oligonucleotide: Ptpn6-3990
gaggacagcaccgcucacuuccuc

SEQ ID NO: 23337 - RNA, 18 nt, Artificial Sequence
  Synthetic oligonucleotide: Ptpn6-3991
ucucccgaaucaggucuc

SEQ ID NO: 23338 - RNA, 19 nt, Artificial Sequence
  Synthetic oligonucleotide: Ptpn6-3992
aucucccgaaucaggucuc

SEQ ID NO: 23339 - RNA, 20 nt, Artificial Sequence
  Synthetic oligonucleotide: Ptpn6-2688
gaucucccgaaucaggucuc

SEQ ID NO: 23340 - RNA, 21 nt, Artificial Sequence
  Synthetic oligonucleotide: Ptpn6-3993
agaucucccgaaucaggucuc

SEQ ID NO: 23341 - RNA, 22 nt, Artificial Sequence
  Synthetic oligonucleotide: Ptpn6-3994
cagaucucccgaaucaggucuc

SEQ ID NO: 23342 - RNA, 23 nt, Artificial Sequence
  Synthetic oligonucleotide: Ptpn6-3995
ccagaucucccgaaucaggucuc

SEQ ID NO: 23343 - RNA, 24 nt, Artificial Sequence
  Synthetic oligonucleotide: Ptpn6-3996
gccagaucucccgaaucaggucuc

SEQ ID NO: 23344 - RNA, 18 nt, Artificial Sequence
  Synthetic oligonucleotide: Ptpn6-3997
ccgcugguugaucugguc

SEQ ID NO: 23345 - RNA, 19 nt, Artificial Sequence
  Synthetic oligonucleotide: Ptpn6-3998
gccgcugguugaucugguc

SEQ ID NO: 23346 - RNA, 20 nt, Artificial Sequence
  Synthetic oligonucleotide: Ptpn6-873
ugccgcugguugaucugguc

SEQ ID NO: 23347 - RNA, 21 nt, Artificial Sequence
  Synthetic oligonucleotide: Ptpn6-3999
cugccgcugguugaucugguc

SEQ ID NO: 23348 - RNA, 22 nt, Artificial Sequence
  Synthetic oligonucleotide: Ptpn6-4000
ccugccgcugguugaucugguc

SEQ ID NO: 23349 - RNA, 23 nt, Artificial Sequence
  Synthetic oligonucleotide: Ptpn6-4001
uccugccgcugguugaucugguc

SEQ ID NO: 23350 - RNA, 24 nt, Artificial Sequence
  Synthetic oligonucleotide: Ptpn6-4002
uuccugccgcugguugaucugguc

SEQ ID NO: 23351 - RNA, 18 nt, Artificial Sequence
  Synthetic oligonucleotide: Ptpn6-4003
uccucaauccccgucuuc

SEQ ID NO: 23352 - RNA, 19 nt, Artificial Sequence
  Synthetic oligonucleotide: Ptpn6-4004
cuccucaauccccgucuuc

SEQ ID NO: 23353 - RNA, 20 nt, Artificial Sequence
  Synthetic oligonucleotide: Ptpn6-899
ccuccucaauccccgucuuc

SEQ ID NO: 23354 - RNA, 21 nt, Artificial Sequence
  Synthetic oligonucleotide: Ptpn6-4005
gccuccucaauccccgucuuc

SEQ ID NO: 23355 - RNA, 22 nt, Artificial Sequence
  Synthetic oligonucleotide: Ptpn6-4006
ggccuccucaauccccgucuuc

SEQ ID NO: 23356 - RNA, 23 nt, Artificial Sequence
  Synthetic oligonucleotide: Ptpn6-4007
aggccuccucaauccccgucuuc

SEQ ID NO: 23357 - RNA, 24 nt, Artificial Sequence
  Synthetic oligonucleotide: Ptpn6-4008
gaggccuccucaauccccgucuuc

SEQ ID NO: 23358 - RNA, 18 nt, Artificial Sequence
  Synthetic oligonucleotide: Ptpn6-4009
uugaucugguccaggaag

SEQ ID NO: 23359 - RNA, 19 nt, Artificial Sequence
  Synthetic oligonucleotide: Ptpn6-4010
guugaucugguccaggaag

SEQ ID NO: 23360 - RNA, 20 nt, Artificial Sequence
  Synthetic oligonucleotide: Ptpn6-875
gguugaucugguccaggaag

SEQ ID NO: 23361 - RNA, 21 nt, Artificial Sequence
  Synthetic oligonucleotide: Ptpn6-4011
ugguugaucugguccaggaag

SEQ ID NO: 23362 - RNA, 22 nt, Artificial Sequence
  Synthetic oligonucleotide: Ptpn6-4012
cugguugaucugguccaggaag

SEQ ID NO: 23363 - RNA, 23 nt, Artificial Sequence
  Synthetic oligonucleotide: Ptpn6-4013
gcugguugaucugguccaggaag

SEQ ID NO: 23364 - RNA, 24 nt, Artificial Sequence
  Synthetic oligonucleotide: Ptpn6-4014
cgcugguugaucugguccaggaag

SEQ ID NO: 23365 - RNA, 18 nt, Artificial Sequence
  Synthetic oligonucleotide: Ptpn6-4015
cagccugggugcucacag

SEQ ID NO: 23366 - RNA, 19 nt, Artificial Sequence
  Synthetic oligonucleotide: Ptpn6-4016
gcagccugggugcucacag

SEQ ID NO: 23367 - RNA, 20 nt, Artificial Sequence
  Synthetic oligonucleotide: Ptpn6-2692
ggcagccugggugcucacag

SEQ ID NO: 23368 - RNA, 21 nt, Artificial Sequence
  Synthetic oligonucleotide: Ptpn6-4017
gggcagccugggugcucacag

SEQ ID NO: 23369 - RNA, 22 nt, Artificial Sequence
  Synthetic oligonucleotide: Ptpn6-4018
ggggcagccugggugcucacag

SEQ ID NO: 23370 - RNA, 23 nt, Artificial Sequence
  Synthetic oligonucleotide: Ptpn6-4019
uggggcagccugggugcucacag

SEQ ID NO: 23371 - RNA, 24 nt, Artificial Sequence
  Synthetic oligonucleotide: Ptpn6-4020
auggggcagccugggugcucacag

SEQ ID NO: 23372 - RNA, 18 nt, Artificial Sequence
  Synthetic oligonucleotide: Ptpn6-4021
gucaaugucacaguccag

SEQ ID NO: 23373 - RNA, 19 nt, Artificial Sequence
  Synthetic oligonucleotide: Ptpn6-4022
ugucaaugucacaguccag

SEQ ID NO: 23374 - RNA, 20 nt, Artificial Sequence
  Synthetic oligonucleotide: Ptpn6-4023
augucaaugucacaguccag

SEQ ID NO: 23375 - RNA, 21 nt, Artificial Sequence
  Synthetic oligonucleotide: Ptpn6-4024
gaugucaaugucacaguccag

SEQ ID NO: 23376 - RNA, 22 nt, Artificial Sequence
  Synthetic oligonucleotide: Ptpn6-4025
ggaugucaaugucacaguccag

SEQ ID NO: 23377 - RNA, 23 nt, Artificial Sequence
  Synthetic oligonucleotide: Ptpn6-4026
uggaugucaaugucacaguccag

SEQ ID NO: 23378 - RNA, 24 nt, Artificial Sequence
  Synthetic oligonucleotide: Ptpn6-4027
cuggaugucaaugucacaguccag

SEQ ID NO: 23379 - RNA, 18 nt, Artificial Sequence
  Synthetic oligonucleotide: Ptpn6-4028
gccacucacauuguccag

SEQ ID NO: 23380 - RNA, 19 nt, Artificial Sequence
  Synthetic oligonucleotide: Ptpn6-4029
ggccacucacauuguccag

SEQ ID NO: 23381 - RNA, 20 nt, Artificial Sequence
  Synthetic oligonucleotide: Ptpn6-2693
gggccacucacauuguccag

SEQ ID NO: 23382 - RNA, 21 nt, Artificial Sequence
  Synthetic oligonucleotide: Ptpn6-4030
ggggccacucacauuguccag

SEQ ID NO: 23383 - RNA, 22 nt, Artificial Sequence
  Synthetic oligonucleotide: Ptpn6-4031
gggggccacucacauuguccag

SEQ ID NO: 23384 - RNA, 23 nt, Artificial Sequence
  Synthetic oligonucleotide: Ptpn6-4032
ugggggccacucacauuguccag

SEQ ID NO: 23385 - RNA, 24 nt, Artificial Sequence
  Synthetic oligonucleotide: Ptpn6-4033
gugggggccacucacauuguccag

SEQ ID NO: 23386 - RNA, 18 nt, Artificial Sequence
  Synthetic oligonucleotide: Ptpn6-4034
ccgcaguuggucacagag

SEQ ID NO: 23387 - RNA, 19 nt, Artificial Sequence
  Synthetic oligonucleotide: Ptpn6-4035
cccgcaguuggucacagag

SEQ ID NO: 23388 - RNA, 20 nt, Artificial Sequence
  Synthetic oligonucleotide: Ptpn6-885
ccccgcaguuggucacagag

SEQ ID NO: 23389 - RNA, 21 nt, Artificial Sequence
  Synthetic oligonucleotide: Ptpn6-4036
uccccgcaguuggucacagag

SEQ ID NO: 23390 - RNA, 22 nt, Artificial Sequence
  Synthetic oligonucleotide: Ptpn6-4037
cuccccgcaguuggucacagag

SEQ ID NO: 23391 - RNA, 23 nt, Artificial Sequence
  Synthetic oligonucleotide: Ptpn6-4038
gcuccccgcaguuggucacagag

SEQ ID NO: 23392 - RNA, 24 nt, Artificial Sequence
  Synthetic oligonucleotide: Ptpn6-4039
ugcuccccgcaguuggucacagag

SEQ ID NO: 23393 - RNA, 18 nt, Artificial Sequence
  Synthetic oligonucleotide: Ptpn6-4040
ugggcgauggccacguag

SEQ ID NO: 23394 - RNA, 19 nt, Artificial Sequence
  Synthetic oligonucleotide: Ptpn6-4041
cugggcgauggccacguag

SEQ ID NO: 23395 - RNA, 20 nt, Artificial Sequence
  Synthetic oligonucleotide: Ptpn6-867
acugggcgauggccacguag

SEQ ID NO: 23396 - RNA, 21 nt, Artificial Sequence
  Synthetic oligonucleotide: Ptpn6-4042
aacugggcgauggccacguag

SEQ ID NO: 23397 - RNA, 22 nt, Artificial Sequence
  Synthetic oligonucleotide: Ptpn6-4043
gaacugggcgauggccacguag

SEQ ID NO: 23398 - RNA, 23 nt, Artificial Sequence
  Synthetic oligonucleotide: Ptpn6-4044
ugaacugggcgauggccacguag

SEQ ID NO: 23399 - RNA, 24 nt, Artificial Sequence
  Synthetic oligonucleotide: Ptpn6-4045
augaacugggcgauggccacguag

SEQ ID NO: 23400 - RNA, 18 nt, Artificial Sequence
  Synthetic oligonucleotide: Ptpn6-4046
uaguuggcauugauguag

SEQ ID NO: 23401 - RNA, 19 nt, Artificial Sequence
  Synthetic oligonucleotide: Ptpn6-4047
guaguuggcauugauguag

SEQ ID NO: 23402 - RNA, 20 nt, Artificial Sequence
  Synthetic oligonucleotide: Ptpn6-892
uguaguuggcauugauguag

SEQ ID NO: 23403 - RNA, 21 nt, Artificial Sequence
  Synthetic oligonucleotide: Ptpn6-4048
auguaguuggcauugauguag

SEQ ID NO: 23404 - RNA, 22 nt, Artificial Sequence
  Synthetic oligonucleotide: Ptpn6-4049
gauguaguuggcauugauguag

SEQ ID NO: 23405 - RNA, 23 nt, Artificial Sequence
  Synthetic oligonucleotide: Ptpn6-4050
ugauguaguuggcauugauguag

SEQ ID NO: 23406 - RNA, 24 nt, Artificial Sequence
  Synthetic oligonucleotide: Ptpn6-4051
uugauguaguuggcauugauguag

SEQ ID NO: 23407 - RNA, 18 nt, Artificial Sequence
  Synthetic oligonucleotide: Ptpn6-4052
cacucacauuguccagcg

SEQ ID NO: 23408 - RNA, 19 nt, Artificial Sequence
  Synthetic oligonucleotide: Ptpn6-4053
ccacucacauuguccagcg

SEQ ID NO: 23409 - RNA, 20 nt, Artificial Sequence
  Synthetic oligonucleotide: Ptpn6-2704
gccacucacauuguccagcg

SEQ ID NO: 23410 - RNA, 21 nt, Artificial Sequence
  Synthetic oligonucleotide: Ptpn6-4054
ggccacucacauuguccagcg

SEQ ID NO: 23411 - RNA, 22 nt, Artificial Sequence
  Synthetic oligonucleotide: Ptpn6-4055
gggccacucacauuguccagcg

SEQ ID NO: 23412 - RNA, 23 nt, Artificial Sequence
  Synthetic oligonucleotide: Ptpn6-4056
ggggccacucacauuguccagcg

SEQ ID NO: 23413 - RNA, 24 nt, Artificial Sequence
  Synthetic oligonucleotide: Ptpn6-4057
gggggccacucacauuguccagcg

SEQ ID NO: 23414 - RNA, 18 nt, Artificial Sequence
  Synthetic oligonucleotide: Ptpn6-4058
uguagcguccacccuggg

SEQ ID NO: 23415 - RNA, 19 nt, Artificial Sequence
  Synthetic oligonucleotide: Ptpn6-4059
guguagcguccacccuggg

SEQ ID NO: 23416 - RNA, 20 nt, Artificial Sequence
  Synthetic oligonucleotide: Ptpn6-2720
uguguagcguccacccuggg

SEQ ID NO: 23417 - RNA, 21 nt, Artificial Sequence
  Synthetic oligonucleotide: Ptpn6-4060
cuguguagcguccacccuggg

SEQ ID NO: 23418 - RNA, 22 nt, Artificial Sequence
  Synthetic oligonucleotide: Ptpn6-4061
acuguguagcguccacccuggg

SEQ ID NO: 23419 - RNA, 23 nt, Artificial Sequence
  Synthetic oligonucleotide: Ptpn6-4062
cacuguguagcguccacccuggg

SEQ ID NO: 23420 - RNA, 24 nt, Artificial Sequence
  Synthetic oligonucleotide: Ptpn6-4063
ccacuguguagcguccacccuggg

SEQ ID NO: 23421 - RNA, 18 nt, Artificial Sequence
  Synthetic oligonucleotide: Ptpn6-4064
caaacucugagauguggg

SEQ ID NO: 23422 - RNA, 19 nt, Artificial Sequence
  Synthetic oligonucleotide: Ptpn6-4065
gcaaacucugagauguggg

SEQ ID NO: 23423 - RNA, 20 nt, Artificial Sequence
  Synthetic oligonucleotide: Ptpn6-2723
ugcaaacucugagauguggg

SEQ ID NO: 23424 - RNA, 21 nt, Artificial Sequence
  Synthetic oligonucleotide: Ptpn6-4066
cugcaaacucugagauguggg

SEQ ID NO: 23425 - RNA, 22 nt, Artificial Sequence
  Synthetic oligonucleotide: Ptpn6-4067
ucugcaaacucugagauguggg

SEQ ID NO: 23426 - RNA, 23 nt, Artificial Sequence
  Synthetic oligonucleotide: Ptpn6-4068
uucugcaaacucugagauguggg

SEQ ID NO: 23427 - RNA, 24 nt, Artificial Sequence
  Synthetic oligonucleotide: Ptpn6-4069
cuucugcaaacucugagauguggg

SEQ ID NO: 23428 - RNA, 18 nt, Artificial Sequence
  Synthetic oligonucleotide: Ptpn6-4070
ucacuggggaccccaugg

SEQ ID NO: 23429 - RNA, 19 nt, Artificial Sequence
  Synthetic oligonucleotide: Ptpn6-4071
cucacuggggaccccaugg

SEQ ID NO: 23430 - RNA, 20 nt, Artificial Sequence
  Synthetic oligonucleotide: Ptpn6-880
gcucacuggggaccccaugg

SEQ ID NO: 23431 - RNA, 21 nt, Artificial Sequence
  Synthetic oligonucleotide: Ptpn6-4072
ggcucacuggggaccccaugg

SEQ ID NO: 23432 - RNA, 22 nt, Artificial Sequence
  Synthetic oligonucleotide: Ptpn6-4073
aggcucacuggggaccccaugg

SEQ ID NO: 23433 - RNA, 23 nt, Artificial Sequence
  Synthetic oligonucleotide: Ptpn6-4074
caggcucacuggggaccccaugg

SEQ ID NO: 23434 - RNA, 24 nt, Artificial Sequence
  Synthetic oligonucleotide: Ptpn6-4075
ccaggcucacuggggaccccaugg

SEQ ID NO: 23435 - RNA, 18 nt, Artificial Sequence
  Synthetic oligonucleotide: Ptpn6-4076
caugggcauucuucaugg

SEQ ID NO: 23436 - RNA, 19 nt, Artificial Sequence
  Synthetic oligonucleotide: Ptpn6-4077
gcaugggcauucuucaugg

SEQ ID NO: 23437 - RNA, 20 nt, Artificial Sequence
  Synthetic oligonucleotide: Ptpn6-861
ggcaugggcauucuucaugg

SEQ ID NO: 23438 - RNA, 21 nt, Artificial Sequence
  Synthetic oligonucleotide: Ptpn6-4078
uggcaugggcauucuucaugg

SEQ ID NO: 23439 - RNA, 22 nt, Artificial Sequence
  Synthetic oligonucleotide: Ptpn6-4079
uuggcaugggcauucuucaugg

SEQ ID NO: 23440 - RNA, 23 nt, Artificial Sequence
  Synthetic oligonucleotide: Ptpn6-4080
cuuggcaugggcauucuucaugg

SEQ ID NO: 23441 - RNA, 24 nt, Artificial Sequence
  Synthetic oligonucleotide: Ptpn6-4081
ccuuggcaugggcauucuucaugg

SEQ ID NO: 23442 - RNA, 18 nt, Artificial Sequence
  Synthetic oligonucleotide: Ptpn6-4082
guguagcguccacccugg

SEQ ID NO: 23443 - RNA, 19 nt, Artificial Sequence
  Synthetic oligonucleotide: Ptpn6-4083
uguguagcguccacccugg

SEQ ID NO: 23444 - RNA, 20 nt, Artificial Sequence
  Synthetic oligonucleotide: Ptpn6-2726
cuguguagcguccacccugg

SEQ ID NO: 23445 - RNA, 21 nt, Artificial Sequence
  Synthetic oligonucleotide: Ptpn6-4084
acuguguagcguccacccugg

SEQ ID NO: 23446 - RNA, 22 nt, Artificial Sequence
  Synthetic oligonucleotide: Ptpn6-4085
cacuguguagcguccacccugg

SEQ ID NO: 23447 - RNA, 23 nt, Artificial Sequence
  Synthetic oligonucleotide: Ptpn6-4086
ccacuguguagcguccacccugg

SEQ ID NO: 23448 - RNA, 24 nt, Artificial Sequence
  Synthetic oligonucleotide: Ptpn6-4087
cccacuguguagcguccacccugg

SEQ ID NO: 23449 - RNA, 18 nt, Artificial Sequence
  Synthetic oligonucleotide: Ptpn6-4088
gcaaacucugagaugugg

SEQ ID NO: 23450 - RNA, 19 nt, Artificial Sequence
  Synthetic oligonucleotide: Ptpn6-4089
ugcaaacucugagaugugg

SEQ ID NO: 23451 - RNA, 20 nt, Artificial Sequence
  Synthetic oligonucleotide: Ptpn6-4090
cugcaaacucugagaugugg

SEQ ID NO: 23452 - RNA, 21 nt, Artificial Sequence
  Synthetic oligonucleotide: Ptpn6-4091
ucugcaaacucugagaugugg

SEQ ID NO: 23453 - RNA, 22 nt, Artificial Sequence
  Synthetic oligonucleotide: Ptpn6-4092
uucugcaaacucugagaugugg

SEQ ID NO: 23454 - RNA, 23 nt, Artificial Sequence
  Synthetic oligonucleotide: Ptpn6-4093
cuucugcaaacucugagaugugg

SEQ ID NO: 23455 - RNA, 24 nt, Artificial Sequence
  Synthetic oligonucleotide: Ptpn6-4094
gcuucugcaaacucugagaugugg

SEQ ID NO: 23456 - RNA, 18 nt, Artificial Sequence
  Synthetic oligonucleotide: Ptpn6-4095
ucagggccacucacuugg

SEQ ID NO: 23457 - RNA, 19 nt, Artificial Sequence
  Synthetic oligonucleotide: Ptpn6-4096
gucagggccacucacuugg

SEQ ID NO: 23458 - RNA, 20 nt, Artificial Sequence
  Synthetic oligonucleotide: Ptpn6-4097
agucagggccacucacuugg

SEQ ID NO: 23459 - RNA, 21 nt, Artificial Sequence
  Synthetic oligonucleotide: Ptpn6-4098
cagucagggccacucacuugg

SEQ ID NO: 23460 - RNA, 22 nt, Artificial Sequence
  Synthetic oligonucleotide: Ptpn6-4099
gcagucagggccacucacuugg

SEQ ID NO: 23461 - RNA, 23 nt, Artificial Sequence
  Synthetic oligonucleotide: Ptpn6-4100
ggcagucagggccacucacuugg

SEQ ID NO: 23462 - RNA, 24 nt, Artificial Sequence
  Synthetic oligonucleotide: Ptpn6-4101
uggcagucagggccacucacuugg

SEQ ID NO: 23463 - RNA, 18 nt, Artificial Sequence
  Synthetic oligonucleotide: Ptpn6-4102
ggugccccucacccuugg

SEQ ID NO: 23464 - RNA, 19 nt, Artificial Sequence
  Synthetic oligonucleotide: Ptpn6-4103
aggugccccucacccuugg

SEQ ID NO: 23465 - RNA, 20 nt, Artificial Sequence
  Synthetic oligonucleotide: Ptpn6-2728
caggugccccucacccuugg

SEQ ID NO: 23466 - RNA, 21 nt, Artificial Sequence
  Synthetic oligonucleotide: Ptpn6-4104
ccaggugccccucacccuugg

SEQ ID NO: 23467 - RNA, 22 nt, Artificial Sequence
  Synthetic oligonucleotide: Ptpn6-4105
cccaggugccccucacccuugg

SEQ ID NO: 23468 - RNA, 23 nt, Artificial Sequence
  Synthetic oligonucleotide: Ptpn6-4106
ccccaggugccccucacccuugg

SEQ ID NO: 23469 - RNA, 24 nt, Artificial Sequence
  Synthetic oligonucleotide: Ptpn6-4107
cccccaggugccccucacccuugg

SEQ ID NO: 23470 - RNA, 18 nt, Artificial Sequence
  Synthetic oligonucleotide: Ptpn6-4108
caccugcagugcacgaug

SEQ ID NO: 23471 - RNA, 19 nt, Artificial Sequence
  Synthetic oligonucleotide: Ptpn6-4109
ucaccugcagugcacgaug

SEQ ID NO: 23472 - RNA, 20 nt, Artificial Sequence
  Synthetic oligonucleotide: Ptpn6-4110
cucaccugcagugcacgaug

SEQ ID NO: 23473 - RNA, 21 nt, Artificial Sequence
  Synthetic oligonucleotide: Ptpn6-4111
ccucaccugcagugcacgaug

SEQ ID NO: 23474 - RNA, 22 nt, Artificial Sequence
  Synthetic oligonucleotide: Ptpn6-4112
uccucaccugcagugcacgaug

SEQ ID NO: 23475 - RNA, 23 nt, Artificial Sequence
  Synthetic oligonucleotide: Ptpn6-4113
auccucaccugcagugcacgaug

SEQ ID NO: 23476 - RNA, 24 nt, Artificial Sequence
  Synthetic oligonucleotide: Ptpn6-4114
cauccucaccugcagugcacgaug

SEQ ID NO: 23477 - RNA, 18 nt, Artificial Sequence
  Synthetic oligonucleotide: Ptpn6-4115
cugcucugcacgcaccug

SEQ ID NO: 23478 - RNA, 19 nt, Artificial Sequence
  Synthetic oligonucleotide: Ptpn6-4116
ccugcucugcacgcaccug

SEQ ID NO: 23479 - RNA, 20 nt, Artificial Sequence
  Synthetic oligonucleotide: Ptpn6-4117
cccugcucugcacgcaccug

SEQ ID NO: 23480 - RNA, 21 nt, Artificial Sequence
  Synthetic oligonucleotide: Ptpn6-4118
gcccugcucugcacgcaccug

SEQ ID NO: 23481 - RNA, 22 nt, Artificial Sequence
  Synthetic oligonucleotide: Ptpn6-4119
ggcccugcucugcacgcaccug

SEQ ID NO: 23482 - RNA, 23 nt, Artificial Sequence
  Synthetic oligonucleotide: Ptpn6-4120
aggcccugcucugcacgcaccug

SEQ ID NO: 23483 - RNA, 24 nt, Artificial Sequence
  Synthetic oligonucleotide: Ptpn6-4121
caggcccugcucugcacgcaccug

SEQ ID NO: 23484 - RNA, 18 nt, Artificial Sequence
  Synthetic oligonucleotide: Ptpn6-4122
uguguagcguccacccug

SEQ ID NO: 23485 - RNA, 19 nt, Artificial Sequence
  Synthetic oligonucleotide: Ptpn6-4123
cuguguagcguccacccug

SEQ ID NO: 23486 - RNA, 20 nt, Artificial Sequence
  Synthetic oligonucleotide: Ptpn6-2734
acuguguagcguccacccug

SEQ ID NO: 23487 - RNA, 21 nt, Artificial Sequence
  Synthetic oligonucleotide: Ptpn6-4124
cacuguguagcguccacccug

SEQ ID NO: 23488 - RNA, 22 nt, Artificial Sequence
  Synthetic oligonucleotide: Ptpn6-4125
ccacuguguagcguccacccug

SEQ ID NO: 23489 - RNA, 23 nt, Artificial Sequence
  Synthetic oligonucleotide: Ptpn6-4126
cccacuguguagcguccacccug

SEQ ID NO: 23490 - RNA, 24 nt, Artificial Sequence
  Synthetic oligonucleotide: Ptpn6-4127
acccacuguguagcguccacccug

SEQ ID NO: 23491 - RNA, 18 nt, Artificial Sequence
  Synthetic oligonucleotide: Ptpn6-4128
accagguccgugaggcug

SEQ ID NO: 23492 - RNA, 19 nt, Artificial Sequence
  Synthetic oligonucleotide: Ptpn6-4129
caccagguccgugaggcug

SEQ ID NO: 23493 - RNA, 20 nt, Artificial Sequence
  Synthetic oligonucleotide: Ptpn6-901
ccaccagguccgugaggcug

SEQ ID NO: 23494 - RNA, 21 nt, Artificial Sequence
  Synthetic oligonucleotide: Ptpn6-4130
uccaccagguccgugaggcug

SEQ ID NO: 23495 - RNA, 22 nt, Artificial Sequence
  Synthetic oligonucleotide: Ptpn6-4131
cuccaccagguccgugaggcug

SEQ ID NO: 23496 - RNA, 23 nt, Artificial Sequence
  Synthetic oligonucleotide: Ptpn6-4132
gcuccaccagguccgugaggcug

SEQ ID NO: 23497 - RNA, 24 nt, Artificial Sequence
  Synthetic oligonucleotide: Ptpn6-4133
ugcuccaccagguccgugaggcug

SEQ ID NO: 23498 - RNA, 18 nt, Artificial Sequence
  Synthetic oligonucleotide: Ptpn6-4134
acucacuuggacgaggug

SEQ ID NO: 23499 - RNA, 19 nt, Artificial Sequence
  Synthetic oligonucleotide: Ptpn6-4135
cacucacuuggacgaggug

SEQ ID NO: 23500 - RNA, 20 nt, Artificial Sequence
  Synthetic oligonucleotide: Ptpn6-2739
ccacucacuuggacgaggug

SEQ ID NO: 23501 - RNA, 21 nt, Artificial Sequence
  Synthetic oligonucleotide: Ptpn6-4136
gccacucacuuggacgaggug

SEQ ID NO: 23502 - RNA, 22 nt, Artificial Sequence
  Synthetic oligonucleotide: Ptpn6-4137
ggccacucacuuggacgaggug

SEQ ID NO: 23503 - RNA, 23 nt, Artificial Sequence
  Synthetic oligonucleotide: Ptpn6-4138
gggccacucacuuggacgaggug

SEQ ID NO: 23504 - RNA, 24 nt, Artificial Sequence
  Synthetic oligonucleotide: Ptpn6-4139
agggccacucacuuggacgaggug

SEQ ID NO: 23505 - RNA, 18 nt, Artificial Sequence
  Synthetic oligonucleotide: Ptpn6-4140
aacucugagaugugggug

SEQ ID NO: 23506 - RNA, 19 nt, Artificial Sequence
  Synthetic oligonucleotide: Ptpn6-4141
aaacucugagaugugggug

SEQ ID NO: 23507 - RNA, 20 nt, Artificial Sequence
  Synthetic oligonucleotide: Ptpn6-2742
caaacucugagaugugggug

SEQ ID NO: 23508 - RNA, 21 nt, Artificial Sequence
  Synthetic oligonucleotide: Ptpn6-4142
gcaaacucugagaugugggug

SEQ ID NO: 23509 - RNA, 22 nt, Artificial Sequence
  Synthetic oligonucleotide: Ptpn6-4143
ugcaaacucugagaugugggug

SEQ ID NO: 23510 - RNA, 23 nt, Artificial Sequence
  Synthetic oligonucleotide: Ptpn6-4144
cugcaaacucugagaugugggug

SEQ ID NO: 23511 - RNA, 24 nt, Artificial Sequence
  Synthetic oligonucleotide: Ptpn6-4145
ucugcaaacucugagaugugggug

SEQ ID NO: 23512 - RNA, 18 nt, Artificial Sequence
  Synthetic oligonucleotide: Ptpn6-4146
aggugccccucacccuug

SEQ ID NO: 23513 - RNA, 19 nt, Artificial Sequence
  Synthetic oligonucleotide: Ptpn6-4147
caggugccccucacccuug

SEQ ID NO: 23514 - RNA, 20 nt, Artificial Sequence
  Synthetic oligonucleotide: Ptpn6-4148
ccaggugccccucacccuug

SEQ ID NO: 23515 - RNA, 21 nt, Artificial Sequence
  Synthetic oligonucleotide: Ptpn6-4149
cccaggugccccucacccuug

SEQ ID NO: 23516 - RNA, 22 nt, Artificial Sequence
  Synthetic oligonucleotide: Ptpn6-4150
ccccaggugccccucacccuug

SEQ ID NO: 23517 - RNA, 23 nt, Artificial Sequence
  Synthetic oligonucleotide: Ptpn6-4151
cccccaggugccccucacccuug

SEQ ID NO: 23518 - RNA, 24 nt, Artificial Sequence
  Synthetic oligonucleotide: Ptpn6-4152
acccccaggugccccucacccuug

SEQ ID NO: 23519 - RNA, 18 nt, Artificial Sequence
  Synthetic oligonucleotide: Ptpn6-4153
accgcucacuuccucuug

SEQ ID NO: 23520 - RNA, 19 nt, Artificial Sequence
  Synthetic oligonucleotide: Ptpn6-4154
caccgcucacuuccucuug

SEQ ID NO: 23521 - RNA, 20 nt, Artificial Sequence
  Synthetic oligonucleotide: Ptpn6-2744
gcaccgcucacuuccucuug

SEQ ID NO: 23522 - RNA, 21 nt, Artificial Sequence
  Synthetic oligonucleotide: Ptpn6-4155
agcaccgcucacuuccucuug

SEQ ID NO: 23523 - RNA, 22 nt, Artificial Sequence
  Synthetic oligonucleotide: Ptpn6-4156
cagcaccgcucacuuccucuug

SEQ ID NO: 23524 - RNA, 23 nt, Artificial Sequence
  Synthetic oligonucleotide: Ptpn6-4157
acagcaccgcucacuuccucuug

SEQ ID NO: 23525 - RNA, 24 nt, Artificial Sequence
  Synthetic oligonucleotide: Ptpn6-4158
gacagcaccgcucacuuccucuug

SEQ ID NO: 23526 - RNA, 18 nt, Artificial Sequence
  Synthetic oligonucleotide: Ptpn6-4159
aggucuuagcguucucau

SEQ ID NO: 23527 - RNA, 19 nt, Artificial Sequence
  Synthetic oligonucleotide: Ptpn6-4160
uaggucuuagcguucucau

SEQ ID NO: 23528 - RNA, 20 nt, Artificial Sequence
  Synthetic oligonucleotide: Ptpn6-891
guaggucuuagcguucucau

SEQ ID NO: 23529 - RNA, 21 nt, Artificial Sequence
  Synthetic oligonucleotide: Ptpn6-4161
uguaggucuuagcguucucau

SEQ ID NO: 23530 - RNA, 22 nt, Artificial Sequence
  Synthetic oligonucleotide: Ptpn6-4162
auguaggucuuagcguucucau

SEQ ID NO: 23531 - RNA, 23 nt, Artificial Sequence
  Synthetic oligonucleotide: Ptpn6-4163
gauguaggucuuagcguucucau

SEQ ID NO: 23532 - RNA, 24 nt, Artificial Sequence
  Synthetic oligonucleotide: Ptpn6-4164
cgauguaggucuuagcguucucau

SEQ ID NO: 23533 - RNA, 18 nt, Artificial Sequence
  Synthetic oligonucleotide: Ptpn6-4165
cuccugcuucugcaaacu

SEQ ID NO: 23534 - RNA, 19 nt, Artificial Sequence
  Synthetic oligonucleotide: Ptpn6-4166
ccuccugcuucugcaaacu

SEQ ID NO: 23535 - RNA, 20 nt, Artificial Sequence
  Synthetic oligonucleotide: Ptpn6-4167
accuccugcuucugcaaacu

SEQ ID NO: 23536 - RNA, 21 nt, Artificial Sequence
  Synthetic oligonucleotide: Ptpn6-4168
caccuccugcuucugcaaacu

SEQ ID NO: 23537 - RNA, 22 nt, Artificial Sequence
  Synthetic oligonucleotide: Ptpn6-4169
ucaccuccugcuucugcaaacu

SEQ ID NO: 23538 - RNA, 23 nt, Artificial Sequence
  Synthetic oligonucleotide: Ptpn6-4170
uucaccuccugcuucugcaaacu

SEQ ID NO: 23539 - RNA, 24 nt, Artificial Sequence
  Synthetic oligonucleotide: Ptpn6-4171
cuucaccuccugcuucugcaaacu

SEQ ID NO: 23540 - RNA, 18 nt, Artificial Sequence
  Synthetic oligonucleotide: Ptpn6-4172
gacacccccaggcucacu

SEQ ID NO: 23541 - RNA, 19 nt, Artificial Sequence
  Synthetic oligonucleotide: Ptpn6-4173
ggacacccccaggcucacu

SEQ ID NO: 23542 - RNA, 20 nt, Artificial Sequence
  Synthetic oligonucleotide: Ptpn6-368
aggacacccccaggcucacu

SEQ ID NO: 23543 - RNA, 21 nt, Artificial Sequence
  Synthetic oligonucleotide: Ptpn6-4174
gaggacacccccaggcucacu

SEQ ID NO: 23544 - RNA, 22 nt, Artificial Sequence
  Synthetic oligonucleotide: Ptpn6-4175
ugaggacacccccaggcucacu

SEQ ID NO: 23545 - RNA, 23 nt, Artificial Sequence
  Synthetic oligonucleotide: Ptpn6-4176
cugaggacacccccaggcucacu

SEQ ID NO: 23546 - RNA, 24 nt, Artificial Sequence
  Synthetic oligonucleotide: Ptpn6-4177
gcugaggacacccccaggcucacu

SEQ ID NO: 23547 - RNA, 18 nt, Artificial Sequence
  Synthetic oligonucleotide: Ptpn6-4178
cuguguagcguccacccu

SEQ ID NO: 23548 - RNA, 19 nt, Artificial Sequence
  Synthetic oligonucleotide: Ptpn6-4179
acuguguagcguccacccu

SEQ ID NO: 23549 - RNA, 20 nt, Artificial Sequence
  Synthetic oligonucleotide: Ptpn6-2752
cacuguguagcguccacccu

SEQ ID NO: 23550 - RNA, 21 nt, Artificial Sequence
  Synthetic oligonucleotide: Ptpn6-4180
ccacuguguagcguccacccu

SEQ ID NO: 23551 - RNA, 22 nt, Artificial Sequence
  Synthetic oligonucleotide: Ptpn6-4181
cccacuguguagcguccacccu

SEQ ID NO: 23552 - RNA, 23 nt, Artificial Sequence
  Synthetic oligonucleotide: Ptpn6-4182
acccacuguguagcguccacccu

SEQ ID NO: 23553 - RNA, 24 nt, Artificial Sequence
  Synthetic oligonucleotide: Ptpn6-4183
cacccacuguguagcguccacccu

SEQ ID NO: 23554 - RNA, 18 nt, Artificial Sequence
  Synthetic oligonucleotide: Ptpn6-4184
gaucugguccaggaagcu

SEQ ID NO: 23555 - RNA, 19 nt, Artificial Sequence
  Synthetic oligonucleotide: Ptpn6-4185
ugaucugguccaggaagcu

SEQ ID NO: 23556 - RNA, 20 nt, Artificial Sequence
  Synthetic oligonucleotide: Ptpn6-876
uugaucugguccaggaagcu

SEQ ID NO: 23557 - RNA, 21 nt, Artificial Sequence
  Synthetic oligonucleotide: Ptpn6-4186
guugaucugguccaggaagcu

SEQ ID NO: 23558 - RNA, 22 nt, Artificial Sequence
  Synthetic oligonucleotide: Ptpn6-4187
gguugaucugguccaggaagcu

SEQ ID NO: 23559 - RNA, 23 nt, Artificial Sequence
  Synthetic oligonucleotide: Ptpn6-4188
ugguugaucugguccaggaagcu

SEQ ID NO: 23560 - RNA, 24 nt, Artificial Sequence
  Synthetic oligonucleotide: Ptpn6-4189
cugguugaucugguccaggaagcu

SEQ ID NO: 23561 - RNA, 18 nt, Artificial Sequence
  Synthetic oligonucleotide: Ptpn6-4190
ugggcauucuucauggcu

SEQ ID NO: 23562 - RNA, 19 nt, Artificial Sequence
  Synthetic oligonucleotide: Ptpn6-4191
augggcauucuucauggcu

SEQ ID NO: 23563 - RNA, 20 nt, Artificial Sequence
  Synthetic oligonucleotide: Ptpn6-345
caugggcauucuucauggcu

SEQ ID NO: 23564 - RNA, 21 nt, Artificial Sequence
  Synthetic oligonucleotide: Ptpn6-4192
gcaugggcauucuucauggcu

SEQ ID NO: 23565 - RNA, 22 nt, Artificial Sequence
  Synthetic oligonucleotide: Ptpn6-4193
ggcaugggcauucuucauggcu

SEQ ID NO: 23566 - RNA, 23 nt, Artificial Sequence
  Synthetic oligonucleotide: Ptpn6-4194
uggcaugggcauucuucauggcu

SEQ ID NO: 23567 - RNA, 24 nt, Artificial Sequence
  Synthetic oligonucleotide: Ptpn6-4195
uuggcaugggcauucuucauggcu

SEQ ID NO: 23568 - RNA, 18 nt, Artificial Sequence
  Synthetic oligonucleotide: Ptpn6-4196
aucucccgaaucaggucu

SEQ ID NO: 23569 - RNA, 19 nt, Artificial Sequence
  Synthetic oligonucleotide: Ptpn6-4197
gaucucccgaaucaggucu

SEQ ID NO: 23570 - RNA, 20 nt, Artificial Sequence
  Synthetic oligonucleotide: Ptpn6-4198
agaucucccgaaucaggucu

SEQ ID NO: 23571 - RNA, 21 nt, Artificial Sequence
  Synthetic oligonucleotide: Ptpn6-4199
cagaucucccgaaucaggucu

SEQ ID NO: 23572 - RNA, 22 nt, Artificial Sequence
  Synthetic oligonucleotide: Ptpn6-4200
ccagaucucccgaaucaggucu

SEQ ID NO: 23573 - RNA, 23 nt, Artificial Sequence
  Synthetic oligonucleotide: Ptpn6-4201
gccagaucucccgaaucaggucu

SEQ ID NO: 23574 - RNA, 24 nt, Artificial Sequence
  Synthetic oligonucleotide: Ptpn6-4202
ugccagaucucccgaaucaggucu

SEQ ID NO: 23575 - RNA, 18 nt, Artificial Sequence
  Synthetic oligonucleotide: Ptpn6-4203
ccgacuccuggcccuucu

SEQ ID NO: 23576 - RNA, 19 nt, Artificial Sequence
  Synthetic oligonucleotide: Ptpn6-4204
uccgacuccuggcccuucu

SEQ ID NO: 23577 - RNA, 20 nt, Artificial Sequence
  Synthetic oligonucleotide: Ptpn6-4205
cuccgacuccuggcccuucu

SEQ ID NO: 23578 - RNA, 21 nt, Artificial Sequence
  Synthetic oligonucleotide: Ptpn6-4206
acuccgacuccuggcccuucu

SEQ ID NO: 23579 - RNA, 22 nt, Artificial Sequence
  Synthetic oligonucleotide: Ptpn6-4207
uacuccgacuccuggcccuucu

SEQ ID NO: 23580 - RNA, 23 nt, Artificial Sequence
  Synthetic oligonucleotide: Ptpn6-4208
guacuccgacuccuggcccuucu

SEQ ID NO: 23581 - RNA, 24 nt, Artificial Sequence
  Synthetic oligonucleotide: Ptpn6-4209
cguacuccgacuccuggcccuucu

SEQ ID NO: 23582 - RNA, 18 nt, Artificial Sequence
  Synthetic oligonucleotide: Ptpn6-4210
ugcccaccucgggccagu

SEQ ID NO: 23583 - RNA, 19 nt, Artificial Sequence
  Synthetic oligonucleotide: Ptpn6-4211
augcccaccucgggccagu

SEQ ID NO: 23584 - RNA, 20 nt, Artificial Sequence
  Synthetic oligonucleotide: Ptpn6-887
caugcccaccucgggccagu

SEQ ID NO: 23585 - RNA, 21 nt, Artificial Sequence
  Synthetic oligonucleotide: Ptpn6-4212
gcaugcccaccucgggccagu

SEQ ID NO: 23586 - RNA, 22 nt, Artificial Sequence
  Synthetic oligonucleotide: Ptpn6-4213
ugcaugcccaccucgggccagu

SEQ ID NO: 23587 - RNA, 23 nt, Artificial Sequence
  Synthetic oligonucleotide: Ptpn6-4214
cugcaugcccaccucgggccagu

SEQ ID NO: 23588 - RNA, 24 nt, Artificial Sequence
  Synthetic oligonucleotide: Ptpn6-4215
gcugcaugcccaccucgggccagu

SEQ ID NO: 23589 - RNA, 18 nt, Artificial Sequence
  Synthetic oligonucleotide: Ptpn6-4216
cggggagaccuguaaggu

SEQ ID NO: 23590 - RNA, 19 nt, Artificial Sequence
  Synthetic oligonucleotide: Ptpn6-4217
gcggggagaccuguaaggu

SEQ ID NO: 23591 - RNA, 20 nt, Artificial Sequence
  Synthetic oligonucleotide: Ptpn6-882
agcggggagaccuguaaggu

SEQ ID NO: 23592 - RNA, 21 nt, Artificial Sequence
  Synthetic oligonucleotide: Ptpn6-4218
cagcggggagaccuguaaggu

SEQ ID NO: 23593 - RNA, 22 nt, Artificial Sequence
  Synthetic oligonucleotide: Ptpn6-4219
ccagcggggagaccuguaaggu

SEQ ID NO: 23594 - RNA, 23 nt, Artificial Sequence
  Synthetic oligonucleotide: Ptpn6-4220
uccagcggggagaccuguaaggu

SEQ ID NO: 23595 - RNA, 24 nt, Artificial Sequence
  Synthetic oligonucleotide: Ptpn6-4221
guccagcggggagaccuguaaggu

SEQ ID NO: 23596 - RNA, 18 nt, Artificial Sequence
  Synthetic oligonucleotide: Ptpn6-4222
cacucacuuggacgaggu

SEQ ID NO: 23597 - RNA, 19 nt, Artificial Sequence
  Synthetic oligonucleotide: Ptpn6-4223
ccacucacuuggacgaggu

SEQ ID NO: 23598 - RNA, 20 nt, Artificial Sequence
  Synthetic oligonucleotide: Ptpn6-4224
gccacucacuuggacgaggu

SEQ ID NO: 23599 - RNA, 21 nt, Artificial Sequence
  Synthetic oligonucleotide: Ptpn6-4225
ggccacucacuuggacgaggu

SEQ ID NO: 23600 - RNA, 22 nt, Artificial Sequence
  Synthetic oligonucleotide: Ptpn6-4226
gggccacucacuuggacgaggu

SEQ ID NO: 23601 - RNA, 23 nt, Artificial Sequence
  Synthetic oligonucleotide: Ptpn6-4227
agggccacucacuuggacgaggu

SEQ ID NO: 23602 - RNA, 24 nt, Artificial Sequence
  Synthetic oligonucleotide: Ptpn6-4228
cagggccacucacuuggacgaggu

SEQ ID NO: 23603 - RNA, 18 nt, Artificial Sequence
  Synthetic oligonucleotide: Ptpn6-4229
aaacucugagaugugggu

SEQ ID NO: 23604 - RNA, 19 nt, Artificial Sequence
  Synthetic oligonucleotide: Ptpn6-4230
caaacucugagaugugggu

SEQ ID NO: 23605 - RNA, 20 nt, Artificial Sequence
  Synthetic oligonucleotide: Ptpn6-2768
gcaaacucugagaugugggu

SEQ ID NO: 23606 - RNA, 21 nt, Artificial Sequence
  Synthetic oligonucleotide: Ptpn6-4231
ugcaaacucugagaugugggu

SEQ ID NO: 23607 - RNA, 22 nt, Artificial Sequence
  Synthetic oligonucleotide: Ptpn6-4232
cugcaaacucugagaugugggu

SEQ ID NO: 23608 - RNA, 23 nt, Artificial Sequence
  Synthetic oligonucleotide: Ptpn6-4233
ucugcaaacucugagaugugggu

SEQ ID NO: 23609 - RNA, 24 nt, Artificial Sequence
  Synthetic oligonucleotide: Ptpn6-4234
uucugcaaacucugagaugugggu

SEQ ID NO: 23610 - RNA, 18 nt, Artificial Sequence
  Synthetic oligonucleotide: Ptpn6-4235
cagggccuagcagcuggu

SEQ ID NO: 23611 - RNA, 19 nt, Artificial Sequence
  Synthetic oligonucleotide: Ptpn6-4236
ucagggccuagcagcuggu

SEQ ID NO: 23612 - RNA, 20 nt, Artificial Sequence
  Synthetic oligonucleotide: Ptpn6-4237
aucagggccuagcagcuggu

SEQ ID NO: 23613 - RNA, 21 nt, Artificial Sequence
  Synthetic oligonucleotide: Ptpn6-4238
caucagggccuagcagcuggu

SEQ ID NO: 23614 - RNA, 22 nt, Artificial Sequence
  Synthetic oligonucleotide: Ptpn6-4239
ucaucagggccuagcagcuggu

SEQ ID NO: 23615 - RNA, 23 nt, Artificial Sequence
  Synthetic oligonucleotide: Ptpn6-4240
cucaucagggccuagcagcuggu

SEQ ID NO: 23616 - RNA, 24 nt, Artificial Sequence
  Synthetic oligonucleotide: Ptpn6-4241
ucucaucagggccuagcagcuggu

SEQ ID NO: 23617 - RNA, 18 nt, Artificial Sequence
  Synthetic oligonucleotide: Ptpn6-4242
caccgcucacuuccucuu

SEQ ID NO: 23618 - RNA, 19 nt, Artificial Sequence
  Synthetic oligonucleotide: Ptpn6-4243
gcaccgcucacuuccucuu

SEQ ID NO: 23619 - RNA, 20 nt, Artificial Sequence
  Synthetic oligonucleotide: Ptpn6-4244
agcaccgcucacuuccucuu

SEQ ID NO: 23620 - RNA, 21 nt, Artificial Sequence
  Synthetic oligonucleotide: Ptpn6-4245
cagcaccgcucacuuccucuu

SEQ ID NO: 23621 - RNA, 22 nt, Artificial Sequence
  Synthetic oligonucleotide: Ptpn6-4246
acagcaccgcucacuuccucuu

SEQ ID NO: 23622 - RNA, 23 nt, Artificial Sequence
  Synthetic oligonucleotide: Ptpn6-4247
gacagcaccgcucacuuccucuu

SEQ ID NO: 23623 - RNA, 24 nt, Artificial Sequence
  Synthetic oligonucleotide: Ptpn6-4248
ggacagcaccgcucacuuccucuu

SEQ ID NO: 23624 - RNA, 18 nt, Artificial Sequence
  Synthetic oligonucleotide: Ptpn6-4249
aacaagagggaggagaaa

SEQ ID NO: 23625 - RNA, 19 nt, Artificial Sequence
  Synthetic oligonucleotide: Ptpn6-4250
gaacaagagggaggagaaa

SEQ ID NO: 23626 - RNA, 20 nt, Artificial Sequence
  Synthetic oligonucleotide: Ptpn6-732
agaacaagagggaggagaaa

SEQ ID NO: 23627 - RNA, 21 nt, Artificial Sequence
  Synthetic oligonucleotide: Ptpn6-4251
aagaacaagagggaggagaaa

SEQ ID NO: 23628 - RNA, 22 nt, Artificial Sequence
  Synthetic oligonucleotide: Ptpn6-4252
uaagaacaagagggaggagaaa

SEQ ID NO: 23629 - RNA, 23 nt, Artificial Sequence
  Synthetic oligonucleotide: Ptpn6-4253
cuaagaacaagagggaggagaaa

SEQ ID NO: 23630 - RNA, 24 nt, Artificial Sequence
  Synthetic oligonucleotide: Ptpn6-4254
acuaagaacaagagggaggagaaa

SEQ ID NO: 23631 - RNA, 18 nt, Artificial Sequence
  Synthetic oligonucleotide: Ptpn6-4255
ccugcacacuaagaacaa

SEQ ID NO: 23632 - RNA, 19 nt, Artificial Sequence
  Synthetic oligonucleotide: Ptpn6-4256
accugcacacuaagaacaa

SEQ ID NO: 23633 - RNA, 20 nt, Artificial Sequence
  Synthetic oligonucleotide: Ptpn6-726
aaccugcacacuaagaacaa

SEQ ID NO: 23634 - RNA, 21 nt, Artificial Sequence
  Synthetic oligonucleotide: Ptpn6-4257
gaaccugcacacuaagaacaa

SEQ ID NO: 23635 - RNA, 22 nt, Artificial Sequence
  Synthetic oligonucleotide: Ptpn6-4258
agaaccugcacacuaagaacaa

SEQ ID NO: 23636 - RNA, 23 nt, Artificial Sequence
  Synthetic oligonucleotide: Ptpn6-4259
gagaaccugcacacuaagaacaa

SEQ ID NO: 23637 - RNA, 24 nt, Artificial Sequence
  Synthetic oligonucleotide: Ptpn6-4260
ugagaaccugcacacuaagaacaa

SEQ ID NO: 23638 - RNA, 18 nt, Artificial Sequence
  Synthetic oligonucleotide: Ptpn6-4261
gagcaaggguucccucaa

SEQ ID NO: 23639 - RNA, 19 nt, Artificial Sequence
  Synthetic oligonucleotide: Ptpn6-4262
agagcaaggguucccucaa

SEQ ID NO: 23640 - RNA, 20 nt, Artificial Sequence
  Synthetic oligonucleotide: Ptpn6-740
aagagcaaggguucccucaa

SEQ ID NO: 23641 - RNA, 21 nt, Artificial Sequence
  Synthetic oligonucleotide: Ptpn6-4263
gaagagcaaggguucccucaa

SEQ ID NO: 23642 - RNA, 22 nt, Artificial Sequence
  Synthetic oligonucleotide: Ptpn6-4264
agaagagcaaggguucccucaa

SEQ ID NO: 23643 - RNA, 23 nt, Artificial Sequence
  Synthetic oligonucleotide: Ptpn6-4265
gagaagagcaaggguucccucaa

SEQ ID NO: 23644 - RNA, 24 nt, Artificial Sequence
  Synthetic oligonucleotide: Ptpn6-4266
ggagaagagcaaggguucccucaa

SEQ ID NO: 23645 - RNA, 18 nt, Artificial Sequence
  Synthetic oligonucleotide: Ptpn6-4267
ggguucccucaagaggaa

SEQ ID NO: 23646 - RNA, 19 nt, Artificial Sequence
  Synthetic oligonucleotide: Ptpn6-4268
aggguucccucaagaggaa

SEQ ID NO: 23647 - RNA, 20 nt, Artificial Sequence
  Synthetic oligonucleotide: Ptpn6-4269
aaggguucccucaagaggaa

SEQ ID NO: 23648 - RNA, 21 nt, Artificial Sequence
  Synthetic oligonucleotide: Ptpn6-4270
caaggguucccucaagaggaa

SEQ ID NO: 23649 - RNA, 22 nt, Artificial Sequence
  Synthetic oligonucleotide: Ptpn6-4271
gcaaggguucccucaagaggaa

SEQ ID NO: 23650 - RNA, 23 nt, Artificial Sequence
  Synthetic oligonucleotide: Ptpn6-4272
agcaaggguucccucaagaggaa

SEQ ID NO: 23651 - RNA, 24 nt, Artificial Sequence
  Synthetic oligonucleotide: Ptpn6-4273
gagcaaggguucccucaagaggaa

SEQ ID NO: 23652 - RNA, 18 nt, Artificial Sequence
  Synthetic oligonucleotide: Ptpn6-4274
gagaaccgaguguuggaa

SEQ ID NO: 23653 - RNA, 19 nt, Artificial Sequence
  Synthetic oligonucleotide: Ptpn6-4275
ugagaaccgaguguuggaa

SEQ ID NO: 23654 - RNA, 20 nt, Artificial Sequence
  Synthetic oligonucleotide: Ptpn6-648
uugagaaccgaguguuggaa

SEQ ID NO: 23655 - RNA, 21 nt, Artificial Sequence
  Synthetic oligonucleotide: Ptpn6-4276
auugagaaccgaguguuggaa

SEQ ID NO: 23656 - RNA, 22 nt, Artificial Sequence
  Synthetic oligonucleotide: Ptpn6-4277
cauugagaaccgaguguuggaa

SEQ ID NO: 23657 - RNA, 23 nt, Artificial Sequence
  Synthetic oligonucleotide: Ptpn6-4278
acauugagaaccgaguguuggaa

SEQ ID NO: 23658 - RNA, 24 nt, Artificial Sequence
  Synthetic oligonucleotide: Ptpn6-4279
gacauugagaaccgaguguuggaa

SEQ ID NO: 23659 - RNA, 18 nt, Artificial Sequence
  Synthetic oligonucleotide: Ptpn6-4280
ggggcaaguacagacaca

SEQ ID NO: 23660 - RNA, 19 nt, Artificial Sequence
  Synthetic oligonucleotide: Ptpn6-4281
gggggcaaguacagacaca

SEQ ID NO: 23661 - RNA, 20 nt, Artificial Sequence
  Synthetic oligonucleotide: Ptpn6-2638
ggggggcaaguacagacaca

SEQ ID NO: 23662 - RNA, 21 nt, Artificial Sequence
  Synthetic oligonucleotide: Ptpn6-4282
aggggggcaaguacagacaca

SEQ ID NO: 23663 - RNA, 22 nt, Artificial Sequence
  Synthetic oligonucleotide: Ptpn6-4283
caggggggcaaguacagacaca

SEQ ID NO: 23664 - RNA, 23 nt, Artificial Sequence
  Synthetic oligonucleotide: Ptpn6-4284
gcaggggggcaaguacagacaca

SEQ ID NO: 23665 - RNA, 24 nt, Artificial Sequence
  Synthetic oligonucleotide: Ptpn6-4285
ugcaggggggcaaguacagacaca

SEQ ID NO: 23666 - RNA, 18 nt, Artificial Sequence
  Synthetic oligonucleotide: Ptpn6-4286
agcagcggucagcagaca

SEQ ID NO: 23667 - RNA, 19 nt, Artificial Sequence
  Synthetic oligonucleotide: Ptpn6-4287
aagcagcggucagcagaca

SEQ ID NO: 23668 - RNA, 20 nt, Artificial Sequence
  Synthetic oligonucleotide: Ptpn6-237
gaagcagcggucagcagaca

SEQ ID NO: 23669 - RNA, 21 nt, Artificial Sequence
  Synthetic oligonucleotide: Ptpn6-4288
agaagcagcggucagcagaca

SEQ ID NO: 23670 - RNA, 22 nt, Artificial Sequence
  Synthetic oligonucleotide: Ptpn6-4289
aagaagcagcggucagcagaca

SEQ ID NO: 23671 - RNA, 23 nt, Artificial Sequence
  Synthetic oligonucleotide: Ptpn6-4290
gaagaagcagcggucagcagaca

SEQ ID NO: 23672 - RNA, 24 nt, Artificial Sequence
  Synthetic oligonucleotide: Ptpn6-4291
ugaagaagcagcggucagcagaca

SEQ ID NO: 23673 - RNA, 18 nt, Artificial Sequence
  Synthetic oligonucleotide: Ptpn6-4292
gggugaaugcggcugaca

SEQ ID NO: 23674 - RNA, 19 nt, Artificial Sequence
  Synthetic oligonucleotide: Ptpn6-4293
agggugaaugcggcugaca

SEQ ID NO: 23675 - RNA, 20 nt, Artificial Sequence
  Synthetic oligonucleotide: Ptpn6-643
gagggugaaugcggcugaca

SEQ ID NO: 23676 - RNA, 21 nt, Artificial Sequence
  Synthetic oligonucleotide: Ptpn6-4294
cgagggugaaugcggcugaca

SEQ ID NO: 23677 - RNA, 22 nt, Artificial Sequence
  Synthetic oligonucleotide: Ptpn6-4295
acgagggugaaugcggcugaca

SEQ ID NO: 23678 - RNA, 23 nt, Artificial Sequence
  Synthetic oligonucleotide: Ptpn6-4296
cacgagggugaaugcggcugaca

SEQ ID NO: 23679 - RNA, 24 nt, Artificial Sequence
  Synthetic oligonucleotide: Ptpn6-4297
ccacgagggugaaugcggcugaca

SEQ ID NO: 23680 - RNA, 18 nt, Artificial Sequence
  Synthetic oligonucleotide: Ptpn6-4298
ccgaccauggggucccca

SEQ ID NO: 23681 - RNA, 19 nt, Artificial Sequence
  Synthetic oligonucleotide: Ptpn6-4299
cccgaccauggggucccca

SEQ ID NO: 23682 - RNA, 20 nt, Artificial Sequence
  Synthetic oligonucleotide: Ptpn6-698
gcccgaccauggggucccca

SEQ ID NO: 23683 - RNA, 21 nt, Artificial Sequence
  Synthetic oligonucleotide: Ptpn6-4300
ggcccgaccauggggucccca

SEQ ID NO: 23684 - RNA, 22 nt, Artificial Sequence
  Synthetic oligonucleotide: Ptpn6-4301
uggcccgaccauggggucccca

SEQ ID NO: 23685 - RNA, 23 nt, Artificial Sequence
  Synthetic oligonucleotide: Ptpn6-4302
cuggcccgaccauggggucccca

SEQ ID NO: 23686 - RNA, 24 nt, Artificial Sequence
  Synthetic oligonucleotide: Ptpn6-4303
gcuggcccgaccauggggucccca

SEQ ID NO: 23687 - RNA, 18 nt, Artificial Sequence
  Synthetic oligonucleotide: Ptpn6-4304
cuggaagggcagcggcca

SEQ ID NO: 23688 - RNA, 19 nt, Artificial Sequence
  Synthetic oligonucleotide: Ptpn6-4305
ucuggaagggcagcggcca

SEQ ID NO: 23689 - RNA, 20 nt, Artificial Sequence
  Synthetic oligonucleotide: Ptpn6-665
gucuggaagggcagcggcca

SEQ ID NO: 23690 - RNA, 21 nt, Artificial Sequence
  Synthetic oligonucleotide: Ptpn6-4306
cgucuggaagggcagcggcca

SEQ ID NO: 23691 - RNA, 22 nt, Artificial Sequence
  Synthetic oligonucleotide: Ptpn6-4307
gcgucuggaagggcagcggcca

SEQ ID NO: 23692 - RNA, 23 nt, Artificial Sequence
  Synthetic oligonucleotide: Ptpn6-4308
agcgucuggaagggcagcggcca

SEQ ID NO: 23693 - RNA, 24 nt, Artificial Sequence
  Synthetic oligonucleotide: Ptpn6-4309
cagcgucuggaagggcagcggcca

SEQ ID NO: 23694 - RNA, 18 nt, Artificial Sequence
  Synthetic oligonucleotide: Ptpn6-4310
uugucaucgacaugcuca

SEQ ID NO: 23695 - RNA, 19 nt, Artificial Sequence
  Synthetic oligonucleotide: Ptpn6-4311
auugucaucgacaugcuca

SEQ ID NO: 23696 - RNA, 20 nt, Artificial Sequence
  Synthetic oligonucleotide: Ptpn6-217
cauugucaucgacaugcuca

SEQ ID NO: 23697 - RNA, 21 nt, Artificial Sequence
  Synthetic oligonucleotide: Ptpn6-4312
ucauugucaucgacaugcuca

SEQ ID NO: 23698 - RNA, 22 nt, Artificial Sequence
  Synthetic oligonucleotide: Ptpn6-4313
aucauugucaucgacaugcuca

SEQ ID NO: 23699 - RNA, 23 nt, Artificial Sequence
  Synthetic oligonucleotide: Ptpn6-4314
caucauugucaucgacaugcuca

SEQ ID NO: 23700 - RNA, 24 nt, Artificial Sequence
  Synthetic oligonucleotide: Ptpn6-4315
ccaucauugucaucgacaugcuca

SEQ ID NO: 23701 - RNA, 18 nt, Artificial Sequence
  Synthetic oligonucleotide: Ptpn6-4316
uggccaucgcccaguuca

SEQ ID NO: 23702 - RNA, 19 nt, Artificial Sequence
  Synthetic oligonucleotide: Ptpn6-4317
guggccaucgcccaguuca

SEQ ID NO: 23703 - RNA, 20 nt, Artificial Sequence
  Synthetic oligonucleotide: Ptpn6-714
cguggccaucgcccaguuca

SEQ ID NO: 23704 - RNA, 21 nt, Artificial Sequence
  Synthetic oligonucleotide: Ptpn6-4318
acguggccaucgcccaguuca

SEQ ID NO: 23705 - RNA, 22 nt, Artificial Sequence
  Synthetic oligonucleotide: Ptpn6-4319
uacguggccaucgcccaguuca

SEQ ID NO: 23706 - RNA, 23 nt, Artificial Sequence
  Synthetic oligonucleotide: Ptpn6-4320
cuacguggccaucgcccaguuca

SEQ ID NO: 23707 - RNA, 24 nt, Artificial Sequence
  Synthetic oligonucleotide: Ptpn6-4321
ucuacguggccaucgcccaguuca

SEQ ID NO: 23708 - RNA, 18 nt, Artificial Sequence
  Synthetic oligonucleotide: Ptpn6-4322
ugcacacuaagaacaaga

SEQ ID NO: 23709 - RNA, 19 nt, Artificial Sequence
  Synthetic oligonucleotide: Ptpn6-4323
cugcacacuaagaacaaga

SEQ ID NO: 23710 - RNA, 20 nt, Artificial Sequence
  Synthetic oligonucleotide: Ptpn6-234
ccugcacacuaagaacaaga

SEQ ID NO: 23711 - RNA, 21 nt, Artificial Sequence
  Synthetic oligonucleotide: Ptpn6-4324
accugcacacuaagaacaaga

SEQ ID NO: 23712 - RNA, 22 nt, Artificial Sequence
  Synthetic oligonucleotide: Ptpn6-4325
aaccugcacacuaagaacaaga

SEQ ID NO: 23713 - RNA, 23 nt, Artificial Sequence
  Synthetic oligonucleotide: Ptpn6-4326
gaaccugcacacuaagaacaaga

SEQ ID NO: 23714 - RNA, 24 nt, Artificial Sequence
  Synthetic oligonucleotide: Ptpn6-4327
agaaccugcacacuaagaacaaga

SEQ ID NO: 23715 - RNA, 18 nt, Artificial Sequence
  Synthetic oligonucleotide: Ptpn6-4328
uggagcauuucaagaaga

SEQ ID NO: 23716 - RNA, 19 nt, Artificial Sequence
  Synthetic oligonucleotide: Ptpn6-4329
guggagcauuucaagaaga

SEQ ID NO: 23717 - RNA, 20 nt, Artificial Sequence
  Synthetic oligonucleotide: Ptpn6-152
gguggagcauuucaagaaga

SEQ ID NO: 23718 - RNA, 21 nt, Artificial Sequence
  Synthetic oligonucleotide: Ptpn6-4330
ugguggagcauuucaagaaga

SEQ ID NO: 23719 - RNA, 22 nt, Artificial Sequence
  Synthetic oligonucleotide: Ptpn6-4331
cugguggagcauuucaagaaga

SEQ ID NO: 23720 - RNA, 23 nt, Artificial Sequence
  Synthetic oligonucleotide: Ptpn6-4332
ccugguggagcauuucaagaaga

SEQ ID NO: 23721 - RNA, 24 nt, Artificial Sequence
  Synthetic oligonucleotide: Ptpn6-4333
accugguggagcauuucaagaaga

SEQ ID NO: 23722 - RNA, 18 nt, Artificial Sequence
  Synthetic oligonucleotide: Ptpn6-4334
gcucgggcauggugcaga

SEQ ID NO: 23723 - RNA, 19 nt, Artificial Sequence
  Synthetic oligonucleotide: Ptpn6-4335
cgcucgggcauggugcaga

SEQ ID NO: 23724 - RNA, 20 nt, Artificial Sequence
  Synthetic oligonucleotide: Ptpn6-225
gcgcucgggcauggugcaga

SEQ ID NO: 23725 - RNA, 21 nt, Artificial Sequence
  Synthetic oligonucleotide: Ptpn6-4336
agcgcucgggcauggugcaga

SEQ ID NO: 23726 - RNA, 22 nt, Artificial Sequence
  Synthetic oligonucleotide: Ptpn6-4337
cagcgcucgggcauggugcaga

SEQ ID NO: 23727 - RNA, 23 nt, Artificial Sequence
  Synthetic oligonucleotide: Ptpn6-4338
gcagcgcucgggcauggugcaga

SEQ ID NO: 23728 - RNA, 24 nt, Artificial Sequence
  Synthetic oligonucleotide: Ptpn6-4339
cgcagcgcucgggcauggugcaga

SEQ ID NO: 23729 - RNA, 18 nt, Artificial Sequence
  Synthetic oligonucleotide: Ptpn6-4340
cgagugauccugcaggga

SEQ ID NO: 23730 - RNA, 19 nt, Artificial Sequence
  Synthetic oligonucleotide: Ptpn6-4341
ccgagugauccugcaggga

SEQ ID NO: 23731 - RNA, 20 nt, Artificial Sequence
  Synthetic oligonucleotide: Ptpn6-176
gccgagugauccugcaggga

SEQ ID NO: 23732 - RNA, 21 nt, Artificial Sequence
  Synthetic oligonucleotide: Ptpn6-4342
agccgagugauccugcaggga

SEQ ID NO: 23733 - RNA, 22 nt, Artificial Sequence
  Synthetic oligonucleotide: Ptpn6-4343
cagccgagugauccugcaggga

SEQ ID NO: 23734 - RNA, 23 nt, Artificial Sequence
  Synthetic oligonucleotide: Ptpn6-4344
acagccgagugauccugcaggga

SEQ ID NO: 23735 - RNA, 24 nt, Artificial Sequence
  Synthetic oligonucleotide: Ptpn6-4345
cacagccgagugauccugcaggga

SEQ ID NO: 23736 - RNA, 18 nt, Artificial Sequence
  Synthetic oligonucleotide: Ptpn6-4346
auuucaagaagacgggga

SEQ ID NO: 23737 - RNA, 19 nt, Artificial Sequence
  Synthetic oligonucleotide: Ptpn6-4347
cauuucaagaagacgggga

SEQ ID NO: 23738 - RNA, 20 nt, Artificial Sequence
  Synthetic oligonucleotide: Ptpn6-642
gcauuucaagaagacgggga

SEQ ID NO: 23739 - RNA, 21 nt, Artificial Sequence
  Synthetic oligonucleotide: Ptpn6-4348
agcauuucaagaagacgggga

SEQ ID NO: 23740 - RNA, 22 nt, Artificial Sequence
  Synthetic oligonucleotide: Ptpn6-4349
gagcauuucaagaagacgggga

SEQ ID NO: 23741 - RNA, 23 nt, Artificial Sequence
  Synthetic oligonucleotide: Ptpn6-4350
ggagcauuucaagaagacgggga

SEQ ID NO: 23742 - RNA, 24 nt, Artificial Sequence
  Synthetic oligonucleotide: Ptpn6-4351
uggagcauuucaagaagacgggga

SEQ ID NO: 23743 - RNA, 18 nt, Artificial Sequence
  Synthetic oligonucleotide: Ptpn6-4352
gggccaggagucggagua

SEQ ID NO: 23744 - RNA, 19 nt, Artificial Sequence
  Synthetic oligonucleotide: Ptpn6-4353
agggccaggagucggagua

SEQ ID NO: 23745 - RNA, 20 nt, Artificial Sequence
  Synthetic oligonucleotide: Ptpn6-230
aagggccaggagucggagua

SEQ ID NO: 23746 - RNA, 21 nt, Artificial Sequence
  Synthetic oligonucleotide: Ptpn6-4354
gaagggccaggagucggagua

SEQ ID NO: 23747 - RNA, 22 nt, Artificial Sequence
  Synthetic oligonucleotide: Ptpn6-4355
agaagggccaggagucggagua

SEQ ID NO: 23748 - RNA, 23 nt, Artificial Sequence
  Synthetic oligonucleotide: Ptpn6-4356
cagaagggccaggagucggagua

SEQ ID NO: 23749 - RNA, 24 nt, Artificial Sequence
  Synthetic oligonucleotide: Ptpn6-4357
gcagaagggccaggagucggagua

SEQ ID NO: 23750 - RNA, 18 nt, Artificial Sequence
  Synthetic oligonucleotide: Ptpn6-4358
aaccugcacacuaagaac

SEQ ID NO: 23751 - RNA, 19 nt, Artificial Sequence
  Synthetic oligonucleotide: Ptpn6-4359
gaaccugcacacuaagaac

SEQ ID NO: 23752 - RNA, 20 nt, Artificial Sequence
  Synthetic oligonucleotide: Ptpn6-725
agaaccugcacacuaagaac

SEQ ID NO: 23753 - RNA, 21 nt, Artificial Sequence
  Synthetic oligonucleotide: Ptpn6-4360
gagaaccugcacacuaagaac

SEQ ID NO: 23754 - RNA, 22 nt, Artificial Sequence
  Synthetic oligonucleotide: Ptpn6-4361
ugagaaccugcacacuaagaac

SEQ ID NO: 23755 - RNA, 23 nt, Artificial Sequence
  Synthetic oligonucleotide: Ptpn6-4362
augagaaccugcacacuaagaac

SEQ ID NO: 23756 - RNA, 24 nt, Artificial Sequence
  Synthetic oligonucleotide: Ptpn6-4363
uaugagaaccugcacacuaagaac

SEQ ID NO: 23757 - RNA, 18 nt, Artificial Sequence
  Synthetic oligonucleotide: Ptpn6-4364
gggcagcggccagagaac

SEQ ID NO: 23758 - RNA, 19 nt, Artificial Sequence
  Synthetic oligonucleotide: Ptpn6-4365
agggcagcggccagagaac

SEQ ID NO: 23759 - RNA, 20 nt, Artificial Sequence
  Synthetic oligonucleotide: Ptpn6-666
aagggcagcggccagagaac

SEQ ID NO: 23760 - RNA, 21 nt, Artificial Sequence
  Synthetic oligonucleotide: Ptpn6-4366
gaagggcagcggccagagaac

SEQ ID NO: 23761 - RNA, 22 nt, Artificial Sequence
  Synthetic oligonucleotide: Ptpn6-4367
ggaagggcagcggccagagaac

SEQ ID NO: 23762 - RNA, 23 nt, Artificial Sequence
  Synthetic oligonucleotide: Ptpn6-4368
uggaagggcagcggccagagaac

SEQ ID NO: 23763 - RNA, 24 nt, Artificial Sequence
  Synthetic oligonucleotide: Ptpn6-4369
cuggaagggcagcggccagagaac

SEQ ID NO: 23764 - RNA, 18 nt, Artificial Sequence
  Synthetic oligonucleotide: Ptpn6-4370
cgaguguuggaacugaac

SEQ ID NO: 23765 - RNA, 19 nt, Artificial Sequence
  Synthetic oligonucleotide: Ptpn6-4371
ccgaguguuggaacugaac

SEQ ID NO: 23766 - RNA, 20 nt, Artificial Sequence
  Synthetic oligonucleotide: Ptpn6-649
accgaguguuggaacugaac

SEQ ID NO: 23767 - RNA, 21 nt, Artificial Sequence
  Synthetic oligonucleotide: Ptpn6-4372
aaccgaguguuggaacugaac

SEQ ID NO: 23768 - RNA, 22 nt, Artificial Sequence
  Synthetic oligonucleotide: Ptpn6-4373
gaaccgaguguuggaacugaac

SEQ ID NO: 23769 - RNA, 23 nt, Artificial Sequence
  Synthetic oligonucleotide: Ptpn6-4374
agaaccgaguguuggaacugaac

SEQ ID NO: 23770 - RNA, 24 nt, Artificial Sequence
  Synthetic oligonucleotide: Ptpn6-4375
gagaaccgaguguuggaacugaac

SEQ ID NO: 23771 - RNA, 18 nt, Artificial Sequence
  Synthetic oligonucleotide: Ptpn6-4376
gggggcaaguacagacac

SEQ ID NO: 23772 - RNA, 19 nt, Artificial Sequence
  Synthetic oligonucleotide: Ptpn6-4377
ggggggcaaguacagacac

SEQ ID NO: 23773 - RNA, 20 nt, Artificial Sequence
  Synthetic oligonucleotide: Ptpn6-4378
aggggggcaaguacagacac

SEQ ID NO: 23774 - RNA, 21 nt, Artificial Sequence
  Synthetic oligonucleotide: Ptpn6-4379
caggggggcaaguacagacac

SEQ ID NO: 23775 - RNA, 22 nt, Artificial Sequence
  Synthetic oligonucleotide: Ptpn6-4380
gcaggggggcaaguacagacac

SEQ ID NO: 23776 - RNA, 23 nt, Artificial Sequence
  Synthetic oligonucleotide: Ptpn6-4381
ugcaggggggcaaguacagacac

SEQ ID NO: 23777 - RNA, 24 nt, Artificial Sequence
  Synthetic oligonucleotide: Ptpn6-4382
gugcaggggggcaaguacagacac

SEQ ID NO: 23778 - RNA, 18 nt, Artificial Sequence
  Synthetic oligonucleotide: Ptpn6-4383
ugucaucgucaugaccac

SEQ ID NO: 23779 - RNA, 19 nt, Artificial Sequence
  Synthetic oligonucleotide: Ptpn6-4384
gugucaucgucaugaccac

SEQ ID NO: 23780 - RNA, 20 nt, Artificial Sequence
  Synthetic oligonucleotide: Ptpn6-681
cgugucaucgucaugaccac

SEQ ID NO: 23781 - RNA, 21 nt, Artificial Sequence
  Synthetic oligonucleotide: Ptpn6-4385
ccgugucaucgucaugaccac

SEQ ID NO: 23782 - RNA, 22 nt, Artificial Sequence
  Synthetic oligonucleotide: Ptpn6-4386
gccgugucaucgucaugaccac

SEQ ID NO: 23783 - RNA, 23 nt, Artificial Sequence
  Synthetic oligonucleotide: Ptpn6-4387
agccgugucaucgucaugaccac

SEQ ID NO: 23784 - RNA, 24 nt, Artificial Sequence
  Synthetic oligonucleotide: Ptpn6-4388
cagccgugucaucgucaugaccac

SEQ ID NO: 23785 - RNA, 18 nt, Artificial Sequence
  Synthetic oligonucleotide: Ptpn6-4389
gucagcagugugggccac

SEQ ID NO: 23786 - RNA, 19 nt, Artificial Sequence
  Synthetic oligonucleotide: Ptpn6-4390
ggucagcagugugggccac

SEQ ID NO: 23787 - RNA, 20 nt, Artificial Sequence
  Synthetic oligonucleotide: Ptpn6-4391
aggucagcagugugggccac

SEQ ID NO: 23788 - RNA, 21 nt, Artificial Sequence
  Synthetic oligonucleotide: Ptpn6-4392
aaggucagcagugugggccac

SEQ ID NO: 23789 - RNA, 22 nt, Artificial Sequence
  Synthetic oligonucleotide: Ptpn6-4393
caaggucagcagugugggccac

SEQ ID NO: 23790 - RNA, 23 nt, Artificial Sequence
  Synthetic oligonucleotide: Ptpn6-4394
ucaaggucagcagugugggccac

SEQ ID NO: 23791 - RNA, 24 nt, Artificial Sequence
  Synthetic oligonucleotide: Ptpn6-4395
aucaaggucagcagugugggccac

SEQ ID NO: 23792 - RNA, 18 nt, Artificial Sequence
  Synthetic oligonucleotide: Ptpn6-4396
accaagggugaggggcac

SEQ ID NO: 23793 - RNA, 19 nt, Artificial Sequence
  Synthetic oligonucleotide: Ptpn6-4397
caccaagggugaggggcac

SEQ ID NO: 23794 - RNA, 20 nt, Artificial Sequence
  Synthetic oligonucleotide: Ptpn6-4398
ccaccaagggugaggggcac

SEQ ID NO: 23795 - RNA, 21 nt, Artificial Sequence
  Synthetic oligonucleotide: Ptpn6-4399
uccaccaagggugaggggcac

SEQ ID NO: 23796 - RNA, 22 nt, Artificial Sequence
  Synthetic oligonucleotide: Ptpn6-4400
cuccaccaagggugaggggcac

SEQ ID NO: 23797 - RNA, 23 nt, Artificial Sequence
  Synthetic oligonucleotide: Ptpn6-4401
ucuccaccaagggugaggggcac

SEQ ID NO: 23798 - RNA, 24 nt, Artificial Sequence
  Synthetic oligonucleotide: Ptpn6-4402
aucuccaccaagggugaggggcac

SEQ ID NO: 23799 - RNA, 18 nt, Artificial Sequence
  Synthetic oligonucleotide: Ptpn6-4403
aagcagcggucagcagac

SEQ ID NO: 23800 - RNA, 19 nt, Artificial Sequence
  Synthetic oligonucleotide: Ptpn6-4404
gaagcagcggucagcagac

SEQ ID NO: 23801 - RNA, 20 nt, Artificial Sequence
  Synthetic oligonucleotide: Ptpn6-734
agaagcagcggucagcagac

SEQ ID NO: 23802 - RNA, 21 nt, Artificial Sequence
  Synthetic oligonucleotide: Ptpn6-4405
aagaagcagcggucagcagac

SEQ ID NO: 23803 - RNA, 22 nt, Artificial Sequence
  Synthetic oligonucleotide: Ptpn6-4406
gaagaagcagcggucagcagac

SEQ ID NO: 23804 - RNA, 23 nt, Artificial Sequence
  Synthetic oligonucleotide: Ptpn6-4407
ugaagaagcagcggucagcagac

SEQ ID NO: 23805 - RNA, 24 nt, Artificial Sequence
  Synthetic oligonucleotide: Ptpn6-4408
gugaagaagcagcggucagcagac

SEQ ID NO: 23806 - RNA, 18 nt, Artificial Sequence
  Synthetic oligonucleotide: Ptpn6-4409
aagggcaagaaccgcuac

SEQ ID NO: 23807 - RNA, 19 nt, Artificial Sequence
  Synthetic oligonucleotide: Ptpn6-4410
caagggcaagaaccgcuac

SEQ ID NO: 23808 - RNA, 20 nt, Artificial Sequence
  Synthetic oligonucleotide: Ptpn6-668
acaagggcaagaaccgcuac

SEQ ID NO: 23809 - RNA, 21 nt, Artificial Sequence
  Synthetic oligonucleotide: Ptpn6-4411
aacaagggcaagaaccgcuac

SEQ ID NO: 23810 - RNA, 22 nt, Artificial Sequence
  Synthetic oligonucleotide: Ptpn6-4412
gaacaagggcaagaaccgcuac

SEQ ID NO: 23811 - RNA, 23 nt, Artificial Sequence
  Synthetic oligonucleotide: Ptpn6-4413
agaacaagggcaagaaccgcuac

SEQ ID NO: 23812 - RNA, 24 nt, Artificial Sequence
  Synthetic oligonucleotide: Ptpn6-4414
gagaacaagggcaagaaccgcuac

SEQ ID NO: 23813 - RNA, 18 nt, Artificial Sequence
  Synthetic oligonucleotide: Ptpn6-4415
aucuggcauuaccaguac

SEQ ID NO: 23814 - RNA, 19 nt, Artificial Sequence
  Synthetic oligonucleotide: Ptpn6-4416
gaucuggcauuaccaguac

SEQ ID NO: 23815 - RNA, 20 nt, Artificial Sequence
  Synthetic oligonucleotide: Ptpn6-695
agaucuggcauuaccaguac

SEQ ID NO: 23816 - RNA, 21 nt, Artificial Sequence
  Synthetic oligonucleotide: Ptpn6-4417
gagaucuggcauuaccaguac

SEQ ID NO: 23817 - RNA, 22 nt, Artificial Sequence
  Synthetic oligonucleotide: Ptpn6-4418
ggagaucuggcauuaccaguac

SEQ ID NO: 23818 - RNA, 23 nt, Artificial Sequence
  Synthetic oligonucleotide: Ptpn6-4419
gggagaucuggcauuaccaguac

SEQ ID NO: 23819 - RNA, 24 nt, Artificial Sequence
  Synthetic oligonucleotide: Ptpn6-4420
cgggagaucuggcauuaccaguac

SEQ ID NO: 23820 - RNA, 18 nt, Artificial Sequence
  Synthetic oligonucleotide: Ptpn6-4421
ggccaggagucggaguac

SEQ ID NO: 23821 - RNA, 19 nt, Artificial Sequence
  Synthetic oligonucleotide: Ptpn6-4422
gggccaggagucggaguac

SEQ ID NO: 23822 - RNA, 20 nt, Artificial Sequence
  Synthetic oligonucleotide: Ptpn6-231
agggccaggagucggaguac

SEQ ID NO: 23823 - RNA, 21 nt, Artificial Sequence
  Synthetic oligonucleotide: Ptpn6-4423
aagggccaggagucggaguac

SEQ ID NO: 23824 - RNA, 22 nt, Artificial Sequence
  Synthetic oligonucleotide: Ptpn6-4424
gaagggccaggagucggaguac

SEQ ID NO: 23825 - RNA, 23 nt, Artificial Sequence
  Synthetic oligonucleotide: Ptpn6-4425
agaagggccaggagucggaguac

SEQ ID NO: 23826 - RNA, 24 nt, Artificial Sequence
  Synthetic oligonucleotide: Ptpn6-4426
cagaagggccaggagucggaguac

SEQ ID NO: 23827 - RNA, 18 nt, Artificial Sequence
  Synthetic oligonucleotide: Ptpn6-4427
ccaagggugaggggcacc

SEQ ID NO: 23828 - RNA, 19 nt, Artificial Sequence
  Synthetic oligonucleotide: Ptpn6-4428
accaagggugaggggcacc

SEQ ID NO: 23829 - RNA, 20 nt, Artificial Sequence
  Synthetic oligonucleotide: Ptpn6-2661
caccaagggugaggggcacc

SEQ ID NO: 23830 - RNA, 21 nt, Artificial Sequence
  Synthetic oligonucleotide: Ptpn6-4429
ccaccaagggugaggggcacc

SEQ ID NO: 23831 - RNA, 22 nt, Artificial Sequence
  Synthetic oligonucleotide: Ptpn6-4430
uccaccaagggugaggggcacc

SEQ ID NO: 23832 - RNA, 23 nt, Artificial Sequence
  Synthetic oligonucleotide: Ptpn6-4431
cuccaccaagggugaggggcacc

SEQ ID NO: 23833 - RNA, 24 nt, Artificial Sequence
  Synthetic oligonucleotide: Ptpn6-4432
ucuccaccaagggugaggggcacc

SEQ ID NO: 23834 - RNA, 18 nt, Artificial Sequence
  Synthetic oligonucleotide: Ptpn6-4433
accugagcuggcccgacc

SEQ ID NO: 23835 - RNA, 19 nt, Artificial Sequence
  Synthetic oligonucleotide: Ptpn6-4434
uaccugagcuggcccgacc

SEQ ID NO: 23836 - RNA, 20 nt, Artificial Sequence
  Synthetic oligonucleotide: Ptpn6-696
guaccugagcuggcccgacc

SEQ ID NO: 23837 - RNA, 21 nt, Artificial Sequence
  Synthetic oligonucleotide: Ptpn6-4435
aguaccugagcuggcccgacc

SEQ ID NO: 23838 - RNA, 22 nt, Artificial Sequence
  Synthetic oligonucleotide: Ptpn6-4436
caguaccugagcuggcccgacc

SEQ ID NO: 23839 - RNA, 23 nt, Artificial Sequence
  Synthetic oligonucleotide: Ptpn6-4437
ccaguaccugagcuggcccgacc

SEQ ID NO: 23840 - RNA, 24 nt, Artificial Sequence
  Synthetic oligonucleotide: Ptpn6-4438
accaguaccugagcuggcccgacc

SEQ ID NO: 23841 - RNA, 18 nt, Artificial Sequence
  Synthetic oligonucleotide: Ptpn6-4439
ucaucgucaugaccaccc

SEQ ID NO: 23842 - RNA, 19 nt, Artificial Sequence
  Synthetic oligonucleotide: Ptpn6-4440
gucaucgucaugaccaccc

SEQ ID NO: 23843 - RNA, 20 nt, Artificial Sequence
  Synthetic oligonucleotide: Ptpn6-682
ugucaucgucaugaccaccc

SEQ ID NO: 23844 - RNA, 21 nt, Artificial Sequence
  Synthetic oligonucleotide: Ptpn6-4441
gugucaucgucaugaccaccc

SEQ ID NO: 23845 - RNA, 22 nt, Artificial Sequence
  Synthetic oligonucleotide: Ptpn6-4442
cgugucaucgucaugaccaccc

SEQ ID NO: 23846 - RNA, 23 nt, Artificial Sequence
  Synthetic oligonucleotide: Ptpn6-4443
ccgugucaucgucaugaccaccc

SEQ ID NO: 23847 - RNA, 24 nt, Artificial Sequence
  Synthetic oligonucleotide: Ptpn6-4444
gccgugucaucgucaugaccaccc

SEQ ID NO: 23848 - RNA, 18 nt, Artificial Sequence
  Synthetic oligonucleotide: Ptpn6-4445
acauagggucagugcccc

SEQ ID NO: 23849 - RNA, 19 nt, Artificial Sequence
  Synthetic oligonucleotide: Ptpn6-4446
gacauagggucagugcccc

SEQ ID NO: 23850 - RNA, 20 nt, Artificial Sequence
  Synthetic oligonucleotide: Ptpn6-2667
ggacauagggucagugcccc

SEQ ID NO: 23851 - RNA, 21 nt, Artificial Sequence
  Synthetic oligonucleotide: Ptpn6-4447
aggacauagggucagugcccc

SEQ ID NO: 23852 - RNA, 22 nt, Artificial Sequence
  Synthetic oligonucleotide: Ptpn6-4448
gaggacauagggucagugcccc

SEQ ID NO: 23853 - RNA, 23 nt, Artificial Sequence
  Synthetic oligonucleotide: Ptpn6-4449
cgaggacauagggucagugcccc

SEQ ID NO: 23854 - RNA, 24 nt, Artificial Sequence
  Synthetic oligonucleotide: Ptpn6-4450
ccgaggacauagggucagugcccc

SEQ ID NO: 23855 - RNA, 18 nt, Artificial Sequence
  Synthetic oligonucleotide: Ptpn6-4451
gacauagggucagugccc

SEQ ID NO: 23856 - RNA, 19 nt, Artificial Sequence
  Synthetic oligonucleotide: Ptpn6-4452
ggacauagggucagugccc

SEQ ID NO: 23857 - RNA, 20 nt, Artificial Sequence
  Synthetic oligonucleotide: Ptpn6-4453
aggacauagggucagugccc

SEQ ID NO: 23858 - RNA, 21 nt, Artificial Sequence
  Synthetic oligonucleotide: Ptpn6-4454
gaggacauagggucagugccc

SEQ ID NO: 23859 - RNA, 22 nt, Artificial Sequence
  Synthetic oligonucleotide: Ptpn6-4455
cgaggacauagggucagugccc

SEQ ID NO: 23860 - RNA, 23 nt, Artificial Sequence
  Synthetic oligonucleotide: Ptpn6-4456
ccgaggacauagggucagugccc

SEQ ID NO: 23861 - RNA, 24 nt, Artificial Sequence
  Synthetic oligonucleotide: Ptpn6-4457
gccgaggacauagggucagugccc

SEQ ID NO: 23862 - RNA, 18 nt, Artificial Sequence
  Synthetic oligonucleotide: Ptpn6-4458
aucaccuaucccccagcc

SEQ ID NO: 23863 - RNA, 19 nt, Artificial Sequence
  Synthetic oligonucleotide: Ptpn6-4459
caucaccuaucccccagcc

SEQ ID NO: 23864 - RNA, 20 nt, Artificial Sequence
  Synthetic oligonucleotide: Ptpn6-722
acaucaccuaucccccagcc

SEQ ID NO: 23865 - RNA, 21 nt, Artificial Sequence
  Synthetic oligonucleotide: Ptpn6-4460
aacaucaccuaucccccagcc

SEQ ID NO: 23866 - RNA, 22 nt, Artificial Sequence
  Synthetic oligonucleotide: Ptpn6-4461
gaacaucaccuaucccccagcc

SEQ ID NO: 23867 - RNA, 23 nt, Artificial Sequence
  Synthetic oligonucleotide: Ptpn6-4462
ggaacaucaccuaucccccagcc

SEQ ID NO: 23868 - RNA, 24 nt, Artificial Sequence
  Synthetic oligonucleotide: Ptpn6-4463
gggaacaucaccuaucccccagcc

SEQ ID NO: 23869 - RNA, 18 nt, Artificial Sequence
  Synthetic oligonucleotide: Ptpn6-4464
ugggguccccagugagcc

SEQ ID NO: 23870 - RNA, 19 nt, Artificial Sequence
  Synthetic oligonucleotide: Ptpn6-4465
augggguccccagugagcc

SEQ ID NO: 23871 - RNA, 20 nt, Artificial Sequence
  Synthetic oligonucleotide: Ptpn6-208
caugggguccccagugagcc

SEQ ID NO: 23872 - RNA, 21 nt, Artificial Sequence
  Synthetic oligonucleotide: Ptpn6-4466
ccaugggguccccagugagcc

SEQ ID NO: 23873 - RNA, 22 nt, Artificial Sequence
  Synthetic oligonucleotide: Ptpn6-4467
accaugggguccccagugagcc

SEQ ID NO: 23874 - RNA, 23 nt, Artificial Sequence
  Synthetic oligonucleotide: Ptpn6-4468
gaccaugggguccccagugagcc

SEQ ID NO: 23875 - RNA, 24 nt, Artificial Sequence
  Synthetic oligonucleotide: Ptpn6-4469
cgaccaugggguccccagugagcc

SEQ ID NO: 23876 - RNA, 18 nt, Artificial Sequence
  Synthetic oligonucleotide: Ptpn6-4470
ugcgugcagagcagggcc

SEQ ID NO: 23877 - RNA, 19 nt, Artificial Sequence
  Synthetic oligonucleotide: Ptpn6-4471
gugcgugcagagcagggcc

SEQ ID NO: 23878 - RNA, 20 nt, Artificial Sequence
  Synthetic oligonucleotide: Ptpn6-2671
ggugcgugcagagcagggcc

SEQ ID NO: 23879 - RNA, 21 nt, Artificial Sequence
  Synthetic oligonucleotide: Ptpn6-4472
aggugcgugcagagcagggcc

SEQ ID NO: 23880 - RNA, 22 nt, Artificial Sequence
  Synthetic oligonucleotide: Ptpn6-4473
caggugcgugcagagcagggcc

SEQ ID NO: 23881 - RNA, 23 nt, Artificial Sequence
  Synthetic oligonucleotide: Ptpn6-4474
gcaggugcgugcagagcagggcc

SEQ ID NO: 23882 - RNA, 24 nt, Artificial Sequence
  Synthetic oligonucleotide: Ptpn6-4475
ugcaggugcgugcagagcagggcc

SEQ ID NO: 23883 - RNA, 18 nt, Artificial Sequence
  Synthetic oligonucleotide: Ptpn6-4476
cagcaaccguacuaugcc

SEQ ID NO: 23884 - RNA, 19 nt, Artificial Sequence
  Synthetic oligonucleotide: Ptpn6-4477
ucagcaaccguacuaugcc

SEQ ID NO: 23885 - RNA, 20 nt, Artificial Sequence
  Synthetic oligonucleotide: Ptpn6-4478
gucagcaaccguacuaugcc

SEQ ID NO: 23886 - RNA, 21 nt, Artificial Sequence
  Synthetic oligonucleotide: Ptpn6-4479
agucagcaaccguacuaugcc

SEQ ID NO: 23887 - RNA, 22 nt, Artificial Sequence
  Synthetic oligonucleotide: Ptpn6-4480
aagucagcaaccguacuaugcc

SEQ ID NO: 23888 - RNA, 23 nt, Artificial Sequence
  Synthetic oligonucleotide: Ptpn6-4481
gaagucagcaaccguacuaugcc

SEQ ID NO: 23889 - RNA, 24 nt, Artificial Sequence
  Synthetic oligonucleotide: Ptpn6-4482
agaagucagcaaccguacuaugcc

SEQ ID NO: 23890 - RNA, 18 nt, Artificial Sequence
  Synthetic oligonucleotide: Ptpn6-4483
aaaccacuaagaagaagc

SEQ ID NO: 23891 - RNA, 19 nt, Artificial Sequence
  Synthetic oligonucleotide: Ptpn6-4484
gaaaccacuaagaagaagc

SEQ ID NO: 23892 - RNA, 20 nt, Artificial Sequence
  Synthetic oligonucleotide: Ptpn6-228
ugaaaccacuaagaagaagc

SEQ ID NO: 23893 - RNA, 21 nt, Artificial Sequence
  Synthetic oligonucleotide: Ptpn6-4485
uugaaaccacuaagaagaagc

SEQ ID NO: 23894 - RNA, 22 nt, Artificial Sequence
  Synthetic oligonucleotide: Ptpn6-4486
auugaaaccacuaagaagaagc

SEQ ID NO: 23895 - RNA, 23 nt, Artificial Sequence
  Synthetic oligonucleotide: Ptpn6-4487
cauugaaaccacuaagaagaagc

SEQ ID NO: 23896 - RNA, 24 nt, Artificial Sequence
  Synthetic oligonucleotide: Ptpn6-4488
ucauugaaaccacuaagaagaagc

SEQ ID NO: 23897 - RNA, 18 nt, Artificial Sequence
  Synthetic oligonucleotide: Ptpn6-4489
cucagaguuugcagaagc

SEQ ID NO: 23898 - RNA, 19 nt, Artificial Sequence
  Synthetic oligonucleotide: Ptpn6-4490
ucucagaguuugcagaagc

SEQ ID NO: 23899 - RNA, 20 nt, Artificial Sequence
  Synthetic oligonucleotide: Ptpn6-2674
aucucagaguuugcagaagc

SEQ ID NO: 23900 - RNA, 21 nt, Artificial Sequence
  Synthetic oligonucleotide: Ptpn6-4491
caucucagaguuugcagaagc

SEQ ID NO: 23901 - RNA, 22 nt, Artificial Sequence
  Synthetic oligonucleotide: Ptpn6-4492
acaucucagaguuugcagaagc

SEQ ID NO: 23902 - RNA, 23 nt, Artificial Sequence
  Synthetic oligonucleotide: Ptpn6-4493
cacaucucagaguuugcagaagc

SEQ ID NO: 23903 - RNA, 24 nt, Artificial Sequence
  Synthetic oligonucleotide: Ptpn6-4494
ccacaucucagaguuugcagaagc

SEQ ID NO: 23904 - RNA, 18 nt, Artificial Sequence
  Synthetic oligonucleotide: Ptpn6-4495
augggguccccagugagc

SEQ ID NO: 23905 - RNA, 19 nt, Artificial Sequence
  Synthetic oligonucleotide: Ptpn6-4496
caugggguccccagugagc

SEQ ID NO: 23906 - RNA, 20 nt, Artificial Sequence
  Synthetic oligonucleotide: Ptpn6-699
ccaugggguccccagugagc

SEQ ID NO: 23907 - RNA, 21 nt, Artificial Sequence
  Synthetic oligonucleotide: Ptpn6-4497
accaugggguccccagugagc

SEQ ID NO: 23908 - RNA, 22 nt, Artificial Sequence
  Synthetic oligonucleotide: Ptpn6-4498
gaccaugggguccccagugagc

SEQ ID NO: 23909 - RNA, 23 nt, Artificial Sequence
  Synthetic oligonucleotide: Ptpn6-4499
cgaccaugggguccccagugagc

SEQ ID NO: 23910 - RNA, 24 nt, Artificial Sequence
  Synthetic oligonucleotide: Ptpn6-4500
ccgaccaugggguccccagugagc

SEQ ID NO: 23911 - RNA, 18 nt, Artificial Sequence
  Synthetic oligonucleotide: Ptpn6-4501
gucaaaccucagguccgc

SEQ ID NO: 23912 - RNA, 19 nt, Artificial Sequence
  Synthetic oligonucleotide: Ptpn6-4502
agucaaaccucagguccgc

SEQ ID NO: 23913 - RNA, 20 nt, Artificial Sequence
  Synthetic oligonucleotide: Ptpn6-4503
cagucaaaccucagguccgc

SEQ ID NO: 23914 - RNA, 21 nt, Artificial Sequence
  Synthetic oligonucleotide: Ptpn6-4504
gcagucaaaccucagguccgc

SEQ ID NO: 23915 - RNA, 22 nt, Artificial Sequence
  Synthetic oligonucleotide: Ptpn6-4505
ggcagucaaaccucagguccgc

SEQ ID NO: 23916 - RNA, 23 nt, Artificial Sequence
  Synthetic oligonucleotide: Ptpn6-4506
gggcagucaaaccucagguccgc

SEQ ID NO: 23917 - RNA, 24 nt, Artificial Sequence
  Synthetic oligonucleotide: Ptpn6-4507
ggggcagucaaaccucagguccgc

SEQ ID NO: 23918 - RNA, 18 nt, Artificial Sequence
  Synthetic oligonucleotide: Ptpn6-4508
auggugcgggcgcagcgc

SEQ ID NO: 23919 - RNA, 19 nt, Artificial Sequence
  Synthetic oligonucleotide: Ptpn6-4509
gauggugcgggcgcagcgc

SEQ ID NO: 23920 - RNA, 20 nt, Artificial Sequence
  Synthetic oligonucleotide: Ptpn6-711
agauggugcgggcgcagcgc

SEQ ID NO: 23921 - RNA, 21 nt, Artificial Sequence
  Synthetic oligonucleotide: Ptpn6-4510
cagauggugcgggcgcagcgc

SEQ ID NO: 23922 - RNA, 22 nt, Artificial Sequence
  Synthetic oligonucleotide: Ptpn6-4511
ccagauggugcgggcgcagcgc

SEQ ID NO: 23923 - RNA, 23 nt, Artificial Sequence
  Synthetic oligonucleotide: Ptpn6-4512
uccagauggugcgggcgcagcgc

SEQ ID NO: 23924 - RNA, 24 nt, Artificial Sequence
  Synthetic oligonucleotide: Ptpn6-4513
auccagauggugcgggcgcagcgc

SEQ ID NO: 23925 - RNA, 18 nt, Artificial Sequence
  Synthetic oligonucleotide: Ptpn6-4514
accagaucaaccagcggc

SEQ ID NO: 23926 - RNA, 19 nt, Artificial Sequence
  Synthetic oligonucleotide: Ptpn6-4515
gaccagaucaaccagcggc

SEQ ID NO: 23927 - RNA, 20 nt, Artificial Sequence
  Synthetic oligonucleotide: Ptpn6-214
ggaccagaucaaccagcggc

SEQ ID NO: 23928 - RNA, 21 nt, Artificial Sequence
  Synthetic oligonucleotide: Ptpn6-4516
uggaccagaucaaccagcggc

SEQ ID NO: 23929 - RNA, 22 nt, Artificial Sequence
  Synthetic oligonucleotide: Ptpn6-4517
cuggaccagaucaaccagcggc

SEQ ID NO: 23930 - RNA, 23 nt, Artificial Sequence
  Synthetic oligonucleotide: Ptpn6-4518
ccuggaccagaucaaccagcggc

SEQ ID NO: 23931 - RNA, 24 nt, Artificial Sequence
  Synthetic oligonucleotide: Ptpn6-4519
uccuggaccagaucaaccagcggc

SEQ ID NO: 23932 - RNA, 18 nt, Artificial Sequence
  Synthetic oligonucleotide: Ptpn6-4520
gucuggaagggcagcggc

SEQ ID NO: 23933 - RNA, 19 nt, Artificial Sequence
  Synthetic oligonucleotide: Ptpn6-4521
cgucuggaagggcagcggc

SEQ ID NO: 23934 - RNA, 20 nt, Artificial Sequence
  Synthetic oligonucleotide: Ptpn6-664
gcgucuggaagggcagcggc

SEQ ID NO: 23935 - RNA, 21 nt, Artificial Sequence
  Synthetic oligonucleotide: Ptpn6-4522
agcgucuggaagggcagcggc

SEQ ID NO: 23936 - RNA, 22 nt, Artificial Sequence
  Synthetic oligonucleotide: Ptpn6-4523
cagcgucuggaagggcagcggc

SEQ ID NO: 23937 - RNA, 23 nt, Artificial Sequence
  Synthetic oligonucleotide: Ptpn6-4524
ccagcgucuggaagggcagcggc

SEQ ID NO: 23938 - RNA, 24 nt, Artificial Sequence
  Synthetic oligonucleotide: Ptpn6-4525
accagcgucuggaagggcagcggc

SEQ ID NO: 23939 - RNA, 18 nt, Artificial Sequence
  Synthetic oligonucleotide: Ptpn6-4526
cggccagagaacaagggc

SEQ ID NO: 23940 - RNA, 19 nt, Artificial Sequence
  Synthetic oligonucleotide: Ptpn6-4527
gcggccagagaacaagggc

SEQ ID NO: 23941 - RNA, 20 nt, Artificial Sequence
  Synthetic oligonucleotide: Ptpn6-667
agcggccagagaacaagggc

SEQ ID NO: 23942 - RNA, 21 nt, Artificial Sequence
  Synthetic oligonucleotide: Ptpn6-4528
cagcggccagagaacaagggc

SEQ ID NO: 23943 - RNA, 22 nt, Artificial Sequence
  Synthetic oligonucleotide: Ptpn6-4529
gcagcggccagagaacaagggc

SEQ ID NO: 23944 - RNA, 23 nt, Artificial Sequence
  Synthetic oligonucleotide: Ptpn6-4530
ggcagcggccagagaacaagggc

SEQ ID NO: 23945 - RNA, 24 nt, Artificial Sequence
  Synthetic oligonucleotide: Ptpn6-4531
gggcagcggccagagaacaagggc

SEQ ID NO: 23946 - RNA, 18 nt, Artificial Sequence
  Synthetic oligonucleotide: Ptpn6-4532
ggugguucgcagaagggc

SEQ ID NO: 23947 - RNA, 19 nt, Artificial Sequence
  Synthetic oligonucleotide: Ptpn6-4533
aggugguucgcagaagggc

SEQ ID NO: 23948 - RNA, 20 nt, Artificial Sequence
  Synthetic oligonucleotide: Ptpn6-4534
aaggugguucgcagaagggc

SEQ ID NO: 23949 - RNA, 21 nt, Artificial Sequence
  Synthetic oligonucleotide: Ptpn6-4535
gaaggugguucgcagaagggc

SEQ ID NO: 23950 - RNA, 22 nt, Artificial Sequence
  Synthetic oligonucleotide: Ptpn6-4536
ggaaggugguucgcagaagggc

SEQ ID NO: 23951 - RNA, 23 nt, Artificial Sequence
  Synthetic oligonucleotide: Ptpn6-4537
gggaaggugguucgcagaagggc

SEQ ID NO: 23952 - RNA, 24 nt, Artificial Sequence
  Synthetic oligonucleotide: Ptpn6-4538
ugggaaggugguucgcagaagggc

SEQ ID NO: 23953 - RNA, 18 nt, Artificial Sequence
  Synthetic oligonucleotide: Ptpn6-4539
gugcgugcagagcagggc

SEQ ID NO: 23954 - RNA, 19 nt, Artificial Sequence
  Synthetic oligonucleotide: Ptpn6-4540
ggugcgugcagagcagggc

SEQ ID NO: 23955 - RNA, 20 nt, Artificial Sequence
  Synthetic oligonucleotide: Ptpn6-4541
aggugcgugcagagcagggc

SEQ ID NO: 23956 - RNA, 21 nt, Artificial Sequence
  Synthetic oligonucleotide: Ptpn6-4542
caggugcgugcagagcagggc

SEQ ID NO: 23957 - RNA, 22 nt, Artificial Sequence
  Synthetic oligonucleotide: Ptpn6-4543
gcaggugcgugcagagcagggc

SEQ ID NO: 23958 - RNA, 23 nt, Artificial Sequence
  Synthetic oligonucleotide: Ptpn6-4544
ugcaggugcgugcagagcagggc

SEQ ID NO: 23959 - RNA, 24 nt, Artificial Sequence
  Synthetic oligonucleotide: Ptpn6-4545
cugcaggugcgugcagagcagggc

SEQ ID NO: 23960 - RNA, 18 nt, Artificial Sequence
  Synthetic oligonucleotide: Ptpn6-4546
gguggggaccggcagggc

SEQ ID NO: 23961 - RNA, 19 nt, Artificial Sequence
  Synthetic oligonucleotide: Ptpn6-4547
ugguggggaccggcagggc

SEQ ID NO: 23962 - RNA, 20 nt, Artificial Sequence
  Synthetic oligonucleotide: Ptpn6-2681
augguggggaccggcagggc

SEQ ID NO: 23963 - RNA, 21 nt, Artificial Sequence
  Synthetic oligonucleotide: Ptpn6-4548
caugguggggaccggcagggc

SEQ ID NO: 23964 - RNA, 22 nt, Artificial Sequence
  Synthetic oligonucleotide: Ptpn6-4549
gcaugguggggaccggcagggc

SEQ ID NO: 23965 - RNA, 23 nt, Artificial Sequence
  Synthetic oligonucleotide: Ptpn6-4550
ugcaugguggggaccggcagggc

SEQ ID NO: 23966 - RNA, 24 nt, Artificial Sequence
  Synthetic oligonucleotide: Ptpn6-4551
gugcaugguggggaccggcagggc

SEQ ID NO: 23967 - RNA, 18 nt, Artificial Sequence
  Synthetic oligonucleotide: Ptpn6-4552
aaugcgucccauacuggc

SEQ ID NO: 23968 - RNA, 19 nt, Artificial Sequence
  Synthetic oligonucleotide: Ptpn6-4553
aaaugcgucccauacuggc

SEQ ID NO: 23969 - RNA, 20 nt, Artificial Sequence
  Synthetic oligonucleotide: Ptpn6-686
caaaugcgucccauacuggc

SEQ ID NO: 23970 - RNA, 21 nt, Artificial Sequence
  Synthetic oligonucleotide: Ptpn6-4554
acaaaugcgucccauacuggc

SEQ ID NO: 23971 - RNA, 22 nt, Artificial Sequence
  Synthetic oligonucleotide: Ptpn6-4555
aacaaaugcgucccauacuggc

SEQ ID NO: 23972 - RNA, 23 nt, Artificial Sequence
  Synthetic oligonucleotide: Ptpn6-4556
gaacaaaugcgucccauacuggc

SEQ ID NO: 23973 - RNA, 24 nt, Artificial Sequence
  Synthetic oligonucleotide: Ptpn6-4557
ggaacaaaugcgucccauacuggc

SEQ ID NO: 23974 - RNA, 18 nt, Artificial Sequence
  Synthetic oligonucleotide: Ptpn6-4558
ucuggcagauggcguggc

SEQ ID NO: 23975 - RNA, 19 nt, Artificial Sequence
  Synthetic oligonucleotide: Ptpn6-4559
uucuggcagauggcguggc

SEQ ID NO: 23976 - RNA, 20 nt, Artificial Sequence
  Synthetic oligonucleotide: Ptpn6-188
cuucuggcagauggcguggc

SEQ ID NO: 23977 - RNA, 21 nt, Artificial Sequence
  Synthetic oligonucleotide: Ptpn6-4560
acuucuggcagauggcguggc

SEQ ID NO: 23978 - RNA, 22 nt, Artificial Sequence
  Synthetic oligonucleotide: Ptpn6-4561
gacuucuggcagauggcguggc

SEQ ID NO: 23979 - RNA, 23 nt, Artificial Sequence
  Synthetic oligonucleotide: Ptpn6-4562
ugacuucuggcagauggcguggc

SEQ ID NO: 23980 - RNA, 24 nt, Artificial Sequence
  Synthetic oligonucleotide: Ptpn6-4563
augacuucuggcagauggcguggc

SEQ ID NO: 23981 - RNA, 18 nt, Artificial Sequence
  Synthetic oligonucleotide: Ptpn6-4564
uacucugugaccaacugc

SEQ ID NO: 23982 - RNA, 19 nt, Artificial Sequence
  Synthetic oligonucleotide: Ptpn6-4565
cuacucugugaccaacugc

SEQ ID NO: 23983 - RNA, 20 nt, Artificial Sequence
  Synthetic oligonucleotide: Ptpn6-199
ccuacucugugaccaacugc

SEQ ID NO: 23984 - RNA, 21 nt, Artificial Sequence
  Synthetic oligonucleotide: Ptpn6-4566
cccuacucugugaccaacugc

SEQ ID NO: 23985 - RNA, 22 nt, Artificial Sequence
  Synthetic oligonucleotide: Ptpn6-4567
gcccuacucugugaccaacugc

SEQ ID NO: 23986 - RNA, 23 nt, Artificial Sequence
  Synthetic oligonucleotide: Ptpn6-4568
ggcccuacucugugaccaacugc

SEQ ID NO: 23987 - RNA, 24 nt, Artificial Sequence
  Synthetic oligonucleotide: Ptpn6-4569
gggcccuacucugugaccaacugc

SEQ ID NO: 23988 - RNA, 18 nt, Artificial Sequence
  Synthetic oligonucleotide: Ptpn6-4570
acagccgagugauccugc

SEQ ID NO: 23989 - RNA, 19 nt, Artificial Sequence
  Synthetic oligonucleotide: Ptpn6-4571
cacagccgagugauccugc

SEQ ID NO: 23990 - RNA, 20 nt, Artificial Sequence
  Synthetic oligonucleotide: Ptpn6-174
ccacagccgagugauccugc

SEQ ID NO: 23991 - RNA, 21 nt, Artificial Sequence
  Synthetic oligonucleotide: Ptpn6-4572
accacagccgagugauccugc

SEQ ID NO: 23992 - RNA, 22 nt, Artificial Sequence
  Synthetic oligonucleotide: Ptpn6-4573
gaccacagccgagugauccugc

SEQ ID NO: 23993 - RNA, 23 nt, Artificial Sequence
  Synthetic oligonucleotide: Ptpn6-4574
ugaccacagccgagugauccugc

SEQ ID NO: 23994 - RNA, 24 nt, Artificial Sequence
  Synthetic oligonucleotide: Ptpn6-4575
uugaccacagccgagugauccugc

SEQ ID NO: 23995 - RNA, 18 nt, Artificial Sequence
  Synthetic oligonucleotide: Ptpn6-4576
gacugugacauugacauc

SEQ ID NO: 23996 - RNA, 19 nt, Artificial Sequence
  Synthetic oligonucleotide: Ptpn6-4577
ggacugugacauugacauc

SEQ ID NO: 23997 - RNA, 20 nt, Artificial Sequence
  Synthetic oligonucleotide: Ptpn6-709
uggacugugacauugacauc

SEQ ID NO: 23998 - RNA, 21 nt, Artificial Sequence
  Synthetic oligonucleotide: Ptpn6-4578
cuggacugugacauugacauc

SEQ ID NO: 23999 - RNA, 22 nt, Artificial Sequence
  Synthetic oligonucleotide: Ptpn6-4579
ccuggacugugacauugacauc

SEQ ID NO: 24000 - RNA, 23 nt, Artificial Sequence
  Synthetic oligonucleotide: Ptpn6-4580
gccuggacugugacauugacauc

SEQ ID NO: 24001 - RNA, 24 nt, Artificial Sequence
  Synthetic oligonucleotide: Ptpn6-4581
cgccuggacugugacauugacauc

SEQ ID NO: 24002 - RNA, 18 nt, Artificial Sequence
  Synthetic oligonucleotide: Ptpn6-4582
aagagcaaggguucccuc

SEQ ID NO: 24003 - RNA, 19 nt, Artificial Sequence
  Synthetic oligonucleotide: Ptpn6-4583
gaagagcaaggguucccuc

SEQ ID NO: 24004 - RNA, 20 nt, Artificial Sequence
  Synthetic oligonucleotide: Ptpn6-739
agaagagcaaggguucccuc

SEQ ID NO: 24005 - RNA, 21 nt, Artificial Sequence
  Synthetic oligonucleotide: Ptpn6-4584
gagaagagcaaggguucccuc

SEQ ID NO: 24006 - RNA, 22 nt, Artificial Sequence
  Synthetic oligonucleotide: Ptpn6-4585
ggagaagagcaaggguucccuc

SEQ ID NO: 24007 - RNA, 23 nt, Artificial Sequence
  Synthetic oligonucleotide: Ptpn6-4586
aggagaagagcaaggguucccuc

SEQ ID NO: 24008 - RNA, 24 nt, Artificial Sequence
  Synthetic oligonucleotide: Ptpn6-4587
aaggagaagagcaaggguucccuc

SEQ ID NO: 24009 - RNA, 18 nt, Artificial Sequence
  Synthetic oligonucleotide: Ptpn6-4588
gagaccuucgacagccuc

SEQ ID NO: 24010 - RNA, 19 nt, Artificial Sequence
  Synthetic oligonucleotide: Ptpn6-4589
ggagaccuucgacagccuc

SEQ ID NO: 24011 - RNA, 20 nt, Artificial Sequence
  Synthetic oligonucleotide: Ptpn6-631
uggagaccuucgacagccuc

SEQ ID NO: 24012 - RNA, 21 nt, Artificial Sequence
  Synthetic oligonucleotide: Ptpn6-4590
uuggagaccuucgacagccuc

SEQ ID NO: 24013 - RNA, 22 nt, Artificial Sequence
  Synthetic oligonucleotide: Ptpn6-4591
uuuggagaccuucgacagccuc

SEQ ID NO: 24014 - RNA, 23 nt, Artificial Sequence
  Synthetic oligonucleotide: Ptpn6-4592
guuuggagaccuucgacagccuc

SEQ ID NO: 24015 - RNA, 24 nt, Artificial Sequence
  Synthetic oligonucleotide: Ptpn6-4593
gguuuggagaccuucgacagccuc

SEQ ID NO: 24016 - RNA, 18 nt, Artificial Sequence
  Synthetic oligonucleotide: Ptpn6-4594
auugucaucgacaugcuc

SEQ ID NO: 24017 - RNA, 19 nt, Artificial Sequence
  Synthetic oligonucleotide: Ptpn6-4595
cauugucaucgacaugcuc

SEQ ID NO: 24018 - RNA, 20 nt, Artificial Sequence
  Synthetic oligonucleotide: Ptpn6-706
ucauugucaucgacaugcuc

SEQ ID NO: 24019 - RNA, 21 nt, Artificial Sequence
  Synthetic oligonucleotide: Ptpn6-4596
aucauugucaucgacaugcuc

SEQ ID NO: 24020 - RNA, 22 nt, Artificial Sequence
  Synthetic oligonucleotide: Ptpn6-4597
caucauugucaucgacaugcuc

SEQ ID NO: 24021 - RNA, 23 nt, Artificial Sequence
  Synthetic oligonucleotide: Ptpn6-4598
ccaucauugucaucgacaugcuc

SEQ ID NO: 24022 - RNA, 24 nt, Artificial Sequence
  Synthetic oligonucleotide: Ptpn6-4599
accaucauugucaucgacaugcuc

SEQ ID NO: 24023 - RNA, 18 nt, Artificial Sequence
  Synthetic oligonucleotide: Ptpn6-4600
agaacuugcaccagcguc

SEQ ID NO: 24024 - RNA, 19 nt, Artificial Sequence
  Synthetic oligonucleotide: Ptpn6-4601
aagaacuugcaccagcguc

SEQ ID NO: 24025 - RNA, 20 nt, Artificial Sequence
  Synthetic oligonucleotide: Ptpn6-168
gaagaacuugcaccagcguc

SEQ ID NO: 24026 - RNA, 21 nt, Artificial Sequence
  Synthetic oligonucleotide: Ptpn6-4602
ugaagaacuugcaccagcguc

SEQ ID NO: 24027 - RNA, 22 nt, Artificial Sequence
  Synthetic oligonucleotide: Ptpn6-4603
gugaagaacuugcaccagcguc

SEQ ID NO: 24028 - RNA, 23 nt, Artificial Sequence
  Synthetic oligonucleotide: Ptpn6-4604
ggugaagaacuugcaccagcguc

SEQ ID NO: 24029 - RNA, 24 nt, Artificial Sequence
  Synthetic oligonucleotide: Ptpn6-4605
aggugaagaacuugcaccagcguc

SEQ ID NO: 24030 - RNA, 18 nt, Artificial Sequence
  Synthetic oligonucleotide: Ptpn6-4606
ucgccagccaggguuguc

SEQ ID NO: 24031 - RNA, 19 nt, Artificial Sequence
  Synthetic oligonucleotide: Ptpn6-4607
aucgccagccaggguuguc

SEQ ID NO: 24032 - RNA, 20 nt, Artificial Sequence
  Synthetic oligonucleotide: Ptpn6-182
caucgccagccaggguuguc

SEQ ID NO: 24033 - RNA, 21 nt, Artificial Sequence
  Synthetic oligonucleotide: Ptpn6-4608
acaucgccagccaggguuguc

SEQ ID NO: 24034 - RNA, 22 nt, Artificial Sequence
  Synthetic oligonucleotide: Ptpn6-4609
uacaucgccagccaggguuguc

SEQ ID NO: 24035 - RNA, 23 nt, Artificial Sequence
  Synthetic oligonucleotide: Ptpn6-4610
cuacaucgccagccaggguuguc

SEQ ID NO: 24036 - RNA, 24 nt, Artificial Sequence
  Synthetic oligonucleotide: Ptpn6-4611
ccuacaucgccagccaggguuguc

SEQ ID NO: 24037 - RNA, 18 nt, Artificial Sequence
  Synthetic oligonucleotide: Ptpn6-4612
cccccggagaccugauuc

SEQ ID NO: 24038 - RNA, 19 nt, Artificial Sequence
  Synthetic oligonucleotide: Ptpn6-4613
gcccccggagaccugauuc

SEQ ID NO: 24039 - RNA, 20 nt, Artificial Sequence
  Synthetic oligonucleotide: Ptpn6-2690
ugcccccggagaccugauuc

SEQ ID NO: 24040 - RNA, 21 nt, Artificial Sequence
  Synthetic oligonucleotide: Ptpn6-4614
gugcccccggagaccugauuc

SEQ ID NO: 24041 - RNA, 22 nt, Artificial Sequence
  Synthetic oligonucleotide: Ptpn6-4615
agugcccccggagaccugauuc

SEQ ID NO: 24042 - RNA, 23 nt, Artificial Sequence
  Synthetic oligonucleotide: Ptpn6-4616
cagugcccccggagaccugauuc

SEQ ID NO: 24043 - RNA, 24 nt, Artificial Sequence
  Synthetic oligonucleotide: Ptpn6-4617
ucagugcccccggagaccugauuc

SEQ ID NO: 24044 - RNA, 18 nt, Artificial Sequence
  Synthetic oligonucleotide: Ptpn6-4618
ggggguguccucagcuuc

SEQ ID NO: 24045 - RNA, 19 nt, Artificial Sequence
  Synthetic oligonucleotide: Ptpn6-4619
uggggguguccucagcuuc

SEQ ID NO: 24046 - RNA, 20 nt, Artificial Sequence
  Synthetic oligonucleotide: Ptpn6-702
cuggggguguccucagcuuc

SEQ ID NO: 24047 - RNA, 21 nt, Artificial Sequence
  Synthetic oligonucleotide: Ptpn6-4620
ccuggggguguccucagcuuc

SEQ ID NO: 24048 - RNA, 22 nt, Artificial Sequence
  Synthetic oligonucleotide: Ptpn6-4621
gccuggggguguccucagcuuc

SEQ ID NO: 24049 - RNA, 23 nt, Artificial Sequence
  Synthetic oligonucleotide: Ptpn6-4622
agccuggggguguccucagcuuc

SEQ ID NO: 24050 - RNA, 24 nt, Artificial Sequence
  Synthetic oligonucleotide: Ptpn6-4623
gagccuggggguguccucagcuuc

SEQ ID NO: 24051 - RNA, 18 nt, Artificial Sequence
  Synthetic oligonucleotide: Ptpn6-4624
acagccaaggcuggcuuc

SEQ ID NO: 24052 - RNA, 19 nt, Artificial Sequence
  Synthetic oligonucleotide: Ptpn6-4625
uacagccaaggcuggcuuc

SEQ ID NO: 24053 - RNA, 20 nt, Artificial Sequence
  Synthetic oligonucleotide: Ptpn6-165
auacagccaaggcuggcuuc

SEQ ID NO: 24054 - RNA, 21 nt, Artificial Sequence
  Synthetic oligonucleotide: Ptpn6-4626
gauacagccaaggcuggcuuc

SEQ ID NO: 24055 - RNA, 22 nt, Artificial Sequence
  Synthetic oligonucleotide: Ptpn6-4627
ggauacagccaaggcuggcuuc

SEQ ID NO: 24056 - RNA, 23 nt, Artificial Sequence
  Synthetic oligonucleotide: Ptpn6-4628
aggauacagccaaggcuggcuuc

SEQ ID NO: 24057 - RNA, 24 nt, Artificial Sequence
  Synthetic oligonucleotide: Ptpn6-4629
gaggauacagccaaggcuggcuuc

SEQ ID NO: 24058 - RNA, 18 nt, Artificial Sequence
  Synthetic oligonucleotide: Ptpn6-4630
gaccugguggagcauuuc

SEQ ID NO: 24059 - RNA, 19 nt, Artificial Sequence
  Synthetic oligonucleotide: Ptpn6-4631
ggaccugguggagcauuuc

SEQ ID NO: 24060 - RNA, 20 nt, Artificial Sequence
  Synthetic oligonucleotide: Ptpn6-638
cggaccugguggagcauuuc

SEQ ID NO: 24061 - RNA, 21 nt, Artificial Sequence
  Synthetic oligonucleotide: Ptpn6-4632
acggaccugguggagcauuuc

SEQ ID NO: 24062 - RNA, 22 nt, Artificial Sequence
  Synthetic oligonucleotide: Ptpn6-4633
cacggaccugguggagcauuuc

SEQ ID NO: 24063 - RNA, 23 nt, Artificial Sequence
  Synthetic oligonucleotide: Ptpn6-4634
ucacggaccugguggagcauuuc

SEQ ID NO: 24064 - RNA, 24 nt, Artificial Sequence
  Synthetic oligonucleotide: Ptpn6-4635
cucacggaccugguggagcauuuc

SEQ ID NO: 24065 - RNA, 18 nt, Artificial Sequence
  Synthetic oligonucleotide: Ptpn6-4636
cugcacacuaagaacaag

SEQ ID NO: 24066 - RNA, 19 nt, Artificial Sequence
  Synthetic oligonucleotide: Ptpn6-4637
ccugcacacuaagaacaag

SEQ ID NO: 24067 - RNA, 20 nt, Artificial Sequence
  Synthetic oligonucleotide: Ptpn6-233
accugcacacuaagaacaag

SEQ ID NO: 24068 - RNA, 21 nt, Artificial Sequence
  Synthetic oligonucleotide: Ptpn6-4638
aaccugcacacuaagaacaag

SEQ ID NO: 24069 - RNA, 22 nt, Artificial Sequence
  Synthetic oligonucleotide: Ptpn6-4639
gaaccugcacacuaagaacaag

SEQ ID NO: 24070 - RNA, 23 nt, Artificial Sequence
  Synthetic oligonucleotide: Ptpn6-4640
agaaccugcacacuaagaacaag

SEQ ID NO: 24071 - RNA, 24 nt, Artificial Sequence
  Synthetic oligonucleotide: Ptpn6-4641
gagaaccugcacacuaagaacaag

SEQ ID NO: 24072 - RNA, 18 nt, Artificial Sequence
  Synthetic oligonucleotide: Ptpn6-4642
cagcggucagcagacaag

SEQ ID NO: 24073 - RNA, 19 nt, Artificial Sequence
  Synthetic oligonucleotide: Ptpn6-4643
gcagcggucagcagacaag

SEQ ID NO: 24074 - RNA, 20 nt, Artificial Sequence
  Synthetic oligonucleotide: Ptpn6-736
agcagcggucagcagacaag

SEQ ID NO: 24075 - RNA, 21 nt, Artificial Sequence
  Synthetic oligonucleotide: Ptpn6-4644
aagcagcggucagcagacaag

SEQ ID NO: 24076 - RNA, 22 nt, Artificial Sequence
  Synthetic oligonucleotide: Ptpn6-4645
gaagcagcggucagcagacaag

SEQ ID NO: 24077 - RNA, 23 nt, Artificial Sequence
  Synthetic oligonucleotide: Ptpn6-4646
agaagcagcggucagcagacaag

SEQ ID NO: 24078 - RNA, 24 nt, Artificial Sequence
  Synthetic oligonucleotide: Ptpn6-4647
aagaagcagcggucagcagacaag

SEQ ID NO: 24079 - RNA, 18 nt, Artificial Sequence
  Synthetic oligonucleotide: Ptpn6-4648
agcaaggguucccucaag

SEQ ID NO: 24080 - RNA, 19 nt, Artificial Sequence
  Synthetic oligonucleotide: Ptpn6-4649
gagcaaggguucccucaag

SEQ ID NO: 24081 - RNA, 20 nt, Artificial Sequence
  Synthetic oligonucleotide: Ptpn6-240
agagcaaggguucccucaag

SEQ ID NO: 24082 - RNA, 21 nt, Artificial Sequence
  Synthetic oligonucleotide: Ptpn6-4650
aagagcaaggguucccucaag

SEQ ID NO: 24083 - RNA, 22 nt, Artificial Sequence
  Synthetic oligonucleotide: Ptpn6-4651
gaagagcaaggguucccucaag

SEQ ID NO: 24084 - RNA, 23 nt, Artificial Sequence
  Synthetic oligonucleotide: Ptpn6-4652
agaagagcaaggguucccucaag

SEQ ID NO: 24085 - RNA, 24 nt, Artificial Sequence
  Synthetic oligonucleotide: Ptpn6-4653
gagaagagcaaggguucccucaag

SEQ ID NO: 24086 - RNA, 18 nt, Artificial Sequence
  Synthetic oligonucleotide: Ptpn6-4654
uuggaacugaacaagaag

SEQ ID NO: 24087 - RNA, 19 nt, Artificial Sequence
  Synthetic oligonucleotide: Ptpn6-4655
guuggaacugaacaagaag

SEQ ID NO: 24088 - RNA, 20 nt, Artificial Sequence
  Synthetic oligonucleotide: Ptpn6-650
uguuggaacugaacaagaag

SEQ ID NO: 24089 - RNA, 21 nt, Artificial Sequence
  Synthetic oligonucleotide: Ptpn6-4656
guguuggaacugaacaagaag

SEQ ID NO: 24090 - RNA, 22 nt, Artificial Sequence
  Synthetic oligonucleotide: Ptpn6-4657
aguguuggaacugaacaagaag

SEQ ID NO: 24091 - RNA, 23 nt, Artificial Sequence
  Synthetic oligonucleotide: Ptpn6-4658
gaguguuggaacugaacaagaag

SEQ ID NO: 24092 - RNA, 24 nt, Artificial Sequence
  Synthetic oligonucleotide: Ptpn6-4659
cgaguguuggaacugaacaagaag

SEQ ID NO: 24093 - RNA, 18 nt, Artificial Sequence
  Synthetic oligonucleotide: Ptpn6-4660
guggagcauuucaagaag

SEQ ID NO: 24094 - RNA, 19 nt, Artificial Sequence
  Synthetic oligonucleotide: Ptpn6-4661
gguggagcauuucaagaag

SEQ ID NO: 24095 - RNA, 20 nt, Artificial Sequence
  Synthetic oligonucleotide: Ptpn6-639
ugguggagcauuucaagaag

SEQ ID NO: 24096 - RNA, 21 nt, Artificial Sequence
  Synthetic oligonucleotide: Ptpn6-4662
cugguggagcauuucaagaag

SEQ ID NO: 24097 - RNA, 22 nt, Artificial Sequence
  Synthetic oligonucleotide: Ptpn6-4663
ccugguggagcauuucaagaag

SEQ ID NO: 24098 - RNA, 23 nt, Artificial Sequence
  Synthetic oligonucleotide: Ptpn6-4664
accugguggagcauuucaagaag

SEQ ID NO: 24099 - RNA, 24 nt, Artificial Sequence
  Synthetic oligonucleotide: Ptpn6-4665
gaccugguggagcauuucaagaag

SEQ ID NO: 24100 - RNA, 18 nt, Artificial Sequence
  Synthetic oligonucleotide: Ptpn6-4666
gaaaccacuaagaagaag

SEQ ID NO: 24101 - RNA, 19 nt, Artificial Sequence
  Synthetic oligonucleotide: Ptpn6-4667
ugaaaccacuaagaagaag

SEQ ID NO: 24102 - RNA, 20 nt, Artificial Sequence
  Synthetic oligonucleotide: Ptpn6-717
uugaaaccacuaagaagaag

SEQ ID NO: 24103 - RNA, 21 nt, Artificial Sequence
  Synthetic oligonucleotide: Ptpn6-4668
auugaaaccacuaagaagaag

SEQ ID NO: 24104 - RNA, 22 nt, Artificial Sequence
  Synthetic oligonucleotide: Ptpn6-4669
cauugaaaccacuaagaagaag

SEQ ID NO: 24105 - RNA, 23 nt, Artificial Sequence
  Synthetic oligonucleotide: Ptpn6-4670
ucauugaaaccacuaagaagaag

SEQ ID NO: 24106 - RNA, 24 nt, Artificial Sequence
  Synthetic oligonucleotide: Ptpn6-4671
uucauugaaaccacuaagaagaag

SEQ ID NO: 24107 - RNA, 18 nt, Artificial Sequence
  Synthetic oligonucleotide: Ptpn6-4672
ucucagaguuugcagaag

SEQ ID NO: 24108 - RNA, 19 nt, Artificial Sequence
  Synthetic oligonucleotide: Ptpn6-4673
aucucagaguuugcagaag

SEQ ID NO: 24109 - RNA, 20 nt, Artificial Sequence
  Synthetic oligonucleotide: Ptpn6-4674
caucucagaguuugcagaag

SEQ ID NO: 24110 - RNA, 21 nt, Artificial Sequence
  Synthetic oligonucleotide: Ptpn6-4675
acaucucagaguuugcagaag

SEQ ID NO: 24111 - RNA, 22 nt, Artificial Sequence
  Synthetic oligonucleotide: Ptpn6-4676
cacaucucagaguuugcagaag

SEQ ID NO: 24112 - RNA, 23 nt, Artificial Sequence
  Synthetic oligonucleotide: Ptpn6-4677
ccacaucucagaguuugcagaag

SEQ ID NO: 24113 - RNA, 24 nt, Artificial Sequence
  Synthetic oligonucleotide: Ptpn6-4678
cccacaucucagaguuugcagaag

SEQ ID NO: 24114 - RNA, 18 nt, Artificial Sequence
  Synthetic oligonucleotide: Ptpn6-4679
uucauugaaaccacuaag

SEQ ID NO: 24115 - RNA, 19 nt, Artificial Sequence
  Synthetic oligonucleotide: Ptpn6-4680
guucauugaaaccacuaag

SEQ ID NO: 24116 - RNA, 20 nt, Artificial Sequence
  Synthetic oligonucleotide: Ptpn6-716
aguucauugaaaccacuaag

SEQ ID NO: 24117 - RNA, 21 nt, Artificial Sequence
  Synthetic oligonucleotide: Ptpn6-4681
caguucauugaaaccacuaag

SEQ ID NO: 24118 - RNA, 22 nt, Artificial Sequence
  Synthetic oligonucleotide: Ptpn6-4682
ccaguucauugaaaccacuaag

SEQ ID NO: 24119 - RNA, 23 nt, Artificial Sequence
  Synthetic oligonucleotide: Ptpn6-4683
cccaguucauugaaaccacuaag

SEQ ID NO: 24120 - RNA, 24 nt, Artificial Sequence
  Synthetic oligonucleotide: Ptpn6-4684
gcccaguucauugaaaccacuaag

SEQ ID NO: 24121 - RNA, 18 nt, Artificial Sequence
  Synthetic oligonucleotide: Ptpn6-4685
ugggaaggugguucgcag

SEQ ID NO: 24122 - RNA, 19 nt, Artificial Sequence
  Synthetic oligonucleotide: Ptpn6-4686
gugggaaggugguucgcag

SEQ ID NO: 24123 - RNA, 20 nt, Artificial Sequence
  Synthetic oligonucleotide: Ptpn6-4687
agugggaaggugguucgcag

SEQ ID NO: 24124 - RNA, 21 nt, Artificial Sequence
  Synthetic oligonucleotide: Ptpn6-4688
cagugggaaggugguucgcag

SEQ ID NO: 24125 - RNA, 22 nt, Artificial Sequence
  Synthetic oligonucleotide: Ptpn6-4689
acagugggaaggugguucgcag

SEQ ID NO: 24126 - RNA, 23 nt, Artificial Sequence
  Synthetic oligonucleotide: Ptpn6-4690
gacagugggaaggugguucgcag

SEQ ID NO: 24127 - RNA, 24 nt, Artificial Sequence
  Synthetic oligonucleotide: Ptpn6-4691
ggacagugggaaggugguucgcag

SEQ ID NO: 24128 - RNA, 18 nt, Artificial Sequence
  Synthetic oligonucleotide: Ptpn6-4692
uggcagauggcguggcag

SEQ ID NO: 24129 - RNA, 19 nt, Artificial Sequence
  Synthetic oligonucleotide: Ptpn6-4693
cuggcagauggcguggcag

SEQ ID NO: 24130 - RNA, 20 nt, Artificial Sequence
  Synthetic oligonucleotide: Ptpn6-680
ucuggcagauggcguggcag

SEQ ID NO: 24131 - RNA, 21 nt, Artificial Sequence
  Synthetic oligonucleotide: Ptpn6-4694
uucuggcagauggcguggcag

SEQ ID NO: 24132 - RNA, 22 nt, Artificial Sequence
  Synthetic oligonucleotide: Ptpn6-4695
cuucuggcagauggcguggcag

SEQ ID NO: 24133 - RNA, 23 nt, Artificial Sequence
  Synthetic oligonucleotide: Ptpn6-4696
acuucuggcagauggcguggcag

SEQ ID NO: 24134 - RNA, 24 nt, Artificial Sequence
  Synthetic oligonucleotide: Ptpn6-4697
gacuucuggcagauggcguggcag

SEQ ID NO: 24135 - RNA, 18 nt, Artificial Sequence
  Synthetic oligonucleotide: Ptpn6-4698
caucaucgugcacugcag

SEQ ID NO: 24136 - RNA, 19 nt, Artificial Sequence
  Synthetic oligonucleotide: Ptpn6-4699
ccaucaucgugcacugcag

SEQ ID NO: 24137 - RNA, 20 nt, Artificial Sequence
  Synthetic oligonucleotide: Ptpn6-4700
cccaucaucgugcacugcag

SEQ ID NO: 24138 - RNA, 21 nt, Artificial Sequence
  Synthetic oligonucleotide: Ptpn6-4701
gcccaucaucgugcacugcag

SEQ ID NO: 24139 - RNA, 22 nt, Artificial Sequence
  Synthetic oligonucleotide: Ptpn6-4702
ggcccaucaucgugcacugcag

SEQ ID NO: 24140 - RNA, 23 nt, Artificial Sequence
  Synthetic oligonucleotide: Ptpn6-4703
gggcccaucaucgugcacugcag

SEQ ID NO: 24141 - RNA, 24 nt, Artificial Sequence
  Synthetic oligonucleotide: Ptpn6-4704
agggcccaucaucgugcacugcag

SEQ ID NO: 24142 - RNA, 18 nt, Artificial Sequence
  Synthetic oligonucleotide: Ptpn6-4705
cgcucgggcauggugcag

SEQ ID NO: 24143 - RNA, 19 nt, Artificial Sequence
  Synthetic oligonucleotide: Ptpn6-4706
gcgcucgggcauggugcag

SEQ ID NO: 24144 - RNA, 20 nt, Artificial Sequence
  Synthetic oligonucleotide: Ptpn6-712
agcgcucgggcauggugcag

SEQ ID NO: 24145 - RNA, 21 nt, Artificial Sequence
  Synthetic oligonucleotide: Ptpn6-4707
cagcgcucgggcauggugcag

SEQ ID NO: 24146 - RNA, 22 nt, Artificial Sequence
  Synthetic oligonucleotide: Ptpn6-4708
gcagcgcucgggcauggugcag

SEQ ID NO: 24147 - RNA, 23 nt, Artificial Sequence
  Synthetic oligonucleotide: Ptpn6-4709
cgcagcgcucgggcauggugcag

SEQ ID NO: 24148 - RNA, 24 nt, Artificial Sequence
  Synthetic oligonucleotide: Ptpn6-4710
gcgcagcgcucgggcauggugcag

SEQ ID NO: 24149 - RNA, 18 nt, Artificial Sequence
  Synthetic oligonucleotide: Ptpn6-4711
cugcaggugcgugcagag

SEQ ID NO: 24150 - RNA, 19 nt, Artificial Sequence
  Synthetic oligonucleotide: Ptpn6-4712
ccugcaggugcgugcagag

SEQ ID NO: 24151 - RNA, 20 nt, Artificial Sequence
  Synthetic oligonucleotide: Ptpn6-4713
uccugcaggugcgugcagag

SEQ ID NO: 24152 - RNA, 21 nt, Artificial Sequence
  Synthetic oligonucleotide: Ptpn6-4714
guccugcaggugcgugcagag

SEQ ID NO: 24153 - RNA, 22 nt, Artificial Sequence
  Synthetic oligonucleotide: Ptpn6-4715
gguccugcaggugcgugcagag

SEQ ID NO: 24154 - RNA, 23 nt, Artificial Sequence
  Synthetic oligonucleotide: Ptpn6-4716
agguccugcaggugcgugcagag

SEQ ID NO: 24155 - RNA, 24 nt, Artificial Sequence
  Synthetic oligonucleotide: Ptpn6-4717
gagguccugcaggugcgugcagag

SEQ ID NO: 24156 - RNA, 18 nt, Artificial Sequence
  Synthetic oligonucleotide: Ptpn6-4718
gucaugaccacccgagag

SEQ ID NO: 24157 - RNA, 19 nt, Artificial Sequence
  Synthetic oligonucleotide: Ptpn6-4719
cgucaugaccacccgagag

SEQ ID NO: 24158 - RNA, 20 nt, Artificial Sequence
  Synthetic oligonucleotide: Ptpn6-683
ucgucaugaccacccgagag

SEQ ID NO: 24159 - RNA, 21 nt, Artificial Sequence
  Synthetic oligonucleotide: Ptpn6-4720
aucgucaugaccacccgagag

SEQ ID NO: 24160 - RNA, 22 nt, Artificial Sequence
  Synthetic oligonucleotide: Ptpn6-4721
caucgucaugaccacccgagag

SEQ ID NO: 24161 - RNA, 23 nt, Artificial Sequence
  Synthetic oligonucleotide: Ptpn6-4722
ucaucgucaugaccacccgagag

SEQ ID NO: 24162 - RNA, 24 nt, Artificial Sequence
  Synthetic oligonucleotide: Ptpn6-4723
gucaucgucaugaccacccgagag

SEQ ID NO: 24163 - RNA, 18 nt, Artificial Sequence
  Synthetic oligonucleotide: Ptpn6-4724
gucccauacuggcccgag

SEQ ID NO: 24164 - RNA, 19 nt, Artificial Sequence
  Synthetic oligonucleotide: Ptpn6-4725
cgucccauacuggcccgag

SEQ ID NO: 24165 - RNA, 20 nt, Artificial Sequence
  Synthetic oligonucleotide: Ptpn6-687
gcgucccauacuggcccgag

SEQ ID NO: 24166 - RNA, 21 nt, Artificial Sequence
  Synthetic oligonucleotide: Ptpn6-4726
ugcgucccauacuggcccgag

SEQ ID NO: 24167 - RNA, 22 nt, Artificial Sequence
  Synthetic oligonucleotide: Ptpn6-4727
augcgucccauacuggcccgag

SEQ ID NO: 24168 - RNA, 23 nt, Artificial Sequence
  Synthetic oligonucleotide: Ptpn6-4728
aaugcgucccauacuggcccgag

SEQ ID NO: 24169 - RNA, 24 nt, Artificial Sequence
  Synthetic oligonucleotide: Ptpn6-4729
aaaugcgucccauacuggcccgag

SEQ ID NO: 24170 - RNA, 18 nt, Artificial Sequence
  Synthetic oligonucleotide: Ptpn6-4730
cggucagcagacaaggag

SEQ ID NO: 24171 - RNA, 19 nt, Artificial Sequence
  Synthetic oligonucleotide: Ptpn6-4731
gcggucagcagacaaggag

SEQ ID NO: 24172 - RNA, 20 nt, Artificial Sequence
  Synthetic oligonucleotide: Ptpn6-737
agcggucagcagacaaggag

SEQ ID NO: 24173 - RNA, 21 nt, Artificial Sequence
  Synthetic oligonucleotide: Ptpn6-4732
cagcggucagcagacaaggag

SEQ ID NO: 24174 - RNA, 22 nt, Artificial Sequence
  Synthetic oligonucleotide: Ptpn6-4733
gcagcggucagcagacaaggag

SEQ ID NO: 24175 - RNA, 23 nt, Artificial Sequence
  Synthetic oligonucleotide: Ptpn6-4734
agcagcggucagcagacaaggag

SEQ ID NO: 24176 - RNA, 24 nt, Artificial Sequence
  Synthetic oligonucleotide: Ptpn6-4735
aagcagcggucagcagacaaggag

SEQ ID NO: 24177 - RNA, 18 nt, Artificial Sequence
  Synthetic oligonucleotide: Ptpn6-4736
ucgcagaagggccaggag

SEQ ID NO: 24178 - RNA, 19 nt, Artificial Sequence
  Synthetic oligonucleotide: Ptpn6-4737
uucgcagaagggccaggag

SEQ ID NO: 24179 - RNA, 20 nt, Artificial Sequence
  Synthetic oligonucleotide: Ptpn6-4738
guucgcagaagggccaggag

SEQ ID NO: 24180 - RNA, 21 nt, Artificial Sequence
  Synthetic oligonucleotide: Ptpn6-4739
gguucgcagaagggccaggag

SEQ ID NO: 24181 - RNA, 22 nt, Artificial Sequence
  Synthetic oligonucleotide: Ptpn6-4740
ugguucgcagaagggccaggag

SEQ ID NO: 24182 - RNA, 23 nt, Artificial Sequence
  Synthetic oligonucleotide: Ptpn6-4741
gugguucgcagaagggccaggag

SEQ ID NO: 24183 - RNA, 24 nt, Artificial Sequence
  Synthetic oligonucleotide: Ptpn6-4742
ggugguucgcagaagggccaggag

SEQ ID NO: 24184 - RNA, 18 nt, Artificial Sequence
  Synthetic oligonucleotide: Ptpn6-4743
aguuugcagaagcaggag

SEQ ID NO: 24185 - RNA, 19 nt, Artificial Sequence
  Synthetic oligonucleotide: Ptpn6-4744
gaguuugcagaagcaggag

SEQ ID NO: 24186 - RNA, 20 nt, Artificial Sequence
  Synthetic oligonucleotide: Ptpn6-4745
agaguuugcagaagcaggag

SEQ ID NO: 24187 - RNA, 21 nt, Artificial Sequence
  Synthetic oligonucleotide: Ptpn6-4746
cagaguuugcagaagcaggag

SEQ ID NO: 24188 - RNA, 22 nt, Artificial Sequence
  Synthetic oligonucleotide: Ptpn6-4747
ucagaguuugcagaagcaggag

SEQ ID NO: 24189 - RNA, 23 nt, Artificial Sequence
  Synthetic oligonucleotide: Ptpn6-4748
cucagaguuugcagaagcaggag

SEQ ID NO: 24190 - RNA, 24 nt, Artificial Sequence
  Synthetic oligonucleotide: Ptpn6-4749
ucucagaguuugcagaagcaggag

SEQ ID NO: 24191 - RNA, 18 nt, Artificial Sequence
  Synthetic oligonucleotide: Ptpn6-4750
ggagugggcggagaggag

SEQ ID NO: 24192 - RNA, 19 nt, Artificial Sequence
  Synthetic oligonucleotide: Ptpn6-4751
gggagugggcggagaggag

SEQ ID NO: 24193 - RNA, 20 nt, Artificial Sequence
  Synthetic oligonucleotide: Ptpn6-4752
ugggagugggcggagaggag

SEQ ID NO: 24194 - RNA, 18 nt, Artificial Sequence
  Synthetic oligonucleotide: Ptpn6-4753
acuaagaacaagagggag

SEQ ID NO: 24195 - RNA, 19 nt, Artificial Sequence
  Synthetic oligonucleotide: Ptpn6-4754
cacuaagaacaagagggag

SEQ ID NO: 24196 - RNA, 20 nt, Artificial Sequence
  Synthetic oligonucleotide: Ptpn6-731
acacuaagaacaagagggag

SEQ ID NO: 24197 - RNA, 21 nt, Artificial Sequence
  Synthetic oligonucleotide: Ptpn6-4755
cacacuaagaacaagagggag

SEQ ID NO: 24198 - RNA, 22 nt, Artificial Sequence
  Synthetic oligonucleotide: Ptpn6-4756
gcacacuaagaacaagagggag

SEQ ID NO: 24199 - RNA, 23 nt, Artificial Sequence
  Synthetic oligonucleotide: Ptpn6-4757
ugcacacuaagaacaagagggag

SEQ ID NO: 24200 - RNA, 24 nt, Artificial Sequence
  Synthetic oligonucleotide: Ptpn6-4758
cugcacacuaagaacaagagggag

SEQ ID NO: 24201 - RNA, 18 nt, Artificial Sequence
  Synthetic oligonucleotide: Ptpn6-4759
gugugggccacgugggag

SEQ ID NO: 24202 - RNA, 19 nt, Artificial Sequence
  Synthetic oligonucleotide: Ptpn6-4760
agugugggccacgugggag

SEQ ID NO: 24203 - RNA, 20 nt, Artificial Sequence
  Synthetic oligonucleotide: Ptpn6-4761
cagugugggccacgugggag

SEQ ID NO: 24204 - RNA, 21 nt, Artificial Sequence
  Synthetic oligonucleotide: Ptpn6-4762
gcagugugggccacgugggag

SEQ ID NO: 24205 - RNA, 22 nt, Artificial Sequence
  Synthetic oligonucleotide: Ptpn6-4763
agcagugugggccacgugggag

SEQ ID NO: 24206 - RNA, 23 nt, Artificial Sequence
  Synthetic oligonucleotide: Ptpn6-4764
cagcagugugggccacgugggag

SEQ ID NO: 24207 - RNA, 24 nt, Artificial Sequence
  Synthetic oligonucleotide: Ptpn6-4765
ucagcagugugggccacgugggag

SEQ ID NO: 24208 - RNA, 18 nt, Artificial Sequence
  Synthetic oligonucleotide: Ptpn6-4766
ucagcagugugggccacg

SEQ ID NO: 24209 - RNA, 19 nt, Artificial Sequence
  Synthetic oligonucleotide: Ptpn6-4767
gucagcagugugggccacg

SEQ ID NO: 24210 - RNA, 20 nt, Artificial Sequence
  Synthetic oligonucleotide: Ptpn6-2700
ggucagcagugugggccacg

SEQ ID NO: 24211 - RNA, 21 nt, Artificial Sequence
  Synthetic oligonucleotide: Ptpn6-4768
aggucagcagugugggccacg

SEQ ID NO: 24212 - RNA, 22 nt, Artificial Sequence
  Synthetic oligonucleotide: Ptpn6-4769
aaggucagcagugugggccacg

SEQ ID NO: 24213 - RNA, 23 nt, Artificial Sequence
  Synthetic oligonucleotide: Ptpn6-4770
caaggucagcagugugggccacg

SEQ ID NO: 24214 - RNA, 24 nt, Artificial Sequence
  Synthetic oligonucleotide: Ptpn6-4771
ucaaggucagcagugugggccacg

SEQ ID NO: 24215 - RNA, 18 nt, Artificial Sequence
  Synthetic oligonucleotide: Ptpn6-4772
aggaaagucugccucacg

SEQ ID NO: 24216 - RNA, 19 nt, Artificial Sequence
  Synthetic oligonucleotide: Ptpn6-4773
caggaaagucugccucacg

SEQ ID NO: 24217 - RNA, 20 nt, Artificial Sequence
  Synthetic oligonucleotide: Ptpn6-705
gcaggaaagucugccucacg

SEQ ID NO: 24218 - RNA, 21 nt, Artificial Sequence
  Synthetic oligonucleotide: Ptpn6-4774
ggcaggaaagucugccucacg

SEQ ID NO: 24219 - RNA, 22 nt, Artificial Sequence
  Synthetic oligonucleotide: Ptpn6-4775
cggcaggaaagucugccucacg

SEQ ID NO: 24220 - RNA, 23 nt, Artificial Sequence
  Synthetic oligonucleotide: Ptpn6-4776
gcggcaggaaagucugccucacg

SEQ ID NO: 24221 - RNA, 24 nt, Artificial Sequence
  Synthetic oligonucleotide: Ptpn6-4777
agcggcaggaaagucugccucacg

SEQ ID NO: 24222 - RNA, 18 nt, Artificial Sequence
  Synthetic oligonucleotide: Ptpn6-4778
accuuacaggucuccccg

SEQ ID NO: 24223 - RNA, 19 nt, Artificial Sequence
  Synthetic oligonucleotide: Ptpn6-4779
uaccuuacaggucuccccg

SEQ ID NO: 24224 - RNA, 20 nt, Artificial Sequence
  Synthetic oligonucleotide: Ptpn6-694
guaccuuacaggucuccccg

SEQ ID NO: 24225 - RNA, 21 nt, Artificial Sequence
  Synthetic oligonucleotide: Ptpn6-4780
cguaccuuacaggucuccccg

SEQ ID NO: 24226 - RNA, 22 nt, Artificial Sequence
  Synthetic oligonucleotide: Ptpn6-4781
ccguaccuuacaggucuccccg

SEQ ID NO: 24227 - RNA, 23 nt, Artificial Sequence
  Synthetic oligonucleotide: Ptpn6-4782
uccguaccuuacaggucuccccg

SEQ ID NO: 24228 - RNA, 24 nt, Artificial Sequence
  Synthetic oligonucleotide: Ptpn6-4783
cuccguaccuuacaggucuccccg

SEQ ID NO: 24229 - RNA, 18 nt, Artificial Sequence
  Synthetic oligonucleotide: Ptpn6-4784
acucugugaccaacugcg

SEQ ID NO: 24230 - RNA, 19 nt, Artificial Sequence
  Synthetic oligonucleotide: Ptpn6-4785
uacucugugaccaacugcg

SEQ ID NO: 24231 - RNA, 20 nt, Artificial Sequence
  Synthetic oligonucleotide: Ptpn6-200
cuacucugugaccaacugcg

SEQ ID NO: 24232 - RNA, 21 nt, Artificial Sequence
  Synthetic oligonucleotide: Ptpn6-4786
ccuacucugugaccaacugcg

SEQ ID NO: 24233 - RNA, 22 nt, Artificial Sequence
  Synthetic oligonucleotide: Ptpn6-4787
cccuacucugugaccaacugcg

SEQ ID NO: 24234 - RNA, 23 nt, Artificial Sequence
  Synthetic oligonucleotide: Ptpn6-4788
gcccuacucugugaccaacugcg

SEQ ID NO: 24235 - RNA, 24 nt, Artificial Sequence
  Synthetic oligonucleotide: Ptpn6-4789
ggcccuacucugugaccaacugcg

SEQ ID NO: 24236 - RNA, 18 nt, Artificial Sequence
  Synthetic oligonucleotide: Ptpn6-4790
cagugggaaggugguucg

SEQ ID NO: 24237 - RNA, 19 nt, Artificial Sequence
  Synthetic oligonucleotide: Ptpn6-4791
acagugggaaggugguucg

SEQ ID NO: 24238 - RNA, 20 nt, Artificial Sequence
  Synthetic oligonucleotide: Ptpn6-4792
gacagugggaaggugguucg

SEQ ID NO: 24239 - RNA, 21 nt, Artificial Sequence
  Synthetic oligonucleotide: Ptpn6-4793
ggacagugggaaggugguucg

SEQ ID NO: 24240 - RNA, 22 nt, Artificial Sequence
  Synthetic oligonucleotide: Ptpn6-4794
gggacagugggaaggugguucg

SEQ ID NO: 24241 - RNA, 23 nt, Artificial Sequence
  Synthetic oligonucleotide: Ptpn6-4795
agggacagugggaaggugguucg

SEQ ID NO: 24242 - RNA, 24 nt, Artificial Sequence
  Synthetic oligonucleotide: Ptpn6-4796
gagggacagugggaaggugguucg

SEQ ID NO: 24243 - RNA, 18 nt, Artificial Sequence
  Synthetic oligonucleotide: Ptpn6-4797
agaacaucuccaccaagg

SEQ ID NO: 24244 - RNA, 19 nt, Artificial Sequence
  Synthetic oligonucleotide: Ptpn6-4798
gagaacaucuccaccaagg

SEQ ID NO: 24245 - RNA, 20 nt, Artificial Sequence
  Synthetic oligonucleotide: Ptpn6-4799
ggagaacaucuccaccaagg

SEQ ID NO: 24246 - RNA, 21 nt, Artificial Sequence
  Synthetic oligonucleotide: Ptpn6-4800
uggagaacaucuccaccaagg

SEQ ID NO: 24247 - RNA, 22 nt, Artificial Sequence
  Synthetic oligonucleotide: Ptpn6-4801
auggagaacaucuccaccaagg

SEQ ID NO: 24248 - RNA, 23 nt, Artificial Sequence
  Synthetic oligonucleotide: Ptpn6-4802
cauggagaacaucuccaccaagg

SEQ ID NO: 24249 - RNA, 24 nt, Artificial Sequence
  Synthetic oligonucleotide: Ptpn6-4803
ucauggagaacaucuccaccaagg

SEQ ID NO: 24250 - RNA, 18 nt, Artificial Sequence
  Synthetic oligonucleotide: Ptpn6-4804
aauuuggcuccccccagg

SEQ ID NO: 24251 - RNA, 19 nt, Artificial Sequence
  Synthetic oligonucleotide: Ptpn6-4805
uaauuuggcuccccccagg

SEQ ID NO: 24252 - RNA, 20 nt, Artificial Sequence
  Synthetic oligonucleotide: Ptpn6-4806
cuaauuuggcuccccccagg

SEQ ID NO: 24253 - RNA, 21 nt, Artificial Sequence
  Synthetic oligonucleotide: Ptpn6-4807
ccuaauuuggcuccccccagg

SEQ ID NO: 24254 - RNA, 22 nt, Artificial Sequence
  Synthetic oligonucleotide: Ptpn6-4808
gccuaauuuggcuccccccagg

SEQ ID NO: 24255 - RNA, 23 nt, Artificial Sequence
  Synthetic oligonucleotide: Ptpn6-4809
ggccuaauuuggcuccccccagg

SEQ ID NO: 24256 - RNA, 24 nt, Artificial Sequence
  Synthetic oligonucleotide: Ptpn6-4810
uggccuaauuuggcuccccccagg

SEQ ID NO: 24257 - RNA, 18 nt, Artificial Sequence
  Synthetic oligonucleotide: Ptpn6-4811
cacacuaagaacaagagg

SEQ ID NO: 24258 - RNA, 19 nt, Artificial Sequence
  Synthetic oligonucleotide: Ptpn6-4812
gcacacuaagaacaagagg

SEQ ID NO: 24259 - RNA, 20 nt, Artificial Sequence
  Synthetic oligonucleotide: Ptpn6-729
ugcacacuaagaacaagagg

SEQ ID NO: 24260 - RNA, 21 nt, Artificial Sequence
  Synthetic oligonucleotide: Ptpn6-4813
cugcacacuaagaacaagagg

SEQ ID NO: 24261 - RNA, 22 nt, Artificial Sequence
  Synthetic oligonucleotide: Ptpn6-4814
ccugcacacuaagaacaagagg

SEQ ID NO: 24262 - RNA, 23 nt, Artificial Sequence
  Synthetic oligonucleotide: Ptpn6-4815
accugcacacuaagaacaagagg

SEQ ID NO: 24263 - RNA, 24 nt, Artificial Sequence
  Synthetic oligonucleotide: Ptpn6-4816
aaccugcacacuaagaacaagagg

SEQ ID NO: 24264 - RNA, 18 nt, Artificial Sequence
  Synthetic oligonucleotide: Ptpn6-4817
ucaugaccacccgagagg

SEQ ID NO: 24265 - RNA, 19 nt, Artificial Sequence
  Synthetic oligonucleotide: Ptpn6-4818
gucaugaccacccgagagg

SEQ ID NO: 24266 - RNA, 20 nt, Artificial Sequence
  Synthetic oligonucleotide: Ptpn6-190
cgucaugaccacccgagagg

SEQ ID NO: 24267 - RNA, 21 nt, Artificial Sequence
  Synthetic oligonucleotide: Ptpn6-4819
ucgucaugaccacccgagagg

SEQ ID NO: 24268 - RNA, 22 nt, Artificial Sequence
  Synthetic oligonucleotide: Ptpn6-4820
aucgucaugaccacccgagagg

SEQ ID NO: 24269 - RNA, 23 nt, Artificial Sequence
  Synthetic oligonucleotide: Ptpn6-4821
caucgucaugaccacccgagagg

SEQ ID NO: 24270 - RNA, 24 nt, Artificial Sequence
  Synthetic oligonucleotide: Ptpn6-4822
ucaucgucaugaccacccgagagg

SEQ ID NO: 24271 - RNA, 18 nt, Artificial Sequence
  Synthetic oligonucleotide: Ptpn6-4823
gugcaugguggggaccgg

SEQ ID NO: 24272 - RNA, 19 nt, Artificial Sequence
  Synthetic oligonucleotide: Ptpn6-4824
ggugcaugguggggaccgg

SEQ ID NO: 24273 - RNA, 20 nt, Artificial Sequence
  Synthetic oligonucleotide: Ptpn6-4825
aggugcaugguggggaccgg

SEQ ID NO: 24274 - RNA, 21 nt, Artificial Sequence
  Synthetic oligonucleotide: Ptpn6-4826
gaggugcaugguggggaccgg

SEQ ID NO: 24275 - RNA, 22 nt, Artificial Sequence
  Synthetic oligonucleotide: Ptpn6-4827
ugaggugcaugguggggaccgg

SEQ ID NO: 24276 - RNA, 23 nt, Artificial Sequence
  Synthetic oligonucleotide: Ptpn6-4828
uugaggugcaugguggggaccgg

SEQ ID NO: 24277 - RNA, 24 nt, Artificial Sequence
  Synthetic oligonucleotide: Ptpn6-4829
uuugaggugcaugguggggaccgg

SEQ ID NO: 24278 - RNA, 18 nt, Artificial Sequence
  Synthetic oligonucleotide: Ptpn6-4830
gaccagaucaaccagcgg

SEQ ID NO: 24279 - RNA, 19 nt, Artificial Sequence
  Synthetic oligonucleotide: Ptpn6-4831
ggaccagaucaaccagcgg

SEQ ID NO: 24280 - RNA, 20 nt, Artificial Sequence
  Synthetic oligonucleotide: Ptpn6-703
uggaccagaucaaccagcgg

SEQ ID NO: 24281 - RNA, 21 nt, Artificial Sequence
  Synthetic oligonucleotide: Ptpn6-4832
cuggaccagaucaaccagcgg

SEQ ID NO: 24282 - RNA, 22 nt, Artificial Sequence
  Synthetic oligonucleotide: Ptpn6-4833
ccuggaccagaucaaccagcgg

SEQ ID NO: 24283 - RNA, 23 nt, Artificial Sequence
  Synthetic oligonucleotide: Ptpn6-4834
uccuggaccagaucaaccagcgg

SEQ ID NO: 24284 - RNA, 24 nt, Artificial Sequence
  Synthetic oligonucleotide: Ptpn6-4835
uuccuggaccagaucaaccagcgg

SEQ ID NO: 24285 - RNA, 18 nt, Artificial Sequence
  Synthetic oligonucleotide: Ptpn6-4836
ugguggggaccggcaggg

SEQ ID NO: 24286 - RNA, 19 nt, Artificial Sequence
  Synthetic oligonucleotide: Ptpn6-4837
augguggggaccggcaggg

SEQ ID NO: 24287 - RNA, 20 nt, Artificial Sequence
  Synthetic oligonucleotide: Ptpn6-4838
caugguggggaccggcaggg

SEQ ID NO: 24288 - RNA, 21 nt, Artificial Sequence
  Synthetic oligonucleotide: Ptpn6-4839
gcaugguggggaccggcaggg

SEQ ID NO: 24289 - RNA, 22 nt, Artificial Sequence
  Synthetic oligonucleotide: Ptpn6-4840
ugcaugguggggaccggcaggg

SEQ ID NO: 24290 - RNA, 23 nt, Artificial Sequence
  Synthetic oligonucleotide: Ptpn6-4841
gugcaugguggggaccggcaggg

SEQ ID NO: 24291 - RNA, 24 nt, Artificial Sequence
  Synthetic oligonucleotide: Ptpn6-4842
ggugcaugguggggaccggcaggg

SEQ ID NO: 24292 - RNA, 18 nt, Artificial Sequence
  Synthetic oligonucleotide: Ptpn6-4843
ccgagugauccugcaggg

SEQ ID NO: 24293 - RNA, 19 nt, Artificial Sequence
  Synthetic oligonucleotide: Ptpn6-4844
gccgagugauccugcaggg

SEQ ID NO: 24294 - RNA, 20 nt, Artificial Sequence
  Synthetic oligonucleotide: Ptpn6-671
agccgagugauccugcaggg

SEQ ID NO: 24295 - RNA, 21 nt, Artificial Sequence
  Synthetic oligonucleotide: Ptpn6-4845
cagccgagugauccugcaggg

SEQ ID NO: 24296 - RNA, 22 nt, Artificial Sequence
  Synthetic oligonucleotide: Ptpn6-4846
acagccgagugauccugcaggg

SEQ ID NO: 24297 - RNA, 23 nt, Artificial Sequence
  Synthetic oligonucleotide: Ptpn6-4847
cacagccgagugauccugcaggg

SEQ ID NO: 24298 - RNA, 24 nt, Artificial Sequence
  Synthetic oligonucleotide: Ptpn6-4848
ccacagccgagugauccugcaggg

SEQ ID NO: 24299 - RNA, 18 nt, Artificial Sequence
  Synthetic oligonucleotide: Ptpn6-4849
accugcggcaggucaggg

SEQ ID NO: 24300 - RNA, 19 nt, Artificial Sequence
  Synthetic oligonucleotide: Ptpn6-4850
uaccugcggcaggucaggg

SEQ ID NO: 24301 - RNA, 20 nt, Artificial Sequence
  Synthetic oligonucleotide: Ptpn6-4851
cuaccugcggcaggucaggg

SEQ ID NO: 24302 - RNA, 21 nt, Artificial Sequence
  Synthetic oligonucleotide: Ptpn6-4852
ucuaccugcggcaggucaggg

SEQ ID NO: 24303 - RNA, 22 nt, Artificial Sequence
  Synthetic oligonucleotide: Ptpn6-4853
gucuaccugcggcaggucaggg

SEQ ID NO: 24304 - RNA, 23 nt, Artificial Sequence
  Synthetic oligonucleotide: Ptpn6-4854
ugucuaccugcggcaggucaggg

SEQ ID NO: 24305 - RNA, 24 nt, Artificial Sequence
  Synthetic oligonucleotide: Ptpn6-4855
uugucuaccugcggcaggucaggg

SEQ ID NO: 24306 - RNA, 18 nt, Artificial Sequence
  Synthetic oligonucleotide: Ptpn6-4856
acacuaagaacaagaggg

SEQ ID NO: 24307 - RNA, 19 nt, Artificial Sequence
  Synthetic oligonucleotide: Ptpn6-4857
cacacuaagaacaagaggg

SEQ ID NO: 24308 - RNA, 20 nt, Artificial Sequence
  Synthetic oligonucleotide: Ptpn6-235
gcacacuaagaacaagaggg

SEQ ID NO: 24309 - RNA, 21 nt, Artificial Sequence
  Synthetic oligonucleotide: Ptpn6-4858
ugcacacuaagaacaagaggg

SEQ ID NO: 24310 - RNA, 22 nt, Artificial Sequence
  Synthetic oligonucleotide: Ptpn6-4859
cugcacacuaagaacaagaggg

SEQ ID NO: 24311 - RNA, 23 nt, Artificial Sequence
  Synthetic oligonucleotide: Ptpn6-4860
ccugcacacuaagaacaagaggg

SEQ ID NO: 24312 - RNA, 24 nt, Artificial Sequence
  Synthetic oligonucleotide: Ptpn6-4861
accugcacacuaagaacaagaggg

SEQ ID NO: 24313 - RNA, 18 nt, Artificial Sequence
  Synthetic oligonucleotide: Ptpn6-4862
agguggagaaaggccggg

SEQ ID NO: 24314 - RNA, 19 nt, Artificial Sequence
  Synthetic oligonucleotide: Ptpn6-4863
gagguggagaaaggccggg

SEQ ID NO: 24315 - RNA, 20 nt, Artificial Sequence
  Synthetic oligonucleotide: Ptpn6-4864
agagguggagaaaggccggg

SEQ ID NO: 24316 - RNA, 21 nt, Artificial Sequence
  Synthetic oligonucleotide: Ptpn6-4865
gagagguggagaaaggccggg

SEQ ID NO: 24317 - RNA, 22 nt, Artificial Sequence
  Synthetic oligonucleotide: Ptpn6-4866
cgagagguggagaaaggccggg

SEQ ID NO: 24318 - RNA, 23 nt, Artificial Sequence
  Synthetic oligonucleotide: Ptpn6-4867
ccgagagguggagaaaggccggg

SEQ ID NO: 24319 - RNA, 24 nt, Artificial Sequence
  Synthetic oligonucleotide: Ptpn6-4868
cccgagagguggagaaaggccggg

SEQ ID NO: 24320 - RNA, 18 nt, Artificial Sequence
  Synthetic oligonucleotide: Ptpn6-4869
cagagcagggccuggggg

SEQ ID NO: 24321 - RNA, 19 nt, Artificial Sequence
  Synthetic oligonucleotide: Ptpn6-4870
gcagagcagggccuggggg

SEQ ID NO: 24322 - RNA, 20 nt, Artificial Sequence
  Synthetic oligonucleotide: Ptpn6-2717
ugcagagcagggccuggggg

SEQ ID NO: 24323 - RNA, 21 nt, Artificial Sequence
  Synthetic oligonucleotide: Ptpn6-4871
gugcagagcagggccuggggg

SEQ ID NO: 24324 - RNA, 22 nt, Artificial Sequence
  Synthetic oligonucleotide: Ptpn6-4872
cgugcagagcagggccuggggg

SEQ ID NO: 24325 - RNA, 23 nt, Artificial Sequence
  Synthetic oligonucleotide: Ptpn6-4873
gcgugcagagcagggccuggggg

SEQ ID NO: 24326 - RNA, 24 nt, Artificial Sequence
  Synthetic oligonucleotide: Ptpn6-4874
ugcgugcagagcagggccuggggg

SEQ ID NO: 24327 - RNA, 18 nt, Artificial Sequence
  Synthetic oligonucleotide: Ptpn6-4875
gcagagcagggccugggg

SEQ ID NO: 24328 - RNA, 19 nt, Artificial Sequence
  Synthetic oligonucleotide: Ptpn6-4876
ugcagagcagggccugggg

SEQ ID NO: 24329 - RNA, 20 nt, Artificial Sequence
  Synthetic oligonucleotide: Ptpn6-2719
gugcagagcagggccugggg

SEQ ID NO: 24330 - RNA, 21 nt, Artificial Sequence
  Synthetic oligonucleotide: Ptpn6-4877
cgugcagagcagggccugggg

SEQ ID NO: 24331 - RNA, 22 nt, Artificial Sequence
  Synthetic oligonucleotide: Ptpn6-4878
gcgugcagagcagggccugggg

SEQ ID NO: 24332 - RNA, 23 nt, Artificial Sequence
  Synthetic oligonucleotide: Ptpn6-4879
ugcgugcagagcagggccugggg

SEQ ID NO: 24333 - RNA, 24 nt, Artificial Sequence
  Synthetic oligonucleotide: Ptpn6-4880
gugcgugcagagcagggccugggg

SEQ ID NO: 24334 - RNA, 18 nt, Artificial Sequence
  Synthetic oligonucleotide: Ptpn6-4881
agggagggucgggugggg

SEQ ID NO: 24335 - RNA, 19 nt, Artificial Sequence
  Synthetic oligonucleotide: Ptpn6-4882
aagggagggucgggugggg

SEQ ID NO: 24336 - RNA, 20 nt, Artificial Sequence
  Synthetic oligonucleotide: Ptpn6-4883
aaagggagggucgggugggg

SEQ ID NO: 24337 - RNA, 21 nt, Artificial Sequence
  Synthetic oligonucleotide: Ptpn6-4884
gaaagggagggucgggugggg

SEQ ID NO: 24338 - RNA, 22 nt, Artificial Sequence
  Synthetic oligonucleotide: Ptpn6-4885
ggaaagggagggucgggugggg

SEQ ID NO: 24339 - RNA, 23 nt, Artificial Sequence
  Synthetic oligonucleotide: Ptpn6-4886
uggaaagggagggucgggugggg

SEQ ID NO: 24340 - RNA, 24 nt, Artificial Sequence
  Synthetic oligonucleotide: Ptpn6-4887
cuggaaagggagggucgggugggg

SEQ ID NO: 24341 - RNA, 18 nt, Artificial Sequence
  Synthetic oligonucleotide: Ptpn6-4888
gcaccuggggguuugggg

SEQ ID NO: 24342 - RNA, 19 nt, Artificial Sequence
  Synthetic oligonucleotide: Ptpn6-4889
ggcaccuggggguuugggg

SEQ ID NO: 24343 - RNA, 20 nt, Artificial Sequence
  Synthetic oligonucleotide: Ptpn6-4890
gggcaccuggggguuugggg

SEQ ID NO: 24344 - RNA, 21 nt, Artificial Sequence
  Synthetic oligonucleotide: Ptpn6-4891
ggggcaccuggggguuugggg

SEQ ID NO: 24345 - RNA, 22 nt, Artificial Sequence
  Synthetic oligonucleotide: Ptpn6-4892
aggggcaccuggggguuugggg

SEQ ID NO: 24346 - RNA, 23 nt, Artificial Sequence
  Synthetic oligonucleotide: Ptpn6-4893
gaggggcaccuggggguuugggg

SEQ ID NO: 24347 - RNA, 24 nt, Artificial Sequence
  Synthetic oligonucleotide: Ptpn6-4894
ugaggggcaccuggggguuugggg

SEQ ID NO: 24348 - RNA, 18 nt, Artificial Sequence
  Synthetic oligonucleotide: Ptpn6-4895
ugcagagcagggccuggg

SEQ ID NO: 24349 - RNA, 19 nt, Artificial Sequence
  Synthetic oligonucleotide: Ptpn6-4896
gugcagagcagggccuggg

SEQ ID NO: 24350 - RNA, 20 nt, Artificial Sequence
  Synthetic oligonucleotide: Ptpn6-2721
cgugcagagcagggccuggg

SEQ ID NO: 24351 - RNA, 21 nt, Artificial Sequence
  Synthetic oligonucleotide: Ptpn6-4897
gcgugcagagcagggccuggg

SEQ ID NO: 24352 - RNA, 22 nt, Artificial Sequence
  Synthetic oligonucleotide: Ptpn6-4898
ugcgugcagagcagggccuggg

SEQ ID NO: 24353 - RNA, 23 nt, Artificial Sequence
  Synthetic oligonucleotide: Ptpn6-4899
gugcgugcagagcagggccuggg

SEQ ID NO: 24354 - RNA, 24 nt, Artificial Sequence
  Synthetic oligonucleotide: Ptpn6-4900
ggugcgugcagagcagggccuggg

SEQ ID NO: 24355 - RNA, 18 nt, Artificial Sequence
  Synthetic oligonucleotide: Ptpn6-4901
cagugugggccacguggg

SEQ ID NO: 24356 - RNA, 19 nt, Artificial Sequence
  Synthetic oligonucleotide: Ptpn6-4902
gcagugugggccacguggg

SEQ ID NO: 24357 - RNA, 20 nt, Artificial Sequence
  Synthetic oligonucleotide: Ptpn6-2722
agcagugugggccacguggg

SEQ ID NO: 24358 - RNA, 21 nt, Artificial Sequence
  Synthetic oligonucleotide: Ptpn6-4903
cagcagugugggccacguggg

SEQ ID NO: 24359 - RNA, 22 nt, Artificial Sequence
  Synthetic oligonucleotide: Ptpn6-4904
ucagcagugugggccacguggg

SEQ ID NO: 24360 - RNA, 23 nt, Artificial Sequence
  Synthetic oligonucleotide: Ptpn6-4905
gucagcagugugggccacguggg

SEQ ID NO: 24361 - RNA, 24 nt, Artificial Sequence
  Synthetic oligonucleotide: Ptpn6-4906
ggucagcagugugggccacguggg

SEQ ID NO: 24362 - RNA, 18 nt, Artificial Sequence
  Synthetic oligonucleotide: Ptpn6-4907
ggaguuugaggugcaugg

SEQ ID NO: 24363 - RNA, 19 nt, Artificial Sequence
  Synthetic oligonucleotide: Ptpn6-4908
aggaguuugaggugcaugg

SEQ ID NO: 24364 - RNA, 20 nt, Artificial Sequence
  Synthetic oligonucleotide: Ptpn6-2724
gaggaguuugaggugcaugg

SEQ ID NO: 24365 - RNA, 21 nt, Artificial Sequence
  Synthetic oligonucleotide: Ptpn6-4909
ggaggaguuugaggugcaugg

SEQ ID NO: 24366 - RNA, 22 nt, Artificial Sequence
  Synthetic oligonucleotide: Ptpn6-4910
gggaggaguuugaggugcaugg

SEQ ID NO: 24367 - RNA, 23 nt, Artificial Sequence
  Synthetic oligonucleotide: Ptpn6-4911
ugggaggaguuugaggugcaugg

SEQ ID NO: 24368 - RNA, 24 nt, Artificial Sequence
  Synthetic oligonucleotide: Ptpn6-4912
cugggaggaguuugaggugcaugg

SEQ ID NO: 24369 - RNA, 18 nt, Artificial Sequence
  Synthetic oligonucleotide: Ptpn6-4913
acagccucacggaccugg

SEQ ID NO: 24370 - RNA, 19 nt, Artificial Sequence
  Synthetic oligonucleotide: Ptpn6-4914
gacagccucacggaccugg

SEQ ID NO: 24371 - RNA, 20 nt, Artificial Sequence
  Synthetic oligonucleotide: Ptpn6-151
cgacagccucacggaccugg

SEQ ID NO: 24372 - RNA, 21 nt, Artificial Sequence
  Synthetic oligonucleotide: Ptpn6-4915
ucgacagccucacggaccugg

SEQ ID NO: 24373 - RNA, 22 nt, Artificial Sequence
  Synthetic oligonucleotide: Ptpn6-4916
uucgacagccucacggaccugg

SEQ ID NO: 24374 - RNA, 23 nt, Artificial Sequence
  Synthetic oligonucleotide: Ptpn6-4917
cuucgacagccucacggaccugg

SEQ ID NO: 24375 - RNA, 24 nt, Artificial Sequence
  Synthetic oligonucleotide: Ptpn6-4918
ccuucgacagccucacggaccugg

SEQ ID NO: 24376 - RNA, 18 nt, Artificial Sequence
  Synthetic oligonucleotide: Ptpn6-4919
gugcagagcagggccugg

SEQ ID NO: 24377 - RNA, 19 nt, Artificial Sequence
  Synthetic oligonucleotide: Ptpn6-4920
cgugcagagcagggccugg

SEQ ID NO: 24378 - RNA, 20 nt, Artificial Sequence
  Synthetic oligonucleotide: Ptpn6-2727
gcgugcagagcagggccugg

SEQ ID NO: 24379 - RNA, 21 nt, Artificial Sequence
  Synthetic oligonucleotide: Ptpn6-4921
ugcgugcagagcagggccugg

SEQ ID NO: 24380 - RNA, 22 nt, Artificial Sequence
  Synthetic oligonucleotide: Ptpn6-4922
gugcgugcagagcagggccugg

SEQ ID NO: 24381 - RNA, 23 nt, Artificial Sequence
  Synthetic oligonucleotide: Ptpn6-4923
ggugcgugcagagcagggccugg

SEQ ID NO: 24382 - RNA, 24 nt, Artificial Sequence
  Synthetic oligonucleotide: Ptpn6-4924
aggugcgugcagagcagggccugg

SEQ ID NO: 24383 - RNA, 18 nt, Artificial Sequence
  Synthetic oligonucleotide: Ptpn6-4925
acuugcaccagcgucugg

SEQ ID NO: 24384 - RNA, 19 nt, Artificial Sequence
  Synthetic oligonucleotide: Ptpn6-4926
aacuugcaccagcgucugg

SEQ ID NO: 24385 - RNA, 20 nt, Artificial Sequence
  Synthetic oligonucleotide: Ptpn6-663
gaacuugcaccagcgucugg

SEQ ID NO: 24386 - RNA, 21 nt, Artificial Sequence
  Synthetic oligonucleotide: Ptpn6-4927
agaacuugcaccagcgucugg

SEQ ID NO: 24387 - RNA, 22 nt, Artificial Sequence
  Synthetic oligonucleotide: Ptpn6-4928
aagaacuugcaccagcgucugg

SEQ ID NO: 24388 - RNA, 23 nt, Artificial Sequence
  Synthetic oligonucleotide: Ptpn6-4929
gaagaacuugcaccagcgucugg

SEQ ID NO: 24389 - RNA, 24 nt, Artificial Sequence
  Synthetic oligonucleotide: Ptpn6-4930
ugaagaacuugcaccagcgucugg

SEQ ID NO: 24390 - RNA, 18 nt, Artificial Sequence
  Synthetic oligonucleotide: Ptpn6-4931
gccaaggcuggcuucugg

SEQ ID NO: 24391 - RNA, 19 nt, Artificial Sequence
  Synthetic oligonucleotide: Ptpn6-4932
agccaaggcuggcuucugg

SEQ ID NO: 24392 - RNA, 20 nt, Artificial Sequence
  Synthetic oligonucleotide: Ptpn6-657
cagccaaggcuggcuucugg

SEQ ID NO: 24393 - RNA, 21 nt, Artificial Sequence
  Synthetic oligonucleotide: Ptpn6-4933
acagccaaggcuggcuucugg

SEQ ID NO: 24394 - RNA, 22 nt, Artificial Sequence
  Synthetic oligonucleotide: Ptpn6-4934
uacagccaaggcuggcuucugg

SEQ ID NO: 24395 - RNA, 23 nt, Artificial Sequence
  Synthetic oligonucleotide: Ptpn6-4935
auacagccaaggcuggcuucugg

SEQ ID NO: 24396 - RNA, 24 nt, Artificial Sequence
  Synthetic oligonucleotide: Ptpn6-4936
gauacagccaaggcuggcuucugg

SEQ ID NO: 24397 - RNA, 18 nt, Artificial Sequence
  Synthetic oligonucleotide: Ptpn6-4937
gcagugugggccacgugg

SEQ ID NO: 24398 - RNA, 19 nt, Artificial Sequence
  Synthetic oligonucleotide: Ptpn6-4938
agcagugugggccacgugg

SEQ ID NO: 24399 - RNA, 20 nt, Artificial Sequence
  Synthetic oligonucleotide: Ptpn6-4939
cagcagugugggccacgugg

SEQ ID NO: 24400 - RNA, 21 nt, Artificial Sequence
  Synthetic oligonucleotide: Ptpn6-4940
ucagcagugugggccacgugg

SEQ ID NO: 24401 - RNA, 22 nt, Artificial Sequence
  Synthetic oligonucleotide: Ptpn6-4941
gucagcagugugggccacgugg

SEQ ID NO: 24402 - RNA, 23 nt, Artificial Sequence
  Synthetic oligonucleotide: Ptpn6-4942
ggucagcagugugggccacgugg

SEQ ID NO: 24403 - RNA, 24 nt, Artificial Sequence
  Synthetic oligonucleotide: Ptpn6-4943
aggucagcagugugggccacgugg

SEQ ID NO: 24404 - RNA, 18 nt, Artificial Sequence
  Synthetic oligonucleotide: Ptpn6-4944
uucuggcagauggcgugg

SEQ ID NO: 24405 - RNA, 19 nt, Artificial Sequence
  Synthetic oligonucleotide: Ptpn6-4945
cuucuggcagauggcgugg

SEQ ID NO: 24406 - RNA, 20 nt, Artificial Sequence
  Synthetic oligonucleotide: Ptpn6-678
acuucuggcagauggcgugg

SEQ ID NO: 24407 - RNA, 21 nt, Artificial Sequence
  Synthetic oligonucleotide: Ptpn6-4946
gacuucuggcagauggcgugg

SEQ ID NO: 24408 - RNA, 22 nt, Artificial Sequence
  Synthetic oligonucleotide: Ptpn6-4947
ugacuucuggcagauggcgugg

SEQ ID NO: 24409 - RNA, 23 nt, Artificial Sequence
  Synthetic oligonucleotide: Ptpn6-4948
augacuucuggcagauggcgugg

SEQ ID NO: 24410 - RNA, 24 nt, Artificial Sequence
  Synthetic oligonucleotide: Ptpn6-4949
aaugacuucuggcagauggcgugg

SEQ ID NO: 24411 - RNA, 18 nt, Artificial Sequence
  Synthetic oligonucleotide: Ptpn6-4950
aggaguuugaggugcaug

SEQ ID NO: 24412 - RNA, 19 nt, Artificial Sequence
  Synthetic oligonucleotide: Ptpn6-4951
gaggaguuugaggugcaug

SEQ ID NO: 24413 - RNA, 20 nt, Artificial Sequence
  Synthetic oligonucleotide: Ptpn6-4952
ggaggaguuugaggugcaug

SEQ ID NO: 24414 - RNA, 21 nt, Artificial Sequence
  Synthetic oligonucleotide: Ptpn6-4953
gggaggaguuugaggugcaug

SEQ ID NO: 24415 - RNA, 22 nt, Artificial Sequence
  Synthetic oligonucleotide: Ptpn6-4954
ugggaggaguuugaggugcaug

SEQ ID NO: 24416 - RNA, 23 nt, Artificial Sequence
  Synthetic oligonucleotide: Ptpn6-4955
cugggaggaguuugaggugcaug

SEQ ID NO: 24417 - RNA, 24 nt, Artificial Sequence
  Synthetic oligonucleotide: Ptpn6-4956
ucugggaggaguuugaggugcaug

SEQ ID NO: 24418 - RNA, 18 nt, Artificial Sequence
  Synthetic oligonucleotide: Ptpn6-4957
gucaucgacaugcucaug

SEQ ID NO: 24419 - RNA, 19 nt, Artificial Sequence
  Synthetic oligonucleotide: Ptpn6-4958
ugucaucgacaugcucaug

SEQ ID NO: 24420 - RNA, 20 nt, Artificial Sequence
  Synthetic oligonucleotide: Ptpn6-708
uugucaucgacaugcucaug

SEQ ID NO: 24421 - RNA, 21 nt, Artificial Sequence
  Synthetic oligonucleotide: Ptpn6-4959
auugucaucgacaugcucaug

SEQ ID NO: 24422 - RNA, 22 nt, Artificial Sequence
  Synthetic oligonucleotide: Ptpn6-4960
cauugucaucgacaugcucaug

SEQ ID NO: 24423 - RNA, 23 nt, Artificial Sequence
  Synthetic oligonucleotide: Ptpn6-4961
ucauugucaucgacaugcucaug

SEQ ID NO: 24424 - RNA, 24 nt, Artificial Sequence
  Synthetic oligonucleotide: Ptpn6-4962
aucauugucaucgacaugcucaug

SEQ ID NO: 24425 - RNA, 18 nt, Artificial Sequence
  Synthetic oligonucleotide: Ptpn6-4963
gagggucggguggggaug

SEQ ID NO: 24426 - RNA, 19 nt, Artificial Sequence
  Synthetic oligonucleotide: Ptpn6-4964
ggagggucggguggggaug

SEQ ID NO: 24427 - RNA, 20 nt, Artificial Sequence
  Synthetic oligonucleotide: Ptpn6-2731
gggagggucggguggggaug

SEQ ID NO: 24428 - RNA, 21 nt, Artificial Sequence
  Synthetic oligonucleotide: Ptpn6-4965
agggagggucggguggggaug

SEQ ID NO: 24429 - RNA, 22 nt, Artificial Sequence
  Synthetic oligonucleotide: Ptpn6-4966
aagggagggucggguggggaug

SEQ ID NO: 24430 - RNA, 23 nt, Artificial Sequence
  Synthetic oligonucleotide: Ptpn6-4967
aaagggagggucggguggggaug

SEQ ID NO: 24431 - RNA, 24 nt, Artificial Sequence
  Synthetic oligonucleotide: Ptpn6-4968
gaaagggagggucggguggggaug

SEQ ID NO: 24432 - RNA, 18 nt, Artificial Sequence
  Synthetic oligonucleotide: Ptpn6-4969
cuacucugugaccaacug

SEQ ID NO: 24433 - RNA, 19 nt, Artificial Sequence
  Synthetic oligonucleotide: Ptpn6-4970
ccuacucugugaccaacug

SEQ ID NO: 24434 - RNA, 20 nt, Artificial Sequence
  Synthetic oligonucleotide: Ptpn6-198
cccuacucugugaccaacug

SEQ ID NO: 24435 - RNA, 21 nt, Artificial Sequence
  Synthetic oligonucleotide: Ptpn6-4971
gcccuacucugugaccaacug

SEQ ID NO: 24436 - RNA, 22 nt, Artificial Sequence
  Synthetic oligonucleotide: Ptpn6-4972
ggcccuacucugugaccaacug

SEQ ID NO: 24437 - RNA, 23 nt, Artificial Sequence
  Synthetic oligonucleotide: Ptpn6-4973
gggcccuacucugugaccaacug

SEQ ID NO: 24438 - RNA, 24 nt, Artificial Sequence
  Synthetic oligonucleotide: Ptpn6-4974
ugggcccuacucugugaccaacug

SEQ ID NO: 24439 - RNA, 18 nt, Artificial Sequence
  Synthetic oligonucleotide: Ptpn6-4975
gacagccucacggaccug

SEQ ID NO: 24440 - RNA, 19 nt, Artificial Sequence
  Synthetic oligonucleotide: Ptpn6-4976
cgacagccucacggaccug

SEQ ID NO: 24441 - RNA, 20 nt, Artificial Sequence
  Synthetic oligonucleotide: Ptpn6-636
ucgacagccucacggaccug

SEQ ID NO: 24442 - RNA, 21 nt, Artificial Sequence
  Synthetic oligonucleotide: Ptpn6-4977
uucgacagccucacggaccug

SEQ ID NO: 24443 - RNA, 22 nt, Artificial Sequence
  Synthetic oligonucleotide: Ptpn6-4978
cuucgacagccucacggaccug

SEQ ID NO: 24444 - RNA, 23 nt, Artificial Sequence
  Synthetic oligonucleotide: Ptpn6-4979
ccuucgacagccucacggaccug

SEQ ID NO: 24445 - RNA, 24 nt, Artificial Sequence
  Synthetic oligonucleotide: Ptpn6-4980
accuucgacagccucacggaccug

SEQ ID NO: 24446 - RNA, 18 nt, Artificial Sequence
  Synthetic oligonucleotide: Ptpn6-4981
accagcugcuaggcccug

SEQ ID NO: 24447 - RNA, 19 nt, Artificial Sequence
  Synthetic oligonucleotide: Ptpn6-4982
aaccagcugcuaggcccug

SEQ ID NO: 24448 - RNA, 20 nt, Artificial Sequence
  Synthetic oligonucleotide: Ptpn6-4983
aaaccagcugcuaggcccug

SEQ ID NO: 24449 - RNA, 21 nt, Artificial Sequence
  Synthetic oligonucleotide: Ptpn6-4984
caaaccagcugcuaggcccug

SEQ ID NO: 24450 - RNA, 22 nt, Artificial Sequence
  Synthetic oligonucleotide: Ptpn6-4985
ccaaaccagcugcuaggcccug

SEQ ID NO: 24451 - RNA, 23 nt, Artificial Sequence
  Synthetic oligonucleotide: Ptpn6-4986
cccaaaccagcugcuaggcccug

SEQ ID NO: 24452 - RNA, 24 nt, Artificial Sequence
  Synthetic oligonucleotide: Ptpn6-4987
ccccaaaccagcugcuaggcccug

SEQ ID NO: 24453 - RNA, 18 nt, Artificial Sequence
  Synthetic oligonucleotide: Ptpn6-4988
cgugcagagcagggccug

SEQ ID NO: 24454 - RNA, 19 nt, Artificial Sequence
  Synthetic oligonucleotide: Ptpn6-4989
gcgugcagagcagggccug

SEQ ID NO: 24455 - RNA, 20 nt, Artificial Sequence
  Synthetic oligonucleotide: Ptpn6-2735
ugcgugcagagcagggccug

SEQ ID NO: 24456 - RNA, 21 nt, Artificial Sequence
  Synthetic oligonucleotide: Ptpn6-4990
gugcgugcagagcagggccug

SEQ ID NO: 24457 - RNA, 22 nt, Artificial Sequence
  Synthetic oligonucleotide: Ptpn6-4991
ggugcgugcagagcagggccug

SEQ ID NO: 24458 - RNA, 23 nt, Artificial Sequence
  Synthetic oligonucleotide: Ptpn6-4992
aggugcgugcagagcagggccug

SEQ ID NO: 24459 - RNA, 24 nt, Artificial Sequence
  Synthetic oligonucleotide: Ptpn6-4993
caggugcgugcagagcagggccug

SEQ ID NO: 24460 - RNA, 18 nt, Artificial Sequence
  Synthetic oligonucleotide: Ptpn6-4994
cacagccgagugauccug

SEQ ID NO: 24461 - RNA, 19 nt, Artificial Sequence
  Synthetic oligonucleotide: Ptpn6-4995
ccacagccgagugauccug

SEQ ID NO: 24462 - RNA, 20 nt, Artificial Sequence
  Synthetic oligonucleotide: Ptpn6-669
accacagccgagugauccug

SEQ ID NO: 24463 - RNA, 21 nt, Artificial Sequence
  Synthetic oligonucleotide: Ptpn6-4996
gaccacagccgagugauccug

SEQ ID NO: 24464 - RNA, 22 nt, Artificial Sequence
  Synthetic oligonucleotide: Ptpn6-4997
ugaccacagccgagugauccug

SEQ ID NO: 24465 - RNA, 23 nt, Artificial Sequence
  Synthetic oligonucleotide: Ptpn6-4998
uugaccacagccgagugauccug

SEQ ID NO: 24466 - RNA, 24 nt, Artificial Sequence
  Synthetic oligonucleotide: Ptpn6-4999
guugaccacagccgagugauccug

SEQ ID NO: 24467 - RNA, 18 nt, Artificial Sequence
  Synthetic oligonucleotide: Ptpn6-5000
aagagggaggagaaagug

SEQ ID NO: 24468 - RNA, 19 nt, Artificial Sequence
  Synthetic oligonucleotide: Ptpn6-5001
caagagggaggagaaagug

SEQ ID NO: 24469 - RNA, 20 nt, Artificial Sequence
  Synthetic oligonucleotide: Ptpn6-733
acaagagggaggagaaagug

SEQ ID NO: 24470 - RNA, 21 nt, Artificial Sequence
  Synthetic oligonucleotide: Ptpn6-5002
aacaagagggaggagaaagug

SEQ ID NO: 24471 - RNA, 22 nt, Artificial Sequence
  Synthetic oligonucleotide: Ptpn6-5003
gaacaagagggaggagaaagug

SEQ ID NO: 24472 - RNA, 23 nt, Artificial Sequence
  Synthetic oligonucleotide: Ptpn6-5004
agaacaagagggaggagaaagug

SEQ ID NO: 24473 - RNA, 24 nt, Artificial Sequence
  Synthetic oligonucleotide: Ptpn6-5005
aagaacaagagggaggagaaagug

SEQ ID NO: 24474 - RNA, 18 nt, Artificial Sequence
  Synthetic oligonucleotide: Ptpn6-5006
gacauugagaaccgagug

SEQ ID NO: 24475 - RNA, 19 nt, Artificial Sequence
  Synthetic oligonucleotide: Ptpn6-5007
ugacauugagaaccgagug

SEQ ID NO: 24476 - RNA, 20 nt, Artificial Sequence
  Synthetic oligonucleotide: Ptpn6-646
cugacauugagaaccgagug

SEQ ID NO: 24477 - RNA, 21 nt, Artificial Sequence
  Synthetic oligonucleotide: Ptpn6-5008
gcugacauugagaaccgagug

SEQ ID NO: 24478 - RNA, 22 nt, Artificial Sequence
  Synthetic oligonucleotide: Ptpn6-5009
ggcugacauugagaaccgagug

SEQ ID NO: 24479 - RNA, 23 nt, Artificial Sequence
  Synthetic oligonucleotide: Ptpn6-5010
cggcugacauugagaaccgagug

SEQ ID NO: 24480 - RNA, 24 nt, Artificial Sequence
  Synthetic oligonucleotide: Ptpn6-5011
gcggcugacauugagaaccgagug

SEQ ID NO: 24481 - RNA, 18 nt, Artificial Sequence
  Synthetic oligonucleotide: Ptpn6-5012
agguccugcaggugcgug

SEQ ID NO: 24482 - RNA, 19 nt, Artificial Sequence
  Synthetic oligonucleotide: Ptpn6-5013
gagguccugcaggugcgug

SEQ ID NO: 24483 - RNA, 20 nt, Artificial Sequence
  Synthetic oligonucleotide: Ptpn6-5014
ggagguccugcaggugcgug

SEQ ID NO: 24484 - RNA, 21 nt, Artificial Sequence
  Synthetic oligonucleotide: Ptpn6-5015
uggagguccugcaggugcgug

SEQ ID NO: 24485 - RNA, 22 nt, Artificial Sequence
  Synthetic oligonucleotide: Ptpn6-5016
cuggagguccugcaggugcgug

SEQ ID NO: 24486 - RNA, 23 nt, Artificial Sequence
  Synthetic oligonucleotide: Ptpn6-5017
gcuggagguccugcaggugcgug

SEQ ID NO: 24487 - RNA, 24 nt, Artificial Sequence
  Synthetic oligonucleotide: Ptpn6-5018
agcuggagguccugcaggugcgug

SEQ ID NO: 24488 - RNA, 18 nt, Artificial Sequence
  Synthetic oligonucleotide: Ptpn6-5019
augaccacccgagaggug

SEQ ID NO: 24489 - RNA, 19 nt, Artificial Sequence
  Synthetic oligonucleotide: Ptpn6-5020
caugaccacccgagaggug

SEQ ID NO: 24490 - RNA, 20 nt, Artificial Sequence
  Synthetic oligonucleotide: Ptpn6-685
ucaugaccacccgagaggug

SEQ ID NO: 24491 - RNA, 21 nt, Artificial Sequence
  Synthetic oligonucleotide: Ptpn6-5021
gucaugaccacccgagaggug

SEQ ID NO: 24492 - RNA, 22 nt, Artificial Sequence
  Synthetic oligonucleotide: Ptpn6-5022
cgucaugaccacccgagaggug

SEQ ID NO: 24493 - RNA, 23 nt, Artificial Sequence
  Synthetic oligonucleotide: Ptpn6-5023
ucgucaugaccacccgagaggug

SEQ ID NO: 24494 - RNA, 24 nt, Artificial Sequence
  Synthetic oligonucleotide: Ptpn6-5024
aucgucaugaccacccgagaggug

SEQ ID NO: 24495 - RNA, 18 nt, Artificial Sequence
  Synthetic oligonucleotide: Ptpn6-5025
uugcagaagcaggaggug

SEQ ID NO: 24496 - RNA, 19 nt, Artificial Sequence
  Synthetic oligonucleotide: Ptpn6-5026
uuugcagaagcaggaggug

SEQ ID NO: 24497 - RNA, 20 nt, Artificial Sequence
  Synthetic oligonucleotide: Ptpn6-660
guuugcagaagcaggaggug

SEQ ID NO: 24498 - RNA, 21 nt, Artificial Sequence
  Synthetic oligonucleotide: Ptpn6-5027
aguuugcagaagcaggaggug

SEQ ID NO: 24499 - RNA, 22 nt, Artificial Sequence
  Synthetic oligonucleotide: Ptpn6-5028
gaguuugcagaagcaggaggug

SEQ ID NO: 24500 - RNA, 23 nt, Artificial Sequence
  Synthetic oligonucleotide: Ptpn6-5029
agaguuugcagaagcaggaggug

SEQ ID NO: 24501 - RNA, 24 nt, Artificial Sequence
  Synthetic oligonucleotide: Ptpn6-5030
cagaguuugcagaagcaggaggug

SEQ ID NO: 24502 - RNA, 18 nt, Artificial Sequence
  Synthetic oligonucleotide: Ptpn6-5031
acaucuccaccaagggug

SEQ ID NO: 24503 - RNA, 19 nt, Artificial Sequence
  Synthetic oligonucleotide: Ptpn6-5032
aacaucuccaccaagggug

SEQ ID NO: 24504 - RNA, 20 nt, Artificial Sequence
  Synthetic oligonucleotide: Ptpn6-2740
gaacaucuccaccaagggug

SEQ ID NO: 24505 - RNA, 21 nt, Artificial Sequence
  Synthetic oligonucleotide: Ptpn6-5033
agaacaucuccaccaagggug

SEQ ID NO: 24506 - RNA, 22 nt, Artificial Sequence
  Synthetic oligonucleotide: Ptpn6-5034
gagaacaucuccaccaagggug

SEQ ID NO: 24507 - RNA, 23 nt, Artificial Sequence
  Synthetic oligonucleotide: Ptpn6-5035
ggagaacaucuccaccaagggug

SEQ ID NO: 24508 - RNA, 24 nt, Artificial Sequence
  Synthetic oligonucleotide: Ptpn6-5036
uggagaacaucuccaccaagggug

SEQ ID NO: 24509 - RNA, 18 nt, Artificial Sequence
  Synthetic oligonucleotide: Ptpn6-5037
ucaagaagacggggauug

SEQ ID NO: 24510 - RNA, 19 nt, Artificial Sequence
  Synthetic oligonucleotide: Ptpn6-5038
uucaagaagacggggauug

SEQ ID NO: 24511 - RNA, 20 nt, Artificial Sequence
  Synthetic oligonucleotide: Ptpn6-155
uuucaagaagacggggauug

SEQ ID NO: 24512 - RNA, 21 nt, Artificial Sequence
  Synthetic oligonucleotide: Ptpn6-5039
auuucaagaagacggggauug

SEQ ID NO: 24513 - RNA, 22 nt, Artificial Sequence
  Synthetic oligonucleotide: Ptpn6-5040
cauuucaagaagacggggauug

SEQ ID NO: 24514 - RNA, 23 nt, Artificial Sequence
  Synthetic oligonucleotide: Ptpn6-5041
gcauuucaagaagacggggauug

SEQ ID NO: 24515 - RNA, 24 nt, Artificial Sequence
  Synthetic oligonucleotide: Ptpn6-5042
agcauuucaagaagacggggauug

SEQ ID NO: 24516 - RNA, 18 nt, Artificial Sequence
  Synthetic oligonucleotide: Ptpn6-5043
cccacaucucagaguuug

SEQ ID NO: 24517 - RNA, 19 nt, Artificial Sequence
  Synthetic oligonucleotide: Ptpn6-5044
acccacaucucagaguuug

SEQ ID NO: 24518 - RNA, 20 nt, Artificial Sequence
  Synthetic oligonucleotide: Ptpn6-5045
cacccacaucucagaguuug

SEQ ID NO: 24519 - RNA, 21 nt, Artificial Sequence
  Synthetic oligonucleotide: Ptpn6-5046
ccacccacaucucagaguuug

SEQ ID NO: 24520 - RNA, 22 nt, Artificial Sequence
  Synthetic oligonucleotide: Ptpn6-5047
cccacccacaucucagaguuug

SEQ ID NO: 24521 - RNA, 23 nt, Artificial Sequence
  Synthetic oligonucleotide: Ptpn6-5048
ccccacccacaucucagaguuug

SEQ ID NO: 24522 - RNA, 24 nt, Artificial Sequence
  Synthetic oligonucleotide: Ptpn6-5049
uccccacccacaucucagaguuug

SEQ ID NO: 24523 - RNA, 18 nt, Artificial Sequence
  Synthetic oligonucleotide: Ptpn6-5050
gaaagacgggggugccau

SEQ ID NO: 24524 - RNA, 19 nt, Artificial Sequence
  Synthetic oligonucleotide: Ptpn6-5051
ggaaagacgggggugccau

SEQ ID NO: 24525 - RNA, 20 nt, Artificial Sequence
  Synthetic oligonucleotide: Ptpn6-5052
gggaaagacgggggugccau

SEQ ID NO: 24526 - RNA, 18 nt, Artificial Sequence
  Synthetic oligonucleotide: Ptpn6-5053
ggagggucggguggggau

SEQ ID NO: 24527 - RNA, 19 nt, Artificial Sequence
  Synthetic oligonucleotide: Ptpn6-5054
gggagggucggguggggau

SEQ ID NO: 24528 - RNA, 20 nt, Artificial Sequence
  Synthetic oligonucleotide: Ptpn6-5055
agggagggucggguggggau

SEQ ID NO: 24529 - RNA, 21 nt, Artificial Sequence
  Synthetic oligonucleotide: Ptpn6-5056
aagggagggucggguggggau

SEQ ID NO: 24530 - RNA, 22 nt, Artificial Sequence
  Synthetic oligonucleotide: Ptpn6-5057
aaagggagggucggguggggau

SEQ ID NO: 24531 - RNA, 23 nt, Artificial Sequence
  Synthetic oligonucleotide: Ptpn6-5058
gaaagggagggucggguggggau

SEQ ID NO: 24532 - RNA, 24 nt, Artificial Sequence
  Synthetic oligonucleotide: Ptpn6-5059
ggaaagggagggucggguggggau

SEQ ID NO: 24533 - RNA, 18 nt, Artificial Sequence
  Synthetic oligonucleotide: Ptpn6-5060
ugcccccggagaccugau

SEQ ID NO: 24534 - RNA, 19 nt, Artificial Sequence
  Synthetic oligonucleotide: Ptpn6-5061
gugcccccggagaccugau

SEQ ID NO: 24535 - RNA, 20 nt, Artificial Sequence
  Synthetic oligonucleotide: Ptpn6-5062
agugcccccggagaccugau

SEQ ID NO: 24536 - RNA, 21 nt, Artificial Sequence
  Synthetic oligonucleotide: Ptpn6-5063
cagugcccccggagaccugau

SEQ ID NO: 24537 - RNA, 22 nt, Artificial Sequence
  Synthetic oligonucleotide: Ptpn6-5064
ucagugcccccggagaccugau

SEQ ID NO: 24538 - RNA, 23 nt, Artificial Sequence
  Synthetic oligonucleotide: Ptpn6-5065
gucagugcccccggagaccugau

SEQ ID NO: 24539 - RNA, 24 nt, Artificial Sequence
  Synthetic oligonucleotide: Ptpn6-5066
ggucagugcccccggagaccugau

SEQ ID NO: 24540 - RNA, 18 nt, Artificial Sequence
  Synthetic oligonucleotide: Ptpn6-5067
cagcugcuaggcccugau

SEQ ID NO: 24541 - RNA, 19 nt, Artificial Sequence
  Synthetic oligonucleotide: Ptpn6-5068
ccagcugcuaggcccugau

SEQ ID NO: 24542 - RNA, 20 nt, Artificial Sequence
  Synthetic oligonucleotide: Ptpn6-674
accagcugcuaggcccugau

SEQ ID NO: 24543 - RNA, 21 nt, Artificial Sequence
  Synthetic oligonucleotide: Ptpn6-5069
aaccagcugcuaggcccugau

SEQ ID NO: 24544 - RNA, 22 nt, Artificial Sequence
  Synthetic oligonucleotide: Ptpn6-5070
aaaccagcugcuaggcccugau

SEQ ID NO: 24545 - RNA, 23 nt, Artificial Sequence
  Synthetic oligonucleotide: Ptpn6-5071
caaaccagcugcuaggcccugau

SEQ ID NO: 24546 - RNA, 24 nt, Artificial Sequence
  Synthetic oligonucleotide: Ptpn6-5072
ccaaaccagcugcuaggcccugau

SEQ ID NO: 24547 - RNA, 18 nt, Artificial Sequence
  Synthetic oligonucleotide: Ptpn6-5073
cacaaggaggauguguau

SEQ ID NO: 24548 - RNA, 19 nt, Artificial Sequence
  Synthetic oligonucleotide: Ptpn6-5074
acacaaggaggauguguau

SEQ ID NO: 24549 - RNA, 20 nt, Artificial Sequence
  Synthetic oligonucleotide: Ptpn6-5075
gacacaaggaggauguguau

SEQ ID NO: 24550 - RNA, 21 nt, Artificial Sequence
  Synthetic oligonucleotide: Ptpn6-5076
agacacaaggaggauguguau

SEQ ID NO: 24551 - RNA, 22 nt, Artificial Sequence
  Synthetic oligonucleotide: Ptpn6-5077
cagacacaaggaggauguguau

SEQ ID NO: 24552 - RNA, 23 nt, Artificial Sequence
  Synthetic oligonucleotide: Ptpn6-5078
acagacacaaggaggauguguau

SEQ ID NO: 24553 - RNA, 24 nt, Artificial Sequence
  Synthetic oligonucleotide: Ptpn6-5079
uacagacacaaggaggauguguau

SEQ ID NO: 24554 - RNA, 18 nt, Artificial Sequence
  Synthetic oligonucleotide: Ptpn6-5080
ccuacucugugaccaacu

SEQ ID NO: 24555 - RNA, 19 nt, Artificial Sequence
  Synthetic oligonucleotide: Ptpn6-5081
cccuacucugugaccaacu

SEQ ID NO: 24556 - RNA, 20 nt, Artificial Sequence
  Synthetic oligonucleotide: Ptpn6-689
gcccuacucugugaccaacu

SEQ ID NO: 24557 - RNA, 21 nt, Artificial Sequence
  Synthetic oligonucleotide: Ptpn6-5082
ggcccuacucugugaccaacu

SEQ ID NO: 24558 - RNA, 22 nt, Artificial Sequence
  Synthetic oligonucleotide: Ptpn6-5083
gggcccuacucugugaccaacu

SEQ ID NO: 24559 - RNA, 23 nt, Artificial Sequence
  Synthetic oligonucleotide: Ptpn6-5084
ugggcccuacucugugaccaacu

SEQ ID NO: 24560 - RNA, 24 nt, Artificial Sequence
  Synthetic oligonucleotide: Ptpn6-5085
augggcccuacucugugaccaacu

SEQ ID NO: 24561 - RNA, 18 nt, Artificial Sequence
  Synthetic oligonucleotide: Ptpn6-5086
uaugagaaccugcacacu

SEQ ID NO: 24562 - RNA, 19 nt, Artificial Sequence
  Synthetic oligonucleotide: Ptpn6-5087
guaugagaaccugcacacu

SEQ ID NO: 24563 - RNA, 20 nt, Artificial Sequence
  Synthetic oligonucleotide: Ptpn6-724
uguaugagaaccugcacacu

SEQ ID NO: 24564 - RNA, 21 nt, Artificial Sequence
  Synthetic oligonucleotide: Ptpn6-5088
guguaugagaaccugcacacu

SEQ ID NO: 24565 - RNA, 22 nt, Artificial Sequence
  Synthetic oligonucleotide: Ptpn6-5089
uguguaugagaaccugcacacu

SEQ ID NO: 24566 - RNA, 23 nt, Artificial Sequence
  Synthetic oligonucleotide: Ptpn6-5090
auguguaugagaaccugcacacu

SEQ ID NO: 24567 - RNA, 24 nt, Artificial Sequence
  Synthetic oligonucleotide: Ptpn6-5091
gauguguaugagaaccugcacacu

SEQ ID NO: 24568 - RNA, 18 nt, Artificial Sequence
  Synthetic oligonucleotide: Ptpn6-5092
caguucauugaaaccacu

SEQ ID NO: 24569 - RNA, 19 nt, Artificial Sequence
  Synthetic oligonucleotide: Ptpn6-5093
ccaguucauugaaaccacu

SEQ ID NO: 24570 - RNA, 20 nt, Artificial Sequence
  Synthetic oligonucleotide: Ptpn6-715
cccaguucauugaaaccacu

SEQ ID NO: 24571 - RNA, 21 nt, Artificial Sequence
  Synthetic oligonucleotide: Ptpn6-5094
gcccaguucauugaaaccacu

SEQ ID NO: 24572 - RNA, 22 nt, Artificial Sequence
  Synthetic oligonucleotide: Ptpn6-5095
cgcccaguucauugaaaccacu

SEQ ID NO: 24573 - RNA, 23 nt, Artificial Sequence
  Synthetic oligonucleotide: Ptpn6-5096
ucgcccaguucauugaaaccacu

SEQ ID NO: 24574 - RNA, 24 nt, Artificial Sequence
  Synthetic oligonucleotide: Ptpn6-5097
aucgcccaguucauugaaaccacu

SEQ ID NO: 24575 - RNA, 18 nt, Artificial Sequence
  Synthetic oligonucleotide: Ptpn6-5098
acaagaacauucuccccu

SEQ ID NO: 24576 - RNA, 19 nt, Artificial Sequence
  Synthetic oligonucleotide: Ptpn6-5099
uacaagaacauucuccccu

SEQ ID NO: 24577 - RNA, 20 nt, Artificial Sequence
  Synthetic oligonucleotide: Ptpn6-5100
cuacaagaacauucuccccu

SEQ ID NO: 24578 - RNA, 21 nt, Artificial Sequence
  Synthetic oligonucleotide: Ptpn6-5101
gcuacaagaacauucuccccu

SEQ ID NO: 24579 - RNA, 22 nt, Artificial Sequence
  Synthetic oligonucleotide: Ptpn6-5102
cgcuacaagaacauucuccccu

SEQ ID NO: 24580 - RNA, 23 nt, Artificial Sequence
  Synthetic oligonucleotide: Ptpn6-5103
ccgcuacaagaacauucuccccu

SEQ ID NO: 24581 - RNA, 24 nt, Artificial Sequence
  Synthetic oligonucleotide: Ptpn6-5104
accgcuacaagaacauucuccccu

SEQ ID NO: 24582 - RNA, 18 nt, Artificial Sequence
  Synthetic oligonucleotide: Ptpn6-5105
gcgugcagagcagggccu

SEQ ID NO: 24583 - RNA, 19 nt, Artificial Sequence
  Synthetic oligonucleotide: Ptpn6-5106
ugcgugcagagcagggccu

SEQ ID NO: 24584 - RNA, 20 nt, Artificial Sequence
  Synthetic oligonucleotide: Ptpn6-2755
gugcgugcagagcagggccu

SEQ ID NO: 24585 - RNA, 21 nt, Artificial Sequence
  Synthetic oligonucleotide: Ptpn6-5107
ggugcgugcagagcagggccu

SEQ ID NO: 24586 - RNA, 22 nt, Artificial Sequence
  Synthetic oligonucleotide: Ptpn6-5108
aggugcgugcagagcagggccu

SEQ ID NO: 24587 - RNA, 23 nt, Artificial Sequence
  Synthetic oligonucleotide: Ptpn6-5109
caggugcgugcagagcagggccu

SEQ ID NO: 24588 - RNA, 24 nt, Artificial Sequence
  Synthetic oligonucleotide: Ptpn6-5110
gcaggugcgugcagagcagggccu

SEQ ID NO: 24589 - RNA, 18 nt, Artificial Sequence
  Synthetic oligonucleotide: Ptpn6-5111
cagccaaggcuggcuucu

SEQ ID NO: 24590 - RNA, 19 nt, Artificial Sequence
  Synthetic oligonucleotide: Ptpn6-5112
acagccaaggcuggcuucu

SEQ ID NO: 24591 - RNA, 20 nt, Artificial Sequence
  Synthetic oligonucleotide: Ptpn6-166
uacagccaaggcuggcuucu

SEQ ID NO: 24592 - RNA, 21 nt, Artificial Sequence
  Synthetic oligonucleotide: Ptpn6-5113
auacagccaaggcuggcuucu

SEQ ID NO: 24593 - RNA, 22 nt, Artificial Sequence
  Synthetic oligonucleotide: Ptpn6-5114
gauacagccaaggcuggcuucu

SEQ ID NO: 24594 - RNA, 23 nt, Artificial Sequence
  Synthetic oligonucleotide: Ptpn6-5115
ggauacagccaaggcuggcuucu

SEQ ID NO: 24595 - RNA, 24 nt, Artificial Sequence
  Synthetic oligonucleotide: Ptpn6-5116
aggauacagccaaggcuggcuucu

SEQ ID NO: 24596 - RNA, 18 nt, Artificial Sequence
  Synthetic oligonucleotide: Ptpn6-5117
uacaucaaggucagcagu

SEQ ID NO: 24597 - RNA, 19 nt, Artificial Sequence
  Synthetic oligonucleotide: Ptpn6-5118
cuacaucaaggucagcagu

SEQ ID NO: 24598 - RNA, 20 nt, Artificial Sequence
  Synthetic oligonucleotide: Ptpn6-5119
acuacaucaaggucagcagu

SEQ ID NO: 24599 - RNA, 21 nt, Artificial Sequence
  Synthetic oligonucleotide: Ptpn6-5120
aacuacaucaaggucagcagu

SEQ ID NO: 24600 - RNA, 22 nt, Artificial Sequence
  Synthetic oligonucleotide: Ptpn6-5121
caacuacaucaaggucagcagu

SEQ ID NO: 24601 - RNA, 23 nt, Artificial Sequence
  Synthetic oligonucleotide: Ptpn6-5122
ccaacuacaucaaggucagcagu

SEQ ID NO: 24602 - RNA, 24 nt, Artificial Sequence
  Synthetic oligonucleotide: Ptpn6-5123
gccaacuacaucaaggucagcagu

SEQ ID NO: 24603 - RNA, 18 nt, Artificial Sequence
  Synthetic oligonucleotide: Ptpn6-5124
ugaacaagaagcaggagu

SEQ ID NO: 24604 - RNA, 19 nt, Artificial Sequence
  Synthetic oligonucleotide: Ptpn6-5125
cugaacaagaagcaggagu

SEQ ID NO: 24605 - RNA, 20 nt, Artificial Sequence
  Synthetic oligonucleotide: Ptpn6-652
acugaacaagaagcaggagu

SEQ ID NO: 24606 - RNA, 21 nt, Artificial Sequence
  Synthetic oligonucleotide: Ptpn6-5126
aacugaacaagaagcaggagu

SEQ ID NO: 24607 - RNA, 22 nt, Artificial Sequence
  Synthetic oligonucleotide: Ptpn6-5127
gaacugaacaagaagcaggagu

SEQ ID NO: 24608 - RNA, 23 nt, Artificial Sequence
  Synthetic oligonucleotide: Ptpn6-5128
ggaacugaacaagaagcaggagu

SEQ ID NO: 24609 - RNA, 24 nt, Artificial Sequence
  Synthetic oligonucleotide: Ptpn6-5129
uggaacugaacaagaagcaggagu

SEQ ID NO: 24610 - RNA, 18 nt, Artificial Sequence
  Synthetic oligonucleotide: Ptpn6-5130
cuggcuucugggaggagu

SEQ ID NO: 24611 - RNA, 19 nt, Artificial Sequence
  Synthetic oligonucleotide: Ptpn6-5131
gcuggcuucugggaggagu

SEQ ID NO: 24612 - RNA, 20 nt, Artificial Sequence
  Synthetic oligonucleotide: Ptpn6-659
ggcuggcuucugggaggagu

SEQ ID NO: 24613 - RNA, 21 nt, Artificial Sequence
  Synthetic oligonucleotide: Ptpn6-5132
aggcuggcuucugggaggagu

SEQ ID NO: 24614 - RNA, 22 nt, Artificial Sequence
  Synthetic oligonucleotide: Ptpn6-5133
aaggcuggcuucugggaggagu

SEQ ID NO: 24615 - RNA, 23 nt, Artificial Sequence
  Synthetic oligonucleotide: Ptpn6-5134
caaggcuggcuucugggaggagu

SEQ ID NO: 24616 - RNA, 24 nt, Artificial Sequence
  Synthetic oligonucleotide: Ptpn6-5135
ccaaggcuggcuucugggaggagu

SEQ ID NO: 24617 - RNA, 18 nt, Artificial Sequence
  Synthetic oligonucleotide: Ptpn6-5136
agggccaggagucggagu

SEQ ID NO: 24618 - RNA, 19 nt, Artificial Sequence
  Synthetic oligonucleotide: Ptpn6-5137
aagggccaggagucggagu

SEQ ID NO: 24619 - RNA, 20 nt, Artificial Sequence
  Synthetic oligonucleotide: Ptpn6-719
gaagggccaggagucggagu

SEQ ID NO: 24620 - RNA, 21 nt, Artificial Sequence
  Synthetic oligonucleotide: Ptpn6-5138
agaagggccaggagucggagu

SEQ ID NO: 24621 - RNA, 22 nt, Artificial Sequence
  Synthetic oligonucleotide: Ptpn6-5139
cagaagggccaggagucggagu

SEQ ID NO: 24622 - RNA, 23 nt, Artificial Sequence
  Synthetic oligonucleotide: Ptpn6-5140
gcagaagggccaggagucggagu

SEQ ID NO: 24623 - RNA, 24 nt, Artificial Sequence
  Synthetic oligonucleotide: Ptpn6-5141
cgcagaagggccaggagucggagu

SEQ ID NO: 24624 - RNA, 18 nt, Artificial Sequence
  Synthetic oligonucleotide: Ptpn6-5142
cagcagugugggccacgu

SEQ ID NO: 24625 - RNA, 19 nt, Artificial Sequence
  Synthetic oligonucleotide: Ptpn6-5143
ucagcagugugggccacgu

SEQ ID NO: 24626 - RNA, 20 nt, Artificial Sequence
  Synthetic oligonucleotide: Ptpn6-2763
gucagcagugugggccacgu

SEQ ID NO: 24627 - RNA, 21 nt, Artificial Sequence
  Synthetic oligonucleotide: Ptpn6-5144
ggucagcagugugggccacgu

SEQ ID NO: 24628 - RNA, 22 nt, Artificial Sequence
  Synthetic oligonucleotide: Ptpn6-5145
aggucagcagugugggccacgu

SEQ ID NO: 24629 - RNA, 23 nt, Artificial Sequence
  Synthetic oligonucleotide: Ptpn6-5146
aaggucagcagugugggccacgu

SEQ ID NO: 24630 - RNA, 24 nt, Artificial Sequence
  Synthetic oligonucleotide: Ptpn6-5147
caaggucagcagugugggccacgu

SEQ ID NO: 24631 - RNA, 18 nt, Artificial Sequence
  Synthetic oligonucleotide: Ptpn6-5148
aagaacuugcaccagcgu

SEQ ID NO: 24632 - RNA, 19 nt, Artificial Sequence
  Synthetic oligonucleotide: Ptpn6-5149
gaagaacuugcaccagcgu

SEQ ID NO: 24633 - RNA, 20 nt, Artificial Sequence
  Synthetic oligonucleotide: Ptpn6-661
ugaagaacuugcaccagcgu

SEQ ID NO: 24634 - RNA, 21 nt, Artificial Sequence
  Synthetic oligonucleotide: Ptpn6-5150
gugaagaacuugcaccagcgu

SEQ ID NO: 24635 - RNA, 22 nt, Artificial Sequence
  Synthetic oligonucleotide: Ptpn6-5151
ggugaagaacuugcaccagcgu

SEQ ID NO: 24636 - RNA, 23 nt, Artificial Sequence
  Synthetic oligonucleotide: Ptpn6-5152
aggugaagaacuugcaccagcgu

SEQ ID NO: 24637 - RNA, 24 nt, Artificial Sequence
  Synthetic oligonucleotide: Ptpn6-5153
gaggugaagaacuugcaccagcgu

SEQ ID NO: 24638 - RNA, 18 nt, Artificial Sequence
  Synthetic oligonucleotide: Ptpn6-5154
ugucuaccugcggcaggu

SEQ ID NO: 24639 - RNA, 19 nt, Artificial Sequence
  Synthetic oligonucleotide: Ptpn6-5155
uugucuaccugcggcaggu

SEQ ID NO: 24640 - RNA, 20 nt, Artificial Sequence
  Synthetic oligonucleotide: Ptpn6-5156
uuugucuaccugcggcaggu

SEQ ID NO: 24641 - RNA, 21 nt, Artificial Sequence
  Synthetic oligonucleotide: Ptpn6-5157
cuuugucuaccugcggcaggu

SEQ ID NO: 24642 - RNA, 22 nt, Artificial Sequence
  Synthetic oligonucleotide: Ptpn6-5158
ccuuugucuaccugcggcaggu

SEQ ID NO: 24643 - RNA, 23 nt, Artificial Sequence
  Synthetic oligonucleotide: Ptpn6-5159
gccuuugucuaccugcggcaggu

SEQ ID NO: 24644 - RNA, 24 nt, Artificial Sequence
  Synthetic oligonucleotide: Ptpn6-5160
cgccuuugucuaccugcggcaggu

SEQ ID NO: 24645 - RNA, 18 nt, Artificial Sequence
  Synthetic oligonucleotide: Ptpn6-5161
aacaucuccaccaagggu

SEQ ID NO: 24646 - RNA, 19 nt, Artificial Sequence
  Synthetic oligonucleotide: Ptpn6-5162
gaacaucuccaccaagggu

SEQ ID NO: 24647 - RNA, 20 nt, Artificial Sequence
  Synthetic oligonucleotide: Ptpn6-5163
agaacaucuccaccaagggu

SEQ ID NO: 24648 - RNA, 21 nt, Artificial Sequence
  Synthetic oligonucleotide: Ptpn6-5164
gagaacaucuccaccaagggu

SEQ ID NO: 24649 - RNA, 22 nt, Artificial Sequence
  Synthetic oligonucleotide: Ptpn6-5165
ggagaacaucuccaccaagggu

SEQ ID NO: 24650 - RNA, 23 nt, Artificial Sequence
  Synthetic oligonucleotide: Ptpn6-5166
uggagaacaucuccaccaagggu

SEQ ID NO: 24651 - RNA, 24 nt, Artificial Sequence
  Synthetic oligonucleotide: Ptpn6-5167
auggagaacaucuccaccaagggu

SEQ ID NO: 24652 - RNA, 18 nt, Artificial Sequence
  Synthetic oligonucleotide: Ptpn6-5168
ugaggggcaccugggggu

SEQ ID NO: 24653 - RNA, 19 nt, Artificial Sequence
  Synthetic oligonucleotide: Ptpn6-5169
gugaggggcaccugggggu

SEQ ID NO: 24654 - RNA, 20 nt, Artificial Sequence
  Synthetic oligonucleotide: Ptpn6-5170
ggugaggggcaccugggggu

SEQ ID NO: 24655 - RNA, 21 nt, Artificial Sequence
  Synthetic oligonucleotide: Ptpn6-5171
gggugaggggcaccugggggu

SEQ ID NO: 24656 - RNA, 22 nt, Artificial Sequence
  Synthetic oligonucleotide: Ptpn6-5172
agggugaggggcaccugggggu

SEQ ID NO: 24657 - RNA, 23 nt, Artificial Sequence
  Synthetic oligonucleotide: Ptpn6-5173
aagggugaggggcaccugggggu

SEQ ID NO: 24658 - RNA, 24 nt, Artificial Sequence
  Synthetic oligonucleotide: Ptpn6-5174
caagggugaggggcaccugggggu

SEQ ID NO: 24659 - RNA, 18 nt, Artificial Sequence
  Synthetic oligonucleotide: Ptpn6-5175
gaguuugaggugcauggu

SEQ ID NO: 24660 - RNA, 19 nt, Artificial Sequence
  Synthetic oligonucleotide: Ptpn6-5176
ggaguuugaggugcauggu

SEQ ID NO: 24661 - RNA, 20 nt, Artificial Sequence
  Synthetic oligonucleotide: Ptpn6-2769
aggaguuugaggugcauggu

SEQ ID NO: 24662 - RNA, 21 nt, Artificial Sequence
  Synthetic oligonucleotide: Ptpn6-5177
gaggaguuugaggugcauggu

SEQ ID NO: 24663 - RNA, 22 nt, Artificial Sequence
  Synthetic oligonucleotide: Ptpn6-5178
ggaggaguuugaggugcauggu

SEQ ID NO: 24664 - RNA, 23 nt, Artificial Sequence
  Synthetic oligonucleotide: Ptpn6-5179
gggaggaguuugaggugcauggu

SEQ ID NO: 24665 - RNA, 24 nt, Artificial Sequence
  Synthetic oligonucleotide: Ptpn6-5180
ugggaggaguuugaggugcauggu

SEQ ID NO: 24666 - RNA, 18 nt, Artificial Sequence
  Synthetic oligonucleotide: Ptpn6-5181
gaagaccauccagauggu

SEQ ID NO: 24667 - RNA, 19 nt, Artificial Sequence
  Synthetic oligonucleotide: Ptpn6-5182
agaagaccauccagauggu

SEQ ID NO: 24668 - RNA, 20 nt, Artificial Sequence
  Synthetic oligonucleotide: Ptpn6-710
cagaagaccauccagauggu

SEQ ID NO: 24669 - RNA, 21 nt, Artificial Sequence
  Synthetic oligonucleotide: Ptpn6-5183
ccagaagaccauccagauggu

SEQ ID NO: 24670 - RNA, 22 nt, Artificial Sequence
  Synthetic oligonucleotide: Ptpn6-5184
uccagaagaccauccagauggu

SEQ ID NO: 24671 - RNA, 23 nt, Artificial Sequence
  Synthetic oligonucleotide: Ptpn6-5185
auccagaagaccauccagauggu

SEQ ID NO: 24672 - RNA, 24 nt, Artificial Sequence
  Synthetic oligonucleotide: Ptpn6-5186
cauccagaagaccauccagauggu

SEQ ID NO: 24673 - RNA, 18 nt, Artificial Sequence
  Synthetic oligonucleotide: Ptpn6-5187
cgcuacacaguggguggu

SEQ ID NO: 24674 - RNA, 19 nt, Artificial Sequence
  Synthetic oligonucleotide: Ptpn6-5188
acgcuacacaguggguggu

SEQ ID NO: 24675 - RNA, 20 nt, Artificial Sequence
  Synthetic oligonucleotide: Ptpn6-634
gacgcuacacaguggguggu

SEQ ID NO: 24676 - RNA, 21 nt, Artificial Sequence
  Synthetic oligonucleotide: Ptpn6-5189
ggacgcuacacaguggguggu

SEQ ID NO: 24677 - RNA, 22 nt, Artificial Sequence
  Synthetic oligonucleotide: Ptpn6-5190
uggacgcuacacaguggguggu

SEQ ID NO: 24678 - RNA, 23 nt, Artificial Sequence
  Synthetic oligonucleotide: Ptpn6-5191
guggacgcuacacaguggguggu

SEQ ID NO: 24679 - RNA, 24 nt, Artificial Sequence
  Synthetic oligonucleotide: Ptpn6-5192
gguggacgcuacacaguggguggu

SEQ ID NO: 24680 - RNA, 18 nt, Artificial Sequence
  Synthetic oligonucleotide: Ptpn6-5193
acauugagaaccgagugu

SEQ ID NO: 24681 - RNA, 19 nt, Artificial Sequence
  Synthetic oligonucleotide: Ptpn6-5194
gacauugagaaccgagugu

SEQ ID NO: 24682 - RNA, 20 nt, Artificial Sequence
  Synthetic oligonucleotide: Ptpn6-160
ugacauugagaaccgagugu

SEQ ID NO: 24683 - RNA, 21 nt, Artificial Sequence
  Synthetic oligonucleotide: Ptpn6-5195
cugacauugagaaccgagugu

SEQ ID NO: 24684 - RNA, 22 nt, Artificial Sequence
  Synthetic oligonucleotide: Ptpn6-5196
gcugacauugagaaccgagugu

SEQ ID NO: 24685 - RNA, 23 nt, Artificial Sequence
  Synthetic oligonucleotide: Ptpn6-5197
ggcugacauugagaaccgagugu

SEQ ID NO: 24686 - RNA, 24 nt, Artificial Sequence
  Synthetic oligonucleotide: Ptpn6-5198
cggcugacauugagaaccgagugu

SEQ ID NO: 24687 - RNA, 18 nt, Artificial Sequence
  Synthetic oligonucleotide: Ptpn6-5199
gacacaaggaggaugugu

SEQ ID NO: 24688 - RNA, 19 nt, Artificial Sequence
  Synthetic oligonucleotide: Ptpn6-5200
agacacaaggaggaugugu

SEQ ID NO: 24689 - RNA, 20 nt, Artificial Sequence
  Synthetic oligonucleotide: Ptpn6-5201
cagacacaaggaggaugugu

SEQ ID NO: 24690 - RNA, 21 nt, Artificial Sequence
  Synthetic oligonucleotide: Ptpn6-5202
acagacacaaggaggaugugu

SEQ ID NO: 24691 - RNA, 22 nt, Artificial Sequence
  Synthetic oligonucleotide: Ptpn6-5203
uacagacacaaggaggaugugu

SEQ ID NO: 24692 - RNA, 23 nt, Artificial Sequence
  Synthetic oligonucleotide: Ptpn6-5204
guacagacacaaggaggaugugu

SEQ ID NO: 24693 - RNA, 24 nt, Artificial Sequence
  Synthetic oligonucleotide: Ptpn6-5205
aguacagacacaaggaggaugugu

SEQ ID NO: 24694 - RNA, 18 nt, Artificial Sequence
  Synthetic oligonucleotide: Ptpn6-5206
aucgccagccaggguugu

SEQ ID NO: 24695 - RNA, 19 nt, Artificial Sequence
  Synthetic oligonucleotide: Ptpn6-5207
caucgccagccaggguugu

SEQ ID NO: 24696 - RNA, 20 nt, Artificial Sequence
  Synthetic oligonucleotide: Ptpn6-676
acaucgccagccaggguugu

SEQ ID NO: 24697 - RNA, 21 nt, Artificial Sequence
  Synthetic oligonucleotide: Ptpn6-5208
uacaucgccagccaggguugu

SEQ ID NO: 24698 - RNA, 22 nt, Artificial Sequence
  Synthetic oligonucleotide: Ptpn6-5209
cuacaucgccagccaggguugu

SEQ ID NO: 24699 - RNA, 23 nt, Artificial Sequence
  Synthetic oligonucleotide: Ptpn6-5210
ccuacaucgccagccaggguugu

SEQ ID NO: 24700 - RNA, 24 nt, Artificial Sequence
  Synthetic oligonucleotide: Ptpn6-5211
accuacaucgccagccaggguugu

SEQ ID NO: 24701 - RNA, 18 nt, Artificial Sequence
  Synthetic oligonucleotide: Ptpn6-5212
gugaaugcggcugacauu

SEQ ID NO: 24702 - RNA, 19 nt, Artificial Sequence
  Synthetic oligonucleotide: Ptpn6-5213
ggugaaugcggcugacauu

SEQ ID NO: 24703 - RNA, 20 nt, Artificial Sequence
  Synthetic oligonucleotide: Ptpn6-644
gggugaaugcggcugacauu

SEQ ID NO: 24704 - RNA, 21 nt, Artificial Sequence
  Synthetic oligonucleotide: Ptpn6-5214
agggugaaugcggcugacauu

SEQ ID NO: 24705 - RNA, 22 nt, Artificial Sequence
  Synthetic oligonucleotide: Ptpn6-5215
gagggugaaugcggcugacauu

SEQ ID NO: 24706 - RNA, 23 nt, Artificial Sequence
  Synthetic oligonucleotide: Ptpn6-5216
cgagggugaaugcggcugacauu

SEQ ID NO: 24707 - RNA, 24 nt, Artificial Sequence
  Synthetic oligonucleotide: Ptpn6-5217
acgagggugaaugcggcugacauu

SEQ ID NO: 24708 - RNA, 18 nt, Artificial Sequence
  Synthetic oligonucleotide: Ptpn6-5218
uucaagaagacggggauu

SEQ ID NO: 24709 - RNA, 19 nt, Artificial Sequence
  Synthetic oligonucleotide: Ptpn6-5219
uuucaagaagacggggauu

SEQ ID NO: 24710 - RNA, 20 nt, Artificial Sequence
  Synthetic oligonucleotide: Ptpn6-632
auuucaagaagacggggauu

SEQ ID NO: 24711 - RNA, 21 nt, Artificial Sequence
  Synthetic oligonucleotide: Ptpn6-5220
cauuucaagaagacggggauu

SEQ ID NO: 24712 - RNA, 22 nt, Artificial Sequence
  Synthetic oligonucleotide: Ptpn6-5221
gcauuucaagaagacggggauu

SEQ ID NO: 24713 - RNA, 23 nt, Artificial Sequence
  Synthetic oligonucleotide: Ptpn6-5222
agcauuucaagaagacggggauu

SEQ ID NO: 24714 - RNA, 24 nt, Artificial Sequence
  Synthetic oligonucleotide: Ptpn6-5223
gagcauuucaagaagacggggauu

SEQ ID NO: 24715 - RNA, 18 nt, Artificial Sequence
  Synthetic oligonucleotide: Ptpn6-5224
gcccccggagaccugauu

SEQ ID NO: 24716 - RNA, 19 nt, Artificial Sequence
  Synthetic oligonucleotide: Ptpn6-5225
ugcccccggagaccugauu

SEQ ID NO: 24717 - RNA, 20 nt, Artificial Sequence
  Synthetic oligonucleotide: Ptpn6-2773
gugcccccggagaccugauu

SEQ ID NO: 24718 - RNA, 21 nt, Artificial Sequence
  Synthetic oligonucleotide: Ptpn6-5226
agugcccccggagaccugauu

SEQ ID NO: 24719 - RNA, 22 nt, Artificial Sequence
  Synthetic oligonucleotide: Ptpn6-5227
cagugcccccggagaccugauu

SEQ ID NO: 24720 - RNA, 23 nt, Artificial Sequence
  Synthetic oligonucleotide: Ptpn6-5228
ucagugcccccggagaccugauu

SEQ ID NO: 24721 - RNA, 24 nt, Artificial Sequence
  Synthetic oligonucleotide: Ptpn6-5229
gucagugcccccggagaccugauu

SEQ ID NO: 24722 - RNA, 18 nt, Artificial Sequence
  Synthetic oligonucleotide: Ptpn6-5230
uacagccaaggcuggcuu

SEQ ID NO: 24723 - RNA, 19 nt, Artificial Sequence
  Synthetic oligonucleotide: Ptpn6-5231
auacagccaaggcuggcuu

SEQ ID NO: 24724 - RNA, 20 nt, Artificial Sequence
  Synthetic oligonucleotide: Ptpn6-654
gauacagccaaggcuggcuu

SEQ ID NO: 24725 - RNA, 21 nt, Artificial Sequence
  Synthetic oligonucleotide: Ptpn6-5232
ggauacagccaaggcuggcuu

SEQ ID NO: 24726 - RNA, 22 nt, Artificial Sequence
  Synthetic oligonucleotide: Ptpn6-5233
aggauacagccaaggcuggcuu

SEQ ID NO: 24727 - RNA, 23 nt, Artificial Sequence
  Synthetic oligonucleotide: Ptpn6-5234
gaggauacagccaaggcuggcuu

SEQ ID NO: 24728 - RNA, 24 nt, Artificial Sequence
  Synthetic oligonucleotide: Ptpn6-5235
cgaggauacagccaaggcuggcuu

SEQ ID NO: 24729 - RNA, 18 nt, Artificial Sequence
  Synthetic oligonucleotide: Ptpn6-5236
ugggcaugcagcgugcuu

SEQ ID NO: 24730 - RNA, 19 nt, Artificial Sequence
  Synthetic oligonucleotide: Ptpn6-5237
gugggcaugcagcgugcuu

SEQ ID NO: 24731 - RNA, 20 nt, Artificial Sequence
  Synthetic oligonucleotide: Ptpn6-688
ggugggcaugcagcgugcuu

SEQ ID NO: 24732 - RNA, 21 nt, Artificial Sequence
  Synthetic oligonucleotide: Ptpn6-5238
aggugggcaugcagcgugcuu

SEQ ID NO: 24733 - RNA, 22 nt, Artificial Sequence
  Synthetic oligonucleotide: Ptpn6-5239
gaggugggcaugcagcgugcuu

SEQ ID NO: 24734 - RNA, 23 nt, Artificial Sequence
  Synthetic oligonucleotide: Ptpn6-5240
cgaggugggcaugcagcgugcuu

SEQ ID NO: 24735 - RNA, 24 nt, Artificial Sequence
  Synthetic oligonucleotide: Ptpn6-5241
ccgaggugggcaugcagcgugcuu

SEQ ID NO: 24736 - RNA, 18 nt, Artificial Sequence
  Synthetic oligonucleotide: Ptpn6-5242
gaggggcaccuggggguu

SEQ ID NO: 24737 - RNA, 19 nt, Artificial Sequence
  Synthetic oligonucleotide: Ptpn6-5243
ugaggggcaccuggggguu

SEQ ID NO: 24738 - RNA, 20 nt, Artificial Sequence
  Synthetic oligonucleotide: Ptpn6-2774
gugaggggcaccuggggguu

SEQ ID NO: 24739 - RNA, 21 nt, Artificial Sequence
  Synthetic oligonucleotide: Ptpn6-5244
ggugaggggcaccuggggguu

SEQ ID NO: 24740 - RNA, 22 nt, Artificial Sequence
  Synthetic oligonucleotide: Ptpn6-5245
gggugaggggcaccuggggguu

SEQ ID NO: 24741 - RNA, 23 nt, Artificial Sequence
  Synthetic oligonucleotide: Ptpn6-5246
agggugaggggcaccuggggguu

SEQ ID NO: 24742 - RNA, 24 nt, Artificial Sequence
  Synthetic oligonucleotide: Ptpn6-5247
aagggugaggggcaccuggggguu

SEQ ID NO: 24743 - RNA, 18 nt, Artificial Sequence
  Synthetic oligonucleotide: Ptpn6-5248
gcuacacagugggugguu

SEQ ID NO: 24744 - RNA, 19 nt, Artificial Sequence
  Synthetic oligonucleotide: Ptpn6-5249
cgcuacacagugggugguu

SEQ ID NO: 24745 - RNA, 20 nt, Artificial Sequence
  Synthetic oligonucleotide: Ptpn6-148
acgcuacacagugggugguu

SEQ ID NO: 24746 - RNA, 21 nt, Artificial Sequence
  Synthetic oligonucleotide: Ptpn6-5250
gacgcuacacagugggugguu

SEQ ID NO: 24747 - RNA, 22 nt, Artificial Sequence
  Synthetic oligonucleotide: Ptpn6-5251
ggacgcuacacagugggugguu

SEQ ID NO: 24748 - RNA, 23 nt, Artificial Sequence
  Synthetic oligonucleotide: Ptpn6-5252
uggacgcuacacagugggugguu

SEQ ID NO: 24749 - RNA, 24 nt, Artificial Sequence
  Synthetic oligonucleotide: Ptpn6-5253
guggacgcuacacagugggugguu

SEQ ID NO: 24750 - RNA, 17 nt, Artificial Sequence
  Synthetic oligonucleotide: Ptpn6-5254
agggccgagguguccac

SEQ ID NO: 24751 - RNA, 17 nt, Artificial Sequence
  Synthetic oligonucleotide: Ptpn6-36
auucggauccagaacuc

SEQ ID NO: 24752 - RNA, 17 nt, Artificial Sequence
  Synthetic oligonucleotide: Ptpn6-5255
cagccagccuggagacu

SEQ ID NO: 24753 - RNA, 20 nt, Artificial Sequence
  Synthetic oligonucleotide: Ptpn6-5256
ucaagggccgagguguccac

SEQ ID NO: 24754 - RNA, 20 nt, Artificial Sequence
  Synthetic oligonucleotide: Ptpn6-95
cauauucggauccagaacuc

SEQ ID NO: 24755 - RNA, 20 nt, Artificial Sequence
  Synthetic oligonucleotide: Ptpn6-5257
ccucagccagccuggagacu

SEQ ID NO: 24756 - RNA, 17 nt, Artificial Sequence
  Synthetic oligonucleotide: Ptpn6-5258
cccgaggugggcaugca

SEQ ID NO: 24757 - RNA, 17 nt, Artificial Sequence
  Synthetic oligonucleotide: Ptpn6-247
ggagcauuucaagaaga

SEQ ID NO: 24758 - RNA, 17 nt, Artificial Sequence
  Synthetic oligonucleotide: Ptpn6-5259
uggcuguauccucggac

SEQ ID NO: 24759 - RNA, 17 nt, Artificial Sequence
  Synthetic oligonucleotide: Ptpn6-5260
ucuccuugucugcugac

SEQ ID NO: 24760 - RNA, 17 nt, Artificial Sequence
  Synthetic oligonucleotide: Ptpn6-5261
ggugcaaguucuucacc

SEQ ID NO: 24761 - RNA, 17 nt, Artificial Sequence
  Synthetic oligonucleotide: Ptpn6-5262
cacgcaccugcaggacc

SEQ ID NO: 24762 - RNA, 17 nt, Artificial Sequence
  Synthetic oligonucleotide: Ptpn6-5263
ggcacugacccuauguc

SEQ ID NO: 24763 - RNA, 17 nt, Artificial Sequence
  Synthetic oligonucleotide: Ptpn6-5264
gugagccuggggguguc

SEQ ID NO: 24764 - RNA, 17 nt, Artificial Sequence
  Synthetic oligonucleotide: Ptpn6-5265
ccgaggauacagccaag

SEQ ID NO: 24765 - RNA, 17 nt, Artificial Sequence
  Synthetic oligonucleotide: Ptpn6-5266
ggucagugcccccggag

SEQ ID NO: 24766 - RNA, 17 nt, Artificial Sequence
  Synthetic oligonucleotide: Ptpn6-5267
guuuggggugcgucucu

SEQ ID NO: 24767 - RNA, 20 nt, Artificial Sequence
  Synthetic oligonucleotide: Ptpn6-5268
uggcccgaggugggcaugca

SEQ ID NO: 24768 - RNA, 20 nt, Artificial Sequence
  Synthetic oligonucleotide: Ptpn6-152
gguggagcauuucaagaaga

SEQ ID NO: 24769 - RNA, 20 nt, Artificial Sequence
  Synthetic oligonucleotide: Ptpn6-5269
ccuuggcuguauccucggac

SEQ ID NO: 24770 - RNA, 20 nt, Artificial Sequence
  Synthetic oligonucleotide: Ptpn6-5270
ucuucuccuugucugcugac

SEQ ID NO: 24771 - RNA, 20 nt, Artificial Sequence
  Synthetic oligonucleotide: Ptpn6-5271
gcuggugcaaguucuucacc

SEQ ID NO: 24772 - RNA, 20 nt, Artificial Sequence
  Synthetic oligonucleotide: Ptpn6-5272
cugcacgcaccugcaggacc

SEQ ID NO: 24773 - RNA, 20 nt, Artificial Sequence
  Synthetic oligonucleotide: Ptpn6-5273
gggggcacugacccuauguc

SEQ ID NO: 24774 - RNA, 20 nt, Artificial Sequence
  Synthetic oligonucleotide: Ptpn6-5274
ccagugagccuggggguguc

SEQ ID NO: 24775 - RNA, 20 nt, Artificial Sequence
  Synthetic oligonucleotide: Ptpn6-5275
aguccgaggauacagccaag

SEQ ID NO: 24776 - RNA, 20 nt, Artificial Sequence
  Synthetic oligonucleotide: Ptpn6-5276
uagggucagugcccccggag

SEQ ID NO: 24777 - RNA, 20 nt, Artificial Sequence
  Synthetic oligonucleotide: Ptpn6-5277
cugguuuggggugcgucucu

SEQ ID NO: 24778 - RNA, 17 nt, Artificial Sequence
  Synthetic oligonucleotide: Ptpn6-1001
cguaggcggaaaccaaa

SEQ ID NO: 24779 - RNA, 17 nt, Artificial Sequence
  Synthetic oligonucleotide: Ptpn6-999
ccguaggcggaaaccaa

SEQ ID NO: 24780 - RNA, 17 nt, Artificial Sequence
  Synthetic oligonucleotide: Ptpn6-1086
gcccgggacuuacccac

SEQ ID NO: 24781 - RNA, 17 nt, Artificial Sequence
  Synthetic oligonucleotide: Ptpn6-998
agcgguucuuccucacc

SEQ ID NO: 24782 - RNA, 17 nt, Artificial Sequence
  Synthetic oligonucleotide: Ptpn6-1087
ggaccccgauggugccc

SEQ ID NO: 24783 - RNA, 17 nt, Artificial Sequence
  Synthetic oligonucleotide: Ptpn6-1258
ucccguggguaaguccc

SEQ ID NO: 24784 - RNA, 17 nt, Artificial Sequence
  Synthetic oligonucleotide: Ptpn6-1330
caaagcgggaguacagc

SEQ ID NO: 24785 - RNA, 17 nt, Artificial Sequence
  Synthetic oligonucleotide: Ptpn6-1338
ccacggcagagggccgc

SEQ ID NO: 24786 - RNA, 17 nt, Artificial Sequence
  Synthetic oligonucleotide: Ptpn6-1067
gugcacagcugugccgc

SEQ ID NO: 24787 - RNA, 17 nt, Artificial Sequence
  Synthetic oligonucleotide: Ptpn6-968
ggaccggaaacaggcgc

SEQ ID NO: 24788 - RNA, 17 nt, Artificial Sequence
  Synthetic oligonucleotide: Ptpn6-1331
caagcugacagagcggc

SEQ ID NO: 24789 - RNA, 17 nt, Artificial Sequence
  Synthetic oligonucleotide: Ptpn6-1261
aagucccgggcaccauc

SEQ ID NO: 24790 - RNA, 17 nt, Artificial Sequence
  Synthetic oligonucleotide: Ptpn6-1263
ccgcugugggcggucuc

SEQ ID NO: 24791 - RNA, 17 nt, Artificial Sequence
  Synthetic oligonucleotide: Ptpn6-1327
ucacaccuugcgggaag

SEQ ID NO: 24792 - RNA, 17 nt, Artificial Sequence
  Synthetic oligonucleotide: Ptpn6-1325
cccgagaccgcccacag

SEQ ID NO: 24793 - RNA, 17 nt, Artificial Sequence
  Synthetic oligonucleotide: Ptpn6-963
gguuuccgccuacggag

SEQ ID NO: 24794 - RNA, 17 nt, Artificial Sequence
  Synthetic oligonucleotide: Ptpn6-965
ggaaaccucuccguagg

SEQ ID NO: 24795 - RNA, 17 nt, Artificial Sequence
  Synthetic oligonucleotide: Ptpn6-1319
ucaagcugacagagcgg

SEQ ID NO: 24796 - RNA, 17 nt, Artificial Sequence
  Synthetic oligonucleotide: Ptpn6-1063
gcuguacucccgcuuug

SEQ ID NO: 24797 - RNA, 17 nt, Artificial Sequence
  Synthetic oligonucleotide: Ptpn6-1066
ggagagguuucccccau

SEQ ID NO: 24798 - RNA, 17 nt, Artificial Sequence
  Synthetic oligonucleotide: Ptpn6-1596
agguaggguuaggcccu

SEQ ID NO: 24799 - RNA, 17 nt, Artificial Sequence
  Synthetic oligonucleotide: Ptpn6-1002
cucacguucacacacgu

SEQ ID NO: 24800 - RNA, 17 nt, Artificial Sequence
  Synthetic oligonucleotide: Ptpn6-1081
gcggcgggguauugggu

SEQ ID NO: 24801 - RNA, 17 nt, Artificial Sequence
  Synthetic oligonucleotide: Ptpn6-1320
cagagcggcgggguauu

SEQ ID NO: 24802 - RNA, 20 nt, Artificial Sequence
  Synthetic oligonucleotide: Ptpn6-982
cuccguaggcggaaaccaaa

SEQ ID NO: 24803 - RNA, 20 nt, Artificial Sequence
  Synthetic oligonucleotide: Ptpn6-981
ucuccguaggcggaaaccaa

SEQ ID NO: 24804 - RNA, 20 nt, Artificial Sequence
  Synthetic oligonucleotide: Ptpn6-962
guccucacaccuugcgggaa

SEQ ID NO: 24805 - RNA, 20 nt, Artificial Sequence
  Synthetic oligonucleotide: Ptpn6-1517
cucaaccugccccgggggaa

SEQ ID NO: 24806 - RNA, 20 nt, Artificial Sequence
  Synthetic oligonucleotide: Ptpn6-1033
gagguguugugagcuaccca

SEQ ID NO: 24807 - RNA, 20 nt, Artificial Sequence
  Synthetic oligonucleotide: Ptpn6-1140
acucccgcuuuggggcugca

SEQ ID NO: 24808 - RNA, 20 nt, Artificial Sequence
  Synthetic oligonucleotide: Ptpn6-1532
uaggcccagccaggaccaua

SEQ ID NO: 24809 - RNA, 20 nt, Artificial Sequence
  Synthetic oligonucleotide: Ptpn6-953
ggcccuuugguuuccgccua

SEQ ID NO: 24810 - RNA, 20 nt, Artificial Sequence
  Synthetic oligonucleotide: Ptpn6-1041
gagcggcgggguauugggua

SEQ ID NO: 24811 - RNA, 20 nt, Artificial Sequence
  Synthetic oligonucleotide: Ptpn6-984
aguucauagggaccggaaac

SEQ ID NO: 24812 - RNA, 20 nt, Artificial Sequence
  Synthetic oligonucleotide: Ptpn6-1025
ggugcccgggacuuacccac

SEQ ID NO: 24813 - RNA, 20 nt, Artificial Sequence
  Synthetic oligonucleotide: Ptpn6-972
ccgcaaggugugaggacccc

SEQ ID NO: 24814 - RNA, 20 nt, Artificial Sequence
  Synthetic oligonucleotide: Ptpn6-1197
cugggaccccgauggugccc

SEQ ID NO: 24815 - RNA, 20 nt, Artificial Sequence
  Synthetic oligonucleotide: Ptpn6-973
cugucccguggguaaguccc

SEQ ID NO: 24816 - RNA, 20 nt, Artificial Sequence
  Synthetic oligonucleotide: Ptpn6-1187
acugggaccccgauggugcc

SEQ ID NO: 24817 - RNA, 20 nt, Artificial Sequence
  Synthetic oligonucleotide: Ptpn6-1028
gaacagauacacacuugucc

SEQ ID NO: 24818 - RNA, 20 nt, Artificial Sequence
  Synthetic oligonucleotide: Ptpn6-1010
gaaggcggcccuggaccagc

SEQ ID NO: 24819 - RNA, 20 nt, Artificial Sequence
  Synthetic oligonucleotide: Ptpn6-991
aagccacggcagagggccgc

SEQ ID NO: 24820 - RNA, 20 nt, Artificial Sequence
  Synthetic oligonucleotide: Ptpn6-1141
acugugcacagcugugccgc

SEQ ID NO: 24821 - RNA, 20 nt, Artificial Sequence
  Synthetic oligonucleotide: Ptpn6-985
uagggaccggaaacaggcgc

SEQ ID NO: 24822 - RNA, 20 nt, Artificial Sequence
  Synthetic oligonucleotide: Ptpn6-1024
gcucaagcugacagagcggc

SEQ ID NO: 24823 - RNA, 20 nt, Artificial Sequence
  Synthetic oligonucleotide: Ptpn6-1217
ugccaggccaauggcacugc

SEQ ID NO: 24824 - RNA, 20 nt, Artificial Sequence
  Synthetic oligonucleotide: Ptpn6-988
uggcccgagaccgcccacag

SEQ ID NO: 24825 - RNA, 20 nt, Artificial Sequence
  Synthetic oligonucleotide: Ptpn6-969
uuugguuuccgccuacggag

SEQ ID NO: 24826 - RNA, 20 nt, Artificial Sequence
  Synthetic oligonucleotide: Ptpn6-989
agcggcgggguauuggguag

SEQ ID NO: 24827 - RNA, 20 nt, Artificial Sequence
  Synthetic oligonucleotide: Ptpn6-1151
uacagagagaugcugucccg

SEQ ID NO: 24828 - RNA, 20 nt, Artificial Sequence
  Synthetic oligonucleotide: Ptpn6-1203
agaggagcaugagugagccg

SEQ ID NO: 24829 - RNA, 20 nt, Artificial Sequence
  Synthetic oligonucleotide: Ptpn6-1218
cucaagcugacagagcggcg

SEQ ID NO: 24830 - RNA, 20 nt, Artificial Sequence
  Synthetic oligonucleotide: Ptpn6-1150
uggccuggcaggcaggaucg

SEQ ID NO: 24831 - RNA, 20 nt, Artificial Sequence
  Synthetic oligonucleotide: Ptpn6-957
gggggaaaccucuccguagg

SEQ ID NO: 24832 - RNA, 20 nt, Artificial Sequence
  Synthetic oligonucleotide: Ptpn6-1526
ucagguaggguuaggcccug

SEQ ID NO: 24833 - RNA, 20 nt, Artificial Sequence
  Synthetic oligonucleotide: Ptpn6-990
ccggggguccucacaccuug

SEQ ID NO: 24834 - RNA, 20 nt, Artificial Sequence
  Synthetic oligonucleotide: Ptpn6-1525
cucagguaggguuaggcccu

SEQ ID NO: 24835 - RNA, 20 nt, Artificial Sequence
  Synthetic oligonucleotide: Ptpn6-961
gcacucacguucacacacgu

SEQ ID NO: 24836 - RNA, 20 nt, Artificial Sequence
  Synthetic oligonucleotide: Ptpn6-992
aaugggggaaaccucuccgu

SEQ ID NO: 24837 - RNA, 20 nt, Artificial Sequence
  Synthetic oligonucleotide: Ptpn6-1409
ggucccucagcgcccugggu

SEQ ID NO: 24838 - RNA, 20 nt, Artificial Sequence
  Synthetic oligonucleotide: Ptpn6-980
agagcggcgggguauugggu

SEQ ID NO: 24839 - RNA, 20 nt, Artificial Sequence
  Synthetic oligonucleotide: Ptpn6-1190
acgggacagcaucucucugu

SEQ ID NO: 24840 - RNA, 20 nt, Artificial Sequence
  Synthetic oligonucleotide: Ptpn6-978
ugacagagcggcgggguauu

SEQ ID NO: 24841 - RNA, 20 nt, Artificial Sequence
  Synthetic oligonucleotide: Ptpn6-1003
ggcuguuagggauuuuccuu

SEQ ID NO: 24842 - RNA, 17 nt, Artificial Sequence
  Synthetic oligonucleotide: Ptpn6-1342
uaauagucuccaggaaa

SEQ ID NO: 24843 - RNA, 17 nt, Artificial Sequence
  Synthetic oligonucleotide: Ptpn6-1358
ugaggaagagcaaccaa

SEQ ID NO: 24844 - RNA, 17 nt, Artificial Sequence
  Synthetic oligonucleotide: Ptpn6-1367
ccugccugccaggccaa

SEQ ID NO: 24845 - RNA, 17 nt, Artificial Sequence
  Synthetic oligonucleotide: Ptpn6-1374
uggaaguagaaaugcaa

SEQ ID NO: 24846 - RNA, 17 nt, Artificial Sequence
  Synthetic oligonucleotide: Ptpn6-1345
cucacaccuugcgggaa

SEQ ID NO: 24847 - RNA, 17 nt, Artificial Sequence
  Synthetic oligonucleotide: Ptpn6-1588
aaccugccccgggggaa

SEQ ID NO: 24848 - RNA, 17 nt, Artificial Sequence
  Synthetic oligonucleotide: Ptpn6-5278
gugggugggccugcaca

SEQ ID NO: 24849 - RNA, 17 nt, Artificial Sequence
  Synthetic oligonucleotide: Ptpn6-5279
gcaggcccacccaccca

SEQ ID NO: 24850 - RNA, 17 nt, Artificial Sequence
  Synthetic oligonucleotide: Ptpn6-1085
guguugugagcuaccca

SEQ ID NO: 24851 - RNA, 17 nt, Artificial Sequence
  Synthetic oligonucleotide: Ptpn6-1322
ugcccgggacuuaccca

SEQ ID NO: 24852 - RNA, 17 nt, Artificial Sequence
  Synthetic oligonucleotide: Ptpn6-1456
ggccuaacccugcccca

SEQ ID NO: 24853 - RNA, 17 nt, Artificial Sequence
  Synthetic oligonucleotide: Ptpn6-1377
uagggagggggaagcca

SEQ ID NO: 24854 - RNA, 17 nt, Artificial Sequence
  Synthetic oligonucleotide: Ptpn6-1302
uugcucuuccucagcca

SEQ ID NO: 24855 - RNA, 17 nt, Artificial Sequence
  Synthetic oligonucleotide: Ptpn6-1285
uggagacuauuagucca

SEQ ID NO: 24856 - RNA, 17 nt, Artificial Sequence
  Synthetic oligonucleotide: Ptpn6-1102
gcccgccugcuggucca

SEQ ID NO: 24857 - RNA, 17 nt, Artificial Sequence
  Synthetic oligonucleotide: Ptpn6-1339
agauacacacuugucca

SEQ ID NO: 24858 - RNA, 17 nt, Artificial Sequence
  Synthetic oligonucleotide: Ptpn6-1264
aacuuccccuucccgca

SEQ ID NO: 24859 - RNA, 17 nt, Artificial Sequence
  Synthetic oligonucleotide: Ptpn6-1383
cacggcagagggccgca

SEQ ID NO: 24860 - RNA, 17 nt, Artificial Sequence
  Synthetic oligonucleotide: Ptpn6-966
gaccggaaacaggcgca

SEQ ID NO: 24861 - RNA, 17 nt, Artificial Sequence
  Synthetic oligonucleotide: Ptpn6-1599
gguuaggcccuggggca

SEQ ID NO: 24862 - RNA, 17 nt, Artificial Sequence
  Synthetic oligonucleotide: Ptpn6-1341
aggccaauggcacugca

SEQ ID NO: 24863 - RNA, 17 nt, Artificial Sequence
  Synthetic oligonucleotide: Ptpn6-1267
cccgcuuuggggcugca

SEQ ID NO: 24864 - RNA, 17 nt, Artificial Sequence
  Synthetic oligonucleotide: Ptpn6-1606
uagggaggagcuguuca

SEQ ID NO: 24865 - RNA, 17 nt, Artificial Sequence
  Synthetic oligonucleotide: Ptpn6-1126
ggggaaaauguuaaaga

SEQ ID NO: 24866 - RNA, 17 nt, Artificial Sequence
  Synthetic oligonucleotide: Ptpn6-1133
ggggaagccacggcaga

SEQ ID NO: 24867 - RNA, 17 nt, Artificial Sequence
  Synthetic oligonucleotide: Ptpn6-1120
gcccaguuccucagaga

SEQ ID NO: 24868 - RNA, 17 nt, Artificial Sequence
  Synthetic oligonucleotide: Ptpn6-1101
ggagacugggaccccga

SEQ ID NO: 24869 - RNA, 17 nt, Artificial Sequence
  Synthetic oligonucleotide: Ptpn6-1314
aguuuuggagggaggga

SEQ ID NO: 24870 - RNA, 17 nt, Artificial Sequence
  Synthetic oligonucleotide: Ptpn6-1307
uguuaguuuuggaggga

SEQ ID NO: 24871 - RNA, 17 nt, Artificial Sequence
  Synthetic oligonucleotide: Ptpn6-1105
gcaucucucuguaggga

SEQ ID NO: 24872 - RNA, 17 nt, Artificial Sequence
  Synthetic oligonucleotide: Ptpn6-1337
ccucacaccuugcggga

SEQ ID NO: 24873 - RNA, 17 nt, Artificial Sequence
  Synthetic oligonucleotide: Ptpn6-1609
ggagcuguucaggggga

SEQ ID NO: 24874 - RNA, 17 nt, Artificial Sequence
  Synthetic oligonucleotide: Ptpn6-1587
caaccugccccggggga

SEQ ID NO: 24875 - RNA, 17 nt, Artificial Sequence
  Synthetic oligonucleotide: Ptpn6-1296
ccuccucucccggggga

SEQ ID NO: 24876 - RNA, 17 nt, Artificial Sequence
  Synthetic oligonucleotide: Ptpn6-1282
cuccuguuaguuuugga

SEQ ID NO: 24877 - RNA, 17 nt, Artificial Sequence
  Synthetic oligonucleotide: Ptpn6-1582
cccacccagggcgcuga

SEQ ID NO: 24878 - RNA, 17 nt, Artificial Sequence
  Synthetic oligonucleotide: Ptpn6-1603
gcccagccaggaccaua

SEQ ID NO: 24879 - RNA, 17 nt, Artificial Sequence
  Synthetic oligonucleotide: Ptpn6-1110
ggaaggggaaguucaua

SEQ ID NO: 24880 - RNA, 17 nt, Artificial Sequence
  Synthetic oligonucleotide: Ptpn6-1451
ugaacagcuccucccua

SEQ ID NO: 24881 - RNA, 17 nt, Artificial Sequence
  Synthetic oligonucleotide: Ptpn6-997
ccuuugguuuccgccua

SEQ ID NO: 24882 - RNA, 17 nt, Artificial Sequence
  Synthetic oligonucleotide: Ptpn6-1103
ggaaaccaaagggccua

SEQ ID NO: 24883 - RNA, 17 nt, Artificial Sequence
  Synthetic oligonucleotide: Ptpn6-1593
gggaggagccucaggua

SEQ ID NO: 24884 - RNA, 17 nt, Artificial Sequence
  Synthetic oligonucleotide: Ptpn6-1000
cggcgggguauugggua

SEQ ID NO: 24885 - RNA, 17 nt, Artificial Sequence
  Synthetic oligonucleotide: Ptpn6-1113
gacagcaucucucugua

SEQ ID NO: 24886 - RNA, 17 nt, Artificial Sequence
  Synthetic oligonucleotide: Ptpn6-1069
gaggaacugggcuguua

SEQ ID NO: 24887 - RNA, 17 nt, Artificial Sequence
  Synthetic oligonucleotide: Ptpn6-1317
ucauagggaccggaaac

SEQ ID NO: 24888 - RNA, 17 nt, Artificial Sequence
  Synthetic oligonucleotide: Ptpn6-1299
cuccuucucugaggaac

SEQ ID NO: 24889 - RNA, 17 nt, Artificial Sequence
  Synthetic oligonucleotide: Ptpn6-1336
cucccuccaaaacuaac

SEQ ID NO: 24890 - RNA, 17 nt, Artificial Sequence
  Synthetic oligonucleotide: Ptpn6-5280
ggugggugggccugcac

SEQ ID NO: 24891 - RNA, 17 nt, Artificial Sequence
  Synthetic oligonucleotide: Ptpn6-1359
caaaacuaacaggagac

SEQ ID NO: 24892 - RNA, 17 nt, Artificial Sequence
  Synthetic oligonucleotide: Ptpn6-1118
gucuccaggaaaaggac

SEQ ID NO: 24893 - RNA, 17 nt, Artificial Sequence
  Synthetic oligonucleotide: Ptpn6-1099
gggaaguucauagggac

SEQ ID NO: 24894 - RNA, 17 nt, Artificial Sequence
  Synthetic oligonucleotide: Ptpn6-1089
gagcuacccagggggac

SEQ ID NO: 24895 - RNA, 17 nt, Artificial Sequence
  Synthetic oligonucleotide: Ptpn6-1129
ggagaggaggagccacc

SEQ ID NO: 24896 - RNA, 17 nt, Artificial Sequence
  Synthetic oligonucleotide: Ptpn6-1386
ccaccuggagcuccacc

SEQ ID NO: 24897 - RNA, 17 nt, Artificial Sequence
  Synthetic oligonucleotide: Ptpn6-1106
ggguaggggaacagacc

SEQ ID NO: 24898 - RNA, 17 nt, Artificial Sequence
  Synthetic oligonucleotide: Ptpn6-1343
acugcagggacaaaccc

SEQ ID NO: 24899 - RNA, 17 nt, Artificial Sequence
  Synthetic oligonucleotide: Ptpn6-1350
agaccaggaaguaaccc

SEQ ID NO: 24900 - RNA, 17 nt, Artificial Sequence
  Synthetic oligonucleotide: Ptpn6-5281
ugcaggcccacccaccc

SEQ ID NO: 24901 - RNA, 17 nt, Artificial Sequence
  Synthetic oligonucleotide: Ptpn6-1083
gguguugugagcuaccc

SEQ ID NO: 24902 - RNA, 17 nt, Artificial Sequence
  Synthetic oligonucleotide: Ptpn6-1291
caaggugugaggacccc

SEQ ID NO: 24903 - RNA, 17 nt, Artificial Sequence
  Synthetic oligonucleotide: Ptpn6-1270
cuuaggaccuguccccc

SEQ ID NO: 24904 - RNA, 17 nt, Artificial Sequence
  Synthetic oligonucleotide: Ptpn6-1459
gcuccuccccuuccccc

SEQ ID NO: 24905 - RNA, 17 nt, Artificial Sequence
  Synthetic oligonucleotide: Ptpn6-1364
cagggccgccuuccccc

SEQ ID NO: 24906 - RNA, 17 nt, Artificial Sequence
  Synthetic oligonucleotide: Ptpn6-1584
gccucucaaccugcccc

SEQ ID NO: 24907 - RNA, 17 nt, Artificial Sequence
  Synthetic oligonucleotide: Ptpn6-1455
gggccuaacccugcccc

SEQ ID NO: 24908 - RNA, 17 nt, Artificial Sequence
  Synthetic oligonucleotide: Ptpn6-1458
ggcuccuccccuucccc

SEQ ID NO: 24909 - RNA, 17 nt, Artificial Sequence
  Synthetic oligonucleotide: Ptpn6-1379
ccagggccgccuucccc

SEQ ID NO: 24910 - RNA, 17 nt, Artificial Sequence
  Synthetic oligonucleotide: Ptpn6-1292
ucuuuaacauuuucccc

SEQ ID NO: 24911 - RNA, 17 nt, Artificial Sequence
  Synthetic oligonucleotide: Ptpn6-1466
ugggucccucagcgccc

SEQ ID NO: 24912 - RNA, 17 nt, Artificial Sequence
  Synthetic oligonucleotide: Ptpn6-1595
cagguaggguuaggccc

SEQ ID NO: 24913 - RNA, 17 nt, Artificial Sequence
  Synthetic oligonucleotide: Ptpn6-1303
ccgggggaaggcggccc

SEQ ID NO: 24914 - RNA, 17 nt, Artificial Sequence
  Synthetic oligonucleotide: Ptpn6-1583
agccucucaaccugccc

SEQ ID NO: 24915 - RNA, 17 nt, Artificial Sequence
  Synthetic oligonucleotide: Ptpn6-1080
guggcuccuccucuccc

SEQ ID NO: 24916 - RNA, 17 nt, Artificial Sequence
  Synthetic oligonucleotide: Ptpn6-1134
gcacaguggcccaagcc

SEQ ID NO: 24917 - RNA, 17 nt, Artificial Sequence
  Synthetic oligonucleotide: Ptpn6-1601
caggguuaggcccagcc

SEQ ID NO: 24918 - RNA, 17 nt, Artificial Sequence
  Synthetic oligonucleotide: Ptpn6-1071
guugcucuuccucagcc

SEQ ID NO: 24919 - RNA, 17 nt, Artificial Sequence
  Synthetic oligonucleotide: Ptpn6-1372
aggagcaugagugagcc

SEQ ID NO: 24920 - RNA, 17 nt, Artificial Sequence
  Synthetic oligonucleotide: Ptpn6-1287
cugcagugccauuggcc

SEQ ID NO: 24921 - RNA, 17 nt, Artificial Sequence
  Synthetic oligonucleotide: Ptpn6-1346
ccucgauccugccugcc

SEQ ID NO: 24922 - RNA, 17 nt, Artificial Sequence
  Synthetic oligonucleotide: Ptpn6-1088
gggaccccgauggugcc

SEQ ID NO: 24923 - RNA, 17 nt, Artificial Sequence
  Synthetic oligonucleotide: Ptpn6-1078
gcuccagguggagcucc

SEQ ID NO: 24924 - RNA, 17 nt, Artificial Sequence
  Synthetic oligonucleotide: Ptpn6-1309
cugucagcuugagcucc

SEQ ID NO: 24925 - RNA, 17 nt, Artificial Sequence
  Synthetic oligonucleotide: Ptpn6-1075
gguggcuccuccucucc

SEQ ID NO: 24926 - RNA, 17 nt, Artificial Sequence
  Synthetic oligonucleotide: Ptpn6-1321
cuggacuaauagucucc

SEQ ID NO: 24927 - RNA, 17 nt, Artificial Sequence
  Synthetic oligonucleotide: Ptpn6-964
gucccguggguaagucc

SEQ ID NO: 24928 - RNA, 17 nt, Artificial Sequence
  Synthetic oligonucleotide: Ptpn6-1272
cuggagacuauuagucc

SEQ ID NO: 24929 - RNA, 17 nt, Artificial Sequence
  Synthetic oligonucleotide: Ptpn6-1452
gcuccucccuauggucc

SEQ ID NO: 24930 - RNA, 17 nt, Artificial Sequence
  Synthetic oligonucleotide: Ptpn6-1111
ggcccgccugcuggucc

SEQ ID NO: 24931 - RNA, 17 nt, Artificial Sequence
  Synthetic oligonucleotide: Ptpn6-1332
cagauacacacuugucc

SEQ ID NO: 24932 - RNA, 17 nt, Artificial Sequence
  Synthetic oligonucleotide: Ptpn6-1283
cagccaggguuacuucc

SEQ ID NO: 24933 - RNA, 17 nt, Artificial Sequence
  Synthetic oligonucleotide: Ptpn6-1298
cccaccuguccuuuucc

SEQ ID NO: 24934 - RNA, 17 nt, Artificial Sequence
  Synthetic oligonucleotide: Ptpn6-1376
cccugcagccccaaagc

SEQ ID NO: 24935 - RNA, 17 nt, Artificial Sequence
  Synthetic oligonucleotide: Ptpn6-1388
aagcaggaggcagaagc

SEQ ID NO: 24936 - RNA, 17 nt, Artificial Sequence
  Synthetic oligonucleotide: Ptpn6-1315
uggggcugcagggaagc

SEQ ID NO: 24937 - RNA, 17 nt, Artificial Sequence
  Synthetic oligonucleotide: Ptpn6-1096
ggggacagguccuaagc

SEQ ID NO: 24938 - RNA, 17 nt, Artificial Sequence
  Synthetic oligonucleotide: Ptpn6-1073
ggcggcccuggaccagc

SEQ ID NO: 24939 - RNA, 17 nt, Artificial Sequence
  Synthetic oligonucleotide: Ptpn6-1116
gaggagcaugagugagc

SEQ ID NO: 24940 - RNA, 17 nt, Artificial Sequence
  Synthetic oligonucleotide: Ptpn6-1076
gcccuggaccagcaggc

SEQ ID NO: 24941 - RNA, 17 nt, Artificial Sequence
  Synthetic oligonucleotide: Ptpn6-1284
ccauuggccuggcaggc

SEQ ID NO: 24942 - RNA, 17 nt, Artificial Sequence
  Synthetic oligonucleotide: Ptpn6-1385
agcaggagcccagaggc

SEQ ID NO: 24943 - RNA, 17 nt, Artificial Sequence
  Synthetic oligonucleotide: Ptpn6-1463
ggggcagguugagaggc

SEQ ID NO: 24944 - RNA, 17 nt, Artificial Sequence
  Synthetic oligonucleotide: Ptpn6-1461
uccccuucccccggggc

SEQ ID NO: 24945 - RNA, 17 nt, Artificial Sequence
  Synthetic oligonucleotide: Ptpn6-1132
gacagguggggcggggc

SEQ ID NO: 24946 - RNA, 17 nt, Artificial Sequence
  Synthetic oligonucleotide: Ptpn6-1378
agagggccgcagggggc

SEQ ID NO: 24947 - RNA, 17 nt, Artificial Sequence
  Synthetic oligonucleotide: Ptpn6-1598
ggguuaggcccuggggc

SEQ ID NO: 24948 - RNA, 17 nt, Artificial Sequence
  Synthetic oligonucleotide: Ptpn6-1380
aaaaggacagguggggc

SEQ ID NO: 24949 - RNA, 17 nt, Artificial Sequence
  Synthetic oligonucleotide: Ptpn6-1277
agugccauuggccuggc

SEQ ID NO: 24950 - RNA, 17 nt, Artificial Sequence
  Synthetic oligonucleotide: Ptpn6-1453
cucccuaugguccuggc

SEQ ID NO: 24951 - RNA, 17 nt, Artificial Sequence
  Synthetic oligonucleotide: Ptpn6-1348
caggccaauggcacugc

SEQ ID NO: 24952 - RNA, 17 nt, Artificial Sequence
  Synthetic oligonucleotide: Ptpn6-1356
acagcaggcccgccugc

SEQ ID NO: 24953 - RNA, 17 nt, Artificial Sequence
  Synthetic oligonucleotide: Ptpn6-1312
ucccgcuuuggggcugc

SEQ ID NO: 24954 - RNA, 17 nt, Artificial Sequence
  Synthetic oligonucleotide: Ptpn6-5282
ggagguacccccugugc

SEQ ID NO: 24955 - RNA, 17 nt, Artificial Sequence
  Synthetic oligonucleotide: Ptpn6-1093
ggguccucacaccuugc

SEQ ID NO: 24956 - RNA, 17 nt, Artificial Sequence
  Synthetic oligonucleotide: Ptpn6-1308
uuucuacuuccagccuc

SEQ ID NO: 24957 - RNA, 17 nt, Artificial Sequence
  Synthetic oligonucleotide: Ptpn6-1591
ggaaggggaggagccuc

SEQ ID NO: 24958 - RNA, 17 nt, Artificial Sequence
  Synthetic oligonucleotide: Ptpn6-1605
auagggaggagcuguuc

SEQ ID NO: 24959 - RNA, 17 nt, Artificial Sequence
  Synthetic oligonucleotide: Ptpn6-1265
ugcccugcgccuguuuc

SEQ ID NO: 24960 - RNA, 17 nt, Artificial Sequence
  Synthetic oligonucleotide: Ptpn6-1369
ucccugcagccccaaag

SEQ ID NO: 24961 - RNA, 17 nt, Artificial Sequence
  Synthetic oligonucleotide: Ptpn6-1373
aggggaaaauguuaaag

SEQ ID NO: 24962 - RNA, 17 nt, Artificial Sequence
  Synthetic oligonucleotide: Ptpn6-1294
caggaucgaggaggaag

SEQ ID NO: 24963 - RNA, 17 nt, Artificial Sequence
  Synthetic oligonucleotide: Ptpn6-1589
accugccccgggggaag

SEQ ID NO: 24964 - RNA, 17 nt, Artificial Sequence
  Synthetic oligonucleotide: Ptpn6-5283
ugggugggccugcacag

SEQ ID NO: 24965 - RNA, 17 nt, Artificial Sequence
  Synthetic oligonucleotide: Ptpn6-1130
ggcacagcugugcacag

SEQ ID NO: 24966 - RNA, 17 nt, Artificial Sequence
  Synthetic oligonucleotide: Ptpn6-1354
uguugugagcuacccag

SEQ ID NO: 24967 - RNA, 17 nt, Artificial Sequence
  Synthetic oligonucleotide: Ptpn6-1381
cagaagcaggagcccag

SEQ ID NO: 24968 - RNA, 17 nt, Artificial Sequence
  Synthetic oligonucleotide: Ptpn6-1127
gggcggggcugagccag

SEQ ID NO: 24969 - RNA, 17 nt, Artificial Sequence
  Synthetic oligonucleotide: Ptpn6-1082
gauacacacuuguccag

SEQ ID NO: 24970 - RNA, 17 nt, Artificial Sequence
  Synthetic oligonucleotide: Ptpn6-1335
acggcagagggccgcag

SEQ ID NO: 24971 - RNA, 17 nt, Artificial Sequence
  Synthetic oligonucleotide: Ptpn6-1114
gggggaagccacggcag

SEQ ID NO: 24972 - RNA, 17 nt, Artificial Sequence
  Synthetic oligonucleotide: Ptpn6-1361
aaacaggcgcagggcag

SEQ ID NO: 24973 - RNA, 17 nt, Artificial Sequence
  Synthetic oligonucleotide: Ptpn6-1344
uguuaaagagggggcag

SEQ ID NO: 24974 - RNA, 17 nt, Artificial Sequence
  Synthetic oligonucleotide: Ptpn6-1607
agggaggagcuguucag

SEQ ID NO: 24975 - RNA, 17 nt, Artificial Sequence
  Synthetic oligonucleotide: Ptpn6-1119
gggaaaauguuaaagag

SEQ ID NO: 24976 - RNA, 17 nt, Artificial Sequence
  Synthetic oligonucleotide: Ptpn6-1349
agcucaagcugacagag

SEQ ID NO: 24977 - RNA, 17 nt, Artificial Sequence
  Synthetic oligonucleotide: Ptpn6-1357
caucucucuguagggag

SEQ ID NO: 24978 - RNA, 17 nt, Artificial Sequence
  Synthetic oligonucleotide: Ptpn6-1333
ccgccuucccccgggag

SEQ ID NO: 24979 - RNA, 17 nt, Artificial Sequence
  Synthetic oligonucleotide: Ptpn6-1464
agguugagaggcuggag

SEQ ID NO: 24980 - RNA, 17 nt, Artificial Sequence
  Synthetic oligonucleotide: Ptpn6-1276
aguggcugauuacugag

SEQ ID NO: 24981 - RNA, 17 nt, Artificial Sequence
  Synthetic oligonucleotide: Ptpn6-1462
ccccggggcagguugag

SEQ ID NO: 24982 - RNA, 17 nt, Artificial Sequence
  Synthetic oligonucleotide: Ptpn6-1084
ggcgggguauuggguag

SEQ ID NO: 24983 - RNA, 17 nt, Artificial Sequence
  Synthetic oligonucleotide: Ptpn6-1460
cuccuccccuucccccg

SEQ ID NO: 24984 - RNA, 17 nt, Artificial Sequence
  Synthetic oligonucleotide: Ptpn6-1585
ccucucaaccugccccg

SEQ ID NO: 24985 - RNA, 17 nt, Artificial Sequence
  Synthetic oligonucleotide: Ptpn6-1293
uggcuccuccucucccg

SEQ ID NO: 24986 - RNA, 17 nt, Artificial Sequence
  Synthetic oligonucleotide: Ptpn6-1281
agagagaugcugucccg

SEQ ID NO: 24987 - RNA, 17 nt, Artificial Sequence
  Synthetic oligonucleotide: Ptpn6-1092
ggagcaugagugagccg

SEQ ID NO: 24988 - RNA, 17 nt, Artificial Sequence
  Synthetic oligonucleotide: Ptpn6-1268
ccugcggcccucugccg

SEQ ID NO: 24989 - RNA, 17 nt, Artificial Sequence
  Synthetic oligonucleotide: Ptpn6-1324
aagcugacagagcggcg

SEQ ID NO: 24990 - RNA, 17 nt, Artificial Sequence
  Synthetic oligonucleotide: Ptpn6-1128
gagggccgcagggggcg

SEQ ID NO: 24991 - RNA, 17 nt, Artificial Sequence
  Synthetic oligonucleotide: Ptpn6-1375
aaaggacagguggggcg

SEQ ID NO: 24992 - RNA, 17 nt, Artificial Sequence
  Synthetic oligonucleotide: Ptpn6-1259
agucccgggcaccaucg

SEQ ID NO: 24993 - RNA, 17 nt, Artificial Sequence
  Synthetic oligonucleotide: Ptpn6-1288
ccuggcaggcaggaucg

SEQ ID NO: 24994 - RNA, 17 nt, Artificial Sequence
  Synthetic oligonucleotide: Ptpn6-1365
caguuccucagagaagg

SEQ ID NO: 24995 - RNA, 17 nt, Artificial Sequence
  Synthetic oligonucleotide: Ptpn6-1297
ccucucccgggggaagg

SEQ ID NO: 24996 - RNA, 17 nt, Artificial Sequence
  Synthetic oligonucleotide: Ptpn6-5284
gggugggccugcacagg

SEQ ID NO: 24997 - RNA, 17 nt, Artificial Sequence
  Synthetic oligonucleotide: Ptpn6-1371
uccaggaaaaggacagg

SEQ ID NO: 24998 - RNA, 17 nt, Artificial Sequence
  Synthetic oligonucleotide: Ptpn6-1100
guugugagcuacccagg

SEQ ID NO: 24999 - RNA, 17 nt, Artificial Sequence
  Synthetic oligonucleotide: Ptpn6-1313
ccagguggagcuccagg

SEQ ID NO: 25000 - RNA, 17 nt, Artificial Sequence
  Synthetic oligonucleotide: Ptpn6-1290
ucagcuugagcuccagg

SEQ ID NO: 25001 - RNA, 17 nt, Artificial Sequence
  Synthetic oligonucleotide: Ptpn6-1091
gacagguccuaagcagg

SEQ ID NO: 25002 - RNA, 17 nt, Artificial Sequence
  Synthetic oligonucleotide: Ptpn6-1079
ggcccuggaccagcagg

SEQ ID NO: 25003 - RNA, 17 nt, Artificial Sequence
  Synthetic oligonucleotide: Ptpn6-1353
cggcagagggccgcagg

SEQ ID NO: 25004 - RNA, 17 nt, Artificial Sequence
  Synthetic oligonucleotide: Ptpn6-1608
gggaggagcuguucagg

SEQ ID NO: 25005 - RNA, 17 nt, Artificial Sequence
  Synthetic oligonucleotide: Ptpn6-1122
ggaaaauguuaaagagg

SEQ ID NO: 25006 - RNA, 17 nt, Artificial Sequence
  Synthetic oligonucleotide: Ptpn6-1352
ccuucccccgggagagg

SEQ ID NO: 25007 - RNA, 17 nt, Artificial Sequence
  Synthetic oligonucleotide: Ptpn6-1072
ggcaggcaggaucgagg

SEQ ID NO: 25008 - RNA, 17 nt, Artificial Sequence
  Synthetic oligonucleotide: Ptpn6-1351
aucucucuguagggagg

SEQ ID NO: 25009 - RNA, 17 nt, Artificial Sequence
  Synthetic oligonucleotide: Ptpn6-1586
cucucaaccugccccgg

SEQ ID NO: 25010 - RNA, 17 nt, Artificial Sequence
  Synthetic oligonucleotide: Ptpn6-1074
ggcuccuccucucccgg

SEQ ID NO: 25011 - RNA, 17 nt, Artificial Sequence
  Synthetic oligonucleotide: Ptpn6-1097
gagcaugagugagccgg

SEQ ID NO: 25012 - RNA, 17 nt, Artificial Sequence
  Synthetic oligonucleotide: Ptpn6-1310
uaguuuuggagggaggg

SEQ ID NO: 25013 - RNA, 17 nt, Artificial Sequence
  Synthetic oligonucleotide: Ptpn6-1278
cuguuaguuuuggaggg

SEQ ID NO: 25014 - RNA, 17 nt, Artificial Sequence
  Synthetic oligonucleotide: Ptpn6-1604
cagccaggaccauaggg

SEQ ID NO: 25015 - RNA, 17 nt, Artificial Sequence
  Synthetic oligonucleotide: Ptpn6-1347
agcaucucucuguaggg

SEQ ID NO: 25016 - RNA, 17 nt, Artificial Sequence
  Synthetic oligonucleotide: Ptpn6-1590
ugccccgggggaagggg

SEQ ID NO: 25017 - RNA, 17 nt, Artificial Sequence
  Synthetic oligonucleotide: Ptpn6-1363
cagagggccgcaggggg

SEQ ID NO: 25018 - RNA, 17 nt, Artificial Sequence
  Synthetic oligonucleotide: Ptpn6-1131
gaaaaggacaggugggg

SEQ ID NO: 25019 - RNA, 17 nt, Artificial Sequence
  Synthetic oligonucleotide: Ptpn6-1468
ucccucagcgcccuggg

SEQ ID NO: 25020 - RNA, 17 nt, Artificial Sequence
  Synthetic oligonucleotide: Ptpn6-1470
ucagcgcccuggguggg

SEQ ID NO: 25021 - RNA, 17 nt, Artificial Sequence
  Synthetic oligonucleotide: Ptpn6-1274
aagcuggccgcuguggg

SEQ ID NO: 25022 - RNA, 17 nt, Artificial Sequence
  Synthetic oligonucleotide: Ptpn6-1104
ggaagagcaaccaaugg

SEQ ID NO: 25023 - RNA, 17 nt, Artificial Sequence
  Synthetic oligonucleotide: Ptpn6-1279
ucuccuguuaguuuugg

SEQ ID NO: 25024 - RNA, 17 nt, Artificial Sequence
  Synthetic oligonucleotide: Ptpn6-1355
aggaagagcaaccaaug

SEQ ID NO: 25025 - RNA, 17 nt, Artificial Sequence
  Synthetic oligonucleotide: Ptpn6-1457
gggccuaacccuaccug

SEQ ID NO: 25026 - RNA, 17 nt, Artificial Sequence
  Synthetic oligonucleotide: Ptpn6-1304
cucagccccgcccccug

SEQ ID NO: 25027 - RNA, 17 nt, Artificial Sequence
  Synthetic oligonucleotide: Ptpn6-1597
gguaggguuaggcccug

SEQ ID NO: 25028 - RNA, 17 nt, Artificial Sequence
  Synthetic oligonucleotide: Ptpn6-1295
agggaagcuggccgcug

SEQ ID NO: 25029 - RNA, 17 nt, Artificial Sequence
  Synthetic oligonucleotide: Ptpn6-1581
acccacccagggcgcug

SEQ ID NO: 25030 - RNA, 17 nt, Artificial Sequence
  Synthetic oligonucleotide: Ptpn6-1108
ggaaguaacccuggcug

SEQ ID NO: 25031 - RNA, 17 nt, Artificial Sequence
  Synthetic oligonucleotide: Ptpn6-1070
ggguaccuccuucucug

SEQ ID NO: 25032 - RNA, 17 nt, Artificial Sequence
  Synthetic oligonucleotide: Ptpn6-1382
caggaaaaggacaggug

SEQ ID NO: 25033 - RNA, 17 nt, Artificial Sequence
  Synthetic oligonucleotide: Ptpn6-1121
guggcccaagccaggug

SEQ ID NO: 25034 - RNA, 17 nt, Artificial Sequence
  Synthetic oligonucleotide: Ptpn6-1266
ccuucccgcaaggugug

SEQ ID NO: 25035 - RNA, 17 nt, Artificial Sequence
  Synthetic oligonucleotide: Ptpn6-1098
gggguccucacaccuug

SEQ ID NO: 25036 - RNA, 17 nt, Artificial Sequence
  Synthetic oligonucleotide: Ptpn6-1334
ucugacugcuauguuug

SEQ ID NO: 25037 - RNA, 17 nt, Artificial Sequence
  Synthetic oligonucleotide: Ptpn6-1107
gaggaagagcaaccaau

SEQ ID NO: 25038 - RNA, 17 nt, Artificial Sequence
  Synthetic oligonucleotide: Ptpn6-1260
uaagucccgggcaccau

SEQ ID NO: 25039 - RNA, 17 nt, Artificial Sequence
  Synthetic oligonucleotide: Ptpn6-1602
ggcccagccaggaccau

SEQ ID NO: 25040 - RNA, 17 nt, Artificial Sequence
  Synthetic oligonucleotide: Ptpn6-1280
ugucccugcagugccau

SEQ ID NO: 25041 - RNA, 17 nt, Artificial Sequence
  Synthetic oligonucleotide: Ptpn6-1115
gggaaggggaaguucau

SEQ ID NO: 25042 - RNA, 17 nt, Artificial Sequence
  Synthetic oligonucleotide: Ptpn6-1318
acagagcggcgggguau

SEQ ID NO: 25043 - RNA, 17 nt, Artificial Sequence
  Synthetic oligonucleotide: Ptpn6-1300
uccuucucugaggaacu

SEQ ID NO: 25044 - RNA, 17 nt, Artificial Sequence
  Synthetic oligonucleotide: Ptpn6-1360
aaaacuaacaggagacu

SEQ ID NO: 25045 - RNA, 17 nt, Artificial Sequence
  Synthetic oligonucleotide: Ptpn6-1257
uuaggaccugucccccu

SEQ ID NO: 25046 - RNA, 17 nt, Artificial Sequence
  Synthetic oligonucleotide: Ptpn6-1467
gggucccucagcgcccu

SEQ ID NO: 25047 - RNA, 17 nt, Artificial Sequence
  Synthetic oligonucleotide: Ptpn6-1301
uucuuccucaccuggcu

SEQ ID NO: 25048 - RNA, 17 nt, Artificial Sequence
  Synthetic oligonucleotide: Ptpn6-1454
ucccuaugguccuggcu

SEQ ID NO: 25049 - RNA, 17 nt, Artificial Sequence
  Synthetic oligonucleotide: Ptpn6-1306
uucuacuuccagccucu

SEQ ID NO: 25050 - RNA, 17 nt, Artificial Sequence
  Synthetic oligonucleotide: Ptpn6-1064
gccgcugugggcggucu

SEQ ID NO: 25051 - RNA, 17 nt, Artificial Sequence
  Synthetic oligonucleotide: Ptpn6-1465
gguugagaggcuggagu

SEQ ID NO: 25052 - RNA, 17 nt, Artificial Sequence
  Synthetic oligonucleotide: Ptpn6-1065
gagagaugcugucccgu

SEQ ID NO: 25053 - RNA, 17 nt, Artificial Sequence
  Synthetic oligonucleotide: Ptpn6-967
gggggaaaccucuccgu

SEQ ID NO: 25054 - RNA, 17 nt, Artificial Sequence
  Synthetic oligonucleotide: Ptpn6-1368
ccaggaaaaggacaggu

SEQ ID NO: 25055 - RNA, 17 nt, Artificial Sequence
  Synthetic oligonucleotide: Ptpn6-1592
ggggaggagccucaggu

SEQ ID NO: 25056 - RNA, 17 nt, Artificial Sequence
  Synthetic oligonucleotide: Ptpn6-1469
cccucagcgcccugggu

SEQ ID NO: 25057 - RNA, 17 nt, Artificial Sequence
  Synthetic oligonucleotide: Ptpn6-1471
cagcgcccugggugggu

SEQ ID NO: 25058 - RNA, 17 nt, Artificial Sequence
  Synthetic oligonucleotide: Ptpn6-1068
gggaagcuggccgcugu

SEQ ID NO: 25059 - RNA, 17 nt, Artificial Sequence
  Synthetic oligonucleotide: Ptpn6-1112
ggacagcaucucucugu

SEQ ID NO: 25060 - RNA, 17 nt, Artificial Sequence
  Synthetic oligonucleotide: Ptpn6-1271
auuuuccuuaggcccuu

SEQ ID NO: 25061 - RNA, 17 nt, Artificial Sequence
  Synthetic oligonucleotide: Ptpn6-1275
uguuagggauuuuccuu

SEQ ID NO: 25062 - RNA, 17 nt, Artificial Sequence
  Synthetic oligonucleotide: Ptpn6-1316
cugcuguacucccgcuu

SEQ ID NO: 25063 - RNA, 17 nt, Artificial Sequence
  Synthetic oligonucleotide: Ptpn6-1305
ucuuccucaccuggcuu

SEQ ID NO: 25064 - RNA, 17 nt, Artificial Sequence
  Synthetic oligonucleotide: Ptpn6-1077
gcuucugccuccugcuu

SEQ ID NO: 25065 - RNA, 17 nt, Artificial Sequence
  Synthetic oligonucleotide: Ptpn6-1600
ggcccuggggcaggguu

SEQ ID NO: 25066 - RNA, 17 nt, Artificial Sequence
  Synthetic oligonucleotide: Ptpn6-1594
gagccucagguaggguu

SEQ ID NO: 25067 - RNA, 17 nt, Artificial Sequence
  Synthetic oligonucleotide: Ptpn6-1289
ugaggaacugggcuguu

SEQ ID NO: 25068 - RNA, 17 nt, Artificial Sequence
  Synthetic oligonucleotide: Ptpn6-996
ugcuguacucccgcuuu

SEQ ID NO: 25069 - RNA, 17 nt, Artificial Sequence
  Synthetic oligonucleotide: Ptpn6-1311
cagucuccuguuaguuu

SEQ ID NO: 25070 - RNA, 20 nt, Artificial Sequence
  Synthetic oligonucleotide: Ptpn6-1038
gacuaauagucuccaggaaa

SEQ ID NO: 25071 - RNA, 20 nt, Artificial Sequence
  Synthetic oligonucleotide: Ptpn6-1039
ggcugaggaagagcaaccaa

SEQ ID NO: 25072 - RNA, 20 nt, Artificial Sequence
  Synthetic oligonucleotide: Ptpn6-1037
gauccugccugccaggccaa

SEQ ID NO: 25073 - RNA, 20 nt, Artificial Sequence
  Synthetic oligonucleotide: Ptpn6-1054
ggcuggaaguagaaaugcaa

SEQ ID NO: 25074 - RNA, 20 nt, Artificial Sequence
  Synthetic oligonucleotide: Ptpn6-5285
ugggugggugggccugcaca

SEQ ID NO: 25075 - RNA, 20 nt, Artificial Sequence
  Synthetic oligonucleotide: Ptpn6-5286
ugugcaggcccacccaccca

SEQ ID NO: 25076 - RNA, 20 nt, Artificial Sequence
  Synthetic oligonucleotide: Ptpn6-995
uggugcccgggacuuaccca

SEQ ID NO: 25077 - RNA, 20 nt, Artificial Sequence
  Synthetic oligonucleotide: Ptpn6-1396
cugggccuaacccugcccca

SEQ ID NO: 25078 - RNA, 20 nt, Artificial Sequence
  Synthetic oligonucleotide: Ptpn6-1245
cuguagggagggggaagcca

SEQ ID NO: 25079 - RNA, 20 nt, Artificial Sequence
  Synthetic oligonucleotide: Ptpn6-1162
ugguugcucuuccucagcca

SEQ ID NO: 25080 - RNA, 20 nt, Artificial Sequence
  Synthetic oligonucleotide: Ptpn6-1144
uccuggagacuauuagucca

SEQ ID NO: 25081 - RNA, 20 nt, Artificial Sequence
  Synthetic oligonucleotide: Ptpn6-1226
caggcccgccugcuggucca

SEQ ID NO: 25082 - RNA, 20 nt, Artificial Sequence
  Synthetic oligonucleotide: Ptpn6-1210
aacagauacacacuugucca

SEQ ID NO: 25083 - RNA, 20 nt, Artificial Sequence
  Synthetic oligonucleotide: Ptpn6-1159
augaacuuccccuucccgca

SEQ ID NO: 25084 - RNA, 20 nt, Artificial Sequence
  Synthetic oligonucleotide: Ptpn6-1216
agccacggcagagggccgca

SEQ ID NO: 25085 - RNA, 20 nt, Artificial Sequence
  Synthetic oligonucleotide: Ptpn6-994
agggaccggaaacaggcgca

SEQ ID NO: 25086 - RNA, 20 nt, Artificial Sequence
  Synthetic oligonucleotide: Ptpn6-1528
uaggguuaggcccuggggca

SEQ ID NO: 25087 - RNA, 20 nt, Artificial Sequence
  Synthetic oligonucleotide: Ptpn6-1046
gccaggccaauggcacugca

SEQ ID NO: 25088 - RNA, 20 nt, Artificial Sequence
  Synthetic oligonucleotide: Ptpn6-1535
ccauagggaggagcuguuca

SEQ ID NO: 25089 - RNA, 20 nt, Artificial Sequence
  Synthetic oligonucleotide: Ptpn6-1227
ccaggggaaaauguuaaaga

SEQ ID NO: 25090 - RNA, 20 nt, Artificial Sequence
  Synthetic oligonucleotide: Ptpn6-1053
gagggggaagccacggcaga

SEQ ID NO: 25091 - RNA, 20 nt, Artificial Sequence
  Synthetic oligonucleotide: Ptpn6-1230
acagcccaguuccucagaga

SEQ ID NO: 25092 - RNA, 20 nt, Artificial Sequence
  Synthetic oligonucleotide: Ptpn6-1204
acaggagacugggaccccga

SEQ ID NO: 25093 - RNA, 20 nt, Artificial Sequence
  Synthetic oligonucleotide: Ptpn6-1022
guuaguuuuggagggaggga

SEQ ID NO: 25094 - RNA, 20 nt, Artificial Sequence
  Synthetic oligonucleotide: Ptpn6-1146
uccuguuaguuuuggaggga

SEQ ID NO: 25095 - RNA, 20 nt, Artificial Sequence
  Synthetic oligonucleotide: Ptpn6-1215
acagcaucucucuguaggga

SEQ ID NO: 25096 - RNA, 20 nt, Artificial Sequence
  Synthetic oligonucleotide: Ptpn6-958
gguccucacaccuugcggga

SEQ ID NO: 25097 - RNA, 20 nt, Artificial Sequence
  Synthetic oligonucleotide: Ptpn6-1538
ggaggagcuguucaggggga

SEQ ID NO: 25098 - RNA, 20 nt, Artificial Sequence
  Synthetic oligonucleotide: Ptpn6-1516
ucucaaccugccccggggga

SEQ ID NO: 25099 - RNA, 20 nt, Artificial Sequence
  Synthetic oligonucleotide: Ptpn6-1018
gcuccuccucucccggggga

SEQ ID NO: 25100 - RNA, 20 nt, Artificial Sequence
  Synthetic oligonucleotide: Ptpn6-1158
agucuccuguuaguuuugga

SEQ ID NO: 25101 - RNA, 20 nt, Artificial Sequence
  Synthetic oligonucleotide: Ptpn6-1511
ccacccacccagggcgcuga

SEQ ID NO: 25102 - RNA, 20 nt, Artificial Sequence
  Synthetic oligonucleotide: Ptpn6-1023
gcgggaaggggaaguucaua

SEQ ID NO: 25103 - RNA, 20 nt, Artificial Sequence
  Synthetic oligonucleotide: Ptpn6-1391
cccugaacagcuccucccua

SEQ ID NO: 25104 - RNA, 20 nt, Artificial Sequence
  Synthetic oligonucleotide: Ptpn6-959
ggcggaaaccaaagggccua

SEQ ID NO: 25105 - RNA, 20 nt, Artificial Sequence
  Synthetic oligonucleotide: Ptpn6-1522
aaggggaggagccucaggua

SEQ ID NO: 25106 - RNA, 20 nt, Artificial Sequence
  Synthetic oligonucleotide: Ptpn6-987
cgggacagcaucucucugua

SEQ ID NO: 25107 - RNA, 20 nt, Artificial Sequence
  Synthetic oligonucleotide: Ptpn6-1156
ucugaggaacugggcuguua

SEQ ID NO: 25108 - RNA, 20 nt, Artificial Sequence
  Synthetic oligonucleotide: Ptpn6-1168
uaccuccuucucugaggaac

SEQ ID NO: 25109 - RNA, 20 nt, Artificial Sequence
  Synthetic oligonucleotide: Ptpn6-1208
ucccucccuccaaaacuaac

SEQ ID NO: 25110 - RNA, 20 nt, Artificial Sequence
  Synthetic oligonucleotide: Ptpn6-5287
cugggugggugggccugcac

SEQ ID NO: 25111 - RNA, 20 nt, Artificial Sequence
  Synthetic oligonucleotide: Ptpn6-1225
cuccaaaacuaacaggagac

SEQ ID NO: 25112 - RNA, 20 nt, Artificial Sequence
  Synthetic oligonucleotide: Ptpn6-1223
auagucuccaggaaaaggac

SEQ ID NO: 25113 - RNA, 20 nt, Artificial Sequence
  Synthetic oligonucleotide: Ptpn6-1199
aaggggaaguucauagggac

SEQ ID NO: 25114 - RNA, 20 nt, Artificial Sequence
  Synthetic oligonucleotide: Ptpn6-1206
ugugagcuacccagggggac

SEQ ID NO: 25115 - RNA, 20 nt, Artificial Sequence
  Synthetic oligonucleotide: Ptpn6-1238
ccgggagaggaggagccacc

SEQ ID NO: 25116 - RNA, 20 nt, Artificial Sequence
  Synthetic oligonucleotide: Ptpn6-1055
gagccaccuggagcuccacc

SEQ ID NO: 25117 - RNA, 20 nt, Artificial Sequence
  Synthetic oligonucleotide: Ptpn6-976
cugagcgguucuuccucacc

SEQ ID NO: 25118 - RNA, 20 nt, Artificial Sequence
  Synthetic oligonucleotide: Ptpn6-1192
auuggguaggggaacagacc

SEQ ID NO: 25119 - RNA, 20 nt, Artificial Sequence
  Synthetic oligonucleotide: Ptpn6-1048
ggcacugcagggacaaaccc

SEQ ID NO: 25120 - RNA, 20 nt, Artificial Sequence
  Synthetic oligonucleotide: Ptpn6-1202
aacagaccaggaaguaaccc

SEQ ID NO: 25121 - RNA, 20 nt, Artificial Sequence
  Synthetic oligonucleotide: Ptpn6-5288
cugugcaggcccacccaccc

SEQ ID NO: 25122 - RNA, 20 nt, Artificial Sequence
  Synthetic oligonucleotide: Ptpn6-993
ugagguguugugagcuaccc

SEQ ID NO: 25123 - RNA, 20 nt, Artificial Sequence
  Synthetic oligonucleotide: Ptpn6-1147
cugcuuaggaccuguccccc

SEQ ID NO: 25124 - RNA, 20 nt, Artificial Sequence
  Synthetic oligonucleotide: Ptpn6-1399
gaggcuccuccccuuccccc

SEQ ID NO: 25125 - RNA, 20 nt, Artificial Sequence
  Synthetic oligonucleotide: Ptpn6-1051
guccagggccgccuuccccc

SEQ ID NO: 25126 - RNA, 20 nt, Artificial Sequence
  Synthetic oligonucleotide: Ptpn6-1513
ccagccucucaaccugcccc

SEQ ID NO: 25127 - RNA, 20 nt, Artificial Sequence
  Synthetic oligonucleotide: Ptpn6-1395
gcugggccuaacccugcccc

SEQ ID NO: 25128 - RNA, 20 nt, Artificial Sequence
  Synthetic oligonucleotide: Ptpn6-1398
ugaggcuccuccccuucccc

SEQ ID NO: 25129 - RNA, 20 nt, Artificial Sequence
  Synthetic oligonucleotide: Ptpn6-1052
gguccagggccgccuucccc

SEQ ID NO: 25130 - RNA, 20 nt, Artificial Sequence
  Synthetic oligonucleotide: Ptpn6-1167
cccucuuuaacauuuucccc

SEQ ID NO: 25131 - RNA, 20 nt, Artificial Sequence
  Synthetic oligonucleotide: Ptpn6-1406
gagugggucccucagcgccc

SEQ ID NO: 25132 - RNA, 20 nt, Artificial Sequence
  Synthetic oligonucleotide: Ptpn6-1524
ccucagguaggguuaggccc

SEQ ID NO: 25133 - RNA, 20 nt, Artificial Sequence
  Synthetic oligonucleotide: Ptpn6-1171
cucccgggggaaggcggccc

SEQ ID NO: 25134 - RNA, 20 nt, Artificial Sequence
  Synthetic oligonucleotide: Ptpn6-1512
uccagccucucaaccugccc

SEQ ID NO: 25135 - RNA, 20 nt, Artificial Sequence
  Synthetic oligonucleotide: Ptpn6-1181
cagguggcuccuccucuccc

SEQ ID NO: 25136 - RNA, 20 nt, Artificial Sequence
  Synthetic oligonucleotide: Ptpn6-1247
ugugcacaguggcccaagcc

SEQ ID NO: 25137 - RNA, 20 nt, Artificial Sequence
  Synthetic oligonucleotide: Ptpn6-1530
gggcaggguuaggcccagcc

SEQ ID NO: 25138 - RNA, 20 nt, Artificial Sequence
  Synthetic oligonucleotide: Ptpn6-1148
uugguugcucuuccucagcc

SEQ ID NO: 25139 - RNA, 20 nt, Artificial Sequence
  Synthetic oligonucleotide: Ptpn6-1237
cagaggagcaugagugagcc

SEQ ID NO: 25140 - RNA, 20 nt, Artificial Sequence
  Synthetic oligonucleotide: Ptpn6-1175
ucccugcagugccauuggcc

SEQ ID NO: 25141 - RNA, 20 nt, Artificial Sequence
  Synthetic oligonucleotide: Ptpn6-1205
ccuccucgauccugccugcc

SEQ ID NO: 25142 - RNA, 20 nt, Artificial Sequence
  Synthetic oligonucleotide: Ptpn6-1177
ugagcuccagguggagcucc

SEQ ID NO: 25143 - RNA, 20 nt, Artificial Sequence
  Synthetic oligonucleotide: Ptpn6-1009
gcucugucagcuugagcucc

SEQ ID NO: 25144 - RNA, 20 nt, Artificial Sequence
  Synthetic oligonucleotide: Ptpn6-1182
ccagguggcuccuccucucc

SEQ ID NO: 25145 - RNA, 20 nt, Artificial Sequence
  Synthetic oligonucleotide: Ptpn6-986
acccuggacuaauagucucc

SEQ ID NO: 25146 - RNA, 20 nt, Artificial Sequence
  Synthetic oligonucleotide: Ptpn6-1007
gcugucccguggguaagucc

SEQ ID NO: 25147 - RNA, 20 nt, Artificial Sequence
  Synthetic oligonucleotide: Ptpn6-1138
uuccuggagacuauuagucc

SEQ ID NO: 25148 - RNA, 20 nt, Artificial Sequence
  Synthetic oligonucleotide: Ptpn6-1392
acagcuccucccuauggucc

SEQ ID NO: 25149 - RNA, 20 nt, Artificial Sequence
  Synthetic oligonucleotide: Ptpn6-1050
gcaggcccgccugcuggucc

SEQ ID NO: 25150 - RNA, 20 nt, Artificial Sequence
  Synthetic oligonucleotide: Ptpn6-1154
ccucagccaggguuacuucc

SEQ ID NO: 25151 - RNA, 20 nt, Artificial Sequence
  Synthetic oligonucleotide: Ptpn6-1170
cgccccaccuguccuuuucc

SEQ ID NO: 25152 - RNA, 20 nt, Artificial Sequence
  Synthetic oligonucleotide: Ptpn6-1242
cuucccugcagccccaaagc

SEQ ID NO: 25153 - RNA, 20 nt, Artificial Sequence
  Synthetic oligonucleotide: Ptpn6-1256
ccuaagcaggaggcagaagc

SEQ ID NO: 25154 - RNA, 20 nt, Artificial Sequence
  Synthetic oligonucleotide: Ptpn6-1183
cuuuggggcugcagggaagc

SEQ ID NO: 25155 - RNA, 20 nt, Artificial Sequence
  Synthetic oligonucleotide: Ptpn6-1196
cagggggacagguccuaagc

SEQ ID NO: 25156 - RNA, 20 nt, Artificial Sequence
  Synthetic oligonucleotide: Ptpn6-1191
ccccaaagcgggaguacagc

SEQ ID NO: 25157 - RNA, 20 nt, Artificial Sequence
  Synthetic oligonucleotide: Ptpn6-1034
gcagaggagcaugagugagc

SEQ ID NO: 25158 - RNA, 20 nt, Artificial Sequence
  Synthetic oligonucleotide: Ptpn6-1014
gcggcccuggaccagcaggc

SEQ ID NO: 25159 - RNA, 20 nt, Artificial Sequence
  Synthetic oligonucleotide: Ptpn6-1012
gugccauuggccuggcaggc

SEQ ID NO: 25160 - RNA, 20 nt, Artificial Sequence
  Synthetic oligonucleotide: Ptpn6-1248
agaagcaggagcccagaggc

SEQ ID NO: 25161 - RNA, 20 nt, Artificial Sequence
  Synthetic oligonucleotide: Ptpn6-1403
cccggggcagguugagaggc

SEQ ID NO: 25162 - RNA, 20 nt, Artificial Sequence
  Synthetic oligonucleotide: Ptpn6-1401
uccuccccuucccccggggc

SEQ ID NO: 25163 - RNA, 20 nt, Artificial Sequence
  Synthetic oligonucleotide: Ptpn6-1246
aaggacagguggggcggggc

SEQ ID NO: 25164 - RNA, 20 nt, Artificial Sequence
  Synthetic oligonucleotide: Ptpn6-1060
ggcagagggccgcagggggc

SEQ ID NO: 25165 - RNA, 20 nt, Artificial Sequence
  Synthetic oligonucleotide: Ptpn6-1527
guaggguuaggcccuggggc

SEQ ID NO: 25166 - RNA, 20 nt, Artificial Sequence
  Synthetic oligonucleotide: Ptpn6-1251
aggaaaaggacagguggggc

SEQ ID NO: 25167 - RNA, 20 nt, Artificial Sequence
  Synthetic oligonucleotide: Ptpn6-1163
ugcagugccauuggccuggc

SEQ ID NO: 25168 - RNA, 20 nt, Artificial Sequence
  Synthetic oligonucleotide: Ptpn6-1393
cuccucccuaugguccuggc

SEQ ID NO: 25169 - RNA, 20 nt, Artificial Sequence
  Synthetic oligonucleotide: Ptpn6-1193
aguacagcaggcccgccugc

SEQ ID NO: 25170 - RNA, 20 nt, Artificial Sequence
  Synthetic oligonucleotide: Ptpn6-970
uacucccgcuuuggggcugc

SEQ ID NO: 25171 - RNA, 20 nt, Artificial Sequence
  Synthetic oligonucleotide: Ptpn6-5289
gaaggagguacccccugugc

SEQ ID NO: 25172 - RNA, 20 nt, Artificial Sequence
  Synthetic oligonucleotide: Ptpn6-1185
cggggguccucacaccuugc

SEQ ID NO: 25173 - RNA, 20 nt, Artificial Sequence
  Synthetic oligonucleotide: Ptpn6-955
gguaagucccgggcaccauc

SEQ ID NO: 25174 - RNA, 20 nt, Artificial Sequence
  Synthetic oligonucleotide: Ptpn6-1019
gcauuucuacuuccagccuc

SEQ ID NO: 25175 - RNA, 20 nt, Artificial Sequence
  Synthetic oligonucleotide: Ptpn6-1520
gggggaaggggaggagccuc

SEQ ID NO: 25176 - RNA, 20 nt, Artificial Sequence
  Synthetic oligonucleotide: Ptpn6-1149
uggccgcugugggcggucuc

SEQ ID NO: 25177 - RNA, 20 nt, Artificial Sequence
  Synthetic oligonucleotide: Ptpn6-1534
accauagggaggagcuguuc

SEQ ID NO: 25178 - RNA, 20 nt, Artificial Sequence
  Synthetic oligonucleotide: Ptpn6-1137
cgcugcccugcgccuguuuc

SEQ ID NO: 25179 - RNA, 20 nt, Artificial Sequence
  Synthetic oligonucleotide: Ptpn6-1049
gcuucccugcagccccaaag

SEQ ID NO: 25180 - RNA, 20 nt, Artificial Sequence
  Synthetic oligonucleotide: Ptpn6-1236
uccaggggaaaauguuaaag

SEQ ID NO: 25181 - RNA, 20 nt, Artificial Sequence
  Synthetic oligonucleotide: Ptpn6-1179
aggcaggaucgaggaggaag

SEQ ID NO: 25182 - RNA, 20 nt, Artificial Sequence
  Synthetic oligonucleotide: Ptpn6-1186
uccucacaccuugcgggaag

SEQ ID NO: 25183 - RNA, 20 nt, Artificial Sequence
  Synthetic oligonucleotide: Ptpn6-1518
ucaaccugccccgggggaag

SEQ ID NO: 25184 - RNA, 20 nt, Artificial Sequence
  Synthetic oligonucleotide: Ptpn6-5290
gggugggugggccugcacag

SEQ ID NO: 25185 - RNA, 20 nt, Artificial Sequence
  Synthetic oligonucleotide: Ptpn6-1240
agcggcacagcugugcacag

SEQ ID NO: 25186 - RNA, 20 nt, Artificial Sequence
  Synthetic oligonucleotide: Ptpn6-1194
agguguugugagcuacccag

SEQ ID NO: 25187 - RNA, 20 nt, Artificial Sequence
  Synthetic oligonucleotide: Ptpn6-1255
aggcagaagcaggagcccag

SEQ ID NO: 25188 - RNA, 20 nt, Artificial Sequence
  Synthetic oligonucleotide: Ptpn6-1253
agggggcggggcugagccag

SEQ ID NO: 25189 - RNA, 20 nt, Artificial Sequence
  Synthetic oligonucleotide: Ptpn6-1207
acagauacacacuuguccag

SEQ ID NO: 25190 - RNA, 20 nt, Artificial Sequence
  Synthetic oligonucleotide: Ptpn6-1035
gccacggcagagggccgcag

SEQ ID NO: 25191 - RNA, 20 nt, Artificial Sequence
  Synthetic oligonucleotide: Ptpn6-1057
ggagggggaagccacggcag

SEQ ID NO: 25192 - RNA, 20 nt, Artificial Sequence
  Synthetic oligonucleotide: Ptpn6-1219
cggaaacaggcgcagggcag

SEQ ID NO: 25193 - RNA, 20 nt, Artificial Sequence
  Synthetic oligonucleotide: Ptpn6-1224
aaauguuaaagagggggcag

SEQ ID NO: 25194 - RNA, 20 nt, Artificial Sequence
  Synthetic oligonucleotide: Ptpn6-1536
cauagggaggagcuguucag

SEQ ID NO: 25195 - RNA, 20 nt, Artificial Sequence
  Synthetic oligonucleotide: Ptpn6-1232
caggggaaaauguuaaagag

SEQ ID NO: 25196 - RNA, 20 nt, Artificial Sequence
  Synthetic oligonucleotide: Ptpn6-1220
uggagcucaagcugacagag

SEQ ID NO: 25197 - RNA, 20 nt, Artificial Sequence
  Synthetic oligonucleotide: Ptpn6-1228
cagcaucucucuguagggag

SEQ ID NO: 25198 - RNA, 20 nt, Artificial Sequence
  Synthetic oligonucleotide: Ptpn6-1026
gggccgccuucccccgggag

SEQ ID NO: 25199 - RNA, 20 nt, Artificial Sequence
  Synthetic oligonucleotide: Ptpn6-1404
ggcagguugagaggcuggag

SEQ ID NO: 25200 - RNA, 20 nt, Artificial Sequence
  Synthetic oligonucleotide: Ptpn6-1016
ggaaguggcugauuacugag

SEQ ID NO: 25201 - RNA, 20 nt, Artificial Sequence
  Synthetic oligonucleotide: Ptpn6-1402
uucccccggggcagguugag

SEQ ID NO: 25202 - RNA, 20 nt, Artificial Sequence
  Synthetic oligonucleotide: Ptpn6-1400
aggcuccuccccuucccccg

SEQ ID NO: 25203 - RNA, 20 nt, Artificial Sequence
  Synthetic oligonucleotide: Ptpn6-1514
cagccucucaaccugccccg

SEQ ID NO: 25204 - RNA, 20 nt, Artificial Sequence
  Synthetic oligonucleotide: Ptpn6-1169
agguggcuccuccucucccg

SEQ ID NO: 25205 - RNA, 20 nt, Artificial Sequence
  Synthetic oligonucleotide: Ptpn6-1160
cccccugcggcccucugccg

SEQ ID NO: 25206 - RNA, 20 nt, Artificial Sequence
  Synthetic oligonucleotide: Ptpn6-1056
gcagagggccgcagggggcg

SEQ ID NO: 25207 - RNA, 20 nt, Artificial Sequence
  Synthetic oligonucleotide: Ptpn6-1059
ggaaaaggacagguggggcg

SEQ ID NO: 25208 - RNA, 20 nt, Artificial Sequence
  Synthetic oligonucleotide: Ptpn6-1005
guaagucccgggcaccaucg

SEQ ID NO: 25209 - RNA, 20 nt, Artificial Sequence
  Synthetic oligonucleotide: Ptpn6-1045
gcccaguuccucagagaagg

SEQ ID NO: 25210 - RNA, 20 nt, Artificial Sequence
  Synthetic oligonucleotide: Ptpn6-1164
ccuccucucccgggggaagg

SEQ ID NO: 25211 - RNA, 20 nt, Artificial Sequence
  Synthetic oligonucleotide: Ptpn6-5291
ggugggugggccugcacagg

SEQ ID NO: 25212 - RNA, 20 nt, Artificial Sequence
  Synthetic oligonucleotide: Ptpn6-1047
gucuccaggaaaaggacagg

SEQ ID NO: 25213 - RNA, 20 nt, Artificial Sequence
  Synthetic oligonucleotide: Ptpn6-1042
gguguugugagcuacccagg

SEQ ID NO: 25214 - RNA, 20 nt, Artificial Sequence
  Synthetic oligonucleotide: Ptpn6-1021
gcuccagguggagcuccagg

SEQ ID NO: 25215 - RNA, 20 nt, Artificial Sequence
  Synthetic oligonucleotide: Ptpn6-1173
cugucagcuugagcuccagg

SEQ ID NO: 25216 - RNA, 20 nt, Artificial Sequence
  Synthetic oligonucleotide: Ptpn6-1027
ggggacagguccuaagcagg

SEQ ID NO: 25217 - RNA, 20 nt, Artificial Sequence
  Synthetic oligonucleotide: Ptpn6-1020
ggcggcccuggaccagcagg

SEQ ID NO: 25218 - RNA, 20 nt, Artificial Sequence
  Synthetic oligonucleotide: Ptpn6-1198
ccacggcagagggccgcagg

SEQ ID NO: 25219 - RNA, 20 nt, Artificial Sequence
  Synthetic oligonucleotide: Ptpn6-1537
auagggaggagcuguucagg

SEQ ID NO: 25220 - RNA, 20 nt, Artificial Sequence
  Synthetic oligonucleotide: Ptpn6-1233
aggggaaaauguuaaagagg

SEQ ID NO: 25221 - RNA, 20 nt, Artificial Sequence
  Synthetic oligonucleotide: Ptpn6-1201
ccgccuucccccgggagagg

SEQ ID NO: 25222 - RNA, 20 nt, Artificial Sequence
  Synthetic oligonucleotide: Ptpn6-1152
ccuggcaggcaggaucgagg

SEQ ID NO: 25223 - RNA, 20 nt, Artificial Sequence
  Synthetic oligonucleotide: Ptpn6-1222
agcaucucucuguagggagg

SEQ ID NO: 25224 - RNA, 20 nt, Artificial Sequence
  Synthetic oligonucleotide: Ptpn6-1515
agccucucaaccugccccgg

SEQ ID NO: 25225 - RNA, 20 nt, Artificial Sequence
  Synthetic oligonucleotide: Ptpn6-1017
gguggcuccuccucucccgg

SEQ ID NO: 25226 - RNA, 20 nt, Artificial Sequence
  Synthetic oligonucleotide: Ptpn6-1036
gaggagcaugagugagccgg

SEQ ID NO: 25227 - RNA, 20 nt, Artificial Sequence
  Synthetic oligonucleotide: Ptpn6-1188
agcucaagcugacagagcgg

SEQ ID NO: 25228 - RNA, 20 nt, Artificial Sequence
  Synthetic oligonucleotide: Ptpn6-1178
uguuaguuuuggagggaggg

SEQ ID NO: 25229 - RNA, 20 nt, Artificial Sequence
  Synthetic oligonucleotide: Ptpn6-1161
cuccuguuaguuuuggaggg

SEQ ID NO: 25230 - RNA, 20 nt, Artificial Sequence
  Synthetic oligonucleotide: Ptpn6-1533
gcccagccaggaccauaggg

SEQ ID NO: 25231 - RNA, 20 nt, Artificial Sequence
  Synthetic oligonucleotide: Ptpn6-1043
gacagcaucucucuguaggg

SEQ ID NO: 25232 - RNA, 20 nt, Artificial Sequence
  Synthetic oligonucleotide: Ptpn6-1519
accugccccgggggaagggg

SEQ ID NO: 25233 - RNA, 20 nt, Artificial Sequence
  Synthetic oligonucleotide: Ptpn6-1234
cggcagagggccgcaggggg

SEQ ID NO: 25234 - RNA, 20 nt, Artificial Sequence
  Synthetic oligonucleotide: Ptpn6-1252
caggaaaaggacaggugggg

SEQ ID NO: 25235 - RNA, 20 nt, Artificial Sequence
  Synthetic oligonucleotide: Ptpn6-1408
gggucccucagcgcccuggg

SEQ ID NO: 25236 - RNA, 20 nt, Artificial Sequence
  Synthetic oligonucleotide: Ptpn6-1410
cccucagcgcccuggguggg

SEQ ID NO: 25237 - RNA, 20 nt, Artificial Sequence
  Synthetic oligonucleotide: Ptpn6-1015
gggaagcuggccgcuguggg

SEQ ID NO: 25238 - RNA, 20 nt, Artificial Sequence
  Synthetic oligonucleotide: Ptpn6-1221
ugaggaagagcaaccaaugg

SEQ ID NO: 25239 - RNA, 20 nt, Artificial Sequence
  Synthetic oligonucleotide: Ptpn6-1145
cagucuccuguuaguuuugg

SEQ ID NO: 25240 - RNA, 20 nt, Artificial Sequence
  Synthetic oligonucleotide: Ptpn6-1239
cugaggaagagcaaccaaug

SEQ ID NO: 25241 - RNA, 20 nt, Artificial Sequence
  Synthetic oligonucleotide: Ptpn6-1397
ccagggccuaacccuaccug

SEQ ID NO: 25242 - RNA, 20 nt, Artificial Sequence
  Synthetic oligonucleotide: Ptpn6-1176
uggcucagccccgcccccug

SEQ ID NO: 25243 - RNA, 20 nt, Artificial Sequence
  Synthetic oligonucleotide: Ptpn6-1166
ugcagggaagcuggccgcug

SEQ ID NO: 25244 - RNA, 20 nt, Artificial Sequence
  Synthetic oligonucleotide: Ptpn6-1510
cccacccacccagggcgcug

SEQ ID NO: 25245 - RNA, 20 nt, Artificial Sequence
  Synthetic oligonucleotide: Ptpn6-1231
ccaggaaguaacccuggcug

SEQ ID NO: 25246 - RNA, 20 nt, Artificial Sequence
  Synthetic oligonucleotide: Ptpn6-1655
aggggguaccuccuucucug

SEQ ID NO: 25247 - RNA, 20 nt, Artificial Sequence
  Synthetic oligonucleotide: Ptpn6-1243
cuccaggaaaaggacaggug

SEQ ID NO: 25248 - RNA, 20 nt, Artificial Sequence
  Synthetic oligonucleotide: Ptpn6-1235
acaguggcccaagccaggug

SEQ ID NO: 25249 - RNA, 20 nt, Artificial Sequence
  Synthetic oligonucleotide: Ptpn6-1142
uccccuucccgcaaggugug

SEQ ID NO: 25250 - RNA, 20 nt, Artificial Sequence
  Synthetic oligonucleotide: Ptpn6-1155
ccugcuguacucccgcuuug

SEQ ID NO: 25251 - RNA, 20 nt, Artificial Sequence
  Synthetic oligonucleotide: Ptpn6-1029
gcugaggaagagcaaccaau

SEQ ID NO: 25252 - RNA, 20 nt, Artificial Sequence
  Synthetic oligonucleotide: Ptpn6-954
ggguaagucccgggcaccau

SEQ ID NO: 25253 - RNA, 20 nt, Artificial Sequence
  Synthetic oligonucleotide: Ptpn6-1531
uuaggcccagccaggaccau

SEQ ID NO: 25254 - RNA, 20 nt, Artificial Sequence
  Synthetic oligonucleotide: Ptpn6-1136
uacggagagguuucccccau

SEQ ID NO: 25255 - RNA, 20 nt, Artificial Sequence
  Synthetic oligonucleotide: Ptpn6-1006
guuugucccugcagugccau

SEQ ID NO: 25256 - RNA, 20 nt, Artificial Sequence
  Synthetic oligonucleotide: Ptpn6-1211
ugcgggaaggggaaguucau

SEQ ID NO: 25257 - RNA, 20 nt, Artificial Sequence
  Synthetic oligonucleotide: Ptpn6-1195
cugacagagcggcgggguau

SEQ ID NO: 25258 - RNA, 20 nt, Artificial Sequence
  Synthetic oligonucleotide: Ptpn6-1172
accuccuucucugaggaacu

SEQ ID NO: 25259 - RNA, 20 nt, Artificial Sequence
  Synthetic oligonucleotide: Ptpn6-1200
uccaaaacuaacaggagacu

SEQ ID NO: 25260 - RNA, 20 nt, Artificial Sequence
  Synthetic oligonucleotide: Ptpn6-975
ugcuuaggaccugucccccu

SEQ ID NO: 25261 - RNA, 20 nt, Artificial Sequence
  Synthetic oligonucleotide: Ptpn6-1407
agugggucccucagcgcccu

SEQ ID NO: 25262 - RNA, 20 nt, Artificial Sequence
  Synthetic oligonucleotide: Ptpn6-1157
cgguucuuccucaccuggcu

SEQ ID NO: 25263 - RNA, 20 nt, Artificial Sequence
  Synthetic oligonucleotide: Ptpn6-1394
uccucccuaugguccuggcu

SEQ ID NO: 25264 - RNA, 20 nt, Artificial Sequence
  Synthetic oligonucleotide: Ptpn6-1174
cauuucuacuuccagccucu

SEQ ID NO: 25265 - RNA, 20 nt, Artificial Sequence
  Synthetic oligonucleotide: Ptpn6-974
cuggccgcugugggcggucu

SEQ ID NO: 25266 - RNA, 20 nt, Artificial Sequence
  Synthetic oligonucleotide: Ptpn6-1405
gcagguugagaggcuggagu

SEQ ID NO: 25267 - RNA, 20 nt, Artificial Sequence
  Synthetic oligonucleotide: Ptpn6-971
acagagagaugcugucccgu

SEQ ID NO: 25268 - RNA, 20 nt, Artificial Sequence
  Synthetic oligonucleotide: Ptpn6-1212
ucuccaggaaaaggacaggu

SEQ ID NO: 25269 - RNA, 20 nt, Artificial Sequence
  Synthetic oligonucleotide: Ptpn6-1521
gaaggggaggagccucaggu

SEQ ID NO: 25270 - RNA, 20 nt, Artificial Sequence
  Synthetic oligonucleotide: Ptpn6-1411
ccucagcgcccugggugggu

SEQ ID NO: 25271 - RNA, 20 nt, Artificial Sequence
  Synthetic oligonucleotide: Ptpn6-1008
gcagggaagcuggccgcugu

SEQ ID NO: 25272 - RNA, 20 nt, Artificial Sequence
  Synthetic oligonucleotide: Ptpn6-1004
gggauuuuccuuaggcccuu

SEQ ID NO: 25273 - RNA, 20 nt, Artificial Sequence
  Synthetic oligonucleotide: Ptpn6-1011
ggccugcuguacucccgcuu

SEQ ID NO: 25274 - RNA, 20 nt, Artificial Sequence
  Synthetic oligonucleotide: Ptpn6-1013
gguucuuccucaccuggcuu

SEQ ID NO: 25275 - RNA, 20 nt, Artificial Sequence
  Synthetic oligonucleotide: Ptpn6-1184
ccugcuucugccuccugcuu

SEQ ID NO: 25276 - RNA, 20 nt, Artificial Sequence
  Synthetic oligonucleotide: Ptpn6-1529
uuaggcccuggggcaggguu

SEQ ID NO: 25277 - RNA, 20 nt, Artificial Sequence
  Synthetic oligonucleotide: Ptpn6-1523
gaggagccucagguaggguu

SEQ ID NO: 25278 - RNA, 20 nt, Artificial Sequence
  Synthetic oligonucleotide: Ptpn6-1165
cucugaggaacugggcuguu

SEQ ID NO: 25279 - RNA, 20 nt, Artificial Sequence
  Synthetic oligonucleotide: Ptpn6-956
gccugcuguacucccgcuuu

SEQ ID NO: 25280 - RNA, 20 nt, Artificial Sequence
  Synthetic oligonucleotide: Ptpn6-1143
ucccagucuccuguuaguuu

SEQ ID NO: 25281 - RNA, 17 nt, Artificial Sequence
  Synthetic oligonucleotide: Ptpn6-1123
gaaugaugcaggggaaa

SEQ ID NO: 25282 - RNA, 17 nt, Artificial Sequence
  Synthetic oligonucleotide: Ptpn6-1362
ugaaugaugcaggggaa

SEQ ID NO: 25283 - RNA, 17 nt, Artificial Sequence
  Synthetic oligonucleotide: Ptpn6-1135
ggggaaagggaagugaa

SEQ ID NO: 25284 - RNA, 17 nt, Artificial Sequence
  Synthetic oligonucleotide: Ptpn6-1473
agugaacaagacagaca

SEQ ID NO: 25285 - RNA, 17 nt, Artificial Sequence
  Synthetic oligonucleotide: Ptpn6-1637
uauuuuuuguagagaca

SEQ ID NO: 25286 - RNA, 17 nt, Artificial Sequence
  Synthetic oligonucleotide: Ptpn6-1624
gcaagagacugacacca

SEQ ID NO: 25287 - RNA, 17 nt, Artificial Sequence
  Synthetic oligonucleotide: Ptpn6-1647
accacuacacccggcca

SEQ ID NO: 25288 - RNA, 17 nt, Artificial Sequence
  Synthetic oligonucleotide: Ptpn6-1125
guugaaugaaugaugca

SEQ ID NO: 25289 - RNA, 17 nt, Artificial Sequence
  Synthetic oligonucleotide: Ptpn6-1617
aaaggcagagggaauca

SEQ ID NO: 25290 - RNA, 17 nt, Artificial Sequence
  Synthetic oligonucleotide: Ptpn6-1474
cauggucucugcucuca

SEQ ID NO: 25291 - RNA, 17 nt, Artificial Sequence
  Synthetic oligonucleotide: Ptpn6-1389
aaaggaaacaaagaaga

SEQ ID NO: 25292 - RNA, 17 nt, Artificial Sequence
  Synthetic oligonucleotide: Ptpn6-1619
aaucagggaaggagaga

SEQ ID NO: 25293 - RNA, 17 nt, Artificial Sequence
  Synthetic oligonucleotide: Ptpn6-1618
gcagagggaaucaggga

SEQ ID NO: 25294 - RNA, 17 nt, Artificial Sequence
  Synthetic oligonucleotide: Ptpn6-1109
guuggcuggacguggga

SEQ ID NO: 25295 - RNA, 17 nt, Artificial Sequence
  Synthetic oligonucleotide: Ptpn6-1495
uccugugguuccagcua

SEQ ID NO: 25296 - RNA, 17 nt, Artificial Sequence
  Synthetic oligonucleotide: Ptpn6-1497
cagcuauggagaggcua

SEQ ID NO: 25297 - RNA, 17 nt, Artificial Sequence
  Synthetic oligonucleotide: Ptpn6-1286
ugcaucauucauucaac

SEQ ID NO: 25298 - RNA, 17 nt, Artificial Sequence
  Synthetic oligonucleotide: Ptpn6-1635
uccauagcuggaaccac

SEQ ID NO: 25299 - RNA, 17 nt, Artificial Sequence
  Synthetic oligonucleotide: Ptpn6-1651
ggucuguaaccucccac

SEQ ID NO: 25300 - RNA, 17 nt, Artificial Sequence
  Synthetic oligonucleotide: Ptpn6-1645
cacagugcugggaucac

SEQ ID NO: 25301 - RNA, 17 nt, Artificial Sequence
  Synthetic oligonucleotide: Ptpn6-1636
uuauuuuuuguagagac

SEQ ID NO: 25302 - RNA, 17 nt, Artificial Sequence
  Synthetic oligonucleotide: Ptpn6-1472
uaagaugcugguaauac

SEQ ID NO: 25303 - RNA, 17 nt, Artificial Sequence
  Synthetic oligonucleotide: Ptpn6-1646
gugugaaccacuacacc

SEQ ID NO: 25304 - RNA, 17 nt, Artificial Sequence
  Synthetic oligonucleotide: Ptpn6-5292
gcaucuuaaacagcacc

SEQ ID NO: 25305 - RNA, 17 nt, Artificial Sequence
  Synthetic oligonucleotide: Ptpn6-5293
agcaucuauuaugcacc

SEQ ID NO: 25306 - RNA, 17 nt, Artificial Sequence
  Synthetic oligonucleotide: Ptpn6-1488
gaggauugcuugagccc

SEQ ID NO: 25307 - RNA, 17 nt, Artificial Sequence
  Synthetic oligonucleotide: Ptpn6-1489
ggaguuugagaccagcc

SEQ ID NO: 25308 - RNA, 17 nt, Artificial Sequence
  Synthetic oligonucleotide: Ptpn6-1639
gucucacuauauuggcc

SEQ ID NO: 25309 - RNA, 17 nt, Artificial Sequence
  Synthetic oligonucleotide: Ptpn6-1481
aauagacagccuuggcc

SEQ ID NO: 25310 - RNA, 17 nt, Artificial Sequence
  Synthetic oligonucleotide: Ptpn6-1641
ggcuggucucaaacucc

SEQ ID NO: 25311 - RNA, 17 nt, Artificial Sequence
  Synthetic oligonucleotide: Ptpn6-1450
auucccucugccuuucc

SEQ ID NO: 25312 - RNA, 17 nt, Artificial Sequence
  Synthetic oligonucleotide: Ptpn6-1634
cuuagccucuccauagc

SEQ ID NO: 25313 - RNA, 17 nt, Artificial Sequence
  Synthetic oligonucleotide: Ptpn6-1490
aaaaauaagaaauuagc

SEQ ID NO: 25314 - RNA, 17 nt, Artificial Sequence
  Synthetic oligonucleotide: Ptpn6-1323
cgugggagggccuucgc

SEQ ID NO: 25315 - RNA, 17 nt, Artificial Sequence
  Synthetic oligonucleotide: Ptpn6-1640
cacuauauuggccaggc

SEQ ID NO: 25316 - RNA, 17 nt, Artificial Sequence
  Synthetic oligonucleotide: Ptpn6-1480
aaauagacagccuuggc

SEQ ID NO: 25317 - RNA, 17 nt, Artificial Sequence
  Synthetic oligonucleotide: Ptpn6-1329
agugcggagaaguuggc

SEQ ID NO: 25318 - RNA, 17 nt, Artificial Sequence
  Synthetic oligonucleotide: Ptpn6-5294
ggugcuguuuaagaugc

SEQ ID NO: 25319 - RNA, 17 nt, Artificial Sequence
  Synthetic oligonucleotide: Ptpn6-1384
uguugaaugaaugaugc

SEQ ID NO: 25320 - RNA, 17 nt, Artificial Sequence
  Synthetic oligonucleotide: Ptpn6-1643
ucagccucccacagugc

SEQ ID NO: 25321 - RNA, 17 nt, Artificial Sequence
  Synthetic oligonucleotide: Ptpn6-1616
gaaaggcagagggaauc

SEQ ID NO: 25322 - RNA, 17 nt, Artificial Sequence
  Synthetic oligonucleotide: Ptpn6-1623
gagagauggggguuguc

SEQ ID NO: 25323 - RNA, 17 nt, Artificial Sequence
  Synthetic oligonucleotide: Ptpn6-1475
cggagcuuacauuccag

SEQ ID NO: 25324 - RNA, 17 nt, Artificial Sequence
  Synthetic oligonucleotide: Ptpn6-1370
uugaaugaaugaugcag

SEQ ID NO: 25325 - RNA, 17 nt, Artificial Sequence
  Synthetic oligonucleotide: Ptpn6-1487
ugggaggcugaggcgag

SEQ ID NO: 25326 - RNA, 17 nt, Artificial Sequence
  Synthetic oligonucleotide: Ptpn6-1496
ugguuccagcuauggag

SEQ ID NO: 25327 - RNA, 17 nt, Artificial Sequence
  Synthetic oligonucleotide: Ptpn6-1482
gccuuggccggguguag

SEQ ID NO: 25328 - RNA, 17 nt, Artificial Sequence
  Synthetic oligonucleotide: Ptpn6-1124
gagaaguuggcuggacg

SEQ ID NO: 25329 - RNA, 17 nt, Artificial Sequence
  Synthetic oligonucleotide: Ptpn6-1326
acgugggagggccuucg

SEQ ID NO: 25330 - RNA, 17 nt, Artificial Sequence
  Synthetic oligonucleotide: Ptpn6-1090
gggagggccuucgcggg

SEQ ID NO: 25331 - RNA, 17 nt, Artificial Sequence
  Synthetic oligonucleotide: Ptpn6-1477
gcuuacauuccaguggg

SEQ ID NO: 25332 - RNA, 17 nt, Artificial Sequence
  Synthetic oligonucleotide: Ptpn6-1340
aguuggcuggacguggg

SEQ ID NO: 25333 - RNA, 17 nt, Artificial Sequence
  Synthetic oligonucleotide: Ptpn6-1485
gaucccagcacuguggg

SEQ ID NO: 25334 - RNA, 17 nt, Artificial Sequence
  Synthetic oligonucleotide: Ptpn6-1622
cagggaaggagagaugg

SEQ ID NO: 25335 - RNA, 17 nt, Artificial Sequence
  Synthetic oligonucleotide: Ptpn6-1493
aaauuagcugggugugg

SEQ ID NO: 25336 - RNA, 17 nt, Artificial Sequence
  Synthetic oligonucleotide: Ptpn6-1621
ucagggaaggagagaug

SEQ ID NO: 25337 - RNA, 17 nt, Artificial Sequence
  Synthetic oligonucleotide: Ptpn6-1483
cugugaucccagcacug

SEQ ID NO: 25338 - RNA, 17 nt, Artificial Sequence
  Synthetic oligonucleotide: Ptpn6-1494
ugguggcacacguccug

SEQ ID NO: 25339 - RNA, 17 nt, Artificial Sequence
  Synthetic oligonucleotide: Ptpn6-1486
agcacugugggaggcug

SEQ ID NO: 25340 - RNA, 17 nt, Artificial Sequence
  Synthetic oligonucleotide: Ptpn6-1366
ucugauguugggaagug

SEQ ID NO: 25341 - RNA, 17 nt, Artificial Sequence
  Synthetic oligonucleotide: Ptpn6-1492
aagaaauuagcugggug

SEQ ID NO: 25342 - RNA, 17 nt, Artificial Sequence
  Synthetic oligonucleotide: Ptpn6-5295
uuggugucagucucuug

SEQ ID NO: 25343 - RNA, 17 nt, Artificial Sequence
  Synthetic oligonucleotide: Ptpn6-1478
caaauaacccaauaaau

SEQ ID NO: 25344 - RNA, 17 nt, Artificial Sequence
  Synthetic oligonucleotide: Ptpn6-1387
aaggaaacaaagaagau

SEQ ID NO: 25345 - RNA, 17 nt, Artificial Sequence
  Synthetic oligonucleotide: Ptpn6-1620
aucagggaaggagagau

SEQ ID NO: 25346 - RNA, 17 nt, Artificial Sequence
  Synthetic oligonucleotide: Ptpn6-1638
acagggucucacuauau

SEQ ID NO: 25347 - RNA, 17 nt, Artificial Sequence
  Synthetic oligonucleotide: Ptpn6-1648
gcaaugauccaauuuau

SEQ ID NO: 25348 - RNA, 17 nt, Artificial Sequence
  Synthetic oligonucleotide: Ptpn6-1479
cagaaaauagacagccu

SEQ ID NO: 25349 - RNA, 17 nt, Artificial Sequence
  Synthetic oligonucleotide: Ptpn6-1642
gcuggucucaaacuccu

SEQ ID NO: 25350 - RNA, 17 nt, Artificial Sequence
  Synthetic oligonucleotide: Ptpn6-1491
aaaauaagaaauuagcu

SEQ ID NO: 25351 - RNA, 17 nt, Artificial Sequence
  Synthetic oligonucleotide: Ptpn6-1644
cagccucccacagugcu

SEQ ID NO: 25352 - RNA, 17 nt, Artificial Sequence
  Synthetic oligonucleotide: Ptpn6-1117
gggaagugcggagaagu

SEQ ID NO: 25353 - RNA, 17 nt, Artificial Sequence
  Synthetic oligonucleotide: Ptpn6-1476
ggagcuuacauuccagu

SEQ ID NO: 25354 - RNA, 17 nt, Artificial Sequence
  Synthetic oligonucleotide: Ptpn6-1328
agaaguuggcuggacgu

SEQ ID NO: 25355 - RNA, 17 nt, Artificial Sequence
  Synthetic oligonucleotide: Ptpn6-1094
ggaccaaagucugaugu

SEQ ID NO: 25356 - RNA, 17 nt, Artificial Sequence
  Synthetic oligonucleotide: Ptpn6-1484
ugugaucccagcacugu

SEQ ID NO: 25357 - RNA, 17 nt, Artificial Sequence
  Synthetic oligonucleotide: Ptpn6-1649
caaugauccaauuuauu

SEQ ID NO: 25358 - RNA, 17 nt, Artificial Sequence
  Synthetic oligonucleotide: Ptpn6-1273
uucccaacaucagacuu

SEQ ID NO: 25359 - RNA, 17 nt, Artificial Sequence
  Synthetic oligonucleotide: Ptpn6-1095
gaccaaagucugauguu

SEQ ID NO: 25360 - RNA, 17 nt, Artificial Sequence
  Synthetic oligonucleotide: Ptpn6-1650
uuauuggguuauuuguu

SEQ ID NO: 25361 - RNA, 20 nt, Artificial Sequence
  Synthetic oligonucleotide: Ptpn6-1244
aaugaaugaugcaggggaaa

SEQ ID NO: 25362 - RNA, 20 nt, Artificial Sequence
  Synthetic oligonucleotide: Ptpn6-1058
gaaugaaugaugcaggggaa

SEQ ID NO: 25363 - RNA, 20 nt, Artificial Sequence
  Synthetic oligonucleotide: Ptpn6-1062
gcaggggaaagggaagugaa

SEQ ID NO: 25364 - RNA, 20 nt, Artificial Sequence
  Synthetic oligonucleotide: Ptpn6-1413
uggagugaacaagacagaca

SEQ ID NO: 25365 - RNA, 20 nt, Artificial Sequence
  Synthetic oligonucleotide: Ptpn6-1566
ucuuauuuuuuguagagaca

SEQ ID NO: 25366 - RNA, 20 nt, Artificial Sequence
  Synthetic oligonucleotide: Ptpn6-1553
uccgcaagagacugacacca

SEQ ID NO: 25367 - RNA, 20 nt, Artificial Sequence
  Synthetic oligonucleotide: Ptpn6-1576
ugaaccacuacacccggcca

SEQ ID NO: 25368 - RNA, 20 nt, Artificial Sequence
  Synthetic oligonucleotide: Ptpn6-1250
ccuguugaaugaaugaugca

SEQ ID NO: 25369 - RNA, 20 nt, Artificial Sequence
  Synthetic oligonucleotide: Ptpn6-1546
uggaaaggcagagggaauca

SEQ ID NO: 25370 - RNA, 20 nt, Artificial Sequence
  Synthetic oligonucleotide: Ptpn6-1414
agacauggucucugcucuca

SEQ ID NO: 25371 - RNA, 20 nt, Artificial Sequence
  Synthetic oligonucleotide: Ptpn6-1061
gugaaaggaaacaaagaaga

SEQ ID NO: 25372 - RNA, 20 nt, Artificial Sequence
  Synthetic oligonucleotide: Ptpn6-1548
gggaaucagggaaggagaga

SEQ ID NO: 25373 - RNA, 20 nt, Artificial Sequence
  Synthetic oligonucleotide: Ptpn6-1547
aaggcagagggaaucaggga

SEQ ID NO: 25374 - RNA, 20 nt, Artificial Sequence
  Synthetic oligonucleotide: Ptpn6-1044
gaaguuggcuggacguggga

SEQ ID NO: 25375 - RNA, 20 nt, Artificial Sequence
  Synthetic oligonucleotide: Ptpn6-1435
acguccugugguuccagcua

SEQ ID NO: 25376 - RNA, 20 nt, Artificial Sequence
  Synthetic oligonucleotide: Ptpn6-1437
uuccagcuauggagaggcua

SEQ ID NO: 25377 - RNA, 20 nt, Artificial Sequence
  Synthetic oligonucleotide: Ptpn6-1180
cccugcaucauucauucaac

SEQ ID NO: 25378 - RNA, 20 nt, Artificial Sequence
  Synthetic oligonucleotide: Ptpn6-1564
cucuccauagcuggaaccac

SEQ ID NO: 25379 - RNA, 20 nt, Artificial Sequence
  Synthetic oligonucleotide: Ptpn6-1580
uucggucuguaaccucccac

SEQ ID NO: 25380 - RNA, 20 nt, Artificial Sequence
  Synthetic oligonucleotide: Ptpn6-1574
ucccacagugcugggaucac

SEQ ID NO: 25381 - RNA, 20 nt, Artificial Sequence
  Synthetic oligonucleotide: Ptpn6-1565
uucuuauuuuuuguagagac

SEQ ID NO: 25382 - RNA, 20 nt, Artificial Sequence
  Synthetic oligonucleotide: Ptpn6-1412
guuuaagaugcugguaauac

SEQ ID NO: 25383 - RNA, 20 nt, Artificial Sequence
  Synthetic oligonucleotide: Ptpn6-1575
caggugugaaccacuacacc

SEQ ID NO: 25384 - RNA, 20 nt, Artificial Sequence
  Synthetic oligonucleotide: Ptpn6-5296
ccagcaucuuaaacagcacc

SEQ ID NO: 25385 - RNA, 20 nt, Artificial Sequence
  Synthetic oligonucleotide: Ptpn6-5297
uugagcaucuauuaugcacc

SEQ ID NO: 25386 - RNA, 20 nt, Artificial Sequence
  Synthetic oligonucleotide: Ptpn6-1428
cgagaggauugcuugagccc

SEQ ID NO: 25387 - RNA, 20 nt, Artificial Sequence
  Synthetic oligonucleotide: Ptpn6-1429
ccaggaguuugagaccagcc

SEQ ID NO: 25388 - RNA, 20 nt, Artificial Sequence
  Synthetic oligonucleotide: Ptpn6-1568
agggucucacuauauuggcc

SEQ ID NO: 25389 - RNA, 20 nt, Artificial Sequence
  Synthetic oligonucleotide: Ptpn6-1421
gaaaauagacagccuuggcc

SEQ ID NO: 25390 - RNA, 20 nt, Artificial Sequence
  Synthetic oligonucleotide: Ptpn6-1570
ccaggcuggucucaaacucc

SEQ ID NO: 25391 - RNA, 20 nt, Artificial Sequence
  Synthetic oligonucleotide: Ptpn6-1390
cugauucccucugccuuucc

SEQ ID NO: 25392 - RNA, 20 nt, Artificial Sequence
  Synthetic oligonucleotide: Ptpn6-1563
caccuuagccucuccauagc

SEQ ID NO: 25393 - RNA, 20 nt, Artificial Sequence
  Synthetic oligonucleotide: Ptpn6-1430
acaaaaaauaagaaauuagc

SEQ ID NO: 25394 - RNA, 20 nt, Artificial Sequence
  Synthetic oligonucleotide: Ptpn6-960
ggacgugggagggccuucgc

SEQ ID NO: 25395 - RNA, 20 nt, Artificial Sequence
  Synthetic oligonucleotide: Ptpn6-1569
ucucacuauauuggccaggc

SEQ ID NO: 25396 - RNA, 20 nt, Artificial Sequence
  Synthetic oligonucleotide: Ptpn6-1420
agaaaauagacagccuuggc

SEQ ID NO: 25397 - RNA, 20 nt, Artificial Sequence
  Synthetic oligonucleotide: Ptpn6-1032
ggaagugcggagaaguuggc

SEQ ID NO: 25398 - RNA, 20 nt, Artificial Sequence
  Synthetic oligonucleotide: Ptpn6-5298
ccaggugcuguuuaagaugc

SEQ ID NO: 25399 - RNA, 20 nt, Artificial Sequence
  Synthetic oligonucleotide: Ptpn6-1249
accuguugaaugaaugaugc

SEQ ID NO: 25400 - RNA, 20 nt, Artificial Sequence
  Synthetic oligonucleotide: Ptpn6-1572
gccucagccucccacagugc

SEQ ID NO: 25401 - RNA, 20 nt, Artificial Sequence
  Synthetic oligonucleotide: Ptpn6-1545
cuggaaaggcagagggaauc

SEQ ID NO: 25402 - RNA, 20 nt, Artificial Sequence
  Synthetic oligonucleotide: Ptpn6-1552
aaggagagauggggguuguc

SEQ ID NO: 25403 - RNA, 20 nt, Artificial Sequence
  Synthetic oligonucleotide: Ptpn6-1415
ucacggagcuuacauuccag

SEQ ID NO: 25404 - RNA, 20 nt, Artificial Sequence
  Synthetic oligonucleotide: Ptpn6-1241
cuguugaaugaaugaugcag

SEQ ID NO: 25405 - RNA, 20 nt, Artificial Sequence
  Synthetic oligonucleotide: Ptpn6-1427
cugugggaggcugaggcgag

SEQ ID NO: 25406 - RNA, 20 nt, Artificial Sequence
  Synthetic oligonucleotide: Ptpn6-1436
cugugguuccagcuauggag

SEQ ID NO: 25407 - RNA, 20 nt, Artificial Sequence
  Synthetic oligonucleotide: Ptpn6-1422
acagccuuggccggguguag

SEQ ID NO: 25408 - RNA, 20 nt, Artificial Sequence
  Synthetic oligonucleotide: Ptpn6-1030
gcggagaaguuggcuggacg

SEQ ID NO: 25409 - RNA, 20 nt, Artificial Sequence
  Synthetic oligonucleotide: Ptpn6-1189
uggacgugggagggccuucg

SEQ ID NO: 25410 - RNA, 20 nt, Artificial Sequence
  Synthetic oligonucleotide: Ptpn6-1229
cgugggagggccuucgcggg

SEQ ID NO: 25411 - RNA, 20 nt, Artificial Sequence
  Synthetic oligonucleotide: Ptpn6-1417
ggagcuuacauuccaguggg

SEQ ID NO: 25412 - RNA, 20 nt, Artificial Sequence
  Synthetic oligonucleotide: Ptpn6-1209
agaaguuggcuggacguggg

SEQ ID NO: 25413 - RNA, 20 nt, Artificial Sequence
  Synthetic oligonucleotide: Ptpn6-1425
ugugaucccagcacuguggg

SEQ ID NO: 25414 - RNA, 20 nt, Artificial Sequence
  Synthetic oligonucleotide: Ptpn6-1551
aaucagggaaggagagaugg

SEQ ID NO: 25415 - RNA, 20 nt, Artificial Sequence
  Synthetic oligonucleotide: Ptpn6-1433
aagaaauuagcugggugugg

SEQ ID NO: 25416 - RNA, 20 nt, Artificial Sequence
  Synthetic oligonucleotide: Ptpn6-1550
gaaucagggaaggagagaug

SEQ ID NO: 25417 - RNA, 20 nt, Artificial Sequence
  Synthetic oligonucleotide: Ptpn6-1423
caccugugaucccagcacug

SEQ ID NO: 25418 - RNA, 20 nt, Artificial Sequence
  Synthetic oligonucleotide: Ptpn6-1434
gugugguggcacacguccug

SEQ ID NO: 25419 - RNA, 20 nt, Artificial Sequence
  Synthetic oligonucleotide: Ptpn6-1426
cccagcacugugggaggcug

SEQ ID NO: 25420 - RNA, 20 nt, Artificial Sequence
  Synthetic oligonucleotide: Ptpn6-1213
aagucugauguugggaagug

SEQ ID NO: 25421 - RNA, 20 nt, Artificial Sequence
  Synthetic oligonucleotide: Ptpn6-1432
aauaagaaauuagcugggug

SEQ ID NO: 25422 - RNA, 20 nt, Artificial Sequence
  Synthetic oligonucleotide: Ptpn6-1418
gaacaaauaacccaauaaau

SEQ ID NO: 25423 - RNA, 20 nt, Artificial Sequence
  Synthetic oligonucleotide: Ptpn6-1254
ugaaaggaaacaaagaagau

SEQ ID NO: 25424 - RNA, 20 nt, Artificial Sequence
  Synthetic oligonucleotide: Ptpn6-1549
ggaaucagggaaggagagau

SEQ ID NO: 25425 - RNA, 20 nt, Artificial Sequence
  Synthetic oligonucleotide: Ptpn6-1567
gagacagggucucacuauau

SEQ ID NO: 25426 - RNA, 20 nt, Artificial Sequence
  Synthetic oligonucleotide: Ptpn6-1577
ucugcaaugauccaauuuau

SEQ ID NO: 25427 - RNA, 20 nt, Artificial Sequence
  Synthetic oligonucleotide: Ptpn6-1419
acgcagaaaauagacagccu

SEQ ID NO: 25428 - RNA, 20 nt, Artificial Sequence
  Synthetic oligonucleotide: Ptpn6-1571
caggcuggucucaaacuccu

SEQ ID NO: 25429 - RNA, 20 nt, Artificial Sequence
  Synthetic oligonucleotide: Ptpn6-1431
caaaaaauaagaaauuagcu

SEQ ID NO: 25430 - RNA, 20 nt, Artificial Sequence
  Synthetic oligonucleotide: Ptpn6-1573
ccucagccucccacagugcu

SEQ ID NO: 25431 - RNA, 20 nt, Artificial Sequence
  Synthetic oligonucleotide: Ptpn6-1031
guugggaagugcggagaagu

SEQ ID NO: 25432 - RNA, 20 nt, Artificial Sequence
  Synthetic oligonucleotide: Ptpn6-1416
cacggagcuuacauuccagu

SEQ ID NO: 25433 - RNA, 20 nt, Artificial Sequence
  Synthetic oligonucleotide: Ptpn6-1214
cggagaaguuggcuggacgu

SEQ ID NO: 25434 - RNA, 20 nt, Artificial Sequence
  Synthetic oligonucleotide: Ptpn6-983
augggaccaaagucugaugu

SEQ ID NO: 25435 - RNA, 20 nt, Artificial Sequence
  Synthetic oligonucleotide: Ptpn6-1424
accugugaucccagcacugu

SEQ ID NO: 25436 - RNA, 20 nt, Artificial Sequence
  Synthetic oligonucleotide: Ptpn6-1578
cugcaaugauccaauuuauu

SEQ ID NO: 25437 - RNA, 20 nt, Artificial Sequence
  Synthetic oligonucleotide: Ptpn6-1153
cacuucccaacaucagacuu

SEQ ID NO: 25438 - RNA, 20 nt, Artificial Sequence
  Synthetic oligonucleotide: Ptpn6-979
ugggaccaaagucugauguu

SEQ ID NO: 25439 - RNA, 20 nt, Artificial Sequence
  Synthetic oligonucleotide: Ptpn6-1579
aauuuauuggguuauuuguu

SEQ ID NO: 25440 - RNA, 18 nt, Artificial Sequence
  Synthetic oligonucleotide: Ptpn6-5299
ugacagagcggcggggua

SEQ ID NO: 25441 - RNA, 19 nt, Artificial Sequence
  Synthetic oligonucleotide: Ptpn6-5300
cugacagagcggcggggua

SEQ ID NO: 25442 - RNA, 20 nt, Artificial Sequence
  Synthetic oligonucleotide: Ptpn6-1913
gcugacagagcggcggggua

SEQ ID NO: 25443 - RNA, 21 nt, Artificial Sequence
  Synthetic oligonucleotide: Ptpn6-5301
agcugacagagcggcggggua

SEQ ID NO: 25444 - RNA, 22 nt, Artificial Sequence
  Synthetic oligonucleotide: Ptpn6-5302
aagcugacagagcggcggggua

SEQ ID NO: 25445 - RNA, 23 nt, Artificial Sequence
  Synthetic oligonucleotide: Ptpn6-5303
caagcugacagagcggcggggua

SEQ ID NO: 25446 - RNA, 24 nt, Artificial Sequence
  Synthetic oligonucleotide: Ptpn6-5304
ucaagcugacagagcggcggggua

SEQ ID NO: 25447 - RNA, 21 nt, Artificial Sequence
  Synthetic oligonucleotide: Ptpn6-5305
gcagaggagcaugagugagcc

SEQ ID NO: 25448 - RNA, 22 nt, Artificial Sequence
  Synthetic oligonucleotide: Ptpn6-5306
ggcagaggagcaugagugagcc

SEQ ID NO: 25449 - RNA, 23 nt, Artificial Sequence
  Synthetic oligonucleotide: Ptpn6-5307
gggcagaggagcaugagugagcc

SEQ ID NO: 25450 - RNA, 24 nt, Artificial Sequence
  Synthetic oligonucleotide: Ptpn6-5308
ggggcagaggagcaugagugagcc

SEQ ID NO: 25451 - RNA, 21 nt, Artificial Sequence
  Synthetic oligonucleotide: Ptpn6-5309
gcuucccugcagccccaaagc

SEQ ID NO: 25452 - RNA, 22 nt, Artificial Sequence
  Synthetic oligonucleotide: Ptpn6-5310
agcuucccugcagccccaaagc

SEQ ID NO: 25453 - RNA, 23 nt, Artificial Sequence
  Synthetic oligonucleotide: Ptpn6-5311
cagcuucccugcagccccaaagc

SEQ ID NO: 25454 - RNA, 24 nt, Artificial Sequence
  Synthetic oligonucleotide: Ptpn6-5312
ccagcuucccugcagccccaaagc

SEQ ID NO: 25455 - RNA, 21 nt, Artificial Sequence
  Synthetic oligonucleotide: Ptpn6-5313
uuaaagagggggcagaggagc

SEQ ID NO: 25456 - RNA, 22 nt, Artificial Sequence
  Synthetic oligonucleotide: Ptpn6-5314
guuaaagagggggcagaggagc

SEQ ID NO: 25457 - RNA, 23 nt, Artificial Sequence
  Synthetic oligonucleotide: Ptpn6-5315
uguuaaagagggggcagaggagc

SEQ ID NO: 25458 - RNA, 24 nt, Artificial Sequence
  Synthetic oligonucleotide: Ptpn6-5316
auguuaaagagggggcagaggagc

SEQ ID NO: 25459 - RNA, 21 nt, Artificial Sequence
  Synthetic oligonucleotide: Ptpn6-5317
ccauagggaggagcuguucag

SEQ ID NO: 25460 - RNA, 22 nt, Artificial Sequence
  Synthetic oligonucleotide: Ptpn6-5318
accauagggaggagcuguucag

SEQ ID NO: 25461 - RNA, 23 nt, Artificial Sequence
  Synthetic oligonucleotide: Ptpn6-5319
gaccauagggaggagcuguucag

SEQ ID NO: 25462 - RNA, 24 nt, Artificial Sequence
  Synthetic oligonucleotide: Ptpn6-5320
ggaccauagggaggagcuguucag

SEQ ID NO: 25463 - RNA, 21 nt, Artificial Sequence
  Synthetic oligonucleotide: Ptpn6-5321
gagcucaagcugacagagcgg

SEQ ID NO: 25464 - RNA, 22 nt, Artificial Sequence
  Synthetic oligonucleotide: Ptpn6-5322
ggagcucaagcugacagagcgg

SEQ ID NO: 25465 - RNA, 23 nt, Artificial Sequence
  Synthetic oligonucleotide: Ptpn6-5323
uggagcucaagcugacagagcgg

SEQ ID NO: 25466 - RNA, 24 nt, Artificial Sequence
  Synthetic oligonucleotide: Ptpn6-5324
cuggagcucaagcugacagagcgg

SEQ ID NO: 25467 - RNA, 18 nt, Artificial Sequence
  Synthetic oligonucleotide: Ptpn6-5325
acucacguucacacacgu

SEQ ID NO: 25468 - RNA, 19 nt, Artificial Sequence
  Synthetic oligonucleotide: Ptpn6-5326
cacucacguucacacacgu

SEQ ID NO: 25469 - RNA, 20 nt, Artificial Sequence
  Synthetic oligonucleotide: Ptpn6-961
gcacucacguucacacacgu

SEQ ID NO: 25470 - RNA, 21 nt, Artificial Sequence
  Synthetic oligonucleotide: Ptpn6-5327
cgcacucacguucacacacgu

SEQ ID NO: 25471 - RNA, 22 nt, Artificial Sequence
  Synthetic oligonucleotide: Ptpn6-5328
ucgcacucacguucacacacgu

SEQ ID NO: 25472 - RNA, 23 nt, Artificial Sequence
  Synthetic oligonucleotide: Ptpn6-5329
aucgcacucacguucacacacgu

SEQ ID NO: 25473 - RNA, 24 nt, Artificial Sequence
  Synthetic oligonucleotide: Ptpn6-5330
gaucgcacucacguucacacacgu

SEQ ID NO: 25474 - RNA, 21 nt, Artificial Sequence
  Synthetic oligonucleotide: Ptpn6-5331
ggggcagguugagaggcugga

SEQ ID NO: 25475 - RNA, 22 nt, Artificial Sequence
  Synthetic oligonucleotide: Ptpn6-5332
cggggcagguugagaggcugga

SEQ ID NO: 25476 - RNA, 23 nt, Artificial Sequence
  Synthetic oligonucleotide: Ptpn6-5333
ccggggcagguugagaggcugga

SEQ ID NO: 25477 - RNA, 24 nt, Artificial Sequence
  Synthetic oligonucleotide: Ptpn6-5334
cccggggcagguugagaggcugga

SEQ ID NO: 25478 - RNA, 18 nt, Artificial Sequence
  Synthetic oligonucleotide: Ptpn6-5335
acuccgacgugugugaac

SEQ ID NO: 25479 - RNA, 19 nt, Artificial Sequence
  Synthetic oligonucleotide: Ptpn6-5336
cacuccgacgugugugaac

SEQ ID NO: 25480 - RNA, 20 nt, Artificial Sequence
  Synthetic oligonucleotide: Ptpn6-1704
ucacuccgacgugugugaac

SEQ ID NO: 25481 - RNA, 21 nt, Artificial Sequence
  Synthetic oligonucleotide: Ptpn6-5337
cucacuccgacgugugugaac

SEQ ID NO: 25482 - RNA, 22 nt, Artificial Sequence
  Synthetic oligonucleotide: Ptpn6-5338
gcucacuccgacgugugugaac

SEQ ID NO: 25483 - RNA, 23 nt, Artificial Sequence
  Synthetic oligonucleotide: Ptpn6-5339
ugcucacuccgacgugugugaac

SEQ ID NO: 25484 - RNA, 24 nt, Artificial Sequence
  Synthetic oligonucleotide: Ptpn6-5340
augcucacuccgacgugugugaac

SEQ ID NO: 25485 - RNA, 21 nt, Artificial Sequence
  Synthetic oligonucleotide: Ptpn6-5341
uccugcuuaggaccugucccc

SEQ ID NO: 25486 - RNA, 22 nt, Artificial Sequence
  Synthetic oligonucleotide: Ptpn6-5342
cuccugcuuaggaccugucccc

SEQ ID NO: 25487 - RNA, 23 nt, Artificial Sequence
  Synthetic oligonucleotide: Ptpn6-5343
ccuccugcuuaggaccugucccc

SEQ ID NO: 25488 - RNA, 24 nt, Artificial Sequence
  Synthetic oligonucleotide: Ptpn6-5344
gccuccugcuuaggaccugucccc

SEQ ID NO: 25489 - RNA, 21 nt, Artificial Sequence
  Synthetic oligonucleotide: Ptpn6-2837
ccuacagagagaugcuguccc

SEQ ID NO: 25490 - RNA, 22 nt, Artificial Sequence
  Synthetic oligonucleotide: Ptpn6-2838
cccuacagagagaugcuguccc

SEQ ID NO: 25491 - RNA, 23 nt, Artificial Sequence
  Synthetic oligonucleotide: Ptpn6-2839
ucccuacagagagaugcuguccc

SEQ ID NO: 25492 - RNA, 24 nt, Artificial Sequence
  Synthetic oligonucleotide: Ptpn6-2840
cucccuacagagagaugcuguccc

SEQ ID NO: 25493 - RNA, 18 nt, Artificial Sequence
  Synthetic oligonucleotide: Ptpn6-5345
agugggucccucagcgcc

SEQ ID NO: 25494 - RNA, 19 nt, Artificial Sequence
  Synthetic oligonucleotide: Ptpn6-5346
gagugggucccucagcgcc

SEQ ID NO: 25495 - RNA, 20 nt, Artificial Sequence
  Synthetic oligonucleotide: Ptpn6-2239
ggagugggucccucagcgcc

SEQ ID NO: 25496 - RNA, 21 nt, Artificial Sequence
  Synthetic oligonucleotide: Ptpn6-5347
uggagugggucccucagcgcc

SEQ ID NO: 25497 - RNA, 22 nt, Artificial Sequence
  Synthetic oligonucleotide: Ptpn6-5348
cuggagugggucccucagcgcc

SEQ ID NO: 25498 - RNA, 23 nt, Artificial Sequence
  Synthetic oligonucleotide: Ptpn6-5349
gcuggagugggucccucagcgcc

SEQ ID NO: 25499 - RNA, 24 nt, Artificial Sequence
  Synthetic oligonucleotide: Ptpn6-5350
ggcuggagugggucccucagcgcc

SEQ ID NO: 25500 - RNA, 21 nt, Artificial Sequence
  Synthetic oligonucleotide: Ptpn6-5351
cauugguugcucuuccucagc

SEQ ID NO: 25501 - RNA, 22 nt, Artificial Sequence
  Synthetic oligonucleotide: Ptpn6-5352
ccauugguugcucuuccucagc

SEQ ID NO: 25502 - RNA, 23 nt, Artificial Sequence
  Synthetic oligonucleotide: Ptpn6-5353
cccauugguugcucuuccucagc

SEQ ID NO: 25503 - RNA, 24 nt, Artificial Sequence
  Synthetic oligonucleotide: Ptpn6-5354
ccccauugguugcucuuccucagc

SEQ ID NO: 25504 - RNA, 18 nt, Artificial Sequence
  Synthetic oligonucleotide: Ptpn6-5355
uccuggagacuauuaguc

SEQ ID NO: 25505 - RNA, 19 nt, Artificial Sequence
  Synthetic oligonucleotide: Ptpn6-5356
uuccuggagacuauuaguc

SEQ ID NO: 25506 - RNA, 20 nt, Artificial Sequence
  Synthetic oligonucleotide: Ptpn6-1679
uuuccuggagacuauuaguc

SEQ ID NO: 25507 - RNA, 21 nt, Artificial Sequence
  Synthetic oligonucleotide: Ptpn6-5357
uuuuccuggagacuauuaguc

SEQ ID NO: 25508 - RNA, 22 nt, Artificial Sequence
  Synthetic oligonucleotide: Ptpn6-5358
cuuuuccuggagacuauuaguc

SEQ ID NO: 25509 - RNA, 23 nt, Artificial Sequence
  Synthetic oligonucleotide: Ptpn6-5359
ccuuuuccuggagacuauuaguc

SEQ ID NO: 25510 - RNA, 24 nt, Artificial Sequence
  Synthetic oligonucleotide: Ptpn6-5360
uccuuuuccuggagacuauuaguc

SEQ ID NO: 25511 - RNA, 21 nt, Artificial Sequence
  Synthetic oligonucleotide: Ptpn6-5361
cagugccauuggccuggcagg

SEQ ID NO: 25512 - RNA, 22 nt, Artificial Sequence
  Synthetic oligonucleotide: Ptpn6-5362
gcagugccauuggccuggcagg

SEQ ID NO: 25513 - RNA, 23 nt, Artificial Sequence
  Synthetic oligonucleotide: Ptpn6-5363
ugcagugccauuggccuggcagg

SEQ ID NO: 25514 - RNA, 24 nt, Artificial Sequence
  Synthetic oligonucleotide: Ptpn6-5364
cugcagugccauuggccuggcagg

SEQ ID NO: 25515 - RNA, 18 nt, Artificial Sequence
  Synthetic oligonucleotide: Ptpn6-5365
ggucccucagcgcccugg

SEQ ID NO: 25516 - RNA, 19 nt, Artificial Sequence
  Synthetic oligonucleotide: Ptpn6-5366
gggucccucagcgcccugg

SEQ ID NO: 25517 - RNA, 20 nt, Artificial Sequence
  Synthetic oligonucleotide: Ptpn6-2227
ugggucccucagcgcccugg

SEQ ID NO: 25518 - RNA, 21 nt, Artificial Sequence
  Synthetic oligonucleotide: Ptpn6-5367
gugggucccucagcgcccugg

SEQ ID NO: 25519 - RNA, 22 nt, Artificial Sequence
  Synthetic oligonucleotide: Ptpn6-5368
agugggucccucagcgcccugg

SEQ ID NO: 25520 - RNA, 23 nt, Artificial Sequence
  Synthetic oligonucleotide: Ptpn6-5369
gagugggucccucagcgcccugg

SEQ ID NO: 25521 - RNA, 24 nt, Artificial Sequence
  Synthetic oligonucleotide: Ptpn6-5370
ggagugggucccucagcgcccugg

SEQ ID NO: 25522 - RNA, 18 nt, Artificial Sequence
  Synthetic oligonucleotide: Ptpn6-5371
gaggagcaugagugagcc

SEQ ID NO: 25523 - RNA, 19 nt, Artificial Sequence
  Synthetic oligonucleotide: Ptpn6-5372
agaggagcaugagugagcc

SEQ ID NO: 25524 - RNA, 20 nt, Artificial Sequence
  Synthetic oligonucleotide: Ptpn6-1237
cagaggagcaugagugagcc

SEQ ID NO: 25525 - RNA, 18 nt, Artificial Sequence
  Synthetic oligonucleotide: Ptpn6-5373
ucccugcagccccaaagc

SEQ ID NO: 25526 - RNA, 19 nt, Artificial Sequence
  Synthetic oligonucleotide: Ptpn6-5374
uucccugcagccccaaagc

SEQ ID NO: 25527 - RNA, 20 nt, Artificial Sequence
  Synthetic oligonucleotide: Ptpn6-1242
cuucccugcagccccaaagc

SEQ ID NO: 25528 - RNA, 18 nt, Artificial Sequence
  Synthetic oligonucleotide: Ptpn6-5375
aagagggggcagaggagc

SEQ ID NO: 25529 - RNA, 19 nt, Artificial Sequence
  Synthetic oligonucleotide: Ptpn6-5376
aaagagggggcagaggagc

SEQ ID NO: 25530 - RNA, 20 nt, Artificial Sequence
  Synthetic oligonucleotide: Ptpn6-1835
uaaagagggggcagaggagc

SEQ ID NO: 25531 - RNA, 18 nt, Artificial Sequence
  Synthetic oligonucleotide: Ptpn6-5377
uagggaggagcuguucag

SEQ ID NO: 25532 - RNA, 19 nt, Artificial Sequence
  Synthetic oligonucleotide: Ptpn6-5378
auagggaggagcuguucag

SEQ ID NO: 25533 - RNA, 20 nt, Artificial Sequence
  Synthetic oligonucleotide: Ptpn6-1536
cauagggaggagcuguucag

SEQ ID NO: 25534 - RNA, 18 nt, Artificial Sequence
  Synthetic oligonucleotide: Ptpn6-5379
aaggggaggagccucagg

SEQ ID NO: 25535 - RNA, 19 nt, Artificial Sequence
  Synthetic oligonucleotide: Ptpn6-5380
gaaggggaggagccucagg

SEQ ID NO: 25536 - RNA, 20 nt, Artificial Sequence
  Synthetic oligonucleotide: Ptpn6-2278
ggaaggggaggagccucagg

SEQ ID NO: 25537 - RNA, 21 nt, Artificial Sequence
  Synthetic oligonucleotide: Ptpn6-5381
gggaaggggaggagccucagg

SEQ ID NO: 25538 - RNA, 22 nt, Artificial Sequence
  Synthetic oligonucleotide: Ptpn6-5382
ggggaaggggaggagccucagg

SEQ ID NO: 25539 - RNA, 23 nt, Artificial Sequence
  Synthetic oligonucleotide: Ptpn6-5383
gggggaaggggaggagccucagg

SEQ ID NO: 25540 - RNA, 24 nt, Artificial Sequence
  Synthetic oligonucleotide: Ptpn6-5384
cgggggaaggggaggagccucagg

SEQ ID NO: 25541 - RNA, 18 nt, Artificial Sequence
  Synthetic oligonucleotide: Ptpn6-5385
cucaagcugacagagcgg

SEQ ID NO: 25542 - RNA, 19 nt, Artificial Sequence
  Synthetic oligonucleotide: Ptpn6-5386
gcucaagcugacagagcgg

SEQ ID NO: 25543 - RNA, 20 nt, Artificial Sequence
  Synthetic oligonucleotide: Ptpn6-1188
agcucaagcugacagagcgg

SEQ ID NO: 25544 - RNA, 18 nt, Artificial Sequence
  Synthetic oligonucleotide: Ptpn6-5387
uaggguuaggcccugggg

SEQ ID NO: 25545 - RNA, 19 nt, Artificial Sequence
  Synthetic oligonucleotide: Ptpn6-5388
guaggguuaggcccugggg

SEQ ID NO: 25546 - RNA, 20 nt, Artificial Sequence
  Synthetic oligonucleotide: Ptpn6-2280
gguaggguuaggcccugggg

SEQ ID NO: 25547 - RNA, 21 nt, Artificial Sequence
  Synthetic oligonucleotide: Ptpn6-5389
agguaggguuaggcccugggg

SEQ ID NO: 25548 - RNA, 22 nt, Artificial Sequence
  Synthetic oligonucleotide: Ptpn6-5390
cagguaggguuaggcccugggg

SEQ ID NO: 25549 - RNA, 23 nt, Artificial Sequence
  Synthetic oligonucleotide: Ptpn6-5391
ucagguaggguuaggcccugggg

SEQ ID NO: 25550 - RNA, 24 nt, Artificial Sequence
  Synthetic oligonucleotide: Ptpn6-5392
cucagguaggguuaggcccugggg

SEQ ID NO: 25551 - RNA, 18 nt, Artificial Sequence
  Synthetic oligonucleotide: Ptpn6-5393
ggugggugggccugcaca

SEQ ID NO: 25552 - RNA, 19 nt, Artificial Sequence
  Synthetic oligonucleotide: Ptpn6-5394
gggugggugggccugcaca

SEQ ID NO: 25553 - RNA, 20 nt, Artificial Sequence
  Synthetic oligonucleotide: Ptpn6-5285
ugggugggugggccugcaca

SEQ ID NO: 25554 - RNA, 21 nt, Artificial Sequence
  Synthetic oligonucleotide: Ptpn6-5395
cugggugggugggccugcaca

SEQ ID NO: 25555 - RNA, 22 nt, Artificial Sequence
  Synthetic oligonucleotide: Ptpn6-5396
ccugggugggugggccugcaca

SEQ ID NO: 25556 - RNA, 23 nt, Artificial Sequence
  Synthetic oligonucleotide: Ptpn6-5397
cccugggugggugggccugcaca

SEQ ID NO: 25557 - RNA, 24 nt, Artificial Sequence
  Synthetic oligonucleotide: Ptpn6-5398
gcccugggugggugggccugcaca

SEQ ID NO: 25558 - RNA, 18 nt, Artificial Sequence
  Synthetic oligonucleotide: Ptpn6-5399
gcagguugagaggcugga

SEQ ID NO: 25559 - RNA, 19 nt, Artificial Sequence
  Synthetic oligonucleotide: Ptpn6-5400
ggcagguugagaggcugga

SEQ ID NO: 25560 - RNA, 20 nt, Artificial Sequence
  Synthetic oligonucleotide: Ptpn6-2238
gggcagguugagaggcugga

SEQ ID NO: 25561 - RNA, 18 nt, Artificial Sequence
  Synthetic oligonucleotide: Ptpn6-5401
ugcuuaggaccugucccc

SEQ ID NO: 25562 - RNA, 19 nt, Artificial Sequence
  Synthetic oligonucleotide: Ptpn6-5402
cugcuuaggaccugucccc

SEQ ID NO: 25563 - RNA, 20 nt, Artificial Sequence
  Synthetic oligonucleotide: Ptpn6-1711
ccugcuuaggaccugucccc

SEQ ID NO: 25564 - RNA, 18 nt, Artificial Sequence
  Synthetic oligonucleotide: Ptpn6-2889
acagagagaugcuguccc

SEQ ID NO: 25565 - RNA, 19 nt, Artificial Sequence
  Synthetic oligonucleotide: Ptpn6-2890
uacagagagaugcuguccc

SEQ ID NO: 25566 - RNA, 20 nt, Artificial Sequence
  Synthetic oligonucleotide: Ptpn6-1690
cuacagagagaugcuguccc

SEQ ID NO: 25567 - RNA, 18 nt, Artificial Sequence
  Synthetic oligonucleotide: Ptpn6-5403
ugguugcucuuccucagc

SEQ ID NO: 25568 - RNA, 19 nt, Artificial Sequence
  Synthetic oligonucleotide: Ptpn6-5404
uugguugcucuuccucagc

SEQ ID NO: 25569 - RNA, 20 nt, Artificial Sequence
  Synthetic oligonucleotide: Ptpn6-1662
auugguugcucuuccucagc

SEQ ID NO: 25570 - RNA, 18 nt, Artificial Sequence
  Synthetic oligonucleotide: Ptpn6-5405
cggggcagguugagaggc

SEQ ID NO: 25571 - RNA, 19 nt, Artificial Sequence
  Synthetic oligonucleotide: Ptpn6-5406
ccggggcagguugagaggc

SEQ ID NO: 25572 - RNA, 20 nt, Artificial Sequence
  Synthetic oligonucleotide: Ptpn6-1403
cccggggcagguugagaggc

SEQ ID NO: 25573 - RNA, 21 nt, Artificial Sequence
  Synthetic oligonucleotide: Ptpn6-5407
ccccggggcagguugagaggc

SEQ ID NO: 25574 - RNA, 22 nt, Artificial Sequence
  Synthetic oligonucleotide: Ptpn6-5408
cccccggggcagguugagaggc

SEQ ID NO: 25575 - RNA, 23 nt, Artificial Sequence
  Synthetic oligonucleotide: Ptpn6-5409
ucccccggggcagguugagaggc

SEQ ID NO: 25576 - RNA, 24 nt, Artificial Sequence
  Synthetic oligonucleotide: Ptpn6-5410
uucccccggggcagguugagaggc

SEQ ID NO: 25577 - RNA, 18 nt, Artificial Sequence
  Synthetic oligonucleotide: Ptpn6-5411
ugccauuggccuggcagg

SEQ ID NO: 25578 - RNA, 19 nt, Artificial Sequence
  Synthetic oligonucleotide: Ptpn6-5412
gugccauuggccuggcagg

SEQ ID NO: 25579 - RNA, 20 nt, Artificial Sequence
  Synthetic oligonucleotide: Ptpn6-1680
agugccauuggccuggcagg

SEQ ID NO: 25580 - RNA, 18 nt, Artificial Sequence
  Synthetic oligonucleotide: Ptpn6-2908
guaagucccgggcaccau

SEQ ID NO: 25581 - RNA, 19 nt, Artificial Sequence
  Synthetic oligonucleotide: Ptpn6-2909
gguaagucccgggcaccau

SEQ ID NO: 25582 - RNA, 20 nt, Artificial Sequence
  Synthetic oligonucleotide: Ptpn6-954
ggguaagucccgggcaccau

SEQ ID NO: 25583 - RNA, 21 nt, Artificial Sequence
  Synthetic oligonucleotide: Ptpn6-2910
uggguaagucccgggcaccau

SEQ ID NO: 25584 - RNA, 22 nt, Artificial Sequence
  Synthetic oligonucleotide: Ptpn6-2911
guggguaagucccgggcaccau

SEQ ID NO: 25585 - RNA, 23 nt, Artificial Sequence
  Synthetic oligonucleotide: Ptpn6-2912
cguggguaagucccgggcaccau

SEQ ID NO: 25586 - RNA, 24 nt, Artificial Sequence
  Synthetic oligonucleotide: Ptpn6-2913
ccguggguaagucccgggcaccau

SEQ ID NO: 25587 - RNA, 18 nt, Artificial Sequence
  Synthetic oligonucleotide: Ptpn6-5413
cugaggaacugggcuguu

SEQ ID NO: 25588 - RNA, 19 nt, Artificial Sequence
  Synthetic oligonucleotide: Ptpn6-5414
ucugaggaacugggcuguu

SEQ ID NO: 25589 - RNA, 20 nt, Artificial Sequence
  Synthetic oligonucleotide: Ptpn6-1165
cucugaggaacugggcuguu

SEQ ID NO: 25590 - RNA, 21 nt, Artificial Sequence
  Synthetic oligonucleotide: Ptpn6-5415
ucucugaggaacugggcuguu

SEQ ID NO: 25591 - RNA, 22 nt, Artificial Sequence
  Synthetic oligonucleotide: Ptpn6-5416
uucucugaggaacugggcuguu

SEQ ID NO: 25592 - RNA, 23 nt, Artificial Sequence
  Synthetic oligonucleotide: Ptpn6-5417
cuucucugaggaacugggcuguu

SEQ ID NO: 25593 - RNA, 24 nt, Artificial Sequence
  Synthetic oligonucleotide: Ptpn6-5418
ccuucucugaggaacugggcuguu

SEQ ID NO: 25594 - RNA, 18 nt, Artificial Sequence
  Synthetic oligonucleotide: Ptpn6-5419
cuucccugcagccccaaa

SEQ ID NO: 25595 - RNA, 19 nt, Artificial Sequence
  Synthetic oligonucleotide: Ptpn6-5420
gcuucccugcagccccaaa

SEQ ID NO: 25596 - RNA, 20 nt, Artificial Sequence
  Synthetic oligonucleotide: Ptpn6-1894
agcuucccugcagccccaaa

SEQ ID NO: 25597 - RNA, 21 nt, Artificial Sequence
  Synthetic oligonucleotide: Ptpn6-5421
cagcuucccugcagccccaaa

SEQ ID NO: 25598 - RNA, 22 nt, Artificial Sequence
  Synthetic oligonucleotide: Ptpn6-5422
ccagcuucccugcagccccaaa

SEQ ID NO: 25599 - RNA, 23 nt, Artificial Sequence
  Synthetic oligonucleotide: Ptpn6-5423
gccagcuucccugcagccccaaa

SEQ ID NO: 25600 - RNA, 24 nt, Artificial Sequence
  Synthetic oligonucleotide: Ptpn6-5424
ggccagcuucccugcagccccaaa

SEQ ID NO: 25601 - RNA, 18 nt, Artificial Sequence
  Synthetic oligonucleotide: Ptpn6-5425
ccaggggaaaauguuaaa

SEQ ID NO: 25602 - RNA, 19 nt, Artificial Sequence
  Synthetic oligonucleotide: Ptpn6-5426
uccaggggaaaauguuaaa

SEQ ID NO: 25603 - RNA, 20 nt, Artificial Sequence
  Synthetic oligonucleotide: Ptpn6-1829
guccaggggaaaauguuaaa

SEQ ID NO: 25604 - RNA, 21 nt, Artificial Sequence
  Synthetic oligonucleotide: Ptpn6-5427
uguccaggggaaaauguuaaa

SEQ ID NO: 25605 - RNA, 22 nt, Artificial Sequence
  Synthetic oligonucleotide: Ptpn6-5428
uuguccaggggaaaauguuaaa

SEQ ID NO: 25606 - RNA, 23 nt, Artificial Sequence
  Synthetic oligonucleotide: Ptpn6-5429
cuuguccaggggaaaauguuaaa

SEQ ID NO: 25607 - RNA, 24 nt, Artificial Sequence
  Synthetic oligonucleotide: Ptpn6-5430
acuuguccaggggaaaauguuaaa

SEQ ID NO: 25608 - RNA, 18 nt, Artificial Sequence
  Synthetic oligonucleotide: Ptpn6-5431
cugaggaagagcaaccaa

SEQ ID NO: 25609 - RNA, 19 nt, Artificial Sequence
  Synthetic oligonucleotide: Ptpn6-5432
gcugaggaagagcaaccaa

SEQ ID NO: 25610 - RNA, 20 nt, Artificial Sequence
  Synthetic oligonucleotide: Ptpn6-1039
ggcugaggaagagcaaccaa

SEQ ID NO: 25611 - RNA, 21 nt, Artificial Sequence
  Synthetic oligonucleotide: Ptpn6-5433
uggcugaggaagagcaaccaa

SEQ ID NO: 25612 - RNA, 22 nt, Artificial Sequence
  Synthetic oligonucleotide: Ptpn6-5434
cuggcugaggaagagcaaccaa

SEQ ID NO: 25613 - RNA, 23 nt, Artificial Sequence
  Synthetic oligonucleotide: Ptpn6-5435
ccuggcugaggaagagcaaccaa

SEQ ID NO: 25614 - RNA, 24 nt, Artificial Sequence
  Synthetic oligonucleotide: Ptpn6-5436
cccuggcugaggaagagcaaccaa

SEQ ID NO: 25615 - RNA, 18 nt, Artificial Sequence
  Synthetic oligonucleotide: Ptpn6-5437
cuggaaguagaaaugcaa

SEQ ID NO: 25616 - RNA, 19 nt, Artificial Sequence
  Synthetic oligonucleotide: Ptpn6-5438
gcuggaaguagaaaugcaa

SEQ ID NO: 25617 - RNA, 20 nt, Artificial Sequence
  Synthetic oligonucleotide: Ptpn6-1054
ggcuggaaguagaaaugcaa

SEQ ID NO: 25618 - RNA, 21 nt, Artificial Sequence
  Synthetic oligonucleotide: Ptpn6-5439
aggcuggaaguagaaaugcaa

SEQ ID NO: 25619 - RNA, 22 nt, Artificial Sequence
  Synthetic oligonucleotide: Ptpn6-5440
gaggcuggaaguagaaaugcaa

SEQ ID NO: 25620 - RNA, 23 nt, Artificial Sequence
  Synthetic oligonucleotide: Ptpn6-5441
agaggcuggaaguagaaaugcaa

SEQ ID NO: 25621 - RNA, 24 nt, Artificial Sequence
  Synthetic oligonucleotide: Ptpn6-5442
cagaggcuggaaguagaaaugcaa

SEQ ID NO: 25622 - RNA, 18 nt, Artificial Sequence
  Synthetic oligonucleotide: Ptpn6-5443
acuaauagucuccaggaa

SEQ ID NO: 25623 - RNA, 19 nt, Artificial Sequence
  Synthetic oligonucleotide: Ptpn6-5444
gacuaauagucuccaggaa

SEQ ID NO: 25624 - RNA, 20 nt, Artificial Sequence
  Synthetic oligonucleotide: Ptpn6-1888
ggacuaauagucuccaggaa

SEQ ID NO: 25625 - RNA, 21 nt, Artificial Sequence
  Synthetic oligonucleotide: Ptpn6-5445
uggacuaauagucuccaggaa

SEQ ID NO: 25626 - RNA, 22 nt, Artificial Sequence
  Synthetic oligonucleotide: Ptpn6-5446
cuggacuaauagucuccaggaa

SEQ ID NO: 25627 - RNA, 23 nt, Artificial Sequence
  Synthetic oligonucleotide: Ptpn6-5447
ccuggacuaauagucuccaggaa

SEQ ID NO: 25628 - RNA, 24 nt, Artificial Sequence
  Synthetic oligonucleotide: Ptpn6-5448
cccuggacuaauagucuccaggaa

SEQ ID NO: 25629 - RNA, 18 nt, Artificial Sequence
  Synthetic oligonucleotide: Ptpn6-5449
ccucacaccuugcgggaa

SEQ ID NO: 25630 - RNA, 19 nt, Artificial Sequence
  Synthetic oligonucleotide: Ptpn6-5450
uccucacaccuugcgggaa

SEQ ID NO: 25631 - RNA, 20 nt, Artificial Sequence
  Synthetic oligonucleotide: Ptpn6-962
guccucacaccuugcgggaa

SEQ ID NO: 25632 - RNA, 21 nt, Artificial Sequence
  Synthetic oligonucleotide: Ptpn6-5451
gguccucacaccuugcgggaa

SEQ ID NO: 25633 - RNA, 22 nt, Artificial Sequence
  Synthetic oligonucleotide: Ptpn6-5452
ggguccucacaccuugcgggaa

SEQ ID NO: 25634 - RNA, 23 nt, Artificial Sequence
  Synthetic oligonucleotide: Ptpn6-5453
gggguccucacaccuugcgggaa

SEQ ID NO: 25635 - RNA, 24 nt, Artificial Sequence
  Synthetic oligonucleotide: Ptpn6-5454
ggggguccucacaccuugcgggaa

SEQ ID NO: 25636 - RNA, 18 nt, Artificial Sequence
  Synthetic oligonucleotide: Ptpn6-5455
caaccugccccgggggaa

SEQ ID NO: 25637 - RNA, 19 nt, Artificial Sequence
  Synthetic oligonucleotide: Ptpn6-5456
ucaaccugccccgggggaa

SEQ ID NO: 25638 - RNA, 20 nt, Artificial Sequence
  Synthetic oligonucleotide: Ptpn6-1517
cucaaccugccccgggggaa

SEQ ID NO: 25639 - RNA, 21 nt, Artificial Sequence
  Synthetic oligonucleotide: Ptpn6-5457
ucucaaccugccccgggggaa

SEQ ID NO: 25640 - RNA, 22 nt, Artificial Sequence
  Synthetic oligonucleotide: Ptpn6-5458
cucucaaccugccccgggggaa

SEQ ID NO: 25641 - RNA, 23 nt, Artificial Sequence
  Synthetic oligonucleotide: Ptpn6-5459
ccucucaaccugccccgggggaa

SEQ ID NO: 25642 - RNA, 24 nt, Artificial Sequence
  Synthetic oligonucleotide: Ptpn6-5460
gccucucaaccugccccgggggaa

SEQ ID NO: 25643 - RNA, 18 nt, Artificial Sequence
  Synthetic oligonucleotide: Ptpn6-5461
cccucccuccaaaacuaa

SEQ ID NO: 25644 - RNA, 19 nt, Artificial Sequence
  Synthetic oligonucleotide: Ptpn6-5462
ucccucccuccaaaacuaa

SEQ ID NO: 25645 - RNA, 20 nt, Artificial Sequence
  Synthetic oligonucleotide: Ptpn6-1855
cucccucccuccaaaacuaa

SEQ ID NO: 25646 - RNA, 21 nt, Artificial Sequence
  Synthetic oligonucleotide: Ptpn6-5463
ccucccucccuccaaaacuaa

SEQ ID NO: 25647 - RNA, 22 nt, Artificial Sequence
  Synthetic oligonucleotide: Ptpn6-5464
cccucccucccuccaaaacuaa

SEQ ID NO: 25648 - RNA, 23 nt, Artificial Sequence
  Synthetic oligonucleotide: Ptpn6-5465
gcccucccucccuccaaaacuaa

SEQ ID NO: 25649 - RNA, 24 nt, Artificial Sequence
  Synthetic oligonucleotide: Ptpn6-5466
agcccucccucccuccaaaacuaa

SEQ ID NO: 25650 - RNA, 18 nt, Artificial Sequence
  Synthetic oligonucleotide: Ptpn6-5467
cuccguaggcggaaacca

SEQ ID NO: 25651 - RNA, 19 nt, Artificial Sequence
  Synthetic oligonucleotide: Ptpn6-5468
ucuccguaggcggaaacca

SEQ ID NO: 25652 - RNA, 20 nt, Artificial Sequence
  Synthetic oligonucleotide: Ptpn6-1931
cucuccguaggcggaaacca

SEQ ID NO: 25653 - RNA, 21 nt, Artificial Sequence
  Synthetic oligonucleotide: Ptpn6-5469
ccucuccguaggcggaaacca

SEQ ID NO: 25654 - RNA, 22 nt, Artificial Sequence
  Synthetic oligonucleotide: Ptpn6-5470
accucuccguaggcggaaacca

SEQ ID NO: 25655 - RNA, 23 nt, Artificial Sequence
  Synthetic oligonucleotide: Ptpn6-5471
aaccucuccguaggcggaaacca

SEQ ID NO: 25656 - RNA, 24 nt, Artificial Sequence
  Synthetic oligonucleotide: Ptpn6-5472
aaaccucuccguaggcggaaacca

SEQ ID NO: 25657 - RNA, 18 nt, Artificial Sequence
  Synthetic oligonucleotide: Ptpn6-5473
gcugaggaagagcaacca

SEQ ID NO: 25658 - RNA, 19 nt, Artificial Sequence
  Synthetic oligonucleotide: Ptpn6-5474
ggcugaggaagagcaacca

SEQ ID NO: 25659 - RNA, 20 nt, Artificial Sequence
  Synthetic oligonucleotide: Ptpn6-1924
uggcugaggaagagcaacca

SEQ ID NO: 25660 - RNA, 21 nt, Artificial Sequence
  Synthetic oligonucleotide: Ptpn6-5475
cuggcugaggaagagcaacca

SEQ ID NO: 25661 - RNA, 22 nt, Artificial Sequence
  Synthetic oligonucleotide: Ptpn6-5476
ccuggcugaggaagagcaacca

SEQ ID NO: 25662 - RNA, 23 nt, Artificial Sequence
  Synthetic oligonucleotide: Ptpn6-5477
cccuggcugaggaagagcaacca

SEQ ID NO: 25663 - RNA, 24 nt, Artificial Sequence
  Synthetic oligonucleotide: Ptpn6-5478
acccuggcugaggaagagcaacca

SEQ ID NO: 25664 - RNA, 18 nt, Artificial Sequence
  Synthetic oligonucleotide: Ptpn6-5479
uaggcccagccaggacca

SEQ ID NO: 25665 - RNA, 19 nt, Artificial Sequence
  Synthetic oligonucleotide: Ptpn6-5480
uuaggcccagccaggacca

SEQ ID NO: 25666 - RNA, 20 nt, Artificial Sequence
  Synthetic oligonucleotide: Ptpn6-2281
guuaggcccagccaggacca

SEQ ID NO: 25667 - RNA, 21 nt, Artificial Sequence
  Synthetic oligonucleotide: Ptpn6-5481
gguuaggcccagccaggacca

SEQ ID NO: 25668 - RNA, 22 nt, Artificial Sequence
  Synthetic oligonucleotide: Ptpn6-5482
ggguuaggcccagccaggacca

SEQ ID NO: 25669 - RNA, 23 nt, Artificial Sequence
  Synthetic oligonucleotide: Ptpn6-5483
aggguuaggcccagccaggacca

SEQ ID NO: 25670 - RNA, 24 nt, Artificial Sequence
  Synthetic oligonucleotide: Ptpn6-5484
caggguuaggcccagccaggacca

SEQ ID NO: 25671 - RNA, 18 nt, Artificial Sequence
  Synthetic oligonucleotide: Ptpn6-5485
gguguugugagcuaccca

SEQ ID NO: 25672 - RNA, 19 nt, Artificial Sequence
  Synthetic oligonucleotide: Ptpn6-5486
agguguugugagcuaccca

SEQ ID NO: 25673 - RNA, 20 nt, Artificial Sequence
  Synthetic oligonucleotide: Ptpn6-1033
gagguguugugagcuaccca

SEQ ID NO: 25674 - RNA, 21 nt, Artificial Sequence
  Synthetic oligonucleotide: Ptpn6-5487
ugagguguugugagcuaccca

SEQ ID NO: 25675 - RNA, 22 nt, Artificial Sequence
  Synthetic oligonucleotide: Ptpn6-5488
uugagguguugugagcuaccca

SEQ ID NO: 25676 - RNA, 23 nt, Artificial Sequence
  Synthetic oligonucleotide: Ptpn6-5489
uuugagguguugugagcuaccca

SEQ ID NO: 25677 - RNA, 24 nt, Artificial Sequence
  Synthetic oligonucleotide: Ptpn6-5490
guuugagguguugugagcuaccca

SEQ ID NO: 25678 - RNA, 18 nt, Artificial Sequence
  Synthetic oligonucleotide: Ptpn6-2919
gugcccgggacuuaccca

SEQ ID NO: 25679 - RNA, 19 nt, Artificial Sequence
  Synthetic oligonucleotide: Ptpn6-2920
ggugcccgggacuuaccca

SEQ ID NO: 25680 - RNA, 20 nt, Artificial Sequence
  Synthetic oligonucleotide: Ptpn6-995
uggugcccgggacuuaccca

SEQ ID NO: 25681 - RNA, 21 nt, Artificial Sequence
  Synthetic oligonucleotide: Ptpn6-2921
auggugcccgggacuuaccca

SEQ ID NO: 25682 - RNA, 22 nt, Artificial Sequence
  Synthetic oligonucleotide: Ptpn6-2922
gauggugcccgggacuuaccca

SEQ ID NO: 25683 - RNA, 23 nt, Artificial Sequence
  Synthetic oligonucleotide: Ptpn6-2923
cgauggugcccgggacuuaccca

SEQ ID NO: 25684 - RNA, 24 nt, Artificial Sequence
  Synthetic oligonucleotide: Ptpn6-2924
ccgauggugcccgggacuuaccca

SEQ ID NO: 25685 - RNA, 18 nt, Artificial Sequence
  Synthetic oligonucleotide: Ptpn6-5491
cagauacacacuugucca

SEQ ID NO: 25686 - RNA, 19 nt, Artificial Sequence
  Synthetic oligonucleotide: Ptpn6-5492
acagauacacacuugucca

SEQ ID NO: 25687 - RNA, 20 nt, Artificial Sequence
  Synthetic oligonucleotide: Ptpn6-1210
aacagauacacacuugucca

SEQ ID NO: 25688 - RNA, 21 nt, Artificial Sequence
  Synthetic oligonucleotide: Ptpn6-5493
gaacagauacacacuugucca

SEQ ID NO: 25689 - RNA, 22 nt, Artificial Sequence
  Synthetic oligonucleotide: Ptpn6-5494
agaacagauacacacuugucca

SEQ ID NO: 25690 - RNA, 23 nt, Artificial Sequence
  Synthetic oligonucleotide: Ptpn6-5495
gagaacagauacacacuugucca

SEQ ID NO: 25691 - RNA, 24 nt, Artificial Sequence
  Synthetic oligonucleotide: Ptpn6-5496
agagaacagauacacacuugucca

SEQ ID NO: 25692 - RNA, 18 nt, Artificial Sequence
  Synthetic oligonucleotide: Ptpn6-5497
ccacggcagagggccgca

SEQ ID NO: 25693 - RNA, 19 nt, Artificial Sequence
  Synthetic oligonucleotide: Ptpn6-5498
gccacggcagagggccgca

SEQ ID NO: 25694 - RNA, 20 nt, Artificial Sequence
  Synthetic oligonucleotide: Ptpn6-1216
agccacggcagagggccgca

SEQ ID NO: 25695 - RNA, 21 nt, Artificial Sequence
  Synthetic oligonucleotide: Ptpn6-5499
aagccacggcagagggccgca

SEQ ID NO: 25696 - RNA, 22 nt, Artificial Sequence
  Synthetic oligonucleotide: Ptpn6-5500
gaagccacggcagagggccgca

SEQ ID NO: 25697 - RNA, 23 nt, Artificial Sequence
  Synthetic oligonucleotide: Ptpn6-5501
ggaagccacggcagagggccgca

SEQ ID NO: 25698 - RNA, 24 nt, Artificial Sequence
  Synthetic oligonucleotide: Ptpn6-5502
gggaagccacggcagagggccgca

SEQ ID NO: 25699 - RNA, 18 nt, Artificial Sequence
  Synthetic oligonucleotide: Ptpn6-5503
gagggggaagccacggca

SEQ ID NO: 25700 - RNA, 19 nt, Artificial Sequence
  Synthetic oligonucleotide: Ptpn6-5504
ggagggggaagccacggca

SEQ ID NO: 25701 - RNA, 20 nt, Artificial Sequence
  Synthetic oligonucleotide: Ptpn6-1872
gggagggggaagccacggca

SEQ ID NO: 25702 - RNA, 21 nt, Artificial Sequence
  Synthetic oligonucleotide: Ptpn6-5505
agggagggggaagccacggca

SEQ ID NO: 25703 - RNA, 22 nt, Artificial Sequence
  Synthetic oligonucleotide: Ptpn6-5506
uagggagggggaagccacggca

SEQ ID NO: 25704 - RNA, 23 nt, Artificial Sequence
  Synthetic oligonucleotide: Ptpn6-5507
guagggagggggaagccacggca

SEQ ID NO: 25705 - RNA, 24 nt, Artificial Sequence
  Synthetic oligonucleotide: Ptpn6-5508
uguagggagggggaagccacggca

SEQ ID NO: 25706 - RNA, 18 nt, Artificial Sequence
  Synthetic oligonucleotide: Ptpn6-5509
aauguuaaagagggggca

SEQ ID NO: 25707 - RNA, 19 nt, Artificial Sequence
  Synthetic oligonucleotide: Ptpn6-5510
aaauguuaaagagggggca

SEQ ID NO: 25708 - RNA, 20 nt, Artificial Sequence
  Synthetic oligonucleotide: Ptpn6-1833
aaaauguuaaagagggggca

SEQ ID NO: 25709 - RNA, 21 nt, Artificial Sequence
  Synthetic oligonucleotide: Ptpn6-5511
gaaaauguuaaagagggggca

SEQ ID NO: 25710 - RNA, 22 nt, Artificial Sequence
  Synthetic oligonucleotide: Ptpn6-5512
ggaaaauguuaaagagggggca

SEQ ID NO: 25711 - RNA, 23 nt, Artificial Sequence
  Synthetic oligonucleotide: Ptpn6-5513
gggaaaauguuaaagagggggca

SEQ ID NO: 25712 - RNA, 24 nt, Artificial Sequence
  Synthetic oligonucleotide: Ptpn6-5514
ggggaaaauguuaaagagggggca

SEQ ID NO: 25713 - RNA, 18 nt, Artificial Sequence
  Synthetic oligonucleotide: Ptpn6-5515
gcuggaaguagaaaugca

SEQ ID NO: 25714 - RNA, 19 nt, Artificial Sequence
  Synthetic oligonucleotide: Ptpn6-5516
ggcuggaaguagaaaugca

SEQ ID NO: 25715 - RNA, 20 nt, Artificial Sequence
  Synthetic oligonucleotide: Ptpn6-1820
aggcuggaaguagaaaugca

SEQ ID NO: 25716 - RNA, 21 nt, Artificial Sequence
  Synthetic oligonucleotide: Ptpn6-5517
gaggcuggaaguagaaaugca

SEQ ID NO: 25717 - RNA, 22 nt, Artificial Sequence
  Synthetic oligonucleotide: Ptpn6-5518
agaggcuggaaguagaaaugca

SEQ ID NO: 25718 - RNA, 23 nt, Artificial Sequence
  Synthetic oligonucleotide: Ptpn6-5519
cagaggcuggaaguagaaaugca

SEQ ID NO: 25719 - RNA, 24 nt, Artificial Sequence
  Synthetic oligonucleotide: Ptpn6-5520
ccagaggcuggaaguagaaaugca

SEQ ID NO: 25720 - RNA, 18 nt, Artificial Sequence
  Synthetic oligonucleotide: Ptpn6-5521
uaacagcccaguuccuca

SEQ ID NO: 25721 - RNA, 19 nt, Artificial Sequence
  Synthetic oligonucleotide: Ptpn6-5522
cuaacagcccaguuccuca

SEQ ID NO: 25722 - RNA, 20 nt, Artificial Sequence
  Synthetic oligonucleotide: Ptpn6-1935
ccuaacagcccaguuccuca

SEQ ID NO: 25723 - RNA, 21 nt, Artificial Sequence
  Synthetic oligonucleotide: Ptpn6-5523
cccuaacagcccaguuccuca

SEQ ID NO: 25724 - RNA, 22 nt, Artificial Sequence
  Synthetic oligonucleotide: Ptpn6-5524
ucccuaacagcccaguuccuca

SEQ ID NO: 25725 - RNA, 23 nt, Artificial Sequence
  Synthetic oligonucleotide: Ptpn6-5525
aucccuaacagcccaguuccuca

SEQ ID NO: 25726 - RNA, 24 nt, Artificial Sequence
  Synthetic oligonucleotide: Ptpn6-5526
aaucccuaacagcccaguuccuca

SEQ ID NO: 25727 - RNA, 18 nt, Artificial Sequence
  Synthetic oligonucleotide: Ptpn6-5527
gcgggaaggggaaguuca

SEQ ID NO: 25728 - RNA, 19 nt, Artificial Sequence
  Synthetic oligonucleotide: Ptpn6-5528
ugcgggaaggggaaguuca

SEQ ID NO: 25729 - RNA, 20 nt, Artificial Sequence
  Synthetic oligonucleotide: Ptpn6-1847
uugcgggaaggggaaguuca

SEQ ID NO: 25730 - RNA, 21 nt, Artificial Sequence
  Synthetic oligonucleotide: Ptpn6-5529
cuugcgggaaggggaaguuca

SEQ ID NO: 25731 - RNA, 22 nt, Artificial Sequence
  Synthetic oligonucleotide: Ptpn6-5530
ccuugcgggaaggggaaguuca

SEQ ID NO: 25732 - RNA, 23 nt, Artificial Sequence
  Synthetic oligonucleotide: Ptpn6-5531
accuugcgggaaggggaaguuca

SEQ ID NO: 25733 - RNA, 24 nt, Artificial Sequence
  Synthetic oligonucleotide: Ptpn6-5532
caccuugcgggaaggggaaguuca

SEQ ID NO: 25734 - RNA, 18 nt, Artificial Sequence
  Synthetic oligonucleotide: Ptpn6-5533
auagggaggagcuguuca

SEQ ID NO: 25735 - RNA, 19 nt, Artificial Sequence
  Synthetic oligonucleotide: Ptpn6-5534
cauagggaggagcuguuca

SEQ ID NO: 25736 - RNA, 20 nt, Artificial Sequence
  Synthetic oligonucleotide: Ptpn6-1535
ccauagggaggagcuguuca

SEQ ID NO: 25737 - RNA, 21 nt, Artificial Sequence
  Synthetic oligonucleotide: Ptpn6-5535
accauagggaggagcuguuca

SEQ ID NO: 25738 - RNA, 22 nt, Artificial Sequence
  Synthetic oligonucleotide: Ptpn6-5536
gaccauagggaggagcuguuca

SEQ ID NO: 25739 - RNA, 23 nt, Artificial Sequence
  Synthetic oligonucleotide: Ptpn6-5537
ggaccauagggaggagcuguuca

SEQ ID NO: 25740 - RNA, 24 nt, Artificial Sequence
  Synthetic oligonucleotide: Ptpn6-5538
aggaccauagggaggagcuguuca

SEQ ID NO: 25741 - RNA, 18 nt, Artificial Sequence
  Synthetic oligonucleotide: Ptpn6-5539
aggggaaaauguuaaaga

SEQ ID NO: 25742 - RNA, 19 nt, Artificial Sequence
  Synthetic oligonucleotide: Ptpn6-5540
caggggaaaauguuaaaga

SEQ ID NO: 25743 - RNA, 20 nt, Artificial Sequence
  Synthetic oligonucleotide: Ptpn6-1227
ccaggggaaaauguuaaaga

SEQ ID NO: 25744 - RNA, 21 nt, Artificial Sequence
  Synthetic oligonucleotide: Ptpn6-5541
uccaggggaaaauguuaaaga

SEQ ID NO: 25745 - RNA, 22 nt, Artificial Sequence
  Synthetic oligonucleotide: Ptpn6-5542
guccaggggaaaauguuaaaga

SEQ ID NO: 25746 - RNA, 23 nt, Artificial Sequence
  Synthetic oligonucleotide: Ptpn6-5543
uguccaggggaaaauguuaaaga

SEQ ID NO: 25747 - RNA, 24 nt, Artificial Sequence
  Synthetic oligonucleotide: Ptpn6-5544
uuguccaggggaaaauguuaaaga

SEQ ID NO: 25748 - RNA, 18 nt, Artificial Sequence
  Synthetic oligonucleotide: Ptpn6-5545
agcccaguuccucagaga

SEQ ID NO: 25749 - RNA, 19 nt, Artificial Sequence
  Synthetic oligonucleotide: Ptpn6-5546
cagcccaguuccucagaga

SEQ ID NO: 25750 - RNA, 20 nt, Artificial Sequence
  Synthetic oligonucleotide: Ptpn6-1230
acagcccaguuccucagaga

SEQ ID NO: 25751 - RNA, 21 nt, Artificial Sequence
  Synthetic oligonucleotide: Ptpn6-5547
aacagcccaguuccucagaga

SEQ ID NO: 25752 - RNA, 22 nt, Artificial Sequence
  Synthetic oligonucleotide: Ptpn6-5548
uaacagcccaguuccucagaga

SEQ ID NO: 25753 - RNA, 23 nt, Artificial Sequence
  Synthetic oligonucleotide: Ptpn6-5549
cuaacagcccaguuccucagaga

SEQ ID NO: 25754 - RNA, 24 nt, Artificial Sequence
  Synthetic oligonucleotide: Ptpn6-5550
ccuaacagcccaguuccucagaga

SEQ ID NO: 25755 - RNA, 18 nt, Artificial Sequence
  Synthetic oligonucleotide: Ptpn6-5551
uccaaaacuaacaggaga

SEQ ID NO: 25756 - RNA, 19 nt, Artificial Sequence
  Synthetic oligonucleotide: Ptpn6-5552
cuccaaaacuaacaggaga

SEQ ID NO: 25757 - RNA, 20 nt, Artificial Sequence
  Synthetic oligonucleotide: Ptpn6-1857
ccuccaaaacuaacaggaga

SEQ ID NO: 25758 - RNA, 21 nt, Artificial Sequence
  Synthetic oligonucleotide: Ptpn6-5553
cccuccaaaacuaacaggaga

SEQ ID NO: 25759 - RNA, 22 nt, Artificial Sequence
  Synthetic oligonucleotide: Ptpn6-5554
ucccuccaaaacuaacaggaga

SEQ ID NO: 25760 - RNA, 23 nt, Artificial Sequence
  Synthetic oligonucleotide: Ptpn6-5555
cucccuccaaaacuaacaggaga

SEQ ID NO: 25761 - RNA, 24 nt, Artificial Sequence
  Synthetic oligonucleotide: Ptpn6-5556
ccucccuccaaaacuaacaggaga

SEQ ID NO: 25762 - RNA, 18 nt, Artificial Sequence
  Synthetic oligonucleotide: Ptpn6-5557
acguucacacacgucgga

SEQ ID NO: 25763 - RNA, 19 nt, Artificial Sequence
  Synthetic oligonucleotide: Ptpn6-5558
cacguucacacacgucgga

SEQ ID NO: 25764 - RNA, 20 nt, Artificial Sequence
  Synthetic oligonucleotide: Ptpn6-1854
ucacguucacacacgucgga

SEQ ID NO: 25765 - RNA, 21 nt, Artificial Sequence
  Synthetic oligonucleotide: Ptpn6-5559
cucacguucacacacgucgga

SEQ ID NO: 25766 - RNA, 22 nt, Artificial Sequence
  Synthetic oligonucleotide: Ptpn6-5560
acucacguucacacacgucgga

SEQ ID NO: 25767 - RNA, 23 nt, Artificial Sequence
  Synthetic oligonucleotide: Ptpn6-5561
cacucacguucacacacgucgga

SEQ ID NO: 25768 - RNA, 24 nt, Artificial Sequence
  Synthetic oligonucleotide: Ptpn6-5562
gcacucacguucacacacgucgga

SEQ ID NO: 25769 - RNA, 18 nt, Artificial Sequence
  Synthetic oligonucleotide: Ptpn6-5563
aggggaaguucauaggga

SEQ ID NO: 25770 - RNA, 19 nt, Artificial Sequence
  Synthetic oligonucleotide: Ptpn6-5564
aaggggaaguucauaggga

SEQ ID NO: 25771 - RNA, 20 nt, Artificial Sequence
  Synthetic oligonucleotide: Ptpn6-1849
gaaggggaaguucauaggga

SEQ ID NO: 25772 - RNA, 21 nt, Artificial Sequence
  Synthetic oligonucleotide: Ptpn6-5565
ggaaggggaaguucauaggga

SEQ ID NO: 25773 - RNA, 22 nt, Artificial Sequence
  Synthetic oligonucleotide: Ptpn6-5566
gggaaggggaaguucauaggga

SEQ ID NO: 25774 - RNA, 23 nt, Artificial Sequence
  Synthetic oligonucleotide: Ptpn6-5567
cgggaaggggaaguucauaggga

SEQ ID NO: 25775 - RNA, 24 nt, Artificial Sequence
  Synthetic oligonucleotide: Ptpn6-5568
gcgggaaggggaaguucauaggga

SEQ ID NO: 25776 - RNA, 18 nt, Artificial Sequence
  Synthetic oligonucleotide: Ptpn6-2969
agcaucucucuguaggga

SEQ ID NO: 25777 - RNA, 19 nt, Artificial Sequence
  Synthetic oligonucleotide: Ptpn6-2970
cagcaucucucuguaggga

SEQ ID NO: 25778 - RNA, 20 nt, Artificial Sequence
  Synthetic oligonucleotide: Ptpn6-1215
acagcaucucucuguaggga

SEQ ID NO: 25779 - RNA, 21 nt, Artificial Sequence
  Synthetic oligonucleotide: Ptpn6-2971
gacagcaucucucuguaggga

SEQ ID NO: 25780 - RNA, 22 nt, Artificial Sequence
  Synthetic oligonucleotide: Ptpn6-2972
ggacagcaucucucuguaggga

SEQ ID NO: 25781 - RNA, 23 nt, Artificial Sequence
  Synthetic oligonucleotide: Ptpn6-2973
gggacagcaucucucuguaggga

SEQ ID NO: 25782 - RNA, 24 nt, Artificial Sequence
  Synthetic oligonucleotide: Ptpn6-2974
cgggacagcaucucucuguaggga

SEQ ID NO: 25783 - RNA, 18 nt, Artificial Sequence
  Synthetic oligonucleotide: Ptpn6-5569
ggccgccuucccccggga

SEQ ID NO: 25784 - RNA, 19 nt, Artificial Sequence
  Synthetic oligonucleotide: Ptpn6-5570
gggccgccuucccccggga

SEQ ID NO: 25785 - RNA, 20 nt, Artificial Sequence
  Synthetic oligonucleotide: Ptpn6-1902
agggccgccuucccccggga

SEQ ID NO: 25786 - RNA, 21 nt, Artificial Sequence
  Synthetic oligonucleotide: Ptpn6-5571
cagggccgccuucccccggga

SEQ ID NO: 25787 - RNA, 22 nt, Artificial Sequence
  Synthetic oligonucleotide: Ptpn6-5572
ccagggccgccuucccccggga

SEQ ID NO: 25788 - RNA, 23 nt, Artificial Sequence
  Synthetic oligonucleotide: Ptpn6-5573
uccagggccgccuucccccggga

SEQ ID NO: 25789 - RNA, 24 nt, Artificial Sequence
  Synthetic oligonucleotide: Ptpn6-5574
guccagggccgccuucccccggga

SEQ ID NO: 25790 - RNA, 18 nt, Artificial Sequence
  Synthetic oligonucleotide: Ptpn6-5575
uccucacaccuugcggga

SEQ ID NO: 25791 - RNA, 19 nt, Artificial Sequence
  Synthetic oligonucleotide: Ptpn6-5576
guccucacaccuugcggga

SEQ ID NO: 25792 - RNA, 20 nt, Artificial Sequence
  Synthetic oligonucleotide: Ptpn6-958
gguccucacaccuugcggga

SEQ ID NO: 25793 - RNA, 21 nt, Artificial Sequence
  Synthetic oligonucleotide: Ptpn6-5577
ggguccucacaccuugcggga

SEQ ID NO: 25794 - RNA, 22 nt, Artificial Sequence
  Synthetic oligonucleotide: Ptpn6-5578
gggguccucacaccuugcggga

SEQ ID NO: 25795 - RNA, 23 nt, Artificial Sequence
  Synthetic oligonucleotide: Ptpn6-5579
ggggguccucacaccuugcggga

SEQ ID NO: 25796 - RNA, 24 nt, Artificial Sequence
  Synthetic oligonucleotide: Ptpn6-5580
cggggguccucacaccuugcggga

SEQ ID NO: 25797 - RNA, 18 nt, Artificial Sequence
  Synthetic oligonucleotide: Ptpn6-5581
ucaaccugccccggggga

SEQ ID NO: 25798 - RNA, 19 nt, Artificial Sequence
  Synthetic oligonucleotide: Ptpn6-5582
cucaaccugccccggggga

SEQ ID NO: 25799 - RNA, 20 nt, Artificial Sequence
  Synthetic oligonucleotide: Ptpn6-1516
ucucaaccugccccggggga

SEQ ID NO: 25800 - RNA, 21 nt, Artificial Sequence
  Synthetic oligonucleotide: Ptpn6-5583
cucucaaccugccccggggga

SEQ ID NO: 25801 - RNA, 22 nt, Artificial Sequence
  Synthetic oligonucleotide: Ptpn6-5584
ccucucaaccugccccggggga

SEQ ID NO: 25802 - RNA, 23 nt, Artificial Sequence
  Synthetic oligonucleotide: Ptpn6-5585
gccucucaaccugccccggggga

SEQ ID NO: 25803 - RNA, 24 nt, Artificial Sequence
  Synthetic oligonucleotide: Ptpn6-5586
agccucucaaccugccccggggga

SEQ ID NO: 25804 - RNA, 18 nt, Artificial Sequence
  Synthetic oligonucleotide: Ptpn6-5587
aaguagaaaugcaaugga

SEQ ID NO: 25805 - RNA, 19 nt, Artificial Sequence
  Synthetic oligonucleotide: Ptpn6-5588
gaaguagaaaugcaaugga

SEQ ID NO: 25806 - RNA, 20 nt, Artificial Sequence
  Synthetic oligonucleotide: Ptpn6-1823
ggaaguagaaaugcaaugga

SEQ ID NO: 25807 - RNA, 21 nt, Artificial Sequence
  Synthetic oligonucleotide: Ptpn6-5589
uggaaguagaaaugcaaugga

SEQ ID NO: 25808 - RNA, 22 nt, Artificial Sequence
  Synthetic oligonucleotide: Ptpn6-5590
cuggaaguagaaaugcaaugga

SEQ ID NO: 25809 - RNA, 23 nt, Artificial Sequence
  Synthetic oligonucleotide: Ptpn6-5591
gcuggaaguagaaaugcaaugga

SEQ ID NO: 25810 - RNA, 24 nt, Artificial Sequence
  Synthetic oligonucleotide: Ptpn6-5592
ggcuggaaguagaaaugcaaugga

SEQ ID NO: 25811 - RNA, 18 nt, Artificial Sequence
  Synthetic oligonucleotide: Ptpn6-5593
gggggcagaggagcauga

SEQ ID NO: 25812 - RNA, 19 nt, Artificial Sequence
  Synthetic oligonucleotide: Ptpn6-5594
agggggcagaggagcauga

SEQ ID NO: 25813 - RNA, 20 nt, Artificial Sequence
  Synthetic oligonucleotide: Ptpn6-1836
gagggggcagaggagcauga

SEQ ID NO: 25814 - RNA, 21 nt, Artificial Sequence
  Synthetic oligonucleotide: Ptpn6-5595
agagggggcagaggagcauga

SEQ ID NO: 25815 - RNA, 22 nt, Artificial Sequence
  Synthetic oligonucleotide: Ptpn6-5596
aagagggggcagaggagcauga

SEQ ID NO: 25816 - RNA, 23 nt, Artificial Sequence
  Synthetic oligonucleotide: Ptpn6-5597
aaagagggggcagaggagcauga

SEQ ID NO: 25817 - RNA, 24 nt, Artificial Sequence
  Synthetic oligonucleotide: Ptpn6-5598
uaaagagggggcagaggagcauga

SEQ ID NO: 25818 - RNA, 18 nt, Artificial Sequence
  Synthetic oligonucleotide: Ptpn6-5599
accuggagcucaagcuga

SEQ ID NO: 25819 - RNA, 19 nt, Artificial Sequence
  Synthetic oligonucleotide: Ptpn6-5600
caccuggagcucaagcuga

SEQ ID NO: 25820 - RNA, 20 nt, Artificial Sequence
  Synthetic oligonucleotide: Ptpn6-1910
ccaccuggagcucaagcuga

SEQ ID NO: 25821 - RNA, 21 nt, Artificial Sequence
  Synthetic oligonucleotide: Ptpn6-5601
uccaccuggagcucaagcuga

SEQ ID NO: 25822 - RNA, 22 nt, Artificial Sequence
  Synthetic oligonucleotide: Ptpn6-5602
cuccaccuggagcucaagcuga

SEQ ID NO: 25823 - RNA, 23 nt, Artificial Sequence
  Synthetic oligonucleotide: Ptpn6-5603
gcuccaccuggagcucaagcuga

SEQ ID NO: 25824 - RNA, 24 nt, Artificial Sequence
  Synthetic oligonucleotide: Ptpn6-5604
agcuccaccuggagcucaagcuga

SEQ ID NO: 25825 - RNA, 18 nt, Artificial Sequence
  Synthetic oligonucleotide: Ptpn6-5605
ggcccagccaggaccaua

SEQ ID NO: 25826 - RNA, 19 nt, Artificial Sequence
  Synthetic oligonucleotide: Ptpn6-5606
aggcccagccaggaccaua

SEQ ID NO: 25827 - RNA, 20 nt, Artificial Sequence
  Synthetic oligonucleotide: Ptpn6-1532
uaggcccagccaggaccaua

SEQ ID NO: 25828 - RNA, 21 nt, Artificial Sequence
  Synthetic oligonucleotide: Ptpn6-5607
uuaggcccagccaggaccaua

SEQ ID NO: 25829 - RNA, 22 nt, Artificial Sequence
  Synthetic oligonucleotide: Ptpn6-5608
guuaggcccagccaggaccaua

SEQ ID NO: 25830 - RNA, 23 nt, Artificial Sequence
  Synthetic oligonucleotide: Ptpn6-5609
gguuaggcccagccaggaccaua

SEQ ID NO: 25831 - RNA, 24 nt, Artificial Sequence
  Synthetic oligonucleotide: Ptpn6-5610
ggguuaggcccagccaggaccaua

SEQ ID NO: 25832 - RNA, 18 nt, Artificial Sequence
  Synthetic oligonucleotide: Ptpn6-5611
cggaaaccaaagggccua

SEQ ID NO: 25833 - RNA, 19 nt, Artificial Sequence
  Synthetic oligonucleotide: Ptpn6-5612
gcggaaaccaaagggccua

SEQ ID NO: 25834 - RNA, 20 nt, Artificial Sequence
  Synthetic oligonucleotide: Ptpn6-959
ggcggaaaccaaagggccua

SEQ ID NO: 25835 - RNA, 21 nt, Artificial Sequence
  Synthetic oligonucleotide: Ptpn6-5613
aggcggaaaccaaagggccua

SEQ ID NO: 25836 - RNA, 22 nt, Artificial Sequence
  Synthetic oligonucleotide: Ptpn6-5614
uaggcggaaaccaaagggccua

SEQ ID NO: 25837 - RNA, 23 nt, Artificial Sequence
  Synthetic oligonucleotide: Ptpn6-5615
guaggcggaaaccaaagggccua

SEQ ID NO: 25838 - RNA, 24 nt, Artificial Sequence
  Synthetic oligonucleotide: Ptpn6-5616
cguaggcggaaaccaaagggccua

SEQ ID NO: 25839 - RNA, 18 nt, Artificial Sequence
  Synthetic oligonucleotide: Ptpn6-5617
gcggcgggguauugggua

SEQ ID NO: 25840 - RNA, 19 nt, Artificial Sequence
  Synthetic oligonucleotide: Ptpn6-5618
agcggcgggguauugggua

SEQ ID NO: 25841 - RNA, 20 nt, Artificial Sequence
  Synthetic oligonucleotide: Ptpn6-1041
gagcggcgggguauugggua

SEQ ID NO: 25842 - RNA, 21 nt, Artificial Sequence
  Synthetic oligonucleotide: Ptpn6-5619
agagcggcgggguauugggua

SEQ ID NO: 25843 - RNA, 22 nt, Artificial Sequence
  Synthetic oligonucleotide: Ptpn6-5620
cagagcggcgggguauugggua

SEQ ID NO: 25844 - RNA, 23 nt, Artificial Sequence
  Synthetic oligonucleotide: Ptpn6-5621
acagagcggcgggguauugggua

SEQ ID NO: 25845 - RNA, 24 nt, Artificial Sequence
  Synthetic oligonucleotide: Ptpn6-5622
gacagagcggcgggguauugggua

SEQ ID NO: 25846 - RNA, 18 nt, Artificial Sequence
  Synthetic oligonucleotide: Ptpn6-3002
ggacagcaucucucugua

SEQ ID NO: 25847 - RNA, 19 nt, Artificial Sequence
  Synthetic oligonucleotide: Ptpn6-3003
gggacagcaucucucugua

SEQ ID NO: 25848 - RNA, 20 nt, Artificial Sequence
  Synthetic oligonucleotide: Ptpn6-987
cgggacagcaucucucugua

SEQ ID NO: 25849 - RNA, 21 nt, Artificial Sequence
  Synthetic oligonucleotide: Ptpn6-3004
acgggacagcaucucucugua

SEQ ID NO: 25850 - RNA, 22 nt, Artificial Sequence
  Synthetic oligonucleotide: Ptpn6-3005
cacgggacagcaucucucugua

SEQ ID NO: 25851 - RNA, 23 nt, Artificial Sequence
  Synthetic oligonucleotide: Ptpn6-3006
ccacgggacagcaucucucugua

SEQ ID NO: 25852 - RNA, 24 nt, Artificial Sequence
  Synthetic oligonucleotide: Ptpn6-3007
cccacgggacagcaucucucugua

SEQ ID NO: 25853 - RNA, 18 nt, Artificial Sequence
  Synthetic oligonucleotide: Ptpn6-5623
guccaggggaaaauguua

SEQ ID NO: 25854 - RNA, 19 nt, Artificial Sequence
  Synthetic oligonucleotide: Ptpn6-5624
uguccaggggaaaauguua

SEQ ID NO: 25855 - RNA, 20 nt, Artificial Sequence
  Synthetic oligonucleotide: Ptpn6-1828
uuguccaggggaaaauguua

SEQ ID NO: 25856 - RNA, 21 nt, Artificial Sequence
  Synthetic oligonucleotide: Ptpn6-5625
cuuguccaggggaaaauguua

SEQ ID NO: 25857 - RNA, 22 nt, Artificial Sequence
  Synthetic oligonucleotide: Ptpn6-5626
acuuguccaggggaaaauguua

SEQ ID NO: 25858 - RNA, 23 nt, Artificial Sequence
  Synthetic oligonucleotide: Ptpn6-5627
cacuuguccaggggaaaauguua

SEQ ID NO: 25859 - RNA, 24 nt, Artificial Sequence
  Synthetic oligonucleotide: Ptpn6-5628
acacuuguccaggggaaaauguua

SEQ ID NO: 25860 - RNA, 18 nt, Artificial Sequence
  Synthetic oligonucleotide: Ptpn6-5629
ccucccuccaaaacuaac

SEQ ID NO: 25861 - RNA, 19 nt, Artificial Sequence
  Synthetic oligonucleotide: Ptpn6-5630
cccucccuccaaaacuaac

SEQ ID NO: 25862 - RNA, 20 nt, Artificial Sequence
  Synthetic oligonucleotide: Ptpn6-1208
ucccucccuccaaaacuaac

SEQ ID NO: 25863 - RNA, 21 nt, Artificial Sequence
  Synthetic oligonucleotide: Ptpn6-5631
cucccucccuccaaaacuaac

SEQ ID NO: 25864 - RNA, 22 nt, Artificial Sequence
  Synthetic oligonucleotide: Ptpn6-5632
ccucccucccuccaaaacuaac

SEQ ID NO: 25865 - RNA, 23 nt, Artificial Sequence
  Synthetic oligonucleotide: Ptpn6-5633
cccucccucccuccaaaacuaac

SEQ ID NO: 25866 - RNA, 24 nt, Artificial Sequence
  Synthetic oligonucleotide: Ptpn6-5634
gcccucccucccuccaaaacuaac

SEQ ID NO: 25867 - RNA, 18 nt, Artificial Sequence
  Synthetic oligonucleotide: Ptpn6-5635
cgggagaggaggagccac

SEQ ID NO: 25868 - RNA, 19 nt, Artificial Sequence
  Synthetic oligonucleotide: Ptpn6-5636
ccgggagaggaggagccac

SEQ ID NO: 25869 - RNA, 20 nt, Artificial Sequence
  Synthetic oligonucleotide: Ptpn6-1906
cccgggagaggaggagccac

SEQ ID NO: 25870 - RNA, 21 nt, Artificial Sequence
  Synthetic oligonucleotide: Ptpn6-5637
ccccgggagaggaggagccac

SEQ ID NO: 25871 - RNA, 22 nt, Artificial Sequence
  Synthetic oligonucleotide: Ptpn6-5638
cccccgggagaggaggagccac

SEQ ID NO: 25872 - RNA, 23 nt, Artificial Sequence
  Synthetic oligonucleotide: Ptpn6-5639
ucccccgggagaggaggagccac

SEQ ID NO: 25873 - RNA, 24 nt, Artificial Sequence
  Synthetic oligonucleotide: Ptpn6-5640
uucccccgggagaggaggagccac

SEQ ID NO: 25874 - RNA, 18 nt, Artificial Sequence
  Synthetic oligonucleotide: Ptpn6-5641
agccaccuggagcuccac

SEQ ID NO: 25875 - RNA, 19 nt, Artificial Sequence
  Synthetic oligonucleotide: Ptpn6-5642
gagccaccuggagcuccac

SEQ ID NO: 25876 - RNA, 20 nt, Artificial Sequence
  Synthetic oligonucleotide: Ptpn6-1908
ggagccaccuggagcuccac

SEQ ID NO: 25877 - RNA, 21 nt, Artificial Sequence
  Synthetic oligonucleotide: Ptpn6-5643
aggagccaccuggagcuccac

SEQ ID NO: 25878 - RNA, 22 nt, Artificial Sequence
  Synthetic oligonucleotide: Ptpn6-5644
gaggagccaccuggagcuccac

SEQ ID NO: 25879 - RNA, 23 nt, Artificial Sequence
  Synthetic oligonucleotide: Ptpn6-5645
ggaggagccaccuggagcuccac

SEQ ID NO: 25880 - RNA, 24 nt, Artificial Sequence
  Synthetic oligonucleotide: Ptpn6-5646
aggaggagccaccuggagcuccac

SEQ ID NO: 25881 - RNA, 18 nt, Artificial Sequence
  Synthetic oligonucleotide: Ptpn6-5647
uuggguaggggaacagac

SEQ ID NO: 25882 - RNA, 19 nt, Artificial Sequence
  Synthetic oligonucleotide: Ptpn6-5648
auuggguaggggaacagac

SEQ ID NO: 25883 - RNA, 20 nt, Artificial Sequence
  Synthetic oligonucleotide: Ptpn6-1918
uauuggguaggggaacagac

SEQ ID NO: 25884 - RNA, 21 nt, Artificial Sequence
  Synthetic oligonucleotide: Ptpn6-5649
guauuggguaggggaacagac

SEQ ID NO: 25885 - RNA, 22 nt, Artificial Sequence
  Synthetic oligonucleotide: Ptpn6-5650
gguauuggguaggggaacagac

SEQ ID NO: 25886 - RNA, 23 nt, Artificial Sequence
  Synthetic oligonucleotide: Ptpn6-5651
ggguauuggguaggggaacagac

SEQ ID NO: 25887 - RNA, 24 nt, Artificial Sequence
  Synthetic oligonucleotide: Ptpn6-5652
gggguauuggguaggggaacagac

SEQ ID NO: 25888 - RNA, 18 nt, Artificial Sequence
  Synthetic oligonucleotide: Ptpn6-5653
ccaaaacuaacaggagac

SEQ ID NO: 25889 - RNA, 19 nt, Artificial Sequence
  Synthetic oligonucleotide: Ptpn6-5654
uccaaaacuaacaggagac

SEQ ID NO: 25890 - RNA, 20 nt, Artificial Sequence
  Synthetic oligonucleotide: Ptpn6-1225
cuccaaaacuaacaggagac

SEQ ID NO: 25891 - RNA, 21 nt, Artificial Sequence
  Synthetic oligonucleotide: Ptpn6-5655
ccuccaaaacuaacaggagac

SEQ ID NO: 25892 - RNA, 22 nt, Artificial Sequence
  Synthetic oligonucleotide: Ptpn6-5656
cccuccaaaacuaacaggagac

SEQ ID NO: 25893 - RNA, 23 nt, Artificial Sequence
  Synthetic oligonucleotide: Ptpn6-5657
ucccuccaaaacuaacaggagac

SEQ ID NO: 25894 - RNA, 24 nt, Artificial Sequence
  Synthetic oligonucleotide: Ptpn6-5658
cucccuccaaaacuaacaggagac

SEQ ID NO: 25895 - RNA, 18 nt, Artificial Sequence
  Synthetic oligonucleotide: Ptpn6-5659
ggggaaguucauagggac

SEQ ID NO: 25896 - RNA, 19 nt, Artificial Sequence
  Synthetic oligonucleotide: Ptpn6-5660
aggggaaguucauagggac

SEQ ID NO: 25897 - RNA, 20 nt, Artificial Sequence
  Synthetic oligonucleotide: Ptpn6-1199
aaggggaaguucauagggac

SEQ ID NO: 25898 - RNA, 21 nt, Artificial Sequence
  Synthetic oligonucleotide: Ptpn6-5661
gaaggggaaguucauagggac

SEQ ID NO: 25899 - RNA, 22 nt, Artificial Sequence
  Synthetic oligonucleotide: Ptpn6-5662
ggaaggggaaguucauagggac

SEQ ID NO: 25900 - RNA, 23 nt, Artificial Sequence
  Synthetic oligonucleotide: Ptpn6-5663
gggaaggggaaguucauagggac

SEQ ID NO: 25901 - RNA, 24 nt, Artificial Sequence
  Synthetic oligonucleotide: Ptpn6-5664
cgggaaggggaaguucauagggac

SEQ ID NO: 25902 - RNA, 18 nt, Artificial Sequence
  Synthetic oligonucleotide: Ptpn6-5665
gcacugcagggacaaacc

SEQ ID NO: 25903 - RNA, 19 nt, Artificial Sequence
  Synthetic oligonucleotide: Ptpn6-5666
ggcacugcagggacaaacc

SEQ ID NO: 25904 - RNA, 20 nt, Artificial Sequence
  Synthetic oligonucleotide: Ptpn6-1885
uggcacugcagggacaaacc

SEQ ID NO: 25905 - RNA, 21 nt, Artificial Sequence
  Synthetic oligonucleotide: Ptpn6-5667
auggcacugcagggacaaacc

SEQ ID NO: 25906 - RNA, 22 nt, Artificial Sequence
  Synthetic oligonucleotide: Ptpn6-5668
aauggcacugcagggacaaacc

SEQ ID NO: 25907 - RNA, 23 nt, Artificial Sequence
  Synthetic oligonucleotide: Ptpn6-5669
caauggcacugcagggacaaacc

SEQ ID NO: 25908 - RNA, 24 nt, Artificial Sequence
  Synthetic oligonucleotide: Ptpn6-5670
ccaauggcacugcagggacaaacc

SEQ ID NO: 25909 - RNA, 18 nt, Artificial Sequence
  Synthetic oligonucleotide: Ptpn6-5671
ugugcaggcccacccacc

SEQ ID NO: 25910 - RNA, 19 nt, Artificial Sequence
  Synthetic oligonucleotide: Ptpn6-5672
cugugcaggcccacccacc

SEQ ID NO: 25911 - RNA, 20 nt, Artificial Sequence
  Synthetic oligonucleotide: Ptpn6-5673
ccugugcaggcccacccacc

SEQ ID NO: 25912 - RNA, 21 nt, Artificial Sequence
  Synthetic oligonucleotide: Ptpn6-5674
cccugugcaggcccacccacc

SEQ ID NO: 25913 - RNA, 22 nt, Artificial Sequence
  Synthetic oligonucleotide: Ptpn6-5675
ccccugugcaggcccacccacc

SEQ ID NO: 25914 - RNA, 23 nt, Artificial Sequence
  Synthetic oligonucleotide: Ptpn6-5676
cccccugugcaggcccacccacc

SEQ ID NO: 25915 - RNA, 24 nt, Artificial Sequence
  Synthetic oligonucleotide: Ptpn6-5677
acccccugugcaggcccacccacc

SEQ ID NO: 25916 - RNA, 18 nt, Artificial Sequence
  Synthetic oligonucleotide: Ptpn6-5678
gggagaggaggagccacc

SEQ ID NO: 25917 - RNA, 19 nt, Artificial Sequence
  Synthetic oligonucleotide: Ptpn6-5679
cgggagaggaggagccacc

SEQ ID NO: 25918 - RNA, 20 nt, Artificial Sequence
  Synthetic oligonucleotide: Ptpn6-1238
ccgggagaggaggagccacc

SEQ ID NO: 25919 - RNA, 21 nt, Artificial Sequence
  Synthetic oligonucleotide: Ptpn6-5680
cccgggagaggaggagccacc

SEQ ID NO: 25920 - RNA, 22 nt, Artificial Sequence
  Synthetic oligonucleotide: Ptpn6-5681
ccccgggagaggaggagccacc

SEQ ID NO: 25921 - RNA, 23 nt, Artificial Sequence
  Synthetic oligonucleotide: Ptpn6-5682
cccccgggagaggaggagccacc

SEQ ID NO: 25922 - RNA, 24 nt, Artificial Sequence
  Synthetic oligonucleotide: Ptpn6-5683
ucccccgggagaggaggagccacc

SEQ ID NO: 25923 - RNA, 18 nt, Artificial Sequence
  Synthetic oligonucleotide: Ptpn6-5684
gccaccuggagcuccacc

SEQ ID NO: 25924 - RNA, 19 nt, Artificial Sequence
  Synthetic oligonucleotide: Ptpn6-5685
agccaccuggagcuccacc

SEQ ID NO: 25925 - RNA, 20 nt, Artificial Sequence
  Synthetic oligonucleotide: Ptpn6-1055
gagccaccuggagcuccacc

SEQ ID NO: 25926 - RNA, 21 nt, Artificial Sequence
  Synthetic oligonucleotide: Ptpn6-5686
ggagccaccuggagcuccacc

SEQ ID NO: 25927 - RNA, 22 nt, Artificial Sequence
  Synthetic oligonucleotide: Ptpn6-5687
aggagccaccuggagcuccacc

SEQ ID NO: 25928 - RNA, 23 nt, Artificial Sequence
  Synthetic oligonucleotide: Ptpn6-5688
gaggagccaccuggagcuccacc

SEQ ID NO: 25929 - RNA, 24 nt, Artificial Sequence
  Synthetic oligonucleotide: Ptpn6-5689
ggaggagccaccuggagcuccacc

SEQ ID NO: 25930 - RNA, 18 nt, Artificial Sequence
  Synthetic oligonucleotide: Ptpn6-5690
uggguaggggaacagacc

SEQ ID NO: 25931 - RNA, 19 nt, Artificial Sequence
  Synthetic oligonucleotide: Ptpn6-5691
uuggguaggggaacagacc

SEQ ID NO: 25932 - RNA, 20 nt, Artificial Sequence
  Synthetic oligonucleotide: Ptpn6-1192
auuggguaggggaacagacc

SEQ ID NO: 25933 - RNA, 21 nt, Artificial Sequence
  Synthetic oligonucleotide: Ptpn6-5692
uauuggguaggggaacagacc

SEQ ID NO: 25934 - RNA, 22 nt, Artificial Sequence
  Synthetic oligonucleotide: Ptpn6-5693
guauuggguaggggaacagacc

SEQ ID NO: 25935 - RNA, 23 nt, Artificial Sequence
  Synthetic oligonucleotide: Ptpn6-5694
gguauuggguaggggaacagacc

SEQ ID NO: 25936 - RNA, 24 nt, Artificial Sequence
  Synthetic oligonucleotide: Ptpn6-5695
ggguauuggguaggggaacagacc

SEQ ID NO: 25937 - RNA, 18 nt, Artificial Sequence
  Synthetic oligonucleotide: Ptpn6-5696
gagguguugugagcuacc

SEQ ID NO: 25938 - RNA, 19 nt, Artificial Sequence
  Synthetic oligonucleotide: Ptpn6-5697
ugagguguugugagcuacc

SEQ ID NO: 25939 - RNA, 20 nt, Artificial Sequence
  Synthetic oligonucleotide: Ptpn6-1808
uugagguguugugagcuacc

SEQ ID NO: 25940 - RNA, 21 nt, Artificial Sequence
  Synthetic oligonucleotide: Ptpn6-5698
uuugagguguugugagcuacc

SEQ ID NO: 25941 - RNA, 22 nt, Artificial Sequence
  Synthetic oligonucleotide: Ptpn6-5699
guuugagguguugugagcuacc

SEQ ID NO: 25942 - RNA, 23 nt, Artificial Sequence
  Synthetic oligonucleotide: Ptpn6-5700
uguuugagguguugugagcuacc

SEQ ID NO: 25943 - RNA, 24 nt, Artificial Sequence
  Synthetic oligonucleotide: Ptpn6-5701
auguuugagguguugugagcuacc

SEQ ID NO: 25944 - RNA, 18 nt, Artificial Sequence
  Synthetic oligonucleotide: Ptpn6-5702
agguguugugagcuaccc

SEQ ID NO: 25945 - RNA, 19 nt, Artificial Sequence
  Synthetic oligonucleotide: Ptpn6-5703
gagguguugugagcuaccc

SEQ ID NO: 25946 - RNA, 20 nt, Artificial Sequence
  Synthetic oligonucleotide: Ptpn6-993
ugagguguugugagcuaccc

SEQ ID NO: 25947 - RNA, 21 nt, Artificial Sequence
  Synthetic oligonucleotide: Ptpn6-5704
uugagguguugugagcuaccc

SEQ ID NO: 25948 - RNA, 22 nt, Artificial Sequence
  Synthetic oligonucleotide: Ptpn6-5705
uuugagguguugugagcuaccc

SEQ ID NO: 25949 - RNA, 23 nt, Artificial Sequence
  Synthetic oligonucleotide: Ptpn6-5706
guuugagguguugugagcuaccc

SEQ ID NO: 25950 - RNA, 24 nt, Artificial Sequence
  Synthetic oligonucleotide: Ptpn6-5707
uguuugagguguugugagcuaccc

SEQ ID NO: 25951 - RNA, 18 nt, Artificial Sequence
  Synthetic oligonucleotide: Ptpn6-3040
ggugcccgggacuuaccc

SEQ ID NO: 25952 - RNA, 19 nt, Artificial Sequence
  Synthetic oligonucleotide: Ptpn6-3041
uggugcccgggacuuaccc

SEQ ID NO: 25953 - RNA, 20 nt, Artificial Sequence
  Synthetic oligonucleotide: Ptpn6-1861
auggugcccgggacuuaccc

SEQ ID NO: 25954 - RNA, 21 nt, Artificial Sequence
  Synthetic oligonucleotide: Ptpn6-3042
gauggugcccgggacuuaccc

SEQ ID NO: 25955 - RNA, 22 nt, Artificial Sequence
  Synthetic oligonucleotide: Ptpn6-3043
cgauggugcccgggacuuaccc

SEQ ID NO: 25956 - RNA, 23 nt, Artificial Sequence
  Synthetic oligonucleotide: Ptpn6-3044
ccgauggugcccgggacuuaccc

SEQ ID NO: 25957 - RNA, 24 nt, Artificial Sequence
  Synthetic oligonucleotide: Ptpn6-3045
cccgauggugcccgggacuuaccc

SEQ ID NO: 25958 - RNA, 18 nt, Artificial Sequence
  Synthetic oligonucleotide: Ptpn6-5708
ccagggccgccuuccccc

SEQ ID NO: 25959 - RNA, 19 nt, Artificial Sequence
  Synthetic oligonucleotide: Ptpn6-5709
uccagggccgccuuccccc

SEQ ID NO: 25960 - RNA, 20 nt, Artificial Sequence
  Synthetic oligonucleotide: Ptpn6-1051
guccagggccgccuuccccc

SEQ ID NO: 25961 - RNA, 21 nt, Artificial Sequence
  Synthetic oligonucleotide: Ptpn6-5710
gguccagggccgccuuccccc

SEQ ID NO: 25962 - RNA, 22 nt, Artificial Sequence
  Synthetic oligonucleotide: Ptpn6-5711
ugguccagggccgccuuccccc

SEQ ID NO: 25963 - RNA, 23 nt, Artificial Sequence
  Synthetic oligonucleotide: Ptpn6-5712
cugguccagggccgccuuccccc

SEQ ID NO: 25964 - RNA, 24 nt, Artificial Sequence
  Synthetic oligonucleotide: Ptpn6-5713
gcugguccagggccgccuuccccc

SEQ ID NO: 25965 - RNA, 18 nt, Artificial Sequence
  Synthetic oligonucleotide: Ptpn6-5714
agccucucaaccugcccc

SEQ ID NO: 25966 - RNA, 19 nt, Artificial Sequence
  Synthetic oligonucleotide: Ptpn6-5715
cagccucucaaccugcccc

SEQ ID NO: 25967 - RNA, 20 nt, Artificial Sequence
  Synthetic oligonucleotide: Ptpn6-1513
ccagccucucaaccugcccc

SEQ ID NO: 25968 - RNA, 21 nt, Artificial Sequence
  Synthetic oligonucleotide: Ptpn6-5716
uccagccucucaaccugcccc

SEQ ID NO: 25969 - RNA, 22 nt, Artificial Sequence
  Synthetic oligonucleotide: Ptpn6-5717
cuccagccucucaaccugcccc

SEQ ID NO: 25970 - RNA, 23 nt, Artificial Sequence
  Synthetic oligonucleotide: Ptpn6-5718
acuccagccucucaaccugcccc

SEQ ID NO: 25971 - RNA, 24 nt, Artificial Sequence
  Synthetic oligonucleotide: Ptpn6-5719
cacuccagccucucaaccugcccc

SEQ ID NO: 25972 - RNA, 18 nt, Artificial Sequence
  Synthetic oligonucleotide: Ptpn6-5720
uccagggccgccuucccc

SEQ ID NO: 25973 - RNA, 19 nt, Artificial Sequence
  Synthetic oligonucleotide: Ptpn6-5721
guccagggccgccuucccc

SEQ ID NO: 25974 - RNA, 20 nt, Artificial Sequence
  Synthetic oligonucleotide: Ptpn6-1052
gguccagggccgccuucccc

SEQ ID NO: 25975 - RNA, 21 nt, Artificial Sequence
  Synthetic oligonucleotide: Ptpn6-5722
ugguccagggccgccuucccc

SEQ ID NO: 25976 - RNA, 22 nt, Artificial Sequence
  Synthetic oligonucleotide: Ptpn6-5723
cugguccagggccgccuucccc

SEQ ID NO: 25977 - RNA, 23 nt, Artificial Sequence
  Synthetic oligonucleotide: Ptpn6-5724
gcugguccagggccgccuucccc

SEQ ID NO: 25978 - RNA, 24 nt, Artificial Sequence
  Synthetic oligonucleotide: Ptpn6-5725
ugcugguccagggccgccuucccc

SEQ ID NO: 25979 - RNA, 18 nt, Artificial Sequence
  Synthetic oligonucleotide: Ptpn6-5726
ucagguaggguuaggccc

SEQ ID NO: 25980 - RNA, 19 nt, Artificial Sequence
  Synthetic oligonucleotide: Ptpn6-5727
cucagguaggguuaggccc

SEQ ID NO: 25981 - RNA, 20 nt, Artificial Sequence
  Synthetic oligonucleotide: Ptpn6-1524
ccucagguaggguuaggccc

SEQ ID NO: 25982 - RNA, 21 nt, Artificial Sequence
  Synthetic oligonucleotide: Ptpn6-5728
gccucagguaggguuaggccc

SEQ ID NO: 25983 - RNA, 22 nt, Artificial Sequence
  Synthetic oligonucleotide: Ptpn6-5729
agccucagguaggguuaggccc

SEQ ID NO: 25984 - RNA, 23 nt, Artificial Sequence
  Synthetic oligonucleotide: Ptpn6-5730
gagccucagguaggguuaggccc

SEQ ID NO: 25985 - RNA, 24 nt, Artificial Sequence
  Synthetic oligonucleotide: Ptpn6-5731
ggagccucagguaggguuaggccc

SEQ ID NO: 25986 - RNA, 18 nt, Artificial Sequence
  Synthetic oligonucleotide: Ptpn6-5732
cagccucucaaccugccc

SEQ ID NO: 25987 - RNA, 19 nt, Artificial Sequence
  Synthetic oligonucleotide: Ptpn6-5733
ccagccucucaaccugccc

SEQ ID NO: 25988 - RNA, 20 nt, Artificial Sequence
  Synthetic oligonucleotide: Ptpn6-1512
uccagccucucaaccugccc

SEQ ID NO: 25989 - RNA, 21 nt, Artificial Sequence
  Synthetic oligonucleotide: Ptpn6-5734
cuccagccucucaaccugccc

SEQ ID NO: 25990 - RNA, 22 nt, Artificial Sequence
  Synthetic oligonucleotide: Ptpn6-5735
acuccagccucucaaccugccc

SEQ ID NO: 25991 - RNA, 23 nt, Artificial Sequence
  Synthetic oligonucleotide: Ptpn6-5736
cacuccagccucucaaccugccc

SEQ ID NO: 25992 - RNA, 24 nt, Artificial Sequence
  Synthetic oligonucleotide: Ptpn6-5737
ccacuccagccucucaaccugccc

SEQ ID NO: 25993 - RNA, 18 nt, Artificial Sequence
  Synthetic oligonucleotide: Ptpn6-5738
guccagggccgccuuccc

SEQ ID NO: 25994 - RNA, 19 nt, Artificial Sequence
  Synthetic oligonucleotide: Ptpn6-5739
gguccagggccgccuuccc

SEQ ID NO: 25995 - RNA, 20 nt, Artificial Sequence
  Synthetic oligonucleotide: Ptpn6-1898
ugguccagggccgccuuccc

SEQ ID NO: 25996 - RNA, 21 nt, Artificial Sequence
  Synthetic oligonucleotide: Ptpn6-5740
cugguccagggccgccuuccc

SEQ ID NO: 25997 - RNA, 22 nt, Artificial Sequence
  Synthetic oligonucleotide: Ptpn6-5741
gcugguccagggccgccuuccc

SEQ ID NO: 25998 - RNA, 23 nt, Artificial Sequence
  Synthetic oligonucleotide: Ptpn6-5742
ugcugguccagggccgccuuccc

SEQ ID NO: 25999 - RNA, 24 nt, Artificial Sequence
  Synthetic oligonucleotide: Ptpn6-5743
cugcugguccagggccgccuuccc

SEQ ID NO: 26000 - RNA, 18 nt, Artificial Sequence
  Synthetic oligonucleotide: Ptpn6-5744
gaggcagaagcaggagcc

SEQ ID NO: 26001 - RNA, 19 nt, Artificial Sequence
  Synthetic oligonucleotide: Ptpn6-5745
ggaggcagaagcaggagcc

SEQ ID NO: 26002 - RNA, 20 nt, Artificial Sequence
  Synthetic oligonucleotide: Ptpn6-1816
aggaggcagaagcaggagcc

SEQ ID NO: 26003 - RNA, 21 nt, Artificial Sequence
  Synthetic oligonucleotide: Ptpn6-5746
caggaggcagaagcaggagcc

SEQ ID NO: 26004 - RNA, 22 nt, Artificial Sequence
  Synthetic oligonucleotide: Ptpn6-5747
gcaggaggcagaagcaggagcc

SEQ ID NO: 26005 - RNA, 23 nt, Artificial Sequence
  Synthetic oligonucleotide: Ptpn6-5748
agcaggaggcagaagcaggagcc

SEQ ID NO: 26006 - RNA, 24 nt, Artificial Sequence
  Synthetic oligonucleotide: Ptpn6-5749
aagcaggaggcagaagcaggagcc

SEQ ID NO: 26007 - RNA, 18 nt, Artificial Sequence
  Synthetic oligonucleotide: Ptpn6-5750
cucagguaggguuaggcc

SEQ ID NO: 26008 - RNA, 19 nt, Artificial Sequence
  Synthetic oligonucleotide: Ptpn6-5751
ccucagguaggguuaggcc

SEQ ID NO: 26009 - RNA, 20 nt, Artificial Sequence
  Synthetic oligonucleotide: Ptpn6-2261
gccucagguaggguuaggcc

SEQ ID NO: 26010 - RNA, 21 nt, Artificial Sequence
  Synthetic oligonucleotide: Ptpn6-5752
agccucagguaggguuaggcc

SEQ ID NO: 26011 - RNA, 22 nt, Artificial Sequence
  Synthetic oligonucleotide: Ptpn6-5753
gagccucagguaggguuaggcc

SEQ ID NO: 26012 - RNA, 23 nt, Artificial Sequence
  Synthetic oligonucleotide: Ptpn6-5754
ggagccucagguaggguuaggcc

SEQ ID NO: 26013 - RNA, 24 nt, Artificial Sequence
  Synthetic oligonucleotide: Ptpn6-5755
aggagccucagguaggguuaggcc

SEQ ID NO: 26014 - RNA, 18 nt, Artificial Sequence
  Synthetic oligonucleotide: Ptpn6-5756
ccagccucucaaccugcc

SEQ ID NO: 26015 - RNA, 19 nt, Artificial Sequence
  Synthetic oligonucleotide: Ptpn6-5757
uccagccucucaaccugcc

SEQ ID NO: 26016 - RNA, 20 nt, Artificial Sequence
  Synthetic oligonucleotide: Ptpn6-2267
cuccagccucucaaccugcc

SEQ ID NO: 26017 - RNA, 21 nt, Artificial Sequence
  Synthetic oligonucleotide: Ptpn6-5758
acuccagccucucaaccugcc

SEQ ID NO: 26018 - RNA, 22 nt, Artificial Sequence
  Synthetic oligonucleotide: Ptpn6-5759
cacuccagccucucaaccugcc

SEQ ID NO: 26019 - RNA, 23 nt, Artificial Sequence
  Synthetic oligonucleotide: Ptpn6-5760
ccacuccagccucucaaccugcc

SEQ ID NO: 26020 - RNA, 24 nt, Artificial Sequence
  Synthetic oligonucleotide: Ptpn6-5761
cccacuccagccucucaaccugcc

SEQ ID NO: 26021 - RNA, 18 nt, Artificial Sequence
  Synthetic oligonucleotide: Ptpn6-3064
ugggaccccgauggugcc

SEQ ID NO: 26022 - RNA, 19 nt, Artificial Sequence
  Synthetic oligonucleotide: Ptpn6-3065
cugggaccccgauggugcc

SEQ ID NO: 26023 - RNA, 20 nt, Artificial Sequence
  Synthetic oligonucleotide: Ptpn6-1187
acugggaccccgauggugcc

SEQ ID NO: 26024 - RNA, 21 nt, Artificial Sequence
  Synthetic oligonucleotide: Ptpn6-5762
gacugggaccccgauggugcc

SEQ ID NO: 26025 - RNA, 22 nt, Artificial Sequence
  Synthetic oligonucleotide: Ptpn6-5763
agacugggaccccgauggugcc

SEQ ID NO: 26026 - RNA, 23 nt, Artificial Sequence
  Synthetic oligonucleotide: Ptpn6-5764
gagacugggaccccgauggugcc

SEQ ID NO: 26027 - RNA, 24 nt, Artificial Sequence
  Synthetic oligonucleotide: Ptpn6-5765
ggagacugggaccccgauggugcc

SEQ ID NO: 26028 - RNA, 18 nt, Artificial Sequence
  Synthetic oligonucleotide: Ptpn6-5766
ccuggacuaauagucucc

SEQ ID NO: 26029 - RNA, 19 nt, Artificial Sequence
  Synthetic oligonucleotide: Ptpn6-5767
cccuggacuaauagucucc

SEQ ID NO: 26030 - RNA, 20 nt, Artificial Sequence
  Synthetic oligonucleotide: Ptpn6-986
acccuggacuaauagucucc

SEQ ID NO: 26031 - RNA, 21 nt, Artificial Sequence
  Synthetic oligonucleotide: Ptpn6-5768
aacccuggacuaauagucucc

SEQ ID NO: 26032 - RNA, 22 nt, Artificial Sequence
  Synthetic oligonucleotide: Ptpn6-5769
aaacccuggacuaauagucucc

SEQ ID NO: 26033 - RNA, 23 nt, Artificial Sequence
  Synthetic oligonucleotide: Ptpn6-5770
caaacccuggacuaauagucucc

SEQ ID NO: 26034 - RNA, 24 nt, Artificial Sequence
  Synthetic oligonucleotide: Ptpn6-5771
acaaacccuggacuaauagucucc

SEQ ID NO: 26035 - RNA, 18 nt, Artificial Sequence
  Synthetic oligonucleotide: Ptpn6-5772
acagauacacacuugucc

SEQ ID NO: 26036 - RNA, 19 nt, Artificial Sequence
  Synthetic oligonucleotide: Ptpn6-5773
aacagauacacacuugucc

SEQ ID NO: 26037 - RNA, 20 nt, Artificial Sequence
  Synthetic oligonucleotide: Ptpn6-1028
gaacagauacacacuugucc

SEQ ID NO: 26038 - RNA, 21 nt, Artificial Sequence
  Synthetic oligonucleotide: Ptpn6-5774
agaacagauacacacuugucc

SEQ ID NO: 26039 - RNA, 22 nt, Artificial Sequence
  Synthetic oligonucleotide: Ptpn6-5775
gagaacagauacacacuugucc

SEQ ID NO: 26040 - RNA, 23 nt, Artificial Sequence
  Synthetic oligonucleotide: Ptpn6-5776
agagaacagauacacacuugucc

SEQ ID NO: 26041 - RNA, 24 nt, Artificial Sequence
  Synthetic oligonucleotide: Ptpn6-5777
gagagaacagauacacacuugucc

SEQ ID NO: 26042 - RNA, 18 nt, Artificial Sequence
  Synthetic oligonucleotide: Ptpn6-5778
uaagcaggaggcagaagc

SEQ ID NO: 26043 - RNA, 19 nt, Artificial Sequence
  Synthetic oligonucleotide: Ptpn6-5779
cuaagcaggaggcagaagc

SEQ ID NO: 26044 - RNA, 20 nt, Artificial Sequence
  Synthetic oligonucleotide: Ptpn6-1256
ccuaagcaggaggcagaagc

SEQ ID NO: 26045 - RNA, 21 nt, Artificial Sequence
  Synthetic oligonucleotide: Ptpn6-5780
uccuaagcaggaggcagaagc

SEQ ID NO: 26046 - RNA, 22 nt, Artificial Sequence
  Synthetic oligonucleotide: Ptpn6-5781
guccuaagcaggaggcagaagc

SEQ ID NO: 26047 - RNA, 23 nt, Artificial Sequence
  Synthetic oligonucleotide: Ptpn6-5782
gguccuaagcaggaggcagaagc

SEQ ID NO: 26048 - RNA, 24 nt, Artificial Sequence
  Synthetic oligonucleotide: Ptpn6-5783
agguccuaagcaggaggcagaagc

SEQ ID NO: 26049 - RNA, 18 nt, Artificial Sequence
  Synthetic oligonucleotide: Ptpn6-5784
gggggacagguccuaagc

SEQ ID NO: 26050 - RNA, 19 nt, Artificial Sequence
  Synthetic oligonucleotide: Ptpn6-5785
agggggacagguccuaagc

SEQ ID NO: 26051 - RNA, 20 nt, Artificial Sequence
  Synthetic oligonucleotide: Ptpn6-1196
cagggggacagguccuaagc

SEQ ID NO: 26052 - RNA, 21 nt, Artificial Sequence
  Synthetic oligonucleotide: Ptpn6-5786
ccagggggacagguccuaagc

SEQ ID NO: 26053 - RNA, 22 nt, Artificial Sequence
  Synthetic oligonucleotide: Ptpn6-5787
cccagggggacagguccuaagc

SEQ ID NO: 26054 - RNA, 23 nt, Artificial Sequence
  Synthetic oligonucleotide: Ptpn6-5788
acccagggggacagguccuaagc

SEQ ID NO: 26055 - RNA, 24 nt, Artificial Sequence
  Synthetic oligonucleotide: Ptpn6-5789
uacccagggggacagguccuaagc

SEQ ID NO: 26056 - RNA, 18 nt, Artificial Sequence
  Synthetic oligonucleotide: Ptpn6-5790
ggcaggguuaggcccagc

SEQ ID NO: 26057 - RNA, 19 nt, Artificial Sequence
  Synthetic oligonucleotide: Ptpn6-5791
gggcaggguuaggcccagc

SEQ ID NO: 26058 - RNA, 20 nt, Artificial Sequence
  Synthetic oligonucleotide: Ptpn6-2262
ggggcaggguuaggcccagc

SEQ ID NO: 26059 - RNA, 21 nt, Artificial Sequence
  Synthetic oligonucleotide: Ptpn6-5792
uggggcaggguuaggcccagc

SEQ ID NO: 26060 - RNA, 22 nt, Artificial Sequence
  Synthetic oligonucleotide: Ptpn6-5793
cuggggcaggguuaggcccagc

SEQ ID NO: 26061 - RNA, 23 nt, Artificial Sequence
  Synthetic oligonucleotide: Ptpn6-5794
ccuggggcaggguuaggcccagc

SEQ ID NO: 26062 - RNA, 24 nt, Artificial Sequence
  Synthetic oligonucleotide: Ptpn6-5795
cccuggggcaggguuaggcccagc

SEQ ID NO: 26063 - RNA, 18 nt, Artificial Sequence
  Synthetic oligonucleotide: Ptpn6-5796
agaggagcaugagugagc

SEQ ID NO: 26064 - RNA, 19 nt, Artificial Sequence
  Synthetic oligonucleotide: Ptpn6-5797
cagaggagcaugagugagc

SEQ ID NO: 26065 - RNA, 20 nt, Artificial Sequence
  Synthetic oligonucleotide: Ptpn6-1034
gcagaggagcaugagugagc

SEQ ID NO: 26066 - RNA, 21 nt, Artificial Sequence
  Synthetic oligonucleotide: Ptpn6-5798
ggcagaggagcaugagugagc

SEQ ID NO: 26067 - RNA, 22 nt, Artificial Sequence
  Synthetic oligonucleotide: Ptpn6-5799
gggcagaggagcaugagugagc

SEQ ID NO: 26068 - RNA, 23 nt, Artificial Sequence
  Synthetic oligonucleotide: Ptpn6-5800
ggggcagaggagcaugagugagc

SEQ ID NO: 26069 - RNA, 24 nt, Artificial Sequence
  Synthetic oligonucleotide: Ptpn6-5801
gggggcagaggagcaugagugagc

SEQ ID NO: 26070 - RNA, 18 nt, Artificial Sequence
  Synthetic oligonucleotide: Ptpn6-5802
gccacggcagagggccgc

SEQ ID NO: 26071 - RNA, 19 nt, Artificial Sequence
  Synthetic oligonucleotide: Ptpn6-5803
agccacggcagagggccgc

SEQ ID NO: 26072 - RNA, 20 nt, Artificial Sequence
  Synthetic oligonucleotide: Ptpn6-991
aagccacggcagagggccgc

SEQ ID NO: 26073 - RNA, 21 nt, Artificial Sequence
  Synthetic oligonucleotide: Ptpn6-5804
gaagccacggcagagggccgc

SEQ ID NO: 26074 - RNA, 22 nt, Artificial Sequence
  Synthetic oligonucleotide: Ptpn6-5805
ggaagccacggcagagggccgc

SEQ ID NO: 26075 - RNA, 23 nt, Artificial Sequence
  Synthetic oligonucleotide: Ptpn6-5806
gggaagccacggcagagggccgc

SEQ ID NO: 26076 - RNA, 24 nt, Artificial Sequence
  Synthetic oligonucleotide: Ptpn6-5807
ggggaagccacggcagagggccgc

SEQ ID NO: 26077 - RNA, 18 nt, Artificial Sequence
  Synthetic oligonucleotide: Ptpn6-5808
aagcaggagcccagaggc

SEQ ID NO: 26078 - RNA, 19 nt, Artificial Sequence
  Synthetic oligonucleotide: Ptpn6-5809
gaagcaggagcccagaggc

SEQ ID NO: 26079 - RNA, 20 nt, Artificial Sequence
  Synthetic oligonucleotide: Ptpn6-1248
agaagcaggagcccagaggc

SEQ ID NO: 26080 - RNA, 21 nt, Artificial Sequence
  Synthetic oligonucleotide: Ptpn6-5810
cagaagcaggagcccagaggc

SEQ ID NO: 26081 - RNA, 22 nt, Artificial Sequence
  Synthetic oligonucleotide: Ptpn6-5811
gcagaagcaggagcccagaggc

SEQ ID NO: 26082 - RNA, 23 nt, Artificial Sequence
  Synthetic oligonucleotide: Ptpn6-5812
ggcagaagcaggagcccagaggc

SEQ ID NO: 26083 - RNA, 24 nt, Artificial Sequence
  Synthetic oligonucleotide: Ptpn6-5813
aggcagaagcaggagcccagaggc

SEQ ID NO: 26084 - RNA, 18 nt, Artificial Sequence
  Synthetic oligonucleotide: Ptpn6-5814
agguggggcggggcuggc

SEQ ID NO: 26085 - RNA, 19 nt, Artificial Sequence
  Synthetic oligonucleotide: Ptpn6-5815
cagguggggcggggcuggc

SEQ ID NO: 26086 - RNA, 20 nt, Artificial Sequence
  Synthetic oligonucleotide: Ptpn6-1893
acagguggggcggggcuggc

SEQ ID NO: 26087 - RNA, 21 nt, Artificial Sequence
  Synthetic oligonucleotide: Ptpn6-5816
gacagguggggcggggcuggc

SEQ ID NO: 26088 - RNA, 22 nt, Artificial Sequence
  Synthetic oligonucleotide: Ptpn6-5817
ggacagguggggcggggcuggc

SEQ ID NO: 26089 - RNA, 23 nt, Artificial Sequence
  Synthetic oligonucleotide: Ptpn6-5818
aggacagguggggcggggcuggc

SEQ ID NO: 26090 - RNA, 24 nt, Artificial Sequence
  Synthetic oligonucleotide: Ptpn6-5819
aaggacagguggggcggggcuggc

SEQ ID NO: 26091 - RNA, 18 nt, Artificial Sequence
  Synthetic oligonucleotide: Ptpn6-5820
ccaggccaauggcacugc

SEQ ID NO: 26092 - RNA, 19 nt, Artificial Sequence
  Synthetic oligonucleotide: Ptpn6-5821
gccaggccaauggcacugc

SEQ ID NO: 26093 - RNA, 20 nt, Artificial Sequence
  Synthetic oligonucleotide: Ptpn6-1217
ugccaggccaauggcacugc

SEQ ID NO: 26094 - RNA, 21 nt, Artificial Sequence
  Synthetic oligonucleotide: Ptpn6-5822
cugccaggccaauggcacugc

SEQ ID NO: 26095 - RNA, 22 nt, Artificial Sequence
  Synthetic oligonucleotide: Ptpn6-5823
ccugccaggccaauggcacugc

SEQ ID NO: 26096 - RNA, 23 nt, Artificial Sequence
  Synthetic oligonucleotide: Ptpn6-5824
gccugccaggccaauggcacugc

SEQ ID NO: 26097 - RNA, 24 nt, Artificial Sequence
  Synthetic oligonucleotide: Ptpn6-5825
ugccugccaggccaauggcacugc

SEQ ID NO: 26098 - RNA, 18 nt, Artificial Sequence
  Synthetic oligonucleotide: Ptpn6-5826
cugggaccccgauggugc

SEQ ID NO: 26099 - RNA, 19 nt, Artificial Sequence
  Synthetic oligonucleotide: Ptpn6-5827
acugggaccccgauggugc

SEQ ID NO: 26100 - RNA, 20 nt, Artificial Sequence
  Synthetic oligonucleotide: Ptpn6-1859
gacugggaccccgauggugc

SEQ ID NO: 26101 - RNA, 21 nt, Artificial Sequence
  Synthetic oligonucleotide: Ptpn6-5828
agacugggaccccgauggugc

SEQ ID NO: 26102 - RNA, 22 nt, Artificial Sequence
  Synthetic oligonucleotide: Ptpn6-5829
gagacugggaccccgauggugc

SEQ ID NO: 26103 - RNA, 23 nt, Artificial Sequence
  Synthetic oligonucleotide: Ptpn6-5830
ggagacugggaccccgauggugc

SEQ ID NO: 26104 - RNA, 24 nt, Artificial Sequence
  Synthetic oligonucleotide: Ptpn6-5831
aggagacugggaccccgauggugc

SEQ ID NO: 26105 - RNA, 18 nt, Artificial Sequence
  Synthetic oligonucleotide: Ptpn6-5832
gggguccucacaccuugc

SEQ ID NO: 26106 - RNA, 19 nt, Artificial Sequence
  Synthetic oligonucleotide: Ptpn6-5833
ggggguccucacaccuugc

SEQ ID NO: 26107 - RNA, 20 nt, Artificial Sequence
  Synthetic oligonucleotide: Ptpn6-1185
cggggguccucacaccuugc

SEQ ID NO: 26108 - RNA, 21 nt, Artificial Sequence
  Synthetic oligonucleotide: Ptpn6-5834
ccggggguccucacaccuugc

SEQ ID NO: 26109 - RNA, 22 nt, Artificial Sequence
  Synthetic oligonucleotide: Ptpn6-5835
gccggggguccucacaccuugc

SEQ ID NO: 26110 - RNA, 23 nt, Artificial Sequence
  Synthetic oligonucleotide: Ptpn6-5836
agccggggguccucacaccuugc

SEQ ID NO: 26111 - RNA, 24 nt, Artificial Sequence
  Synthetic oligonucleotide: Ptpn6-5837
gagccggggguccucacaccuugc

SEQ ID NO: 26112 - RNA, 18 nt, Artificial Sequence
  Synthetic oligonucleotide: Ptpn6-5838
cccuggacuaauagucuc

SEQ ID NO: 26113 - RNA, 19 nt, Artificial Sequence
  Synthetic oligonucleotide: Ptpn6-5839
acccuggacuaauagucuc

SEQ ID NO: 26114 - RNA, 20 nt, Artificial Sequence
  Synthetic oligonucleotide: Ptpn6-1886
aacccuggacuaauagucuc

SEQ ID NO: 26115 - RNA, 21 nt, Artificial Sequence
  Synthetic oligonucleotide: Ptpn6-5840
aaacccuggacuaauagucuc

SEQ ID NO: 26116 - RNA, 22 nt, Artificial Sequence
  Synthetic oligonucleotide: Ptpn6-5841
caaacccuggacuaauagucuc

SEQ ID NO: 26117 - RNA, 23 nt, Artificial Sequence
  Synthetic oligonucleotide: Ptpn6-5842
acaaacccuggacuaauagucuc

SEQ ID NO: 26118 - RNA, 24 nt, Artificial Sequence
  Synthetic oligonucleotide: Ptpn6-5843
gacaaacccuggacuaauagucuc

SEQ ID NO: 26119 - RNA, 18 nt, Artificial Sequence
  Synthetic oligonucleotide: Ptpn6-5844
caggcccgccugcugguc

SEQ ID NO: 26120 - RNA, 19 nt, Artificial Sequence
  Synthetic oligonucleotide: Ptpn6-5845
gcaggcccgccugcugguc

SEQ ID NO: 26121 - RNA, 20 nt, Artificial Sequence
  Synthetic oligonucleotide: Ptpn6-1897
agcaggcccgccugcugguc

SEQ ID NO: 26122 - RNA, 21 nt, Artificial Sequence
  Synthetic oligonucleotide: Ptpn6-5846
cagcaggcccgccugcugguc

SEQ ID NO: 26123 - RNA, 22 nt, Artificial Sequence
  Synthetic oligonucleotide: Ptpn6-5847
acagcaggcccgccugcugguc

SEQ ID NO: 26124 - RNA, 23 nt, Artificial Sequence
  Synthetic oligonucleotide: Ptpn6-5848
uacagcaggcccgccugcugguc

SEQ ID NO: 26125 - RNA, 24 nt, Artificial Sequence
  Synthetic oligonucleotide: Ptpn6-5849
guacagcaggcccgccugcugguc

SEQ ID NO: 26126 - RNA, 18 nt, Artificial Sequence
  Synthetic oligonucleotide: Ptpn6-5850
aacagauacacacuuguc

SEQ ID NO: 26127 - RNA, 19 nt, Artificial Sequence
  Synthetic oligonucleotide: Ptpn6-5851
gaacagauacacacuuguc

SEQ ID NO: 26128 - RNA, 20 nt, Artificial Sequence
  Synthetic oligonucleotide: Ptpn6-1824
agaacagauacacacuuguc

SEQ ID NO: 26129 - RNA, 21 nt, Artificial Sequence
  Synthetic oligonucleotide: Ptpn6-5852
gagaacagauacacacuuguc

SEQ ID NO: 26130 - RNA, 22 nt, Artificial Sequence
  Synthetic oligonucleotide: Ptpn6-5853
agagaacagauacacacuuguc

SEQ ID NO: 26131 - RNA, 23 nt, Artificial Sequence
  Synthetic oligonucleotide: Ptpn6-5854
gagagaacagauacacacuuguc

SEQ ID NO: 26132 - RNA, 24 nt, Artificial Sequence
  Synthetic oligonucleotide: Ptpn6-5855
ggagagaacagauacacacuuguc

SEQ ID NO: 26133 - RNA, 18 nt, Artificial Sequence
  Synthetic oligonucleotide: Ptpn6-5856
cauagggaggagcuguuc

SEQ ID NO: 26134 - RNA, 19 nt, Artificial Sequence
  Synthetic oligonucleotide: Ptpn6-5857
ccauagggaggagcuguuc

SEQ ID NO: 26135 - RNA, 20 nt, Artificial Sequence
  Synthetic oligonucleotide: Ptpn6-1534
accauagggaggagcuguuc

SEQ ID NO: 26136 - RNA, 21 nt, Artificial Sequence
  Synthetic oligonucleotide: Ptpn6-5858
gaccauagggaggagcuguuc

SEQ ID NO: 26137 - RNA, 22 nt, Artificial Sequence
  Synthetic oligonucleotide: Ptpn6-5859
ggaccauagggaggagcuguuc

SEQ ID NO: 26138 - RNA, 23 nt, Artificial Sequence
  Synthetic oligonucleotide: Ptpn6-5860
aggaccauagggaggagcuguuc

SEQ ID NO: 26139 - RNA, 24 nt, Artificial Sequence
  Synthetic oligonucleotide: Ptpn6-5861
caggaccauagggaggagcuguuc

SEQ ID NO: 26140 - RNA, 18 nt, Artificial Sequence
  Synthetic oligonucleotide: Ptpn6-5862
uucccugcagccccaaag

SEQ ID NO: 26141 - RNA, 19 nt, Artificial Sequence
  Synthetic oligonucleotide: Ptpn6-5863
cuucccugcagccccaaag

SEQ ID NO: 26142 - RNA, 20 nt, Artificial Sequence
  Synthetic oligonucleotide: Ptpn6-1049
gcuucccugcagccccaaag

SEQ ID NO: 26143 - RNA, 21 nt, Artificial Sequence
  Synthetic oligonucleotide: Ptpn6-5864
agcuucccugcagccccaaag

SEQ ID NO: 26144 - RNA, 22 nt, Artificial Sequence
  Synthetic oligonucleotide: Ptpn6-5865
cagcuucccugcagccccaaag

SEQ ID NO: 26145 - RNA, 23 nt, Artificial Sequence
  Synthetic oligonucleotide: Ptpn6-5866
ccagcuucccugcagccccaaag

SEQ ID NO: 26146 - RNA, 24 nt, Artificial Sequence
  Synthetic oligonucleotide: Ptpn6-5867
gccagcuucccugcagccccaaag

SEQ ID NO: 26147 - RNA, 18 nt, Artificial Sequence
  Synthetic oligonucleotide: Ptpn6-5868
caggggaaaauguuaaag

SEQ ID NO: 26148 - RNA, 19 nt, Artificial Sequence
  Synthetic oligonucleotide: Ptpn6-5869
ccaggggaaaauguuaaag

SEQ ID NO: 26149 - RNA, 20 nt, Artificial Sequence
  Synthetic oligonucleotide: Ptpn6-1236
uccaggggaaaauguuaaag

SEQ ID NO: 26150 - RNA, 21 nt, Artificial Sequence
  Synthetic oligonucleotide: Ptpn6-5870
guccaggggaaaauguuaaag

SEQ ID NO: 26151 - RNA, 22 nt, Artificial Sequence
  Synthetic oligonucleotide: Ptpn6-5871
uguccaggggaaaauguuaaag

SEQ ID NO: 26152 - RNA, 23 nt, Artificial Sequence
  Synthetic oligonucleotide: Ptpn6-5872
uuguccaggggaaaauguuaaag

SEQ ID NO: 26153 - RNA, 24 nt, Artificial Sequence
  Synthetic oligonucleotide: Ptpn6-5873
cuuguccaggggaaaauguuaaag

SEQ ID NO: 26154 - RNA, 18 nt, Artificial Sequence
  Synthetic oligonucleotide: Ptpn6-5874
cuaagcaggaggcagaag

SEQ ID NO: 26155 - RNA, 19 nt, Artificial Sequence
  Synthetic oligonucleotide: Ptpn6-5875
ccuaagcaggaggcagaag

SEQ ID NO: 26156 - RNA, 20 nt, Artificial Sequence
  Synthetic oligonucleotide: Ptpn6-1814
uccuaagcaggaggcagaag

SEQ ID NO: 26157 - RNA, 21 nt, Artificial Sequence
  Synthetic oligonucleotide: Ptpn6-5876
guccuaagcaggaggcagaag

SEQ ID NO: 26158 - RNA, 22 nt, Artificial Sequence
  Synthetic oligonucleotide: Ptpn6-5877
gguccuaagcaggaggcagaag

SEQ ID NO: 26159 - RNA, 23 nt, Artificial Sequence
  Synthetic oligonucleotide: Ptpn6-5878
agguccuaagcaggaggcagaag

SEQ ID NO: 26160 - RNA, 24 nt, Artificial Sequence
  Synthetic oligonucleotide: Ptpn6-5879
cagguccuaagcaggaggcagaag

SEQ ID NO: 26161 - RNA, 18 nt, Artificial Sequence
  Synthetic oligonucleotide: Ptpn6-5880
cucacaccuugcgggaag

SEQ ID NO: 26162 - RNA, 19 nt, Artificial Sequence
  Synthetic oligonucleotide: Ptpn6-5881
ccucacaccuugcgggaag

SEQ ID NO: 26163 - RNA, 20 nt, Artificial Sequence
  Synthetic oligonucleotide: Ptpn6-1186
uccucacaccuugcgggaag

SEQ ID NO: 26164 - RNA, 21 nt, Artificial Sequence
  Synthetic oligonucleotide: Ptpn6-5882
guccucacaccuugcgggaag

SEQ ID NO: 26165 - RNA, 22 nt, Artificial Sequence
  Synthetic oligonucleotide: Ptpn6-5883
gguccucacaccuugcgggaag

SEQ ID NO: 26166 - RNA, 23 nt, Artificial Sequence
  Synthetic oligonucleotide: Ptpn6-5884
ggguccucacaccuugcgggaag

SEQ ID NO: 26167 - RNA, 24 nt, Artificial Sequence
  Synthetic oligonucleotide: Ptpn6-5885
gggguccucacaccuugcgggaag

SEQ ID NO: 26168 - RNA, 18 nt, Artificial Sequence
  Synthetic oligonucleotide: Ptpn6-5886
aaccugccccgggggaag

SEQ ID NO: 26169 - RNA, 19 nt, Artificial Sequence
  Synthetic oligonucleotide: Ptpn6-5887
caaccugccccgggggaag

SEQ ID NO: 26170 - RNA, 20 nt, Artificial Sequence
  Synthetic oligonucleotide: Ptpn6-1518
ucaaccugccccgggggaag

SEQ ID NO: 26171 - RNA, 21 nt, Artificial Sequence
  Synthetic oligonucleotide: Ptpn6-5888
cucaaccugccccgggggaag

SEQ ID NO: 26172 - RNA, 22 nt, Artificial Sequence
  Synthetic oligonucleotide: Ptpn6-5889
ucucaaccugccccgggggaag

SEQ ID NO: 26173 - RNA, 23 nt, Artificial Sequence
  Synthetic oligonucleotide: Ptpn6-5890
cucucaaccugccccgggggaag

SEQ ID NO: 26174 - RNA, 24 nt, Artificial Sequence
  Synthetic oligonucleotide: Ptpn6-5891
ccucucaaccugccccgggggaag

SEQ ID NO: 26175 - RNA, 18 nt, Artificial Sequence
  Synthetic oligonucleotide: Ptpn6-5892
gagcccagaggcuggaag

SEQ ID NO: 26176 - RNA, 19 nt, Artificial Sequence
  Synthetic oligonucleotide: Ptpn6-5893
ggagcccagaggcuggaag

SEQ ID NO: 26177 - RNA, 20 nt, Artificial Sequence
  Synthetic oligonucleotide: Ptpn6-1819
aggagcccagaggcuggaag

SEQ ID NO: 26178 - RNA, 21 nt, Artificial Sequence
  Synthetic oligonucleotide: Ptpn6-5894
caggagcccagaggcuggaag

SEQ ID NO: 26179 - RNA, 22 nt, Artificial Sequence
  Synthetic oligonucleotide: Ptpn6-5895
gcaggagcccagaggcuggaag

SEQ ID NO: 26180 - RNA, 23 nt, Artificial Sequence
  Synthetic oligonucleotide: Ptpn6-5896
agcaggagcccagaggcuggaag

SEQ ID NO: 26181 - RNA, 24 nt, Artificial Sequence
  Synthetic oligonucleotide: Ptpn6-5897
aagcaggagcccagaggcuggaag

SEQ ID NO: 26182 - RNA, 18 nt, Artificial Sequence
  Synthetic oligonucleotide: Ptpn6-5898
agggggacagguccuaag

SEQ ID NO: 26183 - RNA, 19 nt, Artificial Sequence
  Synthetic oligonucleotide: Ptpn6-5899
cagggggacagguccuaag

SEQ ID NO: 26184 - RNA, 20 nt, Artificial Sequence
  Synthetic oligonucleotide: Ptpn6-1782
ccagggggacagguccuaag

SEQ ID NO: 26185 - RNA, 21 nt, Artificial Sequence
  Synthetic oligonucleotide: Ptpn6-5900
cccagggggacagguccuaag

SEQ ID NO: 26186 - RNA, 22 nt, Artificial Sequence
  Synthetic oligonucleotide: Ptpn6-5901
acccagggggacagguccuaag

SEQ ID NO: 26187 - RNA, 23 nt, Artificial Sequence
  Synthetic oligonucleotide: Ptpn6-5902
uacccagggggacagguccuaag

SEQ ID NO: 26188 - RNA, 24 nt, Artificial Sequence
  Synthetic oligonucleotide: Ptpn6-5903
cuacccagggggacagguccuaag

SEQ ID NO: 26189 - RNA, 18 nt, Artificial Sequence
  Synthetic oligonucleotide: Ptpn6-5904
ucuccaggaaaaggacag

SEQ ID NO: 26190 - RNA, 19 nt, Artificial Sequence
  Synthetic oligonucleotide: Ptpn6-5905
gucuccaggaaaaggacag

SEQ ID NO: 26191 - RNA, 20 nt, Artificial Sequence
  Synthetic oligonucleotide: Ptpn6-1889
agucuccaggaaaaggacag

SEQ ID NO: 26192 - RNA, 21 nt, Artificial Sequence
  Synthetic oligonucleotide: Ptpn6-5906
uagucuccaggaaaaggacag

SEQ ID NO: 26193 - RNA, 22 nt, Artificial Sequence
  Synthetic oligonucleotide: Ptpn6-5907
auagucuccaggaaaaggacag

SEQ ID NO: 26194 - RNA, 23 nt, Artificial Sequence
  Synthetic oligonucleotide: Ptpn6-5908
aauagucuccaggaaaaggacag

SEQ ID NO: 26195 - RNA, 24 nt, Artificial Sequence
  Synthetic oligonucleotide: Ptpn6-5909
uaauagucuccaggaaaaggacag

SEQ ID NO: 26196 - RNA, 18 nt, Artificial Sequence
  Synthetic oligonucleotide: Ptpn6-5910
guguugugagcuacccag

SEQ ID NO: 26197 - RNA, 19 nt, Artificial Sequence
  Synthetic oligonucleotide: Ptpn6-5911
gguguugugagcuacccag

SEQ ID NO: 26198 - RNA, 20 nt, Artificial Sequence
  Synthetic oligonucleotide: Ptpn6-1194
agguguugugagcuacccag

SEQ ID NO: 26199 - RNA, 21 nt, Artificial Sequence
  Synthetic oligonucleotide: Ptpn6-5912
gagguguugugagcuacccag

SEQ ID NO: 26200 - RNA, 22 nt, Artificial Sequence
  Synthetic oligonucleotide: Ptpn6-5913
ugagguguugugagcuacccag

SEQ ID NO: 26201 - RNA, 23 nt, Artificial Sequence
  Synthetic oligonucleotide: Ptpn6-5914
uugagguguugugagcuacccag

SEQ ID NO: 26202 - RNA, 24 nt, Artificial Sequence
  Synthetic oligonucleotide: Ptpn6-5915
uuugagguguugugagcuacccag

SEQ ID NO: 26203 - RNA, 18 nt, Artificial Sequence
  Synthetic oligonucleotide: Ptpn6-5916
cacaguggcccaagccag

SEQ ID NO: 26204 - RNA, 19 nt, Artificial Sequence
  Synthetic oligonucleotide: Ptpn6-5917
gcacaguggcccaagccag

SEQ ID NO: 26205 - RNA, 20 nt, Artificial Sequence
  Synthetic oligonucleotide: Ptpn6-1879
ugcacaguggcccaagccag

SEQ ID NO: 26206 - RNA, 21 nt, Artificial Sequence
  Synthetic oligonucleotide: Ptpn6-5918
gugcacaguggcccaagccag

SEQ ID NO: 26207 - RNA, 22 nt, Artificial Sequence
  Synthetic oligonucleotide: Ptpn6-5919
ugugcacaguggcccaagccag

SEQ ID NO: 26208 - RNA, 23 nt, Artificial Sequence
  Synthetic oligonucleotide: Ptpn6-5920
cugugcacaguggcccaagccag

SEQ ID NO: 26209 - RNA, 24 nt, Artificial Sequence
  Synthetic oligonucleotide: Ptpn6-5921
gcugugcacaguggcccaagccag

SEQ ID NO: 26210 - RNA, 18 nt, Artificial Sequence
  Synthetic oligonucleotide: Ptpn6-5922
agauacacacuuguccag

SEQ ID NO: 26211 - RNA, 19 nt, Artificial Sequence
  Synthetic oligonucleotide: Ptpn6-5923
cagauacacacuuguccag

SEQ ID NO: 26212 - RNA, 20 nt, Artificial Sequence
  Synthetic oligonucleotide: Ptpn6-1207
acagauacacacuuguccag

SEQ ID NO: 26213 - RNA, 21 nt, Artificial Sequence
  Synthetic oligonucleotide: Ptpn6-5924
aacagauacacacuuguccag

SEQ ID NO: 26214 - RNA, 22 nt, Artificial Sequence
  Synthetic oligonucleotide: Ptpn6-5925
gaacagauacacacuuguccag

SEQ ID NO: 26215 - RNA, 23 nt, Artificial Sequence
  Synthetic oligonucleotide: Ptpn6-5926
agaacagauacacacuuguccag

SEQ ID NO: 26216 - RNA, 24 nt, Artificial Sequence
  Synthetic oligonucleotide: Ptpn6-5927
gagaacagauacacacuuguccag

SEQ ID NO: 26217 - RNA, 18 nt, Artificial Sequence
  Synthetic oligonucleotide: Ptpn6-5928
auguuaaagagggggcag

SEQ ID NO: 26218 - RNA, 19 nt, Artificial Sequence
  Synthetic oligonucleotide: Ptpn6-5929
aauguuaaagagggggcag

SEQ ID NO: 26219 - RNA, 20 nt, Artificial Sequence
  Synthetic oligonucleotide: Ptpn6-1224
aaauguuaaagagggggcag

SEQ ID NO: 26220 - RNA, 21 nt, Artificial Sequence
  Synthetic oligonucleotide: Ptpn6-5930
aaaauguuaaagagggggcag

SEQ ID NO: 26221 - RNA, 22 nt, Artificial Sequence
  Synthetic oligonucleotide: Ptpn6-5931
gaaaauguuaaagagggggcag

SEQ ID NO: 26222 - RNA, 23 nt, Artificial Sequence
  Synthetic oligonucleotide: Ptpn6-5932
ggaaaauguuaaagagggggcag

SEQ ID NO: 26223 - RNA, 24 nt, Artificial Sequence
  Synthetic oligonucleotide: Ptpn6-5933
gggaaaauguuaaagagggggcag

SEQ ID NO: 26224 - RNA, 18 nt, Artificial Sequence
  Synthetic oligonucleotide: Ptpn6-5934
cagcccaguuccucagag

SEQ ID NO: 26225 - RNA, 19 nt, Artificial Sequence
  Synthetic oligonucleotide: Ptpn6-5935
acagcccaguuccucagag

SEQ ID NO: 26226 - RNA, 20 nt, Artificial Sequence
  Synthetic oligonucleotide: Ptpn6-1936
aacagcccaguuccucagag

SEQ ID NO: 26227 - RNA, 21 nt, Artificial Sequence
  Synthetic oligonucleotide: Ptpn6-5936
uaacagcccaguuccucagag

SEQ ID NO: 26228 - RNA, 22 nt, Artificial Sequence
  Synthetic oligonucleotide: Ptpn6-5937
cuaacagcccaguuccucagag

SEQ ID NO: 26229 - RNA, 23 nt, Artificial Sequence
  Synthetic oligonucleotide: Ptpn6-5938
ccuaacagcccaguuccucagag

SEQ ID NO: 26230 - RNA, 24 nt, Artificial Sequence
  Synthetic oligonucleotide: Ptpn6-5939
cccuaacagcccaguuccucagag

SEQ ID NO: 26231 - RNA, 18 nt, Artificial Sequence
  Synthetic oligonucleotide: Ptpn6-5940
cgccuucccccgggagag

SEQ ID NO: 26232 - RNA, 19 nt, Artificial Sequence
  Synthetic oligonucleotide: Ptpn6-5941
ccgccuucccccgggagag

SEQ ID NO: 26233 - RNA, 20 nt, Artificial Sequence
  Synthetic oligonucleotide: Ptpn6-1904
gccgccuucccccgggagag

SEQ ID NO: 26234 - RNA, 21 nt, Artificial Sequence
  Synthetic oligonucleotide: Ptpn6-5942
ggccgccuucccccgggagag

SEQ ID NO: 26235 - RNA, 22 nt, Artificial Sequence
  Synthetic oligonucleotide: Ptpn6-5943
gggccgccuucccccgggagag

SEQ ID NO: 26236 - RNA, 23 nt, Artificial Sequence
  Synthetic oligonucleotide: Ptpn6-5944
agggccgccuucccccgggagag

SEQ ID NO: 26237 - RNA, 24 nt, Artificial Sequence
  Synthetic oligonucleotide: Ptpn6-5945
cagggccgccuucccccgggagag

SEQ ID NO: 26238 - RNA, 18 nt, Artificial Sequence
  Synthetic oligonucleotide: Ptpn6-3104
gcaucucucuguagggag

SEQ ID NO: 26239 - RNA, 19 nt, Artificial Sequence
  Synthetic oligonucleotide: Ptpn6-3105
agcaucucucuguagggag

SEQ ID NO: 26240 - RNA, 20 nt, Artificial Sequence
  Synthetic oligonucleotide: Ptpn6-1228
cagcaucucucuguagggag

SEQ ID NO: 26241 - RNA, 21 nt, Artificial Sequence
  Synthetic oligonucleotide: Ptpn6-3106
acagcaucucucuguagggag

SEQ ID NO: 26242 - RNA, 22 nt, Artificial Sequence
  Synthetic oligonucleotide: Ptpn6-3107
gacagcaucucucuguagggag

SEQ ID NO: 26243 - RNA, 23 nt, Artificial Sequence
  Synthetic oligonucleotide: Ptpn6-3108
ggacagcaucucucuguagggag

SEQ ID NO: 26244 - RNA, 24 nt, Artificial Sequence
  Synthetic oligonucleotide: Ptpn6-3109
gggacagcaucucucuguagggag

SEQ ID NO: 26245 - RNA, 18 nt, Artificial Sequence
  Synthetic oligonucleotide: Ptpn6-5946
gccgccuucccccgggag

SEQ ID NO: 26246 - RNA, 19 nt, Artificial Sequence
  Synthetic oligonucleotide: Ptpn6-5947
ggccgccuucccccgggag

SEQ ID NO: 26247 - RNA, 20 nt, Artificial Sequence
  Synthetic oligonucleotide: Ptpn6-1026
gggccgccuucccccgggag

SEQ ID NO: 26248 - RNA, 21 nt, Artificial Sequence
  Synthetic oligonucleotide: Ptpn6-5948
agggccgccuucccccgggag

SEQ ID NO: 26249 - RNA, 22 nt, Artificial Sequence
  Synthetic oligonucleotide: Ptpn6-5949
cagggccgccuucccccgggag

SEQ ID NO: 26250 - RNA, 23 nt, Artificial Sequence
  Synthetic oligonucleotide: Ptpn6-5950
ccagggccgccuucccccgggag

SEQ ID NO: 26251 - RNA, 24 nt, Artificial Sequence
  Synthetic oligonucleotide: Ptpn6-5951
uccagggccgccuucccccgggag

SEQ ID NO: 26252 - RNA, 18 nt, Artificial Sequence
  Synthetic oligonucleotide: Ptpn6-5952
cagaggagcaugagugag

SEQ ID NO: 26253 - RNA, 19 nt, Artificial Sequence
  Synthetic oligonucleotide: Ptpn6-5953
gcagaggagcaugagugag

SEQ ID NO: 26254 - RNA, 20 nt, Artificial Sequence
  Synthetic oligonucleotide: Ptpn6-1837
ggcagaggagcaugagugag

SEQ ID NO: 26255 - RNA, 21 nt, Artificial Sequence
  Synthetic oligonucleotide: Ptpn6-5954
gggcagaggagcaugagugag

SEQ ID NO: 26256 - RNA, 22 nt, Artificial Sequence
  Synthetic oligonucleotide: Ptpn6-5955
ggggcagaggagcaugagugag

SEQ ID NO: 26257 - RNA, 23 nt, Artificial Sequence
  Synthetic oligonucleotide: Ptpn6-5956
gggggcagaggagcaugagugag

SEQ ID NO: 26258 - RNA, 24 nt, Artificial Sequence
  Synthetic oligonucleotide: Ptpn6-5957
agggggcagaggagcaugagugag

SEQ ID NO: 26259 - RNA, 18 nt, Artificial Sequence
  Synthetic oligonucleotide: Ptpn6-5958
ggggaaaccucuccguag

SEQ ID NO: 26260 - RNA, 19 nt, Artificial Sequence
  Synthetic oligonucleotide: Ptpn6-5959
gggggaaaccucuccguag

SEQ ID NO: 26261 - RNA, 20 nt, Artificial Sequence
  Synthetic oligonucleotide: Ptpn6-1929
ugggggaaaccucuccguag

SEQ ID NO: 26262 - RNA, 21 nt, Artificial Sequence
  Synthetic oligonucleotide: Ptpn6-5960
augggggaaaccucuccguag

SEQ ID NO: 26263 - RNA, 22 nt, Artificial Sequence
  Synthetic oligonucleotide: Ptpn6-5961
aaugggggaaaccucuccguag

SEQ ID NO: 26264 - RNA, 23 nt, Artificial Sequence
  Synthetic oligonucleotide: Ptpn6-5962
caaugggggaaaccucuccguag

SEQ ID NO: 26265 - RNA, 24 nt, Artificial Sequence
  Synthetic oligonucleotide: Ptpn6-5963
ccaaugggggaaaccucuccguag

SEQ ID NO: 26266 - RNA, 18 nt, Artificial Sequence
  Synthetic oligonucleotide: Ptpn6-5964
cggcgggguauuggguag

SEQ ID NO: 26267 - RNA, 19 nt, Artificial Sequence
  Synthetic oligonucleotide: Ptpn6-5965
gcggcgggguauuggguag

SEQ ID NO: 26268 - RNA, 20 nt, Artificial Sequence
  Synthetic oligonucleotide: Ptpn6-989
agcggcgggguauuggguag

SEQ ID NO: 26269 - RNA, 21 nt, Artificial Sequence
  Synthetic oligonucleotide: Ptpn6-5966
gagcggcgggguauuggguag

SEQ ID NO: 26270 - RNA, 22 nt, Artificial Sequence
  Synthetic oligonucleotide: Ptpn6-5967
agagcggcgggguauuggguag

SEQ ID NO: 26271 - RNA, 23 nt, Artificial Sequence
  Synthetic oligonucleotide: Ptpn6-5968
cagagcggcgggguauuggguag

SEQ ID NO: 26272 - RNA, 24 nt, Artificial Sequence
  Synthetic oligonucleotide: Ptpn6-5969
acagagcggcgggguauuggguag

SEQ ID NO: 26273 - RNA, 18 nt, Artificial Sequence
  Synthetic oligonucleotide: Ptpn6-5970
cacucacguucacacacg

SEQ ID NO: 26274 - RNA, 19 nt, Artificial Sequence
  Synthetic oligonucleotide: Ptpn6-5971
gcacucacguucacacacg

SEQ ID NO: 26275 - RNA, 20 nt, Artificial Sequence
  Synthetic oligonucleotide: Ptpn6-1852
cgcacucacguucacacacg

SEQ ID NO: 26276 - RNA, 21 nt, Artificial Sequence
  Synthetic oligonucleotide: Ptpn6-5972
ucgcacucacguucacacacg

SEQ ID NO: 26277 - RNA, 22 nt, Artificial Sequence
  Synthetic oligonucleotide: Ptpn6-5973
aucgcacucacguucacacacg

SEQ ID NO: 26278 - RNA, 23 nt, Artificial Sequence
  Synthetic oligonucleotide: Ptpn6-5974
gaucgcacucacguucacacacg

SEQ ID NO: 26279 - RNA, 24 nt, Artificial Sequence
  Synthetic oligonucleotide: Ptpn6-5975
agaucgcacucacguucacacacg

SEQ ID NO: 26280 - RNA, 18 nt, Artificial Sequence
  Synthetic oligonucleotide: Ptpn6-5976
gccucucaaccugccccg

SEQ ID NO: 26281 - RNA, 19 nt, Artificial Sequence
  Synthetic oligonucleotide: Ptpn6-5977
agccucucaaccugccccg

SEQ ID NO: 26282 - RNA, 20 nt, Artificial Sequence
  Synthetic oligonucleotide: Ptpn6-1514
cagccucucaaccugccccg

SEQ ID NO: 26283 - RNA, 21 nt, Artificial Sequence
  Synthetic oligonucleotide: Ptpn6-5978
ccagccucucaaccugccccg

SEQ ID NO: 26284 - RNA, 22 nt, Artificial Sequence
  Synthetic oligonucleotide: Ptpn6-5979
uccagccucucaaccugccccg

SEQ ID NO: 26285 - RNA, 23 nt, Artificial Sequence
  Synthetic oligonucleotide: Ptpn6-5980
cuccagccucucaaccugccccg

SEQ ID NO: 26286 - RNA, 24 nt, Artificial Sequence
  Synthetic oligonucleotide: Ptpn6-5981
acuccagccucucaaccugccccg

SEQ ID NO: 26287 - RNA, 18 nt, Artificial Sequence
  Synthetic oligonucleotide: Ptpn6-5982
agccacggcagagggccg

SEQ ID NO: 26288 - RNA, 19 nt, Artificial Sequence
  Synthetic oligonucleotide: Ptpn6-5983
aagccacggcagagggccg

SEQ ID NO: 26289 - RNA, 20 nt, Artificial Sequence
  Synthetic oligonucleotide: Ptpn6-1873
gaagccacggcagagggccg

SEQ ID NO: 26290 - RNA, 21 nt, Artificial Sequence
  Synthetic oligonucleotide: Ptpn6-5984
ggaagccacggcagagggccg

SEQ ID NO: 26291 - RNA, 22 nt, Artificial Sequence
  Synthetic oligonucleotide: Ptpn6-5985
gggaagccacggcagagggccg

SEQ ID NO: 26292 - RNA, 23 nt, Artificial Sequence
  Synthetic oligonucleotide: Ptpn6-5986
ggggaagccacggcagagggccg

SEQ ID NO: 26293 - RNA, 24 nt, Artificial Sequence
  Synthetic oligonucleotide: Ptpn6-5987
gggggaagccacggcagagggccg

SEQ ID NO: 26294 - RNA, 18 nt, Artificial Sequence
  Synthetic oligonucleotide: Ptpn6-5988
gcucaagcugacagagcg

SEQ ID NO: 26295 - RNA, 19 nt, Artificial Sequence
  Synthetic oligonucleotide: Ptpn6-5989
agcucaagcugacagagcg

SEQ ID NO: 26296 - RNA, 20 nt, Artificial Sequence
  Synthetic oligonucleotide: Ptpn6-1911
gagcucaagcugacagagcg

SEQ ID NO: 26297 - RNA, 21 nt, Artificial Sequence
  Synthetic oligonucleotide: Ptpn6-5990
ggagcucaagcugacagagcg

SEQ ID NO: 26298 - RNA, 22 nt, Artificial Sequence
  Synthetic oligonucleotide: Ptpn6-5991
uggagcucaagcugacagagcg

SEQ ID NO: 26299 - RNA, 23 nt, Artificial Sequence
  Synthetic oligonucleotide: Ptpn6-5992
cuggagcucaagcugacagagcg

SEQ ID NO: 26300 - RNA, 24 nt, Artificial Sequence
  Synthetic oligonucleotide: Ptpn6-5993
ccuggagcucaagcugacagagcg

SEQ ID NO: 26301 - RNA, 18 nt, Artificial Sequence
  Synthetic oligonucleotide: Ptpn6-5994
agggaccggaaacaggcg

SEQ ID NO: 26302 - RNA, 19 nt, Artificial Sequence
  Synthetic oligonucleotide: Ptpn6-5995
uagggaccggaaacaggcg

SEQ ID NO: 26303 - RNA, 20 nt, Artificial Sequence
  Synthetic oligonucleotide: Ptpn6-1851
auagggaccggaaacaggcg

SEQ ID NO: 26304 - RNA, 21 nt, Artificial Sequence
  Synthetic oligonucleotide: Ptpn6-5996
cauagggaccggaaacaggcg

SEQ ID NO: 26305 - RNA, 22 nt, Artificial Sequence
  Synthetic oligonucleotide: Ptpn6-5997
ucauagggaccggaaacaggcg

SEQ ID NO: 26306 - RNA, 23 nt, Artificial Sequence
  Synthetic oligonucleotide: Ptpn6-5998
uucauagggaccggaaacaggcg

SEQ ID NO: 26307 - RNA, 24 nt, Artificial Sequence
  Synthetic oligonucleotide: Ptpn6-5999
guucauagggaccggaaacaggcg

SEQ ID NO: 26308 - RNA, 18 nt, Artificial Sequence
  Synthetic oligonucleotide: Ptpn6-6000
gcccacccacccagggcg

SEQ ID NO: 26309 - RNA, 19 nt, Artificial Sequence
  Synthetic oligonucleotide: Ptpn6-6001
ggcccacccacccagggcg

SEQ ID NO: 26310 - RNA, 20 nt, Artificial Sequence
  Synthetic oligonucleotide: Ptpn6-2265
aggcccacccacccagggcg

SEQ ID NO: 26311 - RNA, 21 nt, Artificial Sequence
  Synthetic oligonucleotide: Ptpn6-6002
caggcccacccacccagggcg

SEQ ID NO: 26312 - RNA, 22 nt, Artificial Sequence
  Synthetic oligonucleotide: Ptpn6-6003
gcaggcccacccacccagggcg

SEQ ID NO: 26313 - RNA, 23 nt, Artificial Sequence
  Synthetic oligonucleotide: Ptpn6-6004
ugcaggcccacccacccagggcg

SEQ ID NO: 26314 - RNA, 24 nt, Artificial Sequence
  Synthetic oligonucleotide: Ptpn6-6005
gugcaggcccacccacccagggcg

SEQ ID NO: 26315 - RNA, 18 nt, Artificial Sequence
  Synthetic oligonucleotide: Ptpn6-6006
cuccaggaaaaggacagg

SEQ ID NO: 26316 - RNA, 19 nt, Artificial Sequence
  Synthetic oligonucleotide: Ptpn6-6007
ucuccaggaaaaggacagg

SEQ ID NO: 26317 - RNA, 20 nt, Artificial Sequence
  Synthetic oligonucleotide: Ptpn6-1047
gucuccaggaaaaggacagg

SEQ ID NO: 26318 - RNA, 21 nt, Artificial Sequence
  Synthetic oligonucleotide: Ptpn6-6008
agucuccaggaaaaggacagg

SEQ ID NO: 26319 - RNA, 22 nt, Artificial Sequence
  Synthetic oligonucleotide: Ptpn6-6009
uagucuccaggaaaaggacagg

SEQ ID NO: 26320 - RNA, 23 nt, Artificial Sequence
  Synthetic oligonucleotide: Ptpn6-6010
auagucuccaggaaaaggacagg

SEQ ID NO: 26321 - RNA, 24 nt, Artificial Sequence
  Synthetic oligonucleotide: Ptpn6-6011
aauagucuccaggaaaaggacagg

SEQ ID NO: 26322 - RNA, 18 nt, Artificial Sequence
  Synthetic oligonucleotide: Ptpn6-6012
gaagcaggagcccagagg

SEQ ID NO: 26323 - RNA, 19 nt, Artificial Sequence
  Synthetic oligonucleotide: Ptpn6-6013
agaagcaggagcccagagg

SEQ ID NO: 26324 - RNA, 20 nt, Artificial Sequence
  Synthetic oligonucleotide: Ptpn6-1817
cagaagcaggagcccagagg

SEQ ID NO: 26325 - RNA, 21 nt, Artificial Sequence
  Synthetic oligonucleotide: Ptpn6-6014
gcagaagcaggagcccagagg

SEQ ID NO: 26326 - RNA, 22 nt, Artificial Sequence
  Synthetic oligonucleotide: Ptpn6-6015
ggcagaagcaggagcccagagg

SEQ ID NO: 26327 - RNA, 23 nt, Artificial Sequence
  Synthetic oligonucleotide: Ptpn6-6016
aggcagaagcaggagcccagagg

SEQ ID NO: 26328 - RNA, 24 nt, Artificial Sequence
  Synthetic oligonucleotide: Ptpn6-6017
gaggcagaagcaggagcccagagg

SEQ ID NO: 26329 - RNA, 18 nt, Artificial Sequence
  Synthetic oligonucleotide: Ptpn6-6018
gccuucccccgggagagg

SEQ ID NO: 26330 - RNA, 19 nt, Artificial Sequence
  Synthetic oligonucleotide: Ptpn6-6019
cgccuucccccgggagagg

SEQ ID NO: 26331 - RNA, 20 nt, Artificial Sequence
  Synthetic oligonucleotide: Ptpn6-1201
ccgccuucccccgggagagg

SEQ ID NO: 26332 - RNA, 21 nt, Artificial Sequence
  Synthetic oligonucleotide: Ptpn6-6020
gccgccuucccccgggagagg

SEQ ID NO: 26333 - RNA, 22 nt, Artificial Sequence
  Synthetic oligonucleotide: Ptpn6-6021
ggccgccuucccccgggagagg

SEQ ID NO: 26334 - RNA, 23 nt, Artificial Sequence
  Synthetic oligonucleotide: Ptpn6-6022
gggccgccuucccccgggagagg

SEQ ID NO: 26335 - RNA, 24 nt, Artificial Sequence
  Synthetic oligonucleotide: Ptpn6-6023
agggccgccuucccccgggagagg

SEQ ID NO: 26336 - RNA, 18 nt, Artificial Sequence
  Synthetic oligonucleotide: Ptpn6-6024
cagguccuaagcaggagg

SEQ ID NO: 26337 - RNA, 19 nt, Artificial Sequence
  Synthetic oligonucleotide: Ptpn6-6025
acagguccuaagcaggagg

SEQ ID NO: 26338 - RNA, 20 nt, Artificial Sequence
  Synthetic oligonucleotide: Ptpn6-1813
gacagguccuaagcaggagg

SEQ ID NO: 26339 - RNA, 21 nt, Artificial Sequence
  Synthetic oligonucleotide: Ptpn6-6026
ggacagguccuaagcaggagg

SEQ ID NO: 26340 - RNA, 22 nt, Artificial Sequence
  Synthetic oligonucleotide: Ptpn6-6027
gggacagguccuaagcaggagg

SEQ ID NO: 26341 - RNA, 23 nt, Artificial Sequence
  Synthetic oligonucleotide: Ptpn6-6028
ggggacagguccuaagcaggagg

SEQ ID NO: 26342 - RNA, 24 nt, Artificial Sequence
  Synthetic oligonucleotide: Ptpn6-6029
gggggacagguccuaagcaggagg

SEQ ID NO: 26343 - RNA, 18 nt, Artificial Sequence
  Synthetic oligonucleotide: Ptpn6-3149
caucucucuguagggagg

SEQ ID NO: 26344 - RNA, 19 nt, Artificial Sequence
  Synthetic oligonucleotide: Ptpn6-3150
gcaucucucuguagggagg

SEQ ID NO: 26345 - RNA, 20 nt, Artificial Sequence
  Synthetic oligonucleotide: Ptpn6-1222
agcaucucucuguagggagg

SEQ ID NO: 26346 - RNA, 21 nt, Artificial Sequence
  Synthetic oligonucleotide: Ptpn6-3151
cagcaucucucuguagggagg

SEQ ID NO: 26347 - RNA, 22 nt, Artificial Sequence
  Synthetic oligonucleotide: Ptpn6-3152
acagcaucucucuguagggagg

SEQ ID NO: 26348 - RNA, 23 nt, Artificial Sequence
  Synthetic oligonucleotide: Ptpn6-3153
gacagcaucucucuguagggagg

SEQ ID NO: 26349 - RNA, 24 nt, Artificial Sequence
  Synthetic oligonucleotide: Ptpn6-3154
ggacagcaucucucuguagggagg

SEQ ID NO: 26350 - RNA, 18 nt, Artificial Sequence
  Synthetic oligonucleotide: Ptpn6-6030
aaguaacccuggcugagg

SEQ ID NO: 26351 - RNA, 19 nt, Artificial Sequence
  Synthetic oligonucleotide: Ptpn6-6031
gaaguaacccuggcugagg

SEQ ID NO: 26352 - RNA, 20 nt, Artificial Sequence
  Synthetic oligonucleotide: Ptpn6-1923
ggaaguaacccuggcugagg

SEQ ID NO: 26353 - RNA, 21 nt, Artificial Sequence
  Synthetic oligonucleotide: Ptpn6-6032
aggaaguaacccuggcugagg

SEQ ID NO: 26354 - RNA, 22 nt, Artificial Sequence
  Synthetic oligonucleotide: Ptpn6-6033
caggaaguaacccuggcugagg

SEQ ID NO: 26355 - RNA, 23 nt, Artificial Sequence
  Synthetic oligonucleotide: Ptpn6-6034
ccaggaaguaacccuggcugagg

SEQ ID NO: 26356 - RNA, 24 nt, Artificial Sequence
  Synthetic oligonucleotide: Ptpn6-6035
accaggaaguaacccuggcugagg

SEQ ID NO: 26357 - RNA, 18 nt, Artificial Sequence
  Synthetic oligonucleotide: Ptpn6-6036
ggcccaagccaggugagg

SEQ ID NO: 26358 - RNA, 19 nt, Artificial Sequence
  Synthetic oligonucleotide: Ptpn6-6037
uggcccaagccaggugagg

SEQ ID NO: 26359 - RNA, 20 nt, Artificial Sequence
  Synthetic oligonucleotide: Ptpn6-1882
guggcccaagccaggugagg

SEQ ID NO: 26360 - RNA, 21 nt, Artificial Sequence
  Synthetic oligonucleotide: Ptpn6-6038
aguggcccaagccaggugagg

SEQ ID NO: 26361 - RNA, 22 nt, Artificial Sequence
  Synthetic oligonucleotide: Ptpn6-6039
caguggcccaagccaggugagg

SEQ ID NO: 26362 - RNA, 23 nt, Artificial Sequence
  Synthetic oligonucleotide: Ptpn6-6040
acaguggcccaagccaggugagg

SEQ ID NO: 26363 - RNA, 24 nt, Artificial Sequence
  Synthetic oligonucleotide: Ptpn6-6041
cacaguggcccaagccaggugagg

SEQ ID NO: 26364 - RNA, 18 nt, Artificial Sequence
  Synthetic oligonucleotide: Ptpn6-6042
cccagccaggaccauagg

SEQ ID NO: 26365 - RNA, 19 nt, Artificial Sequence
  Synthetic oligonucleotide: Ptpn6-6043
gcccagccaggaccauagg

SEQ ID NO: 26366 - RNA, 20 nt, Artificial Sequence
  Synthetic oligonucleotide: Ptpn6-2284
ggcccagccaggaccauagg

SEQ ID NO: 26367 - RNA, 21 nt, Artificial Sequence
  Synthetic oligonucleotide: Ptpn6-6044
aggcccagccaggaccauagg

SEQ ID NO: 26368 - RNA, 22 nt, Artificial Sequence
  Synthetic oligonucleotide: Ptpn6-6045
uaggcccagccaggaccauagg

SEQ ID NO: 26369 - RNA, 23 nt, Artificial Sequence
  Synthetic oligonucleotide: Ptpn6-6046
uuaggcccagccaggaccauagg

SEQ ID NO: 26370 - RNA, 24 nt, Artificial Sequence
  Synthetic oligonucleotide: Ptpn6-6047
guuaggcccagccaggaccauagg

SEQ ID NO: 26371 - RNA, 18 nt, Artificial Sequence
  Synthetic oligonucleotide: Ptpn6-6048
gggaaaccucuccguagg

SEQ ID NO: 26372 - RNA, 19 nt, Artificial Sequence
  Synthetic oligonucleotide: Ptpn6-6049
ggggaaaccucuccguagg

SEQ ID NO: 26373 - RNA, 20 nt, Artificial Sequence
  Synthetic oligonucleotide: Ptpn6-957
gggggaaaccucuccguagg

SEQ ID NO: 26374 - RNA, 21 nt, Artificial Sequence
  Synthetic oligonucleotide: Ptpn6-6050
ugggggaaaccucuccguagg

SEQ ID NO: 26375 - RNA, 22 nt, Artificial Sequence
  Synthetic oligonucleotide: Ptpn6-6051
augggggaaaccucuccguagg

SEQ ID NO: 26376 - RNA, 23 nt, Artificial Sequence
  Synthetic oligonucleotide: Ptpn6-6052
aaugggggaaaccucuccguagg

SEQ ID NO: 26377 - RNA, 24 nt, Artificial Sequence
  Synthetic oligonucleotide: Ptpn6-6053
caaugggggaaaccucuccguagg

SEQ ID NO: 26378 - RNA, 18 nt, Artificial Sequence
  Synthetic oligonucleotide: Ptpn6-3155
acagcaucucucuguagg

SEQ ID NO: 26379 - RNA, 19 nt, Artificial Sequence
  Synthetic oligonucleotide: Ptpn6-3156
gacagcaucucucuguagg

SEQ ID NO: 26380 - RNA, 20 nt, Artificial Sequence
  Synthetic oligonucleotide: Ptpn6-1866
ggacagcaucucucuguagg

SEQ ID NO: 26381 - RNA, 21 nt, Artificial Sequence
  Synthetic oligonucleotide: Ptpn6-3157
gggacagcaucucucuguagg

SEQ ID NO: 26382 - RNA, 22 nt, Artificial Sequence
  Synthetic oligonucleotide: Ptpn6-3158
cgggacagcaucucucuguagg

SEQ ID NO: 26383 - RNA, 23 nt, Artificial Sequence
  Synthetic oligonucleotide: Ptpn6-3159
acgggacagcaucucucuguagg

SEQ ID NO: 26384 - RNA, 24 nt, Artificial Sequence
  Synthetic oligonucleotide: Ptpn6-3160
cacgggacagcaucucucuguagg

SEQ ID NO: 26385 - RNA, 18 nt, Artificial Sequence
  Synthetic oligonucleotide: Ptpn6-6054
gggagggggaagccacgg

SEQ ID NO: 26386 - RNA, 19 nt, Artificial Sequence
  Synthetic oligonucleotide: Ptpn6-6055
agggagggggaagccacgg

SEQ ID NO: 26387 - RNA, 20 nt, Artificial Sequence
  Synthetic oligonucleotide: Ptpn6-1871
uagggagggggaagccacgg

SEQ ID NO: 26388 - RNA, 21 nt, Artificial Sequence
  Synthetic oligonucleotide: Ptpn6-6056
guagggagggggaagccacgg

SEQ ID NO: 26389 - RNA, 22 nt, Artificial Sequence
  Synthetic oligonucleotide: Ptpn6-6057
uguagggagggggaagccacgg

SEQ ID NO: 26390 - RNA, 23 nt, Artificial Sequence
  Synthetic oligonucleotide: Ptpn6-6058
cuguagggagggggaagccacgg

SEQ ID NO: 26391 - RNA, 24 nt, Artificial Sequence
  Synthetic oligonucleotide: Ptpn6-6059
ucuguagggagggggaagccacgg

SEQ ID NO: 26392 - RNA, 18 nt, Artificial Sequence
  Synthetic oligonucleotide: Ptpn6-6060
agggccgccuucccccgg

SEQ ID NO: 26393 - RNA, 19 nt, Artificial Sequence
  Synthetic oligonucleotide: Ptpn6-6061
cagggccgccuucccccgg

SEQ ID NO: 26394 - RNA, 20 nt, Artificial Sequence
  Synthetic oligonucleotide: Ptpn6-1901
ccagggccgccuucccccgg

SEQ ID NO: 26395 - RNA, 21 nt, Artificial Sequence
  Synthetic oligonucleotide: Ptpn6-6062
uccagggccgccuucccccgg

SEQ ID NO: 26396 - RNA, 22 nt, Artificial Sequence
  Synthetic oligonucleotide: Ptpn6-6063
guccagggccgccuucccccgg

SEQ ID NO: 26397 - RNA, 23 nt, Artificial Sequence
  Synthetic oligonucleotide: Ptpn6-6064
gguccagggccgccuucccccgg

SEQ ID NO: 26398 - RNA, 24 nt, Artificial Sequence
  Synthetic oligonucleotide: Ptpn6-6065
ugguccagggccgccuucccccgg

SEQ ID NO: 26399 - RNA, 18 nt, Artificial Sequence
  Synthetic oligonucleotide: Ptpn6-6066
ccucucaaccugccccgg

SEQ ID NO: 26400 - RNA, 19 nt, Artificial Sequence
  Synthetic oligonucleotide: Ptpn6-6067
gccucucaaccugccccgg

SEQ ID NO: 26401 - RNA, 20 nt, Artificial Sequence
  Synthetic oligonucleotide: Ptpn6-1515
agccucucaaccugccccgg

SEQ ID NO: 26402 - RNA, 21 nt, Artificial Sequence
  Synthetic oligonucleotide: Ptpn6-6068
cagccucucaaccugccccgg

SEQ ID NO: 26403 - RNA, 22 nt, Artificial Sequence
  Synthetic oligonucleotide: Ptpn6-6069
ccagccucucaaccugccccgg

SEQ ID NO: 26404 - RNA, 23 nt, Artificial Sequence
  Synthetic oligonucleotide: Ptpn6-6070
uccagccucucaaccugccccgg

SEQ ID NO: 26405 - RNA, 24 nt, Artificial Sequence
  Synthetic oligonucleotide: Ptpn6-6071
cuccagccucucaaccugccccgg

SEQ ID NO: 26406 - RNA, 18 nt, Artificial Sequence
  Synthetic oligonucleotide: Ptpn6-6072
ccugccccgggggaaggg

SEQ ID NO: 26407 - RNA, 19 nt, Artificial Sequence
  Synthetic oligonucleotide: Ptpn6-6073
accugccccgggggaaggg

SEQ ID NO: 26408 - RNA, 20 nt, Artificial Sequence
  Synthetic oligonucleotide: Ptpn6-2276
aaccugccccgggggaaggg

SEQ ID NO: 26409 - RNA, 21 nt, Artificial Sequence
  Synthetic oligonucleotide: Ptpn6-6074
caaccugccccgggggaaggg

SEQ ID NO: 26410 - RNA, 22 nt, Artificial Sequence
  Synthetic oligonucleotide: Ptpn6-6075
ucaaccugccccgggggaaggg

SEQ ID NO: 26411 - RNA, 23 nt, Artificial Sequence
  Synthetic oligonucleotide: Ptpn6-6076
cucaaccugccccgggggaaggg

SEQ ID NO: 26412 - RNA, 24 nt, Artificial Sequence
  Synthetic oligonucleotide: Ptpn6-6077
ucucaaccugccccgggggaaggg

SEQ ID NO: 26413 - RNA, 18 nt, Artificial Sequence
  Synthetic oligonucleotide: Ptpn6-6078
ccagccaggaccauaggg

SEQ ID NO: 26414 - RNA, 19 nt, Artificial Sequence
  Synthetic oligonucleotide: Ptpn6-6079
cccagccaggaccauaggg

SEQ ID NO: 26415 - RNA, 20 nt, Artificial Sequence
  Synthetic oligonucleotide: Ptpn6-1533
gcccagccaggaccauaggg

SEQ ID NO: 26416 - RNA, 21 nt, Artificial Sequence
  Synthetic oligonucleotide: Ptpn6-6080
ggcccagccaggaccauaggg

SEQ ID NO: 26417 - RNA, 22 nt, Artificial Sequence
  Synthetic oligonucleotide: Ptpn6-6081
aggcccagccaggaccauaggg

SEQ ID NO: 26418 - RNA, 23 nt, Artificial Sequence
  Synthetic oligonucleotide: Ptpn6-6082
uaggcccagccaggaccauaggg

SEQ ID NO: 26419 - RNA, 24 nt, Artificial Sequence
  Synthetic oligonucleotide: Ptpn6-6083
uuaggcccagccaggaccauaggg

SEQ ID NO: 26420 - RNA, 18 nt, Artificial Sequence
  Synthetic oligonucleotide: Ptpn6-3161
cagcaucucucuguaggg

SEQ ID NO: 26421 - RNA, 19 nt, Artificial Sequence
  Synthetic oligonucleotide: Ptpn6-3162
acagcaucucucuguaggg

SEQ ID NO: 26422 - RNA, 20 nt, Artificial Sequence
  Synthetic oligonucleotide: Ptpn6-1043
gacagcaucucucuguaggg

SEQ ID NO: 26423 - RNA, 21 nt, Artificial Sequence
  Synthetic oligonucleotide: Ptpn6-3163
ggacagcaucucucuguaggg

SEQ ID NO: 26424 - RNA, 22 nt, Artificial Sequence
  Synthetic oligonucleotide: Ptpn6-3164
gggacagcaucucucuguaggg

SEQ ID NO: 26425 - RNA, 23 nt, Artificial Sequence
  Synthetic oligonucleotide: Ptpn6-3165
cgggacagcaucucucuguaggg

SEQ ID NO: 26426 - RNA, 24 nt, Artificial Sequence
  Synthetic oligonucleotide: Ptpn6-3166
acgggacagcaucucucuguaggg

SEQ ID NO: 26427 - RNA, 18 nt, Artificial Sequence
  Synthetic oligonucleotide: Ptpn6-6084
guccucacaccuugcggg

SEQ ID NO: 26428 - RNA, 19 nt, Artificial Sequence
  Synthetic oligonucleotide: Ptpn6-6085
gguccucacaccuugcggg

SEQ ID NO: 26429 - RNA, 20 nt, Artificial Sequence
  Synthetic oligonucleotide: Ptpn6-1843
ggguccucacaccuugcggg

SEQ ID NO: 26430 - RNA, 21 nt, Artificial Sequence
  Synthetic oligonucleotide: Ptpn6-6086
gggguccucacaccuugcggg

SEQ ID NO: 26431 - RNA, 22 nt, Artificial Sequence
  Synthetic oligonucleotide: Ptpn6-6087
ggggguccucacaccuugcggg

SEQ ID NO: 26432 - RNA, 23 nt, Artificial Sequence
  Synthetic oligonucleotide: Ptpn6-6088
cggggguccucacaccuugcggg

SEQ ID NO: 26433 - RNA, 24 nt, Artificial Sequence
  Synthetic oligonucleotide: Ptpn6-6089
ccggggguccucacaccuugcggg

SEQ ID NO: 26434 - RNA, 18 nt, Artificial Sequence
  Synthetic oligonucleotide: Ptpn6-6090
cugccccgggggaagggg

SEQ ID NO: 26435 - RNA, 19 nt, Artificial Sequence
  Synthetic oligonucleotide: Ptpn6-6091
ccugccccgggggaagggg

SEQ ID NO: 26436 - RNA, 20 nt, Artificial Sequence
  Synthetic oligonucleotide: Ptpn6-1519
accugccccgggggaagggg

SEQ ID NO: 26437 - RNA, 21 nt, Artificial Sequence
  Synthetic oligonucleotide: Ptpn6-6092
aaccugccccgggggaagggg

SEQ ID NO: 26438 - RNA, 22 nt, Artificial Sequence
  Synthetic oligonucleotide: Ptpn6-6093
caaccugccccgggggaagggg

SEQ ID NO: 26439 - RNA, 23 nt, Artificial Sequence
  Synthetic oligonucleotide: Ptpn6-6094
ucaaccugccccgggggaagggg

SEQ ID NO: 26440 - RNA, 24 nt, Artificial Sequence
  Synthetic oligonucleotide: Ptpn6-6095
cucaaccugccccgggggaagggg

SEQ ID NO: 26441 - RNA, 18 nt, Artificial Sequence
  Synthetic oligonucleotide: Ptpn6-6096
ggcagagggccgcagggg

SEQ ID NO: 26442 - RNA, 19 nt, Artificial Sequence
  Synthetic oligonucleotide: Ptpn6-6097
cggcagagggccgcagggg

SEQ ID NO: 26443 - RNA, 20 nt, Artificial Sequence
  Synthetic oligonucleotide: Ptpn6-1876
acggcagagggccgcagggg

SEQ ID NO: 26444 - RNA, 21 nt, Artificial Sequence
  Synthetic oligonucleotide: Ptpn6-6098
cacggcagagggccgcagggg

SEQ ID NO: 26445 - RNA, 22 nt, Artificial Sequence
  Synthetic oligonucleotide: Ptpn6-6099
ccacggcagagggccgcagggg

SEQ ID NO: 26446 - RNA, 23 nt, Artificial Sequence
  Synthetic oligonucleotide: Ptpn6-6100
gccacggcagagggccgcagggg

SEQ ID NO: 26447 - RNA, 24 nt, Artificial Sequence
  Synthetic oligonucleotide: Ptpn6-6101
agccacggcagagggccgcagggg

SEQ ID NO: 26448 - RNA, 18 nt, Artificial Sequence
  Synthetic oligonucleotide: Ptpn6-6102
gggccgcagggggcgggg

SEQ ID NO: 26449 - RNA, 19 nt, Artificial Sequence
  Synthetic oligonucleotide: Ptpn6-6103
agggccgcagggggcgggg

SEQ ID NO: 26450 - RNA, 20 nt, Artificial Sequence
  Synthetic oligonucleotide: Ptpn6-1878
gagggccgcagggggcgggg

SEQ ID NO: 26451 - RNA, 21 nt, Artificial Sequence
  Synthetic oligonucleotide: Ptpn6-6104
agagggccgcagggggcgggg

SEQ ID NO: 26452 - RNA, 22 nt, Artificial Sequence
  Synthetic oligonucleotide: Ptpn6-6105
cagagggccgcagggggcgggg

SEQ ID NO: 26453 - RNA, 23 nt, Artificial Sequence
  Synthetic oligonucleotide: Ptpn6-6106
gcagagggccgcagggggcgggg

SEQ ID NO: 26454 - RNA, 24 nt, Artificial Sequence
  Synthetic oligonucleotide: Ptpn6-6107
ggcagagggccgcagggggcgggg

SEQ ID NO: 26455 - RNA, 18 nt, Artificial Sequence
  Synthetic oligonucleotide: Ptpn6-6108
gcagagggccgcaggggg

SEQ ID NO: 26456 - RNA, 19 nt, Artificial Sequence
  Synthetic oligonucleotide: Ptpn6-6109
ggcagagggccgcaggggg

SEQ ID NO: 26457 - RNA, 20 nt, Artificial Sequence
  Synthetic oligonucleotide: Ptpn6-1234
cggcagagggccgcaggggg

SEQ ID NO: 26458 - RNA, 21 nt, Artificial Sequence
  Synthetic oligonucleotide: Ptpn6-6110
acggcagagggccgcaggggg

SEQ ID NO: 26459 - RNA, 22 nt, Artificial Sequence
  Synthetic oligonucleotide: Ptpn6-6111
cacggcagagggccgcaggggg

SEQ ID NO: 26460 - RNA, 23 nt, Artificial Sequence
  Synthetic oligonucleotide: Ptpn6-6112
ccacggcagagggccgcaggggg

SEQ ID NO: 26461 - RNA, 24 nt, Artificial Sequence
  Synthetic oligonucleotide: Ptpn6-6113
gccacggcagagggccgcaggggg

SEQ ID NO: 26462 - RNA, 18 nt, Artificial Sequence
  Synthetic oligonucleotide: Ptpn6-6114
aaaauguuaaagaggggg

SEQ ID NO: 26463 - RNA, 19 nt, Artificial Sequence
  Synthetic oligonucleotide: Ptpn6-6115
gaaaauguuaaagaggggg

SEQ ID NO: 26464 - RNA, 20 nt, Artificial Sequence
  Synthetic oligonucleotide: Ptpn6-1832
ggaaaauguuaaagaggggg

SEQ ID NO: 26465 - RNA, 21 nt, Artificial Sequence
  Synthetic oligonucleotide: Ptpn6-6116
gggaaaauguuaaagaggggg

SEQ ID NO: 26466 - RNA, 22 nt, Artificial Sequence
  Synthetic oligonucleotide: Ptpn6-6117
ggggaaaauguuaaagaggggg

SEQ ID NO: 26467 - RNA, 23 nt, Artificial Sequence
  Synthetic oligonucleotide: Ptpn6-6118
aggggaaaauguuaaagaggggg

SEQ ID NO: 26468 - RNA, 24 nt, Artificial Sequence
  Synthetic oligonucleotide: Ptpn6-6119
caggggaaaauguuaaagaggggg

SEQ ID NO: 26469 - RNA, 18 nt, Artificial Sequence
  Synthetic oligonucleotide: Ptpn6-6120
cucaaccugccccggggg

SEQ ID NO: 26470 - RNA, 19 nt, Artificial Sequence
  Synthetic oligonucleotide: Ptpn6-6121
ucucaaccugccccggggg

SEQ ID NO: 26471 - RNA, 20 nt, Artificial Sequence
  Synthetic oligonucleotide: Ptpn6-2272
cucucaaccugccccggggg

SEQ ID NO: 26472 - RNA, 21 nt, Artificial Sequence
  Synthetic oligonucleotide: Ptpn6-6122
ccucucaaccugccccggggg

SEQ ID NO: 26473 - RNA, 22 nt, Artificial Sequence
  Synthetic oligonucleotide: Ptpn6-6123
gccucucaaccugccccggggg

SEQ ID NO: 26474 - RNA, 23 nt, Artificial Sequence
  Synthetic oligonucleotide: Ptpn6-6124
agccucucaaccugccccggggg

SEQ ID NO: 26475 - RNA, 24 nt, Artificial Sequence
  Synthetic oligonucleotide: Ptpn6-6125
cagccucucaaccugccccggggg

SEQ ID NO: 26476 - RNA, 18 nt, Artificial Sequence
  Synthetic oligonucleotide: Ptpn6-6126
ggaaaaggacaggugggg

SEQ ID NO: 26477 - RNA, 19 nt, Artificial Sequence
  Synthetic oligonucleotide: Ptpn6-6127
aggaaaaggacaggugggg

SEQ ID NO: 26478 - RNA, 20 nt, Artificial Sequence
  Synthetic oligonucleotide: Ptpn6-1252
caggaaaaggacaggugggg

SEQ ID NO: 26479 - RNA, 21 nt, Artificial Sequence
  Synthetic oligonucleotide: Ptpn6-6128
ccaggaaaaggacaggugggg

SEQ ID NO: 26480 - RNA, 22 nt, Artificial Sequence
  Synthetic oligonucleotide: Ptpn6-6129
uccaggaaaaggacaggugggg

SEQ ID NO: 26481 - RNA, 23 nt, Artificial Sequence
  Synthetic oligonucleotide: Ptpn6-6130
cuccaggaaaaggacaggugggg

SEQ ID NO: 26482 - RNA, 24 nt, Artificial Sequence
  Synthetic oligonucleotide: Ptpn6-6131
ucuccaggaaaaggacaggugggg

SEQ ID NO: 26483 - RNA, 18 nt, Artificial Sequence
  Synthetic oligonucleotide: Ptpn6-6132
aggaaaaggacagguggg

SEQ ID NO: 26484 - RNA, 19 nt, Artificial Sequence
  Synthetic oligonucleotide: Ptpn6-6133
caggaaaaggacagguggg

SEQ ID NO: 26485 - RNA, 20 nt, Artificial Sequence
  Synthetic oligonucleotide: Ptpn6-1891
ccaggaaaaggacagguggg

SEQ ID NO: 26486 - RNA, 21 nt, Artificial Sequence
  Synthetic oligonucleotide: Ptpn6-6134
uccaggaaaaggacagguggg

SEQ ID NO: 26487 - RNA, 22 nt, Artificial Sequence
  Synthetic oligonucleotide: Ptpn6-6135
cuccaggaaaaggacagguggg

SEQ ID NO: 26488 - RNA, 23 nt, Artificial Sequence
  Synthetic oligonucleotide: Ptpn6-6136
ucuccaggaaaaggacagguggg

SEQ ID NO: 26489 - RNA, 24 nt, Artificial Sequence
  Synthetic oligonucleotide: Ptpn6-6137
gucuccaggaaaaggacagguggg

SEQ ID NO: 26490 - RNA, 18 nt, Artificial Sequence
  Synthetic oligonucleotide: Ptpn6-6138
gagcggcgggguauuggg

SEQ ID NO: 26491 - RNA, 19 nt, Artificial Sequence
  Synthetic oligonucleotide: Ptpn6-6139
agagcggcgggguauuggg

SEQ ID NO: 26492 - RNA, 20 nt, Artificial Sequence
  Synthetic oligonucleotide: Ptpn6-1914
cagagcggcgggguauuggg

SEQ ID NO: 26493 - RNA, 21 nt, Artificial Sequence
  Synthetic oligonucleotide: Ptpn6-6140
acagagcggcgggguauuggg

SEQ ID NO: 26494 - RNA, 22 nt, Artificial Sequence
  Synthetic oligonucleotide: Ptpn6-6141
gacagagcggcgggguauuggg

SEQ ID NO: 26495 - RNA, 23 nt, Artificial Sequence
  Synthetic oligonucleotide: Ptpn6-6142
ugacagagcggcgggguauuggg

SEQ ID NO: 26496 - RNA, 24 nt, Artificial Sequence
  Synthetic oligonucleotide: Ptpn6-6143
cugacagagcggcgggguauuggg

SEQ ID NO: 26497 - RNA, 18 nt, Artificial Sequence
  Synthetic oligonucleotide: Ptpn6-6144
aggaagagcaaccaaugg

SEQ ID NO: 26498 - RNA, 19 nt, Artificial Sequence
  Synthetic oligonucleotide: Ptpn6-6145
gaggaagagcaaccaaugg

SEQ ID NO: 26499 - RNA, 20 nt, Artificial Sequence
  Synthetic oligonucleotide: Ptpn6-1221
ugaggaagagcaaccaaugg

SEQ ID NO: 26500 - RNA, 21 nt, Artificial Sequence
  Synthetic oligonucleotide: Ptpn6-6146
cugaggaagagcaaccaaugg

SEQ ID NO: 26501 - RNA, 22 nt, Artificial Sequence
  Synthetic oligonucleotide: Ptpn6-6147
gcugaggaagagcaaccaaugg

SEQ ID NO: 26502 - RNA, 23 nt, Artificial Sequence
  Synthetic oligonucleotide: Ptpn6-6148
ggcugaggaagagcaaccaaugg

SEQ ID NO: 26503 - RNA, 24 nt, Artificial Sequence
  Synthetic oligonucleotide: Ptpn6-6149
uggcugaggaagagcaaccaaugg

SEQ ID NO: 26504 - RNA, 18 nt, Artificial Sequence
  Synthetic oligonucleotide: Ptpn6-6150
accaggaaguaacccugg

SEQ ID NO: 26505 - RNA, 19 nt, Artificial Sequence
  Synthetic oligonucleotide: Ptpn6-6151
gaccaggaaguaacccugg

SEQ ID NO: 26506 - RNA, 20 nt, Artificial Sequence
  Synthetic oligonucleotide: Ptpn6-1920
agaccaggaaguaacccugg

SEQ ID NO: 26507 - RNA, 21 nt, Artificial Sequence
  Synthetic oligonucleotide: Ptpn6-6152
cagaccaggaaguaacccugg

SEQ ID NO: 26508 - RNA, 22 nt, Artificial Sequence
  Synthetic oligonucleotide: Ptpn6-6153
acagaccaggaaguaacccugg

SEQ ID NO: 26509 - RNA, 23 nt, Artificial Sequence
  Synthetic oligonucleotide: Ptpn6-6154
aacagaccaggaaguaacccugg

SEQ ID NO: 26510 - RNA, 24 nt, Artificial Sequence
  Synthetic oligonucleotide: Ptpn6-6155
gaacagaccaggaaguaacccugg

SEQ ID NO: 26511 - RNA, 18 nt, Artificial Sequence
  Synthetic oligonucleotide: Ptpn6-6156
gaggaagagcaaccaaug

SEQ ID NO: 26512 - RNA, 19 nt, Artificial Sequence
  Synthetic oligonucleotide: Ptpn6-6157
ugaggaagagcaaccaaug

SEQ ID NO: 26513 - RNA, 20 nt, Artificial Sequence
  Synthetic oligonucleotide: Ptpn6-1239
cugaggaagagcaaccaaug

SEQ ID NO: 26514 - RNA, 21 nt, Artificial Sequence
  Synthetic oligonucleotide: Ptpn6-6158
gcugaggaagagcaaccaaug

SEQ ID NO: 26515 - RNA, 22 nt, Artificial Sequence
  Synthetic oligonucleotide: Ptpn6-6159
ggcugaggaagagcaaccaaug

SEQ ID NO: 26516 - RNA, 23 nt, Artificial Sequence
  Synthetic oligonucleotide: Ptpn6-6160
uggcugaggaagagcaaccaaug

SEQ ID NO: 26517 - RNA, 24 nt, Artificial Sequence
  Synthetic oligonucleotide: Ptpn6-6161
cuggcugaggaagagcaaccaaug

SEQ ID NO: 26518 - RNA, 18 nt, Artificial Sequence
  Synthetic oligonucleotide: Ptpn6-6162
ggaaguagaaaugcaaug

SEQ ID NO: 26519 - RNA, 19 nt, Artificial Sequence
  Synthetic oligonucleotide: Ptpn6-6163
uggaaguagaaaugcaaug

SEQ ID NO: 26520 - RNA, 20 nt, Artificial Sequence
  Synthetic oligonucleotide: Ptpn6-1822
cuggaaguagaaaugcaaug

SEQ ID NO: 26521 - RNA, 21 nt, Artificial Sequence
  Synthetic oligonucleotide: Ptpn6-6164
gcuggaaguagaaaugcaaug

SEQ ID NO: 26522 - RNA, 22 nt, Artificial Sequence
  Synthetic oligonucleotide: Ptpn6-6165
ggcuggaaguagaaaugcaaug

SEQ ID NO: 26523 - RNA, 23 nt, Artificial Sequence
  Synthetic oligonucleotide: Ptpn6-6166
aggcuggaaguagaaaugcaaug

SEQ ID NO: 26524 - RNA, 24 nt, Artificial Sequence
  Synthetic oligonucleotide: Ptpn6-6167
gaggcuggaaguagaaaugcaaug

SEQ ID NO: 26525 - RNA, 18 nt, Artificial Sequence
  Synthetic oligonucleotide: Ptpn6-6168
gccaggccaauggcacug

SEQ ID NO: 26526 - RNA, 19 nt, Artificial Sequence
  Synthetic oligonucleotide: Ptpn6-6169
ugccaggccaauggcacug

SEQ ID NO: 26527 - RNA, 20 nt, Artificial Sequence
  Synthetic oligonucleotide: Ptpn6-1883
cugccaggccaauggcacug

SEQ ID NO: 26528 - RNA, 21 nt, Artificial Sequence
  Synthetic oligonucleotide: Ptpn6-6170
ccugccaggccaauggcacug

SEQ ID NO: 26529 - RNA, 22 nt, Artificial Sequence
  Synthetic oligonucleotide: Ptpn6-6171
gccugccaggccaauggcacug

SEQ ID NO: 26530 - RNA, 23 nt, Artificial Sequence
  Synthetic oligonucleotide: Ptpn6-6172
ugccugccaggccaauggcacug

SEQ ID NO: 26531 - RNA, 24 nt, Artificial Sequence
  Synthetic oligonucleotide: Ptpn6-6173
cugccugccaggccaauggcacug

SEQ ID NO: 26532 - RNA, 18 nt, Artificial Sequence
  Synthetic oligonucleotide: Ptpn6-6174
cacccacccagggcgcug

SEQ ID NO: 26533 - RNA, 19 nt, Artificial Sequence
  Synthetic oligonucleotide: Ptpn6-6175
ccacccacccagggcgcug

SEQ ID NO: 26534 - RNA, 20 nt, Artificial Sequence
  Synthetic oligonucleotide: Ptpn6-1510
cccacccacccagggcgcug

SEQ ID NO: 26535 - RNA, 21 nt, Artificial Sequence
  Synthetic oligonucleotide: Ptpn6-6176
gcccacccacccagggcgcug

SEQ ID NO: 26536 - RNA, 22 nt, Artificial Sequence
  Synthetic oligonucleotide: Ptpn6-6177
ggcccacccacccagggcgcug

SEQ ID NO: 26537 - RNA, 23 nt, Artificial Sequence
  Synthetic oligonucleotide: Ptpn6-6178
aggcccacccacccagggcgcug

SEQ ID NO: 26538 - RNA, 24 nt, Artificial Sequence
  Synthetic oligonucleotide: Ptpn6-6179
caggcccacccacccagggcgcug

SEQ ID NO: 26539 - RNA, 18 nt, Artificial Sequence
  Synthetic oligonucleotide: Ptpn6-6180
aggaaguaacccuggcug

SEQ ID NO: 26540 - RNA, 19 nt, Artificial Sequence
  Synthetic oligonucleotide: Ptpn6-6181
caggaaguaacccuggcug

SEQ ID NO: 26541 - RNA, 20 nt, Artificial Sequence
  Synthetic oligonucleotide: Ptpn6-1231
ccaggaaguaacccuggcug

SEQ ID NO: 26542 - RNA, 21 nt, Artificial Sequence
  Synthetic oligonucleotide: Ptpn6-6182
accaggaaguaacccuggcug

SEQ ID NO: 26543 - RNA, 22 nt, Artificial Sequence
  Synthetic oligonucleotide: Ptpn6-6183
gaccaggaaguaacccuggcug

SEQ ID NO: 26544 - RNA, 23 nt, Artificial Sequence
  Synthetic oligonucleotide: Ptpn6-6184
agaccaggaaguaacccuggcug

SEQ ID NO: 26545 - RNA, 24 nt, Artificial Sequence
  Synthetic oligonucleotide: Ptpn6-6185
cagaccaggaaguaacccuggcug

SEQ ID NO: 26546 - RNA, 18 nt, Artificial Sequence
  Synthetic oligonucleotide: Ptpn6-3199
cgggacagcaucucucug

SEQ ID NO: 26547 - RNA, 19 nt, Artificial Sequence
  Synthetic oligonucleotide: Ptpn6-3200
acgggacagcaucucucug

SEQ ID NO: 26548 - RNA, 20 nt, Artificial Sequence
  Synthetic oligonucleotide: Ptpn6-1863
cacgggacagcaucucucug

SEQ ID NO: 26549 - RNA, 21 nt, Artificial Sequence
  Synthetic oligonucleotide: Ptpn6-3201
ccacgggacagcaucucucug

SEQ ID NO: 26550 - RNA, 22 nt, Artificial Sequence
  Synthetic oligonucleotide: Ptpn6-3202
cccacgggacagcaucucucug

SEQ ID NO: 26551 - RNA, 23 nt, Artificial Sequence
  Synthetic oligonucleotide: Ptpn6-3203
acccacgggacagcaucucucug

SEQ ID NO: 26552 - RNA, 24 nt, Artificial Sequence
  Synthetic oligonucleotide: Ptpn6-3204
uacccacgggacagcaucucucug

SEQ ID NO: 26553 - RNA, 18 nt, Artificial Sequence
  Synthetic oligonucleotide: Ptpn6-6186
aguggcccaagccaggug

SEQ ID NO: 26554 - RNA, 19 nt, Artificial Sequence
  Synthetic oligonucleotide: Ptpn6-6187
caguggcccaagccaggug

SEQ ID NO: 26555 - RNA, 20 nt, Artificial Sequence
  Synthetic oligonucleotide: Ptpn6-1235
acaguggcccaagccaggug

SEQ ID NO: 26556 - RNA, 21 nt, Artificial Sequence
  Synthetic oligonucleotide: Ptpn6-6188
cacaguggcccaagccaggug

SEQ ID NO: 26557 - RNA, 22 nt, Artificial Sequence
  Synthetic oligonucleotide: Ptpn6-6189
gcacaguggcccaagccaggug

SEQ ID NO: 26558 - RNA, 23 nt, Artificial Sequence
  Synthetic oligonucleotide: Ptpn6-6190
ugcacaguggcccaagccaggug

SEQ ID NO: 26559 - RNA, 24 nt, Artificial Sequence
  Synthetic oligonucleotide: Ptpn6-6191
gugcacaguggcccaagccaggug

SEQ ID NO: 26560 - RNA, 18 nt, Artificial Sequence
  Synthetic oligonucleotide: Ptpn6-6192
ggggguccucacaccuug

SEQ ID NO: 26561 - RNA, 19 nt, Artificial Sequence
  Synthetic oligonucleotide: Ptpn6-6193
cggggguccucacaccuug

SEQ ID NO: 26562 - RNA, 20 nt, Artificial Sequence
  Synthetic oligonucleotide: Ptpn6-990
ccggggguccucacaccuug

SEQ ID NO: 26563 - RNA, 21 nt, Artificial Sequence
  Synthetic oligonucleotide: Ptpn6-6194
gccggggguccucacaccuug

SEQ ID NO: 26564 - RNA, 22 nt, Artificial Sequence
  Synthetic oligonucleotide: Ptpn6-6195
agccggggguccucacaccuug

SEQ ID NO: 26565 - RNA, 23 nt, Artificial Sequence
  Synthetic oligonucleotide: Ptpn6-6196
gagccggggguccucacaccuug

SEQ ID NO: 26566 - RNA, 24 nt, Artificial Sequence
  Synthetic oligonucleotide: Ptpn6-6197
ugagccggggguccucacaccuug

SEQ ID NO: 26567 - RNA, 18 nt, Artificial Sequence
  Synthetic oligonucleotide: Ptpn6-6198
ugaggaagagcaaccaau

SEQ ID NO: 26568 - RNA, 19 nt, Artificial Sequence
  Synthetic oligonucleotide: Ptpn6-6199
cugaggaagagcaaccaau

SEQ ID NO: 26569 - RNA, 20 nt, Artificial Sequence
  Synthetic oligonucleotide: Ptpn6-1029
gcugaggaagagcaaccaau

SEQ ID NO: 26570 - RNA, 21 nt, Artificial Sequence
  Synthetic oligonucleotide: Ptpn6-6200
ggcugaggaagagcaaccaau

SEQ ID NO: 26571 - RNA, 22 nt, Artificial Sequence
  Synthetic oligonucleotide: Ptpn6-6201
uggcugaggaagagcaaccaau

SEQ ID NO: 26572 - RNA, 23 nt, Artificial Sequence
  Synthetic oligonucleotide: Ptpn6-6202
cuggcugaggaagagcaaccaau

SEQ ID NO: 26573 - RNA, 24 nt, Artificial Sequence
  Synthetic oligonucleotide: Ptpn6-6203
ccuggcugaggaagagcaaccaau

SEQ ID NO: 26574 - RNA, 18 nt, Artificial Sequence
  Synthetic oligonucleotide: Ptpn6-6204
aggcccagccaggaccau

SEQ ID NO: 26575 - RNA, 19 nt, Artificial Sequence
  Synthetic oligonucleotide: Ptpn6-6205
uaggcccagccaggaccau

SEQ ID NO: 26576 - RNA, 20 nt, Artificial Sequence
  Synthetic oligonucleotide: Ptpn6-1531
uuaggcccagccaggaccau

SEQ ID NO: 26577 - RNA, 21 nt, Artificial Sequence
  Synthetic oligonucleotide: Ptpn6-6206
guuaggcccagccaggaccau

SEQ ID NO: 26578 - RNA, 22 nt, Artificial Sequence
  Synthetic oligonucleotide: Ptpn6-6207
gguuaggcccagccaggaccau

SEQ ID NO: 26579 - RNA, 23 nt, Artificial Sequence
  Synthetic oligonucleotide: Ptpn6-6208
ggguuaggcccagccaggaccau

SEQ ID NO: 26580 - RNA, 24 nt, Artificial Sequence
  Synthetic oligonucleotide: Ptpn6-6209
aggguuaggcccagccaggaccau

SEQ ID NO: 26581 - RNA, 18 nt, Artificial Sequence
  Synthetic oligonucleotide: Ptpn6-6210
cgggaaggggaaguucau

SEQ ID NO: 26582 - RNA, 19 nt, Artificial Sequence
  Synthetic oligonucleotide: Ptpn6-6211
gcgggaaggggaaguucau

SEQ ID NO: 26583 - RNA, 20 nt, Artificial Sequence
  Synthetic oligonucleotide: Ptpn6-1211
ugcgggaaggggaaguucau

SEQ ID NO: 26584 - RNA, 21 nt, Artificial Sequence
  Synthetic oligonucleotide: Ptpn6-6212
uugcgggaaggggaaguucau

SEQ ID NO: 26585 - RNA, 22 nt, Artificial Sequence
  Synthetic oligonucleotide: Ptpn6-6213
cuugcgggaaggggaaguucau

SEQ ID NO: 26586 - RNA, 23 nt, Artificial Sequence
  Synthetic oligonucleotide: Ptpn6-6214
ccuugcgggaaggggaaguucau

SEQ ID NO: 26587 - RNA, 24 nt, Artificial Sequence
  Synthetic oligonucleotide: Ptpn6-6215
accuugcgggaaggggaaguucau

SEQ ID NO: 26588 - RNA, 18 nt, Artificial Sequence
  Synthetic oligonucleotide: Ptpn6-6216
gcggaaaccaaagggccu

SEQ ID NO: 26589 - RNA, 19 nt, Artificial Sequence
  Synthetic oligonucleotide: Ptpn6-6217
ggcggaaaccaaagggccu

SEQ ID NO: 26590 - RNA, 20 nt, Artificial Sequence
  Synthetic oligonucleotide: Ptpn6-1932
aggcggaaaccaaagggccu

SEQ ID NO: 26591 - RNA, 21 nt, Artificial Sequence
  Synthetic oligonucleotide: Ptpn6-6218
uaggcggaaaccaaagggccu

SEQ ID NO: 26592 - RNA, 22 nt, Artificial Sequence
  Synthetic oligonucleotide: Ptpn6-6219
guaggcggaaaccaaagggccu

SEQ ID NO: 26593 - RNA, 23 nt, Artificial Sequence
  Synthetic oligonucleotide: Ptpn6-6220
cguaggcggaaaccaaagggccu

SEQ ID NO: 26594 - RNA, 24 nt, Artificial Sequence
  Synthetic oligonucleotide: Ptpn6-6221
ccguaggcggaaaccaaagggccu

SEQ ID NO: 26595 - RNA, 18 nt, Artificial Sequence
  Synthetic oligonucleotide: Ptpn6-6222
ccuaacagcccaguuccu

SEQ ID NO: 26596 - RNA, 19 nt, Artificial Sequence
  Synthetic oligonucleotide: Ptpn6-6223
cccuaacagcccaguuccu

SEQ ID NO: 26597 - RNA, 20 nt, Artificial Sequence
  Synthetic oligonucleotide: Ptpn6-1934
ucccuaacagcccaguuccu

SEQ ID NO: 26598 - RNA, 21 nt, Artificial Sequence
  Synthetic oligonucleotide: Ptpn6-6224
aucccuaacagcccaguuccu

SEQ ID NO: 26599 - RNA, 22 nt, Artificial Sequence
  Synthetic oligonucleotide: Ptpn6-6225
aaucccuaacagcccaguuccu

SEQ ID NO: 26600 - RNA, 23 nt, Artificial Sequence
  Synthetic oligonucleotide: Ptpn6-6226
aaaucccuaacagcccaguuccu

SEQ ID NO: 26601 - RNA, 24 nt, Artificial Sequence
  Synthetic oligonucleotide: Ptpn6-6227
aaaaucccuaacagcccaguuccu

SEQ ID NO: 26602 - RNA, 18 nt, Artificial Sequence
  Synthetic oligonucleotide: Ptpn6-6228
ccacccacccagggcgcu

SEQ ID NO: 26603 - RNA, 19 nt, Artificial Sequence
  Synthetic oligonucleotide: Ptpn6-6229
cccacccacccagggcgcu

SEQ ID NO: 26604 - RNA, 20 nt, Artificial Sequence
  Synthetic oligonucleotide: Ptpn6-2266
gcccacccacccagggcgcu

SEQ ID NO: 26605 - RNA, 21 nt, Artificial Sequence
  Synthetic oligonucleotide: Ptpn6-6230
ggcccacccacccagggcgcu

SEQ ID NO: 26606 - RNA, 22 nt, Artificial Sequence
  Synthetic oligonucleotide: Ptpn6-6231
aggcccacccacccagggcgcu

SEQ ID NO: 26607 - RNA, 23 nt, Artificial Sequence
  Synthetic oligonucleotide: Ptpn6-6232
caggcccacccacccagggcgcu

SEQ ID NO: 26608 - RNA, 24 nt, Artificial Sequence
  Synthetic oligonucleotide: Ptpn6-6233
gcaggcccacccacccagggcgcu

SEQ ID NO: 26609 - RNA, 18 nt, Artificial Sequence
  Synthetic oligonucleotide: Ptpn6-6234
caggaaguaacccuggcu

SEQ ID NO: 26610 - RNA, 19 nt, Artificial Sequence
  Synthetic oligonucleotide: Ptpn6-6235
ccaggaaguaacccuggcu

SEQ ID NO: 26611 - RNA, 20 nt, Artificial Sequence
  Synthetic oligonucleotide: Ptpn6-1921
accaggaaguaacccuggcu

SEQ ID NO: 26612 - RNA, 21 nt, Artificial Sequence
  Synthetic oligonucleotide: Ptpn6-6236
gaccaggaaguaacccuggcu

SEQ ID NO: 26613 - RNA, 22 nt, Artificial Sequence
  Synthetic oligonucleotide: Ptpn6-6237
agaccaggaaguaacccuggcu

SEQ ID NO: 26614 - RNA, 23 nt, Artificial Sequence
  Synthetic oligonucleotide: Ptpn6-6238
cagaccaggaaguaacccuggcu

SEQ ID NO: 26615 - RNA, 24 nt, Artificial Sequence
  Synthetic oligonucleotide: Ptpn6-6239
acagaccaggaaguaacccuggcu

SEQ ID NO: 26616 - RNA, 18 nt, Artificial Sequence
  Synthetic oligonucleotide: Ptpn6-6240
caguggcccaagccaggu

SEQ ID NO: 26617 - RNA, 19 nt, Artificial Sequence
  Synthetic oligonucleotide: Ptpn6-6241
acaguggcccaagccaggu

SEQ ID NO: 26618 - RNA, 20 nt, Artificial Sequence
  Synthetic oligonucleotide: Ptpn6-1880
cacaguggcccaagccaggu

SEQ ID NO: 26619 - RNA, 21 nt, Artificial Sequence
  Synthetic oligonucleotide: Ptpn6-6242
gcacaguggcccaagccaggu

SEQ ID NO: 26620 - RNA, 22 nt, Artificial Sequence
  Synthetic oligonucleotide: Ptpn6-6243
ugcacaguggcccaagccaggu

SEQ ID NO: 26621 - RNA, 23 nt, Artificial Sequence
  Synthetic oligonucleotide: Ptpn6-6244
gugcacaguggcccaagccaggu

SEQ ID NO: 26622 - RNA, 24 nt, Artificial Sequence
  Synthetic oligonucleotide: Ptpn6-6245
ugugcacaguggcccaagccaggu

SEQ ID NO: 26623 - RNA, 18 nt, Artificial Sequence
  Synthetic oligonucleotide: Ptpn6-6246
agcggcgggguauugggu

SEQ ID NO: 26624 - RNA, 19 nt, Artificial Sequence
  Synthetic oligonucleotide: Ptpn6-6247
gagcggcgggguauugggu

SEQ ID NO: 26625 - RNA, 20 nt, Artificial Sequence
  Synthetic oligonucleotide: Ptpn6-980
agagcggcgggguauugggu

SEQ ID NO: 26626 - RNA, 21 nt, Artificial Sequence
  Synthetic oligonucleotide: Ptpn6-6248
cagagcggcgggguauugggu

SEQ ID NO: 26627 - RNA, 22 nt, Artificial Sequence
  Synthetic oligonucleotide: Ptpn6-6249
acagagcggcgggguauugggu

SEQ ID NO: 26628 - RNA, 23 nt, Artificial Sequence
  Synthetic oligonucleotide: Ptpn6-6250
gacagagcggcgggguauugggu

SEQ ID NO: 26629 - RNA, 24 nt, Artificial Sequence
  Synthetic oligonucleotide: Ptpn6-6251
ugacagagcggcgggguauugggu

SEQ ID NO: 26630 - RNA, 18 nt, Artificial Sequence
  Synthetic oligonucleotide: Ptpn6-3224
gggacagcaucucucugu

SEQ ID NO: 26631 - RNA, 19 nt, Artificial Sequence
  Synthetic oligonucleotide: Ptpn6-3225
cgggacagcaucucucugu

SEQ ID NO: 26632 - RNA, 20 nt, Artificial Sequence
  Synthetic oligonucleotide: Ptpn6-1190
acgggacagcaucucucugu

SEQ ID NO: 26633 - RNA, 21 nt, Artificial Sequence
  Synthetic oligonucleotide: Ptpn6-3226
cacgggacagcaucucucugu

SEQ ID NO: 26634 - RNA, 22 nt, Artificial Sequence
  Synthetic oligonucleotide: Ptpn6-3227
ccacgggacagcaucucucugu

SEQ ID NO: 26635 - RNA, 23 nt, Artificial Sequence
  Synthetic oligonucleotide: Ptpn6-3228
cccacgggacagcaucucucugu

SEQ ID NO: 26636 - RNA, 24 nt, Artificial Sequence
  Synthetic oligonucleotide: Ptpn6-3229
acccacgggacagcaucucucugu

SEQ ID NO: 26637 - RNA, 18 nt, Artificial Sequence
  Synthetic oligonucleotide: Ptpn6-6252
cggggguccucacaccuu

SEQ ID NO: 26638 - RNA, 19 nt, Artificial Sequence
  Synthetic oligonucleotide: Ptpn6-6253
ccggggguccucacaccuu

SEQ ID NO: 26639 - RNA, 20 nt, Artificial Sequence
  Synthetic oligonucleotide: Ptpn6-1840
gccggggguccucacaccuu

SEQ ID NO: 26640 - RNA, 21 nt, Artificial Sequence
  Synthetic oligonucleotide: Ptpn6-6254
agccggggguccucacaccuu

SEQ ID NO: 26641 - RNA, 22 nt, Artificial Sequence
  Synthetic oligonucleotide: Ptpn6-6255
gagccggggguccucacaccuu

SEQ ID NO: 26642 - RNA, 23 nt, Artificial Sequence
  Synthetic oligonucleotide: Ptpn6-6256
ugagccggggguccucacaccuu

SEQ ID NO: 26643 - RNA, 24 nt, Artificial Sequence
  Synthetic oligonucleotide: Ptpn6-6257
gugagccggggguccucacaccuu

SEQ ID NO: 26644 - RNA, 18 nt, Artificial Sequence
  Synthetic oligonucleotide: Ptpn6-6258
ccauagggaggagcuguu

SEQ ID NO: 26645 - RNA, 19 nt, Artificial Sequence
  Synthetic oligonucleotide: Ptpn6-6259
accauagggaggagcuguu

SEQ ID NO: 26646 - RNA, 20 nt, Artificial Sequence
  Synthetic oligonucleotide: Ptpn6-2286
gaccauagggaggagcuguu

SEQ ID NO: 26647 - RNA, 21 nt, Artificial Sequence
  Synthetic oligonucleotide: Ptpn6-6260
ggaccauagggaggagcuguu

SEQ ID NO: 26648 - RNA, 22 nt, Artificial Sequence
  Synthetic oligonucleotide: Ptpn6-6261
aggaccauagggaggagcuguu

SEQ ID NO: 26649 - RNA, 23 nt, Artificial Sequence
  Synthetic oligonucleotide: Ptpn6-6262
caggaccauagggaggagcuguu

SEQ ID NO: 26650 - RNA, 24 nt, Artificial Sequence
  Synthetic oligonucleotide: Ptpn6-6263
ccaggaccauagggaggagcuguu

SEQ ID NO: 26651 - RNA, 18 nt, Artificial Sequence
  Synthetic oligonucleotide: Ptpn6-6264
ugcuauguuugagguguu

SEQ ID NO: 26652 - RNA, 19 nt, Artificial Sequence
  Synthetic oligonucleotide: Ptpn6-6265
cugcuauguuugagguguu

SEQ ID NO: 26653 - RNA, 20 nt, Artificial Sequence
  Synthetic oligonucleotide: Ptpn6-1780
acugcuauguuugagguguu

SEQ ID NO: 26654 - RNA, 21 nt, Artificial Sequence
  Synthetic oligonucleotide: Ptpn6-6266
gacugcuauguuugagguguu

SEQ ID NO: 26655 - RNA, 22 nt, Artificial Sequence
  Synthetic oligonucleotide: Ptpn6-6267
ugacugcuauguuugagguguu

SEQ ID NO: 26656 - RNA, 23 nt, Artificial Sequence
  Synthetic oligonucleotide: Ptpn6-6268
cugacugcuauguuugagguguu

SEQ ID NO: 26657 - RNA, 24 nt, Artificial Sequence
  Synthetic oligonucleotide: Ptpn6-6269
ucugacugcuauguuugagguguu

SEQ ID NO: 26658 - RNA, 18 nt, Artificial Sequence
  Synthetic oligonucleotide: Ptpn6-6270
accuccuucucugaggaa

SEQ ID NO: 26659 - RNA, 19 nt, Artificial Sequence
  Synthetic oligonucleotide: Ptpn6-6271
uaccuccuucucugaggaa

SEQ ID NO: 26660 - RNA, 20 nt, Artificial Sequence
  Synthetic oligonucleotide: Ptpn6-1656
guaccuccuucucugaggaa

SEQ ID NO: 26661 - RNA, 21 nt, Artificial Sequence
  Synthetic oligonucleotide: Ptpn6-6272
gguaccuccuucucugaggaa

SEQ ID NO: 26662 - RNA, 22 nt, Artificial Sequence
  Synthetic oligonucleotide: Ptpn6-6273
ggguaccuccuucucugaggaa

SEQ ID NO: 26663 - RNA, 23 nt, Artificial Sequence
  Synthetic oligonucleotide: Ptpn6-6274
gggguaccuccuucucugaggaa

SEQ ID NO: 26664 - RNA, 24 nt, Artificial Sequence
  Synthetic oligonucleotide: Ptpn6-6275
ggggguaccuccuucucugaggaa

SEQ ID NO: 26665 - RNA, 18 nt, Artificial Sequence
  Synthetic oligonucleotide: Ptpn6-3230
ggcuucccccucccuaca

SEQ ID NO: 26666 - RNA, 19 nt, Artificial Sequence
  Synthetic oligonucleotide: Ptpn6-3231
uggcuucccccucccuaca

SEQ ID NO: 26667 - RNA, 20 nt, Artificial Sequence
  Synthetic oligonucleotide: Ptpn6-1689
guggcuucccccucccuaca

SEQ ID NO: 26668 - RNA, 21 nt, Artificial Sequence
  Synthetic oligonucleotide: Ptpn6-3232
cguggcuucccccucccuaca

SEQ ID NO: 26669 - RNA, 22 nt, Artificial Sequence
  Synthetic oligonucleotide: Ptpn6-3233
ccguggcuucccccucccuaca

SEQ ID NO: 26670 - RNA, 23 nt, Artificial Sequence
  Synthetic oligonucleotide: Ptpn6-3234
gccguggcuucccccucccuaca

SEQ ID NO: 26671 - RNA, 24 nt, Artificial Sequence
  Synthetic oligonucleotide: Ptpn6-3235
ugccguggcuucccccucccuaca

SEQ ID NO: 26672 - RNA, 18 nt, Artificial Sequence
  Synthetic oligonucleotide: Ptpn6-3236
gguaagucccgggcacca

SEQ ID NO: 26673 - RNA, 19 nt, Artificial Sequence
  Synthetic oligonucleotide: Ptpn6-3237
ggguaagucccgggcacca

SEQ ID NO: 26674 - RNA, 20 nt, Artificial Sequence
  Synthetic oligonucleotide: Ptpn6-1692
uggguaagucccgggcacca

SEQ ID NO: 26675 - RNA, 21 nt, Artificial Sequence
  Synthetic oligonucleotide: Ptpn6-3238
guggguaagucccgggcacca

SEQ ID NO: 26676 - RNA, 22 nt, Artificial Sequence
  Synthetic oligonucleotide: Ptpn6-3239
cguggguaagucccgggcacca

SEQ ID NO: 26677 - RNA, 23 nt, Artificial Sequence
  Synthetic oligonucleotide: Ptpn6-3240
ccguggguaagucccgggcacca

SEQ ID NO: 26678 - RNA, 24 nt, Artificial Sequence
  Synthetic oligonucleotide: Ptpn6-3241
cccguggguaagucccgggcacca

SEQ ID NO: 26679 - RNA, 18 nt, Artificial Sequence
  Synthetic oligonucleotide: Ptpn6-6276
ugggugggugggccugca

SEQ ID NO: 26680 - RNA, 19 nt, Artificial Sequence
  Synthetic oligonucleotide: Ptpn6-6277
cugggugggugggccugca

SEQ ID NO: 26681 - RNA, 20 nt, Artificial Sequence
  Synthetic oligonucleotide: Ptpn6-6278
ccugggugggugggccugca

SEQ ID NO: 26682 - RNA, 21 nt, Artificial Sequence
  Synthetic oligonucleotide: Ptpn6-6279
cccugggugggugggccugca

SEQ ID NO: 26683 - RNA, 22 nt, Artificial Sequence
  Synthetic oligonucleotide: Ptpn6-6280
gcccugggugggugggccugca

SEQ ID NO: 26684 - RNA, 23 nt, Artificial Sequence
  Synthetic oligonucleotide: Ptpn6-6281
cgcccugggugggugggccugca

SEQ ID NO: 26685 - RNA, 24 nt, Artificial Sequence
  Synthetic oligonucleotide: Ptpn6-6282
gcgcccugggugggugggccugca

SEQ ID NO: 26686 - RNA, 18 nt, Artificial Sequence
  Synthetic oligonucleotide: Ptpn6-6283
ucccgcuuuggggcugca

SEQ ID NO: 26687 - RNA, 19 nt, Artificial Sequence
  Synthetic oligonucleotide: Ptpn6-6284
cucccgcuuuggggcugca

SEQ ID NO: 26688 - RNA, 20 nt, Artificial Sequence
  Synthetic oligonucleotide: Ptpn6-1140
acucccgcuuuggggcugca

SEQ ID NO: 26689 - RNA, 21 nt, Artificial Sequence
  Synthetic oligonucleotide: Ptpn6-6285
uacucccgcuuuggggcugca

SEQ ID NO: 26690 - RNA, 22 nt, Artificial Sequence
  Synthetic oligonucleotide: Ptpn6-6286
guacucccgcuuuggggcugca

SEQ ID NO: 26691 - RNA, 23 nt, Artificial Sequence
  Synthetic oligonucleotide: Ptpn6-6287
uguacucccgcuuuggggcugca

SEQ ID NO: 26692 - RNA, 24 nt, Artificial Sequence
  Synthetic oligonucleotide: Ptpn6-6288
cuguacucccgcuuuggggcugca

SEQ ID NO: 26693 - RNA, 18 nt, Artificial Sequence
  Synthetic oligonucleotide: Ptpn6-6289
uuggccuggcaggcagga

SEQ ID NO: 26694 - RNA, 19 nt, Artificial Sequence
  Synthetic oligonucleotide: Ptpn6-6290
auuggccuggcaggcagga

SEQ ID NO: 26695 - RNA, 20 nt, Artificial Sequence
  Synthetic oligonucleotide: Ptpn6-1681
cauuggccuggcaggcagga

SEQ ID NO: 26696 - RNA, 21 nt, Artificial Sequence
  Synthetic oligonucleotide: Ptpn6-6291
ccauuggccuggcaggcagga

SEQ ID NO: 26697 - RNA, 22 nt, Artificial Sequence
  Synthetic oligonucleotide: Ptpn6-6292
gccauuggccuggcaggcagga

SEQ ID NO: 26698 - RNA, 23 nt, Artificial Sequence
  Synthetic oligonucleotide: Ptpn6-6293
ugccauuggccuggcaggcagga

SEQ ID NO: 26699 - RNA, 24 nt, Artificial Sequence
  Synthetic oligonucleotide: Ptpn6-6294
gugccauuggccuggcaggcagga

SEQ ID NO: 26700 - RNA, 18 nt, Artificial Sequence
  Synthetic oligonucleotide: Ptpn6-6295
cuguuaguuuuggaggga

SEQ ID NO: 26701 - RNA, 19 nt, Artificial Sequence
  Synthetic oligonucleotide: Ptpn6-6296
ccuguuaguuuuggaggga

SEQ ID NO: 26702 - RNA, 20 nt, Artificial Sequence
  Synthetic oligonucleotide: Ptpn6-1146
uccuguuaguuuuggaggga

SEQ ID NO: 26703 - RNA, 21 nt, Artificial Sequence
  Synthetic oligonucleotide: Ptpn6-6297
cuccuguuaguuuuggaggga

SEQ ID NO: 26704 - RNA, 22 nt, Artificial Sequence
  Synthetic oligonucleotide: Ptpn6-6298
ucuccuguuaguuuuggaggga

SEQ ID NO: 26705 - RNA, 23 nt, Artificial Sequence
  Synthetic oligonucleotide: Ptpn6-6299
gucuccuguuaguuuuggaggga

SEQ ID NO: 26706 - RNA, 24 nt, Artificial Sequence
  Synthetic oligonucleotide: Ptpn6-6300
agucuccuguuaguuuuggaggga

SEQ ID NO: 26707 - RNA, 18 nt, Artificial Sequence
  Synthetic oligonucleotide: Ptpn6-6301
ucuccuguuaguuuugga

SEQ ID NO: 26708 - RNA, 19 nt, Artificial Sequence
  Synthetic oligonucleotide: Ptpn6-6302
gucuccuguuaguuuugga

SEQ ID NO: 26709 - RNA, 20 nt, Artificial Sequence
  Synthetic oligonucleotide: Ptpn6-1158
agucuccuguuaguuuugga

SEQ ID NO: 26710 - RNA, 21 nt, Artificial Sequence
  Synthetic oligonucleotide: Ptpn6-6303
cagucuccuguuaguuuugga

SEQ ID NO: 26711 - RNA, 22 nt, Artificial Sequence
  Synthetic oligonucleotide: Ptpn6-6304
ccagucuccuguuaguuuugga

SEQ ID NO: 26712 - RNA, 23 nt, Artificial Sequence
  Synthetic oligonucleotide: Ptpn6-6305
cccagucuccuguuaguuuugga

SEQ ID NO: 26713 - RNA, 24 nt, Artificial Sequence
  Synthetic oligonucleotide: Ptpn6-6306
ucccagucuccuguuaguuuugga

SEQ ID NO: 26714 - RNA, 18 nt, Artificial Sequence
  Synthetic oligonucleotide: Ptpn6-3273
guggcuucccccucccua

SEQ ID NO: 26715 - RNA, 19 nt, Artificial Sequence
  Synthetic oligonucleotide: Ptpn6-3274
cguggcuucccccucccua

SEQ ID NO: 26716 - RNA, 20 nt, Artificial Sequence
  Synthetic oligonucleotide: Ptpn6-1688
ccguggcuucccccucccua

SEQ ID NO: 26717 - RNA, 21 nt, Artificial Sequence
  Synthetic oligonucleotide: Ptpn6-6307
gccguggcuucccccucccua

SEQ ID NO: 26718 - RNA, 22 nt, Artificial Sequence
  Synthetic oligonucleotide: Ptpn6-6308
ugccguggcuucccccucccua

SEQ ID NO: 26719 - RNA, 23 nt, Artificial Sequence
  Synthetic oligonucleotide: Ptpn6-6309
cugccguggcuucccccucccua

SEQ ID NO: 26720 - RNA, 24 nt, Artificial Sequence
  Synthetic oligonucleotide: Ptpn6-6310
ucugccguggcuucccccucccua

SEQ ID NO: 26721 - RNA, 18 nt, Artificial Sequence
  Synthetic oligonucleotide: Ptpn6-6311
cccuuugguuuccgccua

SEQ ID NO: 26722 - RNA, 19 nt, Artificial Sequence
  Synthetic oligonucleotide: Ptpn6-6312
gcccuuugguuuccgccua

SEQ ID NO: 26723 - RNA, 20 nt, Artificial Sequence
  Synthetic oligonucleotide: Ptpn6-953
ggcccuuugguuuccgccua

SEQ ID NO: 26724 - RNA, 21 nt, Artificial Sequence
  Synthetic oligonucleotide: Ptpn6-6313
aggcccuuugguuuccgccua

SEQ ID NO: 26725 - RNA, 22 nt, Artificial Sequence
  Synthetic oligonucleotide: Ptpn6-6314
uaggcccuuugguuuccgccua

SEQ ID NO: 26726 - RNA, 23 nt, Artificial Sequence
  Synthetic oligonucleotide: Ptpn6-6315
uuaggcccuuugguuuccgccua

SEQ ID NO: 26727 - RNA, 24 nt, Artificial Sequence
  Synthetic oligonucleotide: Ptpn6-6316
cuuaggcccuuugguuuccgccua

SEQ ID NO: 26728 - RNA, 18 nt, Artificial Sequence
  Synthetic oligonucleotide: Ptpn6-6317
ggaggaaguggcugauua

SEQ ID NO: 26729 - RNA, 19 nt, Artificial Sequence
  Synthetic oligonucleotide: Ptpn6-6318
aggaggaaguggcugauua

SEQ ID NO: 26730 - RNA, 20 nt, Artificial Sequence
  Synthetic oligonucleotide: Ptpn6-1686
gaggaggaaguggcugauua

SEQ ID NO: 26731 - RNA, 21 nt, Artificial Sequence
  Synthetic oligonucleotide: Ptpn6-6319
cgaggaggaaguggcugauua

SEQ ID NO: 26732 - RNA, 22 nt, Artificial Sequence
  Synthetic oligonucleotide: Ptpn6-6320
ucgaggaggaaguggcugauua

SEQ ID NO: 26733 - RNA, 23 nt, Artificial Sequence
  Synthetic oligonucleotide: Ptpn6-6321
aucgaggaggaaguggcugauua

SEQ ID NO: 26734 - RNA, 24 nt, Artificial Sequence
  Synthetic oligonucleotide: Ptpn6-6322
gaucgaggaggaaguggcugauua

SEQ ID NO: 26735 - RNA, 18 nt, Artificial Sequence
  Synthetic oligonucleotide: Ptpn6-6323
gggugggugggccugcac

SEQ ID NO: 26736 - RNA, 19 nt, Artificial Sequence
  Synthetic oligonucleotide: Ptpn6-6324
ugggugggugggccugcac

SEQ ID NO: 26737 - RNA, 20 nt, Artificial Sequence
  Synthetic oligonucleotide: Ptpn6-5287
cugggugggugggccugcac

SEQ ID NO: 26738 - RNA, 21 nt, Artificial Sequence
  Synthetic oligonucleotide: Ptpn6-6325
ccugggugggugggccugcac

SEQ ID NO: 26739 - RNA, 22 nt, Artificial Sequence
  Synthetic oligonucleotide: Ptpn6-6326
cccugggugggugggccugcac

SEQ ID NO: 26740 - RNA, 23 nt, Artificial Sequence
  Synthetic oligonucleotide: Ptpn6-6327
gcccugggugggugggccugcac

SEQ ID NO: 26741 - RNA, 24 nt, Artificial Sequence
  Synthetic oligonucleotide: Ptpn6-6328
cgcccugggugggugggccugcac

SEQ ID NO: 26742 - RNA, 18 nt, Artificial Sequence
  Synthetic oligonucleotide: Ptpn6-6329
cccagggccuaacccuac

SEQ ID NO: 26743 - RNA, 19 nt, Artificial Sequence
  Synthetic oligonucleotide: Ptpn6-6330
ccccagggccuaacccuac

SEQ ID NO: 26744 - RNA, 20 nt, Artificial Sequence
  Synthetic oligonucleotide: Ptpn6-2233
gccccagggccuaacccuac

SEQ ID NO: 26745 - RNA, 21 nt, Artificial Sequence
  Synthetic oligonucleotide: Ptpn6-6331
ugccccagggccuaacccuac

SEQ ID NO: 26746 - RNA, 22 nt, Artificial Sequence
  Synthetic oligonucleotide: Ptpn6-6332
cugccccagggccuaacccuac

SEQ ID NO: 26747 - RNA, 23 nt, Artificial Sequence
  Synthetic oligonucleotide: Ptpn6-6333
ccugccccagggccuaacccuac

SEQ ID NO: 26748 - RNA, 24 nt, Artificial Sequence
  Synthetic oligonucleotide: Ptpn6-6334
cccugccccagggccuaacccuac

SEQ ID NO: 26749 - RNA, 18 nt, Artificial Sequence
  Synthetic oligonucleotide: Ptpn6-6335
aggcuccuccccuucccc

SEQ ID NO: 26750 - RNA, 19 nt, Artificial Sequence
  Synthetic oligonucleotide: Ptpn6-6336
gaggcuccuccccuucccc

SEQ ID NO: 26751 - RNA, 20 nt, Artificial Sequence
  Synthetic oligonucleotide: Ptpn6-1398
ugaggcuccuccccuucccc

SEQ ID NO: 26752 - RNA, 21 nt, Artificial Sequence
  Synthetic oligonucleotide: Ptpn6-6337
cugaggcuccuccccuucccc

SEQ ID NO: 26753 - RNA, 22 nt, Artificial Sequence
  Synthetic oligonucleotide: Ptpn6-6338
ccugaggcuccuccccuucccc

SEQ ID NO: 26754 - RNA, 23 nt, Artificial Sequence
  Synthetic oligonucleotide: Ptpn6-6339
accugaggcuccuccccuucccc

SEQ ID NO: 26755 - RNA, 24 nt, Artificial Sequence
  Synthetic oligonucleotide: Ptpn6-6340
uaccugaggcuccuccccuucccc

SEQ ID NO: 26756 - RNA, 18 nt, Artificial Sequence
  Synthetic oligonucleotide: Ptpn6-6341
cugggccuaacccugccc

SEQ ID NO: 26757 - RNA, 19 nt, Artificial Sequence
  Synthetic oligonucleotide: Ptpn6-6342
gcugggccuaacccugccc

SEQ ID NO: 26758 - RNA, 20 nt, Artificial Sequence
  Synthetic oligonucleotide: Ptpn6-2232
ggcugggccuaacccugccc

SEQ ID NO: 26759 - RNA, 21 nt, Artificial Sequence
  Synthetic oligonucleotide: Ptpn6-6343
uggcugggccuaacccugccc

SEQ ID NO: 26760 - RNA, 22 nt, Artificial Sequence
  Synthetic oligonucleotide: Ptpn6-6344
cuggcugggccuaacccugccc

SEQ ID NO: 26761 - RNA, 23 nt, Artificial Sequence
  Synthetic oligonucleotide: Ptpn6-6345
ccuggcugggccuaacccugccc

SEQ ID NO: 26762 - RNA, 24 nt, Artificial Sequence
  Synthetic oligonucleotide: Ptpn6-6346
uccuggcugggccuaacccugccc

SEQ ID NO: 26763 - RNA, 18 nt, Artificial Sequence
  Synthetic oligonucleotide: Ptpn6-6347
gguggcuccuccucuccc

SEQ ID NO: 26764 - RNA, 19 nt, Artificial Sequence
  Synthetic oligonucleotide: Ptpn6-6348
agguggcuccuccucuccc

SEQ ID NO: 26765 - RNA, 20 nt, Artificial Sequence
  Synthetic oligonucleotide: Ptpn6-1181
cagguggcuccuccucuccc

SEQ ID NO: 26766 - RNA, 21 nt, Artificial Sequence
  Synthetic oligonucleotide: Ptpn6-6349
ccagguggcuccuccucuccc

SEQ ID NO: 26767 - RNA, 22 nt, Artificial Sequence
  Synthetic oligonucleotide: Ptpn6-6350
uccagguggcuccuccucuccc

SEQ ID NO: 26768 - RNA, 23 nt, Artificial Sequence
  Synthetic oligonucleotide: Ptpn6-6351
cuccagguggcuccuccucuccc

SEQ ID NO: 26769 - RNA, 24 nt, Artificial Sequence
  Synthetic oligonucleotide: Ptpn6-6352
gcuccagguggcuccuccucuccc

SEQ ID NO: 26770 - RNA, 18 nt, Artificial Sequence
  Synthetic oligonucleotide: Ptpn6-6353
gaggcuccuccccuuccc

SEQ ID NO: 26771 - RNA, 19 nt, Artificial Sequence
  Synthetic oligonucleotide: Ptpn6-6354
ugaggcuccuccccuuccc

SEQ ID NO: 26772 - RNA, 20 nt, Artificial Sequence
  Synthetic oligonucleotide: Ptpn6-2234
cugaggcuccuccccuuccc

SEQ ID NO: 26773 - RNA, 21 nt, Artificial Sequence
  Synthetic oligonucleotide: Ptpn6-6355
ccugaggcuccuccccuuccc

SEQ ID NO: 26774 - RNA, 22 nt, Artificial Sequence
  Synthetic oligonucleotide: Ptpn6-6356
accugaggcuccuccccuuccc

SEQ ID NO: 26775 - RNA, 23 nt, Artificial Sequence
  Synthetic oligonucleotide: Ptpn6-6357
uaccugaggcuccuccccuuccc

SEQ ID NO: 26776 - RNA, 24 nt, Artificial Sequence
  Synthetic oligonucleotide: Ptpn6-6358
cuaccugaggcuccuccccuuccc

SEQ ID NO: 26777 - RNA, 18 nt, Artificial Sequence
  Synthetic oligonucleotide: Ptpn6-6359
ccucuuuaacauuuuccc

SEQ ID NO: 26778 - RNA, 19 nt, Artificial Sequence
  Synthetic oligonucleotide: Ptpn6-6360
cccucuuuaacauuuuccc

SEQ ID NO: 26779 - RNA, 20 nt, Artificial Sequence
  Synthetic oligonucleotide: Ptpn6-1708
ccccucuuuaacauuuuccc

SEQ ID NO: 26780 - RNA, 21 nt, Artificial Sequence
  Synthetic oligonucleotide: Ptpn6-6361
cccccucuuuaacauuuuccc

SEQ ID NO: 26781 - RNA, 22 nt, Artificial Sequence
  Synthetic oligonucleotide: Ptpn6-6362
gcccccucuuuaacauuuuccc

SEQ ID NO: 26782 - RNA, 23 nt, Artificial Sequence
  Synthetic oligonucleotide: Ptpn6-6363
ugcccccucuuuaacauuuuccc

SEQ ID NO: 26783 - RNA, 24 nt, Artificial Sequence
  Synthetic oligonucleotide: Ptpn6-6364
cugcccccucuuuaacauuuuccc

SEQ ID NO: 26784 - RNA, 18 nt, Artificial Sequence
  Synthetic oligonucleotide: Ptpn6-6365
ucccgggggaaggcggcc

SEQ ID NO: 26785 - RNA, 19 nt, Artificial Sequence
  Synthetic oligonucleotide: Ptpn6-6366
cucccgggggaaggcggcc

SEQ ID NO: 26786 - RNA, 20 nt, Artificial Sequence
  Synthetic oligonucleotide: Ptpn6-1668
ucucccgggggaaggcggcc

SEQ ID NO: 26787 - RNA, 21 nt, Artificial Sequence
  Synthetic oligonucleotide: Ptpn6-6367
cucucccgggggaaggcggcc

SEQ ID NO: 26788 - RNA, 22 nt, Artificial Sequence
  Synthetic oligonucleotide: Ptpn6-6368
ccucucccgggggaaggcggcc

SEQ ID NO: 26789 - RNA, 23 nt, Artificial Sequence
  Synthetic oligonucleotide: Ptpn6-6369
uccucucccgggggaaggcggcc

SEQ ID NO: 26790 - RNA, 24 nt, Artificial Sequence
  Synthetic oligonucleotide: Ptpn6-6370
cuccucucccgggggaaggcggcc

SEQ ID NO: 26791 - RNA, 18 nt, Artificial Sequence
  Synthetic oligonucleotide: Ptpn6-6371
agguggcuccuccucucc

SEQ ID NO: 26792 - RNA, 19 nt, Artificial Sequence
  Synthetic oligonucleotide: Ptpn6-6372
cagguggcuccuccucucc

SEQ ID NO: 26793 - RNA, 20 nt, Artificial Sequence
  Synthetic oligonucleotide: Ptpn6-1182
ccagguggcuccuccucucc

SEQ ID NO: 26794 - RNA, 21 nt, Artificial Sequence
  Synthetic oligonucleotide: Ptpn6-6373
uccagguggcuccuccucucc

SEQ ID NO: 26795 - RNA, 22 nt, Artificial Sequence
  Synthetic oligonucleotide: Ptpn6-6374
cuccagguggcuccuccucucc

SEQ ID NO: 26796 - RNA, 23 nt, Artificial Sequence
  Synthetic oligonucleotide: Ptpn6-6375
gcuccagguggcuccuccucucc

SEQ ID NO: 26797 - RNA, 24 nt, Artificial Sequence
  Synthetic oligonucleotide: Ptpn6-6376
agcuccagguggcuccuccucucc

SEQ ID NO: 26798 - RNA, 18 nt, Artificial Sequence
  Synthetic oligonucleotide: Ptpn6-6377
ccccaccuguccuuuucc

SEQ ID NO: 26799 - RNA, 19 nt, Artificial Sequence
  Synthetic oligonucleotide: Ptpn6-6378
gccccaccuguccuuuucc

SEQ ID NO: 26800 - RNA, 20 nt, Artificial Sequence
  Synthetic oligonucleotide: Ptpn6-1170
cgccccaccuguccuuuucc

SEQ ID NO: 26801 - RNA, 21 nt, Artificial Sequence
  Synthetic oligonucleotide: Ptpn6-6379
ccgccccaccuguccuuuucc

SEQ ID NO: 26802 - RNA, 22 nt, Artificial Sequence
  Synthetic oligonucleotide: Ptpn6-6380
cccgccccaccuguccuuuucc

SEQ ID NO: 26803 - RNA, 23 nt, Artificial Sequence
  Synthetic oligonucleotide: Ptpn6-6381
ccccgccccaccuguccuuuucc

SEQ ID NO: 26804 - RNA, 24 nt, Artificial Sequence
  Synthetic oligonucleotide: Ptpn6-6382
gccccgccccaccuguccuuuucc

SEQ ID NO: 26805 - RNA, 18 nt, Artificial Sequence
  Synthetic oligonucleotide: Ptpn6-6383
ccccgccgcucugucagc

SEQ ID NO: 26806 - RNA, 19 nt, Artificial Sequence
  Synthetic oligonucleotide: Ptpn6-6384
accccgccgcucugucagc

SEQ ID NO: 26807 - RNA, 20 nt, Artificial Sequence
  Synthetic oligonucleotide: Ptpn6-1663
uaccccgccgcucugucagc

SEQ ID NO: 26808 - RNA, 21 nt, Artificial Sequence
  Synthetic oligonucleotide: Ptpn6-6385
auaccccgccgcucugucagc

SEQ ID NO: 26809 - RNA, 22 nt, Artificial Sequence
  Synthetic oligonucleotide: Ptpn6-6386
aauaccccgccgcucugucagc

SEQ ID NO: 26810 - RNA, 23 nt, Artificial Sequence
  Synthetic oligonucleotide: Ptpn6-6387
caauaccccgccgcucugucagc

SEQ ID NO: 26811 - RNA, 24 nt, Artificial Sequence
  Synthetic oligonucleotide: Ptpn6-6388
ccaauaccccgccgcucugucagc

SEQ ID NO: 26812 - RNA, 18 nt, Artificial Sequence
  Synthetic oligonucleotide: Ptpn6-6389
gguucuuccucaccuggc

SEQ ID NO: 26813 - RNA, 19 nt, Artificial Sequence
  Synthetic oligonucleotide: Ptpn6-6390
cgguucuuccucaccuggc

SEQ ID NO: 26814 - RNA, 20 nt, Artificial Sequence
  Synthetic oligonucleotide: Ptpn6-1687
gcgguucuuccucaccuggc

SEQ ID NO: 26815 - RNA, 21 nt, Artificial Sequence
  Synthetic oligonucleotide: Ptpn6-6391
agcgguucuuccucaccuggc

SEQ ID NO: 26816 - RNA, 22 nt, Artificial Sequence
  Synthetic oligonucleotide: Ptpn6-6392
gagcgguucuuccucaccuggc

SEQ ID NO: 26817 - RNA, 23 nt, Artificial Sequence
  Synthetic oligonucleotide: Ptpn6-6393
ugagcgguucuuccucaccuggc

SEQ ID NO: 26818 - RNA, 24 nt, Artificial Sequence
  Synthetic oligonucleotide: Ptpn6-6394
cugagcgguucuuccucaccuggc

SEQ ID NO: 26819 - RNA, 18 nt, Artificial Sequence
  Synthetic oligonucleotide: Ptpn6-6395
cucccgcuuuggggcugc

SEQ ID NO: 26820 - RNA, 19 nt, Artificial Sequence
  Synthetic oligonucleotide: Ptpn6-6396
acucccgcuuuggggcugc

SEQ ID NO: 26821 - RNA, 20 nt, Artificial Sequence
  Synthetic oligonucleotide: Ptpn6-970
uacucccgcuuuggggcugc

SEQ ID NO: 26822 - RNA, 21 nt, Artificial Sequence
  Synthetic oligonucleotide: Ptpn6-6397
guacucccgcuuuggggcugc

SEQ ID NO: 26823 - RNA, 22 nt, Artificial Sequence
  Synthetic oligonucleotide: Ptpn6-6398
uguacucccgcuuuggggcugc

SEQ ID NO: 26824 - RNA, 23 nt, Artificial Sequence
  Synthetic oligonucleotide: Ptpn6-6399
cuguacucccgcuuuggggcugc

SEQ ID NO: 26825 - RNA, 24 nt, Artificial Sequence
  Synthetic oligonucleotide: Ptpn6-6400
gcuguacucccgcuuuggggcugc

SEQ ID NO: 26826 - RNA, 18 nt, Artificial Sequence
  Synthetic oligonucleotide: Ptpn6-6401
ggccuggcaggcaggauc

SEQ ID NO: 26827 - RNA, 19 nt, Artificial Sequence
  Synthetic oligonucleotide: Ptpn6-6402
uggccuggcaggcaggauc

SEQ ID NO: 26828 - RNA, 20 nt, Artificial Sequence
  Synthetic oligonucleotide: Ptpn6-1682
uuggccuggcaggcaggauc

SEQ ID NO: 26829 - RNA, 21 nt, Artificial Sequence
  Synthetic oligonucleotide: Ptpn6-6403
auuggccuggcaggcaggauc

SEQ ID NO: 26830 - RNA, 22 nt, Artificial Sequence
  Synthetic oligonucleotide: Ptpn6-6404
cauuggccuggcaggcaggauc

SEQ ID NO: 26831 - RNA, 23 nt, Artificial Sequence
  Synthetic oligonucleotide: Ptpn6-6405
ccauuggccuggcaggcaggauc

SEQ ID NO: 26832 - RNA, 24 nt, Artificial Sequence
  Synthetic oligonucleotide: Ptpn6-6406
gccauuggccuggcaggcaggauc

SEQ ID NO: 26833 - RNA, 18 nt, Artificial Sequence
  Synthetic oligonucleotide: Ptpn6-6407
cagguggcuccuccucuc

SEQ ID NO: 26834 - RNA, 19 nt, Artificial Sequence
  Synthetic oligonucleotide: Ptpn6-6408
ccagguggcuccuccucuc

SEQ ID NO: 26835 - RNA, 20 nt, Artificial Sequence
  Synthetic oligonucleotide: Ptpn6-1666
uccagguggcuccuccucuc

SEQ ID NO: 26836 - RNA, 21 nt, Artificial Sequence
  Synthetic oligonucleotide: Ptpn6-6409
cuccagguggcuccuccucuc

SEQ ID NO: 26837 - RNA, 22 nt, Artificial Sequence
  Synthetic oligonucleotide: Ptpn6-6410
gcuccagguggcuccuccucuc

SEQ ID NO: 26838 - RNA, 23 nt, Artificial Sequence
  Synthetic oligonucleotide: Ptpn6-6411
agcuccagguggcuccuccucuc

SEQ ID NO: 26839 - RNA, 24 nt, Artificial Sequence
  Synthetic oligonucleotide: Ptpn6-6412
gagcuccagguggcuccuccucuc

SEQ ID NO: 26840 - RNA, 18 nt, Artificial Sequence
  Synthetic oligonucleotide: Ptpn6-3348
cugucccguggguaaguc

SEQ ID NO: 26841 - RNA, 19 nt, Artificial Sequence
  Synthetic oligonucleotide: Ptpn6-3349
gcugucccguggguaaguc

SEQ ID NO: 26842 - RNA, 20 nt, Artificial Sequence
  Synthetic oligonucleotide: Ptpn6-1691
ugcugucccguggguaaguc

SEQ ID NO: 26843 - RNA, 21 nt, Artificial Sequence
  Synthetic oligonucleotide: Ptpn6-3350
augcugucccguggguaaguc

SEQ ID NO: 26844 - RNA, 22 nt, Artificial Sequence
  Synthetic oligonucleotide: Ptpn6-3351
gaugcugucccguggguaaguc

SEQ ID NO: 26845 - RNA, 23 nt, Artificial Sequence
  Synthetic oligonucleotide: Ptpn6-3352
agaugcugucccguggguaaguc

SEQ ID NO: 26846 - RNA, 24 nt, Artificial Sequence
  Synthetic oligonucleotide: Ptpn6-3353
gagaugcugucccguggguaaguc

SEQ ID NO: 26847 - RNA, 18 nt, Artificial Sequence
  Synthetic oligonucleotide: Ptpn6-6413
uggccgcugugggcgguc

SEQ ID NO: 26848 - RNA, 19 nt, Artificial Sequence
  Synthetic oligonucleotide: Ptpn6-6414
cuggccgcugugggcgguc

SEQ ID NO: 26849 - RNA, 20 nt, Artificial Sequence
  Synthetic oligonucleotide: Ptpn6-1676
gcuggccgcugugggcgguc

SEQ ID NO: 26850 - RNA, 21 nt, Artificial Sequence
  Synthetic oligonucleotide: Ptpn6-6415
agcuggccgcugugggcgguc

SEQ ID NO: 26851 - RNA, 22 nt, Artificial Sequence
  Synthetic oligonucleotide: Ptpn6-6416
aagcuggccgcugugggcgguc

SEQ ID NO: 26852 - RNA, 23 nt, Artificial Sequence
  Synthetic oligonucleotide: Ptpn6-6417
gaagcuggccgcugugggcgguc

SEQ ID NO: 26853 - RNA, 24 nt, Artificial Sequence
  Synthetic oligonucleotide: Ptpn6-6418
ggaagcuggccgcugugggcgguc

SEQ ID NO: 26854 - RNA, 18 nt, Artificial Sequence
  Synthetic oligonucleotide: Ptpn6-6419
gccccaccuguccuuuuc

SEQ ID NO: 26855 - RNA, 19 nt, Artificial Sequence
  Synthetic oligonucleotide: Ptpn6-6420
cgccccaccuguccuuuuc

SEQ ID NO: 26856 - RNA, 20 nt, Artificial Sequence
  Synthetic oligonucleotide: Ptpn6-1677
ccgccccaccuguccuuuuc

SEQ ID NO: 26857 - RNA, 21 nt, Artificial Sequence
  Synthetic oligonucleotide: Ptpn6-6421
cccgccccaccuguccuuuuc

SEQ ID NO: 26858 - RNA, 22 nt, Artificial Sequence
  Synthetic oligonucleotide: Ptpn6-6422
ccccgccccaccuguccuuuuc

SEQ ID NO: 26859 - RNA, 23 nt, Artificial Sequence
  Synthetic oligonucleotide: Ptpn6-6423
gccccgccccaccuguccuuuuc

SEQ ID NO: 26860 - RNA, 24 nt, Artificial Sequence
  Synthetic oligonucleotide: Ptpn6-6424
agccccgccccaccuguccuuuuc

SEQ ID NO: 26861 - RNA, 18 nt, Artificial Sequence
  Synthetic oligonucleotide: Ptpn6-6425
ugucagcuugagcuccag

SEQ ID NO: 26862 - RNA, 19 nt, Artificial Sequence
  Synthetic oligonucleotide: Ptpn6-6426
cugucagcuugagcuccag

SEQ ID NO: 26863 - RNA, 20 nt, Artificial Sequence
  Synthetic oligonucleotide: Ptpn6-1664
ucugucagcuugagcuccag

SEQ ID NO: 26864 - RNA, 21 nt, Artificial Sequence
  Synthetic oligonucleotide: Ptpn6-6427
cucugucagcuugagcuccag

SEQ ID NO: 26865 - RNA, 22 nt, Artificial Sequence
  Synthetic oligonucleotide: Ptpn6-6428
gcucugucagcuugagcuccag

SEQ ID NO: 26866 - RNA, 23 nt, Artificial Sequence
  Synthetic oligonucleotide: Ptpn6-6429
cgcucugucagcuugagcuccag

SEQ ID NO: 26867 - RNA, 24 nt, Artificial Sequence
  Synthetic oligonucleotide: Ptpn6-6430
ccgcucugucagcuugagcuccag

SEQ ID NO: 26868 - RNA, 18 nt, Artificial Sequence
  Synthetic oligonucleotide: Ptpn6-6431
gcggcccuggaccagcag

SEQ ID NO: 26869 - RNA, 19 nt, Artificial Sequence
  Synthetic oligonucleotide: Ptpn6-6432
ggcggcccuggaccagcag

SEQ ID NO: 26870 - RNA, 20 nt, Artificial Sequence
  Synthetic oligonucleotide: Ptpn6-1669
aggcggcccuggaccagcag

SEQ ID NO: 26871 - RNA, 21 nt, Artificial Sequence
  Synthetic oligonucleotide: Ptpn6-6433
aaggcggcccuggaccagcag

SEQ ID NO: 26872 - RNA, 22 nt, Artificial Sequence
  Synthetic oligonucleotide: Ptpn6-6434
gaaggcggcccuggaccagcag

SEQ ID NO: 26873 - RNA, 23 nt, Artificial Sequence
  Synthetic oligonucleotide: Ptpn6-6435
ggaaggcggcccuggaccagcag

SEQ ID NO: 26874 - RNA, 24 nt, Artificial Sequence
  Synthetic oligonucleotide: Ptpn6-6436
gggaaggcggcccuggaccagcag

SEQ ID NO: 26875 - RNA, 18 nt, Artificial Sequence
  Synthetic oligonucleotide: Ptpn6-6437
cuggcaggcaggaucgag

SEQ ID NO: 26876 - RNA, 19 nt, Artificial Sequence
  Synthetic oligonucleotide: Ptpn6-6438
ccuggcaggcaggaucgag

SEQ ID NO: 26877 - RNA, 20 nt, Artificial Sequence
  Synthetic oligonucleotide: Ptpn6-1684
gccuggcaggcaggaucgag

SEQ ID NO: 26878 - RNA, 21 nt, Artificial Sequence
  Synthetic oligonucleotide: Ptpn6-6439
ggccuggcaggcaggaucgag

SEQ ID NO: 26879 - RNA, 22 nt, Artificial Sequence
  Synthetic oligonucleotide: Ptpn6-6440
uggccuggcaggcaggaucgag

SEQ ID NO: 26880 - RNA, 23 nt, Artificial Sequence
  Synthetic oligonucleotide: Ptpn6-6441
uuggccuggcaggcaggaucgag

SEQ ID NO: 26881 - RNA, 24 nt, Artificial Sequence
  Synthetic oligonucleotide: Ptpn6-6442
auuggccuggcaggcaggaucgag

SEQ ID NO: 26882 - RNA, 18 nt, Artificial Sequence
  Synthetic oligonucleotide: Ptpn6-6443
cuuugguuuccgccuacg

SEQ ID NO: 26883 - RNA, 19 nt, Artificial Sequence
  Synthetic oligonucleotide: Ptpn6-6444
ccuuugguuuccgccuacg

SEQ ID NO: 26884 - RNA, 20 nt, Artificial Sequence
  Synthetic oligonucleotide: Ptpn6-1661
cccuuugguuuccgccuacg

SEQ ID NO: 26885 - RNA, 21 nt, Artificial Sequence
  Synthetic oligonucleotide: Ptpn6-6445
gcccuuugguuuccgccuacg

SEQ ID NO: 26886 - RNA, 22 nt, Artificial Sequence
  Synthetic oligonucleotide: Ptpn6-6446
ggcccuuugguuuccgccuacg

SEQ ID NO: 26887 - RNA, 23 nt, Artificial Sequence
  Synthetic oligonucleotide: Ptpn6-6447
aggcccuuugguuuccgccuacg

SEQ ID NO: 26888 - RNA, 24 nt, Artificial Sequence
  Synthetic oligonucleotide: Ptpn6-6448
uaggcccuuugguuuccgccuacg

SEQ ID NO: 26889 - RNA, 18 nt, Artificial Sequence
  Synthetic oligonucleotide: Ptpn6-6449
guggcuccuccucucccg

SEQ ID NO: 26890 - RNA, 19 nt, Artificial Sequence
  Synthetic oligonucleotide: Ptpn6-6450
gguggcuccuccucucccg

SEQ ID NO: 26891 - RNA, 20 nt, Artificial Sequence
  Synthetic oligonucleotide: Ptpn6-1169
agguggcuccuccucucccg

SEQ ID NO: 26892 - RNA, 21 nt, Artificial Sequence
  Synthetic oligonucleotide: Ptpn6-6451
cagguggcuccuccucucccg

SEQ ID NO: 26893 - RNA, 22 nt, Artificial Sequence
  Synthetic oligonucleotide: Ptpn6-6452
ccagguggcuccuccucucccg

SEQ ID NO: 26894 - RNA, 23 nt, Artificial Sequence
  Synthetic oligonucleotide: Ptpn6-6453
uccagguggcuccuccucucccg

SEQ ID NO: 26895 - RNA, 24 nt, Artificial Sequence
  Synthetic oligonucleotide: Ptpn6-6454
cuccagguggcuccuccucucccg

SEQ ID NO: 26896 - RNA, 18 nt, Artificial Sequence
  Synthetic oligonucleotide: Ptpn6-6455
gccuggcaggcaggaucg

SEQ ID NO: 26897 - RNA, 19 nt, Artificial Sequence
  Synthetic oligonucleotide: Ptpn6-6456
ggccuggcaggcaggaucg

SEQ ID NO: 26898 - RNA, 20 nt, Artificial Sequence
  Synthetic oligonucleotide: Ptpn6-1150
uggccuggcaggcaggaucg

SEQ ID NO: 26899 - RNA, 21 nt, Artificial Sequence
  Synthetic oligonucleotide: Ptpn6-6457
uuggccuggcaggcaggaucg

SEQ ID NO: 26900 - RNA, 22 nt, Artificial Sequence
  Synthetic oligonucleotide: Ptpn6-6458
auuggccuggcaggcaggaucg

SEQ ID NO: 26901 - RNA, 23 nt, Artificial Sequence
  Synthetic oligonucleotide: Ptpn6-6459
cauuggccuggcaggcaggaucg

SEQ ID NO: 26902 - RNA, 24 nt, Artificial Sequence
  Synthetic oligonucleotide: Ptpn6-6460
ccauuggccuggcaggcaggaucg

SEQ ID NO: 26903 - RNA, 18 nt, Artificial Sequence
  Synthetic oligonucleotide: Ptpn6-6461
gucagcuugagcuccagg

SEQ ID NO: 26904 - RNA, 19 nt, Artificial Sequence
  Synthetic oligonucleotide: Ptpn6-6462
ugucagcuugagcuccagg

SEQ ID NO: 26905 - RNA, 20 nt, Artificial Sequence
  Synthetic oligonucleotide: Ptpn6-1173
cugucagcuugagcuccagg

SEQ ID NO: 26906 - RNA, 21 nt, Artificial Sequence
  Synthetic oligonucleotide: Ptpn6-6463
ucugucagcuugagcuccagg

SEQ ID NO: 26907 - RNA, 22 nt, Artificial Sequence
  Synthetic oligonucleotide: Ptpn6-6464
cucugucagcuugagcuccagg

SEQ ID NO: 26908 - RNA, 23 nt, Artificial Sequence
  Synthetic oligonucleotide: Ptpn6-6465
gcucugucagcuugagcuccagg

SEQ ID NO: 26909 - RNA, 24 nt, Artificial Sequence
  Synthetic oligonucleotide: Ptpn6-6466
cgcucugucagcuugagcuccagg

SEQ ID NO: 26910 - RNA, 18 nt, Artificial Sequence
  Synthetic oligonucleotide: Ptpn6-6467
cccuucccccggggcagg

SEQ ID NO: 26911 - RNA, 19 nt, Artificial Sequence
  Synthetic oligonucleotide: Ptpn6-6468
ccccuucccccggggcagg

SEQ ID NO: 26912 - RNA, 20 nt, Artificial Sequence
  Synthetic oligonucleotide: Ptpn6-2228
uccccuucccccggggcagg

SEQ ID NO: 26913 - RNA, 21 nt, Artificial Sequence
  Synthetic oligonucleotide: Ptpn6-6469
cuccccuucccccggggcagg

SEQ ID NO: 26914 - RNA, 22 nt, Artificial Sequence
  Synthetic oligonucleotide: Ptpn6-6470
ccuccccuucccccggggcagg

SEQ ID NO: 26915 - RNA, 23 nt, Artificial Sequence
  Synthetic oligonucleotide: Ptpn6-6471
uccuccccuucccccggggcagg

SEQ ID NO: 26916 - RNA, 24 nt, Artificial Sequence
  Synthetic oligonucleotide: Ptpn6-6472
cuccuccccuucccccggggcagg

SEQ ID NO: 26917 - RNA, 18 nt, Artificial Sequence
  Synthetic oligonucleotide: Ptpn6-6473
ccggggcagguugagagg

SEQ ID NO: 26918 - RNA, 19 nt, Artificial Sequence
  Synthetic oligonucleotide: Ptpn6-6474
cccggggcagguugagagg

SEQ ID NO: 26919 - RNA, 20 nt, Artificial Sequence
  Synthetic oligonucleotide: Ptpn6-2236
ccccggggcagguugagagg

SEQ ID NO: 26920 - RNA, 21 nt, Artificial Sequence
  Synthetic oligonucleotide: Ptpn6-6475
cccccggggcagguugagagg

SEQ ID NO: 26921 - RNA, 22 nt, Artificial Sequence
  Synthetic oligonucleotide: Ptpn6-6476
ucccccggggcagguugagagg

SEQ ID NO: 26922 - RNA, 23 nt, Artificial Sequence
  Synthetic oligonucleotide: Ptpn6-6477
uucccccggggcagguugagagg

SEQ ID NO: 26923 - RNA, 24 nt, Artificial Sequence
  Synthetic oligonucleotide: Ptpn6-6478
cuucccccggggcagguugagagg

SEQ ID NO: 26924 - RNA, 18 nt, Artificial Sequence
  Synthetic oligonucleotide: Ptpn6-6479
uggcaggcaggaucgagg

SEQ ID NO: 26925 - RNA, 19 nt, Artificial Sequence
  Synthetic oligonucleotide: Ptpn6-6480
cuggcaggcaggaucgagg

SEQ ID NO: 26926 - RNA, 20 nt, Artificial Sequence
  Synthetic oligonucleotide: Ptpn6-1152
ccuggcaggcaggaucgagg

SEQ ID NO: 26927 - RNA, 21 nt, Artificial Sequence
  Synthetic oligonucleotide: Ptpn6-6481
gccuggcaggcaggaucgagg

SEQ ID NO: 26928 - RNA, 22 nt, Artificial Sequence
  Synthetic oligonucleotide: Ptpn6-6482
ggccuggcaggcaggaucgagg

SEQ ID NO: 26929 - RNA, 23 nt, Artificial Sequence
  Synthetic oligonucleotide: Ptpn6-6483
uggccuggcaggcaggaucgagg

SEQ ID NO: 26930 - RNA, 24 nt, Artificial Sequence
  Synthetic oligonucleotide: Ptpn6-6484
uuggccuggcaggcaggaucgagg

SEQ ID NO: 26931 - RNA, 18 nt, Artificial Sequence
  Synthetic oligonucleotide: Ptpn6-6485
guuaguuuuggagggagg

SEQ ID NO: 26932 - RNA, 19 nt, Artificial Sequence
  Synthetic oligonucleotide: Ptpn6-6486
uguuaguuuuggagggagg

SEQ ID NO: 26933 - RNA, 20 nt, Artificial Sequence
  Synthetic oligonucleotide: Ptpn6-1702
cuguuaguuuuggagggagg

SEQ ID NO: 26934 - RNA, 21 nt, Artificial Sequence
  Synthetic oligonucleotide: Ptpn6-6487
ccuguuaguuuuggagggagg

SEQ ID NO: 26935 - RNA, 22 nt, Artificial Sequence
  Synthetic oligonucleotide: Ptpn6-6488
uccuguuaguuuuggagggagg

SEQ ID NO: 26936 - RNA, 23 nt, Artificial Sequence
  Synthetic oligonucleotide: Ptpn6-6489
cuccuguuaguuuuggagggagg

SEQ ID NO: 26937 - RNA, 24 nt, Artificial Sequence
  Synthetic oligonucleotide: Ptpn6-6490
ucuccuguuaguuuuggagggagg

SEQ ID NO: 26938 - RNA, 18 nt, Artificial Sequence
  Synthetic oligonucleotide: Ptpn6-6491
uccuguuaguuuuggagg

SEQ ID NO: 26939 - RNA, 19 nt, Artificial Sequence
  Synthetic oligonucleotide: Ptpn6-6492
cuccuguuaguuuuggagg

SEQ ID NO: 26940 - RNA, 20 nt, Artificial Sequence
  Synthetic oligonucleotide: Ptpn6-1699
ucuccuguuaguuuuggagg

SEQ ID NO: 26941 - RNA, 21 nt, Artificial Sequence
  Synthetic oligonucleotide: Ptpn6-6493
gucuccuguuaguuuuggagg

SEQ ID NO: 26942 - RNA, 22 nt, Artificial Sequence
  Synthetic oligonucleotide: Ptpn6-6494
agucuccuguuaguuuuggagg

SEQ ID NO: 26943 - RNA, 23 nt, Artificial Sequence
  Synthetic oligonucleotide: Ptpn6-6495
cagucuccuguuaguuuuggagg

SEQ ID NO: 26944 - RNA, 24 nt, Artificial Sequence
  Synthetic oligonucleotide: Ptpn6-6496
ccagucuccuguuaguuuuggagg

SEQ ID NO: 26945 - RNA, 18 nt, Artificial Sequence
  Synthetic oligonucleotide: Ptpn6-6497
uggcuccuccucucccgg

SEQ ID NO: 26946 - RNA, 19 nt, Artificial Sequence
  Synthetic oligonucleotide: Ptpn6-6498
guggcuccuccucucccgg

SEQ ID NO: 26947 - RNA, 20 nt, Artificial Sequence
  Synthetic oligonucleotide: Ptpn6-1017
gguggcuccuccucucccgg

SEQ ID NO: 26948 - RNA, 21 nt, Artificial Sequence
  Synthetic oligonucleotide: Ptpn6-6499
agguggcuccuccucucccgg

SEQ ID NO: 26949 - RNA, 22 nt, Artificial Sequence
  Synthetic oligonucleotide: Ptpn6-6500
cagguggcuccuccucucccgg

SEQ ID NO: 26950 - RNA, 23 nt, Artificial Sequence
  Synthetic oligonucleotide: Ptpn6-6501
ccagguggcuccuccucucccgg

SEQ ID NO: 26951 - RNA, 24 nt, Artificial Sequence
  Synthetic oligonucleotide: Ptpn6-6502
uccagguggcuccuccucucccgg

SEQ ID NO: 26952 - RNA, 18 nt, Artificial Sequence
  Synthetic oligonucleotide: Ptpn6-6503
ccuguuaguuuuggaggg

SEQ ID NO: 26953 - RNA, 19 nt, Artificial Sequence
  Synthetic oligonucleotide: Ptpn6-6504
uccuguuaguuuuggaggg

SEQ ID NO: 26954 - RNA, 20 nt, Artificial Sequence
  Synthetic oligonucleotide: Ptpn6-1161
cuccuguuaguuuuggaggg

SEQ ID NO: 26955 - RNA, 21 nt, Artificial Sequence
  Synthetic oligonucleotide: Ptpn6-6505
ucuccuguuaguuuuggaggg

SEQ ID NO: 26956 - RNA, 22 nt, Artificial Sequence
  Synthetic oligonucleotide: Ptpn6-6506
gucuccuguuaguuuuggaggg

SEQ ID NO: 26957 - RNA, 23 nt, Artificial Sequence
  Synthetic oligonucleotide: Ptpn6-6507
agucuccuguuaguuuuggaggg

SEQ ID NO: 26958 - RNA, 24 nt, Artificial Sequence
  Synthetic oligonucleotide: Ptpn6-6508
cagucuccuguuaguuuuggaggg

SEQ ID NO: 26959 - RNA, 18 nt, Artificial Sequence
  Synthetic oligonucleotide: Ptpn6-6509
uccucccuaugguccugg

SEQ ID NO: 26960 - RNA, 19 nt, Artificial Sequence
  Synthetic oligonucleotide: Ptpn6-6510
cuccucccuaugguccugg

SEQ ID NO: 26961 - RNA, 20 nt, Artificial Sequence
  Synthetic oligonucleotide: Ptpn6-2231
gcuccucccuaugguccugg

SEQ ID NO: 26962 - RNA, 21 nt, Artificial Sequence
  Synthetic oligonucleotide: Ptpn6-6511
agcuccucccuaugguccugg

SEQ ID NO: 26963 - RNA, 22 nt, Artificial Sequence
  Synthetic oligonucleotide: Ptpn6-6512
cagcuccucccuaugguccugg

SEQ ID NO: 26964 - RNA, 23 nt, Artificial Sequence
  Synthetic oligonucleotide: Ptpn6-6513
acagcuccucccuaugguccugg

SEQ ID NO: 26965 - RNA, 24 nt, Artificial Sequence
  Synthetic oligonucleotide: Ptpn6-6514
aacagcuccucccuaugguccugg

SEQ ID NO: 26966 - RNA, 18 nt, Artificial Sequence
  Synthetic oligonucleotide: Ptpn6-6515
ccucagcgcccugggugg

SEQ ID NO: 26967 - RNA, 19 nt, Artificial Sequence
  Synthetic oligonucleotide: Ptpn6-6516
cccucagcgcccugggugg

SEQ ID NO: 26968 - RNA, 20 nt, Artificial Sequence
  Synthetic oligonucleotide: Ptpn6-2240
ucccucagcgcccugggugg

SEQ ID NO: 26969 - RNA, 21 nt, Artificial Sequence
  Synthetic oligonucleotide: Ptpn6-6517
gucccucagcgcccugggugg

SEQ ID NO: 26970 - RNA, 22 nt, Artificial Sequence
  Synthetic oligonucleotide: Ptpn6-6518
ggucccucagcgcccugggugg

SEQ ID NO: 26971 - RNA, 23 nt, Artificial Sequence
  Synthetic oligonucleotide: Ptpn6-6519
gggucccucagcgcccugggugg

SEQ ID NO: 26972 - RNA, 24 nt, Artificial Sequence
  Synthetic oligonucleotide: Ptpn6-6520
ugggucccucagcgcccugggugg

SEQ ID NO: 26973 - RNA, 18 nt, Artificial Sequence
  Synthetic oligonucleotide: Ptpn6-6521
gucuccuguuaguuuugg

SEQ ID NO: 26974 - RNA, 19 nt, Artificial Sequence
  Synthetic oligonucleotide: Ptpn6-6522
agucuccuguuaguuuugg

SEQ ID NO: 26975 - RNA, 20 nt, Artificial Sequence
  Synthetic oligonucleotide: Ptpn6-1145
cagucuccuguuaguuuugg

SEQ ID NO: 26976 - RNA, 21 nt, Artificial Sequence
  Synthetic oligonucleotide: Ptpn6-6523
ccagucuccuguuaguuuugg

SEQ ID NO: 26977 - RNA, 22 nt, Artificial Sequence
  Synthetic oligonucleotide: Ptpn6-6524
cccagucuccuguuaguuuugg

SEQ ID NO: 26978 - RNA, 23 nt, Artificial Sequence
  Synthetic oligonucleotide: Ptpn6-6525
ucccagucuccuguuaguuuugg

SEQ ID NO: 26979 - RNA, 24 nt, Artificial Sequence
  Synthetic oligonucleotide: Ptpn6-6526
gucccagucuccuguuaguuuugg

SEQ ID NO: 26980 - RNA, 18 nt, Artificial Sequence
  Synthetic oligonucleotide: Ptpn6-6527
acucccgcuuuggggcug

SEQ ID NO: 26981 - RNA, 19 nt, Artificial Sequence
  Synthetic oligonucleotide: Ptpn6-6528
uacucccgcuuuggggcug

SEQ ID NO: 26982 - RNA, 20 nt, Artificial Sequence
  Synthetic oligonucleotide: Ptpn6-1672
guacucccgcuuuggggcug

SEQ ID NO: 26983 - RNA, 21 nt, Artificial Sequence
  Synthetic oligonucleotide: Ptpn6-6529
uguacucccgcuuuggggcug

SEQ ID NO: 26984 - RNA, 22 nt, Artificial Sequence
  Synthetic oligonucleotide: Ptpn6-6530
cuguacucccgcuuuggggcug

SEQ ID NO: 26985 - RNA, 23 nt, Artificial Sequence
  Synthetic oligonucleotide: Ptpn6-6531
gcuguacucccgcuuuggggcug

SEQ ID NO: 26986 - RNA, 24 nt, Artificial Sequence
  Synthetic oligonucleotide: Ptpn6-6532
ugcuguacucccgcuuuggggcug

SEQ ID NO: 26987 - RNA, 18 nt, Artificial Sequence
  Synthetic oligonucleotide: Ptpn6-6533
gggguaccuccuucucug

SEQ ID NO: 26988 - RNA, 19 nt, Artificial Sequence
  Synthetic oligonucleotide: Ptpn6-6534
ggggguaccuccuucucug

SEQ ID NO: 26989 - RNA, 20 nt, Artificial Sequence
  Synthetic oligonucleotide: Ptpn6-1655
aggggguaccuccuucucug

SEQ ID NO: 26990 - RNA, 21 nt, Artificial Sequence
  Synthetic oligonucleotide: Ptpn6-6535
caggggguaccuccuucucug

SEQ ID NO: 26991 - RNA, 22 nt, Artificial Sequence
  Synthetic oligonucleotide: Ptpn6-6536
acaggggguaccuccuucucug

SEQ ID NO: 26992 - RNA, 23 nt, Artificial Sequence
  Synthetic oligonucleotide: Ptpn6-6537
cacaggggguaccuccuucucug

SEQ ID NO: 26993 - RNA, 24 nt, Artificial Sequence
  Synthetic oligonucleotide: Ptpn6-6538
gcacaggggguaccuccuucucug

SEQ ID NO: 26994 - RNA, 18 nt, Artificial Sequence
  Synthetic oligonucleotide: Ptpn6-6539
agucuccuguuaguuuug

SEQ ID NO: 26995 - RNA, 19 nt, Artificial Sequence
  Synthetic oligonucleotide: Ptpn6-6540
cagucuccuguuaguuuug

SEQ ID NO: 26996 - RNA, 20 nt, Artificial Sequence
  Synthetic oligonucleotide: Ptpn6-1696
ccagucuccuguuaguuuug

SEQ ID NO: 26997 - RNA, 21 nt, Artificial Sequence
  Synthetic oligonucleotide: Ptpn6-6541
cccagucuccuguuaguuuug

SEQ ID NO: 26998 - RNA, 22 nt, Artificial Sequence
  Synthetic oligonucleotide: Ptpn6-6542
ucccagucuccuguuaguuuug

SEQ ID NO: 26999 - RNA, 23 nt, Artificial Sequence
  Synthetic oligonucleotide: Ptpn6-6543
gucccagucuccuguuaguuuug

SEQ ID NO: 27000 - RNA, 24 nt, Artificial Sequence
  Synthetic oligonucleotide: Ptpn6-6544
ggucccagucuccuguuaguuuug

SEQ ID NO: 27001 - RNA, 18 nt, Artificial Sequence
  Synthetic oligonucleotide: Ptpn6-6545
cgccuguuuccggucccu

SEQ ID NO: 27002 - RNA, 19 nt, Artificial Sequence
  Synthetic oligonucleotide: Ptpn6-6546
gcgccuguuuccggucccu

SEQ ID NO: 27003 - RNA, 20 nt, Artificial Sequence
  Synthetic oligonucleotide: Ptpn6-1705
ugcgccuguuuccggucccu

SEQ ID NO: 27004 - RNA, 21 nt, Artificial Sequence
  Synthetic oligonucleotide: Ptpn6-6547
cugcgccuguuuccggucccu

SEQ ID NO: 27005 - RNA, 22 nt, Artificial Sequence
  Synthetic oligonucleotide: Ptpn6-6548
ccugcgccuguuuccggucccu

SEQ ID NO: 27006 - RNA, 23 nt, Artificial Sequence
  Synthetic oligonucleotide: Ptpn6-6549
cccugcgccuguuuccggucccu

SEQ ID NO: 27007 - RNA, 24 nt, Artificial Sequence
  Synthetic oligonucleotide: Ptpn6-6550
gcccugcgccuguuuccggucccu

SEQ ID NO: 27008 - RNA, 18 nt, Artificial Sequence
  Synthetic oligonucleotide: Ptpn6-6551
cauuucuacuuccagccu

SEQ ID NO: 27009 - RNA, 19 nt, Artificial Sequence
  Synthetic oligonucleotide: Ptpn6-6552
gcauuucuacuuccagccu

SEQ ID NO: 27010 - RNA, 20 nt, Artificial Sequence
  Synthetic oligonucleotide: Ptpn6-1709
ugcauuucuacuuccagccu

SEQ ID NO: 27011 - RNA, 21 nt, Artificial Sequence
  Synthetic oligonucleotide: Ptpn6-6553
uugcauuucuacuuccagccu

SEQ ID NO: 27012 - RNA, 22 nt, Artificial Sequence
  Synthetic oligonucleotide: Ptpn6-6554
auugcauuucuacuuccagccu

SEQ ID NO: 27013 - RNA, 23 nt, Artificial Sequence
  Synthetic oligonucleotide: Ptpn6-6555
cauugcauuucuacuuccagccu

SEQ ID NO: 27014 - RNA, 24 nt, Artificial Sequence
  Synthetic oligonucleotide: Ptpn6-6556
ccauugcauuucuacuuccagccu

SEQ ID NO: 27015 - RNA, 18 nt, Artificial Sequence
  Synthetic oligonucleotide: Ptpn6-6557
gcccuuugguuuccgccu

SEQ ID NO: 27016 - RNA, 19 nt, Artificial Sequence
  Synthetic oligonucleotide: Ptpn6-6558
ggcccuuugguuuccgccu

SEQ ID NO: 27017 - RNA, 20 nt, Artificial Sequence
  Synthetic oligonucleotide: Ptpn6-1659
aggcccuuugguuuccgccu

SEQ ID NO: 27018 - RNA, 21 nt, Artificial Sequence
  Synthetic oligonucleotide: Ptpn6-6559
uaggcccuuugguuuccgccu

SEQ ID NO: 27019 - RNA, 22 nt, Artificial Sequence
  Synthetic oligonucleotide: Ptpn6-6560
uuaggcccuuugguuuccgccu

SEQ ID NO: 27020 - RNA, 23 nt, Artificial Sequence
  Synthetic oligonucleotide: Ptpn6-6561
cuuaggcccuuugguuuccgccu

SEQ ID NO: 27021 - RNA, 24 nt, Artificial Sequence
  Synthetic oligonucleotide: Ptpn6-6562
ccuuaggcccuuugguuuccgccu

SEQ ID NO: 27022 - RNA, 18 nt, Artificial Sequence
  Synthetic oligonucleotide: Ptpn6-6563
gccugcuguacucccgcu

SEQ ID NO: 27023 - RNA, 19 nt, Artificial Sequence
  Synthetic oligonucleotide: Ptpn6-6564
ggccugcuguacucccgcu

SEQ ID NO: 27024 - RNA, 20 nt, Artificial Sequence
  Synthetic oligonucleotide: Ptpn6-1670
gggccugcuguacucccgcu

SEQ ID NO: 27025 - RNA, 21 nt, Artificial Sequence
  Synthetic oligonucleotide: Ptpn6-6565
cgggccugcuguacucccgcu

SEQ ID NO: 27026 - RNA, 22 nt, Artificial Sequence
  Synthetic oligonucleotide: Ptpn6-6566
gcgggccugcuguacucccgcu

SEQ ID NO: 27027 - RNA, 23 nt, Artificial Sequence
  Synthetic oligonucleotide: Ptpn6-6567
ggcgggccugcuguacucccgcu

SEQ ID NO: 27028 - RNA, 24 nt, Artificial Sequence
  Synthetic oligonucleotide: Ptpn6-6568
aggcgggccugcuguacucccgcu

SEQ ID NO: 27029 - RNA, 18 nt, Artificial Sequence
  Synthetic oligonucleotide: Ptpn6-6569
gcagggaagcuggccgcu

SEQ ID NO: 27030 - RNA, 19 nt, Artificial Sequence
  Synthetic oligonucleotide: Ptpn6-6570
ugcagggaagcuggccgcu

SEQ ID NO: 27031 - RNA, 20 nt, Artificial Sequence
  Synthetic oligonucleotide: Ptpn6-1675
cugcagggaagcuggccgcu

SEQ ID NO: 27032 - RNA, 21 nt, Artificial Sequence
  Synthetic oligonucleotide: Ptpn6-6571
gcugcagggaagcuggccgcu

SEQ ID NO: 27033 - RNA, 22 nt, Artificial Sequence
  Synthetic oligonucleotide: Ptpn6-6572
ggcugcagggaagcuggccgcu

SEQ ID NO: 27034 - RNA, 23 nt, Artificial Sequence
  Synthetic oligonucleotide: Ptpn6-6573
gggcugcagggaagcuggccgcu

SEQ ID NO: 27035 - RNA, 24 nt, Artificial Sequence
  Synthetic oligonucleotide: Ptpn6-6574
ggggcugcagggaagcuggccgcu

SEQ ID NO: 27036 - RNA, 18 nt, Artificial Sequence
  Synthetic oligonucleotide: Ptpn6-6575
cugcuucugccuccugcu

SEQ ID NO: 27037 - RNA, 19 nt, Artificial Sequence
  Synthetic oligonucleotide: Ptpn6-6576
ccugcuucugccuccugcu

SEQ ID NO: 27038 - RNA, 20 nt, Artificial Sequence
  Synthetic oligonucleotide: Ptpn6-1710
uccugcuucugccuccugcu

SEQ ID NO: 27039 - RNA, 21 nt, Artificial Sequence
  Synthetic oligonucleotide: Ptpn6-6577
cuccugcuucugccuccugcu

SEQ ID NO: 27040 - RNA, 22 nt, Artificial Sequence
  Synthetic oligonucleotide: Ptpn6-6578
gcuccugcuucugccuccugcu

SEQ ID NO: 27041 - RNA, 23 nt, Artificial Sequence
  Synthetic oligonucleotide: Ptpn6-6579
ggcuccugcuucugccuccugcu

SEQ ID NO: 27042 - RNA, 24 nt, Artificial Sequence
  Synthetic oligonucleotide: Ptpn6-6580
gggcuccugcuucugccuccugcu

SEQ ID NO: 27043 - RNA, 18 nt, Artificial Sequence
  Synthetic oligonucleotide: Ptpn6-6581
ggggguaccuccuucucu

SEQ ID NO: 27044 - RNA, 19 nt, Artificial Sequence
  Synthetic oligonucleotide: Ptpn6-6582
aggggguaccuccuucucu

SEQ ID NO: 27045 - RNA, 20 nt, Artificial Sequence
  Synthetic oligonucleotide: Ptpn6-6583
caggggguaccuccuucucu

SEQ ID NO: 27046 - RNA, 21 nt, Artificial Sequence
  Synthetic oligonucleotide: Ptpn6-6584
acaggggguaccuccuucucu

SEQ ID NO: 27047 - RNA, 22 nt, Artificial Sequence
  Synthetic oligonucleotide: Ptpn6-6585
cacaggggguaccuccuucucu

SEQ ID NO: 27048 - RNA, 23 nt, Artificial Sequence
  Synthetic oligonucleotide: Ptpn6-6586
gcacaggggguaccuccuucucu

SEQ ID NO: 27049 - RNA, 24 nt, Artificial Sequence
  Synthetic oligonucleotide: Ptpn6-6587
ugcacaggggguaccuccuucucu

SEQ ID NO: 27050 - RNA, 18 nt, Artificial Sequence
  Synthetic oligonucleotide: Ptpn6-6588
caggggguaccuccuucu

SEQ ID NO: 27051 - RNA, 19 nt, Artificial Sequence
  Synthetic oligonucleotide: Ptpn6-6589
acaggggguaccuccuucu

SEQ ID NO: 27052 - RNA, 20 nt, Artificial Sequence
  Synthetic oligonucleotide: Ptpn6-6590
cacaggggguaccuccuucu

SEQ ID NO: 27053 - RNA, 21 nt, Artificial Sequence
  Synthetic oligonucleotide: Ptpn6-6591
gcacaggggguaccuccuucu

SEQ ID NO: 27054 - RNA, 22 nt, Artificial Sequence
  Synthetic oligonucleotide: Ptpn6-6592
ugcacaggggguaccuccuucu

SEQ ID NO: 27055 - RNA, 23 nt, Artificial Sequence
  Synthetic oligonucleotide: Ptpn6-6593
cugcacaggggguaccuccuucu

SEQ ID NO: 27056 - RNA, 24 nt, Artificial Sequence
  Synthetic oligonucleotide: Ptpn6-6594
ccugcacaggggguaccuccuucu

SEQ ID NO: 27057 - RNA, 18 nt, Artificial Sequence
  Synthetic oligonucleotide: Ptpn6-6595
caccucaaacauagcagu

SEQ ID NO: 27058 - RNA, 19 nt, Artificial Sequence
  Synthetic oligonucleotide: Ptpn6-6596
acaccucaaacauagcagu

SEQ ID NO: 27059 - RNA, 20 nt, Artificial Sequence
  Synthetic oligonucleotide: Ptpn6-1712
aacaccucaaacauagcagu

SEQ ID NO: 27060 - RNA, 21 nt, Artificial Sequence
  Synthetic oligonucleotide: Ptpn6-6597
caacaccucaaacauagcagu

SEQ ID NO: 27061 - RNA, 22 nt, Artificial Sequence
  Synthetic oligonucleotide: Ptpn6-6598
acaacaccucaaacauagcagu

SEQ ID NO: 27062 - RNA, 23 nt, Artificial Sequence
  Synthetic oligonucleotide: Ptpn6-6599
cacaacaccucaaacauagcagu

SEQ ID NO: 27063 - RNA, 24 nt, Artificial Sequence
  Synthetic oligonucleotide: Ptpn6-6600
ucacaacaccucaaacauagcagu

SEQ ID NO: 27064 - RNA, 18 nt, Artificial Sequence
  Synthetic oligonucleotide: Ptpn6-6601
uuccccuucccgcaaggu

SEQ ID NO: 27065 - RNA, 19 nt, Artificial Sequence
  Synthetic oligonucleotide: Ptpn6-6602
cuuccccuucccgcaaggu

SEQ ID NO: 27066 - RNA, 20 nt, Artificial Sequence
  Synthetic oligonucleotide: Ptpn6-1706
acuuccccuucccgcaaggu

SEQ ID NO: 27067 - RNA, 21 nt, Artificial Sequence
  Synthetic oligonucleotide: Ptpn6-6603
aacuuccccuucccgcaaggu

SEQ ID NO: 27068 - RNA, 22 nt, Artificial Sequence
  Synthetic oligonucleotide: Ptpn6-6604
gaacuuccccuucccgcaaggu

SEQ ID NO: 27069 - RNA, 23 nt, Artificial Sequence
  Synthetic oligonucleotide: Ptpn6-6605
ugaacuuccccuucccgcaaggu

SEQ ID NO: 27070 - RNA, 24 nt, Artificial Sequence
  Synthetic oligonucleotide: Ptpn6-6606
augaacuuccccuucccgcaaggu

SEQ ID NO: 27071 - RNA, 18 nt, Artificial Sequence
  Synthetic oligonucleotide: Ptpn6-6607
ucugaggaacugggcugu

SEQ ID NO: 27072 - RNA, 19 nt, Artificial Sequence
  Synthetic oligonucleotide: Ptpn6-6608
cucugaggaacugggcugu

SEQ ID NO: 27073 - RNA, 20 nt, Artificial Sequence
  Synthetic oligonucleotide: Ptpn6-1657
ucucugaggaacugggcugu

SEQ ID NO: 27074 - RNA, 21 nt, Artificial Sequence
  Synthetic oligonucleotide: Ptpn6-6609
uucucugaggaacugggcugu

SEQ ID NO: 27075 - RNA, 22 nt, Artificial Sequence
  Synthetic oligonucleotide: Ptpn6-6610
cuucucugaggaacugggcugu

SEQ ID NO: 27076 - RNA, 23 nt, Artificial Sequence
  Synthetic oligonucleotide: Ptpn6-6611
ccuucucugaggaacugggcugu

SEQ ID NO: 27077 - RNA, 24 nt, Artificial Sequence
  Synthetic oligonucleotide: Ptpn6-6612
uccuucucugaggaacugggcugu

SEQ ID NO: 27078 - RNA, 18 nt, Artificial Sequence
  Synthetic oligonucleotide: Ptpn6-6613
augcucacuccgacgugu

SEQ ID NO: 27079 - RNA, 19 nt, Artificial Sequence
  Synthetic oligonucleotide: Ptpn6-6614
gaugcucacuccgacgugu

SEQ ID NO: 27080 - RNA, 20 nt, Artificial Sequence
  Synthetic oligonucleotide: Ptpn6-1703
ugaugcucacuccgacgugu

SEQ ID NO: 27081 - RNA, 21 nt, Artificial Sequence
  Synthetic oligonucleotide: Ptpn6-6615
uugaugcucacuccgacgugu

SEQ ID NO: 27082 - RNA, 22 nt, Artificial Sequence
  Synthetic oligonucleotide: Ptpn6-6616
guugaugcucacuccgacgugu

SEQ ID NO: 27083 - RNA, 23 nt, Artificial Sequence
  Synthetic oligonucleotide: Ptpn6-6617
uguugaugcucacuccgacgugu

SEQ ID NO: 27084 - RNA, 24 nt, Artificial Sequence
  Synthetic oligonucleotide: Ptpn6-6618
uuguugaugcucacuccgacgugu

SEQ ID NO: 27085 - RNA, 18 nt, Artificial Sequence
  Synthetic oligonucleotide: Ptpn6-6619
ccccuucccgcaaggugu

SEQ ID NO: 27086 - RNA, 19 nt, Artificial Sequence
  Synthetic oligonucleotide: Ptpn6-6620
uccccuucccgcaaggugu

SEQ ID NO: 27087 - RNA, 20 nt, Artificial Sequence
  Synthetic oligonucleotide: Ptpn6-1707
uuccccuucccgcaaggugu

SEQ ID NO: 27088 - RNA, 21 nt, Artificial Sequence
  Synthetic oligonucleotide: Ptpn6-6621
cuuccccuucccgcaaggugu

SEQ ID NO: 27089 - RNA, 22 nt, Artificial Sequence
  Synthetic oligonucleotide: Ptpn6-6622
acuuccccuucccgcaaggugu

SEQ ID NO: 27090 - RNA, 23 nt, Artificial Sequence
  Synthetic oligonucleotide: Ptpn6-6623
aacuuccccuucccgcaaggugu

SEQ ID NO: 27091 - RNA, 24 nt, Artificial Sequence
  Synthetic oligonucleotide: Ptpn6-6624
gaacuuccccuucccgcaaggugu

SEQ ID NO: 27092 - RNA, 18 nt, Artificial Sequence
  Synthetic oligonucleotide: Ptpn6-6625
ccugcuguacucccgcuu

SEQ ID NO: 27093 - RNA, 19 nt, Artificial Sequence
  Synthetic oligonucleotide: Ptpn6-6626
gccugcuguacucccgcuu

SEQ ID NO: 27094 - RNA, 20 nt, Artificial Sequence
  Synthetic oligonucleotide: Ptpn6-1011
ggccugcuguacucccgcuu

SEQ ID NO: 27095 - RNA, 21 nt, Artificial Sequence
  Synthetic oligonucleotide: Ptpn6-6627
gggccugcuguacucccgcuu

SEQ ID NO: 27096 - RNA, 22 nt, Artificial Sequence
  Synthetic oligonucleotide: Ptpn6-6628
cgggccugcuguacucccgcuu

SEQ ID NO: 27097 - RNA, 23 nt, Artificial Sequence
  Synthetic oligonucleotide: Ptpn6-6629
gcgggccugcuguacucccgcuu

SEQ ID NO: 27098 - RNA, 24 nt, Artificial Sequence
  Synthetic oligonucleotide: Ptpn6-6630
ggcgggccugcuguacucccgcuu

SEQ ID NO: 27099 - RNA, 18 nt, Artificial Sequence
  Synthetic oligonucleotide: Ptpn6-6631
cccagucuccuguuaguu

SEQ ID NO: 27100 - RNA, 19 nt, Artificial Sequence
  Synthetic oligonucleotide: Ptpn6-6632
ucccagucuccuguuaguu

SEQ ID NO: 27101 - RNA, 20 nt, Artificial Sequence
  Synthetic oligonucleotide: Ptpn6-1694
gucccagucuccuguuaguu

SEQ ID NO: 27102 - RNA, 21 nt, Artificial Sequence
  Synthetic oligonucleotide: Ptpn6-6633
ggucccagucuccuguuaguu

SEQ ID NO: 27103 - RNA, 22 nt, Artificial Sequence
  Synthetic oligonucleotide: Ptpn6-6634
gggucccagucuccuguuaguu

SEQ ID NO: 27104 - RNA, 23 nt, Artificial Sequence
  Synthetic oligonucleotide: Ptpn6-6635
ggggucccagucuccuguuaguu

SEQ ID NO: 27105 - RNA, 24 nt, Artificial Sequence
  Synthetic oligonucleotide: Ptpn6-6636
cggggucccagucuccuguuaguu

SEQ ID NO: 27106 - RNA, 18 nt, Artificial Sequence
  Synthetic oligonucleotide: Ptpn6-6637
cuucccccggggcagguu

SEQ ID NO: 27107 - RNA, 19 nt, Artificial Sequence
  Synthetic oligonucleotide: Ptpn6-6638
ccuucccccggggcagguu

SEQ ID NO: 27108 - RNA, 20 nt, Artificial Sequence
  Synthetic oligonucleotide: Ptpn6-2229
cccuucccccggggcagguu

SEQ ID NO: 27109 - RNA, 21 nt, Artificial Sequence
  Synthetic oligonucleotide: Ptpn6-6639
ccccuucccccggggcagguu

SEQ ID NO: 27110 - RNA, 22 nt, Artificial Sequence
  Synthetic oligonucleotide: Ptpn6-6640
uccccuucccccggggcagguu

SEQ ID NO: 27111 - RNA, 23 nt, Artificial Sequence
  Synthetic oligonucleotide: Ptpn6-6641
cuccccuucccccggggcagguu

SEQ ID NO: 27112 - RNA, 24 nt, Artificial Sequence
  Synthetic oligonucleotide: Ptpn6-6642
ccuccccuucccccggggcagguu

SEQ ID NO: 27113 - RNA, 18 nt, Artificial Sequence
  Synthetic oligonucleotide: Ptpn6-6643
ccagucuccuguuaguuu

SEQ ID NO: 27114 - RNA, 19 nt, Artificial Sequence
  Synthetic oligonucleotide: Ptpn6-6644
cccagucuccuguuaguuu

SEQ ID NO: 27115 - RNA, 20 nt, Artificial Sequence
  Synthetic oligonucleotide: Ptpn6-1143
ucccagucuccuguuaguuu

SEQ ID NO: 27116 - RNA, 21 nt, Artificial Sequence
  Synthetic oligonucleotide: Ptpn6-6645
gucccagucuccuguuaguuu

SEQ ID NO: 27117 - RNA, 22 nt, Artificial Sequence
  Synthetic oligonucleotide: Ptpn6-6646
ggucccagucuccuguuaguuu

SEQ ID NO: 27118 - RNA, 23 nt, Artificial Sequence
  Synthetic oligonucleotide: Ptpn6-6647
gggucccagucuccuguuaguuu

SEQ ID NO: 27119 - RNA, 24 nt, Artificial Sequence
  Synthetic oligonucleotide: Ptpn6-6648
ggggucccagucuccuguuaguuu

SEQ ID NO: 27120 - RNA, 18 nt, Artificial Sequence
  Synthetic oligonucleotide: Ptpn6-6649
ucuuauuuuuuguagaga

SEQ ID NO: 27121 - RNA, 19 nt, Artificial Sequence
  Synthetic oligonucleotide: Ptpn6-6650
uucuuauuuuuuguagaga

SEQ ID NO: 27122 - RNA, 20 nt, Artificial Sequence
  Synthetic oligonucleotide: Ptpn6-2196
uuucuuauuuuuuguagaga

SEQ ID NO: 27123 - RNA, 21 nt, Artificial Sequence
  Synthetic oligonucleotide: Ptpn6-6651
auuucuuauuuuuuguagaga

SEQ ID NO: 27124 - RNA, 22 nt, Artificial Sequence
  Synthetic oligonucleotide: Ptpn6-6652
aauuucuuauuuuuuguagaga

SEQ ID NO: 27125 - RNA, 23 nt, Artificial Sequence
  Synthetic oligonucleotide: Ptpn6-6653
uaauuucuuauuuuuuguagaga

SEQ ID NO: 27126 - RNA, 24 nt, Artificial Sequence
  Synthetic oligonucleotide: Ptpn6-6654
cuaauuucuuauuuuuuguagaga

SEQ ID NO: 27127 - RNA, 18 nt, Artificial Sequence
  Synthetic oligonucleotide: Ptpn6-6655
ucaacacguaccuguuga

SEQ ID NO: 27128 - RNA, 19 nt, Artificial Sequence
  Synthetic oligonucleotide: Ptpn6-6656
cucaacacguaccuguuga

SEQ ID NO: 27129 - RNA, 20 nt, Artificial Sequence
  Synthetic oligonucleotide: Ptpn6-1784
gcucaacacguaccuguuga

SEQ ID NO: 27130 - RNA, 21 nt, Artificial Sequence
  Synthetic oligonucleotide: Ptpn6-6657
ugcucaacacguaccuguuga

SEQ ID NO: 27131 - RNA, 22 nt, Artificial Sequence
  Synthetic oligonucleotide: Ptpn6-6658
augcucaacacguaccuguuga

SEQ ID NO: 27132 - RNA, 23 nt, Artificial Sequence
  Synthetic oligonucleotide: Ptpn6-6659
gaugcucaacacguaccuguuga

SEQ ID NO: 27133 - RNA, 24 nt, Artificial Sequence
  Synthetic oligonucleotide: Ptpn6-6660
agaugcucaacacguaccuguuga

SEQ ID NO: 27134 - RNA, 18 nt, Artificial Sequence
  Synthetic oligonucleotide: Ptpn6-6661
cugcaaugauccaauuua

SEQ ID NO: 27135 - RNA, 19 nt, Artificial Sequence
  Synthetic oligonucleotide: Ptpn6-6662
ucugcaaugauccaauuua

SEQ ID NO: 27136 - RNA, 20 nt, Artificial Sequence
  Synthetic oligonucleotide: Ptpn6-2203
aucugcaaugauccaauuua

SEQ ID NO: 27137 - RNA, 21 nt, Artificial Sequence
  Synthetic oligonucleotide: Ptpn6-6663
aaucugcaaugauccaauuua

SEQ ID NO: 27138 - RNA, 22 nt, Artificial Sequence
  Synthetic oligonucleotide: Ptpn6-6664
gaaucugcaaugauccaauuua

SEQ ID NO: 27139 - RNA, 23 nt, Artificial Sequence
  Synthetic oligonucleotide: Ptpn6-6665
agaaucugcaaugauccaauuua

SEQ ID NO: 27140 - RNA, 24 nt, Artificial Sequence
  Synthetic oligonucleotide: Ptpn6-6666
gagaaucugcaaugauccaauuua

SEQ ID NO: 27141 - RNA, 18 nt, Artificial Sequence
  Synthetic oligonucleotide: Ptpn6-6667
cggucuguaaccucccac

SEQ ID NO: 27142 - RNA, 19 nt, Artificial Sequence
  Synthetic oligonucleotide: Ptpn6-6668
ucggucuguaaccucccac

SEQ ID NO: 27143 - RNA, 20 nt, Artificial Sequence
  Synthetic oligonucleotide: Ptpn6-1580
uucggucuguaaccucccac

SEQ ID NO: 27144 - RNA, 21 nt, Artificial Sequence
  Synthetic oligonucleotide: Ptpn6-6669
guucggucuguaaccucccac

SEQ ID NO: 27145 - RNA, 22 nt, Artificial Sequence
  Synthetic oligonucleotide: Ptpn6-6670
uguucggucuguaaccucccac

SEQ ID NO: 27146 - RNA, 23 nt, Artificial Sequence
  Synthetic oligonucleotide: Ptpn6-6671
uuguucggucuguaaccucccac

SEQ ID NO: 27147 - RNA, 24 nt, Artificial Sequence
  Synthetic oligonucleotide: Ptpn6-6672
uuuguucggucuguaaccucccac

SEQ ID NO: 27148 - RNA, 18 nt, Artificial Sequence
  Synthetic oligonucleotide: Ptpn6-6673
cucagccucccacagugc

SEQ ID NO: 27149 - RNA, 19 nt, Artificial Sequence
  Synthetic oligonucleotide: Ptpn6-6674
ccucagccucccacagugc

SEQ ID NO: 27150 - RNA, 20 nt, Artificial Sequence
  Synthetic oligonucleotide: Ptpn6-1572
gccucagccucccacagugc

SEQ ID NO: 27151 - RNA, 21 nt, Artificial Sequence
  Synthetic oligonucleotide: Ptpn6-6675
cgccucagccucccacagugc

SEQ ID NO: 27152 - RNA, 22 nt, Artificial Sequence
  Synthetic oligonucleotide: Ptpn6-6676
ucgccucagccucccacagugc

SEQ ID NO: 27153 - RNA, 23 nt, Artificial Sequence
  Synthetic oligonucleotide: Ptpn6-6677
cucgccucagccucccacagugc

SEQ ID NO: 27154 - RNA, 24 nt, Artificial Sequence
  Synthetic oligonucleotide: Ptpn6-6678
ucucgccucagccucccacagugc

SEQ ID NO: 27155 - RNA, 18 nt, Artificial Sequence
  Synthetic oligonucleotide: Ptpn6-6679
ggacgugggagggccuuc

SEQ ID NO: 27156 - RNA, 19 nt, Artificial Sequence
  Synthetic oligonucleotide: Ptpn6-6680
uggacgugggagggccuuc

SEQ ID NO: 27157 - RNA, 20 nt, Artificial Sequence
  Synthetic oligonucleotide: Ptpn6-1806
cuggacgugggagggccuuc

SEQ ID NO: 27158 - RNA, 21 nt, Artificial Sequence
  Synthetic oligonucleotide: Ptpn6-6681
gcuggacgugggagggccuuc

SEQ ID NO: 27159 - RNA, 22 nt, Artificial Sequence
  Synthetic oligonucleotide: Ptpn6-6682
ggcuggacgugggagggccuuc

SEQ ID NO: 27160 - RNA, 23 nt, Artificial Sequence
  Synthetic oligonucleotide: Ptpn6-6683
uggcuggacgugggagggccuuc

SEQ ID NO: 27161 - RNA, 24 nt, Artificial Sequence
  Synthetic oligonucleotide: Ptpn6-6684
uuggcuggacgugggagggccuuc

SEQ ID NO: 27162 - RNA, 18 nt, Artificial Sequence
  Synthetic oligonucleotide: Ptpn6-6685
augcucaacacguaccug

SEQ ID NO: 27163 - RNA, 19 nt, Artificial Sequence
  Synthetic oligonucleotide: Ptpn6-6686
gaugcucaacacguaccug

SEQ ID NO: 27164 - RNA, 20 nt, Artificial Sequence
  Synthetic oligonucleotide: Ptpn6-1783
agaugcucaacacguaccug

SEQ ID NO: 27165 - RNA, 21 nt, Artificial Sequence
  Synthetic oligonucleotide: Ptpn6-6687
uagaugcucaacacguaccug

SEQ ID NO: 27166 - RNA, 22 nt, Artificial Sequence
  Synthetic oligonucleotide: Ptpn6-6688
auagaugcucaacacguaccug

SEQ ID NO: 27167 - RNA, 23 nt, Artificial Sequence
  Synthetic oligonucleotide: Ptpn6-6689
aauagaugcucaacacguaccug

SEQ ID NO: 27168 - RNA, 24 nt, Artificial Sequence
  Synthetic oligonucleotide: Ptpn6-6690
uaauagaugcucaacacguaccug

SEQ ID NO: 27169 - RNA, 18 nt, Artificial Sequence
  Synthetic oligonucleotide: Ptpn6-6691
uuucugcguaauacuucu

SEQ ID NO: 27170 - RNA, 19 nt, Artificial Sequence
  Synthetic oligonucleotide: Ptpn6-6692
uuuucugcguaauacuucu

SEQ ID NO: 27171 - RNA, 20 nt, Artificial Sequence
  Synthetic oligonucleotide: Ptpn6-2202
auuuucugcguaauacuucu

SEQ ID NO: 27172 - RNA, 21 nt, Artificial Sequence
  Synthetic oligonucleotide: Ptpn6-6693
uauuuucugcguaauacuucu

SEQ ID NO: 27173 - RNA, 22 nt, Artificial Sequence
  Synthetic oligonucleotide: Ptpn6-6694
cuauuuucugcguaauacuucu

SEQ ID NO: 27174 - RNA, 23 nt, Artificial Sequence
  Synthetic oligonucleotide: Ptpn6-6695
ucuauuuucugcguaauacuucu

SEQ ID NO: 27175 - RNA, 24 nt, Artificial Sequence
  Synthetic oligonucleotide: Ptpn6-6696
gucuauuuucugcguaauacuucu

SEQ ID NO: 27176 - RNA, 18 nt, Artificial Sequence
  Synthetic oligonucleotide: Ptpn6-6697
aacaaauaacccaauaaa

SEQ ID NO: 27177 - RNA, 19 nt, Artificial Sequence
  Synthetic oligonucleotide: Ptpn6-6698
gaacaaauaacccaauaaa

SEQ ID NO: 27178 - RNA, 20 nt, Artificial Sequence
  Synthetic oligonucleotide: Ptpn6-2106
cgaacaaauaacccaauaaa

SEQ ID NO: 27179 - RNA, 21 nt, Artificial Sequence
  Synthetic oligonucleotide: Ptpn6-6699
ccgaacaaauaacccaauaaa

SEQ ID NO: 27180 - RNA, 22 nt, Artificial Sequence
  Synthetic oligonucleotide: Ptpn6-6700
accgaacaaauaacccaauaaa

SEQ ID NO: 27181 - RNA, 23 nt, Artificial Sequence
  Synthetic oligonucleotide: Ptpn6-6701
gaccgaacaaauaacccaauaaa

SEQ ID NO: 27182 - RNA, 24 nt, Artificial Sequence
  Synthetic oligonucleotide: Ptpn6-6702
agaccgaacaaauaacccaauaaa

SEQ ID NO: 27183 - RNA, 18 nt, Artificial Sequence
  Synthetic oligonucleotide: Ptpn6-6703
ugugggaggcugaggcga

SEQ ID NO: 27184 - RNA, 19 nt, Artificial Sequence
  Synthetic oligonucleotide: Ptpn6-6704
cugugggaggcugaggcga

SEQ ID NO: 27185 - RNA, 20 nt, Artificial Sequence
  Synthetic oligonucleotide: Ptpn6-2116
acugugggaggcugaggcga

SEQ ID NO: 27186 - RNA, 21 nt, Artificial Sequence
  Synthetic oligonucleotide: Ptpn6-6705
cacugugggaggcugaggcga

SEQ ID NO: 27187 - RNA, 22 nt, Artificial Sequence
  Synthetic oligonucleotide: Ptpn6-6706
gcacugugggaggcugaggcga

SEQ ID NO: 27188 - RNA, 23 nt, Artificial Sequence
  Synthetic oligonucleotide: Ptpn6-6707
agcacugugggaggcugaggcga

SEQ ID NO: 27189 - RNA, 24 nt, Artificial Sequence
  Synthetic oligonucleotide: Ptpn6-6708
cagcacugugggaggcugaggcga

SEQ ID NO: 27190 - RNA, 18 nt, Artificial Sequence
  Synthetic oligonucleotide: Ptpn6-6709
uuaagaugcugguaauac

SEQ ID NO: 27191 - RNA, 19 nt, Artificial Sequence
  Synthetic oligonucleotide: Ptpn6-6710
uuuaagaugcugguaauac

SEQ ID NO: 27192 - RNA, 20 nt, Artificial Sequence
  Synthetic oligonucleotide: Ptpn6-1412
guuuaagaugcugguaauac

SEQ ID NO: 27193 - RNA, 21 nt, Artificial Sequence
  Synthetic oligonucleotide: Ptpn6-6711
uguuuaagaugcugguaauac

SEQ ID NO: 27194 - RNA, 22 nt, Artificial Sequence
  Synthetic oligonucleotide: Ptpn6-6712
cuguuuaagaugcugguaauac

SEQ ID NO: 27195 - RNA, 23 nt, Artificial Sequence
  Synthetic oligonucleotide: Ptpn6-6713
gcuguuuaagaugcugguaauac

SEQ ID NO: 27196 - RNA, 24 nt, Artificial Sequence
  Synthetic oligonucleotide: Ptpn6-6714
ugcuguuuaagaugcugguaauac

SEQ ID NO: 27197 - RNA, 18 nt, Artificial Sequence
  Synthetic oligonucleotide: Ptpn6-6715
agaggauugcuugagccc

SEQ ID NO: 27198 - RNA, 19 nt, Artificial Sequence
  Synthetic oligonucleotide: Ptpn6-6716
gagaggauugcuugagccc

SEQ ID NO: 27199 - RNA, 20 nt, Artificial Sequence
  Synthetic oligonucleotide: Ptpn6-1428
cgagaggauugcuugagccc

SEQ ID NO: 27200 - RNA, 21 nt, Artificial Sequence
  Synthetic oligonucleotide: Ptpn6-6717
gcgagaggauugcuugagccc

SEQ ID NO: 27201 - RNA, 22 nt, Artificial Sequence
  Synthetic oligonucleotide: Ptpn6-6718
ggcgagaggauugcuugagccc

SEQ ID NO: 27202 - RNA, 23 nt, Artificial Sequence
  Synthetic oligonucleotide: Ptpn6-6719
aggcgagaggauugcuugagccc

SEQ ID NO: 27203 - RNA, 24 nt, Artificial Sequence
  Synthetic oligonucleotide: Ptpn6-6720
gaggcgagaggauugcuugagccc

SEQ ID NO: 27204 - RNA, 18 nt, Artificial Sequence
  Synthetic oligonucleotide: Ptpn6-6721
caaaaaauaagaaauuag

SEQ ID NO: 27205 - RNA, 19 nt, Artificial Sequence
  Synthetic oligonucleotide: Ptpn6-6722
acaaaaaauaagaaauuag

SEQ ID NO: 27206 - RNA, 20 nt, Artificial Sequence
  Synthetic oligonucleotide: Ptpn6-2123
uacaaaaaauaagaaauuag

SEQ ID NO: 27207 - RNA, 21 nt, Artificial Sequence
  Synthetic oligonucleotide: Ptpn6-6723
cuacaaaaaauaagaaauuag

SEQ ID NO: 27208 - RNA, 22 nt, Artificial Sequence
  Synthetic oligonucleotide: Ptpn6-6724
ucuacaaaaaauaagaaauuag

SEQ ID NO: 27209 - RNA, 23 nt, Artificial Sequence
  Synthetic oligonucleotide: Ptpn6-6725
cucuacaaaaaauaagaaauuag

SEQ ID NO: 27210 - RNA, 24 nt, Artificial Sequence
  Synthetic oligonucleotide: Ptpn6-6726
ucucuacaaaaaauaagaaauuag

SEQ ID NO: 27211 - RNA, 18 nt, Artificial Sequence
  Synthetic oligonucleotide: Ptpn6-6727
gaaaauagacagccuugg

SEQ ID NO: 27212 - RNA, 19 nt, Artificial Sequence
  Synthetic oligonucleotide: Ptpn6-6728
agaaaauagacagccuugg

SEQ ID NO: 27213 - RNA, 20 nt, Artificial Sequence
  Synthetic oligonucleotide: Ptpn6-2109
cagaaaauagacagccuugg

SEQ ID NO: 27214 - RNA, 21 nt, Artificial Sequence
  Synthetic oligonucleotide: Ptpn6-6729
gcagaaaauagacagccuugg

SEQ ID NO: 27215 - RNA, 22 nt, Artificial Sequence
  Synthetic oligonucleotide: Ptpn6-6730
cgcagaaaauagacagccuugg

SEQ ID NO: 27216 - RNA, 23 nt, Artificial Sequence
  Synthetic oligonucleotide: Ptpn6-6731
acgcagaaaauagacagccuugg

SEQ ID NO: 27217 - RNA, 24 nt, Artificial Sequence
  Synthetic oligonucleotide: Ptpn6-6732
uacgcagaaaauagacagccuugg

SEQ ID NO: 27218 - RNA, 18 nt, Artificial Sequence
  Synthetic oligonucleotide: Ptpn6-6733
aaucagggaaggagagau

SEQ ID NO: 27219 - RNA, 19 nt, Artificial Sequence
  Synthetic oligonucleotide: Ptpn6-6734
gaaucagggaaggagagau

SEQ ID NO: 27220 - RNA, 20 nt, Artificial Sequence
  Synthetic oligonucleotide: Ptpn6-1549
ggaaucagggaaggagagau

SEQ ID NO: 27221 - RNA, 21 nt, Artificial Sequence
  Synthetic oligonucleotide: Ptpn6-6735
gggaaucagggaaggagagau

SEQ ID NO: 27222 - RNA, 22 nt, Artificial Sequence
  Synthetic oligonucleotide: Ptpn6-6736
agggaaucagggaaggagagau

SEQ ID NO: 27223 - RNA, 23 nt, Artificial Sequence
  Synthetic oligonucleotide: Ptpn6-6737
gagggaaucagggaaggagagau

SEQ ID NO: 27224 - RNA, 24 nt, Artificial Sequence
  Synthetic oligonucleotide: Ptpn6-6738
agagggaaucagggaaggagagau

SEQ ID NO: 27225 - RNA, 18 nt, Artificial Sequence
  Synthetic oligonucleotide: Ptpn6-6739
ugaaugaugcaggggaaa

SEQ ID NO: 27226 - RNA, 19 nt, Artificial Sequence
  Synthetic oligonucleotide: Ptpn6-6740
augaaugaugcaggggaaa

SEQ ID NO: 27227 - RNA, 20 nt, Artificial Sequence
  Synthetic oligonucleotide: Ptpn6-1244
aaugaaugaugcaggggaaa

SEQ ID NO: 27228 - RNA, 21 nt, Artificial Sequence
  Synthetic oligonucleotide: Ptpn6-6741
gaaugaaugaugcaggggaaa

SEQ ID NO: 27229 - RNA, 22 nt, Artificial Sequence
  Synthetic oligonucleotide: Ptpn6-6742
ugaaugaaugaugcaggggaaa

SEQ ID NO: 27230 - RNA, 23 nt, Artificial Sequence
  Synthetic oligonucleotide: Ptpn6-6743
uugaaugaaugaugcaggggaaa

SEQ ID NO: 27231 - RNA, 24 nt, Artificial Sequence
  Synthetic oligonucleotide: Ptpn6-6744
guugaaugaaugaugcaggggaaa

SEQ ID NO: 27232 - RNA, 18 nt, Artificial Sequence
  Synthetic oligonucleotide: Ptpn6-6745
gaugcaggggaaagggaa

SEQ ID NO: 27233 - RNA, 19 nt, Artificial Sequence
  Synthetic oligonucleotide: Ptpn6-6746
ugaugcaggggaaagggaa

SEQ ID NO: 27234 - RNA, 20 nt, Artificial Sequence
  Synthetic oligonucleotide: Ptpn6-1791
augaugcaggggaaagggaa

SEQ ID NO: 27235 - RNA, 21 nt, Artificial Sequence
  Synthetic oligonucleotide: Ptpn6-6747
aaugaugcaggggaaagggaa

SEQ ID NO: 27236 - RNA, 22 nt, Artificial Sequence
  Synthetic oligonucleotide: Ptpn6-6748
gaaugaugcaggggaaagggaa

SEQ ID NO: 27237 - RNA, 23 nt, Artificial Sequence
  Synthetic oligonucleotide: Ptpn6-6749
ugaaugaugcaggggaaagggaa

SEQ ID NO: 27238 - RNA, 24 nt, Artificial Sequence
  Synthetic oligonucleotide: Ptpn6-6750
augaaugaugcaggggaaagggaa

SEQ ID NO: 27239 - RNA, 18 nt, Artificial Sequence
  Synthetic oligonucleotide: Ptpn6-6751
augaaugaugcaggggaa

SEQ ID NO: 27240 - RNA, 19 nt, Artificial Sequence
  Synthetic oligonucleotide: Ptpn6-6752
aaugaaugaugcaggggaa

SEQ ID NO: 27241 - RNA, 20 nt, Artificial Sequence
  Synthetic oligonucleotide: Ptpn6-1058
gaaugaaugaugcaggggaa

SEQ ID NO: 27242 - RNA, 21 nt, Artificial Sequence
  Synthetic oligonucleotide: Ptpn6-6753
ugaaugaaugaugcaggggaa

SEQ ID NO: 27243 - RNA, 22 nt, Artificial Sequence
  Synthetic oligonucleotide: Ptpn6-6754
uugaaugaaugaugcaggggaa

SEQ ID NO: 27244 - RNA, 23 nt, Artificial Sequence
  Synthetic oligonucleotide: Ptpn6-6755
guugaaugaaugaugcaggggaa

SEQ ID NO: 27245 - RNA, 24 nt, Artificial Sequence
  Synthetic oligonucleotide: Ptpn6-6756
uguugaaugaaugaugcaggggaa

SEQ ID NO: 27246 - RNA, 18 nt, Artificial Sequence
  Synthetic oligonucleotide: Ptpn6-6757
aggggaaagggaagugaa

SEQ ID NO: 27247 - RNA, 19 nt, Artificial Sequence
  Synthetic oligonucleotide: Ptpn6-6758
caggggaaagggaagugaa

SEQ ID NO: 27248 - RNA, 20 nt, Artificial Sequence
  Synthetic oligonucleotide: Ptpn6-1062
gcaggggaaagggaagugaa

SEQ ID NO: 27249 - RNA, 21 nt, Artificial Sequence
  Synthetic oligonucleotide: Ptpn6-6759
ugcaggggaaagggaagugaa

SEQ ID NO: 27250 - RNA, 22 nt, Artificial Sequence
  Synthetic oligonucleotide: Ptpn6-6760
augcaggggaaagggaagugaa

SEQ ID NO: 27251 - RNA, 23 nt, Artificial Sequence
  Synthetic oligonucleotide: Ptpn6-6761
gaugcaggggaaagggaagugaa

SEQ ID NO: 27252 - RNA, 24 nt, Artificial Sequence
  Synthetic oligonucleotide: Ptpn6-6762
ugaugcaggggaaagggaagugaa

SEQ ID NO: 27253 - RNA, 18 nt, Artificial Sequence
  Synthetic oligonucleotide: Ptpn6-6763
gggaagugaaaggaaaca

SEQ ID NO: 27254 - RNA, 19 nt, Artificial Sequence
  Synthetic oligonucleotide: Ptpn6-6764
agggaagugaaaggaaaca

SEQ ID NO: 27255 - RNA, 20 nt, Artificial Sequence
  Synthetic oligonucleotide: Ptpn6-1794
aagggaagugaaaggaaaca

SEQ ID NO: 27256 - RNA, 21 nt, Artificial Sequence
  Synthetic oligonucleotide: Ptpn6-6765
aaagggaagugaaaggaaaca

SEQ ID NO: 27257 - RNA, 22 nt, Artificial Sequence
  Synthetic oligonucleotide: Ptpn6-6766
gaaagggaagugaaaggaaaca

SEQ ID NO: 27258 - RNA, 23 nt, Artificial Sequence
  Synthetic oligonucleotide: Ptpn6-6767
ggaaagggaagugaaaggaaaca

SEQ ID NO: 27259 - RNA, 24 nt, Artificial Sequence
  Synthetic oligonucleotide: Ptpn6-6768
gggaaagggaagugaaaggaaaca

SEQ ID NO: 27260 - RNA, 18 nt, Artificial Sequence
  Synthetic oligonucleotide: Ptpn6-6769
ucuccauagcuggaacca

SEQ ID NO: 27261 - RNA, 19 nt, Artificial Sequence
  Synthetic oligonucleotide: Ptpn6-6770
cucuccauagcuggaacca

SEQ ID NO: 27262 - RNA, 20 nt, Artificial Sequence
  Synthetic oligonucleotide: Ptpn6-2194
ccucuccauagcuggaacca

SEQ ID NO: 27263 - RNA, 21 nt, Artificial Sequence
  Synthetic oligonucleotide: Ptpn6-6771
gccucuccauagcuggaacca

SEQ ID NO: 27264 - RNA, 22 nt, Artificial Sequence
  Synthetic oligonucleotide: Ptpn6-6772
agccucuccauagcuggaacca

SEQ ID NO: 27265 - RNA, 23 nt, Artificial Sequence
  Synthetic oligonucleotide: Ptpn6-6773
uagccucuccauagcuggaacca

SEQ ID NO: 27266 - RNA, 24 nt, Artificial Sequence
  Synthetic oligonucleotide: Ptpn6-6774
uuagccucuccauagcuggaacca

SEQ ID NO: 27267 - RNA, 18 nt, Artificial Sequence
  Synthetic oligonucleotide: Ptpn6-6775
ucggucuguaaccuccca

SEQ ID NO: 27268 - RNA, 19 nt, Artificial Sequence
  Synthetic oligonucleotide: Ptpn6-6776
uucggucuguaaccuccca

SEQ ID NO: 27269 - RNA, 20 nt, Artificial Sequence
  Synthetic oligonucleotide: Ptpn6-2204
guucggucuguaaccuccca

SEQ ID NO: 27270 - RNA, 21 nt, Artificial Sequence
  Synthetic oligonucleotide: Ptpn6-6777
uguucggucuguaaccuccca

SEQ ID NO: 27271 - RNA, 22 nt, Artificial Sequence
  Synthetic oligonucleotide: Ptpn6-6778
uuguucggucuguaaccuccca

SEQ ID NO: 27272 - RNA, 23 nt, Artificial Sequence
  Synthetic oligonucleotide: Ptpn6-6779
uuuguucggucuguaaccuccca

SEQ ID NO: 27273 - RNA, 24 nt, Artificial Sequence
  Synthetic oligonucleotide: Ptpn6-6780
auuuguucggucuguaaccuccca

SEQ ID NO: 27274 - RNA, 18 nt, Artificial Sequence
  Synthetic oligonucleotide: Ptpn6-6781
uguugaaugaaugaugca

SEQ ID NO: 27275 - RNA, 19 nt, Artificial Sequence
  Synthetic oligonucleotide: Ptpn6-6782
cuguugaaugaaugaugca

SEQ ID NO: 27276 - RNA, 20 nt, Artificial Sequence
  Synthetic oligonucleotide: Ptpn6-1250
ccuguugaaugaaugaugca

SEQ ID NO: 27277 - RNA, 21 nt, Artificial Sequence
  Synthetic oligonucleotide: Ptpn6-6783
accuguugaaugaaugaugca

SEQ ID NO: 27278 - RNA, 22 nt, Artificial Sequence
  Synthetic oligonucleotide: Ptpn6-6784
uaccuguugaaugaaugaugca

SEQ ID NO: 27279 - RNA, 23 nt, Artificial Sequence
  Synthetic oligonucleotide: Ptpn6-6785
guaccuguugaaugaaugaugca

SEQ ID NO: 27280 - RNA, 24 nt, Artificial Sequence
  Synthetic oligonucleotide: Ptpn6-6786
cguaccuguugaaugaaugaugca

SEQ ID NO: 27281 - RNA, 18 nt, Artificial Sequence
  Synthetic oligonucleotide: Ptpn6-6787
gaaaggaaacaaagaaga

SEQ ID NO: 27282 - RNA, 19 nt, Artificial Sequence
  Synthetic oligonucleotide: Ptpn6-6788
ugaaaggaaacaaagaaga

SEQ ID NO: 27283 - RNA, 20 nt, Artificial Sequence
  Synthetic oligonucleotide: Ptpn6-1061
gugaaaggaaacaaagaaga

SEQ ID NO: 27284 - RNA, 21 nt, Artificial Sequence
  Synthetic oligonucleotide: Ptpn6-6789
agugaaaggaaacaaagaaga

SEQ ID NO: 27285 - RNA, 22 nt, Artificial Sequence
  Synthetic oligonucleotide: Ptpn6-6790
aagugaaaggaaacaaagaaga

SEQ ID NO: 27286 - RNA, 23 nt, Artificial Sequence
  Synthetic oligonucleotide: Ptpn6-6791
gaagugaaaggaaacaaagaaga

SEQ ID NO: 27287 - RNA, 24 nt, Artificial Sequence
  Synthetic oligonucleotide: Ptpn6-6792
ggaagugaaaggaaacaaagaaga

SEQ ID NO: 27288 - RNA, 18 nt, Artificial Sequence
  Synthetic oligonucleotide: Ptpn6-6793
aaugaaugaugcagggga

SEQ ID NO: 27289 - RNA, 19 nt, Artificial Sequence
  Synthetic oligonucleotide: Ptpn6-6794
gaaugaaugaugcagggga

SEQ ID NO: 27290 - RNA, 20 nt, Artificial Sequence
  Synthetic oligonucleotide: Ptpn6-1788
ugaaugaaugaugcagggga

SEQ ID NO: 27291 - RNA, 21 nt, Artificial Sequence
  Synthetic oligonucleotide: Ptpn6-6795
uugaaugaaugaugcagggga

SEQ ID NO: 27292 - RNA, 22 nt, Artificial Sequence
  Synthetic oligonucleotide: Ptpn6-6796
guugaaugaaugaugcagggga

SEQ ID NO: 27293 - RNA, 23 nt, Artificial Sequence
  Synthetic oligonucleotide: Ptpn6-6797
uguugaaugaaugaugcagggga

SEQ ID NO: 27294 - RNA, 24 nt, Artificial Sequence
  Synthetic oligonucleotide: Ptpn6-6798
cuguugaaugaaugaugcagggga

SEQ ID NO: 27295 - RNA, 18 nt, Artificial Sequence
  Synthetic oligonucleotide: Ptpn6-6799
caggggaaagggaaguga

SEQ ID NO: 27296 - RNA, 19 nt, Artificial Sequence
  Synthetic oligonucleotide: Ptpn6-6800
gcaggggaaagggaaguga

SEQ ID NO: 27297 - RNA, 20 nt, Artificial Sequence
  Synthetic oligonucleotide: Ptpn6-1792
ugcaggggaaagggaaguga

SEQ ID NO: 27298 - RNA, 21 nt, Artificial Sequence
  Synthetic oligonucleotide: Ptpn6-6801
augcaggggaaagggaaguga

SEQ ID NO: 27299 - RNA, 22 nt, Artificial Sequence
  Synthetic oligonucleotide: Ptpn6-6802
gaugcaggggaaagggaaguga

SEQ ID NO: 27300 - RNA, 23 nt, Artificial Sequence
  Synthetic oligonucleotide: Ptpn6-6803
ugaugcaggggaaagggaaguga

SEQ ID NO: 27301 - RNA, 24 nt, Artificial Sequence
  Synthetic oligonucleotide: Ptpn6-6804
augaugcaggggaaagggaaguga

SEQ ID NO: 27302 - RNA, 18 nt, Artificial Sequence
  Synthetic oligonucleotide: Ptpn6-6805
cggagaaguuggcuggac

SEQ ID NO: 27303 - RNA, 19 nt, Artificial Sequence
  Synthetic oligonucleotide: Ptpn6-6806
gcggagaaguuggcuggac

SEQ ID NO: 27304 - RNA, 20 nt, Artificial Sequence
  Synthetic oligonucleotide: Ptpn6-1803
ugcggagaaguuggcuggac

SEQ ID NO: 27305 - RNA, 21 nt, Artificial Sequence
  Synthetic oligonucleotide: Ptpn6-6807
gugcggagaaguuggcuggac

SEQ ID NO: 27306 - RNA, 22 nt, Artificial Sequence
  Synthetic oligonucleotide: Ptpn6-6808
agugcggagaaguuggcuggac

SEQ ID NO: 27307 - RNA, 23 nt, Artificial Sequence
  Synthetic oligonucleotide: Ptpn6-6809
aagugcggagaaguuggcuggac

SEQ ID NO: 27308 - RNA, 24 nt, Artificial Sequence
  Synthetic oligonucleotide: Ptpn6-6810
gaagugcggagaaguuggcuggac

SEQ ID NO: 27309 - RNA, 18 nt, Artificial Sequence
  Synthetic oligonucleotide: Ptpn6-6811
cacuggaauguaagcucc

SEQ ID NO: 27310 - RNA, 19 nt, Artificial Sequence
  Synthetic oligonucleotide: Ptpn6-6812
ccacuggaauguaagcucc

SEQ ID NO: 27311 - RNA, 20 nt, Artificial Sequence
  Synthetic oligonucleotide: Ptpn6-2206
cccacuggaauguaagcucc

SEQ ID NO: 27312 - RNA, 21 nt, Artificial Sequence
  Synthetic oligonucleotide: Ptpn6-6813
ucccacuggaauguaagcucc

SEQ ID NO: 27313 - RNA, 22 nt, Artificial Sequence
  Synthetic oligonucleotide: Ptpn6-6814
cucccacuggaauguaagcucc

SEQ ID NO: 27314 - RNA, 23 nt, Artificial Sequence
  Synthetic oligonucleotide: Ptpn6-6815
ccucccacuggaauguaagcucc

SEQ ID NO: 27315 - RNA, 24 nt, Artificial Sequence
  Synthetic oligonucleotide: Ptpn6-6816
accucccacuggaauguaagcucc

SEQ ID NO: 27316 - RNA, 18 nt, Artificial Sequence
  Synthetic oligonucleotide: Ptpn6-6817
ccuuagccucuccauagc

SEQ ID NO: 27317 - RNA, 19 nt, Artificial Sequence
  Synthetic oligonucleotide: Ptpn6-6818
accuuagccucuccauagc

SEQ ID NO: 27318 - RNA, 20 nt, Artificial Sequence
  Synthetic oligonucleotide: Ptpn6-1563
caccuuagccucuccauagc

SEQ ID NO: 27319 - RNA, 18 nt, Artificial Sequence
  Synthetic oligonucleotide: Ptpn6-6819
cuguugaaugaaugaugc

SEQ ID NO: 27320 - RNA, 19 nt, Artificial Sequence
  Synthetic oligonucleotide: Ptpn6-6820
ccuguugaaugaaugaugc

SEQ ID NO: 27321 - RNA, 20 nt, Artificial Sequence
  Synthetic oligonucleotide: Ptpn6-1249
accuguugaaugaaugaugc

SEQ ID NO: 27322 - RNA, 21 nt, Artificial Sequence
  Synthetic oligonucleotide: Ptpn6-6821
uaccuguugaaugaaugaugc

SEQ ID NO: 27323 - RNA, 22 nt, Artificial Sequence
  Synthetic oligonucleotide: Ptpn6-6822
guaccuguugaaugaaugaugc

SEQ ID NO: 27324 - RNA, 23 nt, Artificial Sequence
  Synthetic oligonucleotide: Ptpn6-6823
cguaccuguugaaugaaugaugc

SEQ ID NO: 27325 - RNA, 24 nt, Artificial Sequence
  Synthetic oligonucleotide: Ptpn6-6824
acguaccuguugaaugaaugaugc

SEQ ID NO: 27326 - RNA, 18 nt, Artificial Sequence
  Synthetic oligonucleotide: Ptpn6-6825
caggcuggucucaaacuc

SEQ ID NO: 27327 - RNA, 19 nt, Artificial Sequence
  Synthetic oligonucleotide: Ptpn6-6826
ccaggcuggucucaaacuc

SEQ ID NO: 27328 - RNA, 20 nt, Artificial Sequence
  Synthetic oligonucleotide: Ptpn6-2197
gccaggcuggucucaaacuc

SEQ ID NO: 27329 - RNA, 21 nt, Artificial Sequence
  Synthetic oligonucleotide: Ptpn6-6827
ggccaggcuggucucaaacuc

SEQ ID NO: 27330 - RNA, 22 nt, Artificial Sequence
  Synthetic oligonucleotide: Ptpn6-6828
uggccaggcuggucucaaacuc

SEQ ID NO: 27331 - RNA, 23 nt, Artificial Sequence
  Synthetic oligonucleotide: Ptpn6-6829
uuggccaggcuggucucaaacuc

SEQ ID NO: 27332 - RNA, 24 nt, Artificial Sequence
  Synthetic oligonucleotide: Ptpn6-6830
auuggccaggcuggucucaaacuc

SEQ ID NO: 27333 - RNA, 18 nt, Artificial Sequence
  Synthetic oligonucleotide: Ptpn6-6831
ugaaaggaaacaaagaag

SEQ ID NO: 27334 - RNA, 19 nt, Artificial Sequence
  Synthetic oligonucleotide: Ptpn6-6832
gugaaaggaaacaaagaag

SEQ ID NO: 27335 - RNA, 20 nt, Artificial Sequence
  Synthetic oligonucleotide: Ptpn6-1795
agugaaaggaaacaaagaag

SEQ ID NO: 27336 - RNA, 21 nt, Artificial Sequence
  Synthetic oligonucleotide: Ptpn6-6833
aagugaaaggaaacaaagaag

SEQ ID NO: 27337 - RNA, 22 nt, Artificial Sequence
  Synthetic oligonucleotide: Ptpn6-6834
gaagugaaaggaaacaaagaag

SEQ ID NO: 27338 - RNA, 23 nt, Artificial Sequence
  Synthetic oligonucleotide: Ptpn6-6835
ggaagugaaaggaaacaaagaag

SEQ ID NO: 27339 - RNA, 24 nt, Artificial Sequence
  Synthetic oligonucleotide: Ptpn6-6836
gggaagugaaaggaaacaaagaag

SEQ ID NO: 27340 - RNA, 18 nt, Artificial Sequence
  Synthetic oligonucleotide: Ptpn6-6837
guugaaugaaugaugcag

SEQ ID NO: 27341 - RNA, 19 nt, Artificial Sequence
  Synthetic oligonucleotide: Ptpn6-6838
uguugaaugaaugaugcag

SEQ ID NO: 27342 - RNA, 20 nt, Artificial Sequence
  Synthetic oligonucleotide: Ptpn6-1241
cuguugaaugaaugaugcag

SEQ ID NO: 27343 - RNA, 21 nt, Artificial Sequence
  Synthetic oligonucleotide: Ptpn6-6839
ccuguugaaugaaugaugcag

SEQ ID NO: 27344 - RNA, 22 nt, Artificial Sequence
  Synthetic oligonucleotide: Ptpn6-6840
accuguugaaugaaugaugcag

SEQ ID NO: 27345 - RNA, 23 nt, Artificial Sequence
  Synthetic oligonucleotide: Ptpn6-6841
uaccuguugaaugaaugaugcag

SEQ ID NO: 27346 - RNA, 24 nt, Artificial Sequence
  Synthetic oligonucleotide: Ptpn6-6842
guaccuguugaaugaaugaugcag

SEQ ID NO: 27347 - RNA, 18 nt, Artificial Sequence
  Synthetic oligonucleotide: Ptpn6-6843
auguaagcuccgugagag

SEQ ID NO: 27348 - RNA, 19 nt, Artificial Sequence
  Synthetic oligonucleotide: Ptpn6-6844
aauguaagcuccgugagag

SEQ ID NO: 27349 - RNA, 20 nt, Artificial Sequence
  Synthetic oligonucleotide: Ptpn6-2208
gaauguaagcuccgugagag

SEQ ID NO: 27350 - RNA, 21 nt, Artificial Sequence
  Synthetic oligonucleotide: Ptpn6-6845
ggaauguaagcuccgugagag

SEQ ID NO: 27351 - RNA, 22 nt, Artificial Sequence
  Synthetic oligonucleotide: Ptpn6-6846
uggaauguaagcuccgugagag

SEQ ID NO: 27352 - RNA, 23 nt, Artificial Sequence
  Synthetic oligonucleotide: Ptpn6-6847
cuggaauguaagcuccgugagag

SEQ ID NO: 27353 - RNA, 24 nt, Artificial Sequence
  Synthetic oligonucleotide: Ptpn6-6848
acuggaauguaagcuccgugagag

SEQ ID NO: 27354 - RNA, 18 nt, Artificial Sequence
  Synthetic oligonucleotide: Ptpn6-6849
accuuagccucuccauag

SEQ ID NO: 27355 - RNA, 19 nt, Artificial Sequence
  Synthetic oligonucleotide: Ptpn6-6850
caccuuagccucuccauag

SEQ ID NO: 27356 - RNA, 20 nt, Artificial Sequence
  Synthetic oligonucleotide: Ptpn6-2192
ucaccuuagccucuccauag

SEQ ID NO: 27357 - RNA, 18 nt, Artificial Sequence
  Synthetic oligonucleotide: Ptpn6-6851
ggagaaguuggcuggacg

SEQ ID NO: 27358 - RNA, 19 nt, Artificial Sequence
  Synthetic oligonucleotide: Ptpn6-6852
cggagaaguuggcuggacg

SEQ ID NO: 27359 - RNA, 20 nt, Artificial Sequence
  Synthetic oligonucleotide: Ptpn6-1030
gcggagaaguuggcuggacg

SEQ ID NO: 27360 - RNA, 21 nt, Artificial Sequence
  Synthetic oligonucleotide: Ptpn6-6853
ugcggagaaguuggcuggacg

SEQ ID NO: 27361 - RNA, 22 nt, Artificial Sequence
  Synthetic oligonucleotide: Ptpn6-6854
gugcggagaaguuggcuggacg

SEQ ID NO: 27362 - RNA, 23 nt, Artificial Sequence
  Synthetic oligonucleotide: Ptpn6-6855
agugcggagaaguuggcuggacg

SEQ ID NO: 27363 - RNA, 24 nt, Artificial Sequence
  Synthetic oligonucleotide: Ptpn6-6856
aagugcggagaaguuggcuggacg

SEQ ID NO: 27364 - RNA, 18 nt, Artificial Sequence
  Synthetic oligonucleotide: Ptpn6-6857
cugauguugggaagugcg

SEQ ID NO: 27365 - RNA, 19 nt, Artificial Sequence
  Synthetic oligonucleotide: Ptpn6-6858
ucugauguugggaagugcg

SEQ ID NO: 27366 - RNA, 20 nt, Artificial Sequence
  Synthetic oligonucleotide: Ptpn6-1801
gucugauguugggaagugcg

SEQ ID NO: 27367 - RNA, 21 nt, Artificial Sequence
  Synthetic oligonucleotide: Ptpn6-6859
agucugauguugggaagugcg

SEQ ID NO: 27368 - RNA, 22 nt, Artificial Sequence
  Synthetic oligonucleotide: Ptpn6-6860
aagucugauguugggaagugcg

SEQ ID NO: 27369 - RNA, 23 nt, Artificial Sequence
  Synthetic oligonucleotide: Ptpn6-6861
aaagucugauguugggaagugcg

SEQ ID NO: 27370 - RNA, 24 nt, Artificial Sequence
  Synthetic oligonucleotide: Ptpn6-6862
caaagucugauguugggaagugcg

SEQ ID NO: 27371 - RNA, 18 nt, Artificial Sequence
  Synthetic oligonucleotide: Ptpn6-6863
gaaguuggcuggacgugg

SEQ ID NO: 27372 - RNA, 19 nt, Artificial Sequence
  Synthetic oligonucleotide: Ptpn6-6864
agaaguuggcuggacgugg

SEQ ID NO: 27373 - RNA, 20 nt, Artificial Sequence
  Synthetic oligonucleotide: Ptpn6-1779
gagaaguuggcuggacgugg

SEQ ID NO: 27374 - RNA, 21 nt, Artificial Sequence
  Synthetic oligonucleotide: Ptpn6-6865
ggagaaguuggcuggacgugg

SEQ ID NO: 27375 - RNA, 22 nt, Artificial Sequence
  Synthetic oligonucleotide: Ptpn6-6866
cggagaaguuggcuggacgugg

SEQ ID NO: 27376 - RNA, 23 nt, Artificial Sequence
  Synthetic oligonucleotide: Ptpn6-6867
gcggagaaguuggcuggacgugg

SEQ ID NO: 27377 - RNA, 24 nt, Artificial Sequence
  Synthetic oligonucleotide: Ptpn6-6868
ugcggagaaguuggcuggacgugg

SEQ ID NO: 27378 - RNA, 18 nt, Artificial Sequence
  Synthetic oligonucleotide: Ptpn6-6869
gaagugcggagaaguugg

SEQ ID NO: 27379 - RNA, 19 nt, Artificial Sequence
  Synthetic oligonucleotide: Ptpn6-6870
ggaagugcggagaaguugg

SEQ ID NO: 27380 - RNA, 20 nt, Artificial Sequence
  Synthetic oligonucleotide: Ptpn6-1802
gggaagugcggagaaguugg

SEQ ID NO: 27381 - RNA, 21 nt, Artificial Sequence
  Synthetic oligonucleotide: Ptpn6-6871
ugggaagugcggagaaguugg

SEQ ID NO: 27382 - RNA, 22 nt, Artificial Sequence
  Synthetic oligonucleotide: Ptpn6-6872
uugggaagugcggagaaguugg

SEQ ID NO: 27383 - RNA, 23 nt, Artificial Sequence
  Synthetic oligonucleotide: Ptpn6-6873
guugggaagugcggagaaguugg

SEQ ID NO: 27384 - RNA, 24 nt, Artificial Sequence
  Synthetic oligonucleotide: Ptpn6-6874
uguugggaagugcggagaaguugg

SEQ ID NO: 27385 - RNA, 18 nt, Artificial Sequence
  Synthetic oligonucleotide: Ptpn6-6875
ccuguugaaugaaugaug

SEQ ID NO: 27386 - RNA, 19 nt, Artificial Sequence
  Synthetic oligonucleotide: Ptpn6-6876
accuguugaaugaaugaug

SEQ ID NO: 27387 - RNA, 20 nt, Artificial Sequence
  Synthetic oligonucleotide: Ptpn6-1781
uaccuguugaaugaaugaug

SEQ ID NO: 27388 - RNA, 21 nt, Artificial Sequence
  Synthetic oligonucleotide: Ptpn6-6877
guaccuguugaaugaaugaug

SEQ ID NO: 27389 - RNA, 22 nt, Artificial Sequence
  Synthetic oligonucleotide: Ptpn6-6878
cguaccuguugaaugaaugaug

SEQ ID NO: 27390 - RNA, 23 nt, Artificial Sequence
  Synthetic oligonucleotide: Ptpn6-6879
acguaccuguugaaugaaugaug

SEQ ID NO: 27391 - RNA, 24 nt, Artificial Sequence
  Synthetic oligonucleotide: Ptpn6-6880
cacguaccuguugaaugaaugaug

SEQ ID NO: 27392 - RNA, 18 nt, Artificial Sequence
  Synthetic oligonucleotide: Ptpn6-6881
ugggaccaaagucugaug

SEQ ID NO: 27393 - RNA, 19 nt, Artificial Sequence
  Synthetic oligonucleotide: Ptpn6-6882
augggaccaaagucugaug

SEQ ID NO: 27394 - RNA, 20 nt, Artificial Sequence
  Synthetic oligonucleotide: Ptpn6-1797
gaugggaccaaagucugaug

SEQ ID NO: 27395 - RNA, 21 nt, Artificial Sequence
  Synthetic oligonucleotide: Ptpn6-6883
agaugggaccaaagucugaug

SEQ ID NO: 27396 - RNA, 22 nt, Artificial Sequence
  Synthetic oligonucleotide: Ptpn6-6884
aagaugggaccaaagucugaug

SEQ ID NO: 27397 - RNA, 23 nt, Artificial Sequence
  Synthetic oligonucleotide: Ptpn6-6885
gaagaugggaccaaagucugaug

SEQ ID NO: 27398 - RNA, 24 nt, Artificial Sequence
  Synthetic oligonucleotide: Ptpn6-6886
agaagaugggaccaaagucugaug

SEQ ID NO: 27399 - RNA, 18 nt, Artificial Sequence
  Synthetic oligonucleotide: Ptpn6-6887
gucugauguugggaagug

SEQ ID NO: 27400 - RNA, 19 nt, Artificial Sequence
  Synthetic oligonucleotide: Ptpn6-6888
agucugauguugggaagug

SEQ ID NO: 27401 - RNA, 20 nt, Artificial Sequence
  Synthetic oligonucleotide: Ptpn6-1213
aagucugauguugggaagug

SEQ ID NO: 27402 - RNA, 21 nt, Artificial Sequence
  Synthetic oligonucleotide: Ptpn6-6889
aaagucugauguugggaagug

SEQ ID NO: 27403 - RNA, 22 nt, Artificial Sequence
  Synthetic oligonucleotide: Ptpn6-6890
caaagucugauguugggaagug

SEQ ID NO: 27404 - RNA, 23 nt, Artificial Sequence
  Synthetic oligonucleotide: Ptpn6-6891
ccaaagucugauguugggaagug

SEQ ID NO: 27405 - RNA, 24 nt, Artificial Sequence
  Synthetic oligonucleotide: Ptpn6-6892
accaaagucugauguugggaagug

SEQ ID NO: 27406 - RNA, 18 nt, Artificial Sequence
  Synthetic oligonucleotide: Ptpn6-6893
ccucagccucccacagug

SEQ ID NO: 27407 - RNA, 19 nt, Artificial Sequence
  Synthetic oligonucleotide: Ptpn6-6894
gccucagccucccacagug

SEQ ID NO: 27408 - RNA, 20 nt, Artificial Sequence
  Synthetic oligonucleotide: Ptpn6-2198
cgccucagccucccacagug

SEQ ID NO: 27409 - RNA, 21 nt, Artificial Sequence
  Synthetic oligonucleotide: Ptpn6-6895
ucgccucagccucccacagug

SEQ ID NO: 27410 - RNA, 22 nt, Artificial Sequence
  Synthetic oligonucleotide: Ptpn6-6896
cucgccucagccucccacagug

SEQ ID NO: 27411 - RNA, 23 nt, Artificial Sequence
  Synthetic oligonucleotide: Ptpn6-6897
ucucgccucagccucccacagug

SEQ ID NO: 27412 - RNA, 24 nt, Artificial Sequence
  Synthetic oligonucleotide: Ptpn6-6898
cucucgccucagccucccacagug

SEQ ID NO: 27413 - RNA, 18 nt, Artificial Sequence
  Synthetic oligonucleotide: Ptpn6-6899
cuaauuucuuauuuuuug

SEQ ID NO: 27414 - RNA, 19 nt, Artificial Sequence
  Synthetic oligonucleotide: Ptpn6-6900
gcuaauuucuuauuuuuug

SEQ ID NO: 27415 - RNA, 20 nt, Artificial Sequence
  Synthetic oligonucleotide: Ptpn6-2195
agcuaauuucuuauuuuuug

SEQ ID NO: 27416 - RNA, 21 nt, Artificial Sequence
  Synthetic oligonucleotide: Ptpn6-6901
cagcuaauuucuuauuuuuug

SEQ ID NO: 27417 - RNA, 22 nt, Artificial Sequence
  Synthetic oligonucleotide: Ptpn6-6902
ccagcuaauuucuuauuuuuug

SEQ ID NO: 27418 - RNA, 23 nt, Artificial Sequence
  Synthetic oligonucleotide: Ptpn6-6903
cccagcuaauuucuuauuuuuug

SEQ ID NO: 27419 - RNA, 24 nt, Artificial Sequence
  Synthetic oligonucleotide: Ptpn6-6904
acccagcuaauuucuuauuuuuug

SEQ ID NO: 27420 - RNA, 18 nt, Artificial Sequence
  Synthetic oligonucleotide: Ptpn6-6905
agucugauguugggaagu

SEQ ID NO: 27421 - RNA, 19 nt, Artificial Sequence
  Synthetic oligonucleotide: Ptpn6-6906
aagucugauguugggaagu

SEQ ID NO: 27422 - RNA, 20 nt, Artificial Sequence
  Synthetic oligonucleotide: Ptpn6-1778
aaagucugauguugggaagu

SEQ ID NO: 27423 - RNA, 21 nt, Artificial Sequence
  Synthetic oligonucleotide: Ptpn6-6907
caaagucugauguugggaagu

SEQ ID NO: 27424 - RNA, 22 nt, Artificial Sequence
  Synthetic oligonucleotide: Ptpn6-6908
ccaaagucugauguugggaagu

SEQ ID NO: 27425 - RNA, 23 nt, Artificial Sequence
  Synthetic oligonucleotide: Ptpn6-6909
accaaagucugauguugggaagu

SEQ ID NO: 27426 - RNA, 24 nt, Artificial Sequence
  Synthetic oligonucleotide: Ptpn6-6910
gaccaaagucugauguugggaagu

SEQ ID NO: 27427 - RNA, 18 nt, Artificial Sequence
  Synthetic oligonucleotide: Ptpn6-6911
gagaaguuggcuggacgu

SEQ ID NO: 27428 - RNA, 19 nt, Artificial Sequence
  Synthetic oligonucleotide: Ptpn6-6912
ggagaaguuggcuggacgu

SEQ ID NO: 27429 - RNA, 20 nt, Artificial Sequence
  Synthetic oligonucleotide: Ptpn6-1214
cggagaaguuggcuggacgu

SEQ ID NO: 27430 - RNA, 21 nt, Artificial Sequence
  Synthetic oligonucleotide: Ptpn6-6913
gcggagaaguuggcuggacgu

SEQ ID NO: 27431 - RNA, 22 nt, Artificial Sequence
  Synthetic oligonucleotide: Ptpn6-6914
ugcggagaaguuggcuggacgu

SEQ ID NO: 27432 - RNA, 23 nt, Artificial Sequence
  Synthetic oligonucleotide: Ptpn6-6915
gugcggagaaguuggcuggacgu

SEQ ID NO: 27433 - RNA, 24 nt, Artificial Sequence
  Synthetic oligonucleotide: Ptpn6-6916
agugcggagaaguuggcuggacgu

SEQ ID NO: 27434 - RNA, 18 nt, Artificial Sequence
  Synthetic oligonucleotide: Ptpn6-6917
cuggaauguaagcuccgu

SEQ ID NO: 27435 - RNA, 19 nt, Artificial Sequence
  Synthetic oligonucleotide: Ptpn6-6918
acuggaauguaagcuccgu

SEQ ID NO: 27436 - RNA, 20 nt, Artificial Sequence
  Synthetic oligonucleotide: Ptpn6-2207
cacuggaauguaagcuccgu

SEQ ID NO: 27437 - RNA, 21 nt, Artificial Sequence
  Synthetic oligonucleotide: Ptpn6-6919
ccacuggaauguaagcuccgu

SEQ ID NO: 27438 - RNA, 22 nt, Artificial Sequence
  Synthetic oligonucleotide: Ptpn6-6920
cccacuggaauguaagcuccgu

SEQ ID NO: 27439 - RNA, 23 nt, Artificial Sequence
  Synthetic oligonucleotide: Ptpn6-6921
ucccacuggaauguaagcuccgu

SEQ ID NO: 27440 - RNA, 24 nt, Artificial Sequence
  Synthetic oligonucleotide: Ptpn6-6922
cucccacuggaauguaagcuccgu

SEQ ID NO: 27441 - RNA, 18 nt, Artificial Sequence
  Synthetic oligonucleotide: Ptpn6-6923
agugcugggaucacaggu

SEQ ID NO: 27442 - RNA, 19 nt, Artificial Sequence
  Synthetic oligonucleotide: Ptpn6-6924
cagugcugggaucacaggu

SEQ ID NO: 27443 - RNA, 20 nt, Artificial Sequence
  Synthetic oligonucleotide: Ptpn6-2200
acagugcugggaucacaggu

SEQ ID NO: 27444 - RNA, 21 nt, Artificial Sequence
  Synthetic oligonucleotide: Ptpn6-6925
cacagugcugggaucacaggu

SEQ ID NO: 27445 - RNA, 22 nt, Artificial Sequence
  Synthetic oligonucleotide: Ptpn6-6926
ccacagugcugggaucacaggu

SEQ ID NO: 27446 - RNA, 23 nt, Artificial Sequence
  Synthetic oligonucleotide: Ptpn6-6927
cccacagugcugggaucacaggu

SEQ ID NO: 27447 - RNA, 24 nt, Artificial Sequence
  Synthetic oligonucleotide: Ptpn6-6928
ucccacagugcugggaucacaggu

SEQ ID NO: 27448 - RNA, 18 nt, Artificial Sequence
  Synthetic oligonucleotide: Ptpn6-6929
gggaccaaagucugaugu

SEQ ID NO: 27449 - RNA, 19 nt, Artificial Sequence
  Synthetic oligonucleotide: Ptpn6-6930
ugggaccaaagucugaugu

SEQ ID NO: 27450 - RNA, 20 nt, Artificial Sequence
  Synthetic oligonucleotide: Ptpn6-983
augggaccaaagucugaugu

SEQ ID NO: 27451 - RNA, 21 nt, Artificial Sequence
  Synthetic oligonucleotide: Ptpn6-6931
gaugggaccaaagucugaugu

SEQ ID NO: 27452 - RNA, 22 nt, Artificial Sequence
  Synthetic oligonucleotide: Ptpn6-6932
agaugggaccaaagucugaugu

SEQ ID NO: 27453 - RNA, 23 nt, Artificial Sequence
  Synthetic oligonucleotide: Ptpn6-6933
aagaugggaccaaagucugaugu

SEQ ID NO: 27454 - RNA, 24 nt, Artificial Sequence
  Synthetic oligonucleotide: Ptpn6-6934
gaagaugggaccaaagucugaugu

SEQ ID NO: 27455 - RNA, 18 nt, Artificial Sequence
  Synthetic oligonucleotide: Ptpn6-6935
auuuucugcguaauacuu

SEQ ID NO: 27456 - RNA, 19 nt, Artificial Sequence
  Synthetic oligonucleotide: Ptpn6-6936
uauuuucugcguaauacuu

SEQ ID NO: 27457 - RNA, 20 nt, Artificial Sequence
  Synthetic oligonucleotide: Ptpn6-2201
cuauuuucugcguaauacuu

SEQ ID NO: 27458 - RNA, 21 nt, Artificial Sequence
  Synthetic oligonucleotide: Ptpn6-6937
ucuauuuucugcguaauacuu

SEQ ID NO: 27459 - RNA, 22 nt, Artificial Sequence
  Synthetic oligonucleotide: Ptpn6-6938
gucuauuuucugcguaauacuu

SEQ ID NO: 27460 - RNA, 23 nt, Artificial Sequence
  Synthetic oligonucleotide: Ptpn6-6939
ugucuauuuucugcguaauacuu

SEQ ID NO: 27461 - RNA, 24 nt, Artificial Sequence
  Synthetic oligonucleotide: Ptpn6-6940
cugucuauuuucugcguaauacuu

SEQ ID NO: 27462 - RNA, 18 nt, Artificial Sequence
  Synthetic oligonucleotide: Ptpn6-6941
ggaccaaagucugauguu

SEQ ID NO: 27463 - RNA, 19 nt, Artificial Sequence
  Synthetic oligonucleotide: Ptpn6-6942
gggaccaaagucugauguu

SEQ ID NO: 27464 - RNA, 20 nt, Artificial Sequence
  Synthetic oligonucleotide: Ptpn6-979
ugggaccaaagucugauguu

SEQ ID NO: 27465 - RNA, 21 nt, Artificial Sequence
  Synthetic oligonucleotide: Ptpn6-6943
augggaccaaagucugauguu

SEQ ID NO: 27466 - RNA, 22 nt, Artificial Sequence
  Synthetic oligonucleotide: Ptpn6-6944
gaugggaccaaagucugauguu

SEQ ID NO: 27467 - RNA, 23 nt, Artificial Sequence
  Synthetic oligonucleotide: Ptpn6-6945
agaugggaccaaagucugauguu

SEQ ID NO: 27468 - RNA, 24 nt, Artificial Sequence
  Synthetic oligonucleotide: Ptpn6-6946
aagaugggaccaaagucugauguu

SEQ ID NO: 27469 - RNA, 18 nt, Artificial Sequence
  Synthetic oligonucleotide: Ptpn6-6947
cacggagcuuacauucca

SEQ ID NO: 27470 - RNA, 19 nt, Artificial Sequence
  Synthetic oligonucleotide: Ptpn6-6948
ucacggagcuuacauucca

SEQ ID NO: 27471 - RNA, 20 nt, Artificial Sequence
  Synthetic oligonucleotide: Ptpn6-2102
cucacggagcuuacauucca

SEQ ID NO: 27472 - RNA, 21 nt, Artificial Sequence
  Synthetic oligonucleotide: Ptpn6-6949
ucucacggagcuuacauucca

SEQ ID NO: 27473 - RNA, 22 nt, Artificial Sequence
  Synthetic oligonucleotide: Ptpn6-6950
cucucacggagcuuacauucca

SEQ ID NO: 27474 - RNA, 23 nt, Artificial Sequence
  Synthetic oligonucleotide: Ptpn6-6951
gcucucacggagcuuacauucca

SEQ ID NO: 27475 - RNA, 24 nt, Artificial Sequence
  Synthetic oligonucleotide: Ptpn6-6952
ugcucucacggagcuuacauucca

SEQ ID NO: 27476 - RNA, 18 nt, Artificial Sequence
  Synthetic oligonucleotide: Ptpn6-6953
gaaaggcagagggaauca

SEQ ID NO: 27477 - RNA, 19 nt, Artificial Sequence
  Synthetic oligonucleotide: Ptpn6-6954
ggaaaggcagagggaauca

SEQ ID NO: 27478 - RNA, 20 nt, Artificial Sequence
  Synthetic oligonucleotide: Ptpn6-1546
uggaaaggcagagggaauca

SEQ ID NO: 27479 - RNA, 21 nt, Artificial Sequence
  Synthetic oligonucleotide: Ptpn6-6955
cuggaaaggcagagggaauca

SEQ ID NO: 27480 - RNA, 22 nt, Artificial Sequence
  Synthetic oligonucleotide: Ptpn6-6956
ccuggaaaggcagagggaauca

SEQ ID NO: 27481 - RNA, 23 nt, Artificial Sequence
  Synthetic oligonucleotide: Ptpn6-6957
gccuggaaaggcagagggaauca

SEQ ID NO: 27482 - RNA, 24 nt, Artificial Sequence
  Synthetic oligonucleotide: Ptpn6-6958
ggccuggaaaggcagagggaauca

SEQ ID NO: 27483 - RNA, 18 nt, Artificial Sequence
  Synthetic oligonucleotide: Ptpn6-6959
acauggucucugcucuca

SEQ ID NO: 27484 - RNA, 19 nt, Artificial Sequence
  Synthetic oligonucleotide: Ptpn6-6960
gacauggucucugcucuca

SEQ ID NO: 27485 - RNA, 20 nt, Artificial Sequence
  Synthetic oligonucleotide: Ptpn6-1414
agacauggucucugcucuca

SEQ ID NO: 27486 - RNA, 21 nt, Artificial Sequence
  Synthetic oligonucleotide: Ptpn6-6961
cagacauggucucugcucuca

SEQ ID NO: 27487 - RNA, 22 nt, Artificial Sequence
  Synthetic oligonucleotide: Ptpn6-6962
acagacauggucucugcucuca

SEQ ID NO: 27488 - RNA, 23 nt, Artificial Sequence
  Synthetic oligonucleotide: Ptpn6-6963
gacagacauggucucugcucuca

SEQ ID NO: 27489 - RNA, 24 nt, Artificial Sequence
  Synthetic oligonucleotide: Ptpn6-6964
agacagacauggucucugcucuca

SEQ ID NO: 27490 - RNA, 18 nt, Artificial Sequence
  Synthetic oligonucleotide: Ptpn6-6965
ccagugggagguuacaga

SEQ ID NO: 27491 - RNA, 19 nt, Artificial Sequence
  Synthetic oligonucleotide: Ptpn6-6966
uccagugggagguuacaga

SEQ ID NO: 27492 - RNA, 20 nt, Artificial Sequence
  Synthetic oligonucleotide: Ptpn6-2105
uuccagugggagguuacaga

SEQ ID NO: 27493 - RNA, 21 nt, Artificial Sequence
  Synthetic oligonucleotide: Ptpn6-6967
auuccagugggagguuacaga

SEQ ID NO: 27494 - RNA, 22 nt, Artificial Sequence
  Synthetic oligonucleotide: Ptpn6-6968
cauuccagugggagguuacaga

SEQ ID NO: 27495 - RNA, 23 nt, Artificial Sequence
  Synthetic oligonucleotide: Ptpn6-6969
acauuccagugggagguuacaga

SEQ ID NO: 27496 - RNA, 24 nt, Artificial Sequence
  Synthetic oligonucleotide: Ptpn6-6970
uacauuccagugggagguuacaga

SEQ ID NO: 27497 - RNA, 18 nt, Artificial Sequence
  Synthetic oligonucleotide: Ptpn6-6971
gaaucagggaaggagaga

SEQ ID NO: 27498 - RNA, 19 nt, Artificial Sequence
  Synthetic oligonucleotide: Ptpn6-6972
ggaaucagggaaggagaga

SEQ ID NO: 27499 - RNA, 20 nt, Artificial Sequence
  Synthetic oligonucleotide: Ptpn6-1548
gggaaucagggaaggagaga

SEQ ID NO: 27500 - RNA, 21 nt, Artificial Sequence
  Synthetic oligonucleotide: Ptpn6-6973
agggaaucagggaaggagaga

SEQ ID NO: 27501 - RNA, 22 nt, Artificial Sequence
  Synthetic oligonucleotide: Ptpn6-6974
gagggaaucagggaaggagaga

SEQ ID NO: 27502 - RNA, 23 nt, Artificial Sequence
  Synthetic oligonucleotide: Ptpn6-6975
agagggaaucagggaaggagaga

SEQ ID NO: 27503 - RNA, 24 nt, Artificial Sequence
  Synthetic oligonucleotide: Ptpn6-6976
cagagggaaucagggaaggagaga

SEQ ID NO: 27504 - RNA, 18 nt, Artificial Sequence
  Synthetic oligonucleotide: Ptpn6-6977
ggcagagggaaucaggga

SEQ ID NO: 27505 - RNA, 19 nt, Artificial Sequence
  Synthetic oligonucleotide: Ptpn6-6978
aggcagagggaaucaggga

SEQ ID NO: 27506 - RNA, 20 nt, Artificial Sequence
  Synthetic oligonucleotide: Ptpn6-1547
aaggcagagggaaucaggga

SEQ ID NO: 27507 - RNA, 21 nt, Artificial Sequence
  Synthetic oligonucleotide: Ptpn6-6979
aaaggcagagggaaucaggga

SEQ ID NO: 27508 - RNA, 22 nt, Artificial Sequence
  Synthetic oligonucleotide: Ptpn6-6980
gaaaggcagagggaaucaggga

SEQ ID NO: 27509 - RNA, 23 nt, Artificial Sequence
  Synthetic oligonucleotide: Ptpn6-6981
ggaaaggcagagggaaucaggga

SEQ ID NO: 27510 - RNA, 24 nt, Artificial Sequence
  Synthetic oligonucleotide: Ptpn6-6982
uggaaaggcagagggaaucaggga

SEQ ID NO: 27511 - RNA, 18 nt, Artificial Sequence
  Synthetic oligonucleotide: Ptpn6-6983
gaugcugguaauacugga

SEQ ID NO: 27512 - RNA, 19 nt, Artificial Sequence
  Synthetic oligonucleotide: Ptpn6-6984
agaugcugguaauacugga

SEQ ID NO: 27513 - RNA, 20 nt, Artificial Sequence
  Synthetic oligonucleotide: Ptpn6-2099
aagaugcugguaauacugga

SEQ ID NO: 27514 - RNA, 21 nt, Artificial Sequence
  Synthetic oligonucleotide: Ptpn6-6985
uaagaugcugguaauacugga

SEQ ID NO: 27515 - RNA, 22 nt, Artificial Sequence
  Synthetic oligonucleotide: Ptpn6-6986
uuaagaugcugguaauacugga

SEQ ID NO: 27516 - RNA, 23 nt, Artificial Sequence
  Synthetic oligonucleotide: Ptpn6-6987
uuuaagaugcugguaauacugga

SEQ ID NO: 27517 - RNA, 24 nt, Artificial Sequence
  Synthetic oligonucleotide: Ptpn6-6988
guuuaagaugcugguaauacugga

SEQ ID NO: 27518 - RNA, 18 nt, Artificial Sequence
  Synthetic oligonucleotide: Ptpn6-6989
uuuaagaugcugguaaua

SEQ ID NO: 27519 - RNA, 19 nt, Artificial Sequence
  Synthetic oligonucleotide: Ptpn6-6990
guuuaagaugcugguaaua

SEQ ID NO: 27520 - RNA, 20 nt, Artificial Sequence
  Synthetic oligonucleotide: Ptpn6-6991
uguuuaagaugcugguaaua

SEQ ID NO: 27521 - RNA, 21 nt, Artificial Sequence
  Synthetic oligonucleotide: Ptpn6-6992
cuguuuaagaugcugguaaua

SEQ ID NO: 27522 - RNA, 22 nt, Artificial Sequence
  Synthetic oligonucleotide: Ptpn6-6993
gcuguuuaagaugcugguaaua

SEQ ID NO: 27523 - RNA, 23 nt, Artificial Sequence
  Synthetic oligonucleotide: Ptpn6-6994
ugcuguuuaagaugcugguaaua

SEQ ID NO: 27524 - RNA, 24 nt, Artificial Sequence
  Synthetic oligonucleotide: Ptpn6-6995
gugcuguuuaagaugcugguaaua

SEQ ID NO: 27525 - RNA, 18 nt, Artificial Sequence
  Synthetic oligonucleotide: Ptpn6-6996
accagccuggccaauaua

SEQ ID NO: 27526 - RNA, 19 nt, Artificial Sequence
  Synthetic oligonucleotide: Ptpn6-6997
gaccagccuggccaauaua

SEQ ID NO: 27527 - RNA, 20 nt, Artificial Sequence
  Synthetic oligonucleotide: Ptpn6-2121
agaccagccuggccaauaua

SEQ ID NO: 27528 - RNA, 21 nt, Artificial Sequence
  Synthetic oligonucleotide: Ptpn6-6998
gagaccagccuggccaauaua

SEQ ID NO: 27529 - RNA, 22 nt, Artificial Sequence
  Synthetic oligonucleotide: Ptpn6-6999
ugagaccagccuggccaauaua

SEQ ID NO: 27530 - RNA, 23 nt, Artificial Sequence
  Synthetic oligonucleotide: Ptpn6-7000
uugagaccagccuggccaauaua

SEQ ID NO: 27531 - RNA, 24 nt, Artificial Sequence
  Synthetic oligonucleotide: Ptpn6-7001
uuugagaccagccuggccaauaua

SEQ ID NO: 27532 - RNA, 18 nt, Artificial Sequence
  Synthetic oligonucleotide: Ptpn6-7002
guccugugguuccagcua

SEQ ID NO: 27533 - RNA, 19 nt, Artificial Sequence
  Synthetic oligonucleotide: Ptpn6-7003
cguccugugguuccagcua

SEQ ID NO: 27534 - RNA, 20 nt, Artificial Sequence
  Synthetic oligonucleotide: Ptpn6-1435
acguccugugguuccagcua

SEQ ID NO: 27535 - RNA, 21 nt, Artificial Sequence
  Synthetic oligonucleotide: Ptpn6-7004
cacguccugugguuccagcua

SEQ ID NO: 27536 - RNA, 22 nt, Artificial Sequence
  Synthetic oligonucleotide: Ptpn6-7005
acacguccugugguuccagcua

SEQ ID NO: 27537 - RNA, 23 nt, Artificial Sequence
  Synthetic oligonucleotide: Ptpn6-7006
cacacguccugugguuccagcua

SEQ ID NO: 27538 - RNA, 24 nt, Artificial Sequence
  Synthetic oligonucleotide: Ptpn6-7007
gcacacguccugugguuccagcua

SEQ ID NO: 27539 - RNA, 18 nt, Artificial Sequence
  Synthetic oligonucleotide: Ptpn6-7008
gagaggauugcuugagcc

SEQ ID NO: 27540 - RNA, 19 nt, Artificial Sequence
  Synthetic oligonucleotide: Ptpn6-7009
cgagaggauugcuugagcc

SEQ ID NO: 27541 - RNA, 20 nt, Artificial Sequence
  Synthetic oligonucleotide: Ptpn6-2118
gcgagaggauugcuugagcc

SEQ ID NO: 27542 - RNA, 21 nt, Artificial Sequence
  Synthetic oligonucleotide: Ptpn6-7010
ggcgagaggauugcuugagcc

SEQ ID NO: 27543 - RNA, 22 nt, Artificial Sequence
  Synthetic oligonucleotide: Ptpn6-7011
aggcgagaggauugcuugagcc

SEQ ID NO: 27544 - RNA, 23 nt, Artificial Sequence
  Synthetic oligonucleotide: Ptpn6-7012
gaggcgagaggauugcuugagcc

SEQ ID NO: 27545 - RNA, 24 nt, Artificial Sequence
  Synthetic oligonucleotide: Ptpn6-7013
ugaggcgagaggauugcuugagcc

SEQ ID NO: 27546 - RNA, 18 nt, Artificial Sequence
  Synthetic oligonucleotide: Ptpn6-7014
ggggguugucagguccgc

SEQ ID NO: 27547 - RNA, 19 nt, Artificial Sequence
  Synthetic oligonucleotide: Ptpn6-7015
uggggguugucagguccgc

SEQ ID NO: 27548 - RNA, 20 nt, Artificial Sequence
  Synthetic oligonucleotide: Ptpn6-2300
auggggguugucagguccgc

SEQ ID NO: 27549 - RNA, 21 nt, Artificial Sequence
  Synthetic oligonucleotide: Ptpn6-7016
gauggggguugucagguccgc

SEQ ID NO: 27550 - RNA, 22 nt, Artificial Sequence
  Synthetic oligonucleotide: Ptpn6-7017
agauggggguugucagguccgc

SEQ ID NO: 27551 - RNA, 23 nt, Artificial Sequence
  Synthetic oligonucleotide: Ptpn6-7018
gagauggggguugucagguccgc

SEQ ID NO: 27552 - RNA, 24 nt, Artificial Sequence
  Synthetic oligonucleotide: Ptpn6-7019
agagauggggguugucagguccgc

SEQ ID NO: 27553 - RNA, 18 nt, Artificial Sequence
  Synthetic oligonucleotide: Ptpn6-7020
acugugggaggcugaggc

SEQ ID NO: 27554 - RNA, 19 nt, Artificial Sequence
  Synthetic oligonucleotide: Ptpn6-7021
cacugugggaggcugaggc

SEQ ID NO: 27555 - RNA, 20 nt, Artificial Sequence
  Synthetic oligonucleotide: Ptpn6-2115
gcacugugggaggcugaggc

SEQ ID NO: 27556 - RNA, 21 nt, Artificial Sequence
  Synthetic oligonucleotide: Ptpn6-7022
agcacugugggaggcugaggc

SEQ ID NO: 27557 - RNA, 22 nt, Artificial Sequence
  Synthetic oligonucleotide: Ptpn6-7023
cagcacugugggaggcugaggc

SEQ ID NO: 27558 - RNA, 23 nt, Artificial Sequence
  Synthetic oligonucleotide: Ptpn6-7024
ccagcacugugggaggcugaggc

SEQ ID NO: 27559 - RNA, 24 nt, Artificial Sequence
  Synthetic oligonucleotide: Ptpn6-7025
cccagcacugugggaggcugaggc

SEQ ID NO: 27560 - RNA, 18 nt, Artificial Sequence
  Synthetic oligonucleotide: Ptpn6-7026
cugaggcgagaggauugc

SEQ ID NO: 27561 - RNA, 19 nt, Artificial Sequence
  Synthetic oligonucleotide: Ptpn6-7027
gcugaggcgagaggauugc

SEQ ID NO: 27562 - RNA, 20 nt, Artificial Sequence
  Synthetic oligonucleotide: Ptpn6-2117
ggcugaggcgagaggauugc

SEQ ID NO: 27563 - RNA, 21 nt, Artificial Sequence
  Synthetic oligonucleotide: Ptpn6-7028
aggcugaggcgagaggauugc

SEQ ID NO: 27564 - RNA, 22 nt, Artificial Sequence
  Synthetic oligonucleotide: Ptpn6-7029
gaggcugaggcgagaggauugc

SEQ ID NO: 27565 - RNA, 23 nt, Artificial Sequence
  Synthetic oligonucleotide: Ptpn6-7030
ggaggcugaggcgagaggauugc

SEQ ID NO: 27566 - RNA, 24 nt, Artificial Sequence
  Synthetic oligonucleotide: Ptpn6-7031
gggaggcugaggcgagaggauugc

SEQ ID NO: 27567 - RNA, 18 nt, Artificial Sequence
  Synthetic oligonucleotide: Ptpn6-7032
ggaaaggcagagggaauc

SEQ ID NO: 27568 - RNA, 19 nt, Artificial Sequence
  Synthetic oligonucleotide: Ptpn6-7033
uggaaaggcagagggaauc

SEQ ID NO: 27569 - RNA, 20 nt, Artificial Sequence
  Synthetic oligonucleotide: Ptpn6-1545
cuggaaaggcagagggaauc

SEQ ID NO: 27570 - RNA, 18 nt, Artificial Sequence
  Synthetic oligonucleotide: Ptpn6-7034
gacauggucucugcucuc

SEQ ID NO: 27571 - RNA, 19 nt, Artificial Sequence
  Synthetic oligonucleotide: Ptpn6-7035
agacauggucucugcucuc

SEQ ID NO: 27572 - RNA, 20 nt, Artificial Sequence
  Synthetic oligonucleotide: Ptpn6-2100
cagacauggucucugcucuc

SEQ ID NO: 27573 - RNA, 21 nt, Artificial Sequence
  Synthetic oligonucleotide: Ptpn6-7036
acagacauggucucugcucuc

SEQ ID NO: 27574 - RNA, 22 nt, Artificial Sequence
  Synthetic oligonucleotide: Ptpn6-7037
gacagacauggucucugcucuc

SEQ ID NO: 27575 - RNA, 23 nt, Artificial Sequence
  Synthetic oligonucleotide: Ptpn6-7038
agacagacauggucucugcucuc

SEQ ID NO: 27576 - RNA, 24 nt, Artificial Sequence
  Synthetic oligonucleotide: Ptpn6-7039
aagacagacauggucucugcucuc

SEQ ID NO: 27577 - RNA, 18 nt, Artificial Sequence
  Synthetic oligonucleotide: Ptpn6-7040
cagagggaaucagggaag

SEQ ID NO: 27578 - RNA, 19 nt, Artificial Sequence
  Synthetic oligonucleotide: Ptpn6-7041
gcagagggaaucagggaag

SEQ ID NO: 27579 - RNA, 20 nt, Artificial Sequence
  Synthetic oligonucleotide: Ptpn6-2296
ggcagagggaaucagggaag

SEQ ID NO: 27580 - RNA, 21 nt, Artificial Sequence
  Synthetic oligonucleotide: Ptpn6-7042
aggcagagggaaucagggaag

SEQ ID NO: 27581 - RNA, 22 nt, Artificial Sequence
  Synthetic oligonucleotide: Ptpn6-7043
aaggcagagggaaucagggaag

SEQ ID NO: 27582 - RNA, 23 nt, Artificial Sequence
  Synthetic oligonucleotide: Ptpn6-7044
aaaggcagagggaaucagggaag

SEQ ID NO: 27583 - RNA, 24 nt, Artificial Sequence
  Synthetic oligonucleotide: Ptpn6-7045
gaaaggcagagggaaucagggaag

SEQ ID NO: 27584 - RNA, 18 nt, Artificial Sequence
  Synthetic oligonucleotide: Ptpn6-7046
acggagcuuacauuccag

SEQ ID NO: 27585 - RNA, 19 nt, Artificial Sequence
  Synthetic oligonucleotide: Ptpn6-7047
cacggagcuuacauuccag

SEQ ID NO: 27586 - RNA, 20 nt, Artificial Sequence
  Synthetic oligonucleotide: Ptpn6-1415
ucacggagcuuacauuccag

SEQ ID NO: 27587 - RNA, 21 nt, Artificial Sequence
  Synthetic oligonucleotide: Ptpn6-7048
cucacggagcuuacauuccag

SEQ ID NO: 27588 - RNA, 22 nt, Artificial Sequence
  Synthetic oligonucleotide: Ptpn6-7049
ucucacggagcuuacauuccag

SEQ ID NO: 27589 - RNA, 23 nt, Artificial Sequence
  Synthetic oligonucleotide: Ptpn6-7050
cucucacggagcuuacauuccag

SEQ ID NO: 27590 - RNA, 24 nt, Artificial Sequence
  Synthetic oligonucleotide: Ptpn6-7051
gcucucacggagcuuacauuccag

SEQ ID NO: 27591 - RNA, 18 nt, Artificial Sequence
  Synthetic oligonucleotide: Ptpn6-7052
ggaaucagggaaggagag

SEQ ID NO: 27592 - RNA, 19 nt, Artificial Sequence
  Synthetic oligonucleotide: Ptpn6-7053
gggaaucagggaaggagag

SEQ ID NO: 27593 - RNA, 20 nt, Artificial Sequence
  Synthetic oligonucleotide: Ptpn6-2297
agggaaucagggaaggagag

SEQ ID NO: 27594 - RNA, 21 nt, Artificial Sequence
  Synthetic oligonucleotide: Ptpn6-7054
gagggaaucagggaaggagag

SEQ ID NO: 27595 - RNA, 22 nt, Artificial Sequence
  Synthetic oligonucleotide: Ptpn6-7055
agagggaaucagggaaggagag

SEQ ID NO: 27596 - RNA, 23 nt, Artificial Sequence
  Synthetic oligonucleotide: Ptpn6-7056
cagagggaaucagggaaggagag

SEQ ID NO: 27597 - RNA, 24 nt, Artificial Sequence
  Synthetic oligonucleotide: Ptpn6-7057
gcagagggaaucagggaaggagag

SEQ ID NO: 27598 - RNA, 18 nt, Artificial Sequence
  Synthetic oligonucleotide: Ptpn6-7058
gcacugugggaggcugag

SEQ ID NO: 27599 - RNA, 19 nt, Artificial Sequence
  Synthetic oligonucleotide: Ptpn6-7059
agcacugugggaggcugag

SEQ ID NO: 27600 - RNA, 20 nt, Artificial Sequence
  Synthetic oligonucleotide: Ptpn6-2114
cagcacugugggaggcugag

SEQ ID NO: 27601 - RNA, 21 nt, Artificial Sequence
  Synthetic oligonucleotide: Ptpn6-7060
ccagcacugugggaggcugag

SEQ ID NO: 27602 - RNA, 22 nt, Artificial Sequence
  Synthetic oligonucleotide: Ptpn6-7061
cccagcacugugggaggcugag

SEQ ID NO: 27603 - RNA, 23 nt, Artificial Sequence
  Synthetic oligonucleotide: Ptpn6-7062
ucccagcacugugggaggcugag

SEQ ID NO: 27604 - RNA, 24 nt, Artificial Sequence
  Synthetic oligonucleotide: Ptpn6-7063
aucccagcacugugggaggcugag

SEQ ID NO: 27605 - RNA, 18 nt, Artificial Sequence
  Synthetic oligonucleotide: Ptpn6-7064
auucucagaaguauuacg

SEQ ID NO: 27606 - RNA, 19 nt, Artificial Sequence
  Synthetic oligonucleotide: Ptpn6-7065
gauucucagaaguauuacg

SEQ ID NO: 27607 - RNA, 20 nt, Artificial Sequence
  Synthetic oligonucleotide: Ptpn6-2108
agauucucagaaguauuacg

SEQ ID NO: 27608 - RNA, 21 nt, Artificial Sequence
  Synthetic oligonucleotide: Ptpn6-7066
cagauucucagaaguauuacg

SEQ ID NO: 27609 - RNA, 22 nt, Artificial Sequence
  Synthetic oligonucleotide: Ptpn6-7067
gcagauucucagaaguauuacg

SEQ ID NO: 27610 - RNA, 23 nt, Artificial Sequence
  Synthetic oligonucleotide: Ptpn6-7068
ugcagauucucagaaguauuacg

SEQ ID NO: 27611 - RNA, 24 nt, Artificial Sequence
  Synthetic oligonucleotide: Ptpn6-7069
uugcagauucucagaaguauuacg

SEQ ID NO: 27612 - RNA, 18 nt, Artificial Sequence
  Synthetic oligonucleotide: Ptpn6-7070
ucccagcacugugggagg

SEQ ID NO: 27613 - RNA, 19 nt, Artificial Sequence
  Synthetic oligonucleotide: Ptpn6-7071
aucccagcacugugggagg

SEQ ID NO: 27614 - RNA, 20 nt, Artificial Sequence
  Synthetic oligonucleotide: Ptpn6-2113
gaucccagcacugugggagg

SEQ ID NO: 27615 - RNA, 21 nt, Artificial Sequence
  Synthetic oligonucleotide: Ptpn6-7072
ugaucccagcacugugggagg

SEQ ID NO: 27616 - RNA, 22 nt, Artificial Sequence
  Synthetic oligonucleotide: Ptpn6-7073
gugaucccagcacugugggagg

SEQ ID NO: 27617 - RNA, 23 nt, Artificial Sequence
  Synthetic oligonucleotide: Ptpn6-7074
ugugaucccagcacugugggagg

SEQ ID NO: 27618 - RNA, 24 nt, Artificial Sequence
  Synthetic oligonucleotide: Ptpn6-7075
cugugaucccagcacugugggagg

SEQ ID NO: 27619 - RNA, 18 nt, Artificial Sequence
  Synthetic oligonucleotide: Ptpn6-7076
aggcagagggaaucaggg

SEQ ID NO: 27620 - RNA, 19 nt, Artificial Sequence
  Synthetic oligonucleotide: Ptpn6-7077
aaggcagagggaaucaggg

SEQ ID NO: 27621 - RNA, 20 nt, Artificial Sequence
  Synthetic oligonucleotide: Ptpn6-2259
aaaggcagagggaaucaggg

SEQ ID NO: 27622 - RNA, 21 nt, Artificial Sequence
  Synthetic oligonucleotide: Ptpn6-7078
gaaaggcagagggaaucaggg

SEQ ID NO: 27623 - RNA, 22 nt, Artificial Sequence
  Synthetic oligonucleotide: Ptpn6-7079
ggaaaggcagagggaaucaggg

SEQ ID NO: 27624 - RNA, 23 nt, Artificial Sequence
  Synthetic oligonucleotide: Ptpn6-7080
uggaaaggcagagggaaucaggg

SEQ ID NO: 27625 - RNA, 24 nt, Artificial Sequence
  Synthetic oligonucleotide: Ptpn6-7081
cuggaaaggcagagggaaucaggg

SEQ ID NO: 27626 - RNA, 18 nt, Artificial Sequence
  Synthetic oligonucleotide: Ptpn6-7082
ccugugguuccagcuaug

SEQ ID NO: 27627 - RNA, 19 nt, Artificial Sequence
  Synthetic oligonucleotide: Ptpn6-7083
uccugugguuccagcuaug

SEQ ID NO: 27628 - RNA, 20 nt, Artificial Sequence
  Synthetic oligonucleotide: Ptpn6-2126
guccugugguuccagcuaug

SEQ ID NO: 27629 - RNA, 21 nt, Artificial Sequence
  Synthetic oligonucleotide: Ptpn6-7084
cguccugugguuccagcuaug

SEQ ID NO: 27630 - RNA, 22 nt, Artificial Sequence
  Synthetic oligonucleotide: Ptpn6-7085
acguccugugguuccagcuaug

SEQ ID NO: 27631 - RNA, 23 nt, Artificial Sequence
  Synthetic oligonucleotide: Ptpn6-7086
cacguccugugguuccagcuaug

SEQ ID NO: 27632 - RNA, 24 nt, Artificial Sequence
  Synthetic oligonucleotide: Ptpn6-7087
acacguccugugguuccagcuaug

SEQ ID NO: 27633 - RNA, 18 nt, Artificial Sequence
  Synthetic oligonucleotide: Ptpn6-7088
ccugugaucccagcacug

SEQ ID NO: 27634 - RNA, 19 nt, Artificial Sequence
  Synthetic oligonucleotide: Ptpn6-7089
accugugaucccagcacug

SEQ ID NO: 27635 - RNA, 20 nt, Artificial Sequence
  Synthetic oligonucleotide: Ptpn6-1423
caccugugaucccagcacug

SEQ ID NO: 27636 - RNA, 21 nt, Artificial Sequence
  Synthetic oligonucleotide: Ptpn6-7090
acaccugugaucccagcacug

SEQ ID NO: 27637 - RNA, 22 nt, Artificial Sequence
  Synthetic oligonucleotide: Ptpn6-7091
cacaccugugaucccagcacug

SEQ ID NO: 27638 - RNA, 23 nt, Artificial Sequence
  Synthetic oligonucleotide: Ptpn6-7092
ucacaccugugaucccagcacug

SEQ ID NO: 27639 - RNA, 24 nt, Artificial Sequence
  Synthetic oligonucleotide: Ptpn6-7093
uucacaccugugaucccagcacug

SEQ ID NO: 27640 - RNA, 18 nt, Artificial Sequence
  Synthetic oligonucleotide: Ptpn6-7094
ucauucaacagguacgug

SEQ ID NO: 27641 - RNA, 19 nt, Artificial Sequence
  Synthetic oligonucleotide: Ptpn6-7095
uucauucaacagguacgug

SEQ ID NO: 27642 - RNA, 20 nt, Artificial Sequence
  Synthetic oligonucleotide: Ptpn6-1714
auucauucaacagguacgug

SEQ ID NO: 27643 - RNA, 21 nt, Artificial Sequence
  Synthetic oligonucleotide: Ptpn6-7096
cauucauucaacagguacgug

SEQ ID NO: 27644 - RNA, 22 nt, Artificial Sequence
  Synthetic oligonucleotide: Ptpn6-7097
ucauucauucaacagguacgug

SEQ ID NO: 27645 - RNA, 23 nt, Artificial Sequence
  Synthetic oligonucleotide: Ptpn6-7098
aucauucauucaacagguacgug

SEQ ID NO: 27646 - RNA, 24 nt, Artificial Sequence
  Synthetic oligonucleotide: Ptpn6-7099
caucauucauucaacagguacgug

SEQ ID NO: 27647 - RNA, 18 nt, Artificial Sequence
  Synthetic oligonucleotide: Ptpn6-7100
ccugucucuacaaaaaau

SEQ ID NO: 27648 - RNA, 19 nt, Artificial Sequence
  Synthetic oligonucleotide: Ptpn6-7101
cccugucucuacaaaaaau

SEQ ID NO: 27649 - RNA, 20 nt, Artificial Sequence
  Synthetic oligonucleotide: Ptpn6-2122
acccugucucuacaaaaaau

SEQ ID NO: 27650 - RNA, 21 nt, Artificial Sequence
  Synthetic oligonucleotide: Ptpn6-7102
gacccugucucuacaaaaaau

SEQ ID NO: 27651 - RNA, 22 nt, Artificial Sequence
  Synthetic oligonucleotide: Ptpn6-7103
agacccugucucuacaaaaaau

SEQ ID NO: 27652 - RNA, 23 nt, Artificial Sequence
  Synthetic oligonucleotide: Ptpn6-7104
gagacccugucucuacaaaaaau

SEQ ID NO: 27653 - RNA, 24 nt, Artificial Sequence
  Synthetic oligonucleotide: Ptpn6-7105
ugagacccugucucuacaaaaaau

SEQ ID NO: 27654 - RNA, 18 nt, Artificial Sequence
  Synthetic oligonucleotide: Ptpn6-7106
uggaaaggcagagggaau

SEQ ID NO: 27655 - RNA, 19 nt, Artificial Sequence
  Synthetic oligonucleotide: Ptpn6-7107
cuggaaaggcagagggaau

SEQ ID NO: 27656 - RNA, 20 nt, Artificial Sequence
  Synthetic oligonucleotide: Ptpn6-2294
ccuggaaaggcagagggaau

SEQ ID NO: 27657 - RNA, 18 nt, Artificial Sequence
  Synthetic oligonucleotide: Ptpn6-7108
accugugaucccagcacu

SEQ ID NO: 27658 - RNA, 19 nt, Artificial Sequence
  Synthetic oligonucleotide: Ptpn6-7109
caccugugaucccagcacu

SEQ ID NO: 27659 - RNA, 20 nt, Artificial Sequence
  Synthetic oligonucleotide: Ptpn6-2110
acaccugugaucccagcacu

SEQ ID NO: 27660 - RNA, 21 nt, Artificial Sequence
  Synthetic oligonucleotide: Ptpn6-7110
cacaccugugaucccagcacu

SEQ ID NO: 27661 - RNA, 22 nt, Artificial Sequence
  Synthetic oligonucleotide: Ptpn6-7111
ucacaccugugaucccagcacu

SEQ ID NO: 27662 - RNA, 23 nt, Artificial Sequence
  Synthetic oligonucleotide: Ptpn6-7112
uucacaccugugaucccagcacu

SEQ ID NO: 27663 - RNA, 24 nt, Artificial Sequence
  Synthetic oligonucleotide: Ptpn6-7113
guucacaccugugaucccagcacu

SEQ ID NO: 27664 - RNA, 18 nt, Artificial Sequence
  Synthetic oligonucleotide: Ptpn6-7114
cguccugugguuccagcu

SEQ ID NO: 27665 - RNA, 19 nt, Artificial Sequence
  Synthetic oligonucleotide: Ptpn6-7115
acguccugugguuccagcu

SEQ ID NO: 27666 - RNA, 20 nt, Artificial Sequence
  Synthetic oligonucleotide: Ptpn6-2124
cacguccugugguuccagcu

SEQ ID NO: 27667 - RNA, 21 nt, Artificial Sequence
  Synthetic oligonucleotide: Ptpn6-7116
acacguccugugguuccagcu

SEQ ID NO: 27668 - RNA, 22 nt, Artificial Sequence
  Synthetic oligonucleotide: Ptpn6-7117
cacacguccugugguuccagcu

SEQ ID NO: 27669 - RNA, 23 nt, Artificial Sequence
  Synthetic oligonucleotide: Ptpn6-7118
gcacacguccugugguuccagcu

SEQ ID NO: 27670 - RNA, 24 nt, Artificial Sequence
  Synthetic oligonucleotide: Ptpn6-7119
ggcacacguccugugguuccagcu

SEQ ID NO: 27671 - RNA, 18 nt, Artificial Sequence
  Synthetic oligonucleotide: Ptpn6-7120
uggaucauugcagauucu

SEQ ID NO: 27672 - RNA, 19 nt, Artificial Sequence
  Synthetic oligonucleotide: Ptpn6-7121
uuggaucauugcagauucu

SEQ ID NO: 27673 - RNA, 20 nt, Artificial Sequence
  Synthetic oligonucleotide: Ptpn6-2107
auuggaucauugcagauucu

SEQ ID NO: 27674 - RNA, 21 nt, Artificial Sequence
  Synthetic oligonucleotide: Ptpn6-7122
aauuggaucauugcagauucu

SEQ ID NO: 27675 - RNA, 22 nt, Artificial Sequence
  Synthetic oligonucleotide: Ptpn6-7123
aaauuggaucauugcagauucu

SEQ ID NO: 27676 - RNA, 23 nt, Artificial Sequence
  Synthetic oligonucleotide: Ptpn6-7124
uaaauuggaucauugcagauucu

SEQ ID NO: 27677 - RNA, 24 nt, Artificial Sequence
  Synthetic oligonucleotide: Ptpn6-7125
auaaauuggaucauugcagauucu

SEQ ID NO: 27678 - RNA, 18 nt, Artificial Sequence
  Synthetic oligonucleotide: Ptpn6-7126
cggagcuuacauuccagu

SEQ ID NO: 27679 - RNA, 19 nt, Artificial Sequence
  Synthetic oligonucleotide: Ptpn6-7127
acggagcuuacauuccagu

SEQ ID NO: 27680 - RNA, 20 nt, Artificial Sequence
  Synthetic oligonucleotide: Ptpn6-1416
cacggagcuuacauuccagu

SEQ ID NO: 27681 - RNA, 21 nt, Artificial Sequence
  Synthetic oligonucleotide: Ptpn6-7128
ucacggagcuuacauuccagu

SEQ ID NO: 27682 - RNA, 22 nt, Artificial Sequence
  Synthetic oligonucleotide: Ptpn6-7129
cucacggagcuuacauuccagu

SEQ ID NO: 27683 - RNA, 23 nt, Artificial Sequence
  Synthetic oligonucleotide: Ptpn6-7130
ucucacggagcuuacauuccagu

SEQ ID NO: 27684 - RNA, 24 nt, Artificial Sequence
  Synthetic oligonucleotide: Ptpn6-7131
cucucacggagcuuacauuccagu

SEQ ID NO: 27685 - RNA, 18 nt, Artificial Sequence
  Synthetic oligonucleotide: Ptpn6-7132
uugcuugagcccaggagu

SEQ ID NO: 27686 - RNA, 19 nt, Artificial Sequence
  Synthetic oligonucleotide: Ptpn6-7133
auugcuugagcccaggagu

SEQ ID NO: 27687 - RNA, 20 nt, Artificial Sequence
  Synthetic oligonucleotide: Ptpn6-2120
gauugcuugagcccaggagu

SEQ ID NO: 27688 - RNA, 21 nt, Artificial Sequence
  Synthetic oligonucleotide: Ptpn6-7134
ggauugcuugagcccaggagu

SEQ ID NO: 27689 - RNA, 22 nt, Artificial Sequence
  Synthetic oligonucleotide: Ptpn6-7135
aggauugcuugagcccaggagu

SEQ ID NO: 27690 - RNA, 23 nt, Artificial Sequence
  Synthetic oligonucleotide: Ptpn6-7136
gaggauugcuugagcccaggagu

SEQ ID NO: 27691 - RNA, 24 nt, Artificial Sequence
  Synthetic oligonucleotide: Ptpn6-7137
agaggauugcuugagcccaggagu

SEQ ID NO: 27692 - RNA, 18 nt, Artificial Sequence
  Synthetic oligonucleotide: Ptpn6-7138
cugugaucccagcacugu

SEQ ID NO: 27693 - RNA, 19 nt, Artificial Sequence
  Synthetic oligonucleotide: Ptpn6-7139
ccugugaucccagcacugu

SEQ ID NO: 27694 - RNA, 20 nt, Artificial Sequence
  Synthetic oligonucleotide: Ptpn6-1424
accugugaucccagcacugu

SEQ ID NO: 27695 - RNA, 21 nt, Artificial Sequence
  Synthetic oligonucleotide: Ptpn6-7140
caccugugaucccagcacugu

SEQ ID NO: 27696 - RNA, 22 nt, Artificial Sequence
  Synthetic oligonucleotide: Ptpn6-7141
acaccugugaucccagcacugu

SEQ ID NO: 27697 - RNA, 23 nt, Artificial Sequence
  Synthetic oligonucleotide: Ptpn6-7142
cacaccugugaucccagcacugu

SEQ ID NO: 27698 - RNA, 24 nt, Artificial Sequence
  Synthetic oligonucleotide: Ptpn6-7143
ucacaccugugaucccagcacugu

SEQ ID NO: 27699 - RNA, 17 nt, Artificial Sequence
  Synthetic oligonucleotide: Ptpn6-7144
ugagcgguucuuccuca

SEQ ID NO: 27700 - RNA, 17 nt, Artificial Sequence
  Synthetic oligonucleotide: Ptpn6-7145
aggcgggccugcuguac

SEQ ID NO: 27701 - RNA, 17 nt, Artificial Sequence
  Synthetic oligonucleotide: Ptpn6-7146
gggcuccugcuucugcc

SEQ ID NO: 27702 - RNA, 17 nt, Artificial Sequence
  Synthetic oligonucleotide: Ptpn6-7147
ccccugcggcccucugc

SEQ ID NO: 27703 - RNA, 17 nt, Artificial Sequence
  Synthetic oligonucleotide: Ptpn6-7148
cgagaccgcccacagcg

SEQ ID NO: 27704 - RNA, 17 nt, Artificial Sequence
  Synthetic oligonucleotide: Ptpn6-1765
uuaguuuuggagggagg

SEQ ID NO: 27705 - RNA, 17 nt, Artificial Sequence
  Synthetic oligonucleotide: Ptpn6-7149
caauaccccgccgcucu

SEQ ID NO: 27706 - RNA, 17 nt, Artificial Sequence
  Synthetic oligonucleotide: Ptpn6-2350
aggaucgaggaggaagu

SEQ ID NO: 27707 - RNA, 20 nt, Artificial Sequence
  Synthetic oligonucleotide: Ptpn6-7150
uacugagcgguucuuccuca

SEQ ID NO: 27708 - RNA, 20 nt, Artificial Sequence
  Synthetic oligonucleotide: Ptpn6-7151
agcaggcgggccugcuguac

SEQ ID NO: 27709 - RNA, 20 nt, Artificial Sequence
  Synthetic oligonucleotide: Ptpn6-7152
ucugggcuccugcuucugcc

SEQ ID NO: 27710 - RNA, 20 nt, Artificial Sequence
  Synthetic oligonucleotide: Ptpn6-7153
ucuacuuccagccucugggc

SEQ ID NO: 27711 - RNA, 20 nt, Artificial Sequence
  Synthetic oligonucleotide: Ptpn6-7154
cgcccccugcggcccucugc

SEQ ID NO: 27712 - RNA, 20 nt, Artificial Sequence
  Synthetic oligonucleotide: Ptpn6-7155
gcccgagaccgcccacagcg

SEQ ID NO: 27713 - RNA, 20 nt, Artificial Sequence
  Synthetic oligonucleotide: Ptpn6-1702
cuguuaguuuuggagggagg

SEQ ID NO: 27714 - RNA, 20 nt, Artificial Sequence
  Synthetic oligonucleotide: Ptpn6-7156
acccaauaccccgccgcucu

SEQ ID NO: 27715 - RNA, 20 nt, Artificial Sequence
  Synthetic oligonucleotide: Ptpn6-1657
ucucugaggaacugggcugu

SEQ ID NO: 27716 - RNA, 17 nt, Artificial Sequence
  Synthetic oligonucleotide: Ptpn6-7157
acuuccagccucugggc

SEQ ID NO: 27717 - RNA, 17 nt, Artificial Sequence
  Synthetic oligonucleotide: Ptpn6-1720
cugaggaacugggcugu

SEQ ID NO: 27718 - RNA, 20 nt, Artificial Sequence
  Synthetic oligonucleotide: Ptpn6-2348
ggcaggaucgaggaggaagu

SEQ ID NO: 27719 - RNA, 17 nt, Artificial Sequence
  Synthetic oligonucleotide: Ptpn6-1474
cauggucucugcucuca

SEQ ID NO: 27720 - RNA, 17 nt, Artificial Sequence
  Synthetic oligonucleotide: Ptpn6-7158
ggaggcugaggcgagag

SEQ ID NO: 27721 - RNA, 17 nt, Artificial Sequence
  Synthetic oligonucleotide: Ptpn6-2359
ugugggaggcugaggcg

SEQ ID NO: 27722 - RNA, 17 nt, Artificial Sequence
  Synthetic oligonucleotide: Ptpn6-2358
ccaauaaauuggaucau

SEQ ID NO: 27723 - RNA, 17 nt, Artificial Sequence
  Synthetic oligonucleotide: Ptpn6-2361
aacccccaucucuccuu

SEQ ID NO: 27724 - RNA, 20 nt, Artificial Sequence
  Synthetic oligonucleotide: Ptpn6-1414
agacauggucucugcucuca

SEQ ID NO: 27725 - RNA, 20 nt, Artificial Sequence
  Synthetic oligonucleotide: Ptpn6-7159
gugggaggcugaggcgagag

SEQ ID NO: 27726 - RNA, 20 nt, Artificial Sequence
  Synthetic oligonucleotide: Ptpn6-2356
cacugugggaggcugaggcg

SEQ ID NO: 27727 - RNA, 20 nt, Artificial Sequence
  Synthetic oligonucleotide: Ptpn6-2355
aacccaauaaauuggaucau

SEQ ID NO: 27728 - RNA, 20 nt, Artificial Sequence
  Synthetic oligonucleotide: Ptpn6-2360
gacaacccccaucucuccuu

SEQ ID NO: 27729 - RNA, 17 nt, Artificial Sequence
  Synthetic oligonucleotide: FAS-84
ugcgugcccugccaaga

SEQ ID NO: 27730 - RNA, 20 nt, Artificial Sequence
  Synthetic oligonucleotide: FAS-13
gugacugacaucaacuccaa

SEQ ID NO: 27731 - RNA, 20 nt, Artificial Sequence
  Synthetic oligonucleotide: FAS-57
gcuagggacugcacagucaa

SEQ ID NO: 27732 - RNA, 20 nt, Artificial Sequence
  Synthetic oligonucleotide: FAS-61
acugcgugcccugccaagaa

SEQ ID NO: 27733 - RNA, 20 nt, Artificial Sequence
  Synthetic oligonucleotide: FAS-22
guguaacauaccuggaggac

SEQ ID NO: 27734 - RNA, 20 nt, Artificial Sequence
  Synthetic oligonucleotide: FAS-659
ggauugcucaacaaccaugc

SEQ ID NO: 27735 - RNA, 20 nt, Artificial Sequence
  Synthetic oligonucleotide: FAS-333
uacaucugcacuugguauuc

SEQ ID NO: 27736 - RNA, 20 nt, Artificial Sequence
  Synthetic oligonucleotide: FAS-665
ugagcccucuccugcccggg

SEQ ID NO: 27737 - RNA, 20 nt, Artificial Sequence
  Synthetic oligonucleotide: FAS-332
guuugguuuacaucugcacu

SEQ ID NO: 27738 - RNA, 20 nt, Artificial Sequence
  Synthetic oligonucleotide: FAS-28
uggaguugaugucagucacu

SEQ ID NO: 27739 - RNA, 20 nt, Artificial Sequence
  Synthetic oligonucleotide: FAS-334
acaucugcacuugguauucu

SEQ ID NO: 27740 - RNA, 20 nt, Artificial Sequence
  Synthetic oligonucleotide: FAS-66
caaucuacaucuucugcauu

SEQ ID NO: 27741 - RNA, 20 nt, Artificial Sequence
  Synthetic oligonucleotide: FAS-30
cacuugggcauuaacacuuu

SEQ ID NO: 27742 - RNA, 17 nt, Artificial Sequence
  Synthetic oligonucleotide: FAS-91
ugcauuuggaagaaaaa

SEQ ID NO: 27743 - RNA, 17 nt, Artificial Sequence
  Synthetic oligonucleotide: FAS-98
accugcccaaggaaaaa

SEQ ID NO: 27744 - RNA, 17 nt, Artificial Sequence
  Synthetic oligonucleotide: FAS-33
acugacaucaacuccaa

SEQ ID NO: 27745 - RNA, 17 nt, Artificial Sequence
  Synthetic oligonucleotide: FAS-359
aaacuuacuuggugcaa

SEQ ID NO: 27746 - RNA, 17 nt, Artificial Sequence
  Synthetic oligonucleotide: FAS-81
agggacugcacagucaa

SEQ ID NO: 27747 - RNA, 17 nt, Artificial Sequence
  Synthetic oligonucleotide: FAS-85
gcgugcccugccaagaa

SEQ ID NO: 27748 - RNA, 17 nt, Artificial Sequence
  Synthetic oligonucleotide: FAS-78
uuccuugggcaggugaa

SEQ ID NO: 27749 - RNA, 17 nt, Artificial Sequence
  Synthetic oligonucleotide: FAS-280
uuuucuagaugugaaca

SEQ ID NO: 27750 - RNA, 17 nt, Artificial Sequence
  Synthetic oligonucleotide: FAS-88
uugugugaugaaggaca

SEQ ID NO: 27751 - RNA, 17 nt, Artificial Sequence
  Synthetic oligonucleotide: FAS-43
aacauaccuggaggaca

SEQ ID NO: 27752 - RNA, 17 nt, Artificial Sequence
  Synthetic oligonucleotide: FAS-97
uuccuuucaccugccca

SEQ ID NO: 27753 - RNA, 17 nt, Artificial Sequence
  Synthetic oligonucleotide: FAS-32
gacugacaucaacucca

SEQ ID NO: 27754 - RNA, 17 nt, Artificial Sequence
  Synthetic oligonucleotide: FAS-10
gguccagaugcccagca

SEQ ID NO: 27755 - RNA, 17 nt, Artificial Sequence
  Synthetic oligonucleotide: FAS-95
uccuucccuucuuggca

SEQ ID NO: 27756 - RNA, 17 nt, Artificial Sequence
  Synthetic oligonucleotide: FAS-358
aaaacuuacuuggugca

SEQ ID NO: 27757 - RNA, 17 nt, Artificial Sequence
  Synthetic oligonucleotide: FAS-281
ugaacauggaaucauca

SEQ ID NO: 27758 - RNA, 17 nt, Artificial Sequence
  Synthetic oligonucleotide: FAS-887
uccacccgggcaggaga

SEQ ID NO: 27759 - RNA, 17 nt, Artificial Sequence
  Synthetic oligonucleotide: FAS-283
accaagugcaaagagga

SEQ ID NO: 27760 - RNA, 17 nt, Artificial Sequence
  Synthetic oligonucleotide: FAS-9
gcucaccagagguagga

SEQ ID NO: 27761 - RNA, 17 nt, Artificial Sequence
  Synthetic oligonucleotide: FAS-86
gcccugccaagaaggga

SEQ ID NO: 27762 - RNA, 17 nt, Artificial Sequence
  Synthetic oligonucleotide: FAS-37
gagacucagaacuugga

SEQ ID NO: 27763 - RNA, 17 nt, Artificial Sequence
  Synthetic oligonucleotide: FAS-38
gaaggccugcaucauga

SEQ ID NO: 27764 - RNA, 17 nt, Artificial Sequence
  Synthetic oligonucleotide: FAS-87
uguagauugugugauga

SEQ ID NO: 27765 - RNA, 17 nt, Artificial Sequence
  Synthetic oligonucleotide: FAS-80
aggugaaaggaaagcua

SEQ ID NO: 27766 - RNA, 17 nt, Artificial Sequence
  Synthetic oligonucleotide: FAS-44
cuggaggacagggcuua

SEQ ID NO: 27767 - RNA, 17 nt, Artificial Sequence
  Synthetic oligonucleotide: FAS-284
agguaauuauuuuuuua

SEQ ID NO: 27768 - RNA, 17 nt, Artificial Sequence
  Synthetic oligonucleotide: FAS-42
uaacauaccuggaggac

SEQ ID NO: 27769 - RNA, 17 nt, Artificial Sequence
  Synthetic oligonucleotide: FAS-356
ucuagaaaaaaaaauac

SEQ ID NO: 27770 - RNA, 17 nt, Artificial Sequence
  Synthetic oligonucleotide: FAS-31
ucaugcuuuuauuuuac

SEQ ID NO: 27771 - RNA, 17 nt, Artificial Sequence
  Synthetic oligonucleotide: FAS-279
uggaaauaaacugcacc

SEQ ID NO: 27772 - RNA, 17 nt, Artificial Sequence
  Synthetic oligonucleotide: FAS-40
guuuuguguaacauacc

SEQ ID NO: 27773 - RNA, 17 nt, Artificial Sequence
  Synthetic oligonucleotide: FAS-855
ugagcccucuccugccc

SEQ ID NO: 27774 - RNA, 17 nt, Artificial Sequence
  Synthetic oligonucleotide: FAS-854
gugagcccucuccugcc

SEQ ID NO: 27775 - RNA, 17 nt, Artificial Sequence
  Synthetic oligonucleotide: FAS-39
cauaagcccuguccucc

SEQ ID NO: 27776 - RNA, 17 nt, Artificial Sequence
  Synthetic oligonucleotide: FAS-365
cuugguauucugggucc

SEQ ID NO: 27777 - RNA, 17 nt, Artificial Sequence
  Synthetic oligonucleotide: FAS-77
uccuuuuuuccuugggc

SEQ ID NO: 27778 - RNA, 17 nt, Artificial Sequence
  Synthetic oligonucleotide: FAS-94
cuccuucccuucuuggc

SEQ ID NO: 27779 - RNA, 17 nt, Artificial Sequence
  Synthetic oligonucleotide: FAS-850
uugcucaacaaccaugc

SEQ ID NO: 27780 - RNA, 17 nt, Artificial Sequence
  Synthetic oligonucleotide: FAS-46
auuggccaucaugaugc

SEQ ID NO: 27781 - RNA, 17 nt, Artificial Sequence
  Synthetic oligonucleotide: FAS-355
uuugcacuugguguugc

SEQ ID NO: 27782 - RNA, 17 nt, Artificial Sequence
  Synthetic oligonucleotide: FAS-6
caaccaugcugggcauc

SEQ ID NO: 27783 - RNA, 17 nt, Artificial Sequence
  Synthetic oligonucleotide: FAS-7
cuggacccuccuaccuc

SEQ ID NO: 27784 - RNA, 17 nt, Artificial Sequence
  Synthetic oligonucleotide: FAS-96
uggcagggcacgcaguc

SEQ ID NO: 27785 - RNA, 17 nt, Artificial Sequence
  Synthetic oligonucleotide: FAS-364
acuugguauucuggguc

SEQ ID NO: 27786 - RNA, 17 nt, Artificial Sequence
  Synthetic oligonucleotide: FAS-362
aucugcacuugguauuc

SEQ ID NO: 27787 - RNA, 17 nt, Artificial Sequence
  Synthetic oligonucleotide: FAS-282
caacaccaagugcaaag

SEQ ID NO: 27788 - RNA, 17 nt, Artificial Sequence
  Synthetic oligonucleotide: FAS-89
uaaaaugcaauugaaag

SEQ ID NO: 27789 - RNA, 17 nt, Artificial Sequence
  Synthetic oligonucleotide: FAS-278
uuuucuaggcuuagaag

SEQ ID NO: 27790 - RNA, 17 nt, Artificial Sequence
  Synthetic oligonucleotide: FAS-888
aggagagggcucaccag

SEQ ID NO: 27791 - RNA, 17 nt, Artificial Sequence
  Synthetic oligonucleotide: FAS-886
cuccacccgggcaggag

SEQ ID NO: 27792 - RNA, 17 nt, Artificial Sequence
  Synthetic oligonucleotide: FAS-8
ggcucaccagagguagg

SEQ ID NO: 27793 - RNA, 17 nt, Artificial Sequence
  Synthetic oligonucleotide: FAS-856
gcccucuccugcccggg

SEQ ID NO: 27794 - RNA, 17 nt, Artificial Sequence
  Synthetic oligonucleotide: FAS-41
uuguguaacauaccugg

SEQ ID NO: 27795 - RNA, 17 nt, Artificial Sequence
  Synthetic oligonucleotide: FAS-857
cucuccugcccgggugg

SEQ ID NO: 27796 - RNA, 17 nt, Artificial Sequence
  Synthetic oligonucleotide: FAS-83
ggacugcacagucaaug

SEQ ID NO: 27797 - RNA, 17 nt, Artificial Sequence
  Synthetic oligonucleotide: FAS-35
ccaagggauuggaauug

SEQ ID NO: 27798 - RNA, 17 nt, Artificial Sequence
  Synthetic oligonucleotide: FAS-92
gcauuuggaagaaaaau

SEQ ID NO: 27799 - RNA, 17 nt, Artificial Sequence
  Synthetic oligonucleotide: FAS-82
gggacugcacagucaau

SEQ ID NO: 27800 - RNA, 17 nt, Artificial Sequence
  Synthetic oligonucleotide: FAS-45
agggcuuauggcagaau

SEQ ID NO: 27801 - RNA, 17 nt, Artificial Sequence
  Synthetic oligonucleotide: FAS-34
caucaacuccaagggau

SEQ ID NO: 27802 - RNA, 17 nt, Artificial Sequence
  Synthetic oligonucleotide: FAS-36
aguugagacucagaacu

SEQ ID NO: 27803 - RNA, 17 nt, Artificial Sequence
  Synthetic oligonucleotide: FAS-361
ugguuuacaucugcacu

SEQ ID NO: 27804 - RNA, 17 nt, Artificial Sequence
  Synthetic oligonucleotide: FAS-354
accuuccucuuugcacu

SEQ ID NO: 27805 - RNA, 17 nt, Artificial Sequence
  Synthetic oligonucleotide: FAS-48
aguugaugucagucacu

SEQ ID NO: 27806 - RNA, 17 nt, Artificial Sequence
  Synthetic oligonucleotide: FAS-357
aaagacuaaaacuuacu

SEQ ID NO: 27807 - RNA, 17 nt, Artificial Sequence
  Synthetic oligonucleotide: FAS-47
ccucaauuccaaucccu

SEQ ID NO: 27808 - RNA, 17 nt, Artificial Sequence
  Synthetic oligonucleotide: FAS-75
cuugcuccuuuuuuccu

SEQ ID NO: 27809 - RNA, 17 nt, Artificial Sequence
  Synthetic oligonucleotide: FAS-79
caggugaaaggaaagcu

SEQ ID NO: 27810 - RNA, 17 nt, Artificial Sequence
  Synthetic oligonucleotide: FAS-851
ugcucaacaaccaugcu

SEQ ID NO: 27811 - RNA, 17 nt, Artificial Sequence
  Synthetic oligonucleotide: FAS-363
ucugcacuugguauucu

SEQ ID NO: 27812 - RNA, 17 nt, Artificial Sequence
  Synthetic oligonucleotide: FAS-93
uguacuccuucccuucu

SEQ ID NO: 27813 - RNA, 17 nt, Artificial Sequence
  Synthetic oligonucleotide: FAS-277
uuccaaacugauuuucu

SEQ ID NO: 27814 - RNA, 17 nt, Artificial Sequence
  Synthetic oligonucleotide: FAS-115
gagggcucaccagaggu

SEQ ID NO: 27815 - RNA, 17 nt, Artificial Sequence
  Synthetic oligonucleotide: FAS-90
ucuacaucuucugcauu

SEQ ID NO: 27816 - RNA, 17 nt, Artificial Sequence
  Synthetic oligonucleotide: FAS-49
guugaugucagucacuu

SEQ ID NO: 27817 - RNA, 17 nt, Artificial Sequence
  Synthetic oligonucleotide: FAS-76
uugcuccuuuuuuccuu

SEQ ID NO: 27818 - RNA, 17 nt, Artificial Sequence
  Synthetic oligonucleotide: FAS-360
gaguuacaaaaaaaguu

SEQ ID NO: 27819 - RNA, 17 nt, Artificial Sequence
  Synthetic oligonucleotide: FAS-366
agccuagaaaaucaguu

SEQ ID NO: 27820 - RNA, 17 nt, Artificial Sequence
  Synthetic oligonucleotide: FAS-50
uugggcauuaacacuuu

SEQ ID NO: 27821 - RNA, 20 nt, Artificial Sequence
  Synthetic oligonucleotide: FAS-67
uucugcauuuggaagaaaaa

SEQ ID NO: 27822 - RNA, 20 nt, Artificial Sequence
  Synthetic oligonucleotide: FAS-74
uucaccugcccaaggaaaaa

SEQ ID NO: 27823 - RNA, 20 nt, Artificial Sequence
  Synthetic oligonucleotide: FAS-330
cuaaaacuuacuuggugcaa

SEQ ID NO: 27824 - RNA, 20 nt, Artificial Sequence
  Synthetic oligonucleotide: FAS-54
uuuuuccuugggcaggugaa

SEQ ID NO: 27825 - RNA, 20 nt, Artificial Sequence
  Synthetic oligonucleotide: FAS-248
uuuuuuucuagaugugaaca

SEQ ID NO: 27826 - RNA, 20 nt, Artificial Sequence
  Synthetic oligonucleotide: FAS-64
agauugugugaugaaggaca

SEQ ID NO: 27827 - RNA, 20 nt, Artificial Sequence
  Synthetic oligonucleotide: FAS-23
uguaacauaccuggaggaca

SEQ ID NO: 27828 - RNA, 20 nt, Artificial Sequence
  Synthetic oligonucleotide: FAS-73
gcuuuccuuucaccugccca

SEQ ID NO: 27829 - RNA, 20 nt, Artificial Sequence
  Synthetic oligonucleotide: FAS-12
agugacugacaucaacucca

SEQ ID NO: 27830 - RNA, 20 nt, Artificial Sequence
  Synthetic oligonucleotide: FAS-5
gaggguccagaugcccagca

SEQ ID NO: 27831 - RNA, 20 nt, Artificial Sequence
  Synthetic oligonucleotide: FAS-71
uacuccuucccuucuuggca

SEQ ID NO: 27832 - RNA, 20 nt, Artificial Sequence
  Synthetic oligonucleotide: FAS-329
acuaaaacuuacuuggugca

SEQ ID NO: 27833 - RNA, 20 nt, Artificial Sequence
  Synthetic oligonucleotide: FAS-249
augugaacauggaaucauca

SEQ ID NO: 27834 - RNA, 20 nt, Artificial Sequence
  Synthetic oligonucleotide: FAS-60
gacugcgugcccugccaaga

SEQ ID NO: 27835 - RNA, 20 nt, Artificial Sequence
  Synthetic oligonucleotide: FAS-696
gccuccacccgggcaggaga

SEQ ID NO: 27836 - RNA, 20 nt, Artificial Sequence
  Synthetic oligonucleotide: FAS-251
aacaccaagugcaaagagga

SEQ ID NO: 27837 - RNA, 20 nt, Artificial Sequence
  Synthetic oligonucleotide: FAS-4
agggcucaccagagguagga

SEQ ID NO: 27838 - RNA, 20 nt, Artificial Sequence
  Synthetic oligonucleotide: FAS-62
cgugcccugccaagaaggga

SEQ ID NO: 27839 - RNA, 20 nt, Artificial Sequence
  Synthetic oligonucleotide: FAS-17
guugagacucagaacuugga

SEQ ID NO: 27840 - RNA, 20 nt, Artificial Sequence
  Synthetic oligonucleotide: FAS-18
uuggaaggccugcaucauga

SEQ ID NO: 27841 - RNA, 20 nt, Artificial Sequence
  Synthetic oligonucleotide: FAS-63
agauguagauugugugauga

SEQ ID NO: 27842 - RNA, 20 nt, Artificial Sequence
  Synthetic oligonucleotide: FAS-56
ggcaggugaaaggaaagcua

SEQ ID NO: 27843 - RNA, 20 nt, Artificial Sequence
  Synthetic oligonucleotide: FAS-24
uaccuggaggacagggcuua

SEQ ID NO: 27844 - RNA, 20 nt, Artificial Sequence
  Synthetic oligonucleotide: FAS-252
ggaagguaauuauuuuuuua

SEQ ID NO: 27845 - RNA, 20 nt, Artificial Sequence
  Synthetic oligonucleotide: FAS-327
acaucuagaaaaaaaaauac

SEQ ID NO: 27846 - RNA, 20 nt, Artificial Sequence
  Synthetic oligonucleotide: FAS-11
ucuucaugcuuuuauuuuac

SEQ ID NO: 27847 - RNA, 20 nt, Artificial Sequence
  Synthetic oligonucleotide: FAS-247
aaguggaaauaaacugcacc

SEQ ID NO: 27848 - RNA, 20 nt, Artificial Sequence
  Synthetic oligonucleotide: FAS-20
gauguuuuguguaacauacc

SEQ ID NO: 27849 - RNA, 20 nt, Artificial Sequence
  Synthetic oligonucleotide: FAS-664
uggugagcccucuccugccc

SEQ ID NO: 27850 - RNA, 20 nt, Artificial Sequence
  Synthetic oligonucleotide: FAS-663
cuggugagcccucuccugcc

SEQ ID NO: 27851 - RNA, 20 nt, Artificial Sequence
  Synthetic oligonucleotide: FAS-19
ugccauaagcccuguccucc

SEQ ID NO: 27852 - RNA, 20 nt, Artificial Sequence
  Synthetic oligonucleotide: FAS-336
gcacuugguauucugggucc

SEQ ID NO: 27853 - RNA, 20 nt, Artificial Sequence
  Synthetic oligonucleotide: FAS-53
ugcuccuuuuuuccuugggc

SEQ ID NO: 27854 - RNA, 20 nt, Artificial Sequence
  Synthetic oligonucleotide: FAS-70
guacuccuucccuucuuggc

SEQ ID NO: 27855 - RNA, 20 nt, Artificial Sequence
  Synthetic oligonucleotide: FAS-26
agaauuggccaucaugaugc

SEQ ID NO: 27856 - RNA, 20 nt, Artificial Sequence
  Synthetic oligonucleotide: FAS-326
cucuuugcacuugguguugc

SEQ ID NO: 27857 - RNA, 20 nt, Artificial Sequence
  Synthetic oligonucleotide: FAS-1
caacaaccaugcugggcauc

SEQ ID NO: 27858 - RNA, 20 nt, Artificial Sequence
  Synthetic oligonucleotide: FAS-2
caucuggacccuccuaccuc

SEQ ID NO: 27859 - RNA, 20 nt, Artificial Sequence
  Synthetic oligonucleotide: FAS-72
ucuuggcagggcacgcaguc

SEQ ID NO: 27860 - RNA, 20 nt, Artificial Sequence
  Synthetic oligonucleotide: FAS-335
ugcacuugguauucuggguc

SEQ ID NO: 27861 - RNA, 20 nt, Artificial Sequence
  Synthetic oligonucleotide: FAS-250
cagcaacaccaagugcaaag

SEQ ID NO: 27862 - RNA, 20 nt, Artificial Sequence
  Synthetic oligonucleotide: FAS-65
ucuuaaaaugcaauugaaag

SEQ ID NO: 27863 - RNA, 20 nt, Artificial Sequence
  Synthetic oligonucleotide: FAS-246
ugauuuucuaggcuuagaag

SEQ ID NO: 27864 - RNA, 20 nt, Artificial Sequence
  Synthetic oligonucleotide: FAS-697
ggcaggagagggcucaccag

SEQ ID NO: 27865 - RNA, 20 nt, Artificial Sequence
  Synthetic oligonucleotide: FAS-695
agccuccacccgggcaggag

SEQ ID NO: 27866 - RNA, 20 nt, Artificial Sequence
  Synthetic oligonucleotide: FAS-3
gagggcucaccagagguagg

SEQ ID NO: 27867 - RNA, 20 nt, Artificial Sequence
  Synthetic oligonucleotide: FAS-21
guuuuguguaacauaccugg

SEQ ID NO: 27868 - RNA, 20 nt, Artificial Sequence
  Synthetic oligonucleotide: FAS-666
gcccucuccugcccgggugg

SEQ ID NO: 27869 - RNA, 20 nt, Artificial Sequence
  Synthetic oligonucleotide: FAS-59
uagggacugcacagucaaug

SEQ ID NO: 27870 - RNA, 20 nt, Artificial Sequence
  Synthetic oligonucleotide: FAS-15
acuccaagggauuggaauug

SEQ ID NO: 27871 - RNA, 20 nt, Artificial Sequence
  Synthetic oligonucleotide: FAS-68
ucugcauuuggaagaaaaau

SEQ ID NO: 27872 - RNA, 20 nt, Artificial Sequence
  Synthetic oligonucleotide: FAS-58
cuagggacugcacagucaau

SEQ ID NO: 27873 - RNA, 20 nt, Artificial Sequence
  Synthetic oligonucleotide: FAS-25
gacagggcuuauggcagaau

SEQ ID NO: 27874 - RNA, 20 nt, Artificial Sequence
  Synthetic oligonucleotide: FAS-14
ugacaucaacuccaagggau

SEQ ID NO: 27875 - RNA, 20 nt, Artificial Sequence
  Synthetic oligonucleotide: FAS-16
uacaguugagacucagaacu

SEQ ID NO: 27876 - RNA, 20 nt, Artificial Sequence
  Synthetic oligonucleotide: FAS-325
auuaccuuccucuuugcacu

SEQ ID NO: 27877 - RNA, 20 nt, Artificial Sequence
  Synthetic oligonucleotide: FAS-328
gagaaagacuaaaacuuacu

SEQ ID NO: 27878 - RNA, 20 nt, Artificial Sequence
  Synthetic oligonucleotide: FAS-27
cuuccucaauuccaaucccu

SEQ ID NO: 27879 - RNA, 20 nt, Artificial Sequence
  Synthetic oligonucleotide: FAS-51
acacuugcuccuuuuuuccu

SEQ ID NO: 27880 - RNA, 20 nt, Artificial Sequence
  Synthetic oligonucleotide: FAS-55
gggcaggugaaaggaaagcu

SEQ ID NO: 27881 - RNA, 20 nt, Artificial Sequence
  Synthetic oligonucleotide: FAS-660
gauugcucaacaaccaugcu

SEQ ID NO: 27882 - RNA, 20 nt, Artificial Sequence
  Synthetic oligonucleotide: FAS-69
cuguguacuccuucccuucu

SEQ ID NO: 27883 - RNA, 20 nt, Artificial Sequence
  Synthetic oligonucleotide: FAS-245
aguuuccaaacugauuuucu

SEQ ID NO: 27884 - RNA, 20 nt, Artificial Sequence
  Synthetic oligonucleotide: FAS-105
ggagagggcucaccagaggu

SEQ ID NO: 27885 - RNA, 20 nt, Artificial Sequence
  Synthetic oligonucleotide: FAS-29
ggaguugaugucagucacuu

SEQ ID NO: 27886 - RNA, 20 nt, Artificial Sequence
  Synthetic oligonucleotide: FAS-52
cacuugcuccuuuuuuccuu

SEQ ID NO: 27887 - RNA, 20 nt, Artificial Sequence
  Synthetic oligonucleotide: FAS-331
guagaguuacaaaaaaaguu

SEQ ID NO: 27888 - RNA, 20 nt, Artificial Sequence
  Synthetic oligonucleotide: FAS-337
cuaagccuagaaaaucaguu

SEQ ID NO: 27889 - RNA, 17 nt, Artificial Sequence
  Synthetic oligonucleotide: FAS-344
uccuagaaagcaaaaaa

SEQ ID NO: 27890 - RNA, 17 nt, Artificial Sequence
  Synthetic oligonucleotide: FAS-304
ggcuuuguucgaaagaa

SEQ ID NO: 27891 - RNA, 17 nt, Artificial Sequence
  Synthetic oligonucleotide: FAS-294
augcagaaagcacagaa

SEQ ID NO: 27892 - RNA, 17 nt, Artificial Sequence
  Synthetic oligonucleotide: FAS-293
ucuuucagugaagagaa

SEQ ID NO: 27893 - RNA, 17 nt, Artificial Sequence
  Synthetic oligonucleotide: FAS-303
acacuaagucaaguuaa

SEQ ID NO: 27894 - RNA, 17 nt, Artificial Sequence
  Synthetic oligonucleotide: FAS-295
cacagaaaggaaaacca

SEQ ID NO: 27895 - RNA, 17 nt, Artificial Sequence
  Synthetic oligonucleotide: FAS-307
ucagacuaucauccuca

SEQ ID NO: 27896 - RNA, 17 nt, Artificial Sequence
  Synthetic oligonucleotide: FAS-306
aauuggcaucaacuuca

SEQ ID NO: 27897 - RNA, 17 nt, Artificial Sequence
  Synthetic oligonucleotide: FAS-301
aauaaauuuaucuggua

SEQ ID NO: 27898 - RNA, 17 nt, Artificial Sequence
  Synthetic oligonucleotide: FAS-285
ccaauguuccaaccuac

SEQ ID NO: 27899 - RNA, 17 nt, Artificial Sequence
  Synthetic oligonucleotide: FAS-345
ccuauuucaauaccuac

SEQ ID NO: 27900 - RNA, 17 nt, Artificial Sequence
  Synthetic oligonucleotide: FAS-302
uauaucaccacuauugc

SEQ ID NO: 27901 - RNA, 17 nt, Artificial Sequence
  Synthetic oligonucleotide: FAS-350
ccaccccaaguuagauc

SEQ ID NO: 27902 - RNA, 17 nt, Artificial Sequence
  Synthetic oligonucleotide: FAS-300
guggcaauaaauuuauc

SEQ ID NO: 27903 - RNA, 17 nt, Artificial Sequence
  Synthetic oligonucleotide: FAS-299
ugcuuucuaggaaacag

SEQ ID NO: 27904 - RNA, 17 nt, Artificial Sequence
  Synthetic oligonucleotide: FAS-343
caugacuccagcaauag

SEQ ID NO: 27905 - RNA, 17 nt, Artificial Sequence
  Synthetic oligonucleotide: FAS-348
uuaccccaaacaauuag

SEQ ID NO: 27906 - RNA, 17 nt, Artificial Sequence
  Synthetic oligonucleotide: FAS-289
ccagaucuaacuugggg

SEQ ID NO: 27907 - RNA, 17 nt, Artificial Sequence
  Synthetic oligonucleotide: FAS-288
gauccagaucuaacuug

SEQ ID NO: 27908 - RNA, 17 nt, Artificial Sequence
  Synthetic oligonucleotide: FAS-339
cacuaguaauguccuug

SEQ ID NO: 27909 - RNA, 17 nt, Artificial Sequence
  Synthetic oligonucleotide: FAS-292
auuccacuaauuguuug

SEQ ID NO: 27910 - RNA, 17 nt, Artificial Sequence
  Synthetic oligonucleotide: FAS-297
ccuguagguauugaaau

SEQ ID NO: 27911 - RNA, 17 nt, Artificial Sequence
  Synthetic oligonucleotide: FAS-349
caaacaauuaguggaau

SEQ ID NO: 27912 - RNA, 17 nt, Artificial Sequence
  Synthetic oligonucleotide: FAS-305
uucaacugcuucguaau

SEQ ID NO: 27913 - RNA, 17 nt, Artificial Sequence
  Synthetic oligonucleotide: FAS-353
ccuguagguuggaacau

SEQ ID NO: 27914 - RNA, 17 nt, Artificial Sequence
  Synthetic oligonucleotide: FAS-340
ugcaagaguacaaagau

SEQ ID NO: 27915 - RNA, 17 nt, Artificial Sequence
  Synthetic oligonucleotide: FAS-286
aggauccagaucuaacu

SEQ ID NO: 27916 - RNA, 17 nt, Artificial Sequence
  Synthetic oligonucleotide: FAS-347
gagauucaugagaaccu

SEQ ID NO: 27917 - RNA, 17 nt, Artificial Sequence
  Synthetic oligonucleotide: FAS-308
aaaugaaauccaaagcu

SEQ ID NO: 27918 - RNA, 17 nt, Artificial Sequence
  Synthetic oligonucleotide: FAS-341
ucuguucugcugugucu

SEQ ID NO: 27919 - RNA, 17 nt, Artificial Sequence
  Synthetic oligonucleotide: FAS-298
uccauuuuuugcuuucu

SEQ ID NO: 27920 - RNA, 17 nt, Artificial Sequence
  Synthetic oligonucleotide: FAS-346
ccuacaggauuuaaagu

SEQ ID NO: 27921 - RNA, 17 nt, Artificial Sequence
  Synthetic oligonucleotide: FAS-352
aucuggauccuguaggu

SEQ ID NO: 27922 - RNA, 17 nt, Artificial Sequence
  Synthetic oligonucleotide: FAS-296
ccaacuuuaaauccugu

SEQ ID NO: 27923 - RNA, 17 nt, Artificial Sequence
  Synthetic oligonucleotide: FAS-351
uuagaucuggauccugu

SEQ ID NO: 27924 - RNA, 17 nt, Artificial Sequence
  Synthetic oligonucleotide: FAS-287
ggauccagaucuaacuu

SEQ ID NO: 27925 - RNA, 17 nt, Artificial Sequence
  Synthetic oligonucleotide: FAS-338
cacucuagaccaagcuu

SEQ ID NO: 27926 - RNA, 17 nt, Artificial Sequence
  Synthetic oligonucleotide: FAS-290
caauuccacuaauuguu

SEQ ID NO: 27927 - RNA, 17 nt, Artificial Sequence
  Synthetic oligonucleotide: FAS-342
cuugaucucaucuauuu

SEQ ID NO: 27928 - RNA, 17 nt, Artificial Sequence
  Synthetic oligonucleotide: FAS-291
aauuccacuaauuguuu

SEQ ID NO: 27929 - RNA, 20 nt, Artificial Sequence
  Synthetic oligonucleotide: FAS-315
guuuccuagaaagcaaaaaa

SEQ ID NO: 27930 - RNA, 20 nt, Artificial Sequence
  Synthetic oligonucleotide: FAS-272
aaaggcuuuguucgaaagaa

SEQ ID NO: 27931 - RNA, 20 nt, Artificial Sequence
  Synthetic oligonucleotide: FAS-262
aacaugcagaaagcacagaa

SEQ ID NO: 27932 - RNA, 20 nt, Artificial Sequence
  Synthetic oligonucleotide: FAS-261
uguucuuucagugaagagaa

SEQ ID NO: 27933 - RNA, 20 nt, Artificial Sequence
  Synthetic oligonucleotide: FAS-271
augacacuaagucaaguuaa

SEQ ID NO: 27934 - RNA, 20 nt, Artificial Sequence
  Synthetic oligonucleotide: FAS-263
aagcacagaaaggaaaacca

SEQ ID NO: 27935 - RNA, 20 nt, Artificial Sequence
  Synthetic oligonucleotide: FAS-275
aauucagacuaucauccuca

SEQ ID NO: 27936 - RNA, 20 nt, Artificial Sequence
  Synthetic oligonucleotide: FAS-274
cguaauuggcaucaacuuca

SEQ ID NO: 27937 - RNA, 20 nt, Artificial Sequence
  Synthetic oligonucleotide: FAS-269
ggcaauaaauuuaucuggua

SEQ ID NO: 27938 - RNA, 20 nt, Artificial Sequence
  Synthetic oligonucleotide: FAS-253
uguccaauguuccaaccuac

SEQ ID NO: 27939 - RNA, 20 nt, Artificial Sequence
  Synthetic oligonucleotide: FAS-316
auaccuauuucaauaccuac

SEQ ID NO: 27940 - RNA, 20 nt, Artificial Sequence
  Synthetic oligonucleotide: FAS-270
aaauauaucaccacuauugc

SEQ ID NO: 27941 - RNA, 20 nt, Artificial Sequence
  Synthetic oligonucleotide: FAS-321
aagccaccccaaguuagauc

SEQ ID NO: 27942 - RNA, 20 nt, Artificial Sequence
  Synthetic oligonucleotide: FAS-268
acaguggcaauaaauuuauc

SEQ ID NO: 27943 - RNA, 20 nt, Artificial Sequence
  Synthetic oligonucleotide: FAS-267
uuuugcuuucuaggaaacag

SEQ ID NO: 27944 - RNA, 20 nt, Artificial Sequence
  Synthetic oligonucleotide: FAS-314
ugucaugacuccagcaauag

SEQ ID NO: 27945 - RNA, 20 nt, Artificial Sequence
  Synthetic oligonucleotide: FAS-319
aacuuaccccaaacaauuag

SEQ ID NO: 27946 - RNA, 20 nt, Artificial Sequence
  Synthetic oligonucleotide: FAS-257
gauccagaucuaacuugggg

SEQ ID NO: 27947 - RNA, 20 nt, Artificial Sequence
  Synthetic oligonucleotide: FAS-256
caggauccagaucuaacuug

SEQ ID NO: 27948 - RNA, 20 nt, Artificial Sequence
  Synthetic oligonucleotide: FAS-310
agucacuaguaauguccuug

SEQ ID NO: 27949 - RNA, 20 nt, Artificial Sequence
  Synthetic oligonucleotide: FAS-260
ccaauuccacuaauuguuug

SEQ ID NO: 27950 - RNA, 20 nt, Artificial Sequence
  Synthetic oligonucleotide: FAS-265
aauccuguagguauugaaau

SEQ ID NO: 27951 - RNA, 20 nt, Artificial Sequence
  Synthetic oligonucleotide: FAS-320
ccccaaacaauuaguggaau

SEQ ID NO: 27952 - RNA, 20 nt, Artificial Sequence
  Synthetic oligonucleotide: FAS-273
aaguucaacugcuucguaau

SEQ ID NO: 27953 - RNA, 20 nt, Artificial Sequence
  Synthetic oligonucleotide: FAS-324
gauccuguagguuggaacau

SEQ ID NO: 27954 - RNA, 20 nt, Artificial Sequence
  Synthetic oligonucleotide: FAS-311
cucugcaagaguacaaagau

SEQ ID NO: 27955 - RNA, 20 nt, Artificial Sequence
  Synthetic oligonucleotide: FAS-254
uacaggauccagaucuaacu

SEQ ID NO: 27956 - RNA, 20 nt, Artificial Sequence
  Synthetic oligonucleotide: FAS-318
uuggagauucaugagaaccu

SEQ ID NO: 27957 - RNA, 20 nt, Artificial Sequence
  Synthetic oligonucleotide: FAS-276
cagaaaugaaauccaaagcu

SEQ ID NO: 27958 - RNA, 20 nt, Artificial Sequence
  Synthetic oligonucleotide: FAS-312
cuuucuguucugcugugucu

SEQ ID NO: 27959 - RNA, 20 nt, Artificial Sequence
  Synthetic oligonucleotide: FAS-266
gcuuccauuuuuugcuuucu

SEQ ID NO: 27960 - RNA, 20 nt, Artificial Sequence
  Synthetic oligonucleotide: FAS-317
auaccuacaggauuuaaagu

SEQ ID NO: 27961 - RNA, 20 nt, Artificial Sequence
  Synthetic oligonucleotide: FAS-323
uagaucuggauccuguaggu

SEQ ID NO: 27962 - RNA, 20 nt, Artificial Sequence
  Synthetic oligonucleotide: FAS-264
ucuccaacuuuaaauccugu

SEQ ID NO: 27963 - RNA, 20 nt, Artificial Sequence
  Synthetic oligonucleotide: FAS-322
aaguuagaucuggauccugu

SEQ ID NO: 27964 - RNA, 20 nt, Artificial Sequence
  Synthetic oligonucleotide: FAS-255
acaggauccagaucuaacuu

SEQ ID NO: 27965 - RNA, 20 nt, Artificial Sequence
  Synthetic oligonucleotide: FAS-309
uuucacucuagaccaagcuu

SEQ ID NO: 27966 - RNA, 20 nt, Artificial Sequence
  Synthetic oligonucleotide: FAS-258
ugccaauuccacuaauuguu

SEQ ID NO: 27967 - RNA, 20 nt, Artificial Sequence
  Synthetic oligonucleotide: FAS-313
auucuugaucucaucuauuu

SEQ ID NO: 27968 - RNA, 20 nt, Artificial Sequence
  Synthetic oligonucleotide: FAS-259
gccaauuccacuaauuguuu

SEQ ID NO: 27969 - RNA, 21 nt, Artificial Sequence
  Synthetic oligonucleotide: FAS-2121
ccuguaaaauaaaagcaugaa

SEQ ID NO: 27970 - RNA, 22 nt, Artificial Sequence
  Synthetic oligonucleotide: FAS-2122
accuguaaaauaaaagcaugaa

SEQ ID NO: 27971 - RNA, 23 nt, Artificial Sequence
  Synthetic oligonucleotide: FAS-2123
aaccuguaaaauaaaagcaugaa

SEQ ID NO: 27972 - RNA, 24 nt, Artificial Sequence
  Synthetic oligonucleotide: FAS-2124
gaaccuguaaaauaaaagcaugaa

SEQ ID NO: 27973 - RNA, 21 nt, Artificial Sequence
  Synthetic oligonucleotide: FAS-2125
agacuaaaacuuacuuggugc

SEQ ID NO: 27974 - RNA, 22 nt, Artificial Sequence
  Synthetic oligonucleotide: FAS-2126
aagacuaaaacuuacuuggugc

SEQ ID NO: 27975 - RNA, 23 nt, Artificial Sequence
  Synthetic oligonucleotide: FAS-2127
aaagacuaaaacuuacuuggugc

SEQ ID NO: 27976 - RNA, 24 nt, Artificial Sequence
  Synthetic oligonucleotide: FAS-2128
gaaagacuaaaacuuacuuggugc

SEQ ID NO: 27977 - RNA, 21 nt, Artificial Sequence
  Synthetic oligonucleotide: FAS-2129
gagagggcucaccagagguag

SEQ ID NO: 27978 - RNA, 22 nt, Artificial Sequence
  Synthetic oligonucleotide: FAS-2130
ggagagggcucaccagagguag

SEQ ID NO: 27979 - RNA, 23 nt, Artificial Sequence
  Synthetic oligonucleotide: FAS-2131
aggagagggcucaccagagguag

SEQ ID NO: 27980 - RNA, 24 nt, Artificial Sequence
  Synthetic oligonucleotide: FAS-2132
caggagagggcucaccagagguag

SEQ ID NO: 27981 - RNA, 18 nt, Artificial Sequence
  Synthetic oligonucleotide: FAS-2133
uugcacuugguguugcug

SEQ ID NO: 27982 - RNA, 19 nt, Artificial Sequence
  Synthetic oligonucleotide: FAS-2134
uuugcacuugguguugcug

SEQ ID NO: 27983 - RNA, 20 nt, Artificial Sequence
  Synthetic oligonucleotide: FAS-520
cuuugcacuugguguugcug

SEQ ID NO: 27984 - RNA, 21 nt, Artificial Sequence
  Synthetic oligonucleotide: FAS-2135
ucuuugcacuugguguugcug

SEQ ID NO: 27985 - RNA, 22 nt, Artificial Sequence
  Synthetic oligonucleotide: FAS-2136
cucuuugcacuugguguugcug

SEQ ID NO: 27986 - RNA, 23 nt, Artificial Sequence
  Synthetic oligonucleotide: FAS-2137
ccucuuugcacuugguguugcug

SEQ ID NO: 27987 - RNA, 24 nt, Artificial Sequence
  Synthetic oligonucleotide: FAS-2138
uccucuuugcacuugguguugcug

SEQ ID NO: 27988 - RNA, 21 nt, Artificial Sequence
  Synthetic oligonucleotide: FAS-2139
ucuuccucaauuccaaucccu

SEQ ID NO: 27989 - RNA, 22 nt, Artificial Sequence
  Synthetic oligonucleotide: FAS-2140
gucuuccucaauuccaaucccu

SEQ ID NO: 27990 - RNA, 23 nt, Artificial Sequence
  Synthetic oligonucleotide: FAS-2141
agucuuccucaauuccaaucccu

SEQ ID NO: 27991 - RNA, 24 nt, Artificial Sequence
  Synthetic oligonucleotide: FAS-2142
cagucuuccucaauuccaaucccu

SEQ ID NO: 27992 - RNA, 21 nt, Artificial Sequence
  Synthetic oligonucleotide: FAS-2143
ucugcacuugguauucugggu

SEQ ID NO: 27993 - RNA, 22 nt, Artificial Sequence
  Synthetic oligonucleotide: FAS-2144
aucugcacuugguauucugggu

SEQ ID NO: 27994 - RNA, 23 nt, Artificial Sequence
  Synthetic oligonucleotide: FAS-2145
caucugcacuugguauucugggu

SEQ ID NO: 27995 - RNA, 24 nt, Artificial Sequence
  Synthetic oligonucleotide: FAS-2146
acaucugcacuugguauucugggu

SEQ ID NO: 27996 - RNA, 21 nt, Artificial Sequence
  Synthetic oligonucleotide: FAS-2147
augaugcaggccuuccaaguu

SEQ ID NO: 27997 - RNA, 22 nt, Artificial Sequence
  Synthetic oligonucleotide: FAS-2148
caugaugcaggccuuccaaguu

SEQ ID NO: 27998 - RNA, 23 nt, Artificial Sequence
  Synthetic oligonucleotide: FAS-2149
ucaugaugcaggccuuccaaguu

SEQ ID NO: 27999 - RNA, 24 nt, Artificial Sequence
  Synthetic oligonucleotide: FAS-2150
aucaugaugcaggccuuccaaguu

SEQ ID NO: 28000 - RNA, 18 nt, Artificial Sequence
  Synthetic oligonucleotide: FAS-2151
ugacugacaucaacucca

SEQ ID NO: 28001 - RNA, 19 nt, Artificial Sequence
  Synthetic oligonucleotide: FAS-2152
gugacugacaucaacucca

SEQ ID NO: 28002 - RNA, 20 nt, Artificial Sequence
  Synthetic oligonucleotide: FAS-12
agugacugacaucaacucca

SEQ ID NO: 28003 - RNA, 21 nt, Artificial Sequence
  Synthetic oligonucleotide: FAS-2153
aagugacugacaucaacucca

SEQ ID NO: 28004 - RNA, 22 nt, Artificial Sequence
  Synthetic oligonucleotide: FAS-2154
caagugacugacaucaacucca

SEQ ID NO: 28005 - RNA, 23 nt, Artificial Sequence
  Synthetic oligonucleotide: FAS-2155
ccaagugacugacaucaacucca

SEQ ID NO: 28006 - RNA, 24 nt, Artificial Sequence
  Synthetic oligonucleotide: FAS-2156
cccaagugacugacaucaacucca

SEQ ID NO: 28007 - RNA, 21 nt, Artificial Sequence
  Synthetic oligonucleotide: FAS-2157
gaugugaacauggaaucauca

SEQ ID NO: 28008 - RNA, 22 nt, Artificial Sequence
  Synthetic oligonucleotide: FAS-2158
agaugugaacauggaaucauca

SEQ ID NO: 28009 - RNA, 23 nt, Artificial Sequence
  Synthetic oligonucleotide: FAS-2159
uagaugugaacauggaaucauca

SEQ ID NO: 28010 - RNA, 24 nt, Artificial Sequence
  Synthetic oligonucleotide: FAS-2160
cuagaugugaacauggaaucauca

SEQ ID NO: 28011 - RNA, 21 nt, Artificial Sequence
  Synthetic oligonucleotide: FAS-2161
gcgugcccugccaagaaggga

SEQ ID NO: 28012 - RNA, 22 nt, Artificial Sequence
  Synthetic oligonucleotide: FAS-2162
ugcgugcccugccaagaaggga

SEQ ID NO: 28013 - RNA, 23 nt, Artificial Sequence
  Synthetic oligonucleotide: FAS-2163
cugcgugcccugccaagaaggga

SEQ ID NO: 28014 - RNA, 24 nt, Artificial Sequence
  Synthetic oligonucleotide: FAS-2164
acugcgugcccugccaagaaggga

SEQ ID NO: 28015 - RNA, 21 nt, Artificial Sequence
  Synthetic oligonucleotide: FAS-2165
gaaauaaacugcacccggacc

SEQ ID NO: 28016 - RNA, 22 nt, Artificial Sequence
  Synthetic oligonucleotide: FAS-2166
ggaaauaaacugcacccggacc

SEQ ID NO: 28017 - RNA, 23 nt, Artificial Sequence
  Synthetic oligonucleotide: FAS-2167
uggaaauaaacugcacccggacc

SEQ ID NO: 28018 - RNA, 24 nt, Artificial Sequence
  Synthetic oligonucleotide: FAS-2168
guggaaauaaacugcacccggacc

SEQ ID NO: 28019 - RNA, 21 nt, Artificial Sequence
  Synthetic oligonucleotide: FAS-2169
cucuggugagcccucuccugc

SEQ ID NO: 28020 - RNA, 22 nt, Artificial Sequence
  Synthetic oligonucleotide: FAS-2170
ccucuggugagcccucuccugc

SEQ ID NO: 28021 - RNA, 23 nt, Artificial Sequence
  Synthetic oligonucleotide: FAS-2171
accucuggugagcccucuccugc

SEQ ID NO: 28022 - RNA, 24 nt, Artificial Sequence
  Synthetic oligonucleotide: FAS-2172
uaccucuggugagcccucuccugc

SEQ ID NO: 28023 - RNA, 21 nt, Artificial Sequence
  Synthetic oligonucleotide: FAS-2173
gcuagggacugcacagucaau

SEQ ID NO: 28024 - RNA, 22 nt, Artificial Sequence
  Synthetic oligonucleotide: FAS-2174
agcuagggacugcacagucaau

SEQ ID NO: 28025 - RNA, 23 nt, Artificial Sequence
  Synthetic oligonucleotide: FAS-2175
aagcuagggacugcacagucaau

SEQ ID NO: 28026 - RNA, 24 nt, Artificial Sequence
  Synthetic oligonucleotide: FAS-2176
aaagcuagggacugcacagucaau

SEQ ID NO: 28027 - RNA, 21 nt, Artificial Sequence
  Synthetic oligonucleotide: FAS-2177
cugacaucaacuccaagggau

SEQ ID NO: 28028 - RNA, 22 nt, Artificial Sequence
  Synthetic oligonucleotide: FAS-2178
acugacaucaacuccaagggau

SEQ ID NO: 28029 - RNA, 23 nt, Artificial Sequence
  Synthetic oligonucleotide: FAS-2179
gacugacaucaacuccaagggau

SEQ ID NO: 28030 - RNA, 24 nt, Artificial Sequence
  Synthetic oligonucleotide: FAS-2180
ugacugacaucaacuccaagggau

SEQ ID NO: 28031 - RNA, 21 nt, Artificial Sequence
  Synthetic oligonucleotide: FAS-2181
uugugugaugaaggacauggu

SEQ ID NO: 28032 - RNA, 22 nt, Artificial Sequence
  Synthetic oligonucleotide: FAS-2182
auugugugaugaaggacauggu

SEQ ID NO: 28033 - RNA, 23 nt, Artificial Sequence
  Synthetic oligonucleotide: FAS-2183
gauugugugaugaaggacauggu

SEQ ID NO: 28034 - RNA, 24 nt, Artificial Sequence
  Synthetic oligonucleotide: FAS-2184
agauugugugaugaaggacauggu

SEQ ID NO: 28035 - RNA, 18 nt, Artificial Sequence
  Synthetic oligonucleotide: FAS-2185
guaaaauaaaagcaugaa

SEQ ID NO: 28036 - RNA, 19 nt, Artificial Sequence
  Synthetic oligonucleotide: FAS-2186
uguaaaauaaaagcaugaa

SEQ ID NO: 28037 - RNA, 20 nt, Artificial Sequence
  Synthetic oligonucleotide: FAS-160
cuguaaaauaaaagcaugaa

SEQ ID NO: 28038 - RNA, 18 nt, Artificial Sequence
  Synthetic oligonucleotide: FAS-2187
cuaaaacuuacuuggugc

SEQ ID NO: 28039 - RNA, 19 nt, Artificial Sequence
  Synthetic oligonucleotide: FAS-2188
acuaaaacuuacuuggugc

SEQ ID NO: 28040 - RNA, 20 nt, Artificial Sequence
  Synthetic oligonucleotide: FAS-525
gacuaaaacuuacuuggugc

SEQ ID NO: 28041 - RNA, 18 nt, Artificial Sequence
  Synthetic oligonucleotide: FAS-2189
cacaguguucacauacag

SEQ ID NO: 28042 - RNA, 19 nt, Artificial Sequence
  Synthetic oligonucleotide: FAS-2190
ucacaguguucacauacag

SEQ ID NO: 28043 - RNA, 20 nt, Artificial Sequence
  Synthetic oligonucleotide: FAS-526
gucacaguguucacauacag

SEQ ID NO: 28044 - RNA, 21 nt, Artificial Sequence
  Synthetic oligonucleotide: FAS-2191
ggucacaguguucacauacag

SEQ ID NO: 28045 - RNA, 22 nt, Artificial Sequence
  Synthetic oligonucleotide: FAS-2192
gggucacaguguucacauacag

SEQ ID NO: 28046 - RNA, 23 nt, Artificial Sequence
  Synthetic oligonucleotide: FAS-2193
agggucacaguguucacauacag

SEQ ID NO: 28047 - RNA, 24 nt, Artificial Sequence
  Synthetic oligonucleotide: FAS-2194
aagggucacaguguucacauacag

SEQ ID NO: 28048 - RNA, 18 nt, Artificial Sequence
  Synthetic oligonucleotide: FAS-2195
agggcucaccagagguag

SEQ ID NO: 28049 - RNA, 19 nt, Artificial Sequence
  Synthetic oligonucleotide: FAS-2196
gagggcucaccagagguag

SEQ ID NO: 28050 - RNA, 20 nt, Artificial Sequence
  Synthetic oligonucleotide: FAS-106
agagggcucaccagagguag

SEQ ID NO: 28051 - RNA, 18 nt, Artificial Sequence
  Synthetic oligonucleotide: FAS-2197
ggaggacagggcuuaugg

SEQ ID NO: 28052 - RNA, 19 nt, Artificial Sequence
  Synthetic oligonucleotide: FAS-2198
uggaggacagggcuuaugg

SEQ ID NO: 28053 - RNA, 20 nt, Artificial Sequence
  Synthetic oligonucleotide: FAS-151
cuggaggacagggcuuaugg

SEQ ID NO: 28054 - RNA, 21 nt, Artificial Sequence
  Synthetic oligonucleotide: FAS-2199
ccuggaggacagggcuuaugg

SEQ ID NO: 28055 - RNA, 22 nt, Artificial Sequence
  Synthetic oligonucleotide: FAS-2200
accuggaggacagggcuuaugg

SEQ ID NO: 28056 - RNA, 23 nt, Artificial Sequence
  Synthetic oligonucleotide: FAS-2201
uaccuggaggacagggcuuaugg

SEQ ID NO: 28057 - RNA, 24 nt, Artificial Sequence
  Synthetic oligonucleotide: FAS-2202
auaccuggaggacagggcuuaugg

SEQ ID NO: 28058 - RNA, 18 nt, Artificial Sequence
  Synthetic oligonucleotide: FAS-2203
uccucaauuccaaucccu

SEQ ID NO: 28059 - RNA, 19 nt, Artificial Sequence
  Synthetic oligonucleotide: FAS-2204
uuccucaauuccaaucccu

SEQ ID NO: 28060 - RNA, 20 nt, Artificial Sequence
  Synthetic oligonucleotide: FAS-27
cuuccucaauuccaaucccu

SEQ ID NO: 28061 - RNA, 18 nt, Artificial Sequence
  Synthetic oligonucleotide: FAS-2205
gcacuugguauucugggu

SEQ ID NO: 28062 - RNA, 19 nt, Artificial Sequence
  Synthetic oligonucleotide: FAS-2206
ugcacuugguauucugggu

SEQ ID NO: 28063 - RNA, 20 nt, Artificial Sequence
  Synthetic oligonucleotide: FAS-528
cugcacuugguauucugggu

SEQ ID NO: 28064 - RNA, 18 nt, Artificial Sequence
  Synthetic oligonucleotide: FAS-2207
acaucugcacuugguauu

SEQ ID NO: 28065 - RNA, 19 nt, Artificial Sequence
  Synthetic oligonucleotide: FAS-2208
uacaucugcacuugguauu

SEQ ID NO: 28066 - RNA, 20 nt, Artificial Sequence
  Synthetic oligonucleotide: FAS-527
uuacaucugcacuugguauu

SEQ ID NO: 28067 - RNA, 21 nt, Artificial Sequence
  Synthetic oligonucleotide: FAS-2209
uuuacaucugcacuugguauu

SEQ ID NO: 28068 - RNA, 22 nt, Artificial Sequence
  Synthetic oligonucleotide: FAS-2210
guuuacaucugcacuugguauu

SEQ ID NO: 28069 - RNA, 23 nt, Artificial Sequence
  Synthetic oligonucleotide: FAS-2211
gguuuacaucugcacuugguauu

SEQ ID NO: 28070 - RNA, 24 nt, Artificial Sequence
  Synthetic oligonucleotide: FAS-2212
ugguuuacaucugcacuugguauu

SEQ ID NO: 28071 - RNA, 18 nt, Artificial Sequence
  Synthetic oligonucleotide: FAS-2213
augcaggccuuccaaguu

SEQ ID NO: 28072 - RNA, 19 nt, Artificial Sequence
  Synthetic oligonucleotide: FAS-2214
gaugcaggccuuccaaguu

SEQ ID NO: 28073 - RNA, 20 nt, Artificial Sequence
  Synthetic oligonucleotide: FAS-152
ugaugcaggccuuccaaguu

SEQ ID NO: 28074 - RNA, 18 nt, Artificial Sequence
  Synthetic oligonucleotide: FAS-2215
uuuuucuagaugugaaca

SEQ ID NO: 28075 - RNA, 19 nt, Artificial Sequence
  Synthetic oligonucleotide: FAS-2216
uuuuuucuagaugugaaca

SEQ ID NO: 28076 - RNA, 20 nt, Artificial Sequence
  Synthetic oligonucleotide: FAS-248
uuuuuuucuagaugugaaca

SEQ ID NO: 28077 - RNA, 21 nt, Artificial Sequence
  Synthetic oligonucleotide: FAS-2217
uuuuuuuucuagaugugaaca

SEQ ID NO: 28078 - RNA, 22 nt, Artificial Sequence
  Synthetic oligonucleotide: FAS-2218
uuuuuuuuucuagaugugaaca

SEQ ID NO: 28079 - RNA, 23 nt, Artificial Sequence
  Synthetic oligonucleotide: FAS-2219
auuuuuuuuucuagaugugaaca

SEQ ID NO: 28080 - RNA, 24 nt, Artificial Sequence
  Synthetic oligonucleotide: FAS-2220
uauuuuuuuuucuagaugugaaca

SEQ ID NO: 28081 - RNA, 18 nt, Artificial Sequence
  Synthetic oligonucleotide: FAS-2221
gugaacauggaaucauca

SEQ ID NO: 28082 - RNA, 19 nt, Artificial Sequence
  Synthetic oligonucleotide: FAS-2222
ugugaacauggaaucauca

SEQ ID NO: 28083 - RNA, 20 nt, Artificial Sequence
  Synthetic oligonucleotide: FAS-249
augugaacauggaaucauca

SEQ ID NO: 28084 - RNA, 18 nt, Artificial Sequence
  Synthetic oligonucleotide: FAS-2223
ugcccugccaagaaggga

SEQ ID NO: 28085 - RNA, 19 nt, Artificial Sequence
  Synthetic oligonucleotide: FAS-2224
gugcccugccaagaaggga

SEQ ID NO: 28086 - RNA, 20 nt, Artificial Sequence
  Synthetic oligonucleotide: FAS-62
cgugcccugccaagaaggga

SEQ ID NO: 28087 - RNA, 18 nt, Artificial Sequence
  Synthetic oligonucleotide: FAS-2225
auaaacugcacccggacc

SEQ ID NO: 28088 - RNA, 19 nt, Artificial Sequence
  Synthetic oligonucleotide: FAS-2226
aauaaacugcacccggacc

SEQ ID NO: 28089 - RNA, 20 nt, Artificial Sequence
  Synthetic oligonucleotide: FAS-371
aaauaaacugcacccggacc

SEQ ID NO: 28090 - RNA, 18 nt, Artificial Sequence
  Synthetic oligonucleotide: FAS-2227
uggugagcccucuccugc

SEQ ID NO: 28091 - RNA, 19 nt, Artificial Sequence
  Synthetic oligonucleotide: FAS-2228
cuggugagcccucuccugc

SEQ ID NO: 28092 - RNA, 20 nt, Artificial Sequence
  Synthetic oligonucleotide: FAS-1051
ucuggugagcccucuccugc

SEQ ID NO: 28093 - RNA, 18 nt, Artificial Sequence
  Synthetic oligonucleotide: FAS-2229
agggacugcacagucaau

SEQ ID NO: 28094 - RNA, 19 nt, Artificial Sequence
  Synthetic oligonucleotide: FAS-2230
uagggacugcacagucaau

SEQ ID NO: 28095 - RNA, 20 nt, Artificial Sequence
  Synthetic oligonucleotide: FAS-58
cuagggacugcacagucaau

SEQ ID NO: 28096 - RNA, 18 nt, Artificial Sequence
  Synthetic oligonucleotide: FAS-2231
acaucaacuccaagggau

SEQ ID NO: 28097 - RNA, 19 nt, Artificial Sequence
  Synthetic oligonucleotide: FAS-2232
gacaucaacuccaagggau

SEQ ID NO: 28098 - RNA, 20 nt, Artificial Sequence
  Synthetic oligonucleotide: FAS-14
ugacaucaacuccaagggau

SEQ ID NO: 28099 - RNA, 18 nt, Artificial Sequence
  Synthetic oligonucleotide: FAS-2233
ugugaugaaggacauggu

SEQ ID NO: 28100 - RNA, 19 nt, Artificial Sequence
  Synthetic oligonucleotide: FAS-2234
gugugaugaaggacauggu

SEQ ID NO: 28101 - RNA, 20 nt, Artificial Sequence
  Synthetic oligonucleotide: FAS-194
ugugugaugaaggacauggu

SEQ ID NO: 28102 - RNA, 18 nt, Artificial Sequence
  Synthetic oligonucleotide: FAS-2235
caccugcccaaggaaaaa

SEQ ID NO: 28103 - RNA, 19 nt, Artificial Sequence
  Synthetic oligonucleotide: FAS-2236
ucaccugcccaaggaaaaa

SEQ ID NO: 28104 - RNA, 20 nt, Artificial Sequence
  Synthetic oligonucleotide: FAS-74
uucaccugcccaaggaaaaa

SEQ ID NO: 28105 - RNA, 21 nt, Artificial Sequence
  Synthetic oligonucleotide: FAS-2237
uuucaccugcccaaggaaaaa

SEQ ID NO: 28106 - RNA, 22 nt, Artificial Sequence
  Synthetic oligonucleotide: FAS-2238
cuuucaccugcccaaggaaaaa

SEQ ID NO: 28107 - RNA, 23 nt, Artificial Sequence
  Synthetic oligonucleotide: FAS-2239
ccuuucaccugcccaaggaaaaa

SEQ ID NO: 28108 - RNA, 24 nt, Artificial Sequence
  Synthetic oligonucleotide: FAS-2240
uccuuucaccugcccaaggaaaaa

SEQ ID NO: 28109 - RNA, 18 nt, Artificial Sequence
  Synthetic oligonucleotide: FAS-2241
ucugcauuuggaagaaaa

SEQ ID NO: 28110 - RNA, 19 nt, Artificial Sequence
  Synthetic oligonucleotide: FAS-2242
uucugcauuuggaagaaaa

SEQ ID NO: 28111 - RNA, 20 nt, Artificial Sequence
  Synthetic oligonucleotide: FAS-222
cuucugcauuuggaagaaaa

SEQ ID NO: 28112 - RNA, 21 nt, Artificial Sequence
  Synthetic oligonucleotide: FAS-2243
ucuucugcauuuggaagaaaa

SEQ ID NO: 28113 - RNA, 22 nt, Artificial Sequence
  Synthetic oligonucleotide: FAS-2244
aucuucugcauuuggaagaaaa

SEQ ID NO: 28114 - RNA, 23 nt, Artificial Sequence
  Synthetic oligonucleotide: FAS-2245
caucuucugcauuuggaagaaaa

SEQ ID NO: 28115 - RNA, 24 nt, Artificial Sequence
  Synthetic oligonucleotide: FAS-2246
acaucuucugcauuuggaagaaaa

SEQ ID NO: 28116 - RNA, 18 nt, Artificial Sequence
  Synthetic oligonucleotide: FAS-2247
ucaccugcccaaggaaaa

SEQ ID NO: 28117 - RNA, 19 nt, Artificial Sequence
  Synthetic oligonucleotide: FAS-2248
uucaccugcccaaggaaaa

SEQ ID NO: 28118 - RNA, 20 nt, Artificial Sequence
  Synthetic oligonucleotide: FAS-226
uuucaccugcccaaggaaaa

SEQ ID NO: 28119 - RNA, 21 nt, Artificial Sequence
  Synthetic oligonucleotide: FAS-2249
cuuucaccugcccaaggaaaa

SEQ ID NO: 28120 - RNA, 22 nt, Artificial Sequence
  Synthetic oligonucleotide: FAS-2250
ccuuucaccugcccaaggaaaa

SEQ ID NO: 28121 - RNA, 23 nt, Artificial Sequence
  Synthetic oligonucleotide: FAS-2251
uccuuucaccugcccaaggaaaa

SEQ ID NO: 28122 - RNA, 24 nt, Artificial Sequence
  Synthetic oligonucleotide: FAS-2252
uuccuuucaccugcccaaggaaaa

SEQ ID NO: 28123 - RNA, 18 nt, Artificial Sequence
  Synthetic oligonucleotide: FAS-2253
guugagcaauccuccgaa

SEQ ID NO: 28124 - RNA, 19 nt, Artificial Sequence
  Synthetic oligonucleotide: FAS-2254
uguugagcaauccuccgaa

SEQ ID NO: 28125 - RNA, 20 nt, Artificial Sequence
  Synthetic oligonucleotide: FAS-1172
uuguugagcaauccuccgaa

SEQ ID NO: 28126 - RNA, 21 nt, Artificial Sequence
  Synthetic oligonucleotide: FAS-2255
guuguugagcaauccuccgaa

SEQ ID NO: 28127 - RNA, 22 nt, Artificial Sequence
  Synthetic oligonucleotide: FAS-2256
gguuguugagcaauccuccgaa

SEQ ID NO: 28128 - RNA, 23 nt, Artificial Sequence
  Synthetic oligonucleotide: FAS-2257
ugguuguugagcaauccuccgaa

SEQ ID NO: 28129 - RNA, 24 nt, Artificial Sequence
  Synthetic oligonucleotide: FAS-2258
augguuguugagcaauccuccgaa

SEQ ID NO: 28130 - RNA, 18 nt, Artificial Sequence
  Synthetic oligonucleotide: FAS-2259
uuuccuuucaccugccca

SEQ ID NO: 28131 - RNA, 19 nt, Artificial Sequence
  Synthetic oligonucleotide: FAS-2260
cuuuccuuucaccugccca

SEQ ID NO: 28132 - RNA, 20 nt, Artificial Sequence
  Synthetic oligonucleotide: FAS-73
gcuuuccuuucaccugccca

SEQ ID NO: 28133 - RNA, 21 nt, Artificial Sequence
  Synthetic oligonucleotide: FAS-2261
agcuuuccuuucaccugccca

SEQ ID NO: 28134 - RNA, 22 nt, Artificial Sequence
  Synthetic oligonucleotide: FAS-2262
uagcuuuccuuucaccugccca

SEQ ID NO: 28135 - RNA, 23 nt, Artificial Sequence
  Synthetic oligonucleotide: FAS-2263
cuagcuuuccuuucaccugccca

SEQ ID NO: 28136 - RNA, 24 nt, Artificial Sequence
  Synthetic oligonucleotide: FAS-2264
ccuagcuuuccuuucaccugccca

SEQ ID NO: 28137 - RNA, 18 nt, Artificial Sequence
  Synthetic oligonucleotide: FAS-2265
gccuccacccgggcagga

SEQ ID NO: 28138 - RNA, 19 nt, Artificial Sequence
  Synthetic oligonucleotide: FAS-2266
agccuccacccgggcagga

SEQ ID NO: 28139 - RNA, 20 nt, Artificial Sequence
  Synthetic oligonucleotide: FAS-1165
aagccuccacccgggcagga

SEQ ID NO: 28140 - RNA, 18 nt, Artificial Sequence
  Synthetic oligonucleotide: FAS-2267
uguaacauaccuggagga

SEQ ID NO: 28141 - RNA, 19 nt, Artificial Sequence
  Synthetic oligonucleotide: FAS-2268
guguaacauaccuggagga

SEQ ID NO: 28142 - RNA, 20 nt, Artificial Sequence
  Synthetic oligonucleotide: FAS-150
uguguaacauaccuggagga

SEQ ID NO: 28143 - RNA, 21 nt, Artificial Sequence
  Synthetic oligonucleotide: FAS-2269
uuguguaacauaccuggagga

SEQ ID NO: 28144 - RNA, 22 nt, Artificial Sequence
  Synthetic oligonucleotide: FAS-2270
uuuguguaacauaccuggagga

SEQ ID NO: 28145 - RNA, 23 nt, Artificial Sequence
  Synthetic oligonucleotide: FAS-2271
uuuuguguaacauaccuggagga

SEQ ID NO: 28146 - RNA, 24 nt, Artificial Sequence
  Synthetic oligonucleotide: FAS-2272
guuuuguguaacauaccuggagga

SEQ ID NO: 28147 - RNA, 18 nt, Artificial Sequence
  Synthetic oligonucleotide: FAS-2273
caucuagaaaaaaaaaua

SEQ ID NO: 28148 - RNA, 19 nt, Artificial Sequence
  Synthetic oligonucleotide: FAS-2274
acaucuagaaaaaaaaaua

SEQ ID NO: 28149 - RNA, 20 nt, Artificial Sequence
  Synthetic oligonucleotide: FAS-522
cacaucuagaaaaaaaaaua

SEQ ID NO: 28150 - RNA, 21 nt, Artificial Sequence
  Synthetic oligonucleotide: FAS-2275
ucacaucuagaaaaaaaaaua

SEQ ID NO: 28151 - RNA, 22 nt, Artificial Sequence
  Synthetic oligonucleotide: FAS-2276
uucacaucuagaaaaaaaaaua

SEQ ID NO: 28152 - RNA, 23 nt, Artificial Sequence
  Synthetic oligonucleotide: FAS-2277
guucacaucuagaaaaaaaaaua

SEQ ID NO: 28153 - RNA, 24 nt, Artificial Sequence
  Synthetic oligonucleotide: FAS-2278
uguucacaucuagaaaaaaaaaua

SEQ ID NO: 28154 - RNA, 18 nt, Artificial Sequence
  Synthetic oligonucleotide: FAS-2279
gggcaggagagggcucac

SEQ ID NO: 28155 - RNA, 19 nt, Artificial Sequence
  Synthetic oligonucleotide: FAS-2280
cgggcaggagagggcucac

SEQ ID NO: 28156 - RNA, 20 nt, Artificial Sequence
  Synthetic oligonucleotide: FAS-103
ccgggcaggagagggcucac

SEQ ID NO: 28157 - RNA, 21 nt, Artificial Sequence
  Synthetic oligonucleotide: FAS-2281
cccgggcaggagagggcucac

SEQ ID NO: 28158 - RNA, 22 nt, Artificial Sequence
  Synthetic oligonucleotide: FAS-2282
acccgggcaggagagggcucac

SEQ ID NO: 28159 - RNA, 23 nt, Artificial Sequence
  Synthetic oligonucleotide: FAS-2283
cacccgggcaggagagggcucac

SEQ ID NO: 28160 - RNA, 24 nt, Artificial Sequence
  Synthetic oligonucleotide: FAS-2284
ccacccgggcaggagagggcucac

SEQ ID NO: 28161 - RNA, 18 nt, Artificial Sequence
  Synthetic oligonucleotide: FAS-2285
ggaguugaugucagucac

SEQ ID NO: 28162 - RNA, 19 nt, Artificial Sequence
  Synthetic oligonucleotide: FAS-2286
uggaguugaugucagucac

SEQ ID NO: 28163 - RNA, 20 nt, Artificial Sequence
  Synthetic oligonucleotide: FAS-155
uuggaguugaugucagucac

SEQ ID NO: 28164 - RNA, 21 nt, Artificial Sequence
  Synthetic oligonucleotide: FAS-2287
cuuggaguugaugucagucac

SEQ ID NO: 28165 - RNA, 22 nt, Artificial Sequence
  Synthetic oligonucleotide: FAS-2288
ccuuggaguugaugucagucac

SEQ ID NO: 28166 - RNA, 23 nt, Artificial Sequence
  Synthetic oligonucleotide: FAS-2289
cccuuggaguugaugucagucac

SEQ ID NO: 28167 - RNA, 24 nt, Artificial Sequence
  Synthetic oligonucleotide: FAS-2290
ucccuuggaguugaugucagucac

SEQ ID NO: 28168 - RNA, 18 nt, Artificial Sequence
  Synthetic oligonucleotide: FAS-2291
aucuagaaaaaaaaauac

SEQ ID NO: 28169 - RNA, 19 nt, Artificial Sequence
  Synthetic oligonucleotide: FAS-2292
caucuagaaaaaaaaauac

SEQ ID NO: 28170 - RNA, 20 nt, Artificial Sequence
  Synthetic oligonucleotide: FAS-327
acaucuagaaaaaaaaauac

SEQ ID NO: 28171 - RNA, 21 nt, Artificial Sequence
  Synthetic oligonucleotide: FAS-2293
cacaucuagaaaaaaaaauac

SEQ ID NO: 28172 - RNA, 22 nt, Artificial Sequence
  Synthetic oligonucleotide: FAS-2294
ucacaucuagaaaaaaaaauac

SEQ ID NO: 28173 - RNA, 23 nt, Artificial Sequence
  Synthetic oligonucleotide: FAS-2295
uucacaucuagaaaaaaaaauac

SEQ ID NO: 28174 - RNA, 24 nt, Artificial Sequence
  Synthetic oligonucleotide: FAS-2296
guucacaucuagaaaaaaaaauac

SEQ ID NO: 28175 - RNA, 18 nt, Artificial Sequence
  Synthetic oligonucleotide: FAS-2297
auguuuuguguaacauac

SEQ ID NO: 28176 - RNA, 19 nt, Artificial Sequence
  Synthetic oligonucleotide: FAS-2298
gauguuuuguguaacauac

SEQ ID NO: 28177 - RNA, 20 nt, Artificial Sequence
  Synthetic oligonucleotide: FAS-147
ggauguuuuguguaacauac

SEQ ID NO: 28178 - RNA, 21 nt, Artificial Sequence
  Synthetic oligonucleotide: FAS-2299
uggauguuuuguguaacauac

SEQ ID NO: 28179 - RNA, 22 nt, Artificial Sequence
  Synthetic oligonucleotide: FAS-2300
cuggauguuuuguguaacauac

SEQ ID NO: 28180 - RNA, 23 nt, Artificial Sequence
  Synthetic oligonucleotide: FAS-2301
ucuggauguuuuguguaacauac

SEQ ID NO: 28181 - RNA, 24 nt, Artificial Sequence
  Synthetic oligonucleotide: FAS-2302
cucuggauguuuuguguaacauac

SEQ ID NO: 28182 - RNA, 18 nt, Artificial Sequence
  Synthetic oligonucleotide: FAS-2303
uguuuuguguaacauacc

SEQ ID NO: 28183 - RNA, 19 nt, Artificial Sequence
  Synthetic oligonucleotide: FAS-2304
auguuuuguguaacauacc

SEQ ID NO: 28184 - RNA, 20 nt, Artificial Sequence
  Synthetic oligonucleotide: FAS-20
gauguuuuguguaacauacc

SEQ ID NO: 28185 - RNA, 21 nt, Artificial Sequence
  Synthetic oligonucleotide: FAS-2305
ggauguuuuguguaacauacc

SEQ ID NO: 28186 - RNA, 22 nt, Artificial Sequence
  Synthetic oligonucleotide: FAS-2306
uggauguuuuguguaacauacc

SEQ ID NO: 28187 - RNA, 23 nt, Artificial Sequence
  Synthetic oligonucleotide: FAS-2307
cuggauguuuuguguaacauacc

SEQ ID NO: 28188 - RNA, 24 nt, Artificial Sequence
  Synthetic oligonucleotide: FAS-2308
ucuggauguuuuguguaacauacc

SEQ ID NO: 28189 - RNA, 18 nt, Artificial Sequence
  Synthetic oligonucleotide: FAS-2309
cuuuccuuucaccugccc

SEQ ID NO: 28190 - RNA, 19 nt, Artificial Sequence
  Synthetic oligonucleotide: FAS-2310
gcuuuccuuucaccugccc

SEQ ID NO: 28191 - RNA, 20 nt, Artificial Sequence
  Synthetic oligonucleotide: FAS-224
agcuuuccuuucaccugccc

SEQ ID NO: 28192 - RNA, 21 nt, Artificial Sequence
  Synthetic oligonucleotide: FAS-2311
uagcuuuccuuucaccugccc

SEQ ID NO: 28193 - RNA, 22 nt, Artificial Sequence
  Synthetic oligonucleotide: FAS-2312
cuagcuuuccuuucaccugccc

SEQ ID NO: 28194 - RNA, 23 nt, Artificial Sequence
  Synthetic oligonucleotide: FAS-2313
ccuagcuuuccuuucaccugccc

SEQ ID NO: 28195 - RNA, 24 nt, Artificial Sequence
  Synthetic oligonucleotide: FAS-2314
cccuagcuuuccuuucaccugccc

SEQ ID NO: 28196 - RNA, 18 nt, Artificial Sequence
  Synthetic oligonucleotide: FAS-2315
uuccucaauuccaauccc

SEQ ID NO: 28197 - RNA, 19 nt, Artificial Sequence
  Synthetic oligonucleotide: FAS-2316
cuuccucaauuccaauccc

SEQ ID NO: 28198 - RNA, 20 nt, Artificial Sequence
  Synthetic oligonucleotide: FAS-153
ucuuccucaauuccaauccc

SEQ ID NO: 28199 - RNA, 21 nt, Artificial Sequence
  Synthetic oligonucleotide: FAS-2317
gucuuccucaauuccaauccc

SEQ ID NO: 28200 - RNA, 22 nt, Artificial Sequence
  Synthetic oligonucleotide: FAS-2318
agucuuccucaauuccaauccc

SEQ ID NO: 28201 - RNA, 23 nt, Artificial Sequence
  Synthetic oligonucleotide: FAS-2319
cagucuuccucaauuccaauccc

SEQ ID NO: 28202 - RNA, 24 nt, Artificial Sequence
  Synthetic oligonucleotide: FAS-2320
acagucuuccucaauuccaauccc

SEQ ID NO: 28203 - RNA, 18 nt, Artificial Sequence
  Synthetic oligonucleotide: FAS-2321
uauuuccacuucuaagcc

SEQ ID NO: 28204 - RNA, 19 nt, Artificial Sequence
  Synthetic oligonucleotide: FAS-2322
uuauuuccacuucuaagcc

SEQ ID NO: 28205 - RNA, 20 nt, Artificial Sequence
  Synthetic oligonucleotide: FAS-529
uuuauuuccacuucuaagcc

SEQ ID NO: 28206 - RNA, 21 nt, Artificial Sequence
  Synthetic oligonucleotide: FAS-2323
guuuauuuccacuucuaagcc

SEQ ID NO: 28207 - RNA, 22 nt, Artificial Sequence
  Synthetic oligonucleotide: FAS-2324
aguuuauuuccacuucuaagcc

SEQ ID NO: 28208 - RNA, 23 nt, Artificial Sequence
  Synthetic oligonucleotide: FAS-2325
caguuuauuuccacuucuaagcc

SEQ ID NO: 28209 - RNA, 24 nt, Artificial Sequence
  Synthetic oligonucleotide: FAS-2326
gcaguuuauuuccacuucuaagcc

SEQ ID NO: 28210 - RNA, 18 nt, Artificial Sequence
  Synthetic oligonucleotide: FAS-2327
aaccuguaaaauaaaagc

SEQ ID NO: 28211 - RNA, 19 nt, Artificial Sequence
  Synthetic oligonucleotide: FAS-2328
gaaccuguaaaauaaaagc

SEQ ID NO: 28212 - RNA, 20 nt, Artificial Sequence
  Synthetic oligonucleotide: FAS-158
agaaccuguaaaauaaaagc

SEQ ID NO: 28213 - RNA, 21 nt, Artificial Sequence
  Synthetic oligonucleotide: FAS-2329
aagaaccuguaaaauaaaagc

SEQ ID NO: 28214 - RNA, 22 nt, Artificial Sequence
  Synthetic oligonucleotide: FAS-2330
uaagaaccuguaaaauaaaagc

SEQ ID NO: 28215 - RNA, 23 nt, Artificial Sequence
  Synthetic oligonucleotide: FAS-2331
guaagaaccuguaaaauaaaagc

SEQ ID NO: 28216 - RNA, 24 nt, Artificial Sequence
  Synthetic oligonucleotide: FAS-2332
cguaagaaccuguaaaauaaaagc

SEQ ID NO: 28217 - RNA, 18 nt, Artificial Sequence
  Synthetic oligonucleotide: FAS-2333
ugauuccauguucacauc

SEQ ID NO: 28218 - RNA, 19 nt, Artificial Sequence
  Synthetic oligonucleotide: FAS-2334
augauuccauguucacauc

SEQ ID NO: 28219 - RNA, 20 nt, Artificial Sequence
  Synthetic oligonucleotide: FAS-521
gaugauuccauguucacauc

SEQ ID NO: 28220 - RNA, 21 nt, Artificial Sequence
  Synthetic oligonucleotide: FAS-2335
ugaugauuccauguucacauc

SEQ ID NO: 28221 - RNA, 22 nt, Artificial Sequence
  Synthetic oligonucleotide: FAS-2336
uugaugauuccauguucacauc

SEQ ID NO: 28222 - RNA, 23 nt, Artificial Sequence
  Synthetic oligonucleotide: FAS-2337
cuugaugauuccauguucacauc

SEQ ID NO: 28223 - RNA, 24 nt, Artificial Sequence
  Synthetic oligonucleotide: FAS-2338
ccuugaugauuccauguucacauc

SEQ ID NO: 28224 - RNA, 18 nt, Artificial Sequence
  Synthetic oligonucleotide: FAS-2339
cuagaaaaaaaaauacag

SEQ ID NO: 28225 - RNA, 19 nt, Artificial Sequence
  Synthetic oligonucleotide: FAS-2340
ucuagaaaaaaaaauacag

SEQ ID NO: 28226 - RNA, 20 nt, Artificial Sequence
  Synthetic oligonucleotide: FAS-524
aucuagaaaaaaaaauacag

SEQ ID NO: 28227 - RNA, 21 nt, Artificial Sequence
  Synthetic oligonucleotide: FAS-2341
caucuagaaaaaaaaauacag

SEQ ID NO: 28228 - RNA, 22 nt, Artificial Sequence
  Synthetic oligonucleotide: FAS-2342
acaucuagaaaaaaaaauacag

SEQ ID NO: 28229 - RNA, 23 nt, Artificial Sequence
  Synthetic oligonucleotide: FAS-2343
cacaucuagaaaaaaaaauacag

SEQ ID NO: 28230 - RNA, 24 nt, Artificial Sequence
  Synthetic oligonucleotide: FAS-2344
ucacaucuagaaaaaaaaauacag

SEQ ID NO: 28231 - RNA, 18 nt, Artificial Sequence
  Synthetic oligonucleotide: FAS-2345
gagagggcucaccagagg

SEQ ID NO: 28232 - RNA, 19 nt, Artificial Sequence
  Synthetic oligonucleotide: FAS-2346
ggagagggcucaccagagg

SEQ ID NO: 28233 - RNA, 20 nt, Artificial Sequence
  Synthetic oligonucleotide: FAS-104
aggagagggcucaccagagg

SEQ ID NO: 28234 - RNA, 21 nt, Artificial Sequence
  Synthetic oligonucleotide: FAS-2347
caggagagggcucaccagagg

SEQ ID NO: 28235 - RNA, 22 nt, Artificial Sequence
  Synthetic oligonucleotide: FAS-2348
gcaggagagggcucaccagagg

SEQ ID NO: 28236 - RNA, 23 nt, Artificial Sequence
  Synthetic oligonucleotide: FAS-2349
ggcaggagagggcucaccagagg

SEQ ID NO: 28237 - RNA, 24 nt, Artificial Sequence
  Synthetic oligonucleotide: FAS-2350
gggcaggagagggcucaccagagg

SEQ ID NO: 28238 - RNA, 18 nt, Artificial Sequence
  Synthetic oligonucleotide: FAS-2351
uacuccuucccuucuugg

SEQ ID NO: 28239 - RNA, 19 nt, Artificial Sequence
  Synthetic oligonucleotide: FAS-2352
guacuccuucccuucuugg

SEQ ID NO: 28240 - RNA, 20 nt, Artificial Sequence
  Synthetic oligonucleotide: FAS-223
uguacuccuucccuucuugg

SEQ ID NO: 28241 - RNA, 21 nt, Artificial Sequence
  Synthetic oligonucleotide: FAS-2353
guguacuccuucccuucuugg

SEQ ID NO: 28242 - RNA, 22 nt, Artificial Sequence
  Synthetic oligonucleotide: FAS-2354
uguguacuccuucccuucuugg

SEQ ID NO: 28243 - RNA, 23 nt, Artificial Sequence
  Synthetic oligonucleotide: FAS-2355
cuguguacuccuucccuucuugg

SEQ ID NO: 28244 - RNA, 24 nt, Artificial Sequence
  Synthetic oligonucleotide: FAS-2356
ucuguguacuccuucccuucuugg

SEQ ID NO: 28245 - RNA, 18 nt, Artificial Sequence
  Synthetic oligonucleotide: FAS-2357
uacaucuucugcauuugg

SEQ ID NO: 28246 - RNA, 19 nt, Artificial Sequence
  Synthetic oligonucleotide: FAS-2358
cuacaucuucugcauuugg

SEQ ID NO: 28247 - RNA, 20 nt, Artificial Sequence
  Synthetic oligonucleotide: FAS-221
ucuacaucuucugcauuugg

SEQ ID NO: 28248 - RNA, 21 nt, Artificial Sequence
  Synthetic oligonucleotide: FAS-2359
aucuacaucuucugcauuugg

SEQ ID NO: 28249 - RNA, 22 nt, Artificial Sequence
  Synthetic oligonucleotide: FAS-2360
aaucuacaucuucugcauuugg

SEQ ID NO: 28250 - RNA, 23 nt, Artificial Sequence
  Synthetic oligonucleotide: FAS-2361
caaucuacaucuucugcauuugg

SEQ ID NO: 28251 - RNA, 24 nt, Artificial Sequence
  Synthetic oligonucleotide: FAS-2362
acaaucuacaucuucugcauuugg

SEQ ID NO: 28252 - RNA, 18 nt, Artificial Sequence
  Synthetic oligonucleotide: FAS-2363
cuguaaaauaaaagcaug

SEQ ID NO: 28253 - RNA, 19 nt, Artificial Sequence
  Synthetic oligonucleotide: FAS-2364
ccuguaaaauaaaagcaug

SEQ ID NO: 28254 - RNA, 20 nt, Artificial Sequence
  Synthetic oligonucleotide: FAS-159
accuguaaaauaaaagcaug

SEQ ID NO: 28255 - RNA, 21 nt, Artificial Sequence
  Synthetic oligonucleotide: FAS-2365
aaccuguaaaauaaaagcaug

SEQ ID NO: 28256 - RNA, 22 nt, Artificial Sequence
  Synthetic oligonucleotide: FAS-2366
gaaccuguaaaauaaaagcaug

SEQ ID NO: 28257 - RNA, 23 nt, Artificial Sequence
  Synthetic oligonucleotide: FAS-2367
agaaccuguaaaauaaaagcaug

SEQ ID NO: 28258 - RNA, 24 nt, Artificial Sequence
  Synthetic oligonucleotide: FAS-2368
aagaaccuguaaaauaaaagcaug

SEQ ID NO: 28259 - RNA, 18 nt, Artificial Sequence
  Synthetic oligonucleotide: FAS-2369
uuuuguguaacauaccug

SEQ ID NO: 28260 - RNA, 19 nt, Artificial Sequence
  Synthetic oligonucleotide: FAS-2370
guuuuguguaacauaccug

SEQ ID NO: 28261 - RNA, 20 nt, Artificial Sequence
  Synthetic oligonucleotide: FAS-149
uguuuuguguaacauaccug

SEQ ID NO: 28262 - RNA, 21 nt, Artificial Sequence
  Synthetic oligonucleotide: FAS-2371
auguuuuguguaacauaccug

SEQ ID NO: 28263 - RNA, 22 nt, Artificial Sequence
  Synthetic oligonucleotide: FAS-2372
gauguuuuguguaacauaccug

SEQ ID NO: 28264 - RNA, 23 nt, Artificial Sequence
  Synthetic oligonucleotide: FAS-2373
ggauguuuuguguaacauaccug

SEQ ID NO: 28265 - RNA, 24 nt, Artificial Sequence
  Synthetic oligonucleotide: FAS-2374
uggauguuuuguguaacauaccug

SEQ ID NO: 28266 - RNA, 18 nt, Artificial Sequence
  Synthetic oligonucleotide: FAS-2375
agaugcccagcaugguug

SEQ ID NO: 28267 - RNA, 19 nt, Artificial Sequence
  Synthetic oligonucleotide: FAS-2376
cagaugcccagcaugguug

SEQ ID NO: 28268 - RNA, 20 nt, Artificial Sequence
  Synthetic oligonucleotide: FAS-107
ccagaugcccagcaugguug

SEQ ID NO: 28269 - RNA, 21 nt, Artificial Sequence
  Synthetic oligonucleotide: FAS-2377
uccagaugcccagcaugguug

SEQ ID NO: 28270 - RNA, 22 nt, Artificial Sequence
  Synthetic oligonucleotide: FAS-2378
guccagaugcccagcaugguug

SEQ ID NO: 28271 - RNA, 23 nt, Artificial Sequence
  Synthetic oligonucleotide: FAS-2379
gguccagaugcccagcaugguug

SEQ ID NO: 28272 - RNA, 24 nt, Artificial Sequence
  Synthetic oligonucleotide: FAS-2380
ggguccagaugcccagcaugguug

SEQ ID NO: 28273 - RNA, 18 nt, Artificial Sequence
  Synthetic oligonucleotide: FAS-2381
aaucuacaucuucugcau

SEQ ID NO: 28274 - RNA, 19 nt, Artificial Sequence
  Synthetic oligonucleotide: FAS-2382
caaucuacaucuucugcau

SEQ ID NO: 28275 - RNA, 20 nt, Artificial Sequence
  Synthetic oligonucleotide: FAS-219
acaaucuacaucuucugcau

SEQ ID NO: 28276 - RNA, 21 nt, Artificial Sequence
  Synthetic oligonucleotide: FAS-2383
cacaaucuacaucuucugcau

SEQ ID NO: 28277 - RNA, 22 nt, Artificial Sequence
  Synthetic oligonucleotide: FAS-2384
acacaaucuacaucuucugcau

SEQ ID NO: 28278 - RNA, 23 nt, Artificial Sequence
  Synthetic oligonucleotide: FAS-2385
cacacaaucuacaucuucugcau

SEQ ID NO: 28279 - RNA, 24 nt, Artificial Sequence
  Synthetic oligonucleotide: FAS-2386
ucacacaaucuacaucuucugcau

SEQ ID NO: 28280 - RNA, 18 nt, Artificial Sequence
  Synthetic oligonucleotide: FAS-2387
ugguuguugagcaauccu

SEQ ID NO: 28281 - RNA, 19 nt, Artificial Sequence
  Synthetic oligonucleotide: FAS-2388
augguuguugagcaauccu

SEQ ID NO: 28282 - RNA, 20 nt, Artificial Sequence
  Synthetic oligonucleotide: FAS-1171
caugguuguugagcaauccu

SEQ ID NO: 28283 - RNA, 21 nt, Artificial Sequence
  Synthetic oligonucleotide: FAS-2389
gcaugguuguugagcaauccu

SEQ ID NO: 28284 - RNA, 22 nt, Artificial Sequence
  Synthetic oligonucleotide: FAS-2390
agcaugguuguugagcaauccu

SEQ ID NO: 28285 - RNA, 23 nt, Artificial Sequence
  Synthetic oligonucleotide: FAS-2391
cagcaugguuguugagcaauccu

SEQ ID NO: 28286 - RNA, 24 nt, Artificial Sequence
  Synthetic oligonucleotide: FAS-2392
ccagcaugguuguugagcaauccu

SEQ ID NO: 28287 - RNA, 18 nt, Artificial Sequence
  Synthetic oligonucleotide: FAS-2393
uaagccuagaaaaucagu

SEQ ID NO: 28288 - RNA, 19 nt, Artificial Sequence
  Synthetic oligonucleotide: FAS-2394
cuaagccuagaaaaucagu

SEQ ID NO: 28289 - RNA, 20 nt, Artificial Sequence
  Synthetic oligonucleotide: FAS-530
ucuaagccuagaaaaucagu

SEQ ID NO: 28290 - RNA, 21 nt, Artificial Sequence
  Synthetic oligonucleotide: FAS-2395
uucuaagccuagaaaaucagu

SEQ ID NO: 28291 - RNA, 22 nt, Artificial Sequence
  Synthetic oligonucleotide: FAS-2396
cuucuaagccuagaaaaucagu

SEQ ID NO: 28292 - RNA, 23 nt, Artificial Sequence
  Synthetic oligonucleotide: FAS-2397
acuucuaagccuagaaaaucagu

SEQ ID NO: 28293 - RNA, 24 nt, Artificial Sequence
  Synthetic oligonucleotide: FAS-2398
cacuucuaagccuagaaaaucagu

SEQ ID NO: 28294 - RNA, 18 nt, Artificial Sequence
  Synthetic oligonucleotide: FAS-2399
uaaucuagcaacagacgu

SEQ ID NO: 28295 - RNA, 19 nt, Artificial Sequence
  Synthetic oligonucleotide: FAS-2400
auaaucuagcaacagacgu

SEQ ID NO: 28296 - RNA, 20 nt, Artificial Sequence
  Synthetic oligonucleotide: FAS-157
gauaaucuagcaacagacgu

SEQ ID NO: 28297 - RNA, 21 nt, Artificial Sequence
  Synthetic oligonucleotide: FAS-2401
cgauaaucuagcaacagacgu

SEQ ID NO: 28298 - RNA, 22 nt, Artificial Sequence
  Synthetic oligonucleotide: FAS-2402
acgauaaucuagcaacagacgu

SEQ ID NO: 28299 - RNA, 23 nt, Artificial Sequence
  Synthetic oligonucleotide: FAS-2403
gacgauaaucuagcaacagacgu

SEQ ID NO: 28300 - RNA, 24 nt, Artificial Sequence
  Synthetic oligonucleotide: FAS-2404
ggacgauaaucuagcaacagacgu

SEQ ID NO: 28301 - RNA, 18 nt, Artificial Sequence
  Synthetic oligonucleotide: FAS-2405
agagggcucaccagaggu

SEQ ID NO: 28302 - RNA, 19 nt, Artificial Sequence
  Synthetic oligonucleotide: FAS-2406
gagagggcucaccagaggu

SEQ ID NO: 28303 - RNA, 20 nt, Artificial Sequence
  Synthetic oligonucleotide: FAS-105
ggagagggcucaccagaggu

SEQ ID NO: 28304 - RNA, 21 nt, Artificial Sequence
  Synthetic oligonucleotide: FAS-2407
aggagagggcucaccagaggu

SEQ ID NO: 28305 - RNA, 22 nt, Artificial Sequence
  Synthetic oligonucleotide: FAS-2408
caggagagggcucaccagaggu

SEQ ID NO: 28306 - RNA, 23 nt, Artificial Sequence
  Synthetic oligonucleotide: FAS-2409
gcaggagagggcucaccagaggu

SEQ ID NO: 28307 - RNA, 24 nt, Artificial Sequence
  Synthetic oligonucleotide: FAS-2410
ggcaggagagggcucaccagaggu

SEQ ID NO: 28308 - RNA, 18 nt, Artificial Sequence
  Synthetic oligonucleotide: FAS-2411
aucuacaucuucugcauu

SEQ ID NO: 28309 - RNA, 19 nt, Artificial Sequence
  Synthetic oligonucleotide: FAS-2412
aaucuacaucuucugcauu

SEQ ID NO: 28310 - RNA, 20 nt, Artificial Sequence
  Synthetic oligonucleotide: FAS-66
caaucuacaucuucugcauu

SEQ ID NO: 28311 - RNA, 21 nt, Artificial Sequence
  Synthetic oligonucleotide: FAS-2413
acaaucuacaucuucugcauu

SEQ ID NO: 28312 - RNA, 22 nt, Artificial Sequence
  Synthetic oligonucleotide: FAS-2414
cacaaucuacaucuucugcauu

SEQ ID NO: 28313 - RNA, 23 nt, Artificial Sequence
  Synthetic oligonucleotide: FAS-2415
acacaaucuacaucuucugcauu

SEQ ID NO: 28314 - RNA, 24 nt, Artificial Sequence
  Synthetic oligonucleotide: FAS-2416
cacacaaucuacaucuucugcauu

SEQ ID NO: 28315 - RNA, 18 nt, Artificial Sequence
  Synthetic oligonucleotide: FAS-2417
acuugggcauuaacacuu

SEQ ID NO: 28316 - RNA, 19 nt, Artificial Sequence
  Synthetic oligonucleotide: FAS-2418
cacuugggcauuaacacuu

SEQ ID NO: 28317 - RNA, 20 nt, Artificial Sequence
  Synthetic oligonucleotide: FAS-156
ucacuugggcauuaacacuu

SEQ ID NO: 28318 - RNA, 21 nt, Artificial Sequence
  Synthetic oligonucleotide: FAS-2419
gucacuugggcauuaacacuu

SEQ ID NO: 28319 - RNA, 22 nt, Artificial Sequence
  Synthetic oligonucleotide: FAS-2420
agucacuugggcauuaacacuu

SEQ ID NO: 28320 - RNA, 23 nt, Artificial Sequence
  Synthetic oligonucleotide: FAS-2421
cagucacuugggcauuaacacuu

SEQ ID NO: 28321 - RNA, 24 nt, Artificial Sequence
  Synthetic oligonucleotide: FAS-2422
ucagucacuugggcauuaacacuu

SEQ ID NO: 28322 - RNA, 18 nt, Artificial Sequence
  Synthetic oligonucleotide: FAS-2423
aagccuagaaaaucaguu

SEQ ID NO: 28323 - RNA, 19 nt, Artificial Sequence
  Synthetic oligonucleotide: FAS-2424
uaagccuagaaaaucaguu

SEQ ID NO: 28324 - RNA, 20 nt, Artificial Sequence
  Synthetic oligonucleotide: FAS-337
cuaagccuagaaaaucaguu

SEQ ID NO: 28325 - RNA, 21 nt, Artificial Sequence
  Synthetic oligonucleotide: FAS-2425
ucuaagccuagaaaaucaguu

SEQ ID NO: 28326 - RNA, 22 nt, Artificial Sequence
  Synthetic oligonucleotide: FAS-2426
uucuaagccuagaaaaucaguu

SEQ ID NO: 28327 - RNA, 23 nt, Artificial Sequence
  Synthetic oligonucleotide: FAS-2427
cuucuaagccuagaaaaucaguu

SEQ ID NO: 28328 - RNA, 24 nt, Artificial Sequence
  Synthetic oligonucleotide: FAS-2428
acuucuaagccuagaaaaucaguu

SEQ ID NO: 28329 - RNA, 18 nt, Artificial Sequence
  Synthetic oligonucleotide: FAS-2429
agcaacaccaagugcaaa

SEQ ID NO: 28330 - RNA, 19 nt, Artificial Sequence
  Synthetic oligonucleotide: FAS-2430
cagcaacaccaagugcaaa

SEQ ID NO: 28331 - RNA, 20 nt, Artificial Sequence
  Synthetic oligonucleotide: FAS-379
ccagcaacaccaagugcaaa

SEQ ID NO: 28332 - RNA, 21 nt, Artificial Sequence
  Synthetic oligonucleotide: FAS-2431
accagcaacaccaagugcaaa

SEQ ID NO: 28333 - RNA, 22 nt, Artificial Sequence
  Synthetic oligonucleotide: FAS-2432
caccagcaacaccaagugcaaa

SEQ ID NO: 28334 - RNA, 23 nt, Artificial Sequence
  Synthetic oligonucleotide: FAS-2433
ucaccagcaacaccaagugcaaa

SEQ ID NO: 28335 - RNA, 24 nt, Artificial Sequence
  Synthetic oligonucleotide: FAS-2434
cucaccagcaacaccaagugcaaa

SEQ ID NO: 28336 - RNA, 18 nt, Artificial Sequence
  Synthetic oligonucleotide: FAS-2435
aagagucuuaaaaugcaa

SEQ ID NO: 28337 - RNA, 19 nt, Artificial Sequence
  Synthetic oligonucleotide: FAS-2436
uaagagucuuaaaaugcaa

SEQ ID NO: 28338 - RNA, 20 nt, Artificial Sequence
  Synthetic oligonucleotide: FAS-195
guaagagucuuaaaaugcaa

SEQ ID NO: 28339 - RNA, 21 nt, Artificial Sequence
  Synthetic oligonucleotide: FAS-2437
gguaagagucuuaaaaugcaa

SEQ ID NO: 28340 - RNA, 22 nt, Artificial Sequence
  Synthetic oligonucleotide: FAS-2438
ugguaagagucuuaaaaugcaa

SEQ ID NO: 28341 - RNA, 23 nt, Artificial Sequence
  Synthetic oligonucleotide: FAS-2439
augguaagagucuuaaaaugcaa

SEQ ID NO: 28342 - RNA, 24 nt, Artificial Sequence
  Synthetic oligonucleotide: FAS-2440
caugguaagagucuuaaaaugcaa

SEQ ID NO: 28343 - RNA, 18 nt, Artificial Sequence
  Synthetic oligonucleotide: FAS-2441
uagggacugcacagucaa

SEQ ID NO: 28344 - RNA, 19 nt, Artificial Sequence
  Synthetic oligonucleotide: FAS-2442
cuagggacugcacagucaa

SEQ ID NO: 28345 - RNA, 20 nt, Artificial Sequence
  Synthetic oligonucleotide: FAS-57
gcuagggacugcacagucaa

SEQ ID NO: 28346 - RNA, 21 nt, Artificial Sequence
  Synthetic oligonucleotide: FAS-2443
agcuagggacugcacagucaa

SEQ ID NO: 28347 - RNA, 22 nt, Artificial Sequence
  Synthetic oligonucleotide: FAS-2444
aagcuagggacugcacagucaa

SEQ ID NO: 28348 - RNA, 23 nt, Artificial Sequence
  Synthetic oligonucleotide: FAS-2445
aaagcuagggacugcacagucaa

SEQ ID NO: 28349 - RNA, 24 nt, Artificial Sequence
  Synthetic oligonucleotide: FAS-2446
gaaagcuagggacugcacagucaa

SEQ ID NO: 28350 - RNA, 18 nt, Artificial Sequence
  Synthetic oligonucleotide: FAS-2447
ugcgugcccugccaagaa

SEQ ID NO: 28351 - RNA, 19 nt, Artificial Sequence
  Synthetic oligonucleotide: FAS-2448
cugcgugcccugccaagaa

SEQ ID NO: 28352 - RNA, 20 nt, Artificial Sequence
  Synthetic oligonucleotide: FAS-61
acugcgugcccugccaagaa

SEQ ID NO: 28353 - RNA, 21 nt, Artificial Sequence
  Synthetic oligonucleotide: FAS-2449
gacugcgugcccugccaagaa

SEQ ID NO: 28354 - RNA, 22 nt, Artificial Sequence
  Synthetic oligonucleotide: FAS-2450
agacugcgugcccugccaagaa

SEQ ID NO: 28355 - RNA, 23 nt, Artificial Sequence
  Synthetic oligonucleotide: FAS-2451
cagacugcgugcccugccaagaa

SEQ ID NO: 28356 - RNA, 24 nt, Artificial Sequence
  Synthetic oligonucleotide: FAS-2452
ccagacugcgugcccugccaagaa

SEQ ID NO: 28357 - RNA, 18 nt, Artificial Sequence
  Synthetic oligonucleotide: FAS-2453
gauuuucuaggcuuagaa

SEQ ID NO: 28358 - RNA, 19 nt, Artificial Sequence
  Synthetic oligonucleotide: FAS-2454
ugauuuucuaggcuuagaa

SEQ ID NO: 28359 - RNA, 20 nt, Artificial Sequence
  Synthetic oligonucleotide: FAS-368
cugauuuucuaggcuuagaa

SEQ ID NO: 28360 - RNA, 21 nt, Artificial Sequence
  Synthetic oligonucleotide: FAS-2455
acugauuuucuaggcuuagaa

SEQ ID NO: 28361 - RNA, 22 nt, Artificial Sequence
  Synthetic oligonucleotide: FAS-2456
aacugauuuucuaggcuuagaa

SEQ ID NO: 28362 - RNA, 23 nt, Artificial Sequence
  Synthetic oligonucleotide: FAS-2457
aaacugauuuucuaggcuuagaa

SEQ ID NO: 28363 - RNA, 24 nt, Artificial Sequence
  Synthetic oligonucleotide: FAS-2458
caaacugauuuucuaggcuuagaa

SEQ ID NO: 28364 - RNA, 18 nt, Artificial Sequence
  Synthetic oligonucleotide: FAS-2459
aacuccaagggauuggaa

SEQ ID NO: 28365 - RNA, 19 nt, Artificial Sequence
  Synthetic oligonucleotide: FAS-2460
caacuccaagggauuggaa

SEQ ID NO: 28366 - RNA, 20 nt, Artificial Sequence
  Synthetic oligonucleotide: FAS-127
ucaacuccaagggauuggaa

SEQ ID NO: 28367 - RNA, 21 nt, Artificial Sequence
  Synthetic oligonucleotide: FAS-2461
aucaacuccaagggauuggaa

SEQ ID NO: 28368 - RNA, 22 nt, Artificial Sequence
  Synthetic oligonucleotide: FAS-2462
caucaacuccaagggauuggaa

SEQ ID NO: 28369 - RNA, 23 nt, Artificial Sequence
  Synthetic oligonucleotide: FAS-2463
acaucaacuccaagggauuggaa

SEQ ID NO: 28370 - RNA, 24 nt, Artificial Sequence
  Synthetic oligonucleotide: FAS-2464
gacaucaacuccaagggauuggaa

SEQ ID NO: 28371 - RNA, 18 nt, Artificial Sequence
  Synthetic oligonucleotide: FAS-2465
uuuccuugggcaggugaa

SEQ ID NO: 28372 - RNA, 19 nt, Artificial Sequence
  Synthetic oligonucleotide: FAS-2466
uuuuccuugggcaggugaa

SEQ ID NO: 28373 - RNA, 20 nt, Artificial Sequence
  Synthetic oligonucleotide: FAS-54
uuuuuccuugggcaggugaa

SEQ ID NO: 28374 - RNA, 21 nt, Artificial Sequence
  Synthetic oligonucleotide: FAS-2467
uuuuuuccuugggcaggugaa

SEQ ID NO: 28375 - RNA, 22 nt, Artificial Sequence
  Synthetic oligonucleotide: FAS-2468
cuuuuuuccuugggcaggugaa

SEQ ID NO: 28376 - RNA, 23 nt, Artificial Sequence
  Synthetic oligonucleotide: FAS-2469
ccuuuuuuccuugggcaggugaa

SEQ ID NO: 28377 - RNA, 24 nt, Artificial Sequence
  Synthetic oligonucleotide: FAS-2470
uccuuuuuuccuugggcaggugaa

SEQ ID NO: 28378 - RNA, 18 nt, Artificial Sequence
  Synthetic oligonucleotide: FAS-2471
ccagcaacaccaagugca

SEQ ID NO: 28379 - RNA, 19 nt, Artificial Sequence
  Synthetic oligonucleotide: FAS-2472
accagcaacaccaagugca

SEQ ID NO: 28380 - RNA, 20 nt, Artificial Sequence
  Synthetic oligonucleotide: FAS-378
caccagcaacaccaagugca

SEQ ID NO: 28381 - RNA, 21 nt, Artificial Sequence
  Synthetic oligonucleotide: FAS-2473
ucaccagcaacaccaagugca

SEQ ID NO: 28382 - RNA, 22 nt, Artificial Sequence
  Synthetic oligonucleotide: FAS-2474
cucaccagcaacaccaagugca

SEQ ID NO: 28383 - RNA, 23 nt, Artificial Sequence
  Synthetic oligonucleotide: FAS-2475
acucaccagcaacaccaagugca

SEQ ID NO: 28384 - RNA, 24 nt, Artificial Sequence
  Synthetic oligonucleotide: FAS-2476
cacucaccagcaacaccaagugca

SEQ ID NO: 28385 - RNA, 18 nt, Artificial Sequence
  Synthetic oligonucleotide: FAS-2477
cuagggacugcacaguca

SEQ ID NO: 28386 - RNA, 19 nt, Artificial Sequence
  Synthetic oligonucleotide: FAS-2478
gcuagggacugcacaguca

SEQ ID NO: 28387 - RNA, 20 nt, Artificial Sequence
  Synthetic oligonucleotide: FAS-181
agcuagggacugcacaguca

SEQ ID NO: 28388 - RNA, 21 nt, Artificial Sequence
  Synthetic oligonucleotide: FAS-2479
aagcuagggacugcacaguca

SEQ ID NO: 28389 - RNA, 22 nt, Artificial Sequence
  Synthetic oligonucleotide: FAS-2480
aaagcuagggacugcacaguca

SEQ ID NO: 28390 - RNA, 23 nt, Artificial Sequence
  Synthetic oligonucleotide: FAS-2481
gaaagcuagggacugcacaguca

SEQ ID NO: 28391 - RNA, 24 nt, Artificial Sequence
  Synthetic oligonucleotide: FAS-2482
ggaaagcuagggacugcacaguca

SEQ ID NO: 28392 - RNA, 18 nt, Artificial Sequence
  Synthetic oligonucleotide: FAS-2483
cugcgugcccugccaaga

SEQ ID NO: 28393 - RNA, 19 nt, Artificial Sequence
  Synthetic oligonucleotide: FAS-2484
acugcgugcccugccaaga

SEQ ID NO: 28394 - RNA, 20 nt, Artificial Sequence
  Synthetic oligonucleotide: FAS-60
gacugcgugcccugccaaga

SEQ ID NO: 28395 - RNA, 21 nt, Artificial Sequence
  Synthetic oligonucleotide: FAS-2485
agacugcgugcccugccaaga

SEQ ID NO: 28396 - RNA, 22 nt, Artificial Sequence
  Synthetic oligonucleotide: FAS-2486
cagacugcgugcccugccaaga

SEQ ID NO: 28397 - RNA, 23 nt, Artificial Sequence
  Synthetic oligonucleotide: FAS-2487
ccagacugcgugcccugccaaga

SEQ ID NO: 28398 - RNA, 24 nt, Artificial Sequence
  Synthetic oligonucleotide: FAS-2488
accagacugcgugcccugccaaga

SEQ ID NO: 28399 - RNA, 18 nt, Artificial Sequence
  Synthetic oligonucleotide: FAS-2489
gacaucaacuccaaggga

SEQ ID NO: 28400 - RNA, 19 nt, Artificial Sequence
  Synthetic oligonucleotide: FAS-2490
ugacaucaacuccaaggga

SEQ ID NO: 28401 - RNA, 20 nt, Artificial Sequence
  Synthetic oligonucleotide: FAS-125
cugacaucaacuccaaggga

SEQ ID NO: 28402 - RNA, 21 nt, Artificial Sequence
  Synthetic oligonucleotide: FAS-2491
acugacaucaacuccaaggga

SEQ ID NO: 28403 - RNA, 22 nt, Artificial Sequence
  Synthetic oligonucleotide: FAS-2492
gacugacaucaacuccaaggga

SEQ ID NO: 28404 - RNA, 23 nt, Artificial Sequence
  Synthetic oligonucleotide: FAS-2493
ugacugacaucaacuccaaggga

SEQ ID NO: 28405 - RNA, 24 nt, Artificial Sequence
  Synthetic oligonucleotide: FAS-2494
gugacugacaucaacuccaaggga

SEQ ID NO: 28406 - RNA, 18 nt, Artificial Sequence
  Synthetic oligonucleotide: FAS-2495
uuuuccuugggcagguga

SEQ ID NO: 28407 - RNA, 19 nt, Artificial Sequence
  Synthetic oligonucleotide: FAS-2496
uuuuuccuugggcagguga

SEQ ID NO: 28408 - RNA, 20 nt, Artificial Sequence
  Synthetic oligonucleotide: FAS-177
uuuuuuccuugggcagguga

SEQ ID NO: 28409 - RNA, 21 nt, Artificial Sequence
  Synthetic oligonucleotide: FAS-2497
cuuuuuuccuugggcagguga

SEQ ID NO: 28410 - RNA, 22 nt, Artificial Sequence
  Synthetic oligonucleotide: FAS-2498
ccuuuuuuccuugggcagguga

SEQ ID NO: 28411 - RNA, 23 nt, Artificial Sequence
  Synthetic oligonucleotide: FAS-2499
uccuuuuuuccuugggcagguga

SEQ ID NO: 28412 - RNA, 24 nt, Artificial Sequence
  Synthetic oligonucleotide: FAS-2500
cuccuuuuuuccuugggcagguga

SEQ ID NO: 28413 - RNA, 18 nt, Artificial Sequence
  Synthetic oligonucleotide: FAS-2501
gucuuaaaaugcaauuga

SEQ ID NO: 28414 - RNA, 19 nt, Artificial Sequence
  Synthetic oligonucleotide: FAS-2502
agucuuaaaaugcaauuga

SEQ ID NO: 28415 - RNA, 20 nt, Artificial Sequence
  Synthetic oligonucleotide: FAS-196
gagucuuaaaaugcaauuga

SEQ ID NO: 28416 - RNA, 21 nt, Artificial Sequence
  Synthetic oligonucleotide: FAS-2503
agagucuuaaaaugcaauuga

SEQ ID NO: 28417 - RNA, 22 nt, Artificial Sequence
  Synthetic oligonucleotide: FAS-2504
aagagucuuaaaaugcaauuga

SEQ ID NO: 28418 - RNA, 23 nt, Artificial Sequence
  Synthetic oligonucleotide: FAS-2505
uaagagucuuaaaaugcaauuga

SEQ ID NO: 28419 - RNA, 24 nt, Artificial Sequence
  Synthetic oligonucleotide: FAS-2506
guaagagucuuaaaaugcaauuga

SEQ ID NO: 28420 - RNA, 18 nt, Artificial Sequence
  Synthetic oligonucleotide: FAS-2507
acaguugagacucagaac

SEQ ID NO: 28421 - RNA, 19 nt, Artificial Sequence
  Synthetic oligonucleotide: FAS-2508
uacaguugagacucagaac

SEQ ID NO: 28422 - RNA, 20 nt, Artificial Sequence
  Synthetic oligonucleotide: FAS-132
cuacaguugagacucagaac

SEQ ID NO: 28423 - RNA, 21 nt, Artificial Sequence
  Synthetic oligonucleotide: FAS-2509
acuacaguugagacucagaac

SEQ ID NO: 28424 - RNA, 22 nt, Artificial Sequence
  Synthetic oligonucleotide: FAS-2510
uacuacaguugagacucagaac

SEQ ID NO: 28425 - RNA, 23 nt, Artificial Sequence
  Synthetic oligonucleotide: FAS-2511
uuacuacaguugagacucagaac

SEQ ID NO: 28426 - RNA, 24 nt, Artificial Sequence
  Synthetic oligonucleotide: FAS-2512
guuacuacaguugagacucagaac

SEQ ID NO: 28427 - RNA, 18 nt, Artificial Sequence
  Synthetic oligonucleotide: FAS-2513
uuuuuucuagaugugaac

SEQ ID NO: 28428 - RNA, 19 nt, Artificial Sequence
  Synthetic oligonucleotide: FAS-2514
uuuuuuucuagaugugaac

SEQ ID NO: 28429 - RNA, 20 nt, Artificial Sequence
  Synthetic oligonucleotide: FAS-374
uuuuuuuucuagaugugaac

SEQ ID NO: 28430 - RNA, 21 nt, Artificial Sequence
  Synthetic oligonucleotide: FAS-2515
uuuuuuuuucuagaugugaac

SEQ ID NO: 28431 - RNA, 22 nt, Artificial Sequence
  Synthetic oligonucleotide: FAS-2516
auuuuuuuuucuagaugugaac

SEQ ID NO: 28432 - RNA, 23 nt, Artificial Sequence
  Synthetic oligonucleotide: FAS-2517
uauuuuuuuuucuagaugugaac

SEQ ID NO: 28433 - RNA, 24 nt, Artificial Sequence
  Synthetic oligonucleotide: FAS-2518
guauuuuuuuuucuagaugugaac

SEQ ID NO: 28434 - RNA, 18 nt, Artificial Sequence
  Synthetic oligonucleotide: FAS-2519
aguggaaauaaacugcac

SEQ ID NO: 28435 - RNA, 19 nt, Artificial Sequence
  Synthetic oligonucleotide: FAS-2520
aaguggaaauaaacugcac

SEQ ID NO: 28436 - RNA, 20 nt, Artificial Sequence
  Synthetic oligonucleotide: FAS-370
gaaguggaaauaaacugcac

SEQ ID NO: 28437 - RNA, 21 nt, Artificial Sequence
  Synthetic oligonucleotide: FAS-2521
agaaguggaaauaaacugcac

SEQ ID NO: 28438 - RNA, 22 nt, Artificial Sequence
  Synthetic oligonucleotide: FAS-2522
uagaaguggaaauaaacugcac

SEQ ID NO: 28439 - RNA, 23 nt, Artificial Sequence
  Synthetic oligonucleotide: FAS-2523
uuagaaguggaaauaaacugcac

SEQ ID NO: 28440 - RNA, 24 nt, Artificial Sequence
  Synthetic oligonucleotide: FAS-2524
cuuagaaguggaaauaaacugcac

SEQ ID NO: 28441 - RNA, 18 nt, Artificial Sequence
  Synthetic oligonucleotide: FAS-2525
cagacugcgugcccugcc

SEQ ID NO: 28442 - RNA, 19 nt, Artificial Sequence
  Synthetic oligonucleotide: FAS-2526
ccagacugcgugcccugcc

SEQ ID NO: 28443 - RNA, 20 nt, Artificial Sequence
  Synthetic oligonucleotide: FAS-185
accagacugcgugcccugcc

SEQ ID NO: 28444 - RNA, 21 nt, Artificial Sequence
  Synthetic oligonucleotide: FAS-2527
aaccagacugcgugcccugcc

SEQ ID NO: 28445 - RNA, 22 nt, Artificial Sequence
  Synthetic oligonucleotide: FAS-2528
gaaccagacugcgugcccugcc

SEQ ID NO: 28446 - RNA, 23 nt, Artificial Sequence
  Synthetic oligonucleotide: FAS-2529
ugaaccagacugcgugcccugcc

SEQ ID NO: 28447 - RNA, 24 nt, Artificial Sequence
  Synthetic oligonucleotide: FAS-2530
augaaccagacugcgugcccugcc

SEQ ID NO: 28448 - RNA, 18 nt, Artificial Sequence
  Synthetic oligonucleotide: FAS-2531
gugacugacaucaacucc

SEQ ID NO: 28449 - RNA, 19 nt, Artificial Sequence
  Synthetic oligonucleotide: FAS-2532
agugacugacaucaacucc

SEQ ID NO: 28450 - RNA, 20 nt, Artificial Sequence
  Synthetic oligonucleotide: FAS-123
aagugacugacaucaacucc

SEQ ID NO: 28451 - RNA, 21 nt, Artificial Sequence
  Synthetic oligonucleotide: FAS-2533
caagugacugacaucaacucc

SEQ ID NO: 28452 - RNA, 22 nt, Artificial Sequence
  Synthetic oligonucleotide: FAS-2534
ccaagugacugacaucaacucc

SEQ ID NO: 28453 - RNA, 23 nt, Artificial Sequence
  Synthetic oligonucleotide: FAS-2535
cccaagugacugacaucaacucc

SEQ ID NO: 28454 - RNA, 24 nt, Artificial Sequence
  Synthetic oligonucleotide: FAS-2536
gcccaagugacugacaucaacucc

SEQ ID NO: 28455 - RNA, 18 nt, Artificial Sequence
  Synthetic oligonucleotide: FAS-2537
cacuugcuccuuuuuucc

SEQ ID NO: 28456 - RNA, 19 nt, Artificial Sequence
  Synthetic oligonucleotide: FAS-2538
acacuugcuccuuuuuucc

SEQ ID NO: 28457 - RNA, 20 nt, Artificial Sequence
  Synthetic oligonucleotide: FAS-175
aacacuugcuccuuuuuucc

SEQ ID NO: 28458 - RNA, 18 nt, Artificial Sequence
  Synthetic oligonucleotide: FAS-2539
ggcaggugaaaggaaagc

SEQ ID NO: 28459 - RNA, 19 nt, Artificial Sequence
  Synthetic oligonucleotide: FAS-2540
gggcaggugaaaggaaagc

SEQ ID NO: 28460 - RNA, 20 nt, Artificial Sequence
  Synthetic oligonucleotide: FAS-179
ugggcaggugaaaggaaagc

SEQ ID NO: 28461 - RNA, 21 nt, Artificial Sequence
  Synthetic oligonucleotide: FAS-2541
uugggcaggugaaaggaaagc

SEQ ID NO: 28462 - RNA, 22 nt, Artificial Sequence
  Synthetic oligonucleotide: FAS-2542
cuugggcaggugaaaggaaagc

SEQ ID NO: 28463 - RNA, 23 nt, Artificial Sequence
  Synthetic oligonucleotide: FAS-2543
ccuugggcaggugaaaggaaagc

SEQ ID NO: 28464 - RNA, 24 nt, Artificial Sequence
  Synthetic oligonucleotide: FAS-2544
uccuugggcaggugaaaggaaagc

SEQ ID NO: 28465 - RNA, 18 nt, Artificial Sequence
  Synthetic oligonucleotide: FAS-2545
uauguuacacaaaacauc

SEQ ID NO: 28466 - RNA, 19 nt, Artificial Sequence
  Synthetic oligonucleotide: FAS-2546
guauguuacacaaaacauc

SEQ ID NO: 28467 - RNA, 20 nt, Artificial Sequence
  Synthetic oligonucleotide: FAS-134
gguauguuacacaaaacauc

SEQ ID NO: 28468 - RNA, 21 nt, Artificial Sequence
  Synthetic oligonucleotide: FAS-2547
agguauguuacacaaaacauc

SEQ ID NO: 28469 - RNA, 22 nt, Artificial Sequence
  Synthetic oligonucleotide: FAS-2548
cagguauguuacacaaaacauc

SEQ ID NO: 28470 - RNA, 23 nt, Artificial Sequence
  Synthetic oligonucleotide: FAS-2549
ccagguauguuacacaaaacauc

SEQ ID NO: 28471 - RNA, 24 nt, Artificial Sequence
  Synthetic oligonucleotide: FAS-2550
uccagguauguuacacaaaacauc

SEQ ID NO: 28472 - RNA, 18 nt, Artificial Sequence
  Synthetic oligonucleotide: FAS-2551
ugugaacauggaaucauc

SEQ ID NO: 28473 - RNA, 19 nt, Artificial Sequence
  Synthetic oligonucleotide: FAS-2552
augugaacauggaaucauc

SEQ ID NO: 28474 - RNA, 20 nt, Artificial Sequence
  Synthetic oligonucleotide: FAS-376
gaugugaacauggaaucauc

SEQ ID NO: 28475 - RNA, 21 nt, Artificial Sequence
  Synthetic oligonucleotide: FAS-2553
agaugugaacauggaaucauc

SEQ ID NO: 28476 - RNA, 22 nt, Artificial Sequence
  Synthetic oligonucleotide: FAS-2554
uagaugugaacauggaaucauc

SEQ ID NO: 28477 - RNA, 23 nt, Artificial Sequence
  Synthetic oligonucleotide: FAS-2555
cuagaugugaacauggaaucauc

SEQ ID NO: 28478 - RNA, 24 nt, Artificial Sequence
  Synthetic oligonucleotide: FAS-2556
ucuagaugugaacauggaaucauc

SEQ ID NO: 28479 - RNA, 18 nt, Artificial Sequence
  Synthetic oligonucleotide: FAS-2557
gcaacaccaagugcaaag

SEQ ID NO: 28480 - RNA, 19 nt, Artificial Sequence
  Synthetic oligonucleotide: FAS-2558
agcaacaccaagugcaaag

SEQ ID NO: 28481 - RNA, 20 nt, Artificial Sequence
  Synthetic oligonucleotide: FAS-250
cagcaacaccaagugcaaag

SEQ ID NO: 28482 - RNA, 21 nt, Artificial Sequence
  Synthetic oligonucleotide: FAS-2559
ccagcaacaccaagugcaaag

SEQ ID NO: 28483 - RNA, 22 nt, Artificial Sequence
  Synthetic oligonucleotide: FAS-2560
accagcaacaccaagugcaaag

SEQ ID NO: 28484 - RNA, 23 nt, Artificial Sequence
  Synthetic oligonucleotide: FAS-2561
caccagcaacaccaagugcaaag

SEQ ID NO: 28485 - RNA, 24 nt, Artificial Sequence
  Synthetic oligonucleotide: FAS-2562
ucaccagcaacaccaagugcaaag

SEQ ID NO: 28486 - RNA, 18 nt, Artificial Sequence
  Synthetic oligonucleotide: FAS-2563
acugcgugcccugccaag

SEQ ID NO: 28487 - RNA, 19 nt, Artificial Sequence
  Synthetic oligonucleotide: FAS-2564
gacugcgugcccugccaag

SEQ ID NO: 28488 - RNA, 20 nt, Artificial Sequence
  Synthetic oligonucleotide: FAS-186
agacugcgugcccugccaag

SEQ ID NO: 28489 - RNA, 21 nt, Artificial Sequence
  Synthetic oligonucleotide: FAS-2565
cagacugcgugcccugccaag

SEQ ID NO: 28490 - RNA, 22 nt, Artificial Sequence
  Synthetic oligonucleotide: FAS-2566
ccagacugcgugcccugccaag

SEQ ID NO: 28491 - RNA, 23 nt, Artificial Sequence
  Synthetic oligonucleotide: FAS-2567
accagacugcgugcccugccaag

SEQ ID NO: 28492 - RNA, 24 nt, Artificial Sequence
  Synthetic oligonucleotide: FAS-2568
aaccagacugcgugcccugccaag

SEQ ID NO: 28493 - RNA, 18 nt, Artificial Sequence
  Synthetic oligonucleotide: FAS-2569
auuuucuaggcuuagaag

SEQ ID NO: 28494 - RNA, 19 nt, Artificial Sequence
  Synthetic oligonucleotide: FAS-2570
gauuuucuaggcuuagaag

SEQ ID NO: 28495 - RNA, 20 nt, Artificial Sequence
  Synthetic oligonucleotide: FAS-246
ugauuuucuaggcuuagaag

SEQ ID NO: 28496 - RNA, 21 nt, Artificial Sequence
  Synthetic oligonucleotide: FAS-2571
cugauuuucuaggcuuagaag

SEQ ID NO: 28497 - RNA, 22 nt, Artificial Sequence
  Synthetic oligonucleotide: FAS-2572
acugauuuucuaggcuuagaag

SEQ ID NO: 28498 - RNA, 23 nt, Artificial Sequence
  Synthetic oligonucleotide: FAS-2573
aacugauuuucuaggcuuagaag

SEQ ID NO: 28499 - RNA, 24 nt, Artificial Sequence
  Synthetic oligonucleotide: FAS-2574
aaacugauuuucuaggcuuagaag

SEQ ID NO: 28500 - RNA, 18 nt, Artificial Sequence
  Synthetic oligonucleotide: FAS-2575
ggaagacuguuacuacag

SEQ ID NO: 28501 - RNA, 19 nt, Artificial Sequence
  Synthetic oligonucleotide: FAS-2576
aggaagacuguuacuacag

SEQ ID NO: 28502 - RNA, 20 nt, Artificial Sequence
  Synthetic oligonucleotide: FAS-130
gaggaagacuguuacuacag

SEQ ID NO: 28503 - RNA, 21 nt, Artificial Sequence
  Synthetic oligonucleotide: FAS-2577
ugaggaagacuguuacuacag

SEQ ID NO: 28504 - RNA, 22 nt, Artificial Sequence
  Synthetic oligonucleotide: FAS-2578
uugaggaagacuguuacuacag

SEQ ID NO: 28505 - RNA, 23 nt, Artificial Sequence
  Synthetic oligonucleotide: FAS-2579
auugaggaagacuguuacuacag

SEQ ID NO: 28506 - RNA, 24 nt, Artificial Sequence
  Synthetic oligonucleotide: FAS-2580
aauugaggaagacuguuacuacag

SEQ ID NO: 28507 - RNA, 18 nt, Artificial Sequence
  Synthetic oligonucleotide: FAS-2581
ccuuuuuuccuugggcag

SEQ ID NO: 28508 - RNA, 19 nt, Artificial Sequence
  Synthetic oligonucleotide: FAS-2582
uccuuuuuuccuugggcag

SEQ ID NO: 28509 - RNA, 20 nt, Artificial Sequence
  Synthetic oligonucleotide: FAS-176
cuccuuuuuuccuugggcag

SEQ ID NO: 28510 - RNA, 21 nt, Artificial Sequence
  Synthetic oligonucleotide: FAS-2583
gcuccuuuuuuccuugggcag

SEQ ID NO: 28511 - RNA, 22 nt, Artificial Sequence
  Synthetic oligonucleotide: FAS-2584
ugcuccuuuuuuccuugggcag

SEQ ID NO: 28512 - RNA, 23 nt, Artificial Sequence
  Synthetic oligonucleotide: FAS-2585
uugcuccuuuuuuccuugggcag

SEQ ID NO: 28513 - RNA, 24 nt, Artificial Sequence
  Synthetic oligonucleotide: FAS-2586
cuugcuccuuuuuuccuugggcag

SEQ ID NO: 28514 - RNA, 18 nt, Artificial Sequence
  Synthetic oligonucleotide: FAS-2587
gagcccucuccugcccgg

SEQ ID NO: 28515 - RNA, 19 nt, Artificial Sequence
  Synthetic oligonucleotide: FAS-2588
ugagcccucuccugcccgg

SEQ ID NO: 28516 - RNA, 20 nt, Artificial Sequence
  Synthetic oligonucleotide: FAS-1052
gugagcccucuccugcccgg

SEQ ID NO: 28517 - RNA, 21 nt, Artificial Sequence
  Synthetic oligonucleotide: FAS-2589
ggugagcccucuccugcccgg

SEQ ID NO: 28518 - RNA, 22 nt, Artificial Sequence
  Synthetic oligonucleotide: FAS-2590
uggugagcccucuccugcccgg

SEQ ID NO: 28519 - RNA, 23 nt, Artificial Sequence
  Synthetic oligonucleotide: FAS-2591
cuggugagcccucuccugcccgg

SEQ ID NO: 28520 - RNA, 24 nt, Artificial Sequence
  Synthetic oligonucleotide: FAS-2592
ucuggugagcccucuccugcccgg

SEQ ID NO: 28521 - RNA, 18 nt, Artificial Sequence
  Synthetic oligonucleotide: FAS-2593
gugcccugccaagaaggg

SEQ ID NO: 28522 - RNA, 19 nt, Artificial Sequence
  Synthetic oligonucleotide: FAS-2594
cgugcccugccaagaaggg

SEQ ID NO: 28523 - RNA, 20 nt, Artificial Sequence
  Synthetic oligonucleotide: FAS-189
gcgugcccugccaagaaggg

SEQ ID NO: 28524 - RNA, 21 nt, Artificial Sequence
  Synthetic oligonucleotide: FAS-2595
ugcgugcccugccaagaaggg

SEQ ID NO: 28525 - RNA, 22 nt, Artificial Sequence
  Synthetic oligonucleotide: FAS-2596
cugcgugcccugccaagaaggg

SEQ ID NO: 28526 - RNA, 23 nt, Artificial Sequence
  Synthetic oligonucleotide: FAS-2597
acugcgugcccugccaagaaggg

SEQ ID NO: 28527 - RNA, 24 nt, Artificial Sequence
  Synthetic oligonucleotide: FAS-2598
gacugcgugcccugccaagaaggg

SEQ ID NO: 28528 - RNA, 18 nt, Artificial Sequence
  Synthetic oligonucleotide: FAS-2599
agcccucuccugcccggg

SEQ ID NO: 28529 - RNA, 19 nt, Artificial Sequence
  Synthetic oligonucleotide: FAS-2600
gagcccucuccugcccggg

SEQ ID NO: 28530 - RNA, 20 nt, Artificial Sequence
  Synthetic oligonucleotide: FAS-665
ugagcccucuccugcccggg

SEQ ID NO: 28531 - RNA, 21 nt, Artificial Sequence
  Synthetic oligonucleotide: FAS-2601
gugagcccucuccugcccggg

SEQ ID NO: 28532 - RNA, 22 nt, Artificial Sequence
  Synthetic oligonucleotide: FAS-2602
ggugagcccucuccugcccggg

SEQ ID NO: 28533 - RNA, 23 nt, Artificial Sequence
  Synthetic oligonucleotide: FAS-2603
uggugagcccucuccugcccggg

SEQ ID NO: 28534 - RNA, 24 nt, Artificial Sequence
  Synthetic oligonucleotide: FAS-2604
cuggugagcccucuccugcccggg

SEQ ID NO: 28535 - RNA, 18 nt, Artificial Sequence
  Synthetic oligonucleotide: FAS-2605
acugcacagucaaugggg

SEQ ID NO: 28536 - RNA, 19 nt, Artificial Sequence
  Synthetic oligonucleotide: FAS-2606
gacugcacagucaaugggg

SEQ ID NO: 28537 - RNA, 20 nt, Artificial Sequence
  Synthetic oligonucleotide: FAS-184
ggacugcacagucaaugggg

SEQ ID NO: 28538 - RNA, 21 nt, Artificial Sequence
  Synthetic oligonucleotide: FAS-2607
gggacugcacagucaaugggg

SEQ ID NO: 28539 - RNA, 22 nt, Artificial Sequence
  Synthetic oligonucleotide: FAS-2608
agggacugcacagucaaugggg

SEQ ID NO: 28540 - RNA, 23 nt, Artificial Sequence
  Synthetic oligonucleotide: FAS-2609
uagggacugcacagucaaugggg

SEQ ID NO: 28541 - RNA, 24 nt, Artificial Sequence
  Synthetic oligonucleotide: FAS-2610
cuagggacugcacagucaaugggg

SEQ ID NO: 28542 - RNA, 18 nt, Artificial Sequence
  Synthetic oligonucleotide: FAS-2611
ccauuuuucuuccaaaug

SEQ ID NO: 28543 - RNA, 19 nt, Artificial Sequence
  Synthetic oligonucleotide: FAS-2612
cccauuuuucuuccaaaug

SEQ ID NO: 28544 - RNA, 20 nt, Artificial Sequence
  Synthetic oligonucleotide: FAS-191
gcccauuuuucuuccaaaug

SEQ ID NO: 28545 - RNA, 21 nt, Artificial Sequence
  Synthetic oligonucleotide: FAS-2613
agcccauuuuucuuccaaaug

SEQ ID NO: 28546 - RNA, 22 nt, Artificial Sequence
  Synthetic oligonucleotide: FAS-2614
aagcccauuuuucuuccaaaug

SEQ ID NO: 28547 - RNA, 23 nt, Artificial Sequence
  Synthetic oligonucleotide: FAS-2615
aaagcccauuuuucuuccaaaug

SEQ ID NO: 28548 - RNA, 24 nt, Artificial Sequence
  Synthetic oligonucleotide: FAS-2616
caaagcccauuuuucuuccaaaug

SEQ ID NO: 28549 - RNA, 18 nt, Artificial Sequence
  Synthetic oligonucleotide: FAS-2617
gauugcucaacaaccaug

SEQ ID NO: 28550 - RNA, 19 nt, Artificial Sequence
  Synthetic oligonucleotide: FAS-2618
ggauugcucaacaaccaug

SEQ ID NO: 28551 - RNA, 20 nt, Artificial Sequence
  Synthetic oligonucleotide: FAS-1048
aggauugcucaacaaccaug

SEQ ID NO: 28552 - RNA, 21 nt, Artificial Sequence
  Synthetic oligonucleotide: FAS-2619
gaggauugcucaacaaccaug

SEQ ID NO: 28553 - RNA, 22 nt, Artificial Sequence
  Synthetic oligonucleotide: FAS-2620
ggaggauugcucaacaaccaug

SEQ ID NO: 28554 - RNA, 23 nt, Artificial Sequence
  Synthetic oligonucleotide: FAS-2621
cggaggauugcucaacaaccaug

SEQ ID NO: 28555 - RNA, 24 nt, Artificial Sequence
  Synthetic oligonucleotide: FAS-2622
ucggaggauugcucaacaaccaug

SEQ ID NO: 28556 - RNA, 18 nt, Artificial Sequence
  Synthetic oligonucleotide: FAS-2623
gauguagauugugugaug

SEQ ID NO: 28557 - RNA, 19 nt, Artificial Sequence
  Synthetic oligonucleotide: FAS-2624
agauguagauugugugaug

SEQ ID NO: 28558 - RNA, 20 nt, Artificial Sequence
  Synthetic oligonucleotide: FAS-193
aagauguagauugugugaug

SEQ ID NO: 28559 - RNA, 21 nt, Artificial Sequence
  Synthetic oligonucleotide: FAS-2625
gaagauguagauugugugaug

SEQ ID NO: 28560 - RNA, 22 nt, Artificial Sequence
  Synthetic oligonucleotide: FAS-2626
agaagauguagauugugugaug

SEQ ID NO: 28561 - RNA, 23 nt, Artificial Sequence
  Synthetic oligonucleotide: FAS-2627
cagaagauguagauugugugaug

SEQ ID NO: 28562 - RNA, 24 nt, Artificial Sequence
  Synthetic oligonucleotide: FAS-2628
gcagaagauguagauugugugaug

SEQ ID NO: 28563 - RNA, 18 nt, Artificial Sequence
  Synthetic oligonucleotide: FAS-2629
uggacccuccuaccucug

SEQ ID NO: 28564 - RNA, 19 nt, Artificial Sequence
  Synthetic oligonucleotide: FAS-2630
cuggacccuccuaccucug

SEQ ID NO: 28565 - RNA, 20 nt, Artificial Sequence
  Synthetic oligonucleotide: FAS-100
ucuggacccuccuaccucug

SEQ ID NO: 28566 - RNA, 21 nt, Artificial Sequence
  Synthetic oligonucleotide: FAS-2631
aucuggacccuccuaccucug

SEQ ID NO: 28567 - RNA, 22 nt, Artificial Sequence
  Synthetic oligonucleotide: FAS-2632
caucuggacccuccuaccucug

SEQ ID NO: 28568 - RNA, 23 nt, Artificial Sequence
  Synthetic oligonucleotide: FAS-2633
gcaucuggacccuccuaccucug

SEQ ID NO: 28569 - RNA, 24 nt, Artificial Sequence
  Synthetic oligonucleotide: FAS-2634
ggcaucuggacccuccuaccucug

SEQ ID NO: 28570 - RNA, 18 nt, Artificial Sequence
  Synthetic oligonucleotide: FAS-2635
gaagauguagauugugug

SEQ ID NO: 28571 - RNA, 19 nt, Artificial Sequence
  Synthetic oligonucleotide: FAS-2636
agaagauguagauugugug

SEQ ID NO: 28572 - RNA, 20 nt, Artificial Sequence
  Synthetic oligonucleotide: FAS-192
cagaagauguagauugugug

SEQ ID NO: 28573 - RNA, 21 nt, Artificial Sequence
  Synthetic oligonucleotide: FAS-2637
gcagaagauguagauugugug

SEQ ID NO: 28574 - RNA, 22 nt, Artificial Sequence
  Synthetic oligonucleotide: FAS-2638
ugcagaagauguagauugugug

SEQ ID NO: 28575 - RNA, 23 nt, Artificial Sequence
  Synthetic oligonucleotide: FAS-2639
augcagaagauguagauugugug

SEQ ID NO: 28576 - RNA, 24 nt, Artificial Sequence
  Synthetic oligonucleotide: FAS-2640
aaugcagaagauguagauugugug

SEQ ID NO: 28577 - RNA, 18 nt, Artificial Sequence
  Synthetic oligonucleotide: FAS-2641
uccaagggauuggaauug

SEQ ID NO: 28578 - RNA, 19 nt, Artificial Sequence
  Synthetic oligonucleotide: FAS-2642
cuccaagggauuggaauug

SEQ ID NO: 28579 - RNA, 20 nt, Artificial Sequence
  Synthetic oligonucleotide: FAS-15
acuccaagggauuggaauug

SEQ ID NO: 28580 - RNA, 21 nt, Artificial Sequence
  Synthetic oligonucleotide: FAS-2643
aacuccaagggauuggaauug

SEQ ID NO: 28581 - RNA, 22 nt, Artificial Sequence
  Synthetic oligonucleotide: FAS-2644
caacuccaagggauuggaauug

SEQ ID NO: 28582 - RNA, 23 nt, Artificial Sequence
  Synthetic oligonucleotide: FAS-2645
ucaacuccaagggauuggaauug

SEQ ID NO: 28583 - RNA, 24 nt, Artificial Sequence
  Synthetic oligonucleotide: FAS-2646
aucaacuccaagggauuggaauug

SEQ ID NO: 28584 - RNA, 18 nt, Artificial Sequence
  Synthetic oligonucleotide: FAS-2647
aacaaccaugcugggcau

SEQ ID NO: 28585 - RNA, 19 nt, Artificial Sequence
  Synthetic oligonucleotide: FAS-2648
caacaaccaugcugggcau

SEQ ID NO: 28586 - RNA, 20 nt, Artificial Sequence
  Synthetic oligonucleotide: FAS-99
ucaacaaccaugcugggcau

SEQ ID NO: 28587 - RNA, 21 nt, Artificial Sequence
  Synthetic oligonucleotide: FAS-2649
cucaacaaccaugcugggcau

SEQ ID NO: 28588 - RNA, 22 nt, Artificial Sequence
  Synthetic oligonucleotide: FAS-2650
gcucaacaaccaugcugggcau

SEQ ID NO: 28589 - RNA, 23 nt, Artificial Sequence
  Synthetic oligonucleotide: FAS-2651
ugcucaacaaccaugcugggcau

SEQ ID NO: 28590 - RNA, 24 nt, Artificial Sequence
  Synthetic oligonucleotide: FAS-2652
uugcucaacaaccaugcugggcau

SEQ ID NO: 28591 - RNA, 18 nt, Artificial Sequence
  Synthetic oligonucleotide: FAS-2653
guauuuuuuuuucuagau

SEQ ID NO: 28592 - RNA, 19 nt, Artificial Sequence
  Synthetic oligonucleotide: FAS-2654
uguauuuuuuuuucuagau

SEQ ID NO: 28593 - RNA, 20 nt, Artificial Sequence
  Synthetic oligonucleotide: FAS-373
cuguauuuuuuuuucuagau

SEQ ID NO: 28594 - RNA, 21 nt, Artificial Sequence
  Synthetic oligonucleotide: FAS-2655
ccuguauuuuuuuuucuagau

SEQ ID NO: 28595 - RNA, 22 nt, Artificial Sequence
  Synthetic oligonucleotide: FAS-2656
uccuguauuuuuuuuucuagau

SEQ ID NO: 28596 - RNA, 23 nt, Artificial Sequence
  Synthetic oligonucleotide: FAS-2657
cuccuguauuuuuuuuucuagau

SEQ ID NO: 28597 - RNA, 24 nt, Artificial Sequence
  Synthetic oligonucleotide: FAS-2658
ucuccuguauuuuuuuuucuagau

SEQ ID NO: 28598 - RNA, 18 nt, Artificial Sequence
  Synthetic oligonucleotide: FAS-2659
uuuguaacucuacuguau

SEQ ID NO: 28599 - RNA, 19 nt, Artificial Sequence
  Synthetic oligonucleotide: FAS-2660
uuuuguaacucuacuguau

SEQ ID NO: 28600 - RNA, 20 nt, Artificial Sequence
  Synthetic oligonucleotide: FAS-372
uuuuuguaacucuacuguau

SEQ ID NO: 28601 - RNA, 21 nt, Artificial Sequence
  Synthetic oligonucleotide: FAS-2661
uuuuuuguaacucuacuguau

SEQ ID NO: 28602 - RNA, 22 nt, Artificial Sequence
  Synthetic oligonucleotide: FAS-2662
uuuuuuuguaacucuacuguau

SEQ ID NO: 28603 - RNA, 23 nt, Artificial Sequence
  Synthetic oligonucleotide: FAS-2663
cuuuuuuuguaacucuacuguau

SEQ ID NO: 28604 - RNA, 24 nt, Artificial Sequence
  Synthetic oligonucleotide: FAS-2664
acuuuuuuuguaacucuacuguau

SEQ ID NO: 28605 - RNA, 18 nt, Artificial Sequence
  Synthetic oligonucleotide: FAS-2665
caguugagacucagaacu

SEQ ID NO: 28606 - RNA, 19 nt, Artificial Sequence
  Synthetic oligonucleotide: FAS-2666
acaguugagacucagaacu

SEQ ID NO: 28607 - RNA, 20 nt, Artificial Sequence
  Synthetic oligonucleotide: FAS-16
uacaguugagacucagaacu

SEQ ID NO: 28608 - RNA, 21 nt, Artificial Sequence
  Synthetic oligonucleotide: FAS-2667
cuacaguugagacucagaacu

SEQ ID NO: 28609 - RNA, 22 nt, Artificial Sequence
  Synthetic oligonucleotide: FAS-2668
acuacaguugagacucagaacu

SEQ ID NO: 28610 - RNA, 23 nt, Artificial Sequence
  Synthetic oligonucleotide: FAS-2669
uacuacaguugagacucagaacu

SEQ ID NO: 28611 - RNA, 24 nt, Artificial Sequence
  Synthetic oligonucleotide: FAS-2670
uuacuacaguugagacucagaacu

SEQ ID NO: 28612 - RNA, 18 nt, Artificial Sequence
  Synthetic oligonucleotide: FAS-2671
guuacuacaguugagacu

SEQ ID NO: 28613 - RNA, 19 nt, Artificial Sequence
  Synthetic oligonucleotide: FAS-2672
uguuacuacaguugagacu

SEQ ID NO: 28614 - RNA, 20 nt, Artificial Sequence
  Synthetic oligonucleotide: FAS-131
cuguuacuacaguugagacu

SEQ ID NO: 28615 - RNA, 21 nt, Artificial Sequence
  Synthetic oligonucleotide: FAS-2673
acuguuacuacaguugagacu

SEQ ID NO: 28616 - RNA, 22 nt, Artificial Sequence
  Synthetic oligonucleotide: FAS-2674
gacuguuacuacaguugagacu

SEQ ID NO: 28617 - RNA, 23 nt, Artificial Sequence
  Synthetic oligonucleotide: FAS-2675
agacuguuacuacaguugagacu

SEQ ID NO: 28618 - RNA, 24 nt, Artificial Sequence
  Synthetic oligonucleotide: FAS-2676
aagacuguuacuacaguugagacu

SEQ ID NO: 28619 - RNA, 18 nt, Artificial Sequence
  Synthetic oligonucleotide: FAS-2677
gcaggugaaaggaaagcu

SEQ ID NO: 28620 - RNA, 19 nt, Artificial Sequence
  Synthetic oligonucleotide: FAS-2678
ggcaggugaaaggaaagcu

SEQ ID NO: 28621 - RNA, 20 nt, Artificial Sequence
  Synthetic oligonucleotide: FAS-55
gggcaggugaaaggaaagcu

SEQ ID NO: 28622 - RNA, 21 nt, Artificial Sequence
  Synthetic oligonucleotide: FAS-2679
ugggcaggugaaaggaaagcu

SEQ ID NO: 28623 - RNA, 22 nt, Artificial Sequence
  Synthetic oligonucleotide: FAS-2680
uugggcaggugaaaggaaagcu

SEQ ID NO: 28624 - RNA, 23 nt, Artificial Sequence
  Synthetic oligonucleotide: FAS-2681
cuugggcaggugaaaggaaagcu

SEQ ID NO: 28625 - RNA, 24 nt, Artificial Sequence
  Synthetic oligonucleotide: FAS-2682
ccuugggcaggugaaaggaaagcu

SEQ ID NO: 28626 - RNA, 18 nt, Artificial Sequence
  Synthetic oligonucleotide: FAS-2683
aaacugauuuucuaggcu

SEQ ID NO: 28627 - RNA, 19 nt, Artificial Sequence
  Synthetic oligonucleotide: FAS-2684
caaacugauuuucuaggcu

SEQ ID NO: 28628 - RNA, 20 nt, Artificial Sequence
  Synthetic oligonucleotide: FAS-367
ccaaacugauuuucuaggcu

SEQ ID NO: 28629 - RNA, 21 nt, Artificial Sequence
  Synthetic oligonucleotide: FAS-2685
uccaaacugauuuucuaggcu

SEQ ID NO: 28630 - RNA, 22 nt, Artificial Sequence
  Synthetic oligonucleotide: FAS-2686
uuccaaacugauuuucuaggcu

SEQ ID NO: 28631 - RNA, 23 nt, Artificial Sequence
  Synthetic oligonucleotide: FAS-2687
uuuccaaacugauuuucuaggcu

SEQ ID NO: 28632 - RNA, 24 nt, Artificial Sequence
  Synthetic oligonucleotide: FAS-2688
guuuccaaacugauuuucuaggcu

SEQ ID NO: 28633 - RNA, 18 nt, Artificial Sequence
  Synthetic oligonucleotide: FAS-2689
cuccaagggauuggaauu

SEQ ID NO: 28634 - RNA, 19 nt, Artificial Sequence
  Synthetic oligonucleotide: FAS-2690
acuccaagggauuggaauu

SEQ ID NO: 28635 - RNA, 20 nt, Artificial Sequence
  Synthetic oligonucleotide: FAS-128
aacuccaagggauuggaauu

SEQ ID NO: 28636 - RNA, 21 nt, Artificial Sequence
  Synthetic oligonucleotide: FAS-2691
caacuccaagggauuggaauu

SEQ ID NO: 28637 - RNA, 22 nt, Artificial Sequence
  Synthetic oligonucleotide: FAS-2692
ucaacuccaagggauuggaauu

SEQ ID NO: 28638 - RNA, 23 nt, Artificial Sequence
  Synthetic oligonucleotide: FAS-2693
aucaacuccaagggauuggaauu

SEQ ID NO: 28639 - RNA, 24 nt, Artificial Sequence
  Synthetic oligonucleotide: FAS-2694
caucaacuccaagggauuggaauu

SEQ ID NO: 28640 - RNA, 18 nt, Artificial Sequence
  Synthetic oligonucleotide: FAS-2695
uaccuauuucaauaccua

SEQ ID NO: 28641 - RNA, 19 nt, Artificial Sequence
  Synthetic oligonucleotide: FAS-2696
auaccuauuucaauaccua

SEQ ID NO: 28642 - RNA, 20 nt, Artificial Sequence
  Synthetic oligonucleotide: FAS-503
gauaccuauuucaauaccua

SEQ ID NO: 28643 - RNA, 21 nt, Artificial Sequence
  Synthetic oligonucleotide: FAS-2697
ugauaccuauuucaauaccua

SEQ ID NO: 28644 - RNA, 22 nt, Artificial Sequence
  Synthetic oligonucleotide: FAS-2698
cugauaccuauuucaauaccua

SEQ ID NO: 28645 - RNA, 23 nt, Artificial Sequence
  Synthetic oligonucleotide: FAS-2699
gcugauaccuauuucaauaccua

SEQ ID NO: 28646 - RNA, 24 nt, Artificial Sequence
  Synthetic oligonucleotide: FAS-2700
agcugauaccuauuucaauaccua

SEQ ID NO: 28647 - RNA, 18 nt, Artificial Sequence
  Synthetic oligonucleotide: FAS-2701
agucugaauuuucucugc

SEQ ID NO: 28648 - RNA, 19 nt, Artificial Sequence
  Synthetic oligonucleotide: FAS-2702
uagucugaauuuucucugc

SEQ ID NO: 28649 - RNA, 20 nt, Artificial Sequence
  Synthetic oligonucleotide: FAS-488
auagucugaauuuucucugc

SEQ ID NO: 28650 - RNA, 21 nt, Artificial Sequence
  Synthetic oligonucleotide: FAS-2703
gauagucugaauuuucucugc

SEQ ID NO: 28651 - RNA, 22 nt, Artificial Sequence
  Synthetic oligonucleotide: FAS-2704
ugauagucugaauuuucucugc

SEQ ID NO: 28652 - RNA, 23 nt, Artificial Sequence
  Synthetic oligonucleotide: FAS-2705
augauagucugaauuuucucugc

SEQ ID NO: 28653 - RNA, 24 nt, Artificial Sequence
  Synthetic oligonucleotide: FAS-2706
gaugauagucugaauuuucucugc

SEQ ID NO: 28654 - RNA, 18 nt, Artificial Sequence
  Synthetic oligonucleotide: FAS-2707
cuuaccccaaacaauuag

SEQ ID NO: 28655 - RNA, 19 nt, Artificial Sequence
  Synthetic oligonucleotide: FAS-2708
acuuaccccaaacaauuag

SEQ ID NO: 28656 - RNA, 20 nt, Artificial Sequence
  Synthetic oligonucleotide: FAS-319
aacuuaccccaaacaauuag

SEQ ID NO: 28657 - RNA, 21 nt, Artificial Sequence
  Synthetic oligonucleotide: FAS-2709
gaacuuaccccaaacaauuag

SEQ ID NO: 28658 - RNA, 22 nt, Artificial Sequence
  Synthetic oligonucleotide: FAS-2710
agaacuuaccccaaacaauuag

SEQ ID NO: 28659 - RNA, 23 nt, Artificial Sequence
  Synthetic oligonucleotide: FAS-2711
aagaacuuaccccaaacaauuag

SEQ ID NO: 28660 - RNA, 24 nt, Artificial Sequence
  Synthetic oligonucleotide: FAS-2712
caagaacuuaccccaaacaauuag

SEQ ID NO: 28661 - RNA, 18 nt, Artificial Sequence
  Synthetic oligonucleotide: FAS-2713
agccaccccaaguuagau

SEQ ID NO: 28662 - RNA, 19 nt, Artificial Sequence
  Synthetic oligonucleotide: FAS-2714
aagccaccccaaguuagau

SEQ ID NO: 28663 - RNA, 20 nt, Artificial Sequence
  Synthetic oligonucleotide: FAS-516
aaagccaccccaaguuagau

SEQ ID NO: 28664 - RNA, 21 nt, Artificial Sequence
  Synthetic oligonucleotide: FAS-2715
caaagccaccccaaguuagau

SEQ ID NO: 28665 - RNA, 22 nt, Artificial Sequence
  Synthetic oligonucleotide: FAS-2716
acaaagccaccccaaguuagau

SEQ ID NO: 28666 - RNA, 23 nt, Artificial Sequence
  Synthetic oligonucleotide: FAS-2717
gacaaagccaccccaaguuagau

SEQ ID NO: 28667 - RNA, 24 nt, Artificial Sequence
  Synthetic oligonucleotide: FAS-2718
agacaaagccaccccaaguuagau

SEQ ID NO: 28668 - RNA, 18 nt, Artificial Sequence
  Synthetic oligonucleotide: FAS-2719
uucacucuagaccaagcu

SEQ ID NO: 28669 - RNA, 19 nt, Artificial Sequence
  Synthetic oligonucleotide: FAS-2720
uuucacucuagaccaagcu

SEQ ID NO: 28670 - RNA, 20 nt, Artificial Sequence
  Synthetic oligonucleotide: FAS-481
uuuucacucuagaccaagcu

SEQ ID NO: 28671 - RNA, 21 nt, Artificial Sequence
  Synthetic oligonucleotide: FAS-2721
uuuuucacucuagaccaagcu

SEQ ID NO: 28672 - RNA, 22 nt, Artificial Sequence
  Synthetic oligonucleotide: FAS-2722
guuuuucacucuagaccaagcu

SEQ ID NO: 28673 - RNA, 23 nt, Artificial Sequence
  Synthetic oligonucleotide: FAS-2723
uguuuuucacucuagaccaagcu

SEQ ID NO: 28674 - RNA, 24 nt, Artificial Sequence
  Synthetic oligonucleotide: FAS-2724
uuguuuuucacucuagaccaagcu

SEQ ID NO: 28675 - RNA, 18 nt, Artificial Sequence
  Synthetic oligonucleotide: FAS-2725
ggauuucauuucugaagu

SEQ ID NO: 28676 - RNA, 19 nt, Artificial Sequence
  Synthetic oligonucleotide: FAS-2726
uggauuucauuucugaagu

SEQ ID NO: 28677 - RNA, 20 nt, Artificial Sequence
  Synthetic oligonucleotide: FAS-483
uuggauuucauuucugaagu

SEQ ID NO: 28678 - RNA, 21 nt, Artificial Sequence
  Synthetic oligonucleotide: FAS-2727
uuuggauuucauuucugaagu

SEQ ID NO: 28679 - RNA, 22 nt, Artificial Sequence
  Synthetic oligonucleotide: FAS-2728
cuuuggauuucauuucugaagu

SEQ ID NO: 28680 - RNA, 23 nt, Artificial Sequence
  Synthetic oligonucleotide: FAS-2729
gcuuuggauuucauuucugaagu

SEQ ID NO: 28681 - RNA, 24 nt, Artificial Sequence
  Synthetic oligonucleotide: FAS-2730
agcuuuggauuucauuucugaagu

SEQ ID NO: 28682 - RNA, 18 nt, Artificial Sequence
  Synthetic oligonucleotide: FAS-2731
guccuugaggaugauagu

SEQ ID NO: 28683 - RNA, 19 nt, Artificial Sequence
  Synthetic oligonucleotide: FAS-2732
uguccuugaggaugauagu

SEQ ID NO: 28684 - RNA, 20 nt, Artificial Sequence
  Synthetic oligonucleotide: FAS-487
auguccuugaggaugauagu

SEQ ID NO: 28685 - RNA, 21 nt, Artificial Sequence
  Synthetic oligonucleotide: FAS-2733
aauguccuugaggaugauagu

SEQ ID NO: 28686 - RNA, 22 nt, Artificial Sequence
  Synthetic oligonucleotide: FAS-2734
uaauguccuugaggaugauagu

SEQ ID NO: 28687 - RNA, 23 nt, Artificial Sequence
  Synthetic oligonucleotide: FAS-2735
guaauguccuugaggaugauagu

SEQ ID NO: 28688 - RNA, 24 nt, Artificial Sequence
  Synthetic oligonucleotide: FAS-2736
aguaauguccuugaggaugauagu

SEQ ID NO: 28689 - RNA, 18 nt, Artificial Sequence
  Synthetic oligonucleotide: FAS-2737
gucacuaguaauguccuu

SEQ ID NO: 28690 - RNA, 19 nt, Artificial Sequence
  Synthetic oligonucleotide: FAS-2738
agucacuaguaauguccuu

SEQ ID NO: 28691 - RNA, 20 nt, Artificial Sequence
  Synthetic oligonucleotide: FAS-486
gagucacuaguaauguccuu

SEQ ID NO: 28692 - RNA, 21 nt, Artificial Sequence
  Synthetic oligonucleotide: FAS-2739
ugagucacuaguaauguccuu

SEQ ID NO: 28693 - RNA, 22 nt, Artificial Sequence
  Synthetic oligonucleotide: FAS-2740
cugagucacuaguaauguccuu

SEQ ID NO: 28694 - RNA, 23 nt, Artificial Sequence
  Synthetic oligonucleotide: FAS-2741
ucugagucacuaguaauguccuu

SEQ ID NO: 28695 - RNA, 24 nt, Artificial Sequence
  Synthetic oligonucleotide: FAS-2742
uucugagucacuaguaauguccuu

SEQ ID NO: 28696 - RNA, 18 nt, Artificial Sequence
  Synthetic oligonucleotide: FAS-2743
uucugaaguuugaauuuu

SEQ ID NO: 28697 - RNA, 19 nt, Artificial Sequence
  Synthetic oligonucleotide: FAS-2744
uuucugaaguuugaauuuu

SEQ ID NO: 28698 - RNA, 20 nt, Artificial Sequence
  Synthetic oligonucleotide: FAS-484
auuucugaaguuugaauuuu

SEQ ID NO: 28699 - RNA, 21 nt, Artificial Sequence
  Synthetic oligonucleotide: FAS-2745
cauuucugaaguuugaauuuu

SEQ ID NO: 28700 - RNA, 22 nt, Artificial Sequence
  Synthetic oligonucleotide: FAS-2746
ucauuucugaaguuugaauuuu

SEQ ID NO: 28701 - RNA, 23 nt, Artificial Sequence
  Synthetic oligonucleotide: FAS-2747
uucauuucugaaguuugaauuuu

SEQ ID NO: 28702 - RNA, 24 nt, Artificial Sequence
  Synthetic oligonucleotide: FAS-2748
uuucauuucugaaguuugaauuuu

SEQ ID NO: 28703 - RNA, 18 nt, Artificial Sequence
  Synthetic oligonucleotide: FAS-2749
guuaaaggcuuuguucga

SEQ ID NO: 28704 - RNA, 19 nt, Artificial Sequence
  Synthetic oligonucleotide: FAS-2750
aguuaaaggcuuuguucga

SEQ ID NO: 28705 - RNA, 20 nt, Artificial Sequence
  Synthetic oligonucleotide: FAS-405
aaguuaaaggcuuuguucga

SEQ ID NO: 28706 - RNA, 21 nt, Artificial Sequence
  Synthetic oligonucleotide: FAS-2751
caaguuaaaggcuuuguucga

SEQ ID NO: 28707 - RNA, 22 nt, Artificial Sequence
  Synthetic oligonucleotide: FAS-2752
ucaaguuaaaggcuuuguucga

SEQ ID NO: 28708 - RNA, 23 nt, Artificial Sequence
  Synthetic oligonucleotide: FAS-2753
gucaaguuaaaggcuuuguucga

SEQ ID NO: 28709 - RNA, 24 nt, Artificial Sequence
  Synthetic oligonucleotide: FAS-2754
agucaaguuaaaggcuuuguucga

SEQ ID NO: 28710 - RNA, 18 nt, Artificial Sequence
  Synthetic oligonucleotide: FAS-2755
guccaauguuccaaccua

SEQ ID NO: 28711 - RNA, 19 nt, Artificial Sequence
  Synthetic oligonucleotide: FAS-2756
uguccaauguuccaaccua

SEQ ID NO: 28712 - RNA, 20 nt, Artificial Sequence
  Synthetic oligonucleotide: FAS-381
auguccaauguuccaaccua

SEQ ID NO: 28713 - RNA, 21 nt, Artificial Sequence
  Synthetic oligonucleotide: FAS-2757
aauguccaauguuccaaccua

SEQ ID NO: 28714 - RNA, 22 nt, Artificial Sequence
  Synthetic oligonucleotide: FAS-2758
aaauguccaauguuccaaccua

SEQ ID NO: 28715 - RNA, 23 nt, Artificial Sequence
  Synthetic oligonucleotide: FAS-2759
aaaauguccaauguuccaaccua

SEQ ID NO: 28716 - RNA, 24 nt, Artificial Sequence
  Synthetic oligonucleotide: FAS-2760
uaaaauguccaauguuccaaccua

SEQ ID NO: 28717 - RNA, 18 nt, Artificial Sequence
  Synthetic oligonucleotide: FAS-2761
uauuuuucagauguugac

SEQ ID NO: 28718 - RNA, 19 nt, Artificial Sequence
  Synthetic oligonucleotide: FAS-2762
cuauuuuucagauguugac

SEQ ID NO: 28719 - RNA, 20 nt, Artificial Sequence
  Synthetic oligonucleotide: FAS-401
ucuauuuuucagauguugac

SEQ ID NO: 28720 - RNA, 21 nt, Artificial Sequence
  Synthetic oligonucleotide: FAS-2763
uucuauuuuucagauguugac

SEQ ID NO: 28721 - RNA, 22 nt, Artificial Sequence
  Synthetic oligonucleotide: FAS-2764
uuucuauuuuucagauguugac

SEQ ID NO: 28722 - RNA, 23 nt, Artificial Sequence
  Synthetic oligonucleotide: FAS-2765
uuuucuauuuuucagauguugac

SEQ ID NO: 28723 - RNA, 24 nt, Artificial Sequence
  Synthetic oligonucleotide: FAS-2766
auuuucuauuuuucagauguugac

SEQ ID NO: 28724 - RNA, 18 nt, Artificial Sequence
  Synthetic oligonucleotide: FAS-2767
auauaucaccacuauugc

SEQ ID NO: 28725 - RNA, 19 nt, Artificial Sequence
  Synthetic oligonucleotide: FAS-2768
aauauaucaccacuauugc

SEQ ID NO: 28726 - RNA, 20 nt, Artificial Sequence
  Synthetic oligonucleotide: FAS-270
aaauauaucaccacuauugc

SEQ ID NO: 28727 - RNA, 21 nt, Artificial Sequence
  Synthetic oligonucleotide: FAS-2769
uaaauauaucaccacuauugc

SEQ ID NO: 28728 - RNA, 22 nt, Artificial Sequence
  Synthetic oligonucleotide: FAS-2770
guaaauauaucaccacuauugc

SEQ ID NO: 28729 - RNA, 23 nt, Artificial Sequence
  Synthetic oligonucleotide: FAS-2771
aguaaauauaucaccacuauugc

SEQ ID NO: 28730 - RNA, 24 nt, Artificial Sequence
  Synthetic oligonucleotide: FAS-2772
gaguaaauauaucaccacuauugc

SEQ ID NO: 28731 - RNA, 18 nt, Artificial Sequence
  Synthetic oligonucleotide: FAS-2773
gccaaaauagaugagauc

SEQ ID NO: 28732 - RNA, 19 nt, Artificial Sequence
  Synthetic oligonucleotide: FAS-2774
agccaaaauagaugagauc

SEQ ID NO: 28733 - RNA, 20 nt, Artificial Sequence
  Synthetic oligonucleotide: FAS-408
aagccaaaauagaugagauc

SEQ ID NO: 28734 - RNA, 21 nt, Artificial Sequence
  Synthetic oligonucleotide: FAS-2775
gaagccaaaauagaugagauc

SEQ ID NO: 28735 - RNA, 22 nt, Artificial Sequence
  Synthetic oligonucleotide: FAS-2776
ugaagccaaaauagaugagauc

SEQ ID NO: 28736 - RNA, 23 nt, Artificial Sequence
  Synthetic oligonucleotide: FAS-2777
augaagccaaaauagaugagauc

SEQ ID NO: 28737 - RNA, 24 nt, Artificial Sequence
  Synthetic oligonucleotide: FAS-2778
aaugaagccaaaauagaugagauc

SEQ ID NO: 28738 - RNA, 18 nt, Artificial Sequence
  Synthetic oligonucleotide: FAS-2779
aggaaaaccaagguucuc

SEQ ID NO: 28739 - RNA, 19 nt, Artificial Sequence
  Synthetic oligonucleotide: FAS-2780
aaggaaaaccaagguucuc

SEQ ID NO: 28740 - RNA, 20 nt, Artificial Sequence
  Synthetic oligonucleotide: FAS-396
aaaggaaaaccaagguucuc

SEQ ID NO: 28741 - RNA, 21 nt, Artificial Sequence
  Synthetic oligonucleotide: FAS-2781
gaaaggaaaaccaagguucuc

SEQ ID NO: 28742 - RNA, 22 nt, Artificial Sequence
  Synthetic oligonucleotide: FAS-2782
agaaaggaaaaccaagguucuc

SEQ ID NO: 28743 - RNA, 23 nt, Artificial Sequence
  Synthetic oligonucleotide: FAS-2783
cagaaaggaaaaccaagguucuc

SEQ ID NO: 28744 - RNA, 24 nt, Artificial Sequence
  Synthetic oligonucleotide: FAS-2784
acagaaaggaaaaccaagguucuc

SEQ ID NO: 28745 - RNA, 18 nt, Artificial Sequence
  Synthetic oligonucleotide: FAS-2785
gaaauccaaagcuugguc

SEQ ID NO: 28746 - RNA, 19 nt, Artificial Sequence
  Synthetic oligonucleotide: FAS-2786
ugaaauccaaagcuugguc

SEQ ID NO: 28747 - RNA, 20 nt, Artificial Sequence
  Synthetic oligonucleotide: FAS-421
augaaauccaaagcuugguc

SEQ ID NO: 28748 - RNA, 21 nt, Artificial Sequence
  Synthetic oligonucleotide: FAS-2787
aaugaaauccaaagcuugguc

SEQ ID NO: 28749 - RNA, 22 nt, Artificial Sequence
  Synthetic oligonucleotide: FAS-2788
aaaugaaauccaaagcuugguc

SEQ ID NO: 28750 - RNA, 23 nt, Artificial Sequence
  Synthetic oligonucleotide: FAS-2789
gaaaugaaauccaaagcuugguc

SEQ ID NO: 28751 - RNA, 24 nt, Artificial Sequence
  Synthetic oligonucleotide: FAS-2790
agaaaugaaauccaaagcuugguc

SEQ ID NO: 28752 - RNA, 18 nt, Artificial Sequence
  Synthetic oligonucleotide: FAS-2791
caggauccagaucuaacu

SEQ ID NO: 28753 - RNA, 19 nt, Artificial Sequence
  Synthetic oligonucleotide: FAS-2792
acaggauccagaucuaacu

SEQ ID NO: 28754 - RNA, 20 nt, Artificial Sequence
  Synthetic oligonucleotide: FAS-254
uacaggauccagaucuaacu

SEQ ID NO: 28755 - RNA, 21 nt, Artificial Sequence
  Synthetic oligonucleotide: FAS-2793
cuacaggauccagaucuaacu

SEQ ID NO: 28756 - RNA, 22 nt, Artificial Sequence
  Synthetic oligonucleotide: FAS-2794
ccuacaggauccagaucuaacu

SEQ ID NO: 28757 - RNA, 23 nt, Artificial Sequence
  Synthetic oligonucleotide: FAS-2795
accuacaggauccagaucuaacu

SEQ ID NO: 28758 - RNA, 24 nt, Artificial Sequence
  Synthetic oligonucleotide: FAS-2796
aaccuacaggauccagaucuaacu

SEQ ID NO: 28759 - RNA, 18 nt, Artificial Sequence
  Synthetic oligonucleotide: FAS-2797
aaaacaacaaauucaguu

SEQ ID NO: 28760 - RNA, 19 nt, Artificial Sequence
  Synthetic oligonucleotide: FAS-2798
aaaaacaacaaauucaguu

SEQ ID NO: 28761 - RNA, 20 nt, Artificial Sequence
  Synthetic oligonucleotide: FAS-423
gaaaaacaacaaauucaguu

SEQ ID NO: 28762 - RNA, 21 nt, Artificial Sequence
  Synthetic oligonucleotide: FAS-2799
ugaaaaacaacaaauucaguu

SEQ ID NO: 28763 - RNA, 22 nt, Artificial Sequence
  Synthetic oligonucleotide: FAS-2800
gugaaaaacaacaaauucaguu

SEQ ID NO: 28764 - RNA, 23 nt, Artificial Sequence
  Synthetic oligonucleotide: FAS-2801
agugaaaaacaacaaauucaguu

SEQ ID NO: 28765 - RNA, 24 nt, Artificial Sequence
  Synthetic oligonucleotide: FAS-2802
gagugaaaaacaacaaauucaguu

SEQ ID NO: 28766 - RNA, 18 nt, Artificial Sequence
  Synthetic oligonucleotide: FAS-2803
ccaauuccacuaauuguu

SEQ ID NO: 28767 - RNA, 19 nt, Artificial Sequence
  Synthetic oligonucleotide: FAS-2804
gccaauuccacuaauuguu

SEQ ID NO: 28768 - RNA, 20 nt, Artificial Sequence
  Synthetic oligonucleotide: FAS-258
ugccaauuccacuaauuguu

SEQ ID NO: 28769 - RNA, 21 nt, Artificial Sequence
  Synthetic oligonucleotide: FAS-2805
uugccaauuccacuaauuguu

SEQ ID NO: 28770 - RNA, 22 nt, Artificial Sequence
  Synthetic oligonucleotide: FAS-2806
uuugccaauuccacuaauuguu

SEQ ID NO: 28771 - RNA, 23 nt, Artificial Sequence
  Synthetic oligonucleotide: FAS-2807
uuuugccaauuccacuaauuguu

SEQ ID NO: 28772 - RNA, 24 nt, Artificial Sequence
  Synthetic oligonucleotide: FAS-2808
cuuuugccaauuccacuaauuguu

SEQ ID NO: 28773 - RNA, 18 nt, Artificial Sequence
  Synthetic oligonucleotide: FAS-2809
uuccuagaaagcaaaaaa

SEQ ID NO: 28774 - RNA, 19 nt, Artificial Sequence
  Synthetic oligonucleotide: FAS-2810
uuuccuagaaagcaaaaaa

SEQ ID NO: 28775 - RNA, 20 nt, Artificial Sequence
  Synthetic oligonucleotide: FAS-315
guuuccuagaaagcaaaaaa

SEQ ID NO: 28776 - RNA, 21 nt, Artificial Sequence
  Synthetic oligonucleotide: FAS-2811
uguuuccuagaaagcaaaaaa

SEQ ID NO: 28777 - RNA, 22 nt, Artificial Sequence
  Synthetic oligonucleotide: FAS-2812
cuguuuccuagaaagcaaaaaa

SEQ ID NO: 28778 - RNA, 23 nt, Artificial Sequence
  Synthetic oligonucleotide: FAS-2813
acuguuuccuagaaagcaaaaaa

SEQ ID NO: 28779 - RNA, 24 nt, Artificial Sequence
  Synthetic oligonucleotide: FAS-2814
cacuguuuccuagaaagcaaaaaa

SEQ ID NO: 28780 - RNA, 18 nt, Artificial Sequence
  Synthetic oligonucleotide: FAS-2815
uuuccuagaaagcaaaaa

SEQ ID NO: 28781 - RNA, 19 nt, Artificial Sequence
  Synthetic oligonucleotide: FAS-2816
guuuccuagaaagcaaaaa

SEQ ID NO: 28782 - RNA, 20 nt, Artificial Sequence
  Synthetic oligonucleotide: FAS-499
uguuuccuagaaagcaaaaa

SEQ ID NO: 28783 - RNA, 21 nt, Artificial Sequence
  Synthetic oligonucleotide: FAS-2817
cuguuuccuagaaagcaaaaa

SEQ ID NO: 28784 - RNA, 22 nt, Artificial Sequence
  Synthetic oligonucleotide: FAS-2818
acuguuuccuagaaagcaaaaa

SEQ ID NO: 28785 - RNA, 23 nt, Artificial Sequence
  Synthetic oligonucleotide: FAS-2819
cacuguuuccuagaaagcaaaaa

SEQ ID NO: 28786 - RNA, 24 nt, Artificial Sequence
  Synthetic oligonucleotide: FAS-2820
ccacuguuuccuagaaagcaaaaa

SEQ ID NO: 28787 - RNA, 18 nt, Artificial Sequence
  Synthetic oligonucleotide: FAS-2821
aagucaacaucugaaaaa

SEQ ID NO: 28788 - RNA, 19 nt, Artificial Sequence
  Synthetic oligonucleotide: FAS-2822
caagucaacaucugaaaaa

SEQ ID NO: 28789 - RNA, 20 nt, Artificial Sequence
  Synthetic oligonucleotide: FAS-496
ucaagucaacaucugaaaaa

SEQ ID NO: 28790 - RNA, 21 nt, Artificial Sequence
  Synthetic oligonucleotide: FAS-2823
cucaagucaacaucugaaaaa

SEQ ID NO: 28791 - RNA, 22 nt, Artificial Sequence
  Synthetic oligonucleotide: FAS-2824
acucaagucaacaucugaaaaa

SEQ ID NO: 28792 - RNA, 23 nt, Artificial Sequence
  Synthetic oligonucleotide: FAS-2825
uacucaagucaacaucugaaaaa

SEQ ID NO: 28793 - RNA, 24 nt, Artificial Sequence
  Synthetic oligonucleotide: FAS-2826
uuacucaagucaacaucugaaaaa

SEQ ID NO: 28794 - RNA, 18 nt, Artificial Sequence
  Synthetic oligonucleotide: FAS-2827
aauuaguggaauuggcaa

SEQ ID NO: 28795 - RNA, 19 nt, Artificial Sequence
  Synthetic oligonucleotide: FAS-2828
caauuaguggaauuggcaa

SEQ ID NO: 28796 - RNA, 20 nt, Artificial Sequence
  Synthetic oligonucleotide: FAS-514
acaauuaguggaauuggcaa

SEQ ID NO: 28797 - RNA, 21 nt, Artificial Sequence
  Synthetic oligonucleotide: FAS-2829
aacaauuaguggaauuggcaa

SEQ ID NO: 28798 - RNA, 22 nt, Artificial Sequence
  Synthetic oligonucleotide: FAS-2830
aaacaauuaguggaauuggcaa

SEQ ID NO: 28799 - RNA, 23 nt, Artificial Sequence
  Synthetic oligonucleotide: FAS-2831
caaacaauuaguggaauuggcaa

SEQ ID NO: 28800 - RNA, 24 nt, Artificial Sequence
  Synthetic oligonucleotide: FAS-2832
ccaaacaauuaguggaauuggcaa

SEQ ID NO: 28801 - RNA, 18 nt, Artificial Sequence
  Synthetic oligonucleotide: FAS-2833
cucuucacugaaagaaca

SEQ ID NO: 28802 - RNA, 19 nt, Artificial Sequence
  Synthetic oligonucleotide: FAS-2834
ucucuucacugaaagaaca

SEQ ID NO: 28803 - RNA, 20 nt, Artificial Sequence
  Synthetic oligonucleotide: FAS-510
uucucuucacugaaagaaca

SEQ ID NO: 28804 - RNA, 21 nt, Artificial Sequence
  Synthetic oligonucleotide: FAS-2835
uuucucuucacugaaagaaca

SEQ ID NO: 28805 - RNA, 22 nt, Artificial Sequence
  Synthetic oligonucleotide: FAS-2836
cuuucucuucacugaaagaaca

SEQ ID NO: 28806 - RNA, 23 nt, Artificial Sequence
  Synthetic oligonucleotide: FAS-2837
ccuuucucuucacugaaagaaca

SEQ ID NO: 28807 - RNA, 24 nt, Artificial Sequence
  Synthetic oligonucleotide: FAS-2838
uccuuucucuucacugaaagaaca

SEQ ID NO: 28808 - RNA, 18 nt, Artificial Sequence
  Synthetic oligonucleotide: FAS-2839
auccuguagguuggaaca

SEQ ID NO: 28809 - RNA, 19 nt, Artificial Sequence
  Synthetic oligonucleotide: FAS-2840
gauccuguagguuggaaca

SEQ ID NO: 28810 - RNA, 20 nt, Artificial Sequence
  Synthetic oligonucleotide: FAS-519
ggauccuguagguuggaaca

SEQ ID NO: 28811 - RNA, 21 nt, Artificial Sequence
  Synthetic oligonucleotide: FAS-2841
uggauccuguagguuggaaca

SEQ ID NO: 28812 - RNA, 22 nt, Artificial Sequence
  Synthetic oligonucleotide: FAS-2842
cuggauccuguagguuggaaca

SEQ ID NO: 28813 - RNA, 23 nt, Artificial Sequence
  Synthetic oligonucleotide: FAS-2843
ucuggauccuguagguuggaaca

SEQ ID NO: 28814 - RNA, 24 nt, Artificial Sequence
  Synthetic oligonucleotide: FAS-2844
aucuggauccuguagguuggaaca

SEQ ID NO: 28815 - RNA, 18 nt, Artificial Sequence
  Synthetic oligonucleotide: FAS-2845
aagcaaaaaauggaagca

SEQ ID NO: 28816 - RNA, 19 nt, Artificial Sequence
  Synthetic oligonucleotide: FAS-2846
aaagcaaaaaauggaagca

SEQ ID NO: 28817 - RNA, 20 nt, Artificial Sequence
  Synthetic oligonucleotide: FAS-502
gaaagcaaaaaauggaagca

SEQ ID NO: 28818 - RNA, 21 nt, Artificial Sequence
  Synthetic oligonucleotide: FAS-2847
agaaagcaaaaaauggaagca

SEQ ID NO: 28819 - RNA, 22 nt, Artificial Sequence
  Synthetic oligonucleotide: FAS-2848
uagaaagcaaaaaauggaagca

SEQ ID NO: 28820 - RNA, 23 nt, Artificial Sequence
  Synthetic oligonucleotide: FAS-2849
cuagaaagcaaaaaauggaagca

SEQ ID NO: 28821 - RNA, 24 nt, Artificial Sequence
  Synthetic oligonucleotide: FAS-2850
ccuagaaagcaaaaaauggaagca

SEQ ID NO: 28822 - RNA, 18 nt, Artificial Sequence
  Synthetic oligonucleotide: FAS-2851
guacuuccuuucucuuca

SEQ ID NO: 28823 - RNA, 19 nt, Artificial Sequence
  Synthetic oligonucleotide: FAS-2852
uguacuuccuuucucuuca

SEQ ID NO: 28824 - RNA, 20 nt, Artificial Sequence
  Synthetic oligonucleotide: FAS-508
cuguacuuccuuucucuuca

SEQ ID NO: 28825 - RNA, 21 nt, Artificial Sequence
  Synthetic oligonucleotide: FAS-2853
ucuguacuuccuuucucuuca

SEQ ID NO: 28826 - RNA, 22 nt, Artificial Sequence
  Synthetic oligonucleotide: FAS-2854
uucuguacuuccuuucucuuca

SEQ ID NO: 28827 - RNA, 23 nt, Artificial Sequence
  Synthetic oligonucleotide: FAS-2855
uuucuguacuuccuuucucuuca

SEQ ID NO: 28828 - RNA, 24 nt, Artificial Sequence
  Synthetic oligonucleotide: FAS-2856
uuuucuguacuuccuuucucuuca

SEQ ID NO: 28829 - RNA, 18 nt, Artificial Sequence
  Synthetic oligonucleotide: FAS-2857
uuccuuucucuucacuga

SEQ ID NO: 28830 - RNA, 19 nt, Artificial Sequence
  Synthetic oligonucleotide: FAS-2858
cuuccuuucucuucacuga

SEQ ID NO: 28831 - RNA, 20 nt, Artificial Sequence
  Synthetic oligonucleotide: FAS-509
acuuccuuucucuucacuga

SEQ ID NO: 28832 - RNA, 21 nt, Artificial Sequence
  Synthetic oligonucleotide: FAS-2859
uacuuccuuucucuucacuga

SEQ ID NO: 28833 - RNA, 22 nt, Artificial Sequence
  Synthetic oligonucleotide: FAS-2860
guacuuccuuucucuucacuga

SEQ ID NO: 28834 - RNA, 23 nt, Artificial Sequence
  Synthetic oligonucleotide: FAS-2861
uguacuuccuuucucuucacuga

SEQ ID NO: 28835 - RNA, 24 nt, Artificial Sequence
  Synthetic oligonucleotide: FAS-2862
cuguacuuccuuucucuucacuga

SEQ ID NO: 28836 - RNA, 18 nt, Artificial Sequence
  Synthetic oligonucleotide: FAS-2863
acuuaccccaaacaauua

SEQ ID NO: 28837 - RNA, 19 nt, Artificial Sequence
  Synthetic oligonucleotide: FAS-2864
aacuuaccccaaacaauua

SEQ ID NO: 28838 - RNA, 20 nt, Artificial Sequence
  Synthetic oligonucleotide: FAS-512
gaacuuaccccaaacaauua

SEQ ID NO: 28839 - RNA, 21 nt, Artificial Sequence
  Synthetic oligonucleotide: FAS-2865
agaacuuaccccaaacaauua

SEQ ID NO: 28840 - RNA, 22 nt, Artificial Sequence
  Synthetic oligonucleotide: FAS-2866
aagaacuuaccccaaacaauua

SEQ ID NO: 28841 - RNA, 23 nt, Artificial Sequence
  Synthetic oligonucleotide: FAS-2867
caagaacuuaccccaaacaauua

SEQ ID NO: 28842 - RNA, 24 nt, Artificial Sequence
  Synthetic oligonucleotide: FAS-2868
gcaagaacuuaccccaaacaauua

SEQ ID NO: 28843 - RNA, 18 nt, Artificial Sequence
  Synthetic oligonucleotide: FAS-2869
gagucacuaguaaugucc

SEQ ID NO: 28844 - RNA, 19 nt, Artificial Sequence
  Synthetic oligonucleotide: FAS-2870
ugagucacuaguaaugucc

SEQ ID NO: 28845 - RNA, 20 nt, Artificial Sequence
  Synthetic oligonucleotide: FAS-485
cugagucacuaguaaugucc

SEQ ID NO: 28846 - RNA, 21 nt, Artificial Sequence
  Synthetic oligonucleotide: FAS-2871
ucugagucacuaguaaugucc

SEQ ID NO: 28847 - RNA, 22 nt, Artificial Sequence
  Synthetic oligonucleotide: FAS-2872
uucugagucacuaguaaugucc

SEQ ID NO: 28848 - RNA, 23 nt, Artificial Sequence
  Synthetic oligonucleotide: FAS-2873
uuucugagucacuaguaaugucc

SEQ ID NO: 28849 - RNA, 24 nt, Artificial Sequence
  Synthetic oligonucleotide: FAS-2874
uuuucugagucacuaguaaugucc

SEQ ID NO: 28850 - RNA, 18 nt, Artificial Sequence
  Synthetic oligonucleotide: FAS-2875
auacgcuucuuucuuucc

SEQ ID NO: 28851 - RNA, 19 nt, Artificial Sequence
  Synthetic oligonucleotide: FAS-2876
cauacgcuucuuucuuucc

SEQ ID NO: 28852 - RNA, 20 nt, Artificial Sequence
  Synthetic oligonucleotide: FAS-490
ucauacgcuucuuucuuucc

SEQ ID NO: 28853 - RNA, 21 nt, Artificial Sequence
  Synthetic oligonucleotide: FAS-2877
gucauacgcuucuuucuuucc

SEQ ID NO: 28854 - RNA, 22 nt, Artificial Sequence
  Synthetic oligonucleotide: FAS-2878
ugucauacgcuucuuucuuucc

SEQ ID NO: 28855 - RNA, 23 nt, Artificial Sequence
  Synthetic oligonucleotide: FAS-2879
gugucauacgcuucuuucuuucc

SEQ ID NO: 28856 - RNA, 24 nt, Artificial Sequence
  Synthetic oligonucleotide: FAS-2880
ugugucauacgcuucuuucuuucc

SEQ ID NO: 28857 - RNA, 18 nt, Artificial Sequence
  Synthetic oligonucleotide: FAS-2881
uuuauugccacuguuucc

SEQ ID NO: 28858 - RNA, 19 nt, Artificial Sequence
  Synthetic oligonucleotide: FAS-2882
auuuauugccacuguuucc

SEQ ID NO: 28859 - RNA, 20 nt, Artificial Sequence
  Synthetic oligonucleotide: FAS-498
aauuuauugccacuguuucc

SEQ ID NO: 28860 - RNA, 21 nt, Artificial Sequence
  Synthetic oligonucleotide: FAS-2883
aaauuuauugccacuguuucc

SEQ ID NO: 28861 - RNA, 22 nt, Artificial Sequence
  Synthetic oligonucleotide: FAS-2884
uaaauuuauugccacuguuucc

SEQ ID NO: 28862 - RNA, 23 nt, Artificial Sequence
  Synthetic oligonucleotide: FAS-2885
auaaauuuauugccacuguuucc

SEQ ID NO: 28863 - RNA, 24 nt, Artificial Sequence
  Synthetic oligonucleotide: FAS-2886
gauaaauuuauugccacuguuucc

SEQ ID NO: 28864 - RNA, 18 nt, Artificial Sequence
  Synthetic oligonucleotide: FAS-2887
cugcaguuugaacaaagc

SEQ ID NO: 28865 - RNA, 19 nt, Artificial Sequence
  Synthetic oligonucleotide: FAS-2888
ucugcaguuugaacaaagc

SEQ ID NO: 28866 - RNA, 20 nt, Artificial Sequence
  Synthetic oligonucleotide: FAS-511
aucugcaguuugaacaaagc

SEQ ID NO: 28867 - RNA, 18 nt, Artificial Sequence
  Synthetic oligonucleotide: FAS-2889
uuucuguucugcuguguc

SEQ ID NO: 28868 - RNA, 19 nt, Artificial Sequence
  Synthetic oligonucleotide: FAS-2890
cuuucuguucugcuguguc

SEQ ID NO: 28869 - RNA, 20 nt, Artificial Sequence
  Synthetic oligonucleotide: FAS-493
acuuucuguucugcuguguc

SEQ ID NO: 28870 - RNA, 21 nt, Artificial Sequence
  Synthetic oligonucleotide: FAS-2891
aacuuucuguucugcuguguc

SEQ ID NO: 28871 - RNA, 22 nt, Artificial Sequence
  Synthetic oligonucleotide: FAS-2892
gaacuuucuguucugcuguguc

SEQ ID NO: 28872 - RNA, 23 nt, Artificial Sequence
  Synthetic oligonucleotide: FAS-2893
ugaacuuucuguucugcuguguc

SEQ ID NO: 28873 - RNA, 24 nt, Artificial Sequence
  Synthetic oligonucleotide: FAS-2894
uugaacuuucuguucugcuguguc

SEQ ID NO: 28874 - RNA, 18 nt, Artificial Sequence
  Synthetic oligonucleotide: FAS-2895
auuuaaaguuggagauuc

SEQ ID NO: 28875 - RNA, 19 nt, Artificial Sequence
  Synthetic oligonucleotide: FAS-2896
gauuuaaaguuggagauuc

SEQ ID NO: 28876 - RNA, 20 nt, Artificial Sequence
  Synthetic oligonucleotide: FAS-506
ggauuuaaaguuggagauuc

SEQ ID NO: 28877 - RNA, 21 nt, Artificial Sequence
  Synthetic oligonucleotide: FAS-2897
aggauuuaaaguuggagauuc

SEQ ID NO: 28878 - RNA, 22 nt, Artificial Sequence
  Synthetic oligonucleotide: FAS-2898
caggauuuaaaguuggagauuc

SEQ ID NO: 28879 - RNA, 23 nt, Artificial Sequence
  Synthetic oligonucleotide: FAS-2899
acaggauuuaaaguuggagauuc

SEQ ID NO: 28880 - RNA, 24 nt, Artificial Sequence
  Synthetic oligonucleotide: FAS-2900
uacaggauuuaaaguuggagauuc

SEQ ID NO: 28881 - RNA, 18 nt, Artificial Sequence
  Synthetic oligonucleotide: FAS-2901
uaguggaauuggcaaaag

SEQ ID NO: 28882 - RNA, 19 nt, Artificial Sequence
  Synthetic oligonucleotide: FAS-2902
uuaguggaauuggcaaaag

SEQ ID NO: 28883 - RNA, 20 nt, Artificial Sequence
  Synthetic oligonucleotide: FAS-515
auuaguggaauuggcaaaag

SEQ ID NO: 28884 - RNA, 21 nt, Artificial Sequence
  Synthetic oligonucleotide: FAS-2903
aauuaguggaauuggcaaaag

SEQ ID NO: 28885 - RNA, 22 nt, Artificial Sequence
  Synthetic oligonucleotide: FAS-2904
caauuaguggaauuggcaaaag

SEQ ID NO: 28886 - RNA, 23 nt, Artificial Sequence
  Synthetic oligonucleotide: FAS-2905
acaauuaguggaauuggcaaaag

SEQ ID NO: 28887 - RNA, 24 nt, Artificial Sequence
  Synthetic oligonucleotide: FAS-2906
aacaauuaguggaauuggcaaaag

SEQ ID NO: 28888 - RNA, 18 nt, Artificial Sequence
  Synthetic oligonucleotide: FAS-2907
uaccuacaggauuuaaag

SEQ ID NO: 28889 - RNA, 19 nt, Artificial Sequence
  Synthetic oligonucleotide: FAS-2908
auaccuacaggauuuaaag

SEQ ID NO: 28890 - RNA, 20 nt, Artificial Sequence
  Synthetic oligonucleotide: FAS-504
aauaccuacaggauuuaaag

SEQ ID NO: 28891 - RNA, 21 nt, Artificial Sequence
  Synthetic oligonucleotide: FAS-2909
caauaccuacaggauuuaaag

SEQ ID NO: 28892 - RNA, 22 nt, Artificial Sequence
  Synthetic oligonucleotide: FAS-2910
ucaauaccuacaggauuuaaag

SEQ ID NO: 28893 - RNA, 23 nt, Artificial Sequence
  Synthetic oligonucleotide: FAS-2911
uucaauaccuacaggauuuaaag

SEQ ID NO: 28894 - RNA, 24 nt, Artificial Sequence
  Synthetic oligonucleotide: FAS-2912
uuucaauaccuacaggauuuaaag

SEQ ID NO: 28895 - RNA, 18 nt, Artificial Sequence
  Synthetic oligonucleotide: FAS-2913
gaaagcaaaaaauggaag

SEQ ID NO: 28896 - RNA, 19 nt, Artificial Sequence
  Synthetic oligonucleotide: FAS-2914
agaaagcaaaaaauggaag

SEQ ID NO: 28897 - RNA, 20 nt, Artificial Sequence
  Synthetic oligonucleotide: FAS-501
uagaaagcaaaaaauggaag

SEQ ID NO: 28898 - RNA, 21 nt, Artificial Sequence
  Synthetic oligonucleotide: FAS-2915
cuagaaagcaaaaaauggaag

SEQ ID NO: 28899 - RNA, 22 nt, Artificial Sequence
  Synthetic oligonucleotide: FAS-2916
ccuagaaagcaaaaaauggaag

SEQ ID NO: 28900 - RNA, 23 nt, Artificial Sequence
  Synthetic oligonucleotide: FAS-2917
uccuagaaagcaaaaaauggaag

SEQ ID NO: 28901 - RNA, 24 nt, Artificial Sequence
  Synthetic oligonucleotide: FAS-2918
uuccuagaaagcaaaaaauggaag

SEQ ID NO: 28902 - RNA, 18 nt, Artificial Sequence
  Synthetic oligonucleotide: FAS-2919
augccaauuacgaagcag

SEQ ID NO: 28903 - RNA, 19 nt, Artificial Sequence
  Synthetic oligonucleotide: FAS-2920
gaugccaauuacgaagcag

SEQ ID NO: 28904 - RNA, 20 nt, Artificial Sequence
  Synthetic oligonucleotide: FAS-492
ugaugccaauuacgaagcag

SEQ ID NO: 28905 - RNA, 21 nt, Artificial Sequence
  Synthetic oligonucleotide: FAS-2921
uugaugccaauuacgaagcag

SEQ ID NO: 28906 - RNA, 22 nt, Artificial Sequence
  Synthetic oligonucleotide: FAS-2922
guugaugccaauuacgaagcag

SEQ ID NO: 28907 - RNA, 23 nt, Artificial Sequence
  Synthetic oligonucleotide: FAS-2923
aguugaugccaauuacgaagcag

SEQ ID NO: 28908 - RNA, 24 nt, Artificial Sequence
  Synthetic oligonucleotide: FAS-2924
aaguugaugccaauuacgaagcag

SEQ ID NO: 28909 - RNA, 18 nt, Artificial Sequence
  Synthetic oligonucleotide: FAS-2925
agaucuggauccuguagg

SEQ ID NO: 28910 - RNA, 19 nt, Artificial Sequence
  Synthetic oligonucleotide: FAS-2926
uagaucuggauccuguagg

SEQ ID NO: 28911 - RNA, 20 nt, Artificial Sequence
  Synthetic oligonucleotide: FAS-517
uuagaucuggauccuguagg

SEQ ID NO: 28912 - RNA, 21 nt, Artificial Sequence
  Synthetic oligonucleotide: FAS-2927
guuagaucuggauccuguagg

SEQ ID NO: 28913 - RNA, 22 nt, Artificial Sequence
  Synthetic oligonucleotide: FAS-2928
aguuagaucuggauccuguagg

SEQ ID NO: 28914 - RNA, 23 nt, Artificial Sequence
  Synthetic oligonucleotide: FAS-2929
aaguuagaucuggauccuguagg

SEQ ID NO: 28915 - RNA, 24 nt, Artificial Sequence
  Synthetic oligonucleotide: FAS-2930
caaguuagaucuggauccuguagg

SEQ ID NO: 28916 - RNA, 18 nt, Artificial Sequence
  Synthetic oligonucleotide: FAS-2931
auuuacucaagucaacau

SEQ ID NO: 28917 - RNA, 19 nt, Artificial Sequence
  Synthetic oligonucleotide: FAS-2932
uauuuacucaagucaacau

SEQ ID NO: 28918 - RNA, 20 nt, Artificial Sequence
  Synthetic oligonucleotide: FAS-495
auauuuacucaagucaacau

SEQ ID NO: 28919 - RNA, 21 nt, Artificial Sequence
  Synthetic oligonucleotide: FAS-2933
uauauuuacucaagucaacau

SEQ ID NO: 28920 - RNA, 22 nt, Artificial Sequence
  Synthetic oligonucleotide: FAS-2934
auauauuuacucaagucaacau

SEQ ID NO: 28921 - RNA, 23 nt, Artificial Sequence
  Synthetic oligonucleotide: FAS-2935
gauauauuuacucaagucaacau

SEQ ID NO: 28922 - RNA, 24 nt, Artificial Sequence
  Synthetic oligonucleotide: FAS-2936
ugauauauuuacucaagucaacau

SEQ ID NO: 28923 - RNA, 18 nt, Artificial Sequence
  Synthetic oligonucleotide: FAS-2937
uuaaaguuggagauucau

SEQ ID NO: 28924 - RNA, 19 nt, Artificial Sequence
  Synthetic oligonucleotide: FAS-2938
uuuaaaguuggagauucau

SEQ ID NO: 28925 - RNA, 20 nt, Artificial Sequence
  Synthetic oligonucleotide: FAS-507
auuuaaaguuggagauucau

SEQ ID NO: 28926 - RNA, 21 nt, Artificial Sequence
  Synthetic oligonucleotide: FAS-2939
gauuuaaaguuggagauucau

SEQ ID NO: 28927 - RNA, 22 nt, Artificial Sequence
  Synthetic oligonucleotide: FAS-2940
ggauuuaaaguuggagauucau

SEQ ID NO: 28928 - RNA, 23 nt, Artificial Sequence
  Synthetic oligonucleotide: FAS-2941
aggauuuaaaguuggagauucau

SEQ ID NO: 28929 - RNA, 24 nt, Artificial Sequence
  Synthetic oligonucleotide: FAS-2942
caggauuuaaaguuggagauucau

SEQ ID NO: 28930 - RNA, 18 nt, Artificial Sequence
  Synthetic oligonucleotide: FAS-2943
accuacaggauuuaaagu

SEQ ID NO: 28931 - RNA, 19 nt, Artificial Sequence
  Synthetic oligonucleotide: FAS-2944
uaccuacaggauuuaaagu

SEQ ID NO: 28932 - RNA, 20 nt, Artificial Sequence
  Synthetic oligonucleotide: FAS-317
auaccuacaggauuuaaagu

SEQ ID NO: 28933 - RNA, 21 nt, Artificial Sequence
  Synthetic oligonucleotide: FAS-2945
aauaccuacaggauuuaaagu

SEQ ID NO: 28934 - RNA, 22 nt, Artificial Sequence
  Synthetic oligonucleotide: FAS-2946
caauaccuacaggauuuaaagu

SEQ ID NO: 28935 - RNA, 23 nt, Artificial Sequence
  Synthetic oligonucleotide: FAS-2947
ucaauaccuacaggauuuaaagu

SEQ ID NO: 28936 - RNA, 24 nt, Artificial Sequence
  Synthetic oligonucleotide: FAS-2948
uucaauaccuacaggauuuaaagu

SEQ ID NO: 28937 - RNA, 18 nt, Artificial Sequence
  Synthetic oligonucleotide: FAS-2949
ugaaaaauagaaaauagu

SEQ ID NO: 28938 - RNA, 19 nt, Artificial Sequence
  Synthetic oligonucleotide: FAS-2950
cugaaaaauagaaaauagu

SEQ ID NO: 28939 - RNA, 20 nt, Artificial Sequence
  Synthetic oligonucleotide: FAS-497
ucugaaaaauagaaaauagu

SEQ ID NO: 28940 - RNA, 21 nt, Artificial Sequence
  Synthetic oligonucleotide: FAS-2951
aucugaaaaauagaaaauagu

SEQ ID NO: 28941 - RNA, 22 nt, Artificial Sequence
  Synthetic oligonucleotide: FAS-2952
caucugaaaaauagaaaauagu

SEQ ID NO: 28942 - RNA, 23 nt, Artificial Sequence
  Synthetic oligonucleotide: FAS-2953
acaucugaaaaauagaaaauagu

SEQ ID NO: 28943 - RNA, 24 nt, Artificial Sequence
  Synthetic oligonucleotide: FAS-2954
aacaucugaaaaauagaaaauagu

SEQ ID NO: 28944 - RNA, 18 nt, Artificial Sequence
  Synthetic oligonucleotide: FAS-2955
gaucuggauccuguaggu

SEQ ID NO: 28945 - RNA, 19 nt, Artificial Sequence
  Synthetic oligonucleotide: FAS-2956
agaucuggauccuguaggu

SEQ ID NO: 28946 - RNA, 20 nt, Artificial Sequence
  Synthetic oligonucleotide: FAS-323
uagaucuggauccuguaggu

SEQ ID NO: 28947 - RNA, 21 nt, Artificial Sequence
  Synthetic oligonucleotide: FAS-2957
uuagaucuggauccuguaggu

SEQ ID NO: 28948 - RNA, 22 nt, Artificial Sequence
  Synthetic oligonucleotide: FAS-2958
guuagaucuggauccuguaggu

SEQ ID NO: 28949 - RNA, 23 nt, Artificial Sequence
  Synthetic oligonucleotide: FAS-2959
aguuagaucuggauccuguaggu

SEQ ID NO: 28950 - RNA, 24 nt, Artificial Sequence
  Synthetic oligonucleotide: FAS-2960
aaguuagaucuggauccuguaggu

SEQ ID NO: 28951 - RNA, 18 nt, Artificial Sequence
  Synthetic oligonucleotide: FAS-2961
augaaguugaugccaauu

SEQ ID NO: 28952 - RNA, 19 nt, Artificial Sequence
  Synthetic oligonucleotide: FAS-2962
caugaaguugaugccaauu

SEQ ID NO: 28953 - RNA, 20 nt, Artificial Sequence
  Synthetic oligonucleotide: FAS-491
ccaugaaguugaugccaauu

SEQ ID NO: 28954 - RNA, 21 nt, Artificial Sequence
  Synthetic oligonucleotide: FAS-2963
uccaugaaguugaugccaauu

SEQ ID NO: 28955 - RNA, 22 nt, Artificial Sequence
  Synthetic oligonucleotide: FAS-2964
uuccaugaaguugaugccaauu

SEQ ID NO: 28956 - RNA, 23 nt, Artificial Sequence
  Synthetic oligonucleotide: FAS-2965
uuuccaugaaguugaugccaauu

SEQ ID NO: 28957 - RNA, 24 nt, Artificial Sequence
  Synthetic oligonucleotide: FAS-2966
cuuuccaugaaguugaugccaauu

SEQ ID NO: 28958 - RNA, 18 nt, Artificial Sequence
  Synthetic oligonucleotide: FAS-2967
uucauugacaccauucuu

SEQ ID NO: 28959 - RNA, 19 nt, Artificial Sequence
  Synthetic oligonucleotide: FAS-2968
cuucauugacaccauucuu

SEQ ID NO: 28960 - RNA, 20 nt, Artificial Sequence
  Synthetic oligonucleotide: FAS-494
gcuucauugacaccauucuu

SEQ ID NO: 28961 - RNA, 21 nt, Artificial Sequence
  Synthetic oligonucleotide: FAS-2969
ggcuucauugacaccauucuu

SEQ ID NO: 28962 - RNA, 22 nt, Artificial Sequence
  Synthetic oligonucleotide: FAS-2970
uggcuucauugacaccauucuu

SEQ ID NO: 28963 - RNA, 23 nt, Artificial Sequence
  Synthetic oligonucleotide: FAS-2971
uuggcuucauugacaccauucuu

SEQ ID NO: 28964 - RNA, 24 nt, Artificial Sequence
  Synthetic oligonucleotide: FAS-2972
uuuggcuucauugacaccauucuu

SEQ ID NO: 28965 - RNA, 18 nt, Artificial Sequence
  Synthetic oligonucleotide: FAS-2973
aagcuuuggauuucauuu

SEQ ID NO: 28966 - RNA, 19 nt, Artificial Sequence
  Synthetic oligonucleotide: FAS-2974
caagcuuuggauuucauuu

SEQ ID NO: 28967 - RNA, 20 nt, Artificial Sequence
  Synthetic oligonucleotide: FAS-482
ccaagcuuuggauuucauuu

SEQ ID NO: 28968 - RNA, 21 nt, Artificial Sequence
  Synthetic oligonucleotide: FAS-2975
accaagcuuuggauuucauuu

SEQ ID NO: 28969 - RNA, 22 nt, Artificial Sequence
  Synthetic oligonucleotide: FAS-2976
gaccaagcuuuggauuucauuu

SEQ ID NO: 28970 - RNA, 23 nt, Artificial Sequence
  Synthetic oligonucleotide: FAS-2977
agaccaagcuuuggauuucauuu

SEQ ID NO: 28971 - RNA, 24 nt, Artificial Sequence
  Synthetic oligonucleotide: FAS-2978
uagaccaagcuuuggauuucauuu

SEQ ID NO: 28972 - RNA, 18 nt, Artificial Sequence
  Synthetic oligonucleotide: FAS-2979
guacaaagauuggcuuuu

SEQ ID NO: 28973 - RNA, 19 nt, Artificial Sequence
  Synthetic oligonucleotide: FAS-2980
aguacaaagauuggcuuuu

SEQ ID NO: 28974 - RNA, 20 nt, Artificial Sequence
  Synthetic oligonucleotide: FAS-489
gaguacaaagauuggcuuuu

SEQ ID NO: 28975 - RNA, 21 nt, Artificial Sequence
  Synthetic oligonucleotide: FAS-2981
agaguacaaagauuggcuuuu

SEQ ID NO: 28976 - RNA, 22 nt, Artificial Sequence
  Synthetic oligonucleotide: FAS-2982
aagaguacaaagauuggcuuuu

SEQ ID NO: 28977 - RNA, 23 nt, Artificial Sequence
  Synthetic oligonucleotide: FAS-2983
caagaguacaaagauuggcuuuu

SEQ ID NO: 28978 - RNA, 24 nt, Artificial Sequence
  Synthetic oligonucleotide: FAS-2984
gcaagaguacaaagauuggcuuuu

SEQ ID NO: 28979 - RNA, 18 nt, Artificial Sequence
  Synthetic oligonucleotide: FAS-2985
caugcagaaagcacagaa

SEQ ID NO: 28980 - RNA, 19 nt, Artificial Sequence
  Synthetic oligonucleotide: FAS-2986
acaugcagaaagcacagaa

SEQ ID NO: 28981 - RNA, 20 nt, Artificial Sequence
  Synthetic oligonucleotide: FAS-262
aacaugcagaaagcacagaa

SEQ ID NO: 28982 - RNA, 21 nt, Artificial Sequence
  Synthetic oligonucleotide: FAS-2987
aaacaugcagaaagcacagaa

SEQ ID NO: 28983 - RNA, 22 nt, Artificial Sequence
  Synthetic oligonucleotide: FAS-2988
aaaacaugcagaaagcacagaa

SEQ ID NO: 28984 - RNA, 23 nt, Artificial Sequence
  Synthetic oligonucleotide: FAS-2989
gaaaacaugcagaaagcacagaa

SEQ ID NO: 28985 - RNA, 24 nt, Artificial Sequence
  Synthetic oligonucleotide: FAS-2990
agaaaacaugcagaaagcacagaa

SEQ ID NO: 28986 - RNA, 18 nt, Artificial Sequence
  Synthetic oligonucleotide: FAS-2991
guccaagacacagcagaa

SEQ ID NO: 28987 - RNA, 19 nt, Artificial Sequence
  Synthetic oligonucleotide: FAS-2992
uguccaagacacagcagaa

SEQ ID NO: 28988 - RNA, 20 nt, Artificial Sequence
  Synthetic oligonucleotide: FAS-410
auguccaagacacagcagaa

SEQ ID NO: 28989 - RNA, 21 nt, Artificial Sequence
  Synthetic oligonucleotide: FAS-2993
aauguccaagacacagcagaa

SEQ ID NO: 28990 - RNA, 22 nt, Artificial Sequence
  Synthetic oligonucleotide: FAS-2994
caauguccaagacacagcagaa

SEQ ID NO: 28991 - RNA, 23 nt, Artificial Sequence
  Synthetic oligonucleotide: FAS-2995
acaauguccaagacacagcagaa

SEQ ID NO: 28992 - RNA, 24 nt, Artificial Sequence
  Synthetic oligonucleotide: FAS-2996
gacaauguccaagacacagcagaa

SEQ ID NO: 28993 - RNA, 18 nt, Artificial Sequence
  Synthetic oligonucleotide: FAS-2997
aaaauucaaacuucagaa

SEQ ID NO: 28994 - RNA, 19 nt, Artificial Sequence
  Synthetic oligonucleotide: FAS-2998
gaaaauucaaacuucagaa

SEQ ID NO: 28995 - RNA, 20 nt, Artificial Sequence
  Synthetic oligonucleotide: FAS-420
agaaaauucaaacuucagaa

SEQ ID NO: 28996 - RNA, 21 nt, Artificial Sequence
  Synthetic oligonucleotide: FAS-2999
cagaaaauucaaacuucagaa

SEQ ID NO: 28997 - RNA, 22 nt, Artificial Sequence
  Synthetic oligonucleotide: FAS-3000
ucagaaaauucaaacuucagaa

SEQ ID NO: 28998 - RNA, 23 nt, Artificial Sequence
  Synthetic oligonucleotide: FAS-3001
cucagaaaauucaaacuucagaa

SEQ ID NO: 28999 - RNA, 24 nt, Artificial Sequence
  Synthetic oligonucleotide: FAS-3002
acucagaaaauucaaacuucagaa

SEQ ID NO: 29000 - RNA, 18 nt, Artificial Sequence
  Synthetic oligonucleotide: FAS-3003
uucuuucagugaagagaa

SEQ ID NO: 29001 - RNA, 19 nt, Artificial Sequence
  Synthetic oligonucleotide: FAS-3004
guucuuucagugaagagaa

SEQ ID NO: 29002 - RNA, 20 nt, Artificial Sequence
  Synthetic oligonucleotide: FAS-261
uguucuuucagugaagagaa

SEQ ID NO: 29003 - RNA, 21 nt, Artificial Sequence
  Synthetic oligonucleotide: FAS-3005
uuguucuuucagugaagagaa

SEQ ID NO: 29004 - RNA, 22 nt, Artificial Sequence
  Synthetic oligonucleotide: FAS-3006
uuuguucuuucagugaagagaa

SEQ ID NO: 29005 - RNA, 23 nt, Artificial Sequence
  Synthetic oligonucleotide: FAS-3007
cuuuguucuuucagugaagagaa

SEQ ID NO: 29006 - RNA, 24 nt, Artificial Sequence
  Synthetic oligonucleotide: FAS-3008
ucuuuguucuuucagugaagagaa

SEQ ID NO: 29007 - RNA, 18 nt, Artificial Sequence
  Synthetic oligonucleotide: FAS-3009
cuuuguucuuucagugaa

SEQ ID NO: 29008 - RNA, 19 nt, Artificial Sequence
  Synthetic oligonucleotide: FAS-3010
ucuuuguucuuucagugaa

SEQ ID NO: 29009 - RNA, 20 nt, Artificial Sequence
  Synthetic oligonucleotide: FAS-388
uucuuuguucuuucagugaa

SEQ ID NO: 29010 - RNA, 21 nt, Artificial Sequence
  Synthetic oligonucleotide: FAS-3011
uuucuuuguucuuucagugaa

SEQ ID NO: 29011 - RNA, 22 nt, Artificial Sequence
  Synthetic oligonucleotide: FAS-3012
auuucuuuguucuuucagugaa

SEQ ID NO: 29012 - RNA, 23 nt, Artificial Sequence
  Synthetic oligonucleotide: FAS-3013
aauuucuuuguucuuucagugaa

SEQ ID NO: 29013 - RNA, 24 nt, Artificial Sequence
  Synthetic oligonucleotide: FAS-3014
aaauuucuuuguucuuucagugaa

SEQ ID NO: 29014 - RNA, 18 nt, Artificial Sequence
  Synthetic oligonucleotide: FAS-3015
gaaaacaugcagaaagca

SEQ ID NO: 29015 - RNA, 19 nt, Artificial Sequence
  Synthetic oligonucleotide: FAS-3016
agaaaacaugcagaaagca

SEQ ID NO: 29016 - RNA, 20 nt, Artificial Sequence
  Synthetic oligonucleotide: FAS-393
cagaaaacaugcagaaagca

SEQ ID NO: 29017 - RNA, 21 nt, Artificial Sequence
  Synthetic oligonucleotide: FAS-3017
acagaaaacaugcagaaagca

SEQ ID NO: 29018 - RNA, 22 nt, Artificial Sequence
  Synthetic oligonucleotide: FAS-3018
uacagaaaacaugcagaaagca

SEQ ID NO: 29019 - RNA, 23 nt, Artificial Sequence
  Synthetic oligonucleotide: FAS-3019
guacagaaaacaugcagaaagca

SEQ ID NO: 29020 - RNA, 24 nt, Artificial Sequence
  Synthetic oligonucleotide: FAS-3020
aguacagaaaacaugcagaaagca

SEQ ID NO: 29021 - RNA, 18 nt, Artificial Sequence
  Synthetic oligonucleotide: FAS-3021
aaucuuuguacucuugca

SEQ ID NO: 29022 - RNA, 19 nt, Artificial Sequence
  Synthetic oligonucleotide: FAS-3022
caaucuuuguacucuugca

SEQ ID NO: 29023 - RNA, 20 nt, Artificial Sequence
  Synthetic oligonucleotide: FAS-416
ccaaucuuuguacucuugca

SEQ ID NO: 29024 - RNA, 21 nt, Artificial Sequence
  Synthetic oligonucleotide: FAS-3023
gccaaucuuuguacucuugca

SEQ ID NO: 29025 - RNA, 22 nt, Artificial Sequence
  Synthetic oligonucleotide: FAS-3024
agccaaucuuuguacucuugca

SEQ ID NO: 29026 - RNA, 23 nt, Artificial Sequence
  Synthetic oligonucleotide: FAS-3025
aagccaaucuuuguacucuugca

SEQ ID NO: 29027 - RNA, 24 nt, Artificial Sequence
  Synthetic oligonucleotide: FAS-3026
aaagccaaucuuuguacucuugca

SEQ ID NO: 29028 - RNA, 18 nt, Artificial Sequence
  Synthetic oligonucleotide: FAS-3027
uucgaaagaaugguguca

SEQ ID NO: 29029 - RNA, 19 nt, Artificial Sequence
  Synthetic oligonucleotide: FAS-3028
guucgaaagaaugguguca

SEQ ID NO: 29030 - RNA, 20 nt, Artificial Sequence
  Synthetic oligonucleotide: FAS-406
uguucgaaagaaugguguca

SEQ ID NO: 29031 - RNA, 21 nt, Artificial Sequence
  Synthetic oligonucleotide: FAS-3029
uuguucgaaagaaugguguca

SEQ ID NO: 29032 - RNA, 22 nt, Artificial Sequence
  Synthetic oligonucleotide: FAS-3030
uuuguucgaaagaaugguguca

SEQ ID NO: 29033 - RNA, 23 nt, Artificial Sequence
  Synthetic oligonucleotide: FAS-3031
cuuuguucgaaagaaugguguca

SEQ ID NO: 29034 - RNA, 24 nt, Artificial Sequence
  Synthetic oligonucleotide: FAS-3032
gcuuuguucgaaagaaugguguca

SEQ ID NO: 29035 - RNA, 18 nt, Artificial Sequence
  Synthetic oligonucleotide: FAS-3033
uaauuggcaucaacuuca

SEQ ID NO: 29036 - RNA, 19 nt, Artificial Sequence
  Synthetic oligonucleotide: FAS-3034
guaauuggcaucaacuuca

SEQ ID NO: 29037 - RNA, 20 nt, Artificial Sequence
  Synthetic oligonucleotide: FAS-274
cguaauuggcaucaacuuca

SEQ ID NO: 29038 - RNA, 21 nt, Artificial Sequence
  Synthetic oligonucleotide: FAS-3035
ucguaauuggcaucaacuuca

SEQ ID NO: 29039 - RNA, 22 nt, Artificial Sequence
  Synthetic oligonucleotide: FAS-3036
uucguaauuggcaucaacuuca

SEQ ID NO: 29040 - RNA, 23 nt, Artificial Sequence
  Synthetic oligonucleotide: FAS-3037
cuucguaauuggcaucaacuuca

SEQ ID NO: 29041 - RNA, 24 nt, Artificial Sequence
  Synthetic oligonucleotide: FAS-3038
gcuucguaauuggcaucaacuuca

SEQ ID NO: 29042 - RNA, 18 nt, Artificial Sequence
  Synthetic oligonucleotide: FAS-3039
uuuuaucauuuuauuuca

SEQ ID NO: 29043 - RNA, 19 nt, Artificial Sequence
  Synthetic oligonucleotide: FAS-3040
cuuuuaucauuuuauuuca

SEQ ID NO: 29044 - RNA, 20 nt, Artificial Sequence
  Synthetic oligonucleotide: FAS-400
gcuuuuaucauuuuauuuca

SEQ ID NO: 29045 - RNA, 21 nt, Artificial Sequence
  Synthetic oligonucleotide: FAS-3041
ggcuuuuaucauuuuauuuca

SEQ ID NO: 29046 - RNA, 22 nt, Artificial Sequence
  Synthetic oligonucleotide: FAS-3042
aggcuuuuaucauuuuauuuca

SEQ ID NO: 29047 - RNA, 23 nt, Artificial Sequence
  Synthetic oligonucleotide: FAS-3043
aaggcuuuuaucauuuuauuuca

SEQ ID NO: 29048 - RNA, 24 nt, Artificial Sequence
  Synthetic oligonucleotide: FAS-3044
uaaggcuuuuaucauuuuauuuca

SEQ ID NO: 29049 - RNA, 18 nt, Artificial Sequence
  Synthetic oligonucleotide: FAS-3045
aauuucuuuguucuuuca

SEQ ID NO: 29050 - RNA, 19 nt, Artificial Sequence
  Synthetic oligonucleotide: FAS-3046
aaauuucuuuguucuuuca

SEQ ID NO: 29051 - RNA, 20 nt, Artificial Sequence
  Synthetic oligonucleotide: FAS-386
aaaauuucuuuguucuuuca

SEQ ID NO: 29052 - RNA, 21 nt, Artificial Sequence
  Synthetic oligonucleotide: FAS-3047
uaaaauuucuuuguucuuuca

SEQ ID NO: 29053 - RNA, 22 nt, Artificial Sequence
  Synthetic oligonucleotide: FAS-3048
auaaaauuucuuuguucuuuca

SEQ ID NO: 29054 - RNA, 23 nt, Artificial Sequence
  Synthetic oligonucleotide: FAS-3049
gauaaaauuucuuuguucuuuca

SEQ ID NO: 29055 - RNA, 24 nt, Artificial Sequence
  Synthetic oligonucleotide: FAS-3050
ugauaaaauuucuuuguucuuuca

SEQ ID NO: 29056 - RNA, 18 nt, Artificial Sequence
  Synthetic oligonucleotide: FAS-3051
aucaacuucauggaaaga

SEQ ID NO: 29057 - RNA, 19 nt, Artificial Sequence
  Synthetic oligonucleotide: FAS-3052
caucaacuucauggaaaga

SEQ ID NO: 29058 - RNA, 20 nt, Artificial Sequence
  Synthetic oligonucleotide: FAS-414
gcaucaacuucauggaaaga

SEQ ID NO: 29059 - RNA, 21 nt, Artificial Sequence
  Synthetic oligonucleotide: FAS-3053
ggcaucaacuucauggaaaga

SEQ ID NO: 29060 - RNA, 22 nt, Artificial Sequence
  Synthetic oligonucleotide: FAS-3054
uggcaucaacuucauggaaaga

SEQ ID NO: 29061 - RNA, 23 nt, Artificial Sequence
  Synthetic oligonucleotide: FAS-3055
uuggcaucaacuucauggaaaga

SEQ ID NO: 29062 - RNA, 24 nt, Artificial Sequence
  Synthetic oligonucleotide: FAS-3056
auuggcaucaacuucauggaaaga

SEQ ID NO: 29063 - RNA, 18 nt, Artificial Sequence
  Synthetic oligonucleotide: FAS-3057
acaugcagaaagcacaga

SEQ ID NO: 29064 - RNA, 19 nt, Artificial Sequence
  Synthetic oligonucleotide: FAS-3058
aacaugcagaaagcacaga

SEQ ID NO: 29065 - RNA, 20 nt, Artificial Sequence
  Synthetic oligonucleotide: FAS-394
aaacaugcagaaagcacaga

SEQ ID NO: 29066 - RNA, 21 nt, Artificial Sequence
  Synthetic oligonucleotide: FAS-3059
aaaacaugcagaaagcacaga

SEQ ID NO: 29067 - RNA, 22 nt, Artificial Sequence
  Synthetic oligonucleotide: FAS-3060
gaaaacaugcagaaagcacaga

SEQ ID NO: 29068 - RNA, 23 nt, Artificial Sequence
  Synthetic oligonucleotide: FAS-3061
agaaaacaugcagaaagcacaga

SEQ ID NO: 29069 - RNA, 24 nt, Artificial Sequence
  Synthetic oligonucleotide: FAS-3062
cagaaaacaugcagaaagcacaga

SEQ ID NO: 29070 - RNA, 18 nt, Artificial Sequence
  Synthetic oligonucleotide: FAS-3063
guucuuucagugaagaga

SEQ ID NO: 29071 - RNA, 19 nt, Artificial Sequence
  Synthetic oligonucleotide: FAS-3064
uguucuuucagugaagaga

SEQ ID NO: 29072 - RNA, 20 nt, Artificial Sequence
  Synthetic oligonucleotide: FAS-389
uuguucuuucagugaagaga

SEQ ID NO: 29073 - RNA, 21 nt, Artificial Sequence
  Synthetic oligonucleotide: FAS-3065
uuuguucuuucagugaagaga

SEQ ID NO: 29074 - RNA, 22 nt, Artificial Sequence
  Synthetic oligonucleotide: FAS-3066
cuuuguucuuucagugaagaga

SEQ ID NO: 29075 - RNA, 23 nt, Artificial Sequence
  Synthetic oligonucleotide: FAS-3067
ucuuuguucuuucagugaagaga

SEQ ID NO: 29076 - RNA, 24 nt, Artificial Sequence
  Synthetic oligonucleotide: FAS-3068
uucuuuguucuuucagugaagaga

SEQ ID NO: 29077 - RNA, 18 nt, Artificial Sequence
  Synthetic oligonucleotide: FAS-3069
uccaaagcuuggucuaga

SEQ ID NO: 29078 - RNA, 19 nt, Artificial Sequence
  Synthetic oligonucleotide: FAS-3070
auccaaagcuuggucuaga

SEQ ID NO: 29079 - RNA, 20 nt, Artificial Sequence
  Synthetic oligonucleotide: FAS-422
aauccaaagcuuggucuaga

SEQ ID NO: 29080 - RNA, 21 nt, Artificial Sequence
  Synthetic oligonucleotide: FAS-3071
aaauccaaagcuuggucuaga

SEQ ID NO: 29081 - RNA, 22 nt, Artificial Sequence
  Synthetic oligonucleotide: FAS-3072
gaaauccaaagcuuggucuaga

SEQ ID NO: 29082 - RNA, 23 nt, Artificial Sequence
  Synthetic oligonucleotide: FAS-3073
ugaaauccaaagcuuggucuaga

SEQ ID NO: 29083 - RNA, 24 nt, Artificial Sequence
  Synthetic oligonucleotide: FAS-3074
augaaauccaaagcuuggucuaga

SEQ ID NO: 29084 - RNA, 18 nt, Artificial Sequence
  Synthetic oligonucleotide: FAS-3075
uggcaucaacuucaugga

SEQ ID NO: 29085 - RNA, 19 nt, Artificial Sequence
  Synthetic oligonucleotide: FAS-3076
uuggcaucaacuucaugga

SEQ ID NO: 29086 - RNA, 20 nt, Artificial Sequence
  Synthetic oligonucleotide: FAS-413
auuggcaucaacuucaugga

SEQ ID NO: 29087 - RNA, 21 nt, Artificial Sequence
  Synthetic oligonucleotide: FAS-3077
aauuggcaucaacuucaugga

SEQ ID NO: 29088 - RNA, 22 nt, Artificial Sequence
  Synthetic oligonucleotide: FAS-3078
uaauuggcaucaacuucaugga

SEQ ID NO: 29089 - RNA, 23 nt, Artificial Sequence
  Synthetic oligonucleotide: FAS-3079
guaauuggcaucaacuucaugga

SEQ ID NO: 29090 - RNA, 24 nt, Artificial Sequence
  Synthetic oligonucleotide: FAS-3080
cguaauuggcaucaacuucaugga

SEQ ID NO: 29091 - RNA, 18 nt, Artificial Sequence
  Synthetic oligonucleotide: FAS-3081
gugaagagaaaggaagua

SEQ ID NO: 29092 - RNA, 19 nt, Artificial Sequence
  Synthetic oligonucleotide: FAS-3082
agugaagagaaaggaagua

SEQ ID NO: 29093 - RNA, 20 nt, Artificial Sequence
  Synthetic oligonucleotide: FAS-391
cagugaagagaaaggaagua

SEQ ID NO: 29094 - RNA, 21 nt, Artificial Sequence
  Synthetic oligonucleotide: FAS-3083
ucagugaagagaaaggaagua

SEQ ID NO: 29095 - RNA, 22 nt, Artificial Sequence
  Synthetic oligonucleotide: FAS-3084
uucagugaagagaaaggaagua

SEQ ID NO: 29096 - RNA, 23 nt, Artificial Sequence
  Synthetic oligonucleotide: FAS-3085
uuucagugaagagaaaggaagua

SEQ ID NO: 29097 - RNA, 24 nt, Artificial Sequence
  Synthetic oligonucleotide: FAS-3086
cuuucagugaagagaaaggaagua

SEQ ID NO: 29098 - RNA, 18 nt, Artificial Sequence
  Synthetic oligonucleotide: FAS-3087
cuuuaaauccuguaggua

SEQ ID NO: 29099 - RNA, 19 nt, Artificial Sequence
  Synthetic oligonucleotide: FAS-3088
acuuuaaauccuguaggua

SEQ ID NO: 29100 - RNA, 20 nt, Artificial Sequence
  Synthetic oligonucleotide: FAS-397
aacuuuaaauccuguaggua

SEQ ID NO: 29101 - RNA, 21 nt, Artificial Sequence
  Synthetic oligonucleotide: FAS-3089
caacuuuaaauccuguaggua

SEQ ID NO: 29102 - RNA, 22 nt, Artificial Sequence
  Synthetic oligonucleotide: FAS-3090
ccaacuuuaaauccuguaggua

SEQ ID NO: 29103 - RNA, 23 nt, Artificial Sequence
  Synthetic oligonucleotide: FAS-3091
uccaacuuuaaauccuguaggua

SEQ ID NO: 29104 - RNA, 24 nt, Artificial Sequence
  Synthetic oligonucleotide: FAS-3092
cuccaacuuuaaauccuguaggua

SEQ ID NO: 29105 - RNA, 18 nt, Artificial Sequence
  Synthetic oligonucleotide: FAS-3093
acaggauccagaucuaac

SEQ ID NO: 29106 - RNA, 19 nt, Artificial Sequence
  Synthetic oligonucleotide: FAS-3094
uacaggauccagaucuaac

SEQ ID NO: 29107 - RNA, 20 nt, Artificial Sequence
  Synthetic oligonucleotide: FAS-382
cuacaggauccagaucuaac

SEQ ID NO: 29108 - RNA, 21 nt, Artificial Sequence
  Synthetic oligonucleotide: FAS-3095
ccuacaggauccagaucuaac

SEQ ID NO: 29109 - RNA, 22 nt, Artificial Sequence
  Synthetic oligonucleotide: FAS-3096
accuacaggauccagaucuaac

SEQ ID NO: 29110 - RNA, 23 nt, Artificial Sequence
  Synthetic oligonucleotide: FAS-3097
aaccuacaggauccagaucuaac

SEQ ID NO: 29111 - RNA, 24 nt, Artificial Sequence
  Synthetic oligonucleotide: FAS-3098
caaccuacaggauccagaucuaac

SEQ ID NO: 29112 - RNA, 18 nt, Artificial Sequence
  Synthetic oligonucleotide: FAS-3099
auucagacuaucauccuc

SEQ ID NO: 29113 - RNA, 19 nt, Artificial Sequence
  Synthetic oligonucleotide: FAS-3100
aauucagacuaucauccuc

SEQ ID NO: 29114 - RNA, 20 nt, Artificial Sequence
  Synthetic oligonucleotide: FAS-417
aaauucagacuaucauccuc

SEQ ID NO: 29115 - RNA, 21 nt, Artificial Sequence
  Synthetic oligonucleotide: FAS-3101
aaaauucagacuaucauccuc

SEQ ID NO: 29116 - RNA, 22 nt, Artificial Sequence
  Synthetic oligonucleotide: FAS-3102
gaaaauucagacuaucauccuc

SEQ ID NO: 29117 - RNA, 23 nt, Artificial Sequence
  Synthetic oligonucleotide: FAS-3103
agaaaauucagacuaucauccuc

SEQ ID NO: 29118 - RNA, 24 nt, Artificial Sequence
  Synthetic oligonucleotide: FAS-3104
gagaaaauucagacuaucauccuc

SEQ ID NO: 29119 - RNA, 18 nt, Artificial Sequence
  Synthetic oligonucleotide: FAS-3105
guaauuggcaucaacuuc

SEQ ID NO: 29120 - RNA, 19 nt, Artificial Sequence
  Synthetic oligonucleotide: FAS-3106
cguaauuggcaucaacuuc

SEQ ID NO: 29121 - RNA, 20 nt, Artificial Sequence
  Synthetic oligonucleotide: FAS-411
ucguaauuggcaucaacuuc

SEQ ID NO: 29122 - RNA, 21 nt, Artificial Sequence
  Synthetic oligonucleotide: FAS-3107
uucguaauuggcaucaacuuc

SEQ ID NO: 29123 - RNA, 22 nt, Artificial Sequence
  Synthetic oligonucleotide: FAS-3108
cuucguaauuggcaucaacuuc

SEQ ID NO: 29124 - RNA, 23 nt, Artificial Sequence
  Synthetic oligonucleotide: FAS-3109
gcuucguaauuggcaucaacuuc

SEQ ID NO: 29125 - RNA, 24 nt, Artificial Sequence
  Synthetic oligonucleotide: FAS-3110
ugcuucguaauuggcaucaacuuc

SEQ ID NO: 29126 - RNA, 18 nt, Artificial Sequence
  Synthetic oligonucleotide: FAS-3111
cuuccauuuuuugcuuuc

SEQ ID NO: 29127 - RNA, 19 nt, Artificial Sequence
  Synthetic oligonucleotide: FAS-3112
gcuuccauuuuuugcuuuc

SEQ ID NO: 29128 - RNA, 20 nt, Artificial Sequence
  Synthetic oligonucleotide: FAS-398
ugcuuccauuuuuugcuuuc

SEQ ID NO: 29129 - RNA, 21 nt, Artificial Sequence
  Synthetic oligonucleotide: FAS-3113
cugcuuccauuuuuugcuuuc

SEQ ID NO: 29130 - RNA, 22 nt, Artificial Sequence
  Synthetic oligonucleotide: FAS-3114
ucugcuuccauuuuuugcuuuc

SEQ ID NO: 29131 - RNA, 23 nt, Artificial Sequence
  Synthetic oligonucleotide: FAS-3115
cucugcuuccauuuuuugcuuuc

SEQ ID NO: 29132 - RNA, 24 nt, Artificial Sequence
  Synthetic oligonucleotide: FAS-3116
ucucugcuuccauuuuuugcuuuc

SEQ ID NO: 29133 - RNA, 18 nt, Artificial Sequence
  Synthetic oligonucleotide: FAS-3117
acaauguccaagacacag

SEQ ID NO: 29134 - RNA, 19 nt, Artificial Sequence
  Synthetic oligonucleotide: FAS-3118
gacaauguccaagacacag

SEQ ID NO: 29135 - RNA, 20 nt, Artificial Sequence
  Synthetic oligonucleotide: FAS-409
ugacaauguccaagacacag

SEQ ID NO: 29136 - RNA, 21 nt, Artificial Sequence
  Synthetic oligonucleotide: FAS-3119
augacaauguccaagacacag

SEQ ID NO: 29137 - RNA, 22 nt, Artificial Sequence
  Synthetic oligonucleotide: FAS-3120
aaugacaauguccaagacacag

SEQ ID NO: 29138 - RNA, 23 nt, Artificial Sequence
  Synthetic oligonucleotide: FAS-3121
gaaugacaauguccaagacacag

SEQ ID NO: 29139 - RNA, 24 nt, Artificial Sequence
  Synthetic oligonucleotide: FAS-3122
agaaugacaauguccaagacacag

SEQ ID NO: 29140 - RNA, 18 nt, Artificial Sequence
  Synthetic oligonucleotide: FAS-3123
ucaaugaagccaaaauag

SEQ ID NO: 29141 - RNA, 19 nt, Artificial Sequence
  Synthetic oligonucleotide: FAS-3124
gucaaugaagccaaaauag

SEQ ID NO: 29142 - RNA, 20 nt, Artificial Sequence
  Synthetic oligonucleotide: FAS-407
ugucaaugaagccaaaauag

SEQ ID NO: 29143 - RNA, 21 nt, Artificial Sequence
  Synthetic oligonucleotide: FAS-3125
gugucaaugaagccaaaauag

SEQ ID NO: 29144 - RNA, 22 nt, Artificial Sequence
  Synthetic oligonucleotide: FAS-3126
ggugucaaugaagccaaaauag

SEQ ID NO: 29145 - RNA, 23 nt, Artificial Sequence
  Synthetic oligonucleotide: FAS-3127
uggugucaaugaagccaaaauag

SEQ ID NO: 29146 - RNA, 24 nt, Artificial Sequence
  Synthetic oligonucleotide: FAS-3128
auggugucaaugaagccaaaauag

SEQ ID NO: 29147 - RNA, 18 nt, Artificial Sequence
  Synthetic oligonucleotide: FAS-3129
ggaaguacagaaaacaug

SEQ ID NO: 29148 - RNA, 19 nt, Artificial Sequence
  Synthetic oligonucleotide: FAS-3130
aggaaguacagaaaacaug

SEQ ID NO: 29149 - RNA, 20 nt, Artificial Sequence
  Synthetic oligonucleotide: FAS-392
aaggaaguacagaaaacaug

SEQ ID NO: 29150 - RNA, 21 nt, Artificial Sequence
  Synthetic oligonucleotide: FAS-3131
aaaggaaguacagaaaacaug

SEQ ID NO: 29151 - RNA, 22 nt, Artificial Sequence
  Synthetic oligonucleotide: FAS-3132
gaaaggaaguacagaaaacaug

SEQ ID NO: 29152 - RNA, 23 nt, Artificial Sequence
  Synthetic oligonucleotide: FAS-3133
agaaaggaaguacagaaaacaug

SEQ ID NO: 29153 - RNA, 24 nt, Artificial Sequence
  Synthetic oligonucleotide: FAS-3134
gagaaaggaaguacagaaaacaug

SEQ ID NO: 29154 - RNA, 18 nt, Artificial Sequence
  Synthetic oligonucleotide: FAS-3135
uucuuuguucuuucagug

SEQ ID NO: 29155 - RNA, 19 nt, Artificial Sequence
  Synthetic oligonucleotide: FAS-3136
uuucuuuguucuuucagug

SEQ ID NO: 29156 - RNA, 20 nt, Artificial Sequence
  Synthetic oligonucleotide: FAS-387
auuucuuuguucuuucagug

SEQ ID NO: 29157 - RNA, 21 nt, Artificial Sequence
  Synthetic oligonucleotide: FAS-3137
aauuucuuuguucuuucagug

SEQ ID NO: 29158 - RNA, 22 nt, Artificial Sequence
  Synthetic oligonucleotide: FAS-3138
aaauuucuuuguucuuucagug

SEQ ID NO: 29159 - RNA, 23 nt, Artificial Sequence
  Synthetic oligonucleotide: FAS-3139
aaaauuucuuuguucuuucagug

SEQ ID NO: 29160 - RNA, 24 nt, Artificial Sequence
  Synthetic oligonucleotide: FAS-3140
uaaaauuucuuuguucuuucagug

SEQ ID NO: 29161 - RNA, 18 nt, Artificial Sequence
  Synthetic oligonucleotide: FAS-3141
aauauaucaccacuauug

SEQ ID NO: 29162 - RNA, 19 nt, Artificial Sequence
  Synthetic oligonucleotide: FAS-3142
aaauauaucaccacuauug

SEQ ID NO: 29163 - RNA, 20 nt, Artificial Sequence
  Synthetic oligonucleotide: FAS-402
uaaauauaucaccacuauug

SEQ ID NO: 29164 - RNA, 21 nt, Artificial Sequence
  Synthetic oligonucleotide: FAS-3143
guaaauauaucaccacuauug

SEQ ID NO: 29165 - RNA, 22 nt, Artificial Sequence
  Synthetic oligonucleotide: FAS-3144
aguaaauauaucaccacuauug

SEQ ID NO: 29166 - RNA, 23 nt, Artificial Sequence
  Synthetic oligonucleotide: FAS-3145
gaguaaauauaucaccacuauug

SEQ ID NO: 29167 - RNA, 24 nt, Artificial Sequence
  Synthetic oligonucleotide: FAS-3146
ugaguaaauauaucaccacuauug

SEQ ID NO: 29168 - RNA, 18 nt, Artificial Sequence
  Synthetic oligonucleotide: FAS-3147
ccaaucuuuguacucuug

SEQ ID NO: 29169 - RNA, 19 nt, Artificial Sequence
  Synthetic oligonucleotide: FAS-3148
gccaaucuuuguacucuug

SEQ ID NO: 29170 - RNA, 20 nt, Artificial Sequence
  Synthetic oligonucleotide: FAS-415
agccaaucuuuguacucuug

SEQ ID NO: 29171 - RNA, 21 nt, Artificial Sequence
  Synthetic oligonucleotide: FAS-3149
aagccaaucuuuguacucuug

SEQ ID NO: 29172 - RNA, 22 nt, Artificial Sequence
  Synthetic oligonucleotide: FAS-3150
aaagccaaucuuuguacucuug

SEQ ID NO: 29173 - RNA, 23 nt, Artificial Sequence
  Synthetic oligonucleotide: FAS-3151
aaaagccaaucuuuguacucuug

SEQ ID NO: 29174 - RNA, 24 nt, Artificial Sequence
  Synthetic oligonucleotide: FAS-3152
aaaaagccaaucuuuguacucuug

SEQ ID NO: 29175 - RNA, 18 nt, Artificial Sequence
  Synthetic oligonucleotide: FAS-3153
aggacauuacuagugacu

SEQ ID NO: 29176 - RNA, 19 nt, Artificial Sequence
  Synthetic oligonucleotide: FAS-3154
aaggacauuacuagugacu

SEQ ID NO: 29177 - RNA, 20 nt, Artificial Sequence
  Synthetic oligonucleotide: FAS-418
caaggacauuacuagugacu

SEQ ID NO: 29178 - RNA, 21 nt, Artificial Sequence
  Synthetic oligonucleotide: FAS-3155
ucaaggacauuacuagugacu

SEQ ID NO: 29179 - RNA, 22 nt, Artificial Sequence
  Synthetic oligonucleotide: FAS-3156
cucaaggacauuacuagugacu

SEQ ID NO: 29180 - RNA, 23 nt, Artificial Sequence
  Synthetic oligonucleotide: FAS-3157
ccucaaggacauuacuagugacu

SEQ ID NO: 29181 - RNA, 24 nt, Artificial Sequence
  Synthetic oligonucleotide: FAS-3158
uccucaaggacauuacuagugacu

SEQ ID NO: 29182 - RNA, 18 nt, Artificial Sequence
  Synthetic oligonucleotide: FAS-3159
uuccauuuuuugcuuucu

SEQ ID NO: 29183 - RNA, 19 nt, Artificial Sequence
  Synthetic oligonucleotide: FAS-3160
cuuccauuuuuugcuuucu

SEQ ID NO: 29184 - RNA, 20 nt, Artificial Sequence
  Synthetic oligonucleotide: FAS-266
gcuuccauuuuuugcuuucu

SEQ ID NO: 29185 - RNA, 21 nt, Artificial Sequence
  Synthetic oligonucleotide: FAS-3161
ugcuuccauuuuuugcuuucu

SEQ ID NO: 29186 - RNA, 22 nt, Artificial Sequence
  Synthetic oligonucleotide: FAS-3162
cugcuuccauuuuuugcuuucu

SEQ ID NO: 29187 - RNA, 23 nt, Artificial Sequence
  Synthetic oligonucleotide: FAS-3163
ucugcuuccauuuuuugcuuucu

SEQ ID NO: 29188 - RNA, 24 nt, Artificial Sequence
  Synthetic oligonucleotide: FAS-3164
cucugcuuccauuuuuugcuuucu

SEQ ID NO: 29189 - RNA, 18 nt, Artificial Sequence
  Synthetic oligonucleotide: FAS-3165
gccaauuccacuaauugu

SEQ ID NO: 29190 - RNA, 19 nt, Artificial Sequence
  Synthetic oligonucleotide: FAS-3166
ugccaauuccacuaauugu

SEQ ID NO: 29191 - RNA, 20 nt, Artificial Sequence
  Synthetic oligonucleotide: FAS-384
uugccaauuccacuaauugu

SEQ ID NO: 29192 - RNA, 21 nt, Artificial Sequence
  Synthetic oligonucleotide: FAS-3167
uuugccaauuccacuaauugu

SEQ ID NO: 29193 - RNA, 22 nt, Artificial Sequence
  Synthetic oligonucleotide: FAS-3168
uuuugccaauuccacuaauugu

SEQ ID NO: 29194 - RNA, 23 nt, Artificial Sequence
  Synthetic oligonucleotide: FAS-3169
cuuuugccaauuccacuaauugu

SEQ ID NO: 29195 - RNA, 24 nt, Artificial Sequence
  Synthetic oligonucleotide: FAS-3170
ucuuuugccaauuccacuaauugu

SEQ ID NO: 29196 - RNA, 18 nt, Artificial Sequence
  Synthetic oligonucleotide: FAS-3171
ucaaguuaaaggcuuugu

SEQ ID NO: 29197 - RNA, 19 nt, Artificial Sequence
  Synthetic oligonucleotide: FAS-3172
gucaaguuaaaggcuuugu

SEQ ID NO: 29198 - RNA, 20 nt, Artificial Sequence
  Synthetic oligonucleotide: FAS-404
agucaaguuaaaggcuuugu

SEQ ID NO: 29199 - RNA, 21 nt, Artificial Sequence
  Synthetic oligonucleotide: FAS-3173
aagucaaguuaaaggcuuugu

SEQ ID NO: 29200 - RNA, 22 nt, Artificial Sequence
  Synthetic oligonucleotide: FAS-3174
uaagucaaguuaaaggcuuugu

SEQ ID NO: 29201 - RNA, 23 nt, Artificial Sequence
  Synthetic oligonucleotide: FAS-3175
cuaagucaaguuaaaggcuuugu

SEQ ID NO: 29202 - RNA, 24 nt, Artificial Sequence
  Synthetic oligonucleotide: FAS-3176
acuaagucaaguuaaaggcuuugu

SEQ ID NO: 29203 - RNA, 18 nt, Artificial Sequence
  Synthetic oligonucleotide: FAS-3177
cucagaaaauucaaacuu

SEQ ID NO: 29204 - RNA, 19 nt, Artificial Sequence
  Synthetic oligonucleotide: FAS-3178
acucagaaaauucaaacuu

SEQ ID NO: 29205 - RNA, 20 nt, Artificial Sequence
  Synthetic oligonucleotide: FAS-419
gacucagaaaauucaaacuu

SEQ ID NO: 29206 - RNA, 21 nt, Artificial Sequence
  Synthetic oligonucleotide: FAS-3179
ugacucagaaaauucaaacuu

SEQ ID NO: 29207 - RNA, 22 nt, Artificial Sequence
  Synthetic oligonucleotide: FAS-3180
gugacucagaaaauucaaacuu

SEQ ID NO: 29208 - RNA, 23 nt, Artificial Sequence
  Synthetic oligonucleotide: FAS-3181
agugacucagaaaauucaaacuu

SEQ ID NO: 29209 - RNA, 24 nt, Artificial Sequence
  Synthetic oligonucleotide: FAS-3182
uagugacucagaaaauucaaacuu

SEQ ID NO: 29210 - RNA, 17 nt, Artificial Sequence
  Synthetic oligonucleotide: FAS-231
cugcauuuggaagaaaa

SEQ ID NO: 29211 - RNA, 17 nt, Artificial Sequence
  Synthetic oligonucleotide: FAS-164
guaacauaccuggagga

SEQ ID NO: 29212 - RNA, 17 nt, Artificial Sequence
  Synthetic oligonucleotide: FAS-135
ugacugacaucaacucc

SEQ ID NO: 29213 - RNA, 17 nt, Artificial Sequence
  Synthetic oligonucleotide: FAS-146
auguuacacaaaacauc

SEQ ID NO: 29214 - RNA, 17 nt, Artificial Sequence
  Synthetic oligonucleotide: FAS-3183
ccauugacugugcaguc

SEQ ID NO: 29215 - RNA, 17 nt, Artificial Sequence
  Synthetic oligonucleotide: FAS-596
ggugagugugcauuccu

SEQ ID NO: 29216 - RNA, 17 nt, Artificial Sequence
  Synthetic oligonucleotide: FAS-3184
cccucuccugcccgggu

SEQ ID NO: 29217 - RNA, 17 nt, Artificial Sequence
  Synthetic oligonucleotide: FAS-240
agguucuuacgucuguu

SEQ ID NO: 29218 - RNA, 17 nt, Artificial Sequence
  Synthetic oligonucleotide: FAS-585
aguaaguuuuagucuuu

SEQ ID NO: 29219 - RNA, 17 nt, Artificial Sequence
  Synthetic oligonucleotide: FAS-3185
guuuccaaacugauuuu

SEQ ID NO: 29220 - RNA, 20 nt, Artificial Sequence
  Synthetic oligonucleotide: FAS-222
cuucugcauuuggaagaaaa

SEQ ID NO: 29221 - RNA, 20 nt, Artificial Sequence
  Synthetic oligonucleotide: FAS-150
uguguaacauaccuggagga

SEQ ID NO: 29222 - RNA, 20 nt, Artificial Sequence
  Synthetic oligonucleotide: FAS-123
aagugacugacaucaacucc

SEQ ID NO: 29223 - RNA, 20 nt, Artificial Sequence
  Synthetic oligonucleotide: FAS-134
gguauguuacacaaaacauc

SEQ ID NO: 29224 - RNA, 20 nt, Artificial Sequence
  Synthetic oligonucleotide: FAS-3186
uccccauugacugugcaguc

SEQ ID NO: 29225 - RNA, 20 nt, Artificial Sequence
  Synthetic oligonucleotide: FAS-591
gcuggugagugugcauuccu

SEQ ID NO: 29226 - RNA, 20 nt, Artificial Sequence
  Synthetic oligonucleotide: FAS-3187
gagcccucuccugcccgggu

SEQ ID NO: 29227 - RNA, 20 nt, Artificial Sequence
  Synthetic oligonucleotide: FAS-237
uacagguucuuacgucuguu

SEQ ID NO: 29228 - RNA, 20 nt, Artificial Sequence
  Synthetic oligonucleotide: FAS-583
ccaaguaaguuuuagucuuu

SEQ ID NO: 29229 - RNA, 20 nt, Artificial Sequence
  Synthetic oligonucleotide: FAS-3188
auaguuuccaaacugauuuu

SEQ ID NO: 29230 - RNA, 17 nt, Artificial Sequence
  Synthetic oligonucleotide: FAS-244
cuuccaaaugcagaaga

SEQ ID NO: 29231 - RNA, 20 nt, Artificial Sequence
  Synthetic oligonucleotide: FAS-243
uuucuuccaaaugcagaaga

SEQ ID NO: 29232 - RNA, 17 nt, Artificial Sequence
  Synthetic oligonucleotide: FAS-586
gaaagaagcguaugaca

SEQ ID NO: 29233 - RNA, 17 nt, Artificial Sequence
  Synthetic oligonucleotide: FAS-3189
uuguuuuucacucuaga

SEQ ID NO: 29234 - RNA, 17 nt, Artificial Sequence
  Synthetic oligonucleotide: FAS-593
uuuucucugcaagagua

SEQ ID NO: 29235 - RNA, 17 nt, Artificial Sequence
  Synthetic oligonucleotide: FAS-592
uucacucuagaccaagc

SEQ ID NO: 29236 - RNA, 17 nt, Artificial Sequence
  Synthetic oligonucleotide: FAS-3190
acuucagaaaugaaauc

SEQ ID NO: 29237 - RNA, 17 nt, Artificial Sequence
  Synthetic oligonucleotide: FAS-3191
ucuuuaaucaauguguc

SEQ ID NO: 29238 - RNA, 17 nt, Artificial Sequence
  Synthetic oligonucleotide: FAS-3192
agcagaacagaaaguuc

SEQ ID NO: 29239 - RNA, 17 nt, Artificial Sequence
  Synthetic oligonucleotide: FAS-3193
ucugcaagaguacaaag

SEQ ID NO: 29240 - RNA, 17 nt, Artificial Sequence
  Synthetic oligonucleotide: FAS-3194
gcaauaaauuuaucugg

SEQ ID NO: 29241 - RNA, 17 nt, Artificial Sequence
  Synthetic oligonucleotide: FAS-3195
auccagaucuaacuugg

SEQ ID NO: 29242 - RNA, 17 nt, Artificial Sequence
  Synthetic oligonucleotide: FAS-3196
uucuugaucucaucuau

SEQ ID NO: 29243 - RNA, 17 nt, Artificial Sequence
  Synthetic oligonucleotide: FAS-594
uaccuauuucaauaccu

SEQ ID NO: 29244 - RNA, 17 nt, Artificial Sequence
  Synthetic oligonucleotide: FAS-346
ccuacaggauuuaaagu

SEQ ID NO: 29245 - RNA, 17 nt, Artificial Sequence
  Synthetic oligonucleotide: FAS-3197
aauuguuugggguaagu

SEQ ID NO: 29246 - RNA, 17 nt, Artificial Sequence
  Synthetic oligonucleotide: FAS-3198
uagguauugaaauaggu

SEQ ID NO: 29247 - RNA, 17 nt, Artificial Sequence
  Synthetic oligonucleotide: FAS-3199
cuuucucugcuuccauu

SEQ ID NO: 29248 - RNA, 17 nt, Artificial Sequence
  Synthetic oligonucleotide: FAS-3200
ugacacuaagucaaguu

SEQ ID NO: 29249 - RNA, 17 nt, Artificial Sequence
  Synthetic oligonucleotide: FAS-3201
aaccuugguuuuccuuu

SEQ ID NO: 29250 - RNA, 20 nt, Artificial Sequence
  Synthetic oligonucleotide: FAS-584
aaagaaagaagcguaugaca

SEQ ID NO: 29251 - RNA, 20 nt, Artificial Sequence
  Synthetic oligonucleotide: FAS-3202
uuguuguuuuucacucuaga

SEQ ID NO: 29252 - RNA, 20 nt, Artificial Sequence
  Synthetic oligonucleotide: FAS-588
gaauuuucucugcaagagua

SEQ ID NO: 29253 - RNA, 20 nt, Artificial Sequence
  Synthetic oligonucleotide: FAS-587
uuuuucacucuagaccaagc

SEQ ID NO: 29254 - RNA, 20 nt, Artificial Sequence
  Synthetic oligonucleotide: FAS-3203
caaacuucagaaaugaaauc

SEQ ID NO: 29255 - RNA, 20 nt, Artificial Sequence
  Synthetic oligonucleotide: FAS-3204
agaucuuuaaucaauguguc

SEQ ID NO: 29256 - RNA, 20 nt, Artificial Sequence
  Synthetic oligonucleotide: FAS-3205
cacagcagaacagaaaguuc

SEQ ID NO: 29257 - RNA, 20 nt, Artificial Sequence
  Synthetic oligonucleotide: FAS-3206
uucucugcaagaguacaaag

SEQ ID NO: 29258 - RNA, 20 nt, Artificial Sequence
  Synthetic oligonucleotide: FAS-3207
guggcaauaaauuuaucugg

SEQ ID NO: 29259 - RNA, 20 nt, Artificial Sequence
  Synthetic oligonucleotide: FAS-3208
aggauccagaucuaacuugg

SEQ ID NO: 29260 - RNA, 20 nt, Artificial Sequence
  Synthetic oligonucleotide: FAS-3209
ucauucuugaucucaucuau

SEQ ID NO: 29261 - RNA, 20 nt, Artificial Sequence
  Synthetic oligonucleotide: FAS-589
ugauaccuauuucaauaccu

SEQ ID NO: 29262 - RNA, 20 nt, Artificial Sequence
  Synthetic oligonucleotide: FAS-317
auaccuacaggauuuaaagu

SEQ ID NO: 29263 - RNA, 20 nt, Artificial Sequence
  Synthetic oligonucleotide: FAS-3210
acuaauuguuugggguaagu

SEQ ID NO: 29264 - RNA, 20 nt, Artificial Sequence
  Synthetic oligonucleotide: FAS-3211
cuguagguauugaaauaggu

SEQ ID NO: 29265 - RNA, 20 nt, Artificial Sequence
  Synthetic oligonucleotide: FAS-3212
ucaugacacuaagucaaguu

SEQ ID NO: 29266 - RNA, 20 nt, Artificial Sequence
  Synthetic oligonucleotide: FAS-3213
gagaaccuugguuuuccuuu

SEQ ID NO: 29267 - RNA, 17 nt, Artificial Sequence
  Synthetic oligonucleotide: FAS-938
aggguucguugcacaaa

SEQ ID NO: 29268 - RNA, 17 nt, Artificial Sequence
  Synthetic oligonucleotide: FAS-880
uauccccgggacuaaga

SEQ ID NO: 29269 - RNA, 17 nt, Artificial Sequence
  Synthetic oligonucleotide: FAS-929
cugcgcgcggguaggga

SEQ ID NO: 29270 - RNA, 17 nt, Artificial Sequence
  Synthetic oligonucleotide: FAS-844
gguggacccgcucagua

SEQ ID NO: 29271 - RNA, 17 nt, Artificial Sequence
  Synthetic oligonucleotide: FAS-820
gcgcaagagugacacac

SEQ ID NO: 29272 - RNA, 17 nt, Artificial Sequence
  Synthetic oligonucleotide: FAS-881
auccccgggacuaagac

SEQ ID NO: 29273 - RNA, 17 nt, Artificial Sequence
  Synthetic oligonucleotide: FAS-917
cucgcuggggaacgccc

SEQ ID NO: 29274 - RNA, 17 nt, Artificial Sequence
  Synthetic oligonucleotide: FAS-916
ccucgcuggggaacgcc

SEQ ID NO: 29275 - RNA, 17 nt, Artificial Sequence
  Synthetic oligonucleotide: FAS-947
gugaggaccucgagagc

SEQ ID NO: 29276 - RNA, 17 nt, Artificial Sequence
  Synthetic oligonucleotide: FAS-894
ccaacuccguacugagc

SEQ ID NO: 29277 - RNA, 17 nt, Artificial Sequence
  Synthetic oligonucleotide: FAS-896
cggguccaccaacccgc

SEQ ID NO: 29278 - RNA, 17 nt, Artificial Sequence
  Synthetic oligonucleotide: FAS-925
caacuuggccugcgcgc

SEQ ID NO: 29279 - RNA, 17 nt, Artificial Sequence
  Synthetic oligonucleotide: FAS-868
caaaguggggcgggcgc

SEQ ID NO: 29280 - RNA, 17 nt, Artificial Sequence
  Synthetic oligonucleotide: FAS-828
uuuacgagugacuuggc

SEQ ID NO: 29281 - RNA, 17 nt, Artificial Sequence
  Synthetic oligonucleotide: FAS-930
ugcgcgcggguagggag

SEQ ID NO: 29282 - RNA, 17 nt, Artificial Sequence
  Synthetic oligonucleotide: FAS-893
cccaacuccguacugag

SEQ ID NO: 29283 - RNA, 17 nt, Artificial Sequence
  Synthetic oligonucleotide: FAS-882
uccccgggacuaagacg

SEQ ID NO: 29284 - RNA, 17 nt, Artificial Sequence
  Synthetic oligonucleotide: FAS-895
gcggguccaccaacccg

SEQ ID NO: 29285 - RNA, 17 nt, Artificial Sequence
  Synthetic oligonucleotide: FAS-860
accccgucuuagucccg

SEQ ID NO: 29286 - RNA, 17 nt, Artificial Sequence
  Synthetic oligonucleotide: FAS-924
gcaacuuggccugcgcg

SEQ ID NO: 29287 - RNA, 17 nt, Artificial Sequence
  Synthetic oligonucleotide: FAS-907
cucacgaaaagccccgg

SEQ ID NO: 29288 - RNA, 17 nt, Artificial Sequence
  Synthetic oligonucleotide: FAS-872
cgcgugcgggauugcgg

SEQ ID NO: 29289 - RNA, 17 nt, Artificial Sequence
  Synthetic oligonucleotide: FAS-871
ggacgcgugcgggauug

SEQ ID NO: 29290 - RNA, 17 nt, Artificial Sequence
  Synthetic oligonucleotide: FAS-847
cgcucaguacggaguug

SEQ ID NO: 29291 - RNA, 17 nt, Artificial Sequence
  Synthetic oligonucleotide: FAS-920
ggggaacgcccggguug

SEQ ID NO: 29292 - RNA, 17 nt, Artificial Sequence
  Synthetic oligonucleotide: FAS-939
ggguucguugcacaaau

SEQ ID NO: 29293 - RNA, 17 nt, Artificial Sequence
  Synthetic oligonucleotide: FAS-972
uacagauguugcgccau

SEQ ID NO: 29294 - RNA, 17 nt, Artificial Sequence
  Synthetic oligonucleotide: FAS-861
gucuuagucccggggau

SEQ ID NO: 29295 - RNA, 17 nt, Artificial Sequence
  Synthetic oligonucleotide: FAS-827
gcgguuuacgagugacu

SEQ ID NO: 29296 - RNA, 17 nt, Artificial Sequence
  Synthetic oligonucleotide: FAS-967
uugcggggcauuugacu

SEQ ID NO: 29297 - RNA, 17 nt, Artificial Sequence
  Synthetic oligonucleotide: FAS-877
ggcgcacgcgggcaccu

SEQ ID NO: 29298 - RNA, 17 nt, Artificial Sequence
  Synthetic oligonucleotide: FAS-822
uguucaaagacgcuucu

SEQ ID NO: 29299 - RNA, 17 nt, Artificial Sequence
  Synthetic oligonucleotide: FAS-863
ccggggauaggcaaagu

SEQ ID NO: 29300 - RNA, 17 nt, Artificial Sequence
  Synthetic oligonucleotide: FAS-845
cccgcucaguacggagu

SEQ ID NO: 29301 - RNA, 17 nt, Artificial Sequence
  Synthetic oligonucleotide: FAS-926
uuggccugcgcgcgggu

SEQ ID NO: 29302 - RNA, 17 nt, Artificial Sequence
  Synthetic oligonucleotide: FAS-791
gcuggggcuaugcgauu

SEQ ID NO: 29303 - RNA, 17 nt, Artificial Sequence
  Synthetic oligonucleotide: FAS-846
ccgcucaguacggaguu

SEQ ID NO: 29304 - RNA, 20 nt, Artificial Sequence
  Synthetic oligonucleotide: FAS-784
gcgccauagggcucugaaaa

SEQ ID NO: 29305 - RNA, 20 nt, Artificial Sequence
  Synthetic oligonucleotide: FAS-747
gucaggguucguugcacaaa

SEQ ID NO: 29306 - RNA, 20 nt, Artificial Sequence
  Synthetic oligonucleotide: FAS-783
ugcgccauagggcucugaaa

SEQ ID NO: 29307 - RNA, 20 nt, Artificial Sequence
  Synthetic oligonucleotide: FAS-757
cggccuccugcccuuucuaa

SEQ ID NO: 29308 - RNA, 20 nt, Artificial Sequence
  Synthetic oligonucleotide: FAS-607
gugacuccagcaauuagcca

SEQ ID NO: 29309 - RNA, 20 nt, Artificial Sequence
  Synthetic oligonucleotide: FAS-689
gccuauccccgggacuaaga

SEQ ID NO: 29310 - RNA, 20 nt, Artificial Sequence
  Synthetic oligonucleotide: FAS-786
cauagggcucugaaaaggga

SEQ ID NO: 29311 - RNA, 20 nt, Artificial Sequence
  Synthetic oligonucleotide: FAS-634
aagacgcuucuggggaguga

SEQ ID NO: 29312 - RNA, 20 nt, Artificial Sequence
  Synthetic oligonucleotide: FAS-653
guugguggacccgcucagua

SEQ ID NO: 29313 - RNA, 20 nt, Artificial Sequence
  Synthetic oligonucleotide: FAS-736
acuuggccugcgcgcgggua

SEQ ID NO: 29314 - RNA, 20 nt, Artificial Sequence
  Synthetic oligonucleotide: FAS-629
cucgcgcaagagugacacac

SEQ ID NO: 29315 - RNA, 20 nt, Artificial Sequence
  Synthetic oligonucleotide: FAS-690
ccuauccccgggacuaagac

SEQ ID NO: 29316 - RNA, 20 nt, Artificial Sequence
  Synthetic oligonucleotide: FAS-620
cugcaggaacgccccgggac

SEQ ID NO: 29317 - RNA, 20 nt, Artificial Sequence
  Synthetic oligonucleotide: FAS-775
agacuugcggggcauuugac

SEQ ID NO: 29318 - RNA, 20 nt, Artificial Sequence
  Synthetic oligonucleotide: FAS-769
cagagguccugccuggguac

SEQ ID NO: 29319 - RNA, 20 nt, Artificial Sequence
  Synthetic oligonucleotide: FAS-758
gcuucugcuguaguucaacc

SEQ ID NO: 29320 - RNA, 20 nt, Artificial Sequence
  Synthetic oligonucleotide: FAS-692
agacgggguaagccuccacc

SEQ ID NO: 29321 - RNA, 20 nt, Artificial Sequence
  Synthetic oligonucleotide: FAS-693
gacgggguaagccuccaccc

SEQ ID NO: 29322 - RNA, 20 nt, Artificial Sequence
  Synthetic oligonucleotide: FAS-619
agccacugcaggaacgcccc

SEQ ID NO: 29323 - RNA, 20 nt, Artificial Sequence
  Synthetic oligonucleotide: FAS-715
gacgagcucacgaaaagccc

SEQ ID NO: 29324 - RNA, 20 nt, Artificial Sequence
  Synthetic oligonucleotide: FAS-687
cgccccacuuugccuauccc

SEQ ID NO: 29325 - RNA, 20 nt, Artificial Sequence
  Synthetic oligonucleotide: FAS-668
gcuuaccccgucuuaguccc

SEQ ID NO: 29326 - RNA, 20 nt, Artificial Sequence
  Synthetic oligonucleotide: FAS-667
ggcuuaccccgucuuagucc

SEQ ID NO: 29327 - RNA, 20 nt, Artificial Sequence
  Synthetic oligonucleotide: FAS-703
uccccaacuccguacugagc

SEQ ID NO: 29328 - RNA, 20 nt, Artificial Sequence
  Synthetic oligonucleotide: FAS-705
gagcggguccaccaacccgc

SEQ ID NO: 29329 - RNA, 20 nt, Artificial Sequence
  Synthetic oligonucleotide: FAS-637
cgguuuacgagugacuuggc

SEQ ID NO: 29330 - RNA, 20 nt, Artificial Sequence
  Synthetic oligonucleotide: FAS-659
ggauugcucaacaaccaugc

SEQ ID NO: 29331 - RNA, 20 nt, Artificial Sequence
  Synthetic oligonucleotide: FAS-717
cacgaaaagccccggugguc

SEQ ID NO: 29332 - RNA, 20 nt, Artificial Sequence
  Synthetic oligonucleotide: FAS-754
guggcuggcaugcucacuuc

SEQ ID NO: 29333 - RNA, 20 nt, Artificial Sequence
  Synthetic oligonucleotide: FAS-630
cagguguucaaagacgcuuc

SEQ ID NO: 29334 - RNA, 20 nt, Artificial Sequence
  Synthetic oligonucleotide: FAS-779
gagaggcucacagacguuuc

SEQ ID NO: 29335 - RNA, 20 nt, Artificial Sequence
  Synthetic oligonucleotide: FAS-671
agucccggggauaggcaaag

SEQ ID NO: 29336 - RNA, 20 nt, Artificial Sequence
  Synthetic oligonucleotide: FAS-766
gaauggagcucagagcgcag

SEQ ID NO: 29337 - RNA, 20 nt, Artificial Sequence
  Synthetic oligonucleotide: FAS-691
cuauccccgggacuaagacg

SEQ ID NO: 29338 - RNA, 20 nt, Artificial Sequence
  Synthetic oligonucleotide: FAS-704
ugagcggguccaccaacccg

SEQ ID NO: 29339 - RNA, 20 nt, Artificial Sequence
  Synthetic oligonucleotide: FAS-669
cuuaccccgucuuagucccg

SEQ ID NO: 29340 - RNA, 20 nt, Artificial Sequence
  Synthetic oligonucleotide: FAS-625
aacccgggcguuccccagcg

SEQ ID NO: 29341 - RNA, 20 nt, Artificial Sequence
  Synthetic oligonucleotide: FAS-733
ucagcaacuuggccugcgcg

SEQ ID NO: 29342 - RNA, 20 nt, Artificial Sequence
  Synthetic oligonucleotide: FAS-718
gaaaagccccgguggucagg

SEQ ID NO: 29343 - RNA, 20 nt, Artificial Sequence
  Synthetic oligonucleotide: FAS-716
gagcucacgaaaagccccgg

SEQ ID NO: 29344 - RNA, 20 nt, Artificial Sequence
  Synthetic oligonucleotide: FAS-681
ggacgcgugcgggauugcgg

SEQ ID NO: 29345 - RNA, 20 nt, Artificial Sequence
  Synthetic oligonucleotide: FAS-665
ugagcccucuccugcccggg

SEQ ID NO: 29346 - RNA, 20 nt, Artificial Sequence
  Synthetic oligonucleotide: FAS-633
aaagacgcuucuggggagug

SEQ ID NO: 29347 - RNA, 20 nt, Artificial Sequence
  Synthetic oligonucleotide: FAS-680
gcgggacgcgugcgggauug

SEQ ID NO: 29348 - RNA, 20 nt, Artificial Sequence
  Synthetic oligonucleotide: FAS-656
acccgcucaguacggaguug

SEQ ID NO: 29349 - RNA, 20 nt, Artificial Sequence
  Synthetic oligonucleotide: FAS-748
ucaggguucguugcacaaau

SEQ ID NO: 29350 - RNA, 20 nt, Artificial Sequence
  Synthetic oligonucleotide: FAS-781
aaguacagauguugcgccau

SEQ ID NO: 29351 - RNA, 20 nt, Artificial Sequence
  Synthetic oligonucleotide: FAS-720
gccccgguggucaggaggau

SEQ ID NO: 29352 - RNA, 20 nt, Artificial Sequence
  Synthetic oligonucleotide: FAS-670
cccgucuuagucccggggau

SEQ ID NO: 29353 - RNA, 20 nt, Artificial Sequence
  Synthetic oligonucleotide: FAS-732
gcuccauugauucagcaacu

SEQ ID NO: 29354 - RNA, 20 nt, Artificial Sequence
  Synthetic oligonucleotide: FAS-636
gaagcgguuuacgagugacu

SEQ ID NO: 29355 - RNA, 20 nt, Artificial Sequence
  Synthetic oligonucleotide: FAS-686
agcggcgcacgcgggcaccu

SEQ ID NO: 29356 - RNA, 20 nt, Artificial Sequence
  Synthetic oligonucleotide: FAS-708
gagaagaggcagcuccgccu

SEQ ID NO: 29357 - RNA, 20 nt, Artificial Sequence
  Synthetic oligonucleotide: FAS-723
gaugggaaggaagccucgcu

SEQ ID NO: 29358 - RNA, 20 nt, Artificial Sequence
  Synthetic oligonucleotide: FAS-672
gucccggggauaggcaaagu

SEQ ID NO: 29359 - RNA, 20 nt, Artificial Sequence
  Synthetic oligonucleotide: FAS-654
ggacccgcucaguacggagu

SEQ ID NO: 29360 - RNA, 20 nt, Artificial Sequence
  Synthetic oligonucleotide: FAS-727
ucgcuggggaacgcccgggu

SEQ ID NO: 29361 - RNA, 20 nt, Artificial Sequence
  Synthetic oligonucleotide: FAS-735
aacuuggccugcgcgcgggu

SEQ ID NO: 29362 - RNA, 20 nt, Artificial Sequence
  Synthetic oligonucleotide: FAS-600
auagcuggggcuaugcgauu

SEQ ID NO: 29363 - RNA, 20 nt, Artificial Sequence
  Synthetic oligonucleotide: FAS-655
gacccgcucaguacggaguu

SEQ ID NO: 29364 - RNA, 17 nt, Artificial Sequence
  Synthetic oligonucleotide: FAS-975
ccauagggcucugaaaa

SEQ ID NO: 29365 - RNA, 17 nt, Artificial Sequence
  Synthetic oligonucleotide: FAS-803
gcagaagccuuuagaaa

SEQ ID NO: 29366 - RNA, 17 nt, Artificial Sequence
  Synthetic oligonucleotide: FAS-974
gccauagggcucugaaa

SEQ ID NO: 29367 - RNA, 17 nt, Artificial Sequence
  Synthetic oligonucleotide: FAS-813
ccaaguugcugaaucaa

SEQ ID NO: 29368 - RNA, 17 nt, Artificial Sequence
  Synthetic oligonucleotide: FAS-956
gaggucuugaaggagaa

SEQ ID NO: 29369 - RNA, 17 nt, Artificial Sequence
  Synthetic oligonucleotide: FAS-802
agcagaagccuuuagaa

SEQ ID NO: 29370 - RNA, 17 nt, Artificial Sequence
  Synthetic oligonucleotide: FAS-971
cacagacguuucuggaa

SEQ ID NO: 29371 - RNA, 17 nt, Artificial Sequence
  Synthetic oligonucleotide: FAS-793
ugagaaauaaaaacuaa

SEQ ID NO: 29372 - RNA, 17 nt, Artificial Sequence
  Synthetic oligonucleotide: FAS-948
ccuccugcccuuucuaa

SEQ ID NO: 29373 - RNA, 17 nt, Artificial Sequence
  Synthetic oligonucleotide: FAS-797
auguugcagccacaaca

SEQ ID NO: 29374 - RNA, 17 nt, Artificial Sequence
  Synthetic oligonucleotide: FAS-901
cuccgccugggcagcca

SEQ ID NO: 29375 - RNA, 17 nt, Artificial Sequence
  Synthetic oligonucleotide: FAS-798
acuccagcaauuagcca

SEQ ID NO: 29376 - RNA, 17 nt, Artificial Sequence
  Synthetic oligonucleotide: FAS-10
gguccagaugcccagca

SEQ ID NO: 29377 - RNA, 17 nt, Artificial Sequence
  Synthetic oligonucleotide: FAS-835
aggggcgggcacuggca

SEQ ID NO: 29378 - RNA, 17 nt, Artificial Sequence
  Synthetic oligonucleotide: FAS-830
acuuggcuggagccuca

SEQ ID NO: 29379 - RNA, 17 nt, Artificial Sequence
  Synthetic oligonucleotide: FAS-904
agccagggcuggccuca

SEQ ID NO: 29380 - RNA, 17 nt, Artificial Sequence
  Synthetic oligonucleotide: FAS-933
gggagggggagaaguca

SEQ ID NO: 29381 - RNA, 17 nt, Artificial Sequence
  Synthetic oligonucleotide: FAS-937
gggugaggaaggaguca

SEQ ID NO: 29382 - RNA, 17 nt, Artificial Sequence
  Synthetic oligonucleotide: FAS-887
uccacccgggcaggaga

SEQ ID NO: 29383 - RNA, 17 nt, Artificial Sequence
  Synthetic oligonucleotide: FAS-910
cccgguggucaggagga

SEQ ID NO: 29384 - RNA, 17 nt, Artificial Sequence
  Synthetic oligonucleotide: FAS-935
agaagucagggugagga

SEQ ID NO: 29385 - RNA, 17 nt, Artificial Sequence
  Synthetic oligonucleotide: FAS-9
gcucaccagagguagga

SEQ ID NO: 29386 - RNA, 17 nt, Artificial Sequence
  Synthetic oligonucleotide: FAS-977
agggcucugaaaaggga

SEQ ID NO: 29387 - RNA, 17 nt, Artificial Sequence
  Synthetic oligonucleotide: FAS-922
aacgcccggguugggga

SEQ ID NO: 29388 - RNA, 17 nt, Artificial Sequence
  Synthetic oligonucleotide: FAS-912
uggucaggaggauggga

SEQ ID NO: 29389 - RNA, 17 nt, Artificial Sequence
  Synthetic oligonucleotide: FAS-825
acgcuucuggggaguga

SEQ ID NO: 29390 - RNA, 17 nt, Artificial Sequence
  Synthetic oligonucleotide: FAS-955
aguuggggaggucuuga

SEQ ID NO: 29391 - RNA, 17 nt, Artificial Sequence
  Synthetic oligonucleotide: FAS-973
acagauguugcgccaua

SEQ ID NO: 29392 - RNA, 17 nt, Artificial Sequence
  Synthetic oligonucleotide: FAS-796
aucuguacuuuuucaua

SEQ ID NO: 29393 - RNA, 17 nt, Artificial Sequence
  Synthetic oligonucleotide: FAS-792
uugagaaauaaaaacua

SEQ ID NO: 29394 - RNA, 17 nt, Artificial Sequence
  Synthetic oligonucleotide: FAS-795
cccuuuucagagcccua

SEQ ID NO: 29395 - RNA, 17 nt, Artificial Sequence
  Synthetic oligonucleotide: FAS-927
uggccugcgcgcgggua

SEQ ID NO: 29396 - RNA, 17 nt, Artificial Sequence
  Synthetic oligonucleotide: FAS-817
cccauccuccugaccac

SEQ ID NO: 29397 - RNA, 17 nt, Artificial Sequence
  Synthetic oligonucleotide: FAS-834
gccucaggggcgggcac

SEQ ID NO: 29398 - RNA, 17 nt, Artificial Sequence
  Synthetic oligonucleotide: FAS-811
caggaacgccccgggac

SEQ ID NO: 29399 - RNA, 17 nt, Artificial Sequence
  Synthetic oligonucleotide: FAS-966
cuugcggggcauuugac

SEQ ID NO: 29400 - RNA, 17 nt, Artificial Sequence
  Synthetic oligonucleotide: FAS-960
agguccugccuggguac

SEQ ID NO: 29401 - RNA, 17 nt, Artificial Sequence
  Synthetic oligonucleotide: FAS-814
uggagcccuccccaacc

SEQ ID NO: 29402 - RNA, 17 nt, Artificial Sequence
  Synthetic oligonucleotide: FAS-949
ucugcuguaguucaacc

SEQ ID NO: 29403 - RNA, 17 nt, Artificial Sequence
  Synthetic oligonucleotide: FAS-818
ccauccuccugaccacc

SEQ ID NO: 29404 - RNA, 17 nt, Artificial Sequence
  Synthetic oligonucleotide: FAS-883
cgggguaagccuccacc

SEQ ID NO: 29405 - RNA, 17 nt, Artificial Sequence
  Synthetic oligonucleotide: FAS-876
cggcgcacgcgggcacc

SEQ ID NO: 29406 - RNA, 17 nt, Artificial Sequence
  Synthetic oligonucleotide: FAS-815
ggagcccuccccaaccc

SEQ ID NO: 29407 - RNA, 17 nt, Artificial Sequence
  Synthetic oligonucleotide: FAS-884
gggguaagccuccaccc

SEQ ID NO: 29408 - RNA, 17 nt, Artificial Sequence
  Synthetic oligonucleotide: FAS-799
ccaaggcuccuguaccc

SEQ ID NO: 29409 - RNA, 17 nt, Artificial Sequence
  Synthetic oligonucleotide: FAS-810
cacugcaggaacgcccc

SEQ ID NO: 29410 - RNA, 17 nt, Artificial Sequence
  Synthetic oligonucleotide: FAS-879
ccacuuugccuaucccc

SEQ ID NO: 29411 - RNA, 17 nt, Artificial Sequence
  Synthetic oligonucleotide: FAS-906
gagcucacgaaaagccc

SEQ ID NO: 29412 - RNA, 17 nt, Artificial Sequence
  Synthetic oligonucleotide: FAS-837
cacccugaggccagccc

SEQ ID NO: 29413 - RNA, 17 nt, Artificial Sequence
  Synthetic oligonucleotide: FAS-809
ccacugcaggaacgccc

SEQ ID NO: 29414 - RNA, 17 nt, Artificial Sequence
  Synthetic oligonucleotide: FAS-855
ugagcccucuccugccc

SEQ ID NO: 29415 - RNA, 17 nt, Artificial Sequence
  Synthetic oligonucleotide: FAS-838
gccagcccuggcugccc

SEQ ID NO: 29416 - RNA, 17 nt, Artificial Sequence
  Synthetic oligonucleotide: FAS-878
cccacuuugccuauccc

SEQ ID NO: 29417 - RNA, 17 nt, Artificial Sequence
  Synthetic oligonucleotide: FAS-859
uaccccgucuuaguccc

SEQ ID NO: 29418 - RNA, 17 nt, Artificial Sequence
  Synthetic oligonucleotide: FAS-941
augggcauuccuguccc

SEQ ID NO: 29419 - RNA, 17 nt, Artificial Sequence
  Synthetic oligonucleotide: FAS-801
gaccuccccaacuuccc

SEQ ID NO: 29420 - RNA, 17 nt, Artificial Sequence
  Synthetic oligonucleotide: FAS-900
gcuccgccugggcagcc

SEQ ID NO: 29421 - RNA, 17 nt, Artificial Sequence
  Synthetic oligonucleotide: FAS-898
gaagaggcagcuccgcc

SEQ ID NO: 29422 - RNA, 17 nt, Artificial Sequence
  Synthetic oligonucleotide: FAS-854
gugagcccucuccugcc

SEQ ID NO: 29423 - RNA, 17 nt, Artificial Sequence
  Synthetic oligonucleotide: FAS-958
agcgcagagguccugcc

SEQ ID NO: 29424 - RNA, 17 nt, Artificial Sequence
  Synthetic oligonucleotide: FAS-858
uuaccccgucuuagucc

SEQ ID NO: 29425 - RNA, 17 nt, Artificial Sequence
  Synthetic oligonucleotide: FAS-940
aaugggcauuccugucc

SEQ ID NO: 29426 - RNA, 17 nt, Artificial Sequence
  Synthetic oligonucleotide: FAS-788
ugaauguuuaauauagc

SEQ ID NO: 29427 - RNA, 17 nt, Artificial Sequence
  Synthetic oligonucleotide: FAS-875
gcggcagcggcgcacgc

SEQ ID NO: 29428 - RNA, 17 nt, Artificial Sequence
  Synthetic oligonucleotide: FAS-841
gcugccucuucucccgc

SEQ ID NO: 29429 - RNA, 17 nt, Artificial Sequence
  Synthetic oligonucleotide: FAS-812
ccucccuacccgcgcgc

SEQ ID NO: 29430 - RNA, 17 nt, Artificial Sequence
  Synthetic oligonucleotide: FAS-913
ugggaaggaagccucgc

SEQ ID NO: 29431 - RNA, 17 nt, Artificial Sequence
  Synthetic oligonucleotide: FAS-800
ggcuccuguacccaggc

SEQ ID NO: 29432 - RNA, 17 nt, Artificial Sequence
  Synthetic oligonucleotide: FAS-806
uagaaagggcaggaggc

SEQ ID NO: 29433 - RNA, 17 nt, Artificial Sequence
  Synthetic oligonucleotide: FAS-804
aagccuuuagaaagggc

SEQ ID NO: 29434 - RNA, 17 nt, Artificial Sequence
  Synthetic oligonucleotide: FAS-902
gccugggcagccagggc

SEQ ID NO: 29435 - RNA, 17 nt, Artificial Sequence
  Synthetic oligonucleotide: FAS-885
uaagccuccacccgggc

SEQ ID NO: 29436 - RNA, 17 nt, Artificial Sequence
  Synthetic oligonucleotide: FAS-833
gcuggagccucaggggc

SEQ ID NO: 29437 - RNA, 17 nt, Artificial Sequence
  Synthetic oligonucleotide: FAS-866
gauaggcaaaguggggc

SEQ ID NO: 29438 - RNA, 17 nt, Artificial Sequence
  Synthetic oligonucleotide: FAS-944
ggcguuccugcaguggc

SEQ ID NO: 29439 - RNA, 17 nt, Artificial Sequence
  Synthetic oligonucleotide: FAS-850
uugcucaacaaccaugc

SEQ ID NO: 29440 - RNA, 17 nt, Artificial Sequence
  Synthetic oligonucleotide: FAS-808
agcaugccagccacugc

SEQ ID NO: 29441 - RNA, 17 nt, Artificial Sequence
  Synthetic oligonucleotide: FAS-870
gggcgcgggacgcgugc

SEQ ID NO: 29442 - RNA, 17 nt, Artificial Sequence
  Synthetic oligonucleotide: FAS-962
gagccuuggcuaauugc

SEQ ID NO: 29443 - RNA, 17 nt, Artificial Sequence
  Synthetic oligonucleotide: FAS-964
cucagagaaagacuugc

SEQ ID NO: 29444 - RNA, 17 nt, Artificial Sequence
  Synthetic oligonucleotide: FAS-6
caaccaugcugggcauc

SEQ ID NO: 29445 - RNA, 17 nt, Artificial Sequence
  Synthetic oligonucleotide: FAS-7
cuggacccuccuaccuc

SEQ ID NO: 29446 - RNA, 17 nt, Artificial Sequence
  Synthetic oligonucleotide: FAS-829
gacuuggcuggagccuc

SEQ ID NO: 29447 - RNA, 17 nt, Artificial Sequence
  Synthetic oligonucleotide: FAS-903
cagccagggcuggccuc

SEQ ID NO: 29448 - RNA, 17 nt, Artificial Sequence
  Synthetic oligonucleotide: FAS-932
agggagggggagaaguc

SEQ ID NO: 29449 - RNA, 17 nt, Artificial Sequence
  Synthetic oligonucleotide: FAS-936
agggugaggaaggaguc

SEQ ID NO: 29450 - RNA, 17 nt, Artificial Sequence
  Synthetic oligonucleotide: FAS-908
gaaaagccccggugguc

SEQ ID NO: 29451 - RNA, 17 nt, Artificial Sequence
  Synthetic oligonucleotide: FAS-945
gcuggcaugcucacuuc

SEQ ID NO: 29452 - RNA, 17 nt, Artificial Sequence
  Synthetic oligonucleotide: FAS-821
guguucaaagacgcuuc

SEQ ID NO: 29453 - RNA, 17 nt, Artificial Sequence
  Synthetic oligonucleotide: FAS-970
aggcucacagacguuuc

SEQ ID NO: 29454 - RNA, 17 nt, Artificial Sequence
  Synthetic oligonucleotide: FAS-862
cccggggauaggcaaag

SEQ ID NO: 29455 - RNA, 17 nt, Artificial Sequence
  Synthetic oligonucleotide: FAS-978
aguuuuuauuucucaag

SEQ ID NO: 29456 - RNA, 17 nt, Artificial Sequence
  Synthetic oligonucleotide: FAS-897
ccaacccgcgggagaag

SEQ ID NO: 29457 - RNA, 17 nt, Artificial Sequence
  Synthetic oligonucleotide: FAS-826
cuggggagugagggaag

SEQ ID NO: 29458 - RNA, 17 nt, Artificial Sequence
  Synthetic oligonucleotide: FAS-794
gagaaauaaaaacuaag

SEQ ID NO: 29459 - RNA, 17 nt, Artificial Sequence
  Synthetic oligonucleotide: FAS-888
aggagagggcucaccag

SEQ ID NO: 29460 - RNA, 17 nt, Artificial Sequence
  Synthetic oligonucleotide: FAS-957
uggagcucagagcgcag

SEQ ID NO: 29461 - RNA, 17 nt, Artificial Sequence
  Synthetic oligonucleotide: FAS-873
cgggauugcggcggcag

SEQ ID NO: 29462 - RNA, 17 nt, Artificial Sequence
  Synthetic oligonucleotide: FAS-943
ccggggcguuccugcag

SEQ ID NO: 29463 - RNA, 17 nt, Artificial Sequence
  Synthetic oligonucleotide: FAS-831
cuuggcuggagccucag

SEQ ID NO: 29464 - RNA, 17 nt, Artificial Sequence
  Synthetic oligonucleotide: FAS-886
cuccacccgggcaggag

SEQ ID NO: 29465 - RNA, 17 nt, Artificial Sequence
  Synthetic oligonucleotide: FAS-969
uguggcugcaacaugag

SEQ ID NO: 29466 - RNA, 17 nt, Artificial Sequence
  Synthetic oligonucleotide: FAS-874
ggcggcagcggcgcacg

SEQ ID NO: 29467 - RNA, 17 nt, Artificial Sequence
  Synthetic oligonucleotide: FAS-819
cauccuccugaccaccg

SEQ ID NO: 29468 - RNA, 17 nt, Artificial Sequence
  Synthetic oligonucleotide: FAS-840
agcugccucuucucccg

SEQ ID NO: 29469 - RNA, 17 nt, Artificial Sequence
  Synthetic oligonucleotide: FAS-942
ugggcauuccugucccg

SEQ ID NO: 29470 - RNA, 17 nt, Artificial Sequence
  Synthetic oligonucleotide: FAS-816
ccgggcguuccccagcg

SEQ ID NO: 29471 - RNA, 17 nt, Artificial Sequence
  Synthetic oligonucleotide: FAS-867
gcaaaguggggcgggcg

SEQ ID NO: 29472 - RNA, 17 nt, Artificial Sequence
  Synthetic oligonucleotide: FAS-965
ucagagaaagacuugcg

SEQ ID NO: 29473 - RNA, 17 nt, Artificial Sequence
  Synthetic oligonucleotide: FAS-807
caggaggccggcucucg

SEQ ID NO: 29474 - RNA, 17 nt, Artificial Sequence
  Synthetic oligonucleotide: FAS-839
agcccuggcugcccagg

SEQ ID NO: 29475 - RNA, 17 nt, Artificial Sequence
  Synthetic oligonucleotide: FAS-805
ccuuuagaaagggcagg

SEQ ID NO: 29476 - RNA, 17 nt, Artificial Sequence
  Synthetic oligonucleotide: FAS-909
aagccccgguggucagg

SEQ ID NO: 29477 - RNA, 17 nt, Artificial Sequence
  Synthetic oligonucleotide: FAS-931
gcgcgcggguagggagg

SEQ ID NO: 29478 - RNA, 17 nt, Artificial Sequence
  Synthetic oligonucleotide: FAS-8
ggcucaccagagguagg

SEQ ID NO: 29479 - RNA, 17 nt, Artificial Sequence
  Synthetic oligonucleotide: FAS-849
aagcucuuucacuucgg

SEQ ID NO: 29480 - RNA, 17 nt, Artificial Sequence
  Synthetic oligonucleotide: FAS-976
uagggcucugaaaaggg

SEQ ID NO: 29481 - RNA, 17 nt, Artificial Sequence
  Synthetic oligonucleotide: FAS-928
ccugcgcgcggguaggg

SEQ ID NO: 29482 - RNA, 17 nt, Artificial Sequence
  Synthetic oligonucleotide: FAS-856
gcccucuccugcccggg

SEQ ID NO: 29483 - RNA, 17 nt, Artificial Sequence
  Synthetic oligonucleotide: FAS-832
ggcuggagccucagggg

SEQ ID NO: 29484 - RNA, 17 nt, Artificial Sequence
  Synthetic oligonucleotide: FAS-865
ggauaggcaaagugggg

SEQ ID NO: 29485 - RNA, 17 nt, Artificial Sequence
  Synthetic oligonucleotide: FAS-954
aaccugggaaguugggg

SEQ ID NO: 29486 - RNA, 17 nt, Artificial Sequence
  Synthetic oligonucleotide: FAS-921
gaacgcccggguugggg

SEQ ID NO: 29487 - RNA, 17 nt, Artificial Sequence
  Synthetic oligonucleotide: FAS-857
cucuccugcccgggugg

SEQ ID NO: 29488 - RNA, 17 nt, Artificial Sequence
  Synthetic oligonucleotide: FAS-843
cuucucccgcggguugg

SEQ ID NO: 29489 - RNA, 17 nt, Artificial Sequence
  Synthetic oligonucleotide: FAS-836
gcacggaacacacccug

SEQ ID NO: 29490 - RNA, 17 nt, Artificial Sequence
  Synthetic oligonucleotide: FAS-905
gccagugcccgccccug

SEQ ID NO: 29491 - RNA, 17 nt, Artificial Sequence
  Synthetic oligonucleotide: FAS-790
aauguuuaauauagcug

SEQ ID NO: 29492 - RNA, 17 nt, Artificial Sequence
  Synthetic oligonucleotide: FAS-915
ggaaggaagccucgcug

SEQ ID NO: 29493 - RNA, 17 nt, Artificial Sequence
  Synthetic oligonucleotide: FAS-823
guucaaagacgcuucug

SEQ ID NO: 29494 - RNA, 17 nt, Artificial Sequence
  Synthetic oligonucleotide: FAS-864
cggggauaggcaaagug

SEQ ID NO: 29495 - RNA, 17 nt, Artificial Sequence
  Synthetic oligonucleotide: FAS-824
gacgcuucuggggagug

SEQ ID NO: 29496 - RNA, 17 nt, Artificial Sequence
  Synthetic oligonucleotide: FAS-869
cgggcgcgggacgcgug

SEQ ID NO: 29497 - RNA, 17 nt, Artificial Sequence
  Synthetic oligonucleotide: FAS-946
caugcucacuucaggug

SEQ ID NO: 29498 - RNA, 17 nt, Artificial Sequence
  Synthetic oligonucleotide: FAS-934
ggggagaagucagggug

SEQ ID NO: 29499 - RNA, 17 nt, Artificial Sequence
  Synthetic oligonucleotide: FAS-963
acucagagaaagacuug

SEQ ID NO: 29500 - RNA, 17 nt, Artificial Sequence
  Synthetic oligonucleotide: FAS-953
uucaaccugggaaguug

SEQ ID NO: 29501 - RNA, 17 nt, Artificial Sequence
  Synthetic oligonucleotide: FAS-968
cugggcuguccauguug

SEQ ID NO: 29502 - RNA, 17 nt, Artificial Sequence
  Synthetic oligonucleotide: FAS-911
ccgguggucaggaggau

SEQ ID NO: 29503 - RNA, 17 nt, Artificial Sequence
  Synthetic oligonucleotide: FAS-923
ccauugauucagcaacu

SEQ ID NO: 29504 - RNA, 17 nt, Artificial Sequence
  Synthetic oligonucleotide: FAS-950
cugcuguaguucaaccu

SEQ ID NO: 29505 - RNA, 17 nt, Artificial Sequence
  Synthetic oligonucleotide: FAS-961
ccuggguacaggagccu

SEQ ID NO: 29506 - RNA, 17 nt, Artificial Sequence
  Synthetic oligonucleotide: FAS-899
aagaggcagcuccgccu

SEQ ID NO: 29507 - RNA, 17 nt, Artificial Sequence
  Synthetic oligonucleotide: FAS-959
gcgcagagguccugccu

SEQ ID NO: 29508 - RNA, 17 nt, Artificial Sequence
  Synthetic oligonucleotide: FAS-789
gaauguuuaauauagcu

SEQ ID NO: 29509 - RNA, 17 nt, Artificial Sequence
  Synthetic oligonucleotide: FAS-914
gggaaggaagccucgcu

SEQ ID NO: 29510 - RNA, 17 nt, Artificial Sequence
  Synthetic oligonucleotide: FAS-851
ugcucaacaaccaugcu

SEQ ID NO: 29511 - RNA, 17 nt, Artificial Sequence
  Synthetic oligonucleotide: FAS-951
aguucaaccugggaagu

SEQ ID NO: 29512 - RNA, 17 nt, Artificial Sequence
  Synthetic oligonucleotide: FAS-115
gagggcucaccagaggu

SEQ ID NO: 29513 - RNA, 17 nt, Artificial Sequence
  Synthetic oligonucleotide: FAS-918
cuggggaacgcccgggu

SEQ ID NO: 29514 - RNA, 17 nt, Artificial Sequence
  Synthetic oligonucleotide: FAS-842
ccucuucucccgcgggu

SEQ ID NO: 29515 - RNA, 17 nt, Artificial Sequence
  Synthetic oligonucleotide: FAS-848
gggaagcucuuucacuu

SEQ ID NO: 29516 - RNA, 17 nt, Artificial Sequence
  Synthetic oligonucleotide: FAS-952
guucaaccugggaaguu

SEQ ID NO: 29517 - RNA, 17 nt, Artificial Sequence
  Synthetic oligonucleotide: FAS-919
uggggaacgcccggguu

SEQ ID NO: 29518 - RNA, 20 nt, Artificial Sequence
  Synthetic oligonucleotide: FAS-612
acagcagaagccuuuagaaa

SEQ ID NO: 29519 - RNA, 20 nt, Artificial Sequence
  Synthetic oligonucleotide: FAS-622
aggccaaguugcugaaucaa

SEQ ID NO: 29520 - RNA, 20 nt, Artificial Sequence
  Synthetic oligonucleotide: FAS-765
ggggaggucuugaaggagaa

SEQ ID NO: 29521 - RNA, 20 nt, Artificial Sequence
  Synthetic oligonucleotide: FAS-611
uacagcagaagccuuuagaa

SEQ ID NO: 29522 - RNA, 20 nt, Artificial Sequence
  Synthetic oligonucleotide: FAS-780
gcucacagacguuucuggaa

SEQ ID NO: 29523 - RNA, 20 nt, Artificial Sequence
  Synthetic oligonucleotide: FAS-602
ucuugagaaauaaaaacuaa

SEQ ID NO: 29524 - RNA, 20 nt, Artificial Sequence
  Synthetic oligonucleotide: FAS-606
cucauguugcagccacaaca

SEQ ID NO: 29525 - RNA, 20 nt, Artificial Sequence
  Synthetic oligonucleotide: FAS-710
cagcuccgccugggcagcca

SEQ ID NO: 29526 - RNA, 20 nt, Artificial Sequence
  Synthetic oligonucleotide: FAS-5
gaggguccagaugcccagca

SEQ ID NO: 29527 - RNA, 20 nt, Artificial Sequence
  Synthetic oligonucleotide: FAS-644
cucaggggcgggcacuggca

SEQ ID NO: 29528 - RNA, 20 nt, Artificial Sequence
  Synthetic oligonucleotide: FAS-639
gugacuuggcuggagccuca

SEQ ID NO: 29529 - RNA, 20 nt, Artificial Sequence
  Synthetic oligonucleotide: FAS-713
ggcagccagggcuggccuca

SEQ ID NO: 29530 - RNA, 20 nt, Artificial Sequence
  Synthetic oligonucleotide: FAS-742
guagggagggggagaaguca

SEQ ID NO: 29531 - RNA, 20 nt, Artificial Sequence
  Synthetic oligonucleotide: FAS-746
ucagggugaggaaggaguca

SEQ ID NO: 29532 - RNA, 20 nt, Artificial Sequence
  Synthetic oligonucleotide: FAS-696
gccuccacccgggcaggaga

SEQ ID NO: 29533 - RNA, 20 nt, Artificial Sequence
  Synthetic oligonucleotide: FAS-719
agccccgguggucaggagga

SEQ ID NO: 29534 - RNA, 20 nt, Artificial Sequence
  Synthetic oligonucleotide: FAS-744
gggagaagucagggugagga

SEQ ID NO: 29535 - RNA, 20 nt, Artificial Sequence
  Synthetic oligonucleotide: FAS-4
agggcucaccagagguagga

SEQ ID NO: 29536 - RNA, 20 nt, Artificial Sequence
  Synthetic oligonucleotide: FAS-738
ggccugcgcgcggguaggga

SEQ ID NO: 29537 - RNA, 20 nt, Artificial Sequence
  Synthetic oligonucleotide: FAS-731
gggaacgcccggguugggga

SEQ ID NO: 29538 - RNA, 20 nt, Artificial Sequence
  Synthetic oligonucleotide: FAS-721
cgguggucaggaggauggga

SEQ ID NO: 29539 - RNA, 20 nt, Artificial Sequence
  Synthetic oligonucleotide: FAS-764
ggaaguuggggaggucuuga

SEQ ID NO: 29540 - RNA, 20 nt, Artificial Sequence
  Synthetic oligonucleotide: FAS-782
aguacagauguugcgccaua

SEQ ID NO: 29541 - RNA, 20 nt, Artificial Sequence
  Synthetic oligonucleotide: FAS-605
aacaucuguacuuuuucaua

SEQ ID NO: 29542 - RNA, 20 nt, Artificial Sequence
  Synthetic oligonucleotide: FAS-601
cucuugagaaauaaaaacua

SEQ ID NO: 29543 - RNA, 20 nt, Artificial Sequence
  Synthetic oligonucleotide: FAS-604
ccucccuuuucagagcccua

SEQ ID NO: 29544 - RNA, 20 nt, Artificial Sequence
  Synthetic oligonucleotide: FAS-626
cuucccauccuccugaccac

SEQ ID NO: 29545 - RNA, 20 nt, Artificial Sequence
  Synthetic oligonucleotide: FAS-643
ggagccucaggggcgggcac

SEQ ID NO: 29546 - RNA, 20 nt, Artificial Sequence
  Synthetic oligonucleotide: FAS-623
caauggagcccuccccaacc

SEQ ID NO: 29547 - RNA, 20 nt, Artificial Sequence
  Synthetic oligonucleotide: FAS-627
uucccauccuccugaccacc

SEQ ID NO: 29548 - RNA, 20 nt, Artificial Sequence
  Synthetic oligonucleotide: FAS-685
cagcggcgcacgcgggcacc

SEQ ID NO: 29549 - RNA, 20 nt, Artificial Sequence
  Synthetic oligonucleotide: FAS-624
aauggagcccuccccaaccc

SEQ ID NO: 29550 - RNA, 20 nt, Artificial Sequence
  Synthetic oligonucleotide: FAS-608
uagccaaggcuccuguaccc

SEQ ID NO: 29551 - RNA, 20 nt, Artificial Sequence
  Synthetic oligonucleotide: FAS-688
gccccacuuugccuaucccc

SEQ ID NO: 29552 - RNA, 20 nt, Artificial Sequence
  Synthetic oligonucleotide: FAS-646
acacacccugaggccagccc

SEQ ID NO: 29553 - RNA, 20 nt, Artificial Sequence
  Synthetic oligonucleotide: FAS-618
cagccacugcaggaacgccc

SEQ ID NO: 29554 - RNA, 20 nt, Artificial Sequence
  Synthetic oligonucleotide: FAS-726
agccucgcuggggaacgccc

SEQ ID NO: 29555 - RNA, 20 nt, Artificial Sequence
  Synthetic oligonucleotide: FAS-664
uggugagcccucuccugccc

SEQ ID NO: 29556 - RNA, 20 nt, Artificial Sequence
  Synthetic oligonucleotide: FAS-647
gaggccagcccuggcugccc

SEQ ID NO: 29557 - RNA, 20 nt, Artificial Sequence
  Synthetic oligonucleotide: FAS-750
caaaugggcauuccuguccc

SEQ ID NO: 29558 - RNA, 20 nt, Artificial Sequence
  Synthetic oligonucleotide: FAS-610
caagaccuccccaacuuccc

SEQ ID NO: 29559 - RNA, 20 nt, Artificial Sequence
  Synthetic oligonucleotide: FAS-709
gcagcuccgccugggcagcc

SEQ ID NO: 29560 - RNA, 20 nt, Artificial Sequence
  Synthetic oligonucleotide: FAS-725
aagccucgcuggggaacgcc

SEQ ID NO: 29561 - RNA, 20 nt, Artificial Sequence
  Synthetic oligonucleotide: FAS-707
ggagaagaggcagcuccgcc

SEQ ID NO: 29562 - RNA, 20 nt, Artificial Sequence
  Synthetic oligonucleotide: FAS-663
cuggugagcccucuccugcc

SEQ ID NO: 29563 - RNA, 20 nt, Artificial Sequence
  Synthetic oligonucleotide: FAS-767
cagagcgcagagguccugcc

SEQ ID NO: 29564 - RNA, 20 nt, Artificial Sequence
  Synthetic oligonucleotide: FAS-749
acaaaugggcauuccugucc

SEQ ID NO: 29565 - RNA, 20 nt, Artificial Sequence
  Synthetic oligonucleotide: FAS-756
caggugaggaccucgagagc

SEQ ID NO: 29566 - RNA, 20 nt, Artificial Sequence
  Synthetic oligonucleotide: FAS-597
uugugaauguuuaauauagc

SEQ ID NO: 29567 - RNA, 20 nt, Artificial Sequence
  Synthetic oligonucleotide: FAS-684
gcggcggcagcggcgcacgc

SEQ ID NO: 29568 - RNA, 20 nt, Artificial Sequence
  Synthetic oligonucleotide: FAS-650
ggagcugccucuucucccgc

SEQ ID NO: 29569 - RNA, 20 nt, Artificial Sequence
  Synthetic oligonucleotide: FAS-621
cccccucccuacccgcgcgc

SEQ ID NO: 29570 - RNA, 20 nt, Artificial Sequence
  Synthetic oligonucleotide: FAS-734
cagcaacuuggccugcgcgc

SEQ ID NO: 29571 - RNA, 20 nt, Artificial Sequence
  Synthetic oligonucleotide: FAS-677
aggcaaaguggggcgggcgc

SEQ ID NO: 29572 - RNA, 20 nt, Artificial Sequence
  Synthetic oligonucleotide: FAS-722
ggaugggaaggaagccucgc

SEQ ID NO: 29573 - RNA, 20 nt, Artificial Sequence
  Synthetic oligonucleotide: FAS-609
caaggcuccuguacccaggc

SEQ ID NO: 29574 - RNA, 20 nt, Artificial Sequence
  Synthetic oligonucleotide: FAS-615
cuuuagaaagggcaggaggc

SEQ ID NO: 29575 - RNA, 20 nt, Artificial Sequence
  Synthetic oligonucleotide: FAS-613
cagaagccuuuagaaagggc

SEQ ID NO: 29576 - RNA, 20 nt, Artificial Sequence
  Synthetic oligonucleotide: FAS-711
uccgccugggcagccagggc

SEQ ID NO: 29577 - RNA, 20 nt, Artificial Sequence
  Synthetic oligonucleotide: FAS-694
ggguaagccuccacccgggc

SEQ ID NO: 29578 - RNA, 20 nt, Artificial Sequence
  Synthetic oligonucleotide: FAS-642
uuggcuggagccucaggggc

SEQ ID NO: 29579 - RNA, 20 nt, Artificial Sequence
  Synthetic oligonucleotide: FAS-675
ggggauaggcaaaguggggc

SEQ ID NO: 29580 - RNA, 20 nt, Artificial Sequence
  Synthetic oligonucleotide: FAS-753
cggggcguuccugcaguggc

SEQ ID NO: 29581 - RNA, 20 nt, Artificial Sequence
  Synthetic oligonucleotide: FAS-617
gugagcaugccagccacugc

SEQ ID NO: 29582 - RNA, 20 nt, Artificial Sequence
  Synthetic oligonucleotide: FAS-679
ggcgggcgcgggacgcgugc

SEQ ID NO: 29583 - RNA, 20 nt, Artificial Sequence
  Synthetic oligonucleotide: FAS-771
caggagccuuggcuaauugc

SEQ ID NO: 29584 - RNA, 20 nt, Artificial Sequence
  Synthetic oligonucleotide: FAS-773
ucacucagagaaagacuugc

SEQ ID NO: 29585 - RNA, 20 nt, Artificial Sequence
  Synthetic oligonucleotide: FAS-1
caacaaccaugcugggcauc

SEQ ID NO: 29586 - RNA, 20 nt, Artificial Sequence
  Synthetic oligonucleotide: FAS-2
caucuggacccuccuaccuc

SEQ ID NO: 29587 - RNA, 20 nt, Artificial Sequence
  Synthetic oligonucleotide: FAS-638
agugacuuggcuggagccuc

SEQ ID NO: 29588 - RNA, 20 nt, Artificial Sequence
  Synthetic oligonucleotide: FAS-712
gggcagccagggcuggccuc

SEQ ID NO: 29589 - RNA, 20 nt, Artificial Sequence
  Synthetic oligonucleotide: FAS-741
gguagggagggggagaaguc

SEQ ID NO: 29590 - RNA, 20 nt, Artificial Sequence
  Synthetic oligonucleotide: FAS-745
gucagggugaggaaggaguc

SEQ ID NO: 29591 - RNA, 20 nt, Artificial Sequence
  Synthetic oligonucleotide: FAS-787
cuuaguuuuuauuucucaag

SEQ ID NO: 29592 - RNA, 20 nt, Artificial Sequence
  Synthetic oligonucleotide: FAS-706
ccaccaacccgcgggagaag

SEQ ID NO: 29593 - RNA, 20 nt, Artificial Sequence
  Synthetic oligonucleotide: FAS-635
cuucuggggagugagggaag

SEQ ID NO: 29594 - RNA, 20 nt, Artificial Sequence
  Synthetic oligonucleotide: FAS-603
cuugagaaauaaaaacuaag

SEQ ID NO: 29595 - RNA, 20 nt, Artificial Sequence
  Synthetic oligonucleotide: FAS-697
ggcaggagagggcucaccag

SEQ ID NO: 29596 - RNA, 20 nt, Artificial Sequence
  Synthetic oligonucleotide: FAS-682
gugcgggauugcggcggcag

SEQ ID NO: 29597 - RNA, 20 nt, Artificial Sequence
  Synthetic oligonucleotide: FAS-752
gucccggggcguuccugcag

SEQ ID NO: 29598 - RNA, 20 nt, Artificial Sequence
  Synthetic oligonucleotide: FAS-640
ugacuuggcuggagccucag

SEQ ID NO: 29599 - RNA, 20 nt, Artificial Sequence
  Synthetic oligonucleotide: FAS-695
agccuccacccgggcaggag

SEQ ID NO: 29600 - RNA, 20 nt, Artificial Sequence
  Synthetic oligonucleotide: FAS-739
gccugcgcgcggguagggag

SEQ ID NO: 29601 - RNA, 20 nt, Artificial Sequence
  Synthetic oligonucleotide: FAS-778
uguuguggcugcaacaugag

SEQ ID NO: 29602 - RNA, 20 nt, Artificial Sequence
  Synthetic oligonucleotide: FAS-702
uuccccaacuccguacugag

SEQ ID NO: 29603 - RNA, 20 nt, Artificial Sequence
  Synthetic oligonucleotide: FAS-683
ugcggcggcagcggcgcacg

SEQ ID NO: 29604 - RNA, 20 nt, Artificial Sequence
  Synthetic oligonucleotide: FAS-628
ucccauccuccugaccaccg

SEQ ID NO: 29605 - RNA, 20 nt, Artificial Sequence
  Synthetic oligonucleotide: FAS-649
cggagcugccucuucucccg

SEQ ID NO: 29606 - RNA, 20 nt, Artificial Sequence
  Synthetic oligonucleotide: FAS-751
aaaugggcauuccugucccg

SEQ ID NO: 29607 - RNA, 20 nt, Artificial Sequence
  Synthetic oligonucleotide: FAS-676
uaggcaaaguggggcgggcg

SEQ ID NO: 29608 - RNA, 20 nt, Artificial Sequence
  Synthetic oligonucleotide: FAS-774
cacucagagaaagacuugcg

SEQ ID NO: 29609 - RNA, 20 nt, Artificial Sequence
  Synthetic oligonucleotide: FAS-616
gggcaggaggccggcucucg

SEQ ID NO: 29610 - RNA, 20 nt, Artificial Sequence
  Synthetic oligonucleotide: FAS-648
gccagcccuggcugcccagg

SEQ ID NO: 29611 - RNA, 20 nt, Artificial Sequence
  Synthetic oligonucleotide: FAS-614
aagccuuuagaaagggcagg

SEQ ID NO: 29612 - RNA, 20 nt, Artificial Sequence
  Synthetic oligonucleotide: FAS-740
ccugcgcgcggguagggagg

SEQ ID NO: 29613 - RNA, 20 nt, Artificial Sequence
  Synthetic oligonucleotide: FAS-3
gagggcucaccagagguagg

SEQ ID NO: 29614 - RNA, 20 nt, Artificial Sequence
  Synthetic oligonucleotide: FAS-658
gggaagcucuuucacuucgg

SEQ ID NO: 29615 - RNA, 20 nt, Artificial Sequence
  Synthetic oligonucleotide: FAS-785
ccauagggcucugaaaaggg

SEQ ID NO: 29616 - RNA, 20 nt, Artificial Sequence
  Synthetic oligonucleotide: FAS-737
uggccugcgcgcggguaggg

SEQ ID NO: 29617 - RNA, 20 nt, Artificial Sequence
  Synthetic oligonucleotide: FAS-641
cuuggcuggagccucagggg

SEQ ID NO: 29618 - RNA, 20 nt, Artificial Sequence
  Synthetic oligonucleotide: FAS-674
cggggauaggcaaagugggg

SEQ ID NO: 29619 - RNA, 20 nt, Artificial Sequence
  Synthetic oligonucleotide: FAS-763
uucaaccugggaaguugggg

SEQ ID NO: 29620 - RNA, 20 nt, Artificial Sequence
  Synthetic oligonucleotide: FAS-730
ggggaacgcccggguugggg

SEQ ID NO: 29621 - RNA, 20 nt, Artificial Sequence
  Synthetic oligonucleotide: FAS-666
gcccucuccugcccgggugg

SEQ ID NO: 29622 - RNA, 20 nt, Artificial Sequence
  Synthetic oligonucleotide: FAS-652
ccucuucucccgcggguugg

SEQ ID NO: 29623 - RNA, 20 nt, Artificial Sequence
  Synthetic oligonucleotide: FAS-645
cuggcacggaacacacccug

SEQ ID NO: 29624 - RNA, 20 nt, Artificial Sequence
  Synthetic oligonucleotide: FAS-714
cgugccagugcccgccccug

SEQ ID NO: 29625 - RNA, 20 nt, Artificial Sequence
  Synthetic oligonucleotide: FAS-599
gugaauguuuaauauagcug

SEQ ID NO: 29626 - RNA, 20 nt, Artificial Sequence
  Synthetic oligonucleotide: FAS-724
augggaaggaagccucgcug

SEQ ID NO: 29627 - RNA, 20 nt, Artificial Sequence
  Synthetic oligonucleotide: FAS-632
gguguucaaagacgcuucug

SEQ ID NO: 29628 - RNA, 20 nt, Artificial Sequence
  Synthetic oligonucleotide: FAS-673
ucccggggauaggcaaagug

SEQ ID NO: 29629 - RNA, 20 nt, Artificial Sequence
  Synthetic oligonucleotide: FAS-678
gggcgggcgcgggacgcgug

SEQ ID NO: 29630 - RNA, 20 nt, Artificial Sequence
  Synthetic oligonucleotide: FAS-755
uggcaugcucacuucaggug

SEQ ID NO: 29631 - RNA, 20 nt, Artificial Sequence
  Synthetic oligonucleotide: FAS-743
gagggggagaagucagggug

SEQ ID NO: 29632 - RNA, 20 nt, Artificial Sequence
  Synthetic oligonucleotide: FAS-772
gucacucagagaaagacuug

SEQ ID NO: 29633 - RNA, 20 nt, Artificial Sequence
  Synthetic oligonucleotide: FAS-762
uaguucaaccugggaaguug

SEQ ID NO: 29634 - RNA, 20 nt, Artificial Sequence
  Synthetic oligonucleotide: FAS-729
gcuggggaacgcccggguug

SEQ ID NO: 29635 - RNA, 20 nt, Artificial Sequence
  Synthetic oligonucleotide: FAS-777
ugacugggcuguccauguug

SEQ ID NO: 29636 - RNA, 20 nt, Artificial Sequence
  Synthetic oligonucleotide: FAS-776
gacuugcggggcauuugacu

SEQ ID NO: 29637 - RNA, 20 nt, Artificial Sequence
  Synthetic oligonucleotide: FAS-759
cuucugcuguaguucaaccu

SEQ ID NO: 29638 - RNA, 20 nt, Artificial Sequence
  Synthetic oligonucleotide: FAS-770
cugccuggguacaggagccu

SEQ ID NO: 29639 - RNA, 20 nt, Artificial Sequence
  Synthetic oligonucleotide: FAS-768
agagcgcagagguccugccu

SEQ ID NO: 29640 - RNA, 20 nt, Artificial Sequence
  Synthetic oligonucleotide: FAS-598
ugugaauguuuaauauagcu

SEQ ID NO: 29641 - RNA, 20 nt, Artificial Sequence
  Synthetic oligonucleotide: FAS-660
gauugcucaacaaccaugcu

SEQ ID NO: 29642 - RNA, 20 nt, Artificial Sequence
  Synthetic oligonucleotide: FAS-631
agguguucaaagacgcuucu

SEQ ID NO: 29643 - RNA, 20 nt, Artificial Sequence
  Synthetic oligonucleotide: FAS-760
uguaguucaaccugggaagu

SEQ ID NO: 29644 - RNA, 20 nt, Artificial Sequence
  Synthetic oligonucleotide: FAS-105
ggagagggcucaccagaggu

SEQ ID NO: 29645 - RNA, 20 nt, Artificial Sequence
  Synthetic oligonucleotide: FAS-651
cugccucuucucccgcgggu

SEQ ID NO: 29646 - RNA, 20 nt, Artificial Sequence
  Synthetic oligonucleotide: FAS-657
uuggggaagcucuuucacuu

SEQ ID NO: 29647 - RNA, 20 nt, Artificial Sequence
  Synthetic oligonucleotide: FAS-761
guaguucaaccugggaaguu

SEQ ID NO: 29648 - RNA, 20 nt, Artificial Sequence
  Synthetic oligonucleotide: FAS-728
cgcuggggaacgcccggguu

SEQ ID NO: 29649 - RNA, 17 nt, Artificial Sequence
  Synthetic oligonucleotide: FAS-1829
acagugggcuaagcaaa

SEQ ID NO: 29650 - RNA, 17 nt, Artificial Sequence
  Synthetic oligonucleotide: FAS-2086
cuuuuucgagaaagaaa

SEQ ID NO: 29651 - RNA, 17 nt, Artificial Sequence
  Synthetic oligonucleotide: FAS-2023
cugacaagccaagccaa

SEQ ID NO: 29652 - RNA, 17 nt, Artificial Sequence
  Synthetic oligonucleotide: FAS-1840
uugguggacgaugccaa

SEQ ID NO: 29653 - RNA, 17 nt, Artificial Sequence
  Synthetic oligonucleotide: FAS-1828
aacagugggcuaagcaa

SEQ ID NO: 29654 - RNA, 17 nt, Artificial Sequence
  Synthetic oligonucleotide: FAS-2043
cggagggcucggaagaa

SEQ ID NO: 29655 - RNA, 17 nt, Artificial Sequence
  Synthetic oligonucleotide: FAS-1835
uugaaucuaauugggaa

SEQ ID NO: 29656 - RNA, 17 nt, Artificial Sequence
  Synthetic oligonucleotide: FAS-1871
ucacuauugcuuuggaa

SEQ ID NO: 29657 - RNA, 17 nt, Artificial Sequence
  Synthetic oligonucleotide: FAS-1877
cagacuggacacacuaa

SEQ ID NO: 29658 - RNA, 17 nt, Artificial Sequence
  Synthetic oligonucleotide: FAS-1830
uauuaauguguuauuaa

SEQ ID NO: 29659 - RNA, 17 nt, Artificial Sequence
  Synthetic oligonucleotide: FAS-1816
gacagaugcaaaacaca

SEQ ID NO: 29660 - RNA, 17 nt, Artificial Sequence
  Synthetic oligonucleotide: FAS-2112
gucagcacuucgcauca

SEQ ID NO: 29661 - RNA, 17 nt, Artificial Sequence
  Synthetic oligonucleotide: FAS-2100
uuuggcuuggcuuguca

SEQ ID NO: 29662 - RNA, 17 nt, Artificial Sequence
  Synthetic oligonucleotide: FAS-1873
agcaugaauuuuacaga

SEQ ID NO: 29663 - RNA, 17 nt, Artificial Sequence
  Synthetic oligonucleotide: FAS-1820
auggaaagcccucagga

SEQ ID NO: 29664 - RNA, 17 nt, Artificial Sequence
  Synthetic oligonucleotide: FAS-2041
gcagugguuaagccgga

SEQ ID NO: 29665 - RNA, 17 nt, Artificial Sequence
  Synthetic oligonucleotide: FAS-2117
cacccgggccugaggga

SEQ ID NO: 29666 - RNA, 17 nt, Artificial Sequence
  Synthetic oligonucleotide: FAS-1834
guugaaucuaauuggga

SEQ ID NO: 29667 - RNA, 17 nt, Artificial Sequence
  Synthetic oligonucleotide: FAS-2015
gcuuuagggucgcugga

SEQ ID NO: 29668 - RNA, 17 nt, Artificial Sequence
  Synthetic oligonucleotide: FAS-1825
acugagaggaagccuga

SEQ ID NO: 29669 - RNA, 17 nt, Artificial Sequence
  Synthetic oligonucleotide: FAS-2116
ugagcacccgggccuga

SEQ ID NO: 29670 - RNA, 17 nt, Artificial Sequence
  Synthetic oligonucleotide: FAS-1886
uuagguuacccuccuga

SEQ ID NO: 29671 - RNA, 17 nt, Artificial Sequence
  Synthetic oligonucleotide: FAS-2089
agcaauaucuguucuga

SEQ ID NO: 29672 - RNA, 17 nt, Artificial Sequence
  Synthetic oligonucleotide: FAS-1817
ugcaaaacacaggguga

SEQ ID NO: 29673 - RNA, 17 nt, Artificial Sequence
  Synthetic oligonucleotide: FAS-1822
accuaaccuagauuuga

SEQ ID NO: 29674 - RNA, 17 nt, Artificial Sequence
  Synthetic oligonucleotide: FAS-2044
uucucgaaaaaguuaua

SEQ ID NO: 29675 - RNA, 17 nt, Artificial Sequence
  Synthetic oligonucleotide: FAS-2012
aagucugggaagcuuua

SEQ ID NO: 29676 - RNA, 17 nt, Artificial Sequence
  Synthetic oligonucleotide: FAS-1823
gauuugagggcccaaac

SEQ ID NO: 29677 - RNA, 17 nt, Artificial Sequence
  Synthetic oligonucleotide: FAS-2102
ccgcuccucucuccaac

SEQ ID NO: 29678 - RNA, 17 nt, Artificial Sequence
  Synthetic oligonucleotide: FAS-1815
ugacagaugcaaaacac

SEQ ID NO: 29679 - RNA, 17 nt, Artificial Sequence
  Synthetic oligonucleotide: FAS-1813
aucaacaccuacaagac

SEQ ID NO: 29680 - RNA, 17 nt, Artificial Sequence
  Synthetic oligonucleotide: FAS-1876
uggaugcaguuccagac

SEQ ID NO: 29681 - RNA, 17 nt, Artificial Sequence
  Synthetic oligonucleotide: FAS-1979
cgggaggcguuggagac

SEQ ID NO: 29682 - RNA, 17 nt, Artificial Sequence
  Synthetic oligonucleotide: FAS-2007
gggcguggggugcggac

SEQ ID NO: 29683 - RNA, 17 nt, Artificial Sequence
  Synthetic oligonucleotide: FAS-2103
cgcuccucucuccaacc

SEQ ID NO: 29684 - RNA, 17 nt, Artificial Sequence
  Synthetic oligonucleotide: FAS-2113
ccagcguucugagcacc

SEQ ID NO: 29685 - RNA, 17 nt, Artificial Sequence
  Synthetic oligonucleotide: FAS-2114
cagcguucugagcaccc

SEQ ID NO: 29686 - RNA, 17 nt, Artificial Sequence
  Synthetic oligonucleotide: FAS-2018
ucgcuggagggggaccc

SEQ ID NO: 29687 - RNA, 17 nt, Artificial Sequence
  Synthetic oligonucleotide: FAS-2119
agguccuaacagccccc

SEQ ID NO: 29688 - RNA, 17 nt, Artificial Sequence
  Synthetic oligonucleotide: FAS-2118
aagguccuaacagcccc

SEQ ID NO: 29689 - RNA, 17 nt, Artificial Sequence
  Synthetic oligonucleotide: FAS-1987
gaccuucccucaggccc

SEQ ID NO: 29690 - RNA, 17 nt, Artificial Sequence
  Synthetic oligonucleotide: FAS-1981
guuggagacuggcuccc

SEQ ID NO: 29691 - RNA, 17 nt, Artificial Sequence
  Synthetic oligonucleotide: FAS-1986
ggaccuucccucaggcc

SEQ ID NO: 29692 - RNA, 17 nt, Artificial Sequence
  Synthetic oligonucleotide: FAS-1844
uuuaaagaaaauuggcc

SEQ ID NO: 29693 - RNA, 17 nt, Artificial Sequence
  Synthetic oligonucleotide: FAS-2022
gagaggagcggaacucc

SEQ ID NO: 29694 - RNA, 17 nt, Artificial Sequence
  Synthetic oligonucleotide: FAS-1980
cguuggagacuggcucc

SEQ ID NO: 29695 - RNA, 17 nt, Artificial Sequence
  Synthetic oligonucleotide: FAS-2101
cuugucagggcuugucc

SEQ ID NO: 29696 - RNA, 17 nt, Artificial Sequence
  Synthetic oligonucleotide: FAS-2039
cgaagcagugguuaagc

SEQ ID NO: 29697 - RNA, 17 nt, Artificial Sequence
  Synthetic oligonucleotide: FAS-2110
ugccccgccugcccagc

SEQ ID NO: 29698 - RNA, 17 nt, Artificial Sequence
  Synthetic oligonucleotide: FAS-1988
ccgggugcucagaacgc

SEQ ID NO: 29699 - RNA, 17 nt, Artificial Sequence
  Synthetic oligonucleotide: FAS-1992
cgaagugcugaccccgc

SEQ ID NO: 29700 - RNA, 17 nt, Artificial Sequence
  Synthetic oligonucleotide: FAS-2092
ucucuccccgcccccgc

SEQ ID NO: 29701 - RNA, 17 nt, Artificial Sequence
  Synthetic oligonucleotide: FAS-2030
agugcgcgccgccccgc

SEQ ID NO: 29702 - RNA, 17 nt, Artificial Sequence
  Synthetic oligonucleotide: FAS-2108
uggucuccgaggagcgc

SEQ ID NO: 29703 - RNA, 17 nt, Artificial Sequence
  Synthetic oligonucleotide: FAS-2095
cacucacccacccgcgc

SEQ ID NO: 29704 - RNA, 17 nt, Artificial Sequence
  Synthetic oligonucleotide: FAS-2026
aagguccgcuccggcgc

SEQ ID NO: 29705 - RNA, 17 nt, Artificial Sequence
  Synthetic oligonucleotide: FAS-2013
ggaagcuuuagggucgc

SEQ ID NO: 29706 - RNA, 17 nt, Artificial Sequence
  Synthetic oligonucleotide: FAS-1996
gaccccgcugggcaggc

SEQ ID NO: 29707 - RNA, 17 nt, Artificial Sequence
  Synthetic oligonucleotide: FAS-2034
cgccgccccgcgggggc

SEQ ID NO: 29708 - RNA, 17 nt, Artificial Sequence
  Synthetic oligonucleotide: FAS-1994
ugcugaccccgcugggc

SEQ ID NO: 29709 - RNA, 17 nt, Artificial Sequence
  Synthetic oligonucleotide: FAS-2090
ucuguucugaaggcugc

SEQ ID NO: 29710 - RNA, 17 nt, Artificial Sequence
  Synthetic oligonucleotide: FAS-1818
ggugauggaaagcccuc

SEQ ID NO: 29711 - RNA, 17 nt, Artificial Sequence
  Synthetic oligonucleotide: FAS-2087
cguucuuccgagcccuc

SEQ ID NO: 29712 - RNA, 17 nt, Artificial Sequence
  Synthetic oligonucleotide: FAS-1985
uguuaggaccuucccuc

SEQ ID NO: 29713 - RNA, 17 nt, Artificial Sequence
  Synthetic oligonucleotide: FAS-1998
ggcaggcggggcagcuc

SEQ ID NO: 29714 - RNA, 17 nt, Artificial Sequence
  Synthetic oligonucleotide: FAS-2024
aagccaaagguccgcuc

SEQ ID NO: 29715 - RNA, 17 nt, Artificial Sequence
  Synthetic oligonucleotide: FAS-1869
guaauucuuucgugcuc

SEQ ID NO: 29716 - RNA, 17 nt, Artificial Sequence
  Synthetic oligonucleotide: FAS-2009
gaauugaagcggaaguc

SEQ ID NO: 29717 - RNA, 17 nt, Artificial Sequence
  Synthetic oligonucleotide: FAS-1841
cuuuaguguguccaguc

SEQ ID NO: 29718 - RNA, 17 nt, Artificial Sequence
  Synthetic oligonucleotide: FAS-2099
cuuuggcuuggcuuguc

SEQ ID NO: 29719 - RNA, 17 nt, Artificial Sequence
  Synthetic oligonucleotide: FAS-1842
gaacugcauccaaauuc

SEQ ID NO: 29720 - RNA, 17 nt, Artificial Sequence
  Synthetic oligonucleotide: FAS-1879
cccacuguucauccuuc

SEQ ID NO: 29721 - RNA, 17 nt, Artificial Sequence
  Synthetic oligonucleotide: FAS-1880
caguugacauuuucuuc

SEQ ID NO: 29722 - RNA, 17 nt, Artificial Sequence
  Synthetic oligonucleotide: FAS-2036
agauauugcucauuuuc

SEQ ID NO: 29723 - RNA, 17 nt, Artificial Sequence
  Synthetic oligonucleotide: FAS-2008
gcggacaggaauugaag

SEQ ID NO: 29724 - RNA, 17 nt, Artificial Sequence
  Synthetic oligonucleotide: FAS-1826
gccugaaggaugaacag

SEQ ID NO: 29725 - RNA, 17 nt, Artificial Sequence
  Synthetic oligonucleotide: FAS-2109
cugccccgccugcccag

SEQ ID NO: 29726 - RNA, 17 nt, Artificial Sequence
  Synthetic oligonucleotide: FAS-2038
agucagcaccgaagcag

SEQ ID NO: 29727 - RNA, 17 nt, Artificial Sequence
  Synthetic oligonucleotide: FAS-2106
cucaacguggagcgcag

SEQ ID NO: 29728 - RNA, 17 nt, Artificial Sequence
  Synthetic oligonucleotide: FAS-1836
uaauugggaagggagag

SEQ ID NO: 29729 - RNA, 17 nt, Artificial Sequence
  Synthetic oligonucleotide: FAS-2020
ggaccccgguuggagag

SEQ ID NO: 29730 - RNA, 17 nt, Artificial Sequence
  Synthetic oligonucleotide: FAS-2021
ccgguuggagagaggag

SEQ ID NO: 29731 - RNA, 17 nt, Artificial Sequence
  Synthetic oligonucleotide: FAS-2096
acccacccgcgccggag

SEQ ID NO: 29732 - RNA, 17 nt, Artificial Sequence
  Synthetic oligonucleotide: FAS-2016
cuuuagggucgcuggag

SEQ ID NO: 29733 - RNA, 17 nt, Artificial Sequence
  Synthetic oligonucleotide: FAS-1824
agaaaaugucaacugag

SEQ ID NO: 29734 - RNA, 17 nt, Artificial Sequence
  Synthetic oligonucleotide: FAS-2105
ccacgcccaccucaacg

SEQ ID NO: 29735 - RNA, 17 nt, Artificial Sequence
  Synthetic oligonucleotide: FAS-2104
gcuccucucuccaaccg

SEQ ID NO: 29736 - RNA, 17 nt, Artificial Sequence
  Synthetic oligonucleotide: FAS-2091
cucucuccccgcccccg

SEQ ID NO: 29737 - RNA, 17 nt, Artificial Sequence
  Synthetic oligonucleotide: FAS-2029
gagugcgcgccgccccg

SEQ ID NO: 29738 - RNA, 17 nt, Artificial Sequence
  Synthetic oligonucleotide: FAS-1982
uuggagacuggcucccg

SEQ ID NO: 29739 - RNA, 17 nt, Artificial Sequence
  Synthetic oligonucleotide: FAS-2107
gagcgcaguggucuccg

SEQ ID NO: 29740 - RNA, 17 nt, Artificial Sequence
  Synthetic oligonucleotide: FAS-2111
gccccgccugcccagcg

SEQ ID NO: 29741 - RNA, 17 nt, Artificial Sequence
  Synthetic oligonucleotide: FAS-2093
cucuccccgcccccgcg

SEQ ID NO: 29742 - RNA, 17 nt, Artificial Sequence
  Synthetic oligonucleotide: FAS-2031
gugcgcgccgccccgcg

SEQ ID NO: 29743 - RNA, 17 nt, Artificial Sequence
  Synthetic oligonucleotide: FAS-1997
accccgcugggcaggcg

SEQ ID NO: 29744 - RNA, 17 nt, Artificial Sequence
  Synthetic oligonucleotide: FAS-2025
aaagguccgcuccggcg

SEQ ID NO: 29745 - RNA, 17 nt, Artificial Sequence
  Synthetic oligonucleotide: FAS-2035
gccgccccgcgggggcg

SEQ ID NO: 29746 - RNA, 17 nt, Artificial Sequence
  Synthetic oligonucleotide: FAS-2003
ccacguugaggugggcg

SEQ ID NO: 29747 - RNA, 17 nt, Artificial Sequence
  Synthetic oligonucleotide: FAS-1995
ugaccccgcugggcagg

SEQ ID NO: 29748 - RNA, 17 nt, Artificial Sequence
  Synthetic oligonucleotide: FAS-1819
gauggaaagcccucagg

SEQ ID NO: 29749 - RNA, 17 nt, Artificial Sequence
  Synthetic oligonucleotide: FAS-2017
uuuagggucgcuggagg

SEQ ID NO: 29750 - RNA, 17 nt, Artificial Sequence
  Synthetic oligonucleotide: FAS-2001
ugcgcuccacguugagg

SEQ ID NO: 29751 - RNA, 17 nt, Artificial Sequence
  Synthetic oligonucleotide: FAS-1983
uggagacuggcucccgg

SEQ ID NO: 29752 - RNA, 17 nt, Artificial Sequence
  Synthetic oligonucleotide: FAS-2040
agcagugguuaagccgg

SEQ ID NO: 29753 - RNA, 17 nt, Artificial Sequence
  Synthetic oligonucleotide: FAS-2032
ugcgcgccgccccgcgg

SEQ ID NO: 29754 - RNA, 17 nt, Artificial Sequence
  Synthetic oligonucleotide: FAS-2027
guccgcuccggcgcggg

SEQ ID NO: 29755 - RNA, 17 nt, Artificial Sequence
  Synthetic oligonucleotide: FAS-2094
uccccgcccccgcgggg

SEQ ID NO: 29756 - RNA, 17 nt, Artificial Sequence
  Synthetic oligonucleotide: FAS-2033
gcgccgccccgcggggg

SEQ ID NO: 29757 - RNA, 17 nt, Artificial Sequence
  Synthetic oligonucleotide: FAS-2047
ucgaaaaaguuauaugg

SEQ ID NO: 29758 - RNA, 17 nt, Artificial Sequence
  Synthetic oligonucleotide: FAS-1814
aacaccuacaagacugg

SEQ ID NO: 29759 - RNA, 17 nt, Artificial Sequence
  Synthetic oligonucleotide: FAS-1989
ggugcucagaacgcugg

SEQ ID NO: 29760 - RNA, 17 nt, Artificial Sequence
  Synthetic oligonucleotide: FAS-2014
agcuuuagggucgcugg

SEQ ID NO: 29761 - RNA, 17 nt, Artificial Sequence
  Synthetic oligonucleotide: FAS-1839
ugaggugcagagcuugg

SEQ ID NO: 29762 - RNA, 17 nt, Artificial Sequence
  Synthetic oligonucleotide: FAS-2046
cucgaaaaaguuauaug

SEQ ID NO: 29763 - RNA, 17 nt, Artificial Sequence
  Synthetic oligonucleotide: FAS-2115
cugagcacccgggccug

SEQ ID NO: 29764 - RNA, 17 nt, Artificial Sequence
  Synthetic oligonucleotide: FAS-1885
guuagguuacccuccug

SEQ ID NO: 29765 - RNA, 17 nt, Artificial Sequence
  Synthetic oligonucleotide: FAS-1837
agagagguugcagagug

SEQ ID NO: 29766 - RNA, 17 nt, Artificial Sequence
  Synthetic oligonucleotide: FAS-2005
acguugaggugggcgug

SEQ ID NO: 29767 - RNA, 17 nt, Artificial Sequence
  Synthetic oligonucleotide: FAS-2006
gaggugggcguggggug

SEQ ID NO: 29768 - RNA, 17 nt, Artificial Sequence
  Synthetic oligonucleotide: FAS-2000
cacugcgcuccacguug

SEQ ID NO: 29769 - RNA, 17 nt, Artificial Sequence
  Synthetic oligonucleotide: FAS-1821
aaccuaaccuagauuug

SEQ ID NO: 29770 - RNA, 17 nt, Artificial Sequence
  Synthetic oligonucleotide: FAS-1843
uuuuuuuuaaagaaaau

SEQ ID NO: 29771 - RNA, 17 nt, Artificial Sequence
  Synthetic oligonucleotide: FAS-1832
aauggguugaaucuaau

SEQ ID NO: 29772 - RNA, 17 nt, Artificial Sequence
  Synthetic oligonucleotide: FAS-1831
auuaauguguuauuaau

SEQ ID NO: 29773 - RNA, 17 nt, Artificial Sequence
  Synthetic oligonucleotide: FAS-1888
gucuuguagguguugau

SEQ ID NO: 29774 - RNA, 17 nt, Artificial Sequence
  Synthetic oligonucleotide: FAS-2045
ucucgaaaaaguuauau

SEQ ID NO: 29775 - RNA, 17 nt, Artificial Sequence
  Synthetic oligonucleotide: FAS-1999
gcagcuccggcgcuccu

SEQ ID NO: 29776 - RNA, 17 nt, Artificial Sequence
  Synthetic oligonucleotide: FAS-1838
gagugaggugcagagcu

SEQ ID NO: 29777 - RNA, 17 nt, Artificial Sequence
  Synthetic oligonucleotide: FAS-1993
gaagugcugaccccgcu

SEQ ID NO: 29778 - RNA, 17 nt, Artificial Sequence
  Synthetic oligonucleotide: FAS-2042
gguuaagccggagggcu

SEQ ID NO: 29779 - RNA, 17 nt, Artificial Sequence
  Synthetic oligonucleotide: FAS-2098
ggagcggaccuuuggcu

SEQ ID NO: 29780 - RNA, 17 nt, Artificial Sequence
  Synthetic oligonucleotide: FAS-1883
uuugggcccucaaaucu

SEQ ID NO: 29781 - RNA, 17 nt, Artificial Sequence
  Synthetic oligonucleotide: FAS-2010
aauugaagcggaagucu

SEQ ID NO: 29782 - RNA, 17 nt, Artificial Sequence
  Synthetic oligonucleotide: FAS-1990
ggaggacuugcuuuucu

SEQ ID NO: 29783 - RNA, 17 nt, Artificial Sequence
  Synthetic oligonucleotide: FAS-1827
ccugaaggaugaacagu

SEQ ID NO: 29784 - RNA, 17 nt, Artificial Sequence
  Synthetic oligonucleotide: FAS-2037
uggcaguucucagacgu

SEQ ID NO: 29785 - RNA, 17 nt, Artificial Sequence
  Synthetic oligonucleotide: FAS-1978
gcugcugcgggaggcgu

SEQ ID NO: 29786 - RNA, 17 nt, Artificial Sequence
  Synthetic oligonucleotide: FAS-2004
cacguugaggugggcgu

SEQ ID NO: 29787 - RNA, 17 nt, Artificial Sequence
  Synthetic oligonucleotide: FAS-2002
gcgcuccacguugaggu

SEQ ID NO: 29788 - RNA, 17 nt, Artificial Sequence
  Synthetic oligonucleotide: FAS-2019
uggagggggaccccggu

SEQ ID NO: 29789 - RNA, 17 nt, Artificial Sequence
  Synthetic oligonucleotide: FAS-2028
uccgcuccggcgcgggu

SEQ ID NO: 29790 - RNA, 17 nt, Artificial Sequence
  Synthetic oligonucleotide: FAS-1887
cuuaccaccagucuugu

SEQ ID NO: 29791 - RNA, 17 nt, Artificial Sequence
  Synthetic oligonucleotide: FAS-1875
auuacugaaccugaauu

SEQ ID NO: 29792 - RNA, 17 nt, Artificial Sequence
  Synthetic oligonucleotide: FAS-1833
auggguugaaucuaauu

SEQ ID NO: 29793 - RNA, 17 nt, Artificial Sequence
  Synthetic oligonucleotide: FAS-2097
gcgccggagcggaccuu

SEQ ID NO: 29794 - RNA, 17 nt, Artificial Sequence
  Synthetic oligonucleotide: FAS-1878
agguuucaguauuccuu

SEQ ID NO: 29795 - RNA, 17 nt, Artificial Sequence
  Synthetic oligonucleotide: FAS-2088
cggcuuaaccacugcuu

SEQ ID NO: 29796 - RNA, 17 nt, Artificial Sequence
  Synthetic oligonucleotide: FAS-1870
caaagucacuauugcuu

SEQ ID NO: 29797 - RNA, 17 nt, Artificial Sequence
  Synthetic oligonucleotide: FAS-1872
aacgguagauagcucuu

SEQ ID NO: 29798 - RNA, 17 nt, Artificial Sequence
  Synthetic oligonucleotide: FAS-1991
gaggacuugcuuuucuu

SEQ ID NO: 29799 - RNA, 17 nt, Artificial Sequence
  Synthetic oligonucleotide: FAS-1884
gcccucaaaucuagguu

SEQ ID NO: 29800 - RNA, 17 nt, Artificial Sequence
  Synthetic oligonucleotide: FAS-1874
uuuacagaagguauguu

SEQ ID NO: 29801 - RNA, 17 nt, Artificial Sequence
  Synthetic oligonucleotide: FAS-1881
uucuucuggagccuguu

SEQ ID NO: 29802 - RNA, 17 nt, Artificial Sequence
  Synthetic oligonucleotide: FAS-1984
ggcucccgggggcuguu

SEQ ID NO: 29803 - RNA, 17 nt, Artificial Sequence
  Synthetic oligonucleotide: FAS-2011
gaagucugggaagcuuu

SEQ ID NO: 29804 - RNA, 17 nt, Artificial Sequence
  Synthetic oligonucleotide: FAS-1882
ucuucuggagccuguuu

SEQ ID NO: 29805 - RNA, 20 nt, Artificial Sequence
  Synthetic oligonucleotide: FAS-1795
ugaacagugggcuaagcaaa

SEQ ID NO: 29806 - RNA, 20 nt, Artificial Sequence
  Synthetic oligonucleotide: FAS-2051
uaacuuuuucgagaaagaaa

SEQ ID NO: 29807 - RNA, 20 nt, Artificial Sequence
  Synthetic oligonucleotide: FAS-1942
gcccugacaagccaagccaa

SEQ ID NO: 29808 - RNA, 20 nt, Artificial Sequence
  Synthetic oligonucleotide: FAS-1806
agcuugguggacgaugccaa

SEQ ID NO: 29809 - RNA, 20 nt, Artificial Sequence
  Synthetic oligonucleotide: FAS-1794
augaacagugggcuaagcaa

SEQ ID NO: 29810 - RNA, 20 nt, Artificial Sequence
  Synthetic oligonucleotide: FAS-1962
agccggagggcucggaagaa

SEQ ID NO: 29811 - RNA, 20 nt, Artificial Sequence
  Synthetic oligonucleotide: FAS-1801
ggguugaaucuaauugggaa

SEQ ID NO: 29812 - RNA, 20 nt, Artificial Sequence
  Synthetic oligonucleotide: FAS-1850
aagucacuauugcuuuggaa

SEQ ID NO: 29813 - RNA, 20 nt, Artificial Sequence
  Synthetic oligonucleotide: FAS-1856
uuccagacuggacacacuaa

SEQ ID NO: 29814 - RNA, 20 nt, Artificial Sequence
  Synthetic oligonucleotide: FAS-1796
gguuauuaauguguuauuaa

SEQ ID NO: 29815 - RNA, 20 nt, Artificial Sequence
  Synthetic oligonucleotide: FAS-1782
agugacagaugcaaaacaca

SEQ ID NO: 29816 - RNA, 20 nt, Artificial Sequence
  Synthetic oligonucleotide: FAS-2077
ggggucagcacuucgcauca

SEQ ID NO: 29817 - RNA, 20 nt, Artificial Sequence
  Synthetic oligonucleotide: FAS-2065
accuuuggcuuggcuuguca

SEQ ID NO: 29818 - RNA, 20 nt, Artificial Sequence
  Synthetic oligonucleotide: FAS-1852
uuuagcaugaauuuuacaga

SEQ ID NO: 29819 - RNA, 20 nt, Artificial Sequence
  Synthetic oligonucleotide: FAS-1786
gugauggaaagcccucagga

SEQ ID NO: 29820 - RNA, 20 nt, Artificial Sequence
  Synthetic oligonucleotide: FAS-1960
gaagcagugguuaagccgga

SEQ ID NO: 29821 - RNA, 20 nt, Artificial Sequence
  Synthetic oligonucleotide: FAS-2082
gagcacccgggccugaggga

SEQ ID NO: 29822 - RNA, 20 nt, Artificial Sequence
  Synthetic oligonucleotide: FAS-1800
uggguugaaucuaauuggga

SEQ ID NO: 29823 - RNA, 20 nt, Artificial Sequence
  Synthetic oligonucleotide: FAS-1934
gaagcuuuagggucgcugga

SEQ ID NO: 29824 - RNA, 20 nt, Artificial Sequence
  Synthetic oligonucleotide: FAS-1791
ucaacugagaggaagccuga

SEQ ID NO: 29825 - RNA, 20 nt, Artificial Sequence
  Synthetic oligonucleotide: FAS-2081
uucugagcacccgggccuga

SEQ ID NO: 29826 - RNA, 20 nt, Artificial Sequence
  Synthetic oligonucleotide: FAS-1865
agguuagguuacccuccuga

SEQ ID NO: 29827 - RNA, 20 nt, Artificial Sequence
  Synthetic oligonucleotide: FAS-2054
augagcaauaucuguucuga

SEQ ID NO: 29828 - RNA, 20 nt, Artificial Sequence
  Synthetic oligonucleotide: FAS-1783
agaugcaaaacacaggguga

SEQ ID NO: 29829 - RNA, 20 nt, Artificial Sequence
  Synthetic oligonucleotide: FAS-1788
guaaccuaaccuagauuuga

SEQ ID NO: 29830 - RNA, 20 nt, Artificial Sequence
  Synthetic oligonucleotide: FAS-1963
ucuuucucgaaaaaguuaua

SEQ ID NO: 29831 - RNA, 20 nt, Artificial Sequence
  Synthetic oligonucleotide: FAS-1931
cggaagucugggaagcuuua

SEQ ID NO: 29832 - RNA, 20 nt, Artificial Sequence
  Synthetic oligonucleotide: FAS-1789
cuagauuugagggcccaaac

SEQ ID NO: 29833 - RNA, 20 nt, Artificial Sequence
  Synthetic oligonucleotide: FAS-2067
guuccgcuccucucuccaac

SEQ ID NO: 29834 - RNA, 20 nt, Artificial Sequence
  Synthetic oligonucleotide: FAS-1781
cagugacagaugcaaaacac

SEQ ID NO: 29835 - RNA, 20 nt, Artificial Sequence
  Synthetic oligonucleotide: FAS-1779
ccuaucaacaccuacaagac

SEQ ID NO: 29836 - RNA, 20 nt, Artificial Sequence
  Synthetic oligonucleotide: FAS-1855
auuuggaugcaguuccagac

SEQ ID NO: 29837 - RNA, 20 nt, Artificial Sequence
  Synthetic oligonucleotide: FAS-1898
cugcgggaggcguuggagac

SEQ ID NO: 29838 - RNA, 20 nt, Artificial Sequence
  Synthetic oligonucleotide: FAS-1926
ggugggcguggggugcggac

SEQ ID NO: 29839 - RNA, 20 nt, Artificial Sequence
  Synthetic oligonucleotide: FAS-2068
uuccgcuccucucuccaacc

SEQ ID NO: 29840 - RNA, 20 nt, Artificial Sequence
  Synthetic oligonucleotide: FAS-2078
ccuccagcguucugagcacc

SEQ ID NO: 29841 - RNA, 20 nt, Artificial Sequence
  Synthetic oligonucleotide: FAS-2079
cuccagcguucugagcaccc

SEQ ID NO: 29842 - RNA, 20 nt, Artificial Sequence
  Synthetic oligonucleotide: FAS-1937
gggucgcuggagggggaccc

SEQ ID NO: 29843 - RNA, 20 nt, Artificial Sequence
  Synthetic oligonucleotide: FAS-2084
ggaagguccuaacagccccc

SEQ ID NO: 29844 - RNA, 20 nt, Artificial Sequence
  Synthetic oligonucleotide: FAS-2083
gggaagguccuaacagcccc

SEQ ID NO: 29845 - RNA, 20 nt, Artificial Sequence
  Synthetic oligonucleotide: FAS-1906
uaggaccuucccucaggccc

SEQ ID NO: 29846 - RNA, 20 nt, Artificial Sequence
  Synthetic oligonucleotide: FAS-1900
ggcguuggagacuggcuccc

SEQ ID NO: 29847 - RNA, 20 nt, Artificial Sequence
  Synthetic oligonucleotide: FAS-1905
uuaggaccuucccucaggcc

SEQ ID NO: 29848 - RNA, 20 nt, Artificial Sequence
  Synthetic oligonucleotide: FAS-1810
uuuuuuaaagaaaauuggcc

SEQ ID NO: 29849 - RNA, 20 nt, Artificial Sequence
  Synthetic oligonucleotide: FAS-1941
ggagagaggagcggaacucc

SEQ ID NO: 29850 - RNA, 20 nt, Artificial Sequence
  Synthetic oligonucleotide: FAS-1899
aggcguuggagacuggcucc

SEQ ID NO: 29851 - RNA, 20 nt, Artificial Sequence
  Synthetic oligonucleotide: FAS-2066
uggcuugucagggcuugucc

SEQ ID NO: 29852 - RNA, 20 nt, Artificial Sequence
  Synthetic oligonucleotide: FAS-1958
caccgaagcagugguuaagc

SEQ ID NO: 29853 - RNA, 20 nt, Artificial Sequence
  Synthetic oligonucleotide: FAS-2075
agcugccccgccugcccagc

SEQ ID NO: 29854 - RNA, 20 nt, Artificial Sequence
  Synthetic oligonucleotide: FAS-1907
ggcccgggugcucagaacgc

SEQ ID NO: 29855 - RNA, 20 nt, Artificial Sequence
  Synthetic oligonucleotide: FAS-1911
augcgaagugcugaccccgc

SEQ ID NO: 29856 - RNA, 20 nt, Artificial Sequence
  Synthetic oligonucleotide: FAS-2057
ggcucucuccccgcccccgc

SEQ ID NO: 29857 - RNA, 20 nt, Artificial Sequence
  Synthetic oligonucleotide: FAS-1949
gugagugcgcgccgccccgc

SEQ ID NO: 29858 - RNA, 20 nt, Artificial Sequence
  Synthetic oligonucleotide: FAS-2073
caguggucuccgaggagcgc

SEQ ID NO: 29859 - RNA, 20 nt, Artificial Sequence
  Synthetic oligonucleotide: FAS-2060
gcgcacucacccacccgcgc

SEQ ID NO: 29860 - RNA, 20 nt, Artificial Sequence
  Synthetic oligonucleotide: FAS-1945
ccaaagguccgcuccggcgc

SEQ ID NO: 29861 - RNA, 20 nt, Artificial Sequence
  Synthetic oligonucleotide: FAS-1932
cugggaagcuuuagggucgc

SEQ ID NO: 29862 - RNA, 20 nt, Artificial Sequence
  Synthetic oligonucleotide: FAS-1915
gcugaccccgcugggcaggc

SEQ ID NO: 29863 - RNA, 20 nt, Artificial Sequence
  Synthetic oligonucleotide: FAS-1953
gcgcgccgccccgcgggggc

SEQ ID NO: 29864 - RNA, 20 nt, Artificial Sequence
  Synthetic oligonucleotide: FAS-1913
aagugcugaccccgcugggc

SEQ ID NO: 29865 - RNA, 20 nt, Artificial Sequence
  Synthetic oligonucleotide: FAS-2055
auaucuguucugaaggcugc

SEQ ID NO: 29866 - RNA, 20 nt, Artificial Sequence
  Synthetic oligonucleotide: FAS-1784
cagggugauggaaagcccuc

SEQ ID NO: 29867 - RNA, 20 nt, Artificial Sequence
  Synthetic oligonucleotide: FAS-2052
ugccguucuuccgagcccuc

SEQ ID NO: 29868 - RNA, 20 nt, Artificial Sequence
  Synthetic oligonucleotide: FAS-1904
ggcuguuaggaccuucccuc

SEQ ID NO: 29869 - RNA, 20 nt, Artificial Sequence
  Synthetic oligonucleotide: FAS-1917
cugggcaggcggggcagcuc

SEQ ID NO: 29870 - RNA, 20 nt, Artificial Sequence
  Synthetic oligonucleotide: FAS-1943
gccaagccaaagguccgcuc

SEQ ID NO: 29871 - RNA, 20 nt, Artificial Sequence
  Synthetic oligonucleotide: FAS-1848
cuuguaauucuuucgugcuc

SEQ ID NO: 29872 - RNA, 20 nt, Artificial Sequence
  Synthetic oligonucleotide: FAS-1928
caggaauugaagcggaaguc

SEQ ID NO: 29873 - RNA, 20 nt, Artificial Sequence
  Synthetic oligonucleotide: FAS-1807
aaccuuuaguguguccaguc

SEQ ID NO: 29874 - RNA, 20 nt, Artificial Sequence
  Synthetic oligonucleotide: FAS-2064
gaccuuuggcuuggcuuguc

SEQ ID NO: 29875 - RNA, 20 nt, Artificial Sequence
  Synthetic oligonucleotide: FAS-1808
cuggaacugcauccaaauuc

SEQ ID NO: 29876 - RNA, 20 nt, Artificial Sequence
  Synthetic oligonucleotide: FAS-1858
uagcccacuguucauccuuc

SEQ ID NO: 29877 - RNA, 20 nt, Artificial Sequence
  Synthetic oligonucleotide: FAS-1859
ucucaguugacauuuucuuc

SEQ ID NO: 29878 - RNA, 20 nt, Artificial Sequence
  Synthetic oligonucleotide: FAS-1955
aacagauauugcucauuuuc

SEQ ID NO: 29879 - RNA, 20 nt, Artificial Sequence
  Synthetic oligonucleotide: FAS-1927
ggugcggacaggaauugaag

SEQ ID NO: 29880 - RNA, 20 nt, Artificial Sequence
  Synthetic oligonucleotide: FAS-1792
gaagccugaaggaugaacag

SEQ ID NO: 29881 - RNA, 20 nt, Artificial Sequence
  Synthetic oligonucleotide: FAS-2074
gagcugccccgccugcccag

SEQ ID NO: 29882 - RNA, 20 nt, Artificial Sequence
  Synthetic oligonucleotide: FAS-1957
auaagucagcaccgaagcag

SEQ ID NO: 29883 - RNA, 20 nt, Artificial Sequence
  Synthetic oligonucleotide: FAS-2071
caccucaacguggagcgcag

SEQ ID NO: 29884 - RNA, 20 nt, Artificial Sequence
  Synthetic oligonucleotide: FAS-1802
aucuaauugggaagggagag

SEQ ID NO: 29885 - RNA, 20 nt, Artificial Sequence
  Synthetic oligonucleotide: FAS-1939
gggggaccccgguuggagag

SEQ ID NO: 29886 - RNA, 20 nt, Artificial Sequence
  Synthetic oligonucleotide: FAS-1940
accccgguuggagagaggag

SEQ ID NO: 29887 - RNA, 20 nt, Artificial Sequence
  Synthetic oligonucleotide: FAS-2061
cucacccacccgcgccggag

SEQ ID NO: 29888 - RNA, 20 nt, Artificial Sequence
  Synthetic oligonucleotide: FAS-1935
aagcuuuagggucgcuggag

SEQ ID NO: 29889 - RNA, 20 nt, Artificial Sequence
  Synthetic oligonucleotide: FAS-1790
agaagaaaaugucaacugag

SEQ ID NO: 29890 - RNA, 20 nt, Artificial Sequence
  Synthetic oligonucleotide: FAS-2070
accccacgcccaccucaacg

SEQ ID NO: 29891 - RNA, 20 nt, Artificial Sequence
  Synthetic oligonucleotide: FAS-2069
uccgcuccucucuccaaccg

SEQ ID NO: 29892 - RNA, 20 nt, Artificial Sequence
  Synthetic oligonucleotide: FAS-2056
aggcucucuccccgcccccg

SEQ ID NO: 29893 - RNA, 20 nt, Artificial Sequence
  Synthetic oligonucleotide: FAS-1948
ggugagugcgcgccgccccg

SEQ ID NO: 29894 - RNA, 20 nt, Artificial Sequence
  Synthetic oligonucleotide: FAS-1901
gcguuggagacuggcucccg

SEQ ID NO: 29895 - RNA, 20 nt, Artificial Sequence
  Synthetic oligonucleotide: FAS-2072
guggagcgcaguggucuccg

SEQ ID NO: 29896 - RNA, 20 nt, Artificial Sequence
  Synthetic oligonucleotide: FAS-2076
gcugccccgccugcccagcg

SEQ ID NO: 29897 - RNA, 20 nt, Artificial Sequence
  Synthetic oligonucleotide: FAS-2058
gcucucuccccgcccccgcg

SEQ ID NO: 29898 - RNA, 20 nt, Artificial Sequence
  Synthetic oligonucleotide: FAS-1950
ugagugcgcgccgccccgcg

SEQ ID NO: 29899 - RNA, 20 nt, Artificial Sequence
  Synthetic oligonucleotide: FAS-1916
cugaccccgcugggcaggcg

SEQ ID NO: 29900 - RNA, 20 nt, Artificial Sequence
  Synthetic oligonucleotide: FAS-1944
gccaaagguccgcuccggcg

SEQ ID NO: 29901 - RNA, 20 nt, Artificial Sequence
  Synthetic oligonucleotide: FAS-1954
cgcgccgccccgcgggggcg

SEQ ID NO: 29902 - RNA, 20 nt, Artificial Sequence
  Synthetic oligonucleotide: FAS-1922
gcuccacguugaggugggcg

SEQ ID NO: 29903 - RNA, 20 nt, Artificial Sequence
  Synthetic oligonucleotide: FAS-1914
ugcugaccccgcugggcagg

SEQ ID NO: 29904 - RNA, 20 nt, Artificial Sequence
  Synthetic oligonucleotide: FAS-1785
ggugauggaaagcccucagg

SEQ ID NO: 29905 - RNA, 20 nt, Artificial Sequence
  Synthetic oligonucleotide: FAS-1936
agcuuuagggucgcuggagg

SEQ ID NO: 29906 - RNA, 20 nt, Artificial Sequence
  Synthetic oligonucleotide: FAS-1920
cacugcgcuccacguugagg

SEQ ID NO: 29907 - RNA, 20 nt, Artificial Sequence
  Synthetic oligonucleotide: FAS-1902
cguuggagacuggcucccgg

SEQ ID NO: 29908 - RNA, 20 nt, Artificial Sequence
  Synthetic oligonucleotide: FAS-1959
cgaagcagugguuaagccgg

SEQ ID NO: 29909 - RNA, 20 nt, Artificial Sequence
  Synthetic oligonucleotide: FAS-1951
gagugcgcgccgccccgcgg

SEQ ID NO: 29910 - RNA, 20 nt, Artificial Sequence
  Synthetic oligonucleotide: FAS-1946
aagguccgcuccggcgcggg

SEQ ID NO: 29911 - RNA, 20 nt, Artificial Sequence
  Synthetic oligonucleotide: FAS-2059
cucuccccgcccccgcgggg

SEQ ID NO: 29912 - RNA, 20 nt, Artificial Sequence
  Synthetic oligonucleotide: FAS-1952
ugcgcgccgccccgcggggg

SEQ ID NO: 29913 - RNA, 20 nt, Artificial Sequence
  Synthetic oligonucleotide: FAS-1966
uucucgaaaaaguuauaugg

SEQ ID NO: 29914 - RNA, 20 nt, Artificial Sequence
  Synthetic oligonucleotide: FAS-1780
aucaacaccuacaagacugg

SEQ ID NO: 29915 - RNA, 20 nt, Artificial Sequence
  Synthetic oligonucleotide: FAS-1908
ccgggugcucagaacgcugg

SEQ ID NO: 29916 - RNA, 20 nt, Artificial Sequence
  Synthetic oligonucleotide: FAS-1933
ggaagcuuuagggucgcugg

SEQ ID NO: 29917 - RNA, 20 nt, Artificial Sequence
  Synthetic oligonucleotide: FAS-1805
gagugaggugcagagcuugg

SEQ ID NO: 29918 - RNA, 20 nt, Artificial Sequence
  Synthetic oligonucleotide: FAS-1965
uuucucgaaaaaguuauaug

SEQ ID NO: 29919 - RNA, 20 nt, Artificial Sequence
  Synthetic oligonucleotide: FAS-2080
guucugagcacccgggccug

SEQ ID NO: 29920 - RNA, 20 nt, Artificial Sequence
  Synthetic oligonucleotide: FAS-1864
uagguuagguuacccuccug

SEQ ID NO: 29921 - RNA, 20 nt, Artificial Sequence
  Synthetic oligonucleotide: FAS-1803
gggagagagguugcagagug

SEQ ID NO: 29922 - RNA, 20 nt, Artificial Sequence
  Synthetic oligonucleotide: FAS-1924
uccacguugaggugggcgug

SEQ ID NO: 29923 - RNA, 20 nt, Artificial Sequence
  Synthetic oligonucleotide: FAS-1925
guugaggugggcguggggug

SEQ ID NO: 29924 - RNA, 20 nt, Artificial Sequence
  Synthetic oligonucleotide: FAS-1919
gaccacugcgcuccacguug

SEQ ID NO: 29925 - RNA, 20 nt, Artificial Sequence
  Synthetic oligonucleotide: FAS-1787
gguaaccuaaccuagauuug

SEQ ID NO: 29926 - RNA, 20 nt, Artificial Sequence
  Synthetic oligonucleotide: FAS-1809
gauuuuuuuuuaaagaaaau

SEQ ID NO: 29927 - RNA, 20 nt, Artificial Sequence
  Synthetic oligonucleotide: FAS-1798
auuaauggguugaaucuaau

SEQ ID NO: 29928 - RNA, 20 nt, Artificial Sequence
  Synthetic oligonucleotide: FAS-1797
guuauuaauguguuauuaau

SEQ ID NO: 29929 - RNA, 20 nt, Artificial Sequence
  Synthetic oligonucleotide: FAS-1867
ccagucuuguagguguugau

SEQ ID NO: 29930 - RNA, 20 nt, Artificial Sequence
  Synthetic oligonucleotide: FAS-1964
cuuucucgaaaaaguuauau

SEQ ID NO: 29931 - RNA, 20 nt, Artificial Sequence
  Synthetic oligonucleotide: FAS-1918
ggggcagcuccggcgcuccu

SEQ ID NO: 29932 - RNA, 20 nt, Artificial Sequence
  Synthetic oligonucleotide: FAS-1804
gcagagugaggugcagagcu

SEQ ID NO: 29933 - RNA, 20 nt, Artificial Sequence
  Synthetic oligonucleotide: FAS-1912
ugcgaagugcugaccccgcu

SEQ ID NO: 29934 - RNA, 20 nt, Artificial Sequence
  Synthetic oligonucleotide: FAS-1961
agugguuaagccggagggcu

SEQ ID NO: 29935 - RNA, 20 nt, Artificial Sequence
  Synthetic oligonucleotide: FAS-2063
gccggagcggaccuuuggcu

SEQ ID NO: 29936 - RNA, 20 nt, Artificial Sequence
  Synthetic oligonucleotide: FAS-1862
cuguuugggcccucaaaucu

SEQ ID NO: 29937 - RNA, 20 nt, Artificial Sequence
  Synthetic oligonucleotide: FAS-1929
aggaauugaagcggaagucu

SEQ ID NO: 29938 - RNA, 20 nt, Artificial Sequence
  Synthetic oligonucleotide: FAS-1909
gcuggaggacuugcuuuucu

SEQ ID NO: 29939 - RNA, 20 nt, Artificial Sequence
  Synthetic oligonucleotide: FAS-1793
aagccugaaggaugaacagu

SEQ ID NO: 29940 - RNA, 20 nt, Artificial Sequence
  Synthetic oligonucleotide: FAS-1956
uucuggcaguucucagacgu

SEQ ID NO: 29941 - RNA, 20 nt, Artificial Sequence
  Synthetic oligonucleotide: FAS-1897
cgggcugcugcgggaggcgu

SEQ ID NO: 29942 - RNA, 20 nt, Artificial Sequence
  Synthetic oligonucleotide: FAS-1923
cuccacguugaggugggcgu

SEQ ID NO: 29943 - RNA, 20 nt, Artificial Sequence
  Synthetic oligonucleotide: FAS-1921
acugcgcuccacguugaggu

SEQ ID NO: 29944 - RNA, 20 nt, Artificial Sequence
  Synthetic oligonucleotide: FAS-1938
cgcuggagggggaccccggu

SEQ ID NO: 29945 - RNA, 20 nt, Artificial Sequence
  Synthetic oligonucleotide: FAS-1947
agguccgcuccggcgcgggu

SEQ ID NO: 29946 - RNA, 20 nt, Artificial Sequence
  Synthetic oligonucleotide: FAS-1866
gcacuuaccaccagucuugu

SEQ ID NO: 29947 - RNA, 20 nt, Artificial Sequence
  Synthetic oligonucleotide: FAS-1854
aucauuacugaaccugaauu

SEQ ID NO: 29948 - RNA, 20 nt, Artificial Sequence
  Synthetic oligonucleotide: FAS-1799
uuaauggguugaaucuaauu

SEQ ID NO: 29949 - RNA, 20 nt, Artificial Sequence
  Synthetic oligonucleotide: FAS-2062
cccgcgccggagcggaccuu

SEQ ID NO: 29950 - RNA, 20 nt, Artificial Sequence
  Synthetic oligonucleotide: FAS-1857
uaaagguuucaguauuccuu

SEQ ID NO: 29951 - RNA, 20 nt, Artificial Sequence
  Synthetic oligonucleotide: FAS-2053
cuccggcuuaaccacugcuu

SEQ ID NO: 29952 - RNA, 20 nt, Artificial Sequence
  Synthetic oligonucleotide: FAS-1849
guucaaagucacuauugcuu

SEQ ID NO: 29953 - RNA, 20 nt, Artificial Sequence
  Synthetic oligonucleotide: FAS-1851
uggaacgguagauagcucuu

SEQ ID NO: 29954 - RNA, 20 nt, Artificial Sequence
  Synthetic oligonucleotide: FAS-1910
cuggaggacuugcuuuucuu

SEQ ID NO: 29955 - RNA, 20 nt, Artificial Sequence
  Synthetic oligonucleotide: FAS-1863
ugggcccucaaaucuagguu

SEQ ID NO: 29956 - RNA, 20 nt, Artificial Sequence
  Synthetic oligonucleotide: FAS-1853
aauuuuacagaagguauguu

SEQ ID NO: 29957 - RNA, 20 nt, Artificial Sequence
  Synthetic oligonucleotide: FAS-1860
auuuucuucuggagccuguu

SEQ ID NO: 29958 - RNA, 20 nt, Artificial Sequence
  Synthetic oligonucleotide: FAS-1903
acuggcucccgggggcuguu

SEQ ID NO: 29959 - RNA, 20 nt, Artificial Sequence
  Synthetic oligonucleotide: FAS-1930
gcggaagucugggaagcuuu

SEQ ID NO: 29960 - RNA, 20 nt, Artificial Sequence
  Synthetic oligonucleotide: FAS-1861
uuuucuucuggagccuguuu

SEQ ID NO: 29961 - RNA, 18 nt, Artificial Sequence
  Synthetic oligonucleotide: FAS-3214
cuauccccgggacuaaga

SEQ ID NO: 29962 - RNA, 19 nt, Artificial Sequence
  Synthetic oligonucleotide: FAS-3215
ccuauccccgggacuaaga

SEQ ID NO: 29963 - RNA, 20 nt, Artificial Sequence
  Synthetic oligonucleotide: FAS-689
gccuauccccgggacuaaga

SEQ ID NO: 29964 - RNA, 21 nt, Artificial Sequence
  Synthetic oligonucleotide: FAS-3216
ugccuauccccgggacuaaga

SEQ ID NO: 29965 - RNA, 22 nt, Artificial Sequence
  Synthetic oligonucleotide: FAS-3217
uugccuauccccgggacuaaga

SEQ ID NO: 29966 - RNA, 23 nt, Artificial Sequence
  Synthetic oligonucleotide: FAS-3218
uuugccuauccccgggacuaaga

SEQ ID NO: 29967 - RNA, 24 nt, Artificial Sequence
  Synthetic oligonucleotide: FAS-3219
cuuugccuauccccgggacuaaga

SEQ ID NO: 29968 - RNA, 18 nt, Artificial Sequence
  Synthetic oligonucleotide: FAS-3220
uccccaacuccguacuga

SEQ ID NO: 29969 - RNA, 19 nt, Artificial Sequence
  Synthetic oligonucleotide: FAS-3221
uuccccaacuccguacuga

SEQ ID NO: 29970 - RNA, 20 nt, Artificial Sequence
  Synthetic oligonucleotide: FAS-1175
cuuccccaacuccguacuga

SEQ ID NO: 29971 - RNA, 21 nt, Artificial Sequence
  Synthetic oligonucleotide: FAS-3222
gcuuccccaacuccguacuga

SEQ ID NO: 29972 - RNA, 22 nt, Artificial Sequence
  Synthetic oligonucleotide: FAS-3223
agcuuccccaacuccguacuga

SEQ ID NO: 29973 - RNA, 23 nt, Artificial Sequence
  Synthetic oligonucleotide: FAS-3224
gagcuuccccaacuccguacuga

SEQ ID NO: 29974 - RNA, 24 nt, Artificial Sequence
  Synthetic oligonucleotide: FAS-3225
agagcuuccccaacuccguacuga

SEQ ID NO: 29975 - RNA, 18 nt, Artificial Sequence
  Synthetic oligonucleotide: FAS-3226
agccucgcuggggaacgc

SEQ ID NO: 29976 - RNA, 19 nt, Artificial Sequence
  Synthetic oligonucleotide: FAS-3227
aagccucgcuggggaacgc

SEQ ID NO: 29977 - RNA, 20 nt, Artificial Sequence
  Synthetic oligonucleotide: FAS-1203
gaagccucgcuggggaacgc

SEQ ID NO: 29978 - RNA, 21 nt, Artificial Sequence
  Synthetic oligonucleotide: FAS-3228
auucagcaacuuggccugcgc

SEQ ID NO: 29979 - RNA, 22 nt, Artificial Sequence
  Synthetic oligonucleotide: FAS-3229
gauucagcaacuuggccugcgc

SEQ ID NO: 29980 - RNA, 23 nt, Artificial Sequence
  Synthetic oligonucleotide: FAS-3230
ugauucagcaacuuggccugcgc

SEQ ID NO: 29981 - RNA, 24 nt, Artificial Sequence
  Synthetic oligonucleotide: FAS-3231
uugauucagcaacuuggccugcgc

SEQ ID NO: 29982 - RNA, 21 nt, Artificial Sequence
  Synthetic oligonucleotide: FAS-3232
cucagagcgcagagguccugc

SEQ ID NO: 29983 - RNA, 22 nt, Artificial Sequence
  Synthetic oligonucleotide: FAS-3233
gcucagagcgcagagguccugc

SEQ ID NO: 29984 - RNA, 23 nt, Artificial Sequence
  Synthetic oligonucleotide: FAS-3234
agcucagagcgcagagguccugc

SEQ ID NO: 29985 - RNA, 24 nt, Artificial Sequence
  Synthetic oligonucleotide: FAS-3235
gagcucagagcgcagagguccugc

SEQ ID NO: 29986 - RNA, 18 nt, Artificial Sequence
  Synthetic oligonucleotide: FAS-3236
ggagccuuggcuaauugc

SEQ ID NO: 29987 - RNA, 19 nt, Artificial Sequence
  Synthetic oligonucleotide: FAS-3237
aggagccuuggcuaauugc

SEQ ID NO: 29988 - RNA, 20 nt, Artificial Sequence
  Synthetic oligonucleotide: FAS-771
caggagccuuggcuaauugc

SEQ ID NO: 29989 - RNA, 21 nt, Artificial Sequence
  Synthetic oligonucleotide: FAS-3238
acaggagccuuggcuaauugc

SEQ ID NO: 29990 - RNA, 22 nt, Artificial Sequence
  Synthetic oligonucleotide: FAS-3239
uacaggagccuuggcuaauugc

SEQ ID NO: 29991 - RNA, 23 nt, Artificial Sequence
  Synthetic oligonucleotide: FAS-3240
guacaggagccuuggcuaauugc

SEQ ID NO: 29992 - RNA, 24 nt, Artificial Sequence
  Synthetic oligonucleotide: FAS-3241
gguacaggagccuuggcuaauugc

SEQ ID NO: 29993 - RNA, 21 nt, Artificial Sequence
  Synthetic oligonucleotide: FAS-3242
ugagaggcucacagacguuuc

SEQ ID NO: 29994 - RNA, 22 nt, Artificial Sequence
  Synthetic oligonucleotide: FAS-3243
augagaggcucacagacguuuc

SEQ ID NO: 29995 - RNA, 23 nt, Artificial Sequence
  Synthetic oligonucleotide: FAS-3244
caugagaggcucacagacguuuc

SEQ ID NO: 29996 - RNA, 24 nt, Artificial Sequence
  Synthetic oligonucleotide: FAS-3245
acaugagaggcucacagacguuuc

SEQ ID NO: 29997 - RNA, 18 nt, Artificial Sequence
  Synthetic oligonucleotide: FAS-3246
aaaagccccgguggucag

SEQ ID NO: 29998 - RNA, 19 nt, Artificial Sequence
  Synthetic oligonucleotide: FAS-3247
gaaaagccccgguggucag

SEQ ID NO: 29999 - RNA, 20 nt, Artificial Sequence
  Synthetic oligonucleotide: FAS-1193
cgaaaagccccgguggucag

SEQ ID NO: 30000 - RNA, 21 nt, Artificial Sequence
  Synthetic oligonucleotide: FAS-3248
acgaaaagccccgguggucag

SEQ ID NO: 30001 - RNA, 22 nt, Artificial Sequence
  Synthetic oligonucleotide: FAS-3249
cacgaaaagccccgguggucag

SEQ ID NO: 30002 - RNA, 23 nt, Artificial Sequence
  Synthetic oligonucleotide: FAS-3250
ucacgaaaagccccgguggucag

SEQ ID NO: 30003 - RNA, 24 nt, Artificial Sequence
  Synthetic oligonucleotide: FAS-3251
cucacgaaaagccccgguggucag

SEQ ID NO: 30004 - RNA, 21 nt, Artificial Sequence
  Synthetic oligonucleotide: FAS-2129
gagagggcucaccagagguag

SEQ ID NO: 30005 - RNA, 22 nt, Artificial Sequence
  Synthetic oligonucleotide: FAS-2130
ggagagggcucaccagagguag

SEQ ID NO: 30006 - RNA, 23 nt, Artificial Sequence
  Synthetic oligonucleotide: FAS-2131
aggagagggcucaccagagguag

SEQ ID NO: 30007 - RNA, 24 nt, Artificial Sequence
  Synthetic oligonucleotide: FAS-2132
caggagagggcucaccagagguag

SEQ ID NO: 30008 - RNA, 21 nt, Artificial Sequence
  Synthetic oligonucleotide: FAS-3252
cggguagggagggggagaagu

SEQ ID NO: 30009 - RNA, 22 nt, Artificial Sequence
  Synthetic oligonucleotide: FAS-3253
gcggguagggagggggagaagu

SEQ ID NO: 30010 - RNA, 23 nt, Artificial Sequence
  Synthetic oligonucleotide: FAS-3254
cgcggguagggagggggagaagu

SEQ ID NO: 30011 - RNA, 24 nt, Artificial Sequence
  Synthetic oligonucleotide: FAS-3255
gcgcggguagggagggggagaagu

SEQ ID NO: 30012 - RNA, 18 nt, Artificial Sequence
  Synthetic oligonucleotide: FAS-3256
ugguggacccgcucagua

SEQ ID NO: 30013 - RNA, 19 nt, Artificial Sequence
  Synthetic oligonucleotide: FAS-3257
uugguggacccgcucagua

SEQ ID NO: 30014 - RNA, 20 nt, Artificial Sequence
  Synthetic oligonucleotide: FAS-653
guugguggacccgcucagua

SEQ ID NO: 30015 - RNA, 21 nt, Artificial Sequence
  Synthetic oligonucleotide: FAS-3258
gguugguggacccgcucagua

SEQ ID NO: 30016 - RNA, 22 nt, Artificial Sequence
  Synthetic oligonucleotide: FAS-3259
ggguugguggacccgcucagua

SEQ ID NO: 30017 - RNA, 23 nt, Artificial Sequence
  Synthetic oligonucleotide: FAS-3260
cggguugguggacccgcucagua

SEQ ID NO: 30018 - RNA, 24 nt, Artificial Sequence
  Synthetic oligonucleotide: FAS-3261
gcggguugguggacccgcucagua

SEQ ID NO: 30019 - RNA, 18 nt, Artificial Sequence
  Synthetic oligonucleotide: FAS-3262
gcaggaacgccccgggac

SEQ ID NO: 30020 - RNA, 19 nt, Artificial Sequence
  Synthetic oligonucleotide: FAS-3263
ugcaggaacgccccgggac

SEQ ID NO: 30021 - RNA, 20 nt, Artificial Sequence
  Synthetic oligonucleotide: FAS-620
cugcaggaacgccccgggac

SEQ ID NO: 30022 - RNA, 21 nt, Artificial Sequence
  Synthetic oligonucleotide: FAS-3264
acugcaggaacgccccgggac

SEQ ID NO: 30023 - RNA, 22 nt, Artificial Sequence
  Synthetic oligonucleotide: FAS-3265
cacugcaggaacgccccgggac

SEQ ID NO: 30024 - RNA, 23 nt, Artificial Sequence
  Synthetic oligonucleotide: FAS-3266
ccacugcaggaacgccccgggac

SEQ ID NO: 30025 - RNA, 24 nt, Artificial Sequence
  Synthetic oligonucleotide: FAS-3267
gccacugcaggaacgccccgggac

SEQ ID NO: 30026 - RNA, 18 nt, Artificial Sequence
  Synthetic oligonucleotide: FAS-3268
ggagcugccucuucuccc

SEQ ID NO: 30027 - RNA, 19 nt, Artificial Sequence
  Synthetic oligonucleotide: FAS-3269
cggagcugccucuucuccc

SEQ ID NO: 30028 - RNA, 20 nt, Artificial Sequence
  Synthetic oligonucleotide: FAS-1037
gcggagcugccucuucuccc

SEQ ID NO: 30029 - RNA, 21 nt, Artificial Sequence
  Synthetic oligonucleotide: FAS-3270
ggcggagcugccucuucuccc

SEQ ID NO: 30030 - RNA, 22 nt, Artificial Sequence
  Synthetic oligonucleotide: FAS-3271
aggcggagcugccucuucuccc

SEQ ID NO: 30031 - RNA, 23 nt, Artificial Sequence
  Synthetic oligonucleotide: FAS-3272
caggcggagcugccucuucuccc

SEQ ID NO: 30032 - RNA, 24 nt, Artificial Sequence
  Synthetic oligonucleotide: FAS-3273
ccaggcggagcugccucuucuccc

SEQ ID NO: 30033 - RNA, 18 nt, Artificial Sequence
  Synthetic oligonucleotide: FAS-3274
uuaccccgucuuaguccc

SEQ ID NO: 30034 - RNA, 19 nt, Artificial Sequence
  Synthetic oligonucleotide: FAS-3275
cuuaccccgucuuaguccc

SEQ ID NO: 30035 - RNA, 20 nt, Artificial Sequence
  Synthetic oligonucleotide: FAS-668
gcuuaccccgucuuaguccc

SEQ ID NO: 30036 - RNA, 21 nt, Artificial Sequence
  Synthetic oligonucleotide: FAS-3276
ggcuuaccccgucuuaguccc

SEQ ID NO: 30037 - RNA, 22 nt, Artificial Sequence
  Synthetic oligonucleotide: FAS-3277
aggcuuaccccgucuuaguccc

SEQ ID NO: 30038 - RNA, 23 nt, Artificial Sequence
  Synthetic oligonucleotide: FAS-3278
gaggcuuaccccgucuuaguccc

SEQ ID NO: 30039 - RNA, 24 nt, Artificial Sequence
  Synthetic oligonucleotide: FAS-3279
ggaggcuuaccccgucuuaguccc

SEQ ID NO: 30040 - RNA, 18 nt, Artificial Sequence
  Synthetic oligonucleotide: FAS-3280
ucgucucugaucucgcgc

SEQ ID NO: 30041 - RNA, 19 nt, Artificial Sequence
  Synthetic oligonucleotide: FAS-3281
cucgucucugaucucgcgc

SEQ ID NO: 30042 - RNA, 20 nt, Artificial Sequence
  Synthetic oligonucleotide: FAS-1017
gcucgucucugaucucgcgc

SEQ ID NO: 30043 - RNA, 21 nt, Artificial Sequence
  Synthetic oligonucleotide: FAS-3282
agcucgucucugaucucgcgc

SEQ ID NO: 30044 - RNA, 22 nt, Artificial Sequence
  Synthetic oligonucleotide: FAS-3283
gagcucgucucugaucucgcgc

SEQ ID NO: 30045 - RNA, 23 nt, Artificial Sequence
  Synthetic oligonucleotide: FAS-3284
ugagcucgucucugaucucgcgc

SEQ ID NO: 30046 - RNA, 24 nt, Artificial Sequence
  Synthetic oligonucleotide: FAS-3285
gugagcucgucucugaucucgcgc

SEQ ID NO: 30047 - RNA, 21 nt, Artificial Sequence
  Synthetic oligonucleotide: FAS-2169
cucuggugagcccucuccugc

SEQ ID NO: 30048 - RNA, 22 nt, Artificial Sequence
  Synthetic oligonucleotide: FAS-2170
ccucuggugagcccucuccugc

SEQ ID NO: 30049 - RNA, 23 nt, Artificial Sequence
  Synthetic oligonucleotide: FAS-2171
accucuggugagcccucuccugc

SEQ ID NO: 30050 - RNA, 24 nt, Artificial Sequence
  Synthetic oligonucleotide: FAS-2172
uaccucuggugagcccucuccugc

SEQ ID NO: 30051 - RNA, 21 nt, Artificial Sequence
  Synthetic oligonucleotide: FAS-3286
agguguucaaagacgcuucug

SEQ ID NO: 30052 - RNA, 22 nt, Artificial Sequence
  Synthetic oligonucleotide: FAS-3287
cagguguucaaagacgcuucug

SEQ ID NO: 30053 - RNA, 23 nt, Artificial Sequence
  Synthetic oligonucleotide: FAS-3288
acagguguucaaagacgcuucug

SEQ ID NO: 30054 - RNA, 24 nt, Artificial Sequence
  Synthetic oligonucleotide: FAS-3289
cacagguguucaaagacgcuucug

SEQ ID NO: 30055 - RNA, 21 nt, Artificial Sequence
  Synthetic oligonucleotide: FAS-3290
ggggcgggcgcgggacgcgug

SEQ ID NO: 30056 - RNA, 22 nt, Artificial Sequence
  Synthetic oligonucleotide: FAS-3291
uggggcgggcgcgggacgcgug

SEQ ID NO: 30057 - RNA, 23 nt, Artificial Sequence
  Synthetic oligonucleotide: FAS-3292
guggggcgggcgcgggacgcgug

SEQ ID NO: 30058 - RNA, 24 nt, Artificial Sequence
  Synthetic oligonucleotide: FAS-3293
aguggggcgggcgcgggacgcgug

SEQ ID NO: 30059 - RNA, 18 nt, Artificial Sequence
  Synthetic oligonucleotide: FAS-3294
cgcgcgcaggccaaguug

SEQ ID NO: 30060 - RNA, 19 nt, Artificial Sequence
  Synthetic oligonucleotide: FAS-3295
ccgcgcgcaggccaaguug

SEQ ID NO: 30061 - RNA, 20 nt, Artificial Sequence
  Synthetic oligonucleotide: FAS-1009
cccgcgcgcaggccaaguug

SEQ ID NO: 30062 - RNA, 21 nt, Artificial Sequence
  Synthetic oligonucleotide: FAS-3296
acccgcgcgcaggccaaguug

SEQ ID NO: 30063 - RNA, 22 nt, Artificial Sequence
  Synthetic oligonucleotide: FAS-3297
uacccgcgcgcaggccaaguug

SEQ ID NO: 30064 - RNA, 23 nt, Artificial Sequence
  Synthetic oligonucleotide: FAS-3298
cuacccgcgcgcaggccaaguug

SEQ ID NO: 30065 - RNA, 24 nt, Artificial Sequence
  Synthetic oligonucleotide: FAS-3299
ccuacccgcgcgcaggccaaguug

SEQ ID NO: 30066 - RNA, 18 nt, Artificial Sequence
  Synthetic oligonucleotide: FAS-3300
ugccccgcaagucuuucu

SEQ ID NO: 30067 - RNA, 19 nt, Artificial Sequence
  Synthetic oligonucleotide: FAS-3301
augccccgcaagucuuucu

SEQ ID NO: 30068 - RNA, 20 nt, Artificial Sequence
  Synthetic oligonucleotide: FAS-990
aaugccccgcaagucuuucu

SEQ ID NO: 30069 - RNA, 21 nt, Artificial Sequence
  Synthetic oligonucleotide: FAS-3302
aaaugccccgcaagucuuucu

SEQ ID NO: 30070 - RNA, 22 nt, Artificial Sequence
  Synthetic oligonucleotide: FAS-3303
caaaugccccgcaagucuuucu

SEQ ID NO: 30071 - RNA, 23 nt, Artificial Sequence
  Synthetic oligonucleotide: FAS-3304
ucaaaugccccgcaagucuuucu

SEQ ID NO: 30072 - RNA, 24 nt, Artificial Sequence
  Synthetic oligonucleotide: FAS-3305
gucaaaugccccgcaagucuuucu

SEQ ID NO: 30073 - RNA, 21 nt, Artificial Sequence
  Synthetic oligonucleotide: FAS-3306
aacgaaggacaggaaguaauu

SEQ ID NO: 30074 - RNA, 22 nt, Artificial Sequence
  Synthetic oligonucleotide: FAS-3307
uaacgaaggacaggaaguaauu

SEQ ID NO: 30075 - RNA, 23 nt, Artificial Sequence
  Synthetic oligonucleotide: FAS-3308
guaacgaaggacaggaaguaauu

SEQ ID NO: 30076 - RNA, 24 nt, Artificial Sequence
  Synthetic oligonucleotide: FAS-3309
aguaacgaaggacaggaaguaauu

SEQ ID NO: 30077 - RNA, 18 nt, Artificial Sequence
  Synthetic oligonucleotide: FAS-3310
gagugagggaagcgguuu

SEQ ID NO: 30078 - RNA, 19 nt, Artificial Sequence
  Synthetic oligonucleotide: FAS-3311
ggagugagggaagcgguuu

SEQ ID NO: 30079 - RNA, 20 nt, Artificial Sequence
  Synthetic oligonucleotide: FAS-1026
gggagugagggaagcgguuu

SEQ ID NO: 30080 - RNA, 21 nt, Artificial Sequence
  Synthetic oligonucleotide: FAS-3312
ggggagugagggaagcgguuu

SEQ ID NO: 30081 - RNA, 22 nt, Artificial Sequence
  Synthetic oligonucleotide: FAS-3313
uggggagugagggaagcgguuu

SEQ ID NO: 30082 - RNA, 23 nt, Artificial Sequence
  Synthetic oligonucleotide: FAS-3314
cuggggagugagggaagcgguuu

SEQ ID NO: 30083 - RNA, 24 nt, Artificial Sequence
  Synthetic oligonucleotide: FAS-3315
ucuggggagugagggaagcgguuu

SEQ ID NO: 30084 - RNA, 18 nt, Artificial Sequence
  Synthetic oligonucleotide: FAS-3316
gagaagucagggugagga

SEQ ID NO: 30085 - RNA, 19 nt, Artificial Sequence
  Synthetic oligonucleotide: FAS-3317
ggagaagucagggugagga

SEQ ID NO: 30086 - RNA, 20 nt, Artificial Sequence
  Synthetic oligonucleotide: FAS-744
gggagaagucagggugagga

SEQ ID NO: 30087 - RNA, 21 nt, Artificial Sequence
  Synthetic oligonucleotide: FAS-3318
ggggagaagucagggugagga

SEQ ID NO: 30088 - RNA, 22 nt, Artificial Sequence
  Synthetic oligonucleotide: FAS-3319
gggggagaagucagggugagga

SEQ ID NO: 30089 - RNA, 23 nt, Artificial Sequence
  Synthetic oligonucleotide: FAS-3320
agggggagaagucagggugagga

SEQ ID NO: 30090 - RNA, 24 nt, Artificial Sequence
  Synthetic oligonucleotide: FAS-3321
gagggggagaagucagggugagga

SEQ ID NO: 30091 - RNA, 21 nt, Artificial Sequence
  Synthetic oligonucleotide: FAS-3322
ggaagccucgcuggggaacgc

SEQ ID NO: 30092 - RNA, 22 nt, Artificial Sequence
  Synthetic oligonucleotide: FAS-3323
aggaagccucgcuggggaacgc

SEQ ID NO: 30093 - RNA, 23 nt, Artificial Sequence
  Synthetic oligonucleotide: FAS-3324
aaggaagccucgcuggggaacgc

SEQ ID NO: 30094 - RNA, 24 nt, Artificial Sequence
  Synthetic oligonucleotide: FAS-3325
gaaggaagccucgcuggggaacgc

SEQ ID NO: 30095 - RNA, 18 nt, Artificial Sequence
  Synthetic oligonucleotide: FAS-3326
cagcaacuuggccugcgc

SEQ ID NO: 30096 - RNA, 19 nt, Artificial Sequence
  Synthetic oligonucleotide: FAS-3327
ucagcaacuuggccugcgc

SEQ ID NO: 30097 - RNA, 20 nt, Artificial Sequence
  Synthetic oligonucleotide: FAS-1209
uucagcaacuuggccugcgc

SEQ ID NO: 30098 - RNA, 18 nt, Artificial Sequence
  Synthetic oligonucleotide: FAS-3328
agagcgcagagguccugc

SEQ ID NO: 30099 - RNA, 19 nt, Artificial Sequence
  Synthetic oligonucleotide: FAS-3329
cagagcgcagagguccugc

SEQ ID NO: 30100 - RNA, 20 nt, Artificial Sequence
  Synthetic oligonucleotide: FAS-1248
ucagagcgcagagguccugc

SEQ ID NO: 30101 - RNA, 18 nt, Artificial Sequence
  Synthetic oligonucleotide: FAS-3330
gaggcucacagacguuuc

SEQ ID NO: 30102 - RNA, 19 nt, Artificial Sequence
  Synthetic oligonucleotide: FAS-3331
agaggcucacagacguuuc

SEQ ID NO: 30103 - RNA, 20 nt, Artificial Sequence
  Synthetic oligonucleotide: FAS-779
gagaggcucacagacguuuc

SEQ ID NO: 30104 - RNA, 18 nt, Artificial Sequence
  Synthetic oligonucleotide: FAS-3332
guuggggaggucuugaag

SEQ ID NO: 30105 - RNA, 19 nt, Artificial Sequence
  Synthetic oligonucleotide: FAS-3333
aguuggggaggucuugaag

SEQ ID NO: 30106 - RNA, 20 nt, Artificial Sequence
  Synthetic oligonucleotide: FAS-1243
aaguuggggaggucuugaag

SEQ ID NO: 30107 - RNA, 21 nt, Artificial Sequence
  Synthetic oligonucleotide: FAS-3334
gaaguuggggaggucuugaag

SEQ ID NO: 30108 - RNA, 22 nt, Artificial Sequence
  Synthetic oligonucleotide: FAS-3335
ggaaguuggggaggucuugaag

SEQ ID NO: 30109 - RNA, 23 nt, Artificial Sequence
  Synthetic oligonucleotide: FAS-3336
gggaaguuggggaggucuugaag

SEQ ID NO: 30110 - RNA, 24 nt, Artificial Sequence
  Synthetic oligonucleotide: FAS-3337
ugggaaguuggggaggucuugaag

SEQ ID NO: 30111 - RNA, 18 nt, Artificial Sequence
  Synthetic oligonucleotide: FAS-2195
agggcucaccagagguag

SEQ ID NO: 30112 - RNA, 19 nt, Artificial Sequence
  Synthetic oligonucleotide: FAS-2196
gagggcucaccagagguag

SEQ ID NO: 30113 - RNA, 20 nt, Artificial Sequence
  Synthetic oligonucleotide: FAS-106
agagggcucaccagagguag

SEQ ID NO: 30114 - RNA, 18 nt, Artificial Sequence
  Synthetic oligonucleotide: FAS-3338
ggcagccagggcuggccu

SEQ ID NO: 30115 - RNA, 19 nt, Artificial Sequence
  Synthetic oligonucleotide: FAS-3339
gggcagccagggcuggccu

SEQ ID NO: 30116 - RNA, 20 nt, Artificial Sequence
  Synthetic oligonucleotide: FAS-1183
ugggcagccagggcuggccu

SEQ ID NO: 30117 - RNA, 21 nt, Artificial Sequence
  Synthetic oligonucleotide: FAS-3340
cugggcagccagggcuggccu

SEQ ID NO: 30118 - RNA, 22 nt, Artificial Sequence
  Synthetic oligonucleotide: FAS-3341
ccugggcagccagggcuggccu

SEQ ID NO: 30119 - RNA, 23 nt, Artificial Sequence
  Synthetic oligonucleotide: FAS-3342
gccugggcagccagggcuggccu

SEQ ID NO: 30120 - RNA, 24 nt, Artificial Sequence
  Synthetic oligonucleotide: FAS-3343
cgccugggcagccagggcuggccu

SEQ ID NO: 30121 - RNA, 18 nt, Artificial Sequence
  Synthetic oligonucleotide: FAS-3344
guagggagggggagaagu

SEQ ID NO: 30122 - RNA, 19 nt, Artificial Sequence
  Synthetic oligonucleotide: FAS-3345
gguagggagggggagaagu

SEQ ID NO: 30123 - RNA, 20 nt, Artificial Sequence
  Synthetic oligonucleotide: FAS-1219
ggguagggagggggagaagu

SEQ ID NO: 30124 - RNA, 18 nt, Artificial Sequence
  Synthetic oligonucleotide: FAS-3346
ucagggugaggaaggagu

SEQ ID NO: 30125 - RNA, 19 nt, Artificial Sequence
  Synthetic oligonucleotide: FAS-3347
gucagggugaggaaggagu

SEQ ID NO: 30126 - RNA, 20 nt, Artificial Sequence
  Synthetic oligonucleotide: FAS-1225
agucagggugaggaaggagu

SEQ ID NO: 30127 - RNA, 21 nt, Artificial Sequence
  Synthetic oligonucleotide: FAS-3348
aagucagggugaggaaggagu

SEQ ID NO: 30128 - RNA, 22 nt, Artificial Sequence
  Synthetic oligonucleotide: FAS-3349
gaagucagggugaggaaggagu

SEQ ID NO: 30129 - RNA, 23 nt, Artificial Sequence
  Synthetic oligonucleotide: FAS-3350
agaagucagggugaggaaggagu

SEQ ID NO: 30130 - RNA, 24 nt, Artificial Sequence
  Synthetic oligonucleotide: FAS-3351
gagaagucagggugaggaaggagu

SEQ ID NO: 30131 - RNA, 18 nt, Artificial Sequence
  Synthetic oligonucleotide: FAS-2227
uggugagcccucuccugc

SEQ ID NO: 30132 - RNA, 19 nt, Artificial Sequence
  Synthetic oligonucleotide: FAS-2228
cuggugagcccucuccugc

SEQ ID NO: 30133 - RNA, 20 nt, Artificial Sequence
  Synthetic oligonucleotide: FAS-1051
ucuggugagcccucuccugc

SEQ ID NO: 30134 - RNA, 18 nt, Artificial Sequence
  Synthetic oligonucleotide: FAS-3352
ggaagcucuuucacuucg

SEQ ID NO: 30135 - RNA, 19 nt, Artificial Sequence
  Synthetic oligonucleotide: FAS-3353
gggaagcucuuucacuucg

SEQ ID NO: 30136 - RNA, 20 nt, Artificial Sequence
  Synthetic oligonucleotide: FAS-1047
ggggaagcucuuucacuucg

SEQ ID NO: 30137 - RNA, 21 nt, Artificial Sequence
  Synthetic oligonucleotide: FAS-3354
uggggaagcucuuucacuucg

SEQ ID NO: 30138 - RNA, 22 nt, Artificial Sequence
  Synthetic oligonucleotide: FAS-3355
uuggggaagcucuuucacuucg

SEQ ID NO: 30139 - RNA, 23 nt, Artificial Sequence
  Synthetic oligonucleotide: FAS-3356
guuggggaagcucuuucacuucg

SEQ ID NO: 30140 - RNA, 24 nt, Artificial Sequence
  Synthetic oligonucleotide: FAS-3357
aguuggggaagcucuuucacuucg

SEQ ID NO: 30141 - RNA, 18 nt, Artificial Sequence
  Synthetic oligonucleotide: FAS-3358
uguucaaagacgcuucug

SEQ ID NO: 30142 - RNA, 19 nt, Artificial Sequence
  Synthetic oligonucleotide: FAS-3359
guguucaaagacgcuucug

SEQ ID NO: 30143 - RNA, 20 nt, Artificial Sequence
  Synthetic oligonucleotide: FAS-632
gguguucaaagacgcuucug

SEQ ID NO: 30144 - RNA, 18 nt, Artificial Sequence
  Synthetic oligonucleotide: FAS-3360
gcgggcgcgggacgcgug

SEQ ID NO: 30145 - RNA, 19 nt, Artificial Sequence
  Synthetic oligonucleotide: FAS-3361
ggcgggcgcgggacgcgug

SEQ ID NO: 30146 - RNA, 20 nt, Artificial Sequence
  Synthetic oligonucleotide: FAS-678
gggcgggcgcgggacgcgug

SEQ ID NO: 30147 - RNA, 18 nt, Artificial Sequence
  Synthetic oligonucleotide: FAS-3362
gaaggacaggaaguaauu

SEQ ID NO: 30148 - RNA, 19 nt, Artificial Sequence
  Synthetic oligonucleotide: FAS-3363
cgaaggacaggaaguaauu

SEQ ID NO: 30149 - RNA, 20 nt, Artificial Sequence
  Synthetic oligonucleotide: FAS-979
acgaaggacaggaaguaauu

SEQ ID NO: 30150 - RNA, 18 nt, Artificial Sequence
  Synthetic oligonucleotide: FAS-3364
gccauagggcucugaaaa

SEQ ID NO: 30151 - RNA, 19 nt, Artificial Sequence
  Synthetic oligonucleotide: FAS-3365
cgccauagggcucugaaaa

SEQ ID NO: 30152 - RNA, 20 nt, Artificial Sequence
  Synthetic oligonucleotide: FAS-784
gcgccauagggcucugaaaa

SEQ ID NO: 30153 - RNA, 21 nt, Artificial Sequence
  Synthetic oligonucleotide: FAS-3366
ugcgccauagggcucugaaaa

SEQ ID NO: 30154 - RNA, 22 nt, Artificial Sequence
  Synthetic oligonucleotide: FAS-3367
uugcgccauagggcucugaaaa

SEQ ID NO: 30155 - RNA, 23 nt, Artificial Sequence
  Synthetic oligonucleotide: FAS-3368
guugcgccauagggcucugaaaa

SEQ ID NO: 30156 - RNA, 24 nt, Artificial Sequence
  Synthetic oligonucleotide: FAS-3369
uguugcgccauagggcucugaaaa

SEQ ID NO: 30157 - RNA, 18 nt, Artificial Sequence
  Synthetic oligonucleotide: FAS-3370
cgccauagggcucugaaa

SEQ ID NO: 30158 - RNA, 19 nt, Artificial Sequence
  Synthetic oligonucleotide: FAS-3371
gcgccauagggcucugaaa

SEQ ID NO: 30159 - RNA, 20 nt, Artificial Sequence
  Synthetic oligonucleotide: FAS-783
ugcgccauagggcucugaaa

SEQ ID NO: 30160 - RNA, 21 nt, Artificial Sequence
  Synthetic oligonucleotide: FAS-3372
uugcgccauagggcucugaaa

SEQ ID NO: 30161 - RNA, 22 nt, Artificial Sequence
  Synthetic oligonucleotide: FAS-3373
guugcgccauagggcucugaaa

SEQ ID NO: 30162 - RNA, 23 nt, Artificial Sequence
  Synthetic oligonucleotide: FAS-3374
uguugcgccauagggcucugaaa

SEQ ID NO: 30163 - RNA, 24 nt, Artificial Sequence
  Synthetic oligonucleotide: FAS-3375
auguugcgccauagggcucugaaa

SEQ ID NO: 30164 - RNA, 18 nt, Artificial Sequence
  Synthetic oligonucleotide: FAS-3376
ucaggguucguugcacaa

SEQ ID NO: 30165 - RNA, 19 nt, Artificial Sequence
  Synthetic oligonucleotide: FAS-3377
gucaggguucguugcacaa

SEQ ID NO: 30166 - RNA, 20 nt, Artificial Sequence
  Synthetic oligonucleotide: FAS-1226
agucaggguucguugcacaa

SEQ ID NO: 30167 - RNA, 21 nt, Artificial Sequence
  Synthetic oligonucleotide: FAS-3378
gagucaggguucguugcacaa

SEQ ID NO: 30168 - RNA, 22 nt, Artificial Sequence
  Synthetic oligonucleotide: FAS-3379
ggagucaggguucguugcacaa

SEQ ID NO: 30169 - RNA, 23 nt, Artificial Sequence
  Synthetic oligonucleotide: FAS-3380
aggagucaggguucguugcacaa

SEQ ID NO: 30170 - RNA, 24 nt, Artificial Sequence
  Synthetic oligonucleotide: FAS-3381
aaggagucaggguucguugcacaa

SEQ ID NO: 30171 - RNA, 18 nt, Artificial Sequence
  Synthetic oligonucleotide: FAS-3382
uuaguuuuuauuucucaa

SEQ ID NO: 30172 - RNA, 19 nt, Artificial Sequence
  Synthetic oligonucleotide: FAS-3383
cuuaguuuuuauuucucaa

SEQ ID NO: 30173 - RNA, 20 nt, Artificial Sequence
  Synthetic oligonucleotide: FAS-1271
ccuuaguuuuuauuucucaa

SEQ ID NO: 30174 - RNA, 21 nt, Artificial Sequence
  Synthetic oligonucleotide: FAS-3384
cccuuaguuuuuauuucucaa

SEQ ID NO: 30175 - RNA, 22 nt, Artificial Sequence
  Synthetic oligonucleotide: FAS-3385
ccccuuaguuuuuauuucucaa

SEQ ID NO: 30176 - RNA, 23 nt, Artificial Sequence
  Synthetic oligonucleotide: FAS-3386
gccccuuaguuuuuauuucucaa

SEQ ID NO: 30177 - RNA, 24 nt, Artificial Sequence
  Synthetic oligonucleotide: FAS-3387
ggccccuuaguuuuuauuucucaa

SEQ ID NO: 30178 - RNA, 18 nt, Artificial Sequence
  Synthetic oligonucleotide: FAS-3388
ggaggucuugaaggagaa

SEQ ID NO: 30179 - RNA, 19 nt, Artificial Sequence
  Synthetic oligonucleotide: FAS-3389
gggaggucuugaaggagaa

SEQ ID NO: 30180 - RNA, 20 nt, Artificial Sequence
  Synthetic oligonucleotide: FAS-765
ggggaggucuugaaggagaa

SEQ ID NO: 30181 - RNA, 21 nt, Artificial Sequence
  Synthetic oligonucleotide: FAS-3390
uggggaggucuugaaggagaa

SEQ ID NO: 30182 - RNA, 22 nt, Artificial Sequence
  Synthetic oligonucleotide: FAS-3391
uuggggaggucuugaaggagaa

SEQ ID NO: 30183 - RNA, 23 nt, Artificial Sequence
  Synthetic oligonucleotide: FAS-3392
guuggggaggucuugaaggagaa

SEQ ID NO: 30184 - RNA, 24 nt, Artificial Sequence
  Synthetic oligonucleotide: FAS-3393
aguuggggaggucuugaaggagaa

SEQ ID NO: 30185 - RNA, 18 nt, Artificial Sequence
  Synthetic oligonucleotide: FAS-2253
guugagcaauccuccgaa

SEQ ID NO: 30186 - RNA, 19 nt, Artificial Sequence
  Synthetic oligonucleotide: FAS-2254
uguugagcaauccuccgaa

SEQ ID NO: 30187 - RNA, 20 nt, Artificial Sequence
  Synthetic oligonucleotide: FAS-1172
uuguugagcaauccuccgaa

SEQ ID NO: 30188 - RNA, 21 nt, Artificial Sequence
  Synthetic oligonucleotide: FAS-2255
guuguugagcaauccuccgaa

SEQ ID NO: 30189 - RNA, 22 nt, Artificial Sequence
  Synthetic oligonucleotide: FAS-2256
gguuguugagcaauccuccgaa

SEQ ID NO: 30190 - RNA, 23 nt, Artificial Sequence
  Synthetic oligonucleotide: FAS-2257
ugguuguugagcaauccuccgaa

SEQ ID NO: 30191 - RNA, 24 nt, Artificial Sequence
  Synthetic oligonucleotide: FAS-2258
augguuguugagcaauccuccgaa

SEQ ID NO: 30192 - RNA, 18 nt, Artificial Sequence
  Synthetic oligonucleotide: FAS-3394
gcgccauagggcucugaa

SEQ ID NO: 30193 - RNA, 19 nt, Artificial Sequence
  Synthetic oligonucleotide: FAS-3395
ugcgccauagggcucugaa

SEQ ID NO: 30194 - RNA, 20 nt, Artificial Sequence
  Synthetic oligonucleotide: FAS-1266
uugcgccauagggcucugaa

SEQ ID NO: 30195 - RNA, 21 nt, Artificial Sequence
  Synthetic oligonucleotide: FAS-3396
guugcgccauagggcucugaa

SEQ ID NO: 30196 - RNA, 22 nt, Artificial Sequence
  Synthetic oligonucleotide: FAS-3397
uguugcgccauagggcucugaa

SEQ ID NO: 30197 - RNA, 23 nt, Artificial Sequence
  Synthetic oligonucleotide: FAS-3398
auguugcgccauagggcucugaa

SEQ ID NO: 30198 - RNA, 24 nt, Artificial Sequence
  Synthetic oligonucleotide: FAS-3399
gauguugcgccauagggcucugaa

SEQ ID NO: 30199 - RNA, 18 nt, Artificial Sequence
  Synthetic oligonucleotide: FAS-3400
aguacagauguugcgcca

SEQ ID NO: 30200 - RNA, 19 nt, Artificial Sequence
  Synthetic oligonucleotide: FAS-3401
aaguacagauguugcgcca

SEQ ID NO: 30201 - RNA, 20 nt, Artificial Sequence
  Synthetic oligonucleotide: FAS-1264
aaaguacagauguugcgcca

SEQ ID NO: 30202 - RNA, 21 nt, Artificial Sequence
  Synthetic oligonucleotide: FAS-3402
aaaaguacagauguugcgcca

SEQ ID NO: 30203 - RNA, 22 nt, Artificial Sequence
  Synthetic oligonucleotide: FAS-3403
aaaaaguacagauguugcgcca

SEQ ID NO: 30204 - RNA, 23 nt, Artificial Sequence
  Synthetic oligonucleotide: FAS-3404
gaaaaaguacagauguugcgcca

SEQ ID NO: 30205 - RNA, 24 nt, Artificial Sequence
  Synthetic oligonucleotide: FAS-3405
ugaaaaaguacagauguugcgcca

SEQ ID NO: 30206 - RNA, 18 nt, Artificial Sequence
  Synthetic oligonucleotide: FAS-3406
aauugcuggagucacuca

SEQ ID NO: 30207 - RNA, 19 nt, Artificial Sequence
  Synthetic oligonucleotide: FAS-3407
uaauugcuggagucacuca

SEQ ID NO: 30208 - RNA, 20 nt, Artificial Sequence
  Synthetic oligonucleotide: FAS-1254
cuaauugcuggagucacuca

SEQ ID NO: 30209 - RNA, 21 nt, Artificial Sequence
  Synthetic oligonucleotide: FAS-3408
gcuaauugcuggagucacuca

SEQ ID NO: 30210 - RNA, 22 nt, Artificial Sequence
  Synthetic oligonucleotide: FAS-3409
ggcuaauugcuggagucacuca

SEQ ID NO: 30211 - RNA, 23 nt, Artificial Sequence
  Synthetic oligonucleotide: FAS-3410
uggcuaauugcuggagucacuca

SEQ ID NO: 30212 - RNA, 24 nt, Artificial Sequence
  Synthetic oligonucleotide: FAS-3411
uuggcuaauugcuggagucacuca

SEQ ID NO: 30213 - RNA, 18 nt, Artificial Sequence
  Synthetic oligonucleotide: FAS-3412
gggaggucuugaaggaga

SEQ ID NO: 30214 - RNA, 19 nt, Artificial Sequence
  Synthetic oligonucleotide: FAS-3413
ggggaggucuugaaggaga

SEQ ID NO: 30215 - RNA, 20 nt, Artificial Sequence
  Synthetic oligonucleotide: FAS-1244
uggggaggucuugaaggaga

SEQ ID NO: 30216 - RNA, 21 nt, Artificial Sequence
  Synthetic oligonucleotide: FAS-3414
uuggggaggucuugaaggaga

SEQ ID NO: 30217 - RNA, 22 nt, Artificial Sequence
  Synthetic oligonucleotide: FAS-3415
guuggggaggucuugaaggaga

SEQ ID NO: 30218 - RNA, 23 nt, Artificial Sequence
  Synthetic oligonucleotide: FAS-3416
aguuggggaggucuugaaggaga

SEQ ID NO: 30219 - RNA, 24 nt, Artificial Sequence
  Synthetic oligonucleotide: FAS-3417
aaguuggggaggucuugaaggaga

SEQ ID NO: 30220 - RNA, 18 nt, Artificial Sequence
  Synthetic oligonucleotide: FAS-2265
gccuccacccgggcagga

SEQ ID NO: 30221 - RNA, 19 nt, Artificial Sequence
  Synthetic oligonucleotide: FAS-2266
agccuccacccgggcagga

SEQ ID NO: 30222 - RNA, 20 nt, Artificial Sequence
  Synthetic oligonucleotide: FAS-1165
aagccuccacccgggcagga

SEQ ID NO: 30223 - RNA, 21 nt, Artificial Sequence
  Synthetic oligonucleotide: FAS-3418
uaagccuccacccgggcagga

SEQ ID NO: 30224 - RNA, 22 nt, Artificial Sequence
  Synthetic oligonucleotide: FAS-3419
guaagccuccacccgggcagga

SEQ ID NO: 30225 - RNA, 23 nt, Artificial Sequence
  Synthetic oligonucleotide: FAS-3420
gguaagccuccacccgggcagga

SEQ ID NO: 30226 - RNA, 24 nt, Artificial Sequence
  Synthetic oligonucleotide: FAS-3421
ggguaagccuccacccgggcagga

SEQ ID NO: 30227 - RNA, 18 nt, Artificial Sequence
  Synthetic oligonucleotide: FAS-3422
ccccgguggucaggagga

SEQ ID NO: 30228 - RNA, 19 nt, Artificial Sequence
  Synthetic oligonucleotide: FAS-3423
gccccgguggucaggagga

SEQ ID NO: 30229 - RNA, 20 nt, Artificial Sequence
  Synthetic oligonucleotide: FAS-719
agccccgguggucaggagga

SEQ ID NO: 30230 - RNA, 21 nt, Artificial Sequence
  Synthetic oligonucleotide: FAS-3424
aagccccgguggucaggagga

SEQ ID NO: 30231 - RNA, 22 nt, Artificial Sequence
  Synthetic oligonucleotide: FAS-3425
aaagccccgguggucaggagga

SEQ ID NO: 30232 - RNA, 23 nt, Artificial Sequence
  Synthetic oligonucleotide: FAS-3426
aaaagccccgguggucaggagga

SEQ ID NO: 30233 - RNA, 24 nt, Artificial Sequence
  Synthetic oligonucleotide: FAS-3427
gaaaagccccgguggucaggagga

SEQ ID NO: 30234 - RNA, 18 nt, Artificial Sequence
  Synthetic oligonucleotide: FAS-3428
ccugcgcgcggguaggga

SEQ ID NO: 30235 - RNA, 19 nt, Artificial Sequence
  Synthetic oligonucleotide: FAS-3429
gccugcgcgcggguaggga

SEQ ID NO: 30236 - RNA, 20 nt, Artificial Sequence
  Synthetic oligonucleotide: FAS-738
ggccugcgcgcggguaggga

SEQ ID NO: 30237 - RNA, 21 nt, Artificial Sequence
  Synthetic oligonucleotide: FAS-3430
uggccugcgcgcggguaggga

SEQ ID NO: 30238 - RNA, 22 nt, Artificial Sequence
  Synthetic oligonucleotide: FAS-3431
uuggccugcgcgcggguaggga

SEQ ID NO: 30239 - RNA, 23 nt, Artificial Sequence
  Synthetic oligonucleotide: FAS-3432
cuuggccugcgcgcggguaggga

SEQ ID NO: 30240 - RNA, 24 nt, Artificial Sequence
  Synthetic oligonucleotide: FAS-3433
acuuggccugcgcgcggguaggga

SEQ ID NO: 30241 - RNA, 18 nt, Artificial Sequence
  Synthetic oligonucleotide: FAS-3434
guggucaggaggauggga

SEQ ID NO: 30242 - RNA, 19 nt, Artificial Sequence
  Synthetic oligonucleotide: FAS-3435
gguggucaggaggauggga

SEQ ID NO: 30243 - RNA, 20 nt, Artificial Sequence
  Synthetic oligonucleotide: FAS-721
cgguggucaggaggauggga

SEQ ID NO: 30244 - RNA, 21 nt, Artificial Sequence
  Synthetic oligonucleotide: FAS-3436
ccgguggucaggaggauggga

SEQ ID NO: 30245 - RNA, 22 nt, Artificial Sequence
  Synthetic oligonucleotide: FAS-3437
cccgguggucaggaggauggga

SEQ ID NO: 30246 - RNA, 23 nt, Artificial Sequence
  Synthetic oligonucleotide: FAS-3438
ccccgguggucaggaggauggga

SEQ ID NO: 30247 - RNA, 24 nt, Artificial Sequence
  Synthetic oligonucleotide: FAS-3439
gccccgguggucaggaggauggga

SEQ ID NO: 30248 - RNA, 18 nt, Artificial Sequence
  Synthetic oligonucleotide: FAS-3440
cucacagacguuucugga

SEQ ID NO: 30249 - RNA, 19 nt, Artificial Sequence
  Synthetic oligonucleotide: FAS-3441
gcucacagacguuucugga

SEQ ID NO: 30250 - RNA, 20 nt, Artificial Sequence
  Synthetic oligonucleotide: FAS-1262
ggcucacagacguuucugga

SEQ ID NO: 30251 - RNA, 21 nt, Artificial Sequence
  Synthetic oligonucleotide: FAS-3442
aggcucacagacguuucugga

SEQ ID NO: 30252 - RNA, 22 nt, Artificial Sequence
  Synthetic oligonucleotide: FAS-3443
gaggcucacagacguuucugga

SEQ ID NO: 30253 - RNA, 23 nt, Artificial Sequence
  Synthetic oligonucleotide: FAS-3444
agaggcucacagacguuucugga

SEQ ID NO: 30254 - RNA, 24 nt, Artificial Sequence
  Synthetic oligonucleotide: FAS-3445
gagaggcucacagacguuucugga

SEQ ID NO: 30255 - RNA, 18 nt, Artificial Sequence
  Synthetic oligonucleotide: FAS-3446
agcaauccuccgaaguga

SEQ ID NO: 30256 - RNA, 19 nt, Artificial Sequence
  Synthetic oligonucleotide: FAS-3447
gagcaauccuccgaaguga

SEQ ID NO: 30257 - RNA, 20 nt, Artificial Sequence
  Synthetic oligonucleotide: FAS-1173
ugagcaauccuccgaaguga

SEQ ID NO: 30258 - RNA, 21 nt, Artificial Sequence
  Synthetic oligonucleotide: FAS-3448
uugagcaauccuccgaaguga

SEQ ID NO: 30259 - RNA, 22 nt, Artificial Sequence
  Synthetic oligonucleotide: FAS-3449
guugagcaauccuccgaaguga

SEQ ID NO: 30260 - RNA, 23 nt, Artificial Sequence
  Synthetic oligonucleotide: FAS-3450
uguugagcaauccuccgaaguga

SEQ ID NO: 30261 - RNA, 24 nt, Artificial Sequence
  Synthetic oligonucleotide: FAS-3451
uuguugagcaauccuccgaaguga

SEQ ID NO: 30262 - RNA, 18 nt, Artificial Sequence
  Synthetic oligonucleotide: FAS-3452
aaguuggggaggucuuga

SEQ ID NO: 30263 - RNA, 19 nt, Artificial Sequence
  Synthetic oligonucleotide: FAS-3453
gaaguuggggaggucuuga

SEQ ID NO: 30264 - RNA, 20 nt, Artificial Sequence
  Synthetic oligonucleotide: FAS-764
ggaaguuggggaggucuuga

SEQ ID NO: 30265 - RNA, 21 nt, Artificial Sequence
  Synthetic oligonucleotide: FAS-3454
gggaaguuggggaggucuuga

SEQ ID NO: 30266 - RNA, 22 nt, Artificial Sequence
  Synthetic oligonucleotide: FAS-3455
ugggaaguuggggaggucuuga

SEQ ID NO: 30267 - RNA, 23 nt, Artificial Sequence
  Synthetic oligonucleotide: FAS-3456
cugggaaguuggggaggucuuga

SEQ ID NO: 30268 - RNA, 24 nt, Artificial Sequence
  Synthetic oligonucleotide: FAS-3457
ccugggaaguuggggaggucuuga

SEQ ID NO: 30269 - RNA, 18 nt, Artificial Sequence
  Synthetic oligonucleotide: FAS-3458
gacuugcggggcauuuga

SEQ ID NO: 30270 - RNA, 19 nt, Artificial Sequence
  Synthetic oligonucleotide: FAS-3459
agacuugcggggcauuuga

SEQ ID NO: 30271 - RNA, 20 nt, Artificial Sequence
  Synthetic oligonucleotide: FAS-1257
aagacuugcggggcauuuga

SEQ ID NO: 30272 - RNA, 21 nt, Artificial Sequence
  Synthetic oligonucleotide: FAS-3460
aaagacuugcggggcauuuga

SEQ ID NO: 30273 - RNA, 22 nt, Artificial Sequence
  Synthetic oligonucleotide: FAS-3461
gaaagacuugcggggcauuuga

SEQ ID NO: 30274 - RNA, 23 nt, Artificial Sequence
  Synthetic oligonucleotide: FAS-3462
agaaagacuugcggggcauuuga

SEQ ID NO: 30275 - RNA, 24 nt, Artificial Sequence
  Synthetic oligonucleotide: FAS-3463
gagaaagacuugcggggcauuuga

SEQ ID NO: 30276 - RNA, 18 nt, Artificial Sequence
  Synthetic oligonucleotide: FAS-3464
agcuuccccaacuccgua

SEQ ID NO: 30277 - RNA, 19 nt, Artificial Sequence
  Synthetic oligonucleotide: FAS-3465
gagcuuccccaacuccgua

SEQ ID NO: 30278 - RNA, 20 nt, Artificial Sequence
  Synthetic oligonucleotide: FAS-1174
agagcuuccccaacuccgua

SEQ ID NO: 30279 - RNA, 21 nt, Artificial Sequence
  Synthetic oligonucleotide: FAS-3466
aagagcuuccccaacuccgua

SEQ ID NO: 30280 - RNA, 22 nt, Artificial Sequence
  Synthetic oligonucleotide: FAS-3467
aaagagcuuccccaacuccgua

SEQ ID NO: 30281 - RNA, 23 nt, Artificial Sequence
  Synthetic oligonucleotide: FAS-3468
gaaagagcuuccccaacuccgua

SEQ ID NO: 30282 - RNA, 24 nt, Artificial Sequence
  Synthetic oligonucleotide: FAS-3469
ugaaagagcuuccccaacuccgua

SEQ ID NO: 30283 - RNA, 18 nt, Artificial Sequence
  Synthetic oligonucleotide: FAS-3470
uuggccugcgcgcgggua

SEQ ID NO: 30284 - RNA, 19 nt, Artificial Sequence
  Synthetic oligonucleotide: FAS-3471
cuuggccugcgcgcgggua

SEQ ID NO: 30285 - RNA, 20 nt, Artificial Sequence
  Synthetic oligonucleotide: FAS-736
acuuggccugcgcgcgggua

SEQ ID NO: 30286 - RNA, 21 nt, Artificial Sequence
  Synthetic oligonucleotide: FAS-3472
aacuuggccugcgcgcgggua

SEQ ID NO: 30287 - RNA, 22 nt, Artificial Sequence
  Synthetic oligonucleotide: FAS-3473
caacuuggccugcgcgcgggua

SEQ ID NO: 30288 - RNA, 23 nt, Artificial Sequence
  Synthetic oligonucleotide: FAS-3474
gcaacuuggccugcgcgcgggua

SEQ ID NO: 30289 - RNA, 24 nt, Artificial Sequence
  Synthetic oligonucleotide: FAS-3475
agcaacuuggccugcgcgcgggua

SEQ ID NO: 30290 - RNA, 18 nt, Artificial Sequence
  Synthetic oligonucleotide: FAS-3476
agagguccugccugggua

SEQ ID NO: 30291 - RNA, 19 nt, Artificial Sequence
  Synthetic oligonucleotide: FAS-3477
cagagguccugccugggua

SEQ ID NO: 30292 - RNA, 20 nt, Artificial Sequence
  Synthetic oligonucleotide: FAS-1249
gcagagguccugccugggua

SEQ ID NO: 30293 - RNA, 21 nt, Artificial Sequence
  Synthetic oligonucleotide: FAS-3478
cgcagagguccugccugggua

SEQ ID NO: 30294 - RNA, 22 nt, Artificial Sequence
  Synthetic oligonucleotide: FAS-3479
gcgcagagguccugccugggua

SEQ ID NO: 30295 - RNA, 23 nt, Artificial Sequence
  Synthetic oligonucleotide: FAS-3480
agcgcagagguccugccugggua

SEQ ID NO: 30296 - RNA, 24 nt, Artificial Sequence
  Synthetic oligonucleotide: FAS-3481
gagcgcagagguccugccugggua

SEQ ID NO: 30297 - RNA, 18 nt, Artificial Sequence
  Synthetic oligonucleotide: FAS-3482
ccauguuguggcugcaac

SEQ ID NO: 30298 - RNA, 19 nt, Artificial Sequence
  Synthetic oligonucleotide: FAS-3483
uccauguuguggcugcaac

SEQ ID NO: 30299 - RNA, 20 nt, Artificial Sequence
  Synthetic oligonucleotide: FAS-1258
guccauguuguggcugcaac

SEQ ID NO: 30300 - RNA, 21 nt, Artificial Sequence
  Synthetic oligonucleotide: FAS-3484
uguccauguuguggcugcaac

SEQ ID NO: 30301 - RNA, 22 nt, Artificial Sequence
  Synthetic oligonucleotide: FAS-3485
cuguccauguuguggcugcaac

SEQ ID NO: 30302 - RNA, 23 nt, Artificial Sequence
  Synthetic oligonucleotide: FAS-3486
gcuguccauguuguggcugcaac

SEQ ID NO: 30303 - RNA, 24 nt, Artificial Sequence
  Synthetic oligonucleotide: FAS-3487
ggcuguccauguuguggcugcaac

SEQ ID NO: 30304 - RNA, 18 nt, Artificial Sequence
  Synthetic oligonucleotide: FAS-3488
cuucugcuguaguucaac

SEQ ID NO: 30305 - RNA, 19 nt, Artificial Sequence
  Synthetic oligonucleotide: FAS-3489
gcuucugcuguaguucaac

SEQ ID NO: 30306 - RNA, 20 nt, Artificial Sequence
  Synthetic oligonucleotide: FAS-1233
ggcuucugcuguaguucaac

SEQ ID NO: 30307 - RNA, 21 nt, Artificial Sequence
  Synthetic oligonucleotide: FAS-3490
aggcuucugcuguaguucaac

SEQ ID NO: 30308 - RNA, 22 nt, Artificial Sequence
  Synthetic oligonucleotide: FAS-3491
aaggcuucugcuguaguucaac

SEQ ID NO: 30309 - RNA, 23 nt, Artificial Sequence
  Synthetic oligonucleotide: FAS-3492
aaaggcuucugcuguaguucaac

SEQ ID NO: 30310 - RNA, 24 nt, Artificial Sequence
  Synthetic oligonucleotide: FAS-3493
uaaaggcuucugcuguaguucaac

SEQ ID NO: 30311 - RNA, 18 nt, Artificial Sequence
  Synthetic oligonucleotide: FAS-3494
gacgggguaagccuccac

SEQ ID NO: 30312 - RNA, 19 nt, Artificial Sequence
  Synthetic oligonucleotide: FAS-3495
agacgggguaagccuccac

SEQ ID NO: 30313 - RNA, 20 nt, Artificial Sequence
  Synthetic oligonucleotide: FAS-1161
aagacgggguaagccuccac

SEQ ID NO: 30314 - RNA, 21 nt, Artificial Sequence
  Synthetic oligonucleotide: FAS-3496
uaagacgggguaagccuccac

SEQ ID NO: 30315 - RNA, 22 nt, Artificial Sequence
  Synthetic oligonucleotide: FAS-3497
cuaagacgggguaagccuccac

SEQ ID NO: 30316 - RNA, 23 nt, Artificial Sequence
  Synthetic oligonucleotide: FAS-3498
acuaagacgggguaagccuccac

SEQ ID NO: 30317 - RNA, 24 nt, Artificial Sequence
  Synthetic oligonucleotide: FAS-3499
gacuaagacgggguaagccuccac

SEQ ID NO: 30318 - RNA, 18 nt, Artificial Sequence
  Synthetic oligonucleotide: FAS-2279
gggcaggagagggcucac

SEQ ID NO: 30319 - RNA, 19 nt, Artificial Sequence
  Synthetic oligonucleotide: FAS-2280
cgggcaggagagggcucac

SEQ ID NO: 30320 - RNA, 20 nt, Artificial Sequence
  Synthetic oligonucleotide: FAS-103
ccgggcaggagagggcucac

SEQ ID NO: 30321 - RNA, 21 nt, Artificial Sequence
  Synthetic oligonucleotide: FAS-2281
cccgggcaggagagggcucac

SEQ ID NO: 30322 - RNA, 22 nt, Artificial Sequence
  Synthetic oligonucleotide: FAS-2282
acccgggcaggagagggcucac

SEQ ID NO: 30323 - RNA, 23 nt, Artificial Sequence
  Synthetic oligonucleotide: FAS-2283
cacccgggcaggagagggcucac

SEQ ID NO: 30324 - RNA, 24 nt, Artificial Sequence
  Synthetic oligonucleotide: FAS-2284
ccacccgggcaggagagggcucac

SEQ ID NO: 30325 - RNA, 18 nt, Artificial Sequence
  Synthetic oligonucleotide: FAS-3500
gagguccugccuggguac

SEQ ID NO: 30326 - RNA, 19 nt, Artificial Sequence
  Synthetic oligonucleotide: FAS-3501
agagguccugccuggguac

SEQ ID NO: 30327 - RNA, 20 nt, Artificial Sequence
  Synthetic oligonucleotide: FAS-769
cagagguccugccuggguac

SEQ ID NO: 30328 - RNA, 21 nt, Artificial Sequence
  Synthetic oligonucleotide: FAS-3502
gcagagguccugccuggguac

SEQ ID NO: 30329 - RNA, 22 nt, Artificial Sequence
  Synthetic oligonucleotide: FAS-3503
cgcagagguccugccuggguac

SEQ ID NO: 30330 - RNA, 23 nt, Artificial Sequence
  Synthetic oligonucleotide: FAS-3504
gcgcagagguccugccuggguac

SEQ ID NO: 30331 - RNA, 24 nt, Artificial Sequence
  Synthetic oligonucleotide: FAS-3505
agcgcagagguccugccuggguac

SEQ ID NO: 30332 - RNA, 18 nt, Artificial Sequence
  Synthetic oligonucleotide: FAS-3506
uucugcuguaguucaacc

SEQ ID NO: 30333 - RNA, 19 nt, Artificial Sequence
  Synthetic oligonucleotide: FAS-3507
cuucugcuguaguucaacc

SEQ ID NO: 30334 - RNA, 20 nt, Artificial Sequence
  Synthetic oligonucleotide: FAS-758
gcuucugcuguaguucaacc

SEQ ID NO: 30335 - RNA, 21 nt, Artificial Sequence
  Synthetic oligonucleotide: FAS-3508
ggcuucugcuguaguucaacc

SEQ ID NO: 30336 - RNA, 22 nt, Artificial Sequence
  Synthetic oligonucleotide: FAS-3509
aggcuucugcuguaguucaacc

SEQ ID NO: 30337 - RNA, 23 nt, Artificial Sequence
  Synthetic oligonucleotide: FAS-3510
aaggcuucugcuguaguucaacc

SEQ ID NO: 30338 - RNA, 24 nt, Artificial Sequence
  Synthetic oligonucleotide: FAS-3511
aaaggcuucugcuguaguucaacc

SEQ ID NO: 30339 - RNA, 18 nt, Artificial Sequence
  Synthetic oligonucleotide: FAS-3512
ucacuucaggugaggacc

SEQ ID NO: 30340 - RNA, 19 nt, Artificial Sequence
  Synthetic oligonucleotide: FAS-3513
cucacuucaggugaggacc

SEQ ID NO: 30341 - RNA, 20 nt, Artificial Sequence
  Synthetic oligonucleotide: FAS-1231
gcucacuucaggugaggacc

SEQ ID NO: 30342 - RNA, 21 nt, Artificial Sequence
  Synthetic oligonucleotide: FAS-3514
ugcucacuucaggugaggacc

SEQ ID NO: 30343 - RNA, 22 nt, Artificial Sequence
  Synthetic oligonucleotide: FAS-3515
augcucacuucaggugaggacc

SEQ ID NO: 30344 - RNA, 23 nt, Artificial Sequence
  Synthetic oligonucleotide: FAS-3516
caugcucacuucaggugaggacc

SEQ ID NO: 30345 - RNA, 24 nt, Artificial Sequence
  Synthetic oligonucleotide: FAS-3517
gcaugcucacuucaggugaggacc

SEQ ID NO: 30346 - RNA, 18 nt, Artificial Sequence
  Synthetic oligonucleotide: FAS-3518
gagcggguccaccaaccc

SEQ ID NO: 30347 - RNA, 19 nt, Artificial Sequence
  Synthetic oligonucleotide: FAS-3519
ugagcggguccaccaaccc

SEQ ID NO: 30348 - RNA, 20 nt, Artificial Sequence
  Synthetic oligonucleotide: FAS-1176
cugagcggguccaccaaccc

SEQ ID NO: 30349 - RNA, 21 nt, Artificial Sequence
  Synthetic oligonucleotide: FAS-3520
acugagcggguccaccaaccc

SEQ ID NO: 30350 - RNA, 22 nt, Artificial Sequence
  Synthetic oligonucleotide: FAS-3521
uacugagcggguccaccaaccc

SEQ ID NO: 30351 - RNA, 23 nt, Artificial Sequence
  Synthetic oligonucleotide: FAS-3522
guacugagcggguccaccaaccc

SEQ ID NO: 30352 - RNA, 24 nt, Artificial Sequence
  Synthetic oligonucleotide: FAS-3523
cguacugagcggguccaccaaccc

SEQ ID NO: 30353 - RNA, 18 nt, Artificial Sequence
  Synthetic oligonucleotide: FAS-3524
ccgugccagugcccgccc

SEQ ID NO: 30354 - RNA, 19 nt, Artificial Sequence
  Synthetic oligonucleotide: FAS-3525
uccgugccagugcccgccc

SEQ ID NO: 30355 - RNA, 20 nt, Artificial Sequence
  Synthetic oligonucleotide: FAS-1184
uuccgugccagugcccgccc

SEQ ID NO: 30356 - RNA, 21 nt, Artificial Sequence
  Synthetic oligonucleotide: FAS-3526
guuccgugccagugcccgccc

SEQ ID NO: 30357 - RNA, 22 nt, Artificial Sequence
  Synthetic oligonucleotide: FAS-3527
uguuccgugccagugcccgccc

SEQ ID NO: 30358 - RNA, 23 nt, Artificial Sequence
  Synthetic oligonucleotide: FAS-3528
guguuccgugccagugcccgccc

SEQ ID NO: 30359 - RNA, 24 nt, Artificial Sequence
  Synthetic oligonucleotide: FAS-3529
uguguuccgugccagugcccgccc

SEQ ID NO: 30360 - RNA, 18 nt, Artificial Sequence
  Synthetic oligonucleotide: FAS-3530
ccccacuuugccuauccc

SEQ ID NO: 30361 - RNA, 19 nt, Artificial Sequence
  Synthetic oligonucleotide: FAS-3531
gccccacuuugccuauccc

SEQ ID NO: 30362 - RNA, 20 nt, Artificial Sequence
  Synthetic oligonucleotide: FAS-687
cgccccacuuugccuauccc

SEQ ID NO: 30363 - RNA, 21 nt, Artificial Sequence
  Synthetic oligonucleotide: FAS-3532
ccgccccacuuugccuauccc

SEQ ID NO: 30364 - RNA, 22 nt, Artificial Sequence
  Synthetic oligonucleotide: FAS-3533
cccgccccacuuugccuauccc

SEQ ID NO: 30365 - RNA, 23 nt, Artificial Sequence
  Synthetic oligonucleotide: FAS-3534
gcccgccccacuuugccuauccc

SEQ ID NO: 30366 - RNA, 24 nt, Artificial Sequence
  Synthetic oligonucleotide: FAS-3535
cgcccgccccacuuugccuauccc

SEQ ID NO: 30367 - RNA, 18 nt, Artificial Sequence
  Synthetic oligonucleotide: FAS-3536
accgcuucccucacuccc

SEQ ID NO: 30368 - RNA, 19 nt, Artificial Sequence
  Synthetic oligonucleotide: FAS-3537
aaccgcuucccucacuccc

SEQ ID NO: 30369 - RNA, 20 nt, Artificial Sequence
  Synthetic oligonucleotide: FAS-1185
aaaccgcuucccucacuccc

SEQ ID NO: 30370 - RNA, 21 nt, Artificial Sequence
  Synthetic oligonucleotide: FAS-3538
uaaaccgcuucccucacuccc

SEQ ID NO: 30371 - RNA, 22 nt, Artificial Sequence
  Synthetic oligonucleotide: FAS-3539
guaaaccgcuucccucacuccc

SEQ ID NO: 30372 - RNA, 23 nt, Artificial Sequence
  Synthetic oligonucleotide: FAS-3540
cguaaaccgcuucccucacuccc

SEQ ID NO: 30373 - RNA, 24 nt, Artificial Sequence
  Synthetic oligonucleotide: FAS-3541
ucguaaaccgcuucccucacuccc

SEQ ID NO: 30374 - RNA, 18 nt, Artificial Sequence
  Synthetic oligonucleotide: FAS-3542
gccccacuuugccuaucc

SEQ ID NO: 30375 - RNA, 19 nt, Artificial Sequence
  Synthetic oligonucleotide: FAS-3543
cgccccacuuugccuaucc

SEQ ID NO: 30376 - RNA, 20 nt, Artificial Sequence
  Synthetic oligonucleotide: FAS-1157
ccgccccacuuugccuaucc

SEQ ID NO: 30377 - RNA, 21 nt, Artificial Sequence
  Synthetic oligonucleotide: FAS-3544
cccgccccacuuugccuaucc

SEQ ID NO: 30378 - RNA, 22 nt, Artificial Sequence
  Synthetic oligonucleotide: FAS-3545
gcccgccccacuuugccuaucc

SEQ ID NO: 30379 - RNA, 23 nt, Artificial Sequence
  Synthetic oligonucleotide: FAS-3546
cgcccgccccacuuugccuaucc

SEQ ID NO: 30380 - RNA, 24 nt, Artificial Sequence
  Synthetic oligonucleotide: FAS-3547
gcgcccgccccacuuugccuaucc

SEQ ID NO: 30381 - RNA, 18 nt, Artificial Sequence
  Synthetic oligonucleotide: FAS-3548
aaaugggcauuccugucc

SEQ ID NO: 30382 - RNA, 19 nt, Artificial Sequence
  Synthetic oligonucleotide: FAS-3549
caaaugggcauuccugucc

SEQ ID NO: 30383 - RNA, 20 nt, Artificial Sequence
  Synthetic oligonucleotide: FAS-749
acaaaugggcauuccugucc

SEQ ID NO: 30384 - RNA, 21 nt, Artificial Sequence
  Synthetic oligonucleotide: FAS-3550
cacaaaugggcauuccugucc

SEQ ID NO: 30385 - RNA, 22 nt, Artificial Sequence
  Synthetic oligonucleotide: FAS-3551
gcacaaaugggcauuccugucc

SEQ ID NO: 30386 - RNA, 23 nt, Artificial Sequence
  Synthetic oligonucleotide: FAS-3552
ugcacaaaugggcauuccugucc

SEQ ID NO: 30387 - RNA, 24 nt, Artificial Sequence
  Synthetic oligonucleotide: FAS-3553
uugcacaaaugggcauuccugucc

SEQ ID NO: 30388 - RNA, 18 nt, Artificial Sequence
  Synthetic oligonucleotide: FAS-3554
cagcuccgccugggcagc

SEQ ID NO: 30389 - RNA, 19 nt, Artificial Sequence
  Synthetic oligonucleotide: FAS-3555
gcagcuccgccugggcagc

SEQ ID NO: 30390 - RNA, 20 nt, Artificial Sequence
  Synthetic oligonucleotide: FAS-1182
ggcagcuccgccugggcagc

SEQ ID NO: 30391 - RNA, 21 nt, Artificial Sequence
  Synthetic oligonucleotide: FAS-3556
aggcagcuccgccugggcagc

SEQ ID NO: 30392 - RNA, 22 nt, Artificial Sequence
  Synthetic oligonucleotide: FAS-3557
gaggcagcuccgccugggcagc

SEQ ID NO: 30393 - RNA, 23 nt, Artificial Sequence
  Synthetic oligonucleotide: FAS-3558
agaggcagcuccgccugggcagc

SEQ ID NO: 30394 - RNA, 24 nt, Artificial Sequence
  Synthetic oligonucleotide: FAS-3559
aagaggcagcuccgccugggcagc

SEQ ID NO: 30395 - RNA, 18 nt, Artificial Sequence
  Synthetic oligonucleotide: FAS-3560
gcggguccaccaacccgc

SEQ ID NO: 30396 - RNA, 19 nt, Artificial Sequence
  Synthetic oligonucleotide: FAS-3561
agcggguccaccaacccgc

SEQ ID NO: 30397 - RNA, 20 nt, Artificial Sequence
  Synthetic oligonucleotide: FAS-705
gagcggguccaccaacccgc

SEQ ID NO: 30398 - RNA, 21 nt, Artificial Sequence
  Synthetic oligonucleotide: FAS-3562
ugagcggguccaccaacccgc

SEQ ID NO: 30399 - RNA, 22 nt, Artificial Sequence
  Synthetic oligonucleotide: FAS-3563
cugagcggguccaccaacccgc

SEQ ID NO: 30400 - RNA, 23 nt, Artificial Sequence
  Synthetic oligonucleotide: FAS-3564
acugagcggguccaccaacccgc

SEQ ID NO: 30401 - RNA, 24 nt, Artificial Sequence
  Synthetic oligonucleotide: FAS-3565
uacugagcggguccaccaacccgc

SEQ ID NO: 30402 - RNA, 18 nt, Artificial Sequence
  Synthetic oligonucleotide: FAS-3566
gagaagaggcagcuccgc

SEQ ID NO: 30403 - RNA, 19 nt, Artificial Sequence
  Synthetic oligonucleotide: FAS-3567
ggagaagaggcagcuccgc

SEQ ID NO: 30404 - RNA, 20 nt, Artificial Sequence
  Synthetic oligonucleotide: FAS-1181
gggagaagaggcagcuccgc

SEQ ID NO: 30405 - RNA, 21 nt, Artificial Sequence
  Synthetic oligonucleotide: FAS-3568
cgggagaagaggcagcuccgc

SEQ ID NO: 30406 - RNA, 22 nt, Artificial Sequence
  Synthetic oligonucleotide: FAS-3569
gcgggagaagaggcagcuccgc

SEQ ID NO: 30407 - RNA, 23 nt, Artificial Sequence
  Synthetic oligonucleotide: FAS-3570
cgcgggagaagaggcagcuccgc

SEQ ID NO: 30408 - RNA, 24 nt, Artificial Sequence
  Synthetic oligonucleotide: FAS-3571
ccgcgggagaagaggcagcuccgc

SEQ ID NO: 30409 - RNA, 18 nt, Artificial Sequence
  Synthetic oligonucleotide: FAS-3572
augggaaggaagccucgc

SEQ ID NO: 30410 - RNA, 19 nt, Artificial Sequence
  Synthetic oligonucleotide: FAS-3573
gaugggaaggaagccucgc

SEQ ID NO: 30411 - RNA, 20 nt, Artificial Sequence
  Synthetic oligonucleotide: FAS-722
ggaugggaaggaagccucgc

SEQ ID NO: 30412 - RNA, 21 nt, Artificial Sequence
  Synthetic oligonucleotide: FAS-3574
aggaugggaaggaagccucgc

SEQ ID NO: 30413 - RNA, 22 nt, Artificial Sequence
  Synthetic oligonucleotide: FAS-3575
gaggaugggaaggaagccucgc

SEQ ID NO: 30414 - RNA, 23 nt, Artificial Sequence
  Synthetic oligonucleotide: FAS-3576
ggaggaugggaaggaagccucgc

SEQ ID NO: 30415 - RNA, 24 nt, Artificial Sequence
  Synthetic oligonucleotide: FAS-3577
aggaggaugggaaggaagccucgc

SEQ ID NO: 30416 - RNA, 18 nt, Artificial Sequence
  Synthetic oligonucleotide: FAS-3578
guaagccuccacccgggc

SEQ ID NO: 30417 - RNA, 19 nt, Artificial Sequence
  Synthetic oligonucleotide: FAS-3579
gguaagccuccacccgggc

SEQ ID NO: 30418 - RNA, 20 nt, Artificial Sequence
  Synthetic oligonucleotide: FAS-694
ggguaagccuccacccgggc

SEQ ID NO: 30419 - RNA, 21 nt, Artificial Sequence
  Synthetic oligonucleotide: FAS-3580
gggguaagccuccacccgggc

SEQ ID NO: 30420 - RNA, 22 nt, Artificial Sequence
  Synthetic oligonucleotide: FAS-3581
cgggguaagccuccacccgggc

SEQ ID NO: 30421 - RNA, 23 nt, Artificial Sequence
  Synthetic oligonucleotide: FAS-3582
acgggguaagccuccacccgggc

SEQ ID NO: 30422 - RNA, 24 nt, Artificial Sequence
  Synthetic oligonucleotide: FAS-3583
gacgggguaagccuccacccgggc

SEQ ID NO: 30423 - RNA, 18 nt, Artificial Sequence
  Synthetic oligonucleotide: FAS-3584
ccugugugucacucuugc

SEQ ID NO: 30424 - RNA, 19 nt, Artificial Sequence
  Synthetic oligonucleotide: FAS-3585
accugugugucacucuugc

SEQ ID NO: 30425 - RNA, 20 nt, Artificial Sequence
  Synthetic oligonucleotide: FAS-1187
caccugugugucacucuugc

SEQ ID NO: 30426 - RNA, 21 nt, Artificial Sequence
  Synthetic oligonucleotide: FAS-3586
acaccugugugucacucuugc

SEQ ID NO: 30427 - RNA, 22 nt, Artificial Sequence
  Synthetic oligonucleotide: FAS-3587
aacaccugugugucacucuugc

SEQ ID NO: 30428 - RNA, 23 nt, Artificial Sequence
  Synthetic oligonucleotide: FAS-3588
gaacaccugugugucacucuugc

SEQ ID NO: 30429 - RNA, 24 nt, Artificial Sequence
  Synthetic oligonucleotide: FAS-3589
ugaacaccugugugucacucuugc

SEQ ID NO: 30430 - RNA, 18 nt, Artificial Sequence
  Synthetic oligonucleotide: FAS-3590
acuucaggugaggaccuc

SEQ ID NO: 30431 - RNA, 19 nt, Artificial Sequence
  Synthetic oligonucleotide: FAS-3591
cacuucaggugaggaccuc

SEQ ID NO: 30432 - RNA, 20 nt, Artificial Sequence
  Synthetic oligonucleotide: FAS-1232
ucacuucaggugaggaccuc

SEQ ID NO: 30433 - RNA, 21 nt, Artificial Sequence
  Synthetic oligonucleotide: FAS-3592
cucacuucaggugaggaccuc

SEQ ID NO: 30434 - RNA, 22 nt, Artificial Sequence
  Synthetic oligonucleotide: FAS-3593
gcucacuucaggugaggaccuc

SEQ ID NO: 30435 - RNA, 23 nt, Artificial Sequence
  Synthetic oligonucleotide: FAS-3594
ugcucacuucaggugaggaccuc

SEQ ID NO: 30436 - RNA, 24 nt, Artificial Sequence
  Synthetic oligonucleotide: FAS-3595
augcucacuucaggugaggaccuc

SEQ ID NO: 30437 - RNA, 18 nt, Artificial Sequence
  Synthetic oligonucleotide: FAS-3596
gagaucagagacgagcuc

SEQ ID NO: 30438 - RNA, 19 nt, Artificial Sequence
  Synthetic oligonucleotide: FAS-3597
cgagaucagagacgagcuc

SEQ ID NO: 30439 - RNA, 20 nt, Artificial Sequence
  Synthetic oligonucleotide: FAS-1190
gcgagaucagagacgagcuc

SEQ ID NO: 30440 - RNA, 21 nt, Artificial Sequence
  Synthetic oligonucleotide: FAS-3598
cgcgagaucagagacgagcuc

SEQ ID NO: 30441 - RNA, 22 nt, Artificial Sequence
  Synthetic oligonucleotide: FAS-3599
gcgcgagaucagagacgagcuc

SEQ ID NO: 30442 - RNA, 23 nt, Artificial Sequence
  Synthetic oligonucleotide: FAS-3600
ugcgcgagaucagagacgagcuc

SEQ ID NO: 30443 - RNA, 24 nt, Artificial Sequence
  Synthetic oligonucleotide: FAS-3601
uugcgcgagaucagagacgagcuc

SEQ ID NO: 30444 - RNA, 18 nt, Artificial Sequence
  Synthetic oligonucleotide: FAS-3602
ccuuaguuuuuauuucuc

SEQ ID NO: 30445 - RNA, 19 nt, Artificial Sequence
  Synthetic oligonucleotide: FAS-3603
cccuuaguuuuuauuucuc

SEQ ID NO: 30446 - RNA, 20 nt, Artificial Sequence
  Synthetic oligonucleotide: FAS-1270
ccccuuaguuuuuauuucuc

SEQ ID NO: 30447 - RNA, 21 nt, Artificial Sequence
  Synthetic oligonucleotide: FAS-3604
gccccuuaguuuuuauuucuc

SEQ ID NO: 30448 - RNA, 22 nt, Artificial Sequence
  Synthetic oligonucleotide: FAS-3605
ggccccuuaguuuuuauuucuc

SEQ ID NO: 30449 - RNA, 23 nt, Artificial Sequence
  Synthetic oligonucleotide: FAS-3606
gggccccuuaguuuuuauuucuc

SEQ ID NO: 30450 - RNA, 24 nt, Artificial Sequence
  Synthetic oligonucleotide: FAS-3607
agggccccuuaguuuuuauuucuc

SEQ ID NO: 30451 - RNA, 18 nt, Artificial Sequence
  Synthetic oligonucleotide: FAS-3608
ugggaaguuggggagguc

SEQ ID NO: 30452 - RNA, 19 nt, Artificial Sequence
  Synthetic oligonucleotide: FAS-3609
cugggaaguuggggagguc

SEQ ID NO: 30453 - RNA, 20 nt, Artificial Sequence
  Synthetic oligonucleotide: FAS-1240
ccugggaaguuggggagguc

SEQ ID NO: 30454 - RNA, 21 nt, Artificial Sequence
  Synthetic oligonucleotide: FAS-3610
accugggaaguuggggagguc

SEQ ID NO: 30455 - RNA, 22 nt, Artificial Sequence
  Synthetic oligonucleotide: FAS-3611
aaccugggaaguuggggagguc

SEQ ID NO: 30456 - RNA, 23 nt, Artificial Sequence
  Synthetic oligonucleotide: FAS-3612
caaccugggaaguuggggagguc

SEQ ID NO: 30457 - RNA, 24 nt, Artificial Sequence
  Synthetic oligonucleotide: FAS-3613
ucaaccugggaaguuggggagguc

SEQ ID NO: 30458 - RNA, 18 nt, Artificial Sequence
  Synthetic oligonucleotide: FAS-3614
cgaaaagccccggugguc

SEQ ID NO: 30459 - RNA, 19 nt, Artificial Sequence
  Synthetic oligonucleotide: FAS-3615
acgaaaagccccggugguc

SEQ ID NO: 30460 - RNA, 20 nt, Artificial Sequence
  Synthetic oligonucleotide: FAS-717
cacgaaaagccccggugguc

SEQ ID NO: 30461 - RNA, 21 nt, Artificial Sequence
  Synthetic oligonucleotide: FAS-3616
ucacgaaaagccccggugguc

SEQ ID NO: 30462 - RNA, 22 nt, Artificial Sequence
  Synthetic oligonucleotide: FAS-3617
cucacgaaaagccccggugguc

SEQ ID NO: 30463 - RNA, 23 nt, Artificial Sequence
  Synthetic oligonucleotide: FAS-3618
gcucacgaaaagccccggugguc

SEQ ID NO: 30464 - RNA, 24 nt, Artificial Sequence
  Synthetic oligonucleotide: FAS-3619
agcucacgaaaagccccggugguc

SEQ ID NO: 30465 - RNA, 18 nt, Artificial Sequence
  Synthetic oligonucleotide: FAS-3620
caaaugggcauuccuguc

SEQ ID NO: 30466 - RNA, 19 nt, Artificial Sequence
  Synthetic oligonucleotide: FAS-3621
acaaaugggcauuccuguc

SEQ ID NO: 30467 - RNA, 20 nt, Artificial Sequence
  Synthetic oligonucleotide: FAS-1227
cacaaaugggcauuccuguc

SEQ ID NO: 30468 - RNA, 21 nt, Artificial Sequence
  Synthetic oligonucleotide: FAS-3622
gcacaaaugggcauuccuguc

SEQ ID NO: 30469 - RNA, 22 nt, Artificial Sequence
  Synthetic oligonucleotide: FAS-3623
ugcacaaaugggcauuccuguc

SEQ ID NO: 30470 - RNA, 23 nt, Artificial Sequence
  Synthetic oligonucleotide: FAS-3624
uugcacaaaugggcauuccuguc

SEQ ID NO: 30471 - RNA, 24 nt, Artificial Sequence
  Synthetic oligonucleotide: FAS-3625
guugcacaaaugggcauuccuguc

SEQ ID NO: 30472 - RNA, 18 nt, Artificial Sequence
  Synthetic oligonucleotide: FAS-3626
uaguuuuuauuucucaag

SEQ ID NO: 30473 - RNA, 19 nt, Artificial Sequence
  Synthetic oligonucleotide: FAS-3627
uuaguuuuuauuucucaag

SEQ ID NO: 30474 - RNA, 20 nt, Artificial Sequence
  Synthetic oligonucleotide: FAS-787
cuuaguuuuuauuucucaag

SEQ ID NO: 30475 - RNA, 21 nt, Artificial Sequence
  Synthetic oligonucleotide: FAS-3628
ccuuaguuuuuauuucucaag

SEQ ID NO: 30476 - RNA, 22 nt, Artificial Sequence
  Synthetic oligonucleotide: FAS-3629
cccuuaguuuuuauuucucaag

SEQ ID NO: 30477 - RNA, 23 nt, Artificial Sequence
  Synthetic oligonucleotide: FAS-3630
ccccuuaguuuuuauuucucaag

SEQ ID NO: 30478 - RNA, 24 nt, Artificial Sequence
  Synthetic oligonucleotide: FAS-3631
gccccuuaguuuuuauuucucaag

SEQ ID NO: 30479 - RNA, 18 nt, Artificial Sequence
  Synthetic oligonucleotide: FAS-3632
guaguucaaccugggaag

SEQ ID NO: 30480 - RNA, 19 nt, Artificial Sequence
  Synthetic oligonucleotide: FAS-3633
uguaguucaaccugggaag

SEQ ID NO: 30481 - RNA, 20 nt, Artificial Sequence
  Synthetic oligonucleotide: FAS-1236
cuguaguucaaccugggaag

SEQ ID NO: 30482 - RNA, 21 nt, Artificial Sequence
  Synthetic oligonucleotide: FAS-3634
gcuguaguucaaccugggaag

SEQ ID NO: 30483 - RNA, 22 nt, Artificial Sequence
  Synthetic oligonucleotide: FAS-3635
ugcuguaguucaaccugggaag

SEQ ID NO: 30484 - RNA, 23 nt, Artificial Sequence
  Synthetic oligonucleotide: FAS-3636
cugcuguaguucaaccugggaag

SEQ ID NO: 30485 - RNA, 24 nt, Artificial Sequence
  Synthetic oligonucleotide: FAS-3637
ucugcuguaguucaaccugggaag

SEQ ID NO: 30486 - RNA, 18 nt, Artificial Sequence
  Synthetic oligonucleotide: FAS-3638
ccuauccccgggacuaag

SEQ ID NO: 30487 - RNA, 19 nt, Artificial Sequence
  Synthetic oligonucleotide: FAS-3639
gccuauccccgggacuaag

SEQ ID NO: 30488 - RNA, 20 nt, Artificial Sequence
  Synthetic oligonucleotide: FAS-1159
ugccuauccccgggacuaag

SEQ ID NO: 30489 - RNA, 21 nt, Artificial Sequence
  Synthetic oligonucleotide: FAS-3640
uugccuauccccgggacuaag

SEQ ID NO: 30490 - RNA, 22 nt, Artificial Sequence
  Synthetic oligonucleotide: FAS-3641
uuugccuauccccgggacuaag

SEQ ID NO: 30491 - RNA, 23 nt, Artificial Sequence
  Synthetic oligonucleotide: FAS-3642
cuuugccuauccccgggacuaag

SEQ ID NO: 30492 - RNA, 24 nt, Artificial Sequence
  Synthetic oligonucleotide: FAS-3643
acuuugccuauccccgggacuaag

SEQ ID NO: 30493 - RNA, 18 nt, Artificial Sequence
  Synthetic oligonucleotide: FAS-3644
aagccuccacccgggcag

SEQ ID NO: 30494 - RNA, 19 nt, Artificial Sequence
  Synthetic oligonucleotide: FAS-3645
uaagccuccacccgggcag

SEQ ID NO: 30495 - RNA, 20 nt, Artificial Sequence
  Synthetic oligonucleotide: FAS-1164
guaagccuccacccgggcag

SEQ ID NO: 30496 - RNA, 21 nt, Artificial Sequence
  Synthetic oligonucleotide: FAS-3646
gguaagccuccacccgggcag

SEQ ID NO: 30497 - RNA, 22 nt, Artificial Sequence
  Synthetic oligonucleotide: FAS-3647
ggguaagccuccacccgggcag

SEQ ID NO: 30498 - RNA, 23 nt, Artificial Sequence
  Synthetic oligonucleotide: FAS-3648
gggguaagccuccacccgggcag

SEQ ID NO: 30499 - RNA, 24 nt, Artificial Sequence
  Synthetic oligonucleotide: FAS-3649
cgggguaagccuccacccgggcag

SEQ ID NO: 30500 - RNA, 18 nt, Artificial Sequence
  Synthetic oligonucleotide: FAS-3650
cuggcaugcucacuucag

SEQ ID NO: 30501 - RNA, 19 nt, Artificial Sequence
  Synthetic oligonucleotide: FAS-3651
gcuggcaugcucacuucag

SEQ ID NO: 30502 - RNA, 20 nt, Artificial Sequence
  Synthetic oligonucleotide: FAS-1229
ggcuggcaugcucacuucag

SEQ ID NO: 30503 - RNA, 21 nt, Artificial Sequence
  Synthetic oligonucleotide: FAS-3652
uggcuggcaugcucacuucag

SEQ ID NO: 30504 - RNA, 22 nt, Artificial Sequence
  Synthetic oligonucleotide: FAS-3653
guggcuggcaugcucacuucag

SEQ ID NO: 30505 - RNA, 23 nt, Artificial Sequence
  Synthetic oligonucleotide: FAS-3654
aguggcuggcaugcucacuucag

SEQ ID NO: 30506 - RNA, 24 nt, Artificial Sequence
  Synthetic oligonucleotide: FAS-3655
caguggcuggcaugcucacuucag

SEQ ID NO: 30507 - RNA, 18 nt, Artificial Sequence
  Synthetic oligonucleotide: FAS-3656
ucuugcgcgagaucagag

SEQ ID NO: 30508 - RNA, 19 nt, Artificial Sequence
  Synthetic oligonucleotide: FAS-3657
cucuugcgcgagaucagag

SEQ ID NO: 30509 - RNA, 20 nt, Artificial Sequence
  Synthetic oligonucleotide: FAS-1189
acucuugcgcgagaucagag

SEQ ID NO: 30510 - RNA, 21 nt, Artificial Sequence
  Synthetic oligonucleotide: FAS-3658
cacucuugcgcgagaucagag

SEQ ID NO: 30511 - RNA, 22 nt, Artificial Sequence
  Synthetic oligonucleotide: FAS-3659
ucacucuugcgcgagaucagag

SEQ ID NO: 30512 - RNA, 23 nt, Artificial Sequence
  Synthetic oligonucleotide: FAS-3660
gucacucuugcgcgagaucagag

SEQ ID NO: 30513 - RNA, 24 nt, Artificial Sequence
  Synthetic oligonucleotide: FAS-3661
ugucacucuugcgcgagaucagag

SEQ ID NO: 30514 - RNA, 18 nt, Artificial Sequence
  Synthetic oligonucleotide: FAS-3662
cugcgcgcggguagggag

SEQ ID NO: 30515 - RNA, 19 nt, Artificial Sequence
  Synthetic oligonucleotide: FAS-3663
ccugcgcgcggguagggag

SEQ ID NO: 30516 - RNA, 20 nt, Artificial Sequence
  Synthetic oligonucleotide: FAS-739
gccugcgcgcggguagggag

SEQ ID NO: 30517 - RNA, 21 nt, Artificial Sequence
  Synthetic oligonucleotide: FAS-3664
ggccugcgcgcggguagggag

SEQ ID NO: 30518 - RNA, 22 nt, Artificial Sequence
  Synthetic oligonucleotide: FAS-3665
uggccugcgcgcggguagggag

SEQ ID NO: 30519 - RNA, 23 nt, Artificial Sequence
  Synthetic oligonucleotide: FAS-3666
uuggccugcgcgcggguagggag

SEQ ID NO: 30520 - RNA, 24 nt, Artificial Sequence
  Synthetic oligonucleotide: FAS-3667
cuuggccugcgcgcggguagggag

SEQ ID NO: 30521 - RNA, 18 nt, Artificial Sequence
  Synthetic oligonucleotide: FAS-3668
uccaccaacccgcgggag

SEQ ID NO: 30522 - RNA, 19 nt, Artificial Sequence
  Synthetic oligonucleotide: FAS-3669
guccaccaacccgcgggag

SEQ ID NO: 30523 - RNA, 20 nt, Artificial Sequence
  Synthetic oligonucleotide: FAS-1180
gguccaccaacccgcgggag

SEQ ID NO: 30524 - RNA, 21 nt, Artificial Sequence
  Synthetic oligonucleotide: FAS-3670
ggguccaccaacccgcgggag

SEQ ID NO: 30525 - RNA, 22 nt, Artificial Sequence
  Synthetic oligonucleotide: FAS-3671
cggguccaccaacccgcgggag

SEQ ID NO: 30526 - RNA, 23 nt, Artificial Sequence
  Synthetic oligonucleotide: FAS-3672
gcggguccaccaacccgcgggag

SEQ ID NO: 30527 - RNA, 24 nt, Artificial Sequence
  Synthetic oligonucleotide: FAS-3673
agcggguccaccaacccgcgggag

SEQ ID NO: 30528 - RNA, 18 nt, Artificial Sequence
  Synthetic oligonucleotide: FAS-3674
agcggguccaccaacccg

SEQ ID NO: 30529 - RNA, 19 nt, Artificial Sequence
  Synthetic oligonucleotide: FAS-3675
gagcggguccaccaacccg

SEQ ID NO: 30530 - RNA, 20 nt, Artificial Sequence
  Synthetic oligonucleotide: FAS-704
ugagcggguccaccaacccg

SEQ ID NO: 30531 - RNA, 21 nt, Artificial Sequence
  Synthetic oligonucleotide: FAS-3676
cugagcggguccaccaacccg

SEQ ID NO: 30532 - RNA, 22 nt, Artificial Sequence
  Synthetic oligonucleotide: FAS-3677
acugagcggguccaccaacccg

SEQ ID NO: 30533 - RNA, 23 nt, Artificial Sequence
  Synthetic oligonucleotide: FAS-3678
uacugagcggguccaccaacccg

SEQ ID NO: 30534 - RNA, 24 nt, Artificial Sequence
  Synthetic oligonucleotide: FAS-3679
guacugagcggguccaccaacccg

SEQ ID NO: 30535 - RNA, 18 nt, Artificial Sequence
  Synthetic oligonucleotide: FAS-3680
agaauggagcucagagcg

SEQ ID NO: 30536 - RNA, 19 nt, Artificial Sequence
  Synthetic oligonucleotide: FAS-3681
gagaauggagcucagagcg

SEQ ID NO: 30537 - RNA, 20 nt, Artificial Sequence
  Synthetic oligonucleotide: FAS-1247
ggagaauggagcucagagcg

SEQ ID NO: 30538 - RNA, 21 nt, Artificial Sequence
  Synthetic oligonucleotide: FAS-3682
aggagaauggagcucagagcg

SEQ ID NO: 30539 - RNA, 22 nt, Artificial Sequence
  Synthetic oligonucleotide: FAS-3683
aaggagaauggagcucagagcg

SEQ ID NO: 30540 - RNA, 23 nt, Artificial Sequence
  Synthetic oligonucleotide: FAS-3684
gaaggagaauggagcucagagcg

SEQ ID NO: 30541 - RNA, 24 nt, Artificial Sequence
  Synthetic oligonucleotide: FAS-3685
ugaaggagaauggagcucagagcg

SEQ ID NO: 30542 - RNA, 18 nt, Artificial Sequence
  Synthetic oligonucleotide: FAS-3686
gaugggaaggaagccucg

SEQ ID NO: 30543 - RNA, 19 nt, Artificial Sequence
  Synthetic oligonucleotide: FAS-3687
ggaugggaaggaagccucg

SEQ ID NO: 30544 - RNA, 20 nt, Artificial Sequence
  Synthetic oligonucleotide: FAS-1199
aggaugggaaggaagccucg

SEQ ID NO: 30545 - RNA, 21 nt, Artificial Sequence
  Synthetic oligonucleotide: FAS-3688
gaggaugggaaggaagccucg

SEQ ID NO: 30546 - RNA, 22 nt, Artificial Sequence
  Synthetic oligonucleotide: FAS-3689
ggaggaugggaaggaagccucg

SEQ ID NO: 30547 - RNA, 23 nt, Artificial Sequence
  Synthetic oligonucleotide: FAS-3690
aggaggaugggaaggaagccucg

SEQ ID NO: 30548 - RNA, 24 nt, Artificial Sequence
  Synthetic oligonucleotide: FAS-3691
caggaggaugggaaggaagccucg

SEQ ID NO: 30549 - RNA, 18 nt, Artificial Sequence
  Synthetic oligonucleotide: FAS-3692
cauagggcucugaaaagg

SEQ ID NO: 30550 - RNA, 19 nt, Artificial Sequence
  Synthetic oligonucleotide: FAS-3693
ccauagggcucugaaaagg

SEQ ID NO: 30551 - RNA, 20 nt, Artificial Sequence
  Synthetic oligonucleotide: FAS-1269
gccauagggcucugaaaagg

SEQ ID NO: 30552 - RNA, 21 nt, Artificial Sequence
  Synthetic oligonucleotide: FAS-3694
cgccauagggcucugaaaagg

SEQ ID NO: 30553 - RNA, 22 nt, Artificial Sequence
  Synthetic oligonucleotide: FAS-3695
gcgccauagggcucugaaaagg

SEQ ID NO: 30554 - RNA, 23 nt, Artificial Sequence
  Synthetic oligonucleotide: FAS-3696
ugcgccauagggcucugaaaagg

SEQ ID NO: 30555 - RNA, 24 nt, Artificial Sequence
  Synthetic oligonucleotide: FAS-3697
uugcgccauagggcucugaaaagg

SEQ ID NO: 30556 - RNA, 18 nt, Artificial Sequence
  Synthetic oligonucleotide: FAS-3698
ggagggggagaagucagg

SEQ ID NO: 30557 - RNA, 19 nt, Artificial Sequence
  Synthetic oligonucleotide: FAS-3699
gggagggggagaagucagg

SEQ ID NO: 30558 - RNA, 20 nt, Artificial Sequence
  Synthetic oligonucleotide: FAS-1220
agggagggggagaagucagg

SEQ ID NO: 30559 - RNA, 21 nt, Artificial Sequence
  Synthetic oligonucleotide: FAS-3700
uagggagggggagaagucagg

SEQ ID NO: 30560 - RNA, 22 nt, Artificial Sequence
  Synthetic oligonucleotide: FAS-3701
guagggagggggagaagucagg

SEQ ID NO: 30561 - RNA, 23 nt, Artificial Sequence
  Synthetic oligonucleotide: FAS-3702
gguagggagggggagaagucagg

SEQ ID NO: 30562 - RNA, 24 nt, Artificial Sequence
  Synthetic oligonucleotide: FAS-3703
ggguagggagggggagaagucagg

SEQ ID NO: 30563 - RNA, 18 nt, Artificial Sequence
  Synthetic oligonucleotide: FAS-2345
gagagggcucaccagagg

SEQ ID NO: 30564 - RNA, 19 nt, Artificial Sequence
  Synthetic oligonucleotide: FAS-2346
ggagagggcucaccagagg

SEQ ID NO: 30565 - RNA, 20 nt, Artificial Sequence
  Synthetic oligonucleotide: FAS-104
aggagagggcucaccagagg

SEQ ID NO: 30566 - RNA, 21 nt, Artificial Sequence
  Synthetic oligonucleotide: FAS-2347
caggagagggcucaccagagg

SEQ ID NO: 30567 - RNA, 22 nt, Artificial Sequence
  Synthetic oligonucleotide: FAS-2348
gcaggagagggcucaccagagg

SEQ ID NO: 30568 - RNA, 23 nt, Artificial Sequence
  Synthetic oligonucleotide: FAS-2349
ggcaggagagggcucaccagagg

SEQ ID NO: 30569 - RNA, 24 nt, Artificial Sequence
  Synthetic oligonucleotide: FAS-2350
gggcaggagagggcucaccagagg

SEQ ID NO: 30570 - RNA, 18 nt, Artificial Sequence
  Synthetic oligonucleotide: FAS-3704
gccccgguggucaggagg

SEQ ID NO: 30571 - RNA, 19 nt, Artificial Sequence
  Synthetic oligonucleotide: FAS-3705
agccccgguggucaggagg

SEQ ID NO: 30572 - RNA, 20 nt, Artificial Sequence
  Synthetic oligonucleotide: FAS-1194
aagccccgguggucaggagg

SEQ ID NO: 30573 - RNA, 21 nt, Artificial Sequence
  Synthetic oligonucleotide: FAS-3706
aaagccccgguggucaggagg

SEQ ID NO: 30574 - RNA, 22 nt, Artificial Sequence
  Synthetic oligonucleotide: FAS-3707
aaaagccccgguggucaggagg

SEQ ID NO: 30575 - RNA, 23 nt, Artificial Sequence
  Synthetic oligonucleotide: FAS-3708
gaaaagccccgguggucaggagg

SEQ ID NO: 30576 - RNA, 24 nt, Artificial Sequence
  Synthetic oligonucleotide: FAS-3709
cgaaaagccccgguggucaggagg

SEQ ID NO: 30577 - RNA, 18 nt, Artificial Sequence
  Synthetic oligonucleotide: FAS-3710
ugcgcgcggguagggagg

SEQ ID NO: 30578 - RNA, 19 nt, Artificial Sequence
  Synthetic oligonucleotide: FAS-3711
cugcgcgcggguagggagg

SEQ ID NO: 30579 - RNA, 20 nt, Artificial Sequence
  Synthetic oligonucleotide: FAS-740
ccugcgcgcggguagggagg

SEQ ID NO: 30580 - RNA, 21 nt, Artificial Sequence
  Synthetic oligonucleotide: FAS-3712
gccugcgcgcggguagggagg

SEQ ID NO: 30581 - RNA, 22 nt, Artificial Sequence
  Synthetic oligonucleotide: FAS-3713
ggccugcgcgcggguagggagg

SEQ ID NO: 30582 - RNA, 23 nt, Artificial Sequence
  Synthetic oligonucleotide: FAS-3714
uggccugcgcgcggguagggagg

SEQ ID NO: 30583 - RNA, 24 nt, Artificial Sequence
  Synthetic oligonucleotide: FAS-3715
uuggccugcgcgcggguagggagg

SEQ ID NO: 30584 - RNA, 18 nt, Artificial Sequence
  Synthetic oligonucleotide: FAS-3716
ggagaagucagggugagg

SEQ ID NO: 30585 - RNA, 19 nt, Artificial Sequence
  Synthetic oligonucleotide: FAS-3717
gggagaagucagggugagg

SEQ ID NO: 30586 - RNA, 20 nt, Artificial Sequence
  Synthetic oligonucleotide: FAS-1223
ggggagaagucagggugagg

SEQ ID NO: 30587 - RNA, 21 nt, Artificial Sequence
  Synthetic oligonucleotide: FAS-3718
gggggagaagucagggugagg

SEQ ID NO: 30588 - RNA, 22 nt, Artificial Sequence
  Synthetic oligonucleotide: FAS-3719
agggggagaagucagggugagg

SEQ ID NO: 30589 - RNA, 23 nt, Artificial Sequence
  Synthetic oligonucleotide: FAS-3720
gagggggagaagucagggugagg

SEQ ID NO: 30590 - RNA, 24 nt, Artificial Sequence
  Synthetic oligonucleotide: FAS-3721
ggagggggagaagucagggugagg

SEQ ID NO: 30591 - RNA, 18 nt, Artificial Sequence
  Synthetic oligonucleotide: FAS-3722
ggccugcgcgcggguagg

SEQ ID NO: 30592 - RNA, 19 nt, Artificial Sequence
  Synthetic oligonucleotide: FAS-3723
uggccugcgcgcggguagg

SEQ ID NO: 30593 - RNA, 20 nt, Artificial Sequence
  Synthetic oligonucleotide: FAS-1213
uuggccugcgcgcggguagg

SEQ ID NO: 30594 - RNA, 21 nt, Artificial Sequence
  Synthetic oligonucleotide: FAS-3724
cuuggccugcgcgcggguagg

SEQ ID NO: 30595 - RNA, 22 nt, Artificial Sequence
  Synthetic oligonucleotide: FAS-3725
acuuggccugcgcgcggguagg

SEQ ID NO: 30596 - RNA, 23 nt, Artificial Sequence
  Synthetic oligonucleotide: FAS-3726
aacuuggccugcgcgcggguagg

SEQ ID NO: 30597 - RNA, 24 nt, Artificial Sequence
  Synthetic oligonucleotide: FAS-3727
caacuuggccugcgcgcggguagg

SEQ ID NO: 30598 - RNA, 18 nt, Artificial Sequence
  Synthetic oligonucleotide: FAS-3728
ggguccaccaacccgcgg

SEQ ID NO: 30599 - RNA, 19 nt, Artificial Sequence
  Synthetic oligonucleotide: FAS-3729
cggguccaccaacccgcgg

SEQ ID NO: 30600 - RNA, 20 nt, Artificial Sequence
  Synthetic oligonucleotide: FAS-1179
gcggguccaccaacccgcgg

SEQ ID NO: 30601 - RNA, 21 nt, Artificial Sequence
  Synthetic oligonucleotide: FAS-3730
agcggguccaccaacccgcgg

SEQ ID NO: 30602 - RNA, 22 nt, Artificial Sequence
  Synthetic oligonucleotide: FAS-3731
gagcggguccaccaacccgcgg

SEQ ID NO: 30603 - RNA, 23 nt, Artificial Sequence
  Synthetic oligonucleotide: FAS-3732
ugagcggguccaccaacccgcgg

SEQ ID NO: 30604 - RNA, 24 nt, Artificial Sequence
  Synthetic oligonucleotide: FAS-3733
cugagcggguccaccaacccgcgg

SEQ ID NO: 30605 - RNA, 18 nt, Artificial Sequence
  Synthetic oligonucleotide: FAS-3734
gccugcgcgcggguaggg

SEQ ID NO: 30606 - RNA, 19 nt, Artificial Sequence
  Synthetic oligonucleotide: FAS-3735
ggccugcgcgcggguaggg

SEQ ID NO: 30607 - RNA, 20 nt, Artificial Sequence
  Synthetic oligonucleotide: FAS-737
uggccugcgcgcggguaggg

SEQ ID NO: 30608 - RNA, 21 nt, Artificial Sequence
  Synthetic oligonucleotide: FAS-3736
uuggccugcgcgcggguaggg

SEQ ID NO: 30609 - RNA, 22 nt, Artificial Sequence
  Synthetic oligonucleotide: FAS-3737
cuuggccugcgcgcggguaggg

SEQ ID NO: 30610 - RNA, 23 nt, Artificial Sequence
  Synthetic oligonucleotide: FAS-3738
acuuggccugcgcgcggguaggg

SEQ ID NO: 30611 - RNA, 24 nt, Artificial Sequence
  Synthetic oligonucleotide: FAS-3739
aacuuggccugcgcgcggguaggg

SEQ ID NO: 30612 - RNA, 18 nt, Artificial Sequence
  Synthetic oligonucleotide: FAS-3740
gguaagccuccacccggg

SEQ ID NO: 30613 - RNA, 19 nt, Artificial Sequence
  Synthetic oligonucleotide: FAS-3741
ggguaagccuccacccggg

SEQ ID NO: 30614 - RNA, 20 nt, Artificial Sequence
  Synthetic oligonucleotide: FAS-1162
gggguaagccuccacccggg

SEQ ID NO: 30615 - RNA, 21 nt, Artificial Sequence
  Synthetic oligonucleotide: FAS-3742
cgggguaagccuccacccggg

SEQ ID NO: 30616 - RNA, 22 nt, Artificial Sequence
  Synthetic oligonucleotide: FAS-3743
acgggguaagccuccacccggg

SEQ ID NO: 30617 - RNA, 23 nt, Artificial Sequence
  Synthetic oligonucleotide: FAS-3744
gacgggguaagccuccacccggg

SEQ ID NO: 30618 - RNA, 24 nt, Artificial Sequence
  Synthetic oligonucleotide: FAS-3745
agacgggguaagccuccacccggg

SEQ ID NO: 30619 - RNA, 18 nt, Artificial Sequence
  Synthetic oligonucleotide: FAS-3746
cgcuggggaacgcccggg

SEQ ID NO: 30620 - RNA, 19 nt, Artificial Sequence
  Synthetic oligonucleotide: FAS-3747
ucgcuggggaacgcccggg

SEQ ID NO: 30621 - RNA, 20 nt, Artificial Sequence
  Synthetic oligonucleotide: FAS-1204
cucgcuggggaacgcccggg

SEQ ID NO: 30622 - RNA, 21 nt, Artificial Sequence
  Synthetic oligonucleotide: FAS-3748
ccucgcuggggaacgcccggg

SEQ ID NO: 30623 - RNA, 22 nt, Artificial Sequence
  Synthetic oligonucleotide: FAS-3749
gccucgcuggggaacgcccggg

SEQ ID NO: 30624 - RNA, 23 nt, Artificial Sequence
  Synthetic oligonucleotide: FAS-3750
agccucgcuggggaacgcccggg

SEQ ID NO: 30625 - RNA, 24 nt, Artificial Sequence
  Synthetic oligonucleotide: FAS-3751
aagccucgcuggggaacgcccggg

SEQ ID NO: 30626 - RNA, 18 nt, Artificial Sequence
  Synthetic oligonucleotide: FAS-3752
acuuggccugcgcgcggg

SEQ ID NO: 30627 - RNA, 19 nt, Artificial Sequence
  Synthetic oligonucleotide: FAS-3753
aacuuggccugcgcgcggg

SEQ ID NO: 30628 - RNA, 20 nt, Artificial Sequence
  Synthetic oligonucleotide: FAS-1210
caacuuggccugcgcgcggg

SEQ ID NO: 30629 - RNA, 21 nt, Artificial Sequence
  Synthetic oligonucleotide: FAS-3754
gcaacuuggccugcgcgcggg

SEQ ID NO: 30630 - RNA, 22 nt, Artificial Sequence
  Synthetic oligonucleotide: FAS-3755
agcaacuuggccugcgcgcggg

SEQ ID NO: 30631 - RNA, 23 nt, Artificial Sequence
  Synthetic oligonucleotide: FAS-3756
cagcaacuuggccugcgcgcggg

SEQ ID NO: 30632 - RNA, 24 nt, Artificial Sequence
  Synthetic oligonucleotide: FAS-3757
ucagcaacuuggccugcgcgcggg

SEQ ID NO: 30633 - RNA, 18 nt, Artificial Sequence
  Synthetic oligonucleotide: FAS-3758
cgcgcggguagggagggg

SEQ ID NO: 30634 - RNA, 19 nt, Artificial Sequence
  Synthetic oligonucleotide: FAS-3759
gcgcgcggguagggagggg

SEQ ID NO: 30635 - RNA, 20 nt, Artificial Sequence
  Synthetic oligonucleotide: FAS-1218
ugcgcgcggguagggagggg

SEQ ID NO: 30636 - RNA, 21 nt, Artificial Sequence
  Synthetic oligonucleotide: FAS-3760
cugcgcgcggguagggagggg

SEQ ID NO: 30637 - RNA, 22 nt, Artificial Sequence
  Synthetic oligonucleotide: FAS-3761
ccugcgcgcggguagggagggg

SEQ ID NO: 30638 - RNA, 23 nt, Artificial Sequence
  Synthetic oligonucleotide: FAS-3762
gccugcgcgcggguagggagggg

SEQ ID NO: 30639 - RNA, 24 nt, Artificial Sequence
  Synthetic oligonucleotide: FAS-3763
ggccugcgcgcggguagggagggg

SEQ ID NO: 30640 - RNA, 18 nt, Artificial Sequence
  Synthetic oligonucleotide: FAS-3764
gguggucaggaggauggg

SEQ ID NO: 30641 - RNA, 19 nt, Artificial Sequence
  Synthetic oligonucleotide: FAS-3765
cgguggucaggaggauggg

SEQ ID NO: 30642 - RNA, 20 nt, Artificial Sequence
  Synthetic oligonucleotide: FAS-1197
ccgguggucaggaggauggg

SEQ ID NO: 30643 - RNA, 21 nt, Artificial Sequence
  Synthetic oligonucleotide: FAS-3766
cccgguggucaggaggauggg

SEQ ID NO: 30644 - RNA, 22 nt, Artificial Sequence
  Synthetic oligonucleotide: FAS-3767
ccccgguggucaggaggauggg

SEQ ID NO: 30645 - RNA, 23 nt, Artificial Sequence
  Synthetic oligonucleotide: FAS-3768
gccccgguggucaggaggauggg

SEQ ID NO: 30646 - RNA, 24 nt, Artificial Sequence
  Synthetic oligonucleotide: FAS-3769
agccccgguggucaggaggauggg

SEQ ID NO: 30647 - RNA, 18 nt, Artificial Sequence
  Synthetic oligonucleotide: FAS-3770
gggaacgcccggguuggg

SEQ ID NO: 30648 - RNA, 19 nt, Artificial Sequence
  Synthetic oligonucleotide: FAS-3771
ggggaacgcccggguuggg

SEQ ID NO: 30649 - RNA, 20 nt, Artificial Sequence
  Synthetic oligonucleotide: FAS-1208
uggggaacgcccggguuggg

SEQ ID NO: 30650 - RNA, 21 nt, Artificial Sequence
  Synthetic oligonucleotide: FAS-3772
cuggggaacgcccggguuggg

SEQ ID NO: 30651 - RNA, 22 nt, Artificial Sequence
  Synthetic oligonucleotide: FAS-3773
gcuggggaacgcccggguuggg

SEQ ID NO: 30652 - RNA, 23 nt, Artificial Sequence
  Synthetic oligonucleotide: FAS-3774
cgcuggggaacgcccggguuggg

SEQ ID NO: 30653 - RNA, 24 nt, Artificial Sequence
  Synthetic oligonucleotide: FAS-3775
ucgcuggggaacgcccggguuggg

SEQ ID NO: 30654 - RNA, 18 nt, Artificial Sequence
  Synthetic oligonucleotide: FAS-3776
gggaaggaagccucgcug

SEQ ID NO: 30655 - RNA, 19 nt, Artificial Sequence
  Synthetic oligonucleotide: FAS-3777
ugggaaggaagccucgcug

SEQ ID NO: 30656 - RNA, 20 nt, Artificial Sequence
  Synthetic oligonucleotide: FAS-724
augggaaggaagccucgcug

SEQ ID NO: 30657 - RNA, 21 nt, Artificial Sequence
  Synthetic oligonucleotide: FAS-3778
gaugggaaggaagccucgcug

SEQ ID NO: 30658 - RNA, 22 nt, Artificial Sequence
  Synthetic oligonucleotide: FAS-3779
ggaugggaaggaagccucgcug

SEQ ID NO: 30659 - RNA, 23 nt, Artificial Sequence
  Synthetic oligonucleotide: FAS-3780
aggaugggaaggaagccucgcug

SEQ ID NO: 30660 - RNA, 24 nt, Artificial Sequence
  Synthetic oligonucleotide: FAS-3781
gaggaugggaaggaagccucgcug

SEQ ID NO: 30661 - RNA, 18 nt, Artificial Sequence
  Synthetic oligonucleotide: FAS-3782
gggggagaagucagggug

SEQ ID NO: 30662 - RNA, 19 nt, Artificial Sequence
  Synthetic oligonucleotide: FAS-3783
agggggagaagucagggug

SEQ ID NO: 30663 - RNA, 20 nt, Artificial Sequence
  Synthetic oligonucleotide: FAS-743
gagggggagaagucagggug

SEQ ID NO: 30664 - RNA, 21 nt, Artificial Sequence
  Synthetic oligonucleotide: FAS-3784
ggagggggagaagucagggug

SEQ ID NO: 30665 - RNA, 22 nt, Artificial Sequence
  Synthetic oligonucleotide: FAS-3785
gggagggggagaagucagggug

SEQ ID NO: 30666 - RNA, 23 nt, Artificial Sequence
  Synthetic oligonucleotide: FAS-3786
agggagggggagaagucagggug

SEQ ID NO: 30667 - RNA, 24 nt, Artificial Sequence
  Synthetic oligonucleotide: FAS-3787
uagggagggggagaagucagggug

SEQ ID NO: 30668 - RNA, 18 nt, Artificial Sequence
  Synthetic oligonucleotide: FAS-3788
aggagccuuggcuaauug

SEQ ID NO: 30669 - RNA, 19 nt, Artificial Sequence
  Synthetic oligonucleotide: FAS-3789
caggagccuuggcuaauug

SEQ ID NO: 30670 - RNA, 20 nt, Artificial Sequence
  Synthetic oligonucleotide: FAS-1251
acaggagccuuggcuaauug

SEQ ID NO: 30671 - RNA, 21 nt, Artificial Sequence
  Synthetic oligonucleotide: FAS-3790
uacaggagccuuggcuaauug

SEQ ID NO: 30672 - RNA, 22 nt, Artificial Sequence
  Synthetic oligonucleotide: FAS-3791
guacaggagccuuggcuaauug

SEQ ID NO: 30673 - RNA, 23 nt, Artificial Sequence
  Synthetic oligonucleotide: FAS-3792
gguacaggagccuuggcuaauug

SEQ ID NO: 30674 - RNA, 24 nt, Artificial Sequence
  Synthetic oligonucleotide: FAS-3793
ggguacaggagccuuggcuaauug

SEQ ID NO: 30675 - RNA, 18 nt, Artificial Sequence
  Synthetic oligonucleotide: FAS-3794
cacucagagaaagacuug

SEQ ID NO: 30676 - RNA, 19 nt, Artificial Sequence
  Synthetic oligonucleotide: FAS-3795
ucacucagagaaagacuug

SEQ ID NO: 30677 - RNA, 20 nt, Artificial Sequence
  Synthetic oligonucleotide: FAS-772
gucacucagagaaagacuug

SEQ ID NO: 30678 - RNA, 21 nt, Artificial Sequence
  Synthetic oligonucleotide: FAS-3796
agucacucagagaaagacuug

SEQ ID NO: 30679 - RNA, 22 nt, Artificial Sequence
  Synthetic oligonucleotide: FAS-3797
gagucacucagagaaagacuug

SEQ ID NO: 30680 - RNA, 23 nt, Artificial Sequence
  Synthetic oligonucleotide: FAS-3798
ggagucacucagagaaagacuug

SEQ ID NO: 30681 - RNA, 24 nt, Artificial Sequence
  Synthetic oligonucleotide: FAS-3799
uggagucacucagagaaagacuug

SEQ ID NO: 30682 - RNA, 18 nt, Artificial Sequence
  Synthetic oligonucleotide: FAS-3800
gaaguuggggaggucuug

SEQ ID NO: 30683 - RNA, 19 nt, Artificial Sequence
  Synthetic oligonucleotide: FAS-3801
ggaaguuggggaggucuug

SEQ ID NO: 30684 - RNA, 20 nt, Artificial Sequence
  Synthetic oligonucleotide: FAS-1241
gggaaguuggggaggucuug

SEQ ID NO: 30685 - RNA, 21 nt, Artificial Sequence
  Synthetic oligonucleotide: FAS-3802
ugggaaguuggggaggucuug

SEQ ID NO: 30686 - RNA, 22 nt, Artificial Sequence
  Synthetic oligonucleotide: FAS-3803
cugggaaguuggggaggucuug

SEQ ID NO: 30687 - RNA, 23 nt, Artificial Sequence
  Synthetic oligonucleotide: FAS-3804
ccugggaaguuggggaggucuug

SEQ ID NO: 30688 - RNA, 24 nt, Artificial Sequence
  Synthetic oligonucleotide: FAS-3805
accugggaaguuggggaggucuug

SEQ ID NO: 30689 - RNA, 18 nt, Artificial Sequence
  Synthetic oligonucleotide: FAS-3806
guucaaccugggaaguug

SEQ ID NO: 30690 - RNA, 19 nt, Artificial Sequence
  Synthetic oligonucleotide: FAS-3807
aguucaaccugggaaguug

SEQ ID NO: 30691 - RNA, 20 nt, Artificial Sequence
  Synthetic oligonucleotide: FAS-762
uaguucaaccugggaaguug

SEQ ID NO: 30692 - RNA, 21 nt, Artificial Sequence
  Synthetic oligonucleotide: FAS-3808
guaguucaaccugggaaguug

SEQ ID NO: 30693 - RNA, 22 nt, Artificial Sequence
  Synthetic oligonucleotide: FAS-3809
uguaguucaaccugggaaguug

SEQ ID NO: 30694 - RNA, 23 nt, Artificial Sequence
  Synthetic oligonucleotide: FAS-3810
cuguaguucaaccugggaaguug

SEQ ID NO: 30695 - RNA, 24 nt, Artificial Sequence
  Synthetic oligonucleotide: FAS-3811
gcuguaguucaaccugggaaguug

SEQ ID NO: 30696 - RNA, 18 nt, Artificial Sequence
  Synthetic oligonucleotide: FAS-3812
uggggaacgcccggguug

SEQ ID NO: 30697 - RNA, 19 nt, Artificial Sequence
  Synthetic oligonucleotide: FAS-3813
cuggggaacgcccggguug

SEQ ID NO: 30698 - RNA, 20 nt, Artificial Sequence
  Synthetic oligonucleotide: FAS-729
gcuggggaacgcccggguug

SEQ ID NO: 30699 - RNA, 21 nt, Artificial Sequence
  Synthetic oligonucleotide: FAS-3814
cgcuggggaacgcccggguug

SEQ ID NO: 30700 - RNA, 22 nt, Artificial Sequence
  Synthetic oligonucleotide: FAS-3815
ucgcuggggaacgcccggguug

SEQ ID NO: 30701 - RNA, 23 nt, Artificial Sequence
  Synthetic oligonucleotide: FAS-3816
cucgcuggggaacgcccggguug

SEQ ID NO: 30702 - RNA, 24 nt, Artificial Sequence
  Synthetic oligonucleotide: FAS-3817
ccucgcuggggaacgcccggguug

SEQ ID NO: 30703 - RNA, 18 nt, Artificial Sequence
  Synthetic oligonucleotide: FAS-2375
agaugcccagcaugguug

SEQ ID NO: 30704 - RNA, 19 nt, Artificial Sequence
  Synthetic oligonucleotide: FAS-2376
cagaugcccagcaugguug

SEQ ID NO: 30705 - RNA, 20 nt, Artificial Sequence
  Synthetic oligonucleotide: FAS-107
ccagaugcccagcaugguug

SEQ ID NO: 30706 - RNA, 21 nt, Artificial Sequence
  Synthetic oligonucleotide: FAS-2377
uccagaugcccagcaugguug

SEQ ID NO: 30707 - RNA, 22 nt, Artificial Sequence
  Synthetic oligonucleotide: FAS-2378
guccagaugcccagcaugguug

SEQ ID NO: 30708 - RNA, 23 nt, Artificial Sequence
  Synthetic oligonucleotide: FAS-2379
gguccagaugcccagcaugguug

SEQ ID NO: 30709 - RNA, 24 nt, Artificial Sequence
  Synthetic oligonucleotide: FAS-2380
ggguccagaugcccagcaugguug

SEQ ID NO: 30710 - RNA, 18 nt, Artificial Sequence
  Synthetic oligonucleotide: FAS-3818
auguuguggcugcaacau

SEQ ID NO: 30711 - RNA, 19 nt, Artificial Sequence
  Synthetic oligonucleotide: FAS-3819
cauguuguggcugcaacau

SEQ ID NO: 30712 - RNA, 20 nt, Artificial Sequence
  Synthetic oligonucleotide: FAS-1259
ccauguuguggcugcaacau

SEQ ID NO: 30713 - RNA, 21 nt, Artificial Sequence
  Synthetic oligonucleotide: FAS-3820
uccauguuguggcugcaacau

SEQ ID NO: 30714 - RNA, 22 nt, Artificial Sequence
  Synthetic oligonucleotide: FAS-3821
guccauguuguggcugcaacau

SEQ ID NO: 30715 - RNA, 23 nt, Artificial Sequence
  Synthetic oligonucleotide: FAS-3822
uguccauguuguggcugcaacau

SEQ ID NO: 30716 - RNA, 24 nt, Artificial Sequence
  Synthetic oligonucleotide: FAS-3823
cuguccauguuguggcugcaacau

SEQ ID NO: 30717 - RNA, 18 nt, Artificial Sequence
  Synthetic oligonucleotide: FAS-3824
gaauggacaguuaaccau

SEQ ID NO: 30718 - RNA, 19 nt, Artificial Sequence
  Synthetic oligonucleotide: FAS-3825
ggaauggacaguuaaccau

SEQ ID NO: 30719 - RNA, 20 nt, Artificial Sequence
  Synthetic oligonucleotide: FAS-1263
uggaauggacaguuaaccau

SEQ ID NO: 30720 - RNA, 21 nt, Artificial Sequence
  Synthetic oligonucleotide: FAS-3826
cuggaauggacaguuaaccau

SEQ ID NO: 30721 - RNA, 22 nt, Artificial Sequence
  Synthetic oligonucleotide: FAS-3827
ucuggaauggacaguuaaccau

SEQ ID NO: 30722 - RNA, 23 nt, Artificial Sequence
  Synthetic oligonucleotide: FAS-3828
uucuggaauggacaguuaaccau

SEQ ID NO: 30723 - RNA, 24 nt, Artificial Sequence
  Synthetic oligonucleotide: FAS-3829
uuucuggaauggacaguuaaccau

SEQ ID NO: 30724 - RNA, 18 nt, Artificial Sequence
  Synthetic oligonucleotide: FAS-3830
gucacucuugcgcgagau

SEQ ID NO: 30725 - RNA, 19 nt, Artificial Sequence
  Synthetic oligonucleotide: FAS-3831
ugucacucuugcgcgagau

SEQ ID NO: 30726 - RNA, 20 nt, Artificial Sequence
  Synthetic oligonucleotide: FAS-1188
gugucacucuugcgcgagau

SEQ ID NO: 30727 - RNA, 21 nt, Artificial Sequence
  Synthetic oligonucleotide: FAS-3832
ugugucacucuugcgcgagau

SEQ ID NO: 30728 - RNA, 22 nt, Artificial Sequence
  Synthetic oligonucleotide: FAS-3833
gugugucacucuugcgcgagau

SEQ ID NO: 30729 - RNA, 23 nt, Artificial Sequence
  Synthetic oligonucleotide: FAS-3834
ugugugucacucuugcgcgagau

SEQ ID NO: 30730 - RNA, 24 nt, Artificial Sequence
  Synthetic oligonucleotide: FAS-3835
cugugugucacucuugcgcgagau

SEQ ID NO: 30731 - RNA, 18 nt, Artificial Sequence
  Synthetic oligonucleotide: FAS-3836
cccgguggucaggaggau

SEQ ID NO: 30732 - RNA, 19 nt, Artificial Sequence
  Synthetic oligonucleotide: FAS-3837
ccccgguggucaggaggau

SEQ ID NO: 30733 - RNA, 20 nt, Artificial Sequence
  Synthetic oligonucleotide: FAS-720
gccccgguggucaggaggau

SEQ ID NO: 30734 - RNA, 21 nt, Artificial Sequence
  Synthetic oligonucleotide: FAS-3838
agccccgguggucaggaggau

SEQ ID NO: 30735 - RNA, 22 nt, Artificial Sequence
  Synthetic oligonucleotide: FAS-3839
aagccccgguggucaggaggau

SEQ ID NO: 30736 - RNA, 23 nt, Artificial Sequence
  Synthetic oligonucleotide: FAS-3840
aaagccccgguggucaggaggau

SEQ ID NO: 30737 - RNA, 24 nt, Artificial Sequence
  Synthetic oligonucleotide: FAS-3841
aaaagccccgguggucaggaggau

SEQ ID NO: 30738 - RNA, 18 nt, Artificial Sequence
  Synthetic oligonucleotide: FAS-3842
cuaauugcuggagucacu

SEQ ID NO: 30739 - RNA, 19 nt, Artificial Sequence
  Synthetic oligonucleotide: FAS-3843
gcuaauugcuggagucacu

SEQ ID NO: 30740 - RNA, 20 nt, Artificial Sequence
  Synthetic oligonucleotide: FAS-1253
ggcuaauugcuggagucacu

SEQ ID NO: 30741 - RNA, 21 nt, Artificial Sequence
  Synthetic oligonucleotide: FAS-3844
uggcuaauugcuggagucacu

SEQ ID NO: 30742 - RNA, 22 nt, Artificial Sequence
  Synthetic oligonucleotide: FAS-3845
uuggcuaauugcuggagucacu

SEQ ID NO: 30743 - RNA, 23 nt, Artificial Sequence
  Synthetic oligonucleotide: FAS-3846
cuuggcuaauugcuggagucacu

SEQ ID NO: 30744 - RNA, 24 nt, Artificial Sequence
  Synthetic oligonucleotide: FAS-3847
ccuuggcuaauugcuggagucacu

SEQ ID NO: 30745 - RNA, 18 nt, Artificial Sequence
  Synthetic oligonucleotide: FAS-3848
ucugcuguaguucaaccu

SEQ ID NO: 30746 - RNA, 19 nt, Artificial Sequence
  Synthetic oligonucleotide: FAS-3849
uucugcuguaguucaaccu

SEQ ID NO: 30747 - RNA, 20 nt, Artificial Sequence
  Synthetic oligonucleotide: FAS-759
cuucugcuguaguucaaccu

SEQ ID NO: 30748 - RNA, 21 nt, Artificial Sequence
  Synthetic oligonucleotide: FAS-3850
gcuucugcuguaguucaaccu

SEQ ID NO: 30749 - RNA, 22 nt, Artificial Sequence
  Synthetic oligonucleotide: FAS-3851
ggcuucugcuguaguucaaccu

SEQ ID NO: 30750 - RNA, 23 nt, Artificial Sequence
  Synthetic oligonucleotide: FAS-3852
aggcuucugcuguaguucaaccu

SEQ ID NO: 30751 - RNA, 24 nt, Artificial Sequence
  Synthetic oligonucleotide: FAS-3853
aaggcuucugcuguaguucaaccu

SEQ ID NO: 30752 - RNA, 18 nt, Artificial Sequence
  Synthetic oligonucleotide: FAS-2387
ugguuguugagcaauccu

SEQ ID NO: 30753 - RNA, 19 nt, Artificial Sequence
  Synthetic oligonucleotide: FAS-2388
augguuguugagcaauccu

SEQ ID NO: 30754 - RNA, 20 nt, Artificial Sequence
  Synthetic oligonucleotide: FAS-1171
caugguuguugagcaauccu

SEQ ID NO: 30755 - RNA, 21 nt, Artificial Sequence
  Synthetic oligonucleotide: FAS-2389
gcaugguuguugagcaauccu

SEQ ID NO: 30756 - RNA, 22 nt, Artificial Sequence
  Synthetic oligonucleotide: FAS-2390
agcaugguuguugagcaauccu

SEQ ID NO: 30757 - RNA, 23 nt, Artificial Sequence
  Synthetic oligonucleotide: FAS-2391
cagcaugguuguugagcaauccu

SEQ ID NO: 30758 - RNA, 24 nt, Artificial Sequence
  Synthetic oligonucleotide: FAS-2392
ccagcaugguuguugagcaauccu

SEQ ID NO: 30759 - RNA, 18 nt, Artificial Sequence
  Synthetic oligonucleotide: FAS-3854
uugaaggagaauggagcu

SEQ ID NO: 30760 - RNA, 19 nt, Artificial Sequence
  Synthetic oligonucleotide: FAS-3855
cuugaaggagaauggagcu

SEQ ID NO: 30761 - RNA, 20 nt, Artificial Sequence
  Synthetic oligonucleotide: FAS-1246
ucuugaaggagaauggagcu

SEQ ID NO: 30762 - RNA, 21 nt, Artificial Sequence
  Synthetic oligonucleotide: FAS-3856
gucuugaaggagaauggagcu

SEQ ID NO: 30763 - RNA, 22 nt, Artificial Sequence
  Synthetic oligonucleotide: FAS-3857
ggucuugaaggagaauggagcu

SEQ ID NO: 30764 - RNA, 23 nt, Artificial Sequence
  Synthetic oligonucleotide: FAS-3858
aggucuugaaggagaauggagcu

SEQ ID NO: 30765 - RNA, 24 nt, Artificial Sequence
  Synthetic oligonucleotide: FAS-3859
gaggucuugaaggagaauggagcu

SEQ ID NO: 30766 - RNA, 18 nt, Artificial Sequence
  Synthetic oligonucleotide: FAS-3860
ugggaaggaagccucgcu

SEQ ID NO: 30767 - RNA, 19 nt, Artificial Sequence
  Synthetic oligonucleotide: FAS-3861
augggaaggaagccucgcu

SEQ ID NO: 30768 - RNA, 20 nt, Artificial Sequence
  Synthetic oligonucleotide: FAS-723
gaugggaaggaagccucgcu

SEQ ID NO: 30769 - RNA, 21 nt, Artificial Sequence
  Synthetic oligonucleotide: FAS-3862
ggaugggaaggaagccucgcu

SEQ ID NO: 30770 - RNA, 22 nt, Artificial Sequence
  Synthetic oligonucleotide: FAS-3863
aggaugggaaggaagccucgcu

SEQ ID NO: 30771 - RNA, 23 nt, Artificial Sequence
  Synthetic oligonucleotide: FAS-3864
gaggaugggaaggaagccucgcu

SEQ ID NO: 30772 - RNA, 24 nt, Artificial Sequence
  Synthetic oligonucleotide: FAS-3865
ggaggaugggaaggaagccucgcu

SEQ ID NO: 30773 - RNA, 18 nt, Artificial Sequence
  Synthetic oligonucleotide: FAS-3866
auguugcgccauagggcu

SEQ ID NO: 30774 - RNA, 19 nt, Artificial Sequence
  Synthetic oligonucleotide: FAS-3867
gauguugcgccauagggcu

SEQ ID NO: 30775 - RNA, 20 nt, Artificial Sequence
  Synthetic oligonucleotide: FAS-1265
agauguugcgccauagggcu

SEQ ID NO: 30776 - RNA, 21 nt, Artificial Sequence
  Synthetic oligonucleotide: FAS-3868
cagauguugcgccauagggcu

SEQ ID NO: 30777 - RNA, 22 nt, Artificial Sequence
  Synthetic oligonucleotide: FAS-3869
acagauguugcgccauagggcu

SEQ ID NO: 30778 - RNA, 23 nt, Artificial Sequence
  Synthetic oligonucleotide: FAS-3870
uacagauguugcgccauagggcu

SEQ ID NO: 30779 - RNA, 24 nt, Artificial Sequence
  Synthetic oligonucleotide: FAS-3871
guacagauguugcgccauagggcu

SEQ ID NO: 30780 - RNA, 18 nt, Artificial Sequence
  Synthetic oligonucleotide: FAS-3872
cacuccccagaagcgucu

SEQ ID NO: 30781 - RNA, 19 nt, Artificial Sequence
  Synthetic oligonucleotide: FAS-3873
ucacuccccagaagcgucu

SEQ ID NO: 30782 - RNA, 20 nt, Artificial Sequence
  Synthetic oligonucleotide: FAS-1186
cucacuccccagaagcgucu

SEQ ID NO: 30783 - RNA, 21 nt, Artificial Sequence
  Synthetic oligonucleotide: FAS-3874
ccucacuccccagaagcgucu

SEQ ID NO: 30784 - RNA, 22 nt, Artificial Sequence
  Synthetic oligonucleotide: FAS-3875
cccucacuccccagaagcgucu

SEQ ID NO: 30785 - RNA, 23 nt, Artificial Sequence
  Synthetic oligonucleotide: FAS-3876
ucccucacuccccagaagcgucu

SEQ ID NO: 30786 - RNA, 24 nt, Artificial Sequence
  Synthetic oligonucleotide: FAS-3877
uucccucacuccccagaagcgucu

SEQ ID NO: 30787 - RNA, 18 nt, Artificial Sequence
  Synthetic oligonucleotide: FAS-3878
uaguucaaccugggaagu

SEQ ID NO: 30788 - RNA, 19 nt, Artificial Sequence
  Synthetic oligonucleotide: FAS-3879
guaguucaaccugggaagu

SEQ ID NO: 30789 - RNA, 20 nt, Artificial Sequence
  Synthetic oligonucleotide: FAS-760
uguaguucaaccugggaagu

SEQ ID NO: 30790 - RNA, 21 nt, Artificial Sequence
  Synthetic oligonucleotide: FAS-3880
cuguaguucaaccugggaagu

SEQ ID NO: 30791 - RNA, 22 nt, Artificial Sequence
  Synthetic oligonucleotide: FAS-3881
gcuguaguucaaccugggaagu

SEQ ID NO: 30792 - RNA, 23 nt, Artificial Sequence
  Synthetic oligonucleotide: FAS-3882
ugcuguaguucaaccugggaagu

SEQ ID NO: 30793 - RNA, 24 nt, Artificial Sequence
  Synthetic oligonucleotide: FAS-3883
cugcuguaguucaaccugggaagu

SEQ ID NO: 30794 - RNA, 18 nt, Artificial Sequence
  Synthetic oligonucleotide: FAS-3884
ggcaugcucacuucaggu

SEQ ID NO: 30795 - RNA, 19 nt, Artificial Sequence
  Synthetic oligonucleotide: FAS-3885
uggcaugcucacuucaggu

SEQ ID NO: 30796 - RNA, 20 nt, Artificial Sequence
  Synthetic oligonucleotide: FAS-1230
cuggcaugcucacuucaggu

SEQ ID NO: 30797 - RNA, 21 nt, Artificial Sequence
  Synthetic oligonucleotide: FAS-3886
gcuggcaugcucacuucaggu

SEQ ID NO: 30798 - RNA, 22 nt, Artificial Sequence
  Synthetic oligonucleotide: FAS-3887
ggcuggcaugcucacuucaggu

SEQ ID NO: 30799 - RNA, 23 nt, Artificial Sequence
  Synthetic oligonucleotide: FAS-3888
uggcuggcaugcucacuucaggu

SEQ ID NO: 30800 - RNA, 24 nt, Artificial Sequence
  Synthetic oligonucleotide: FAS-3889
guggcuggcaugcucacuucaggu

SEQ ID NO: 30801 - RNA, 18 nt, Artificial Sequence
  Synthetic oligonucleotide: FAS-2405
agagggcucaccagaggu

SEQ ID NO: 30802 - RNA, 19 nt, Artificial Sequence
  Synthetic oligonucleotide: FAS-2406
gagagggcucaccagaggu

SEQ ID NO: 30803 - RNA, 20 nt, Artificial Sequence
  Synthetic oligonucleotide: FAS-105
ggagagggcucaccagaggu

SEQ ID NO: 30804 - RNA, 21 nt, Artificial Sequence
  Synthetic oligonucleotide: FAS-2407
aggagagggcucaccagaggu

SEQ ID NO: 30805 - RNA, 22 nt, Artificial Sequence
  Synthetic oligonucleotide: FAS-2408
caggagagggcucaccagaggu

SEQ ID NO: 30806 - RNA, 23 nt, Artificial Sequence
  Synthetic oligonucleotide: FAS-2409
gcaggagagggcucaccagaggu

SEQ ID NO: 30807 - RNA, 24 nt, Artificial Sequence
  Synthetic oligonucleotide: FAS-2410
ggcaggagagggcucaccagaggu

SEQ ID NO: 30808 - RNA, 18 nt, Artificial Sequence
  Synthetic oligonucleotide: FAS-3890
agggggagaagucagggu

SEQ ID NO: 30809 - RNA, 19 nt, Artificial Sequence
  Synthetic oligonucleotide: FAS-3891
gagggggagaagucagggu

SEQ ID NO: 30810 - RNA, 20 nt, Artificial Sequence
  Synthetic oligonucleotide: FAS-1221
ggagggggagaagucagggu

SEQ ID NO: 30811 - RNA, 21 nt, Artificial Sequence
  Synthetic oligonucleotide: FAS-3892
gggagggggagaagucagggu

SEQ ID NO: 30812 - RNA, 22 nt, Artificial Sequence
  Synthetic oligonucleotide: FAS-3893
agggagggggagaagucagggu

SEQ ID NO: 30813 - RNA, 23 nt, Artificial Sequence
  Synthetic oligonucleotide: FAS-3894
uagggagggggagaagucagggu

SEQ ID NO: 30814 - RNA, 24 nt, Artificial Sequence
  Synthetic oligonucleotide: FAS-3895
guagggagggggagaagucagggu

SEQ ID NO: 30815 - RNA, 18 nt, Artificial Sequence
  Synthetic oligonucleotide: FAS-3896
gcuggggaacgcccgggu

SEQ ID NO: 30816 - RNA, 19 nt, Artificial Sequence
  Synthetic oligonucleotide: FAS-3897
cgcuggggaacgcccgggu

SEQ ID NO: 30817 - RNA, 20 nt, Artificial Sequence
  Synthetic oligonucleotide: FAS-727
ucgcuggggaacgcccgggu

SEQ ID NO: 30818 - RNA, 21 nt, Artificial Sequence
  Synthetic oligonucleotide: FAS-3898
cucgcuggggaacgcccgggu

SEQ ID NO: 30819 - RNA, 22 nt, Artificial Sequence
  Synthetic oligonucleotide: FAS-3899
ccucgcuggggaacgcccgggu

SEQ ID NO: 30820 - RNA, 23 nt, Artificial Sequence
  Synthetic oligonucleotide: FAS-3900
gccucgcuggggaacgcccgggu

SEQ ID NO: 30821 - RNA, 24 nt, Artificial Sequence
  Synthetic oligonucleotide: FAS-3901
agccucgcuggggaacgcccgggu

SEQ ID NO: 30822 - RNA, 18 nt, Artificial Sequence
  Synthetic oligonucleotide: FAS-3902
cuuggccugcgcgcgggu

SEQ ID NO: 30823 - RNA, 19 nt, Artificial Sequence
  Synthetic oligonucleotide: FAS-3903
acuuggccugcgcgcgggu

SEQ ID NO: 30824 - RNA, 20 nt, Artificial Sequence
  Synthetic oligonucleotide: FAS-735
aacuuggccugcgcgcgggu

SEQ ID NO: 30825 - RNA, 21 nt, Artificial Sequence
  Synthetic oligonucleotide: FAS-3904
caacuuggccugcgcgcgggu

SEQ ID NO: 30826 - RNA, 22 nt, Artificial Sequence
  Synthetic oligonucleotide: FAS-3905
gcaacuuggccugcgcgcgggu

SEQ ID NO: 30827 - RNA, 23 nt, Artificial Sequence
  Synthetic oligonucleotide: FAS-3906
agcaacuuggccugcgcgcgggu

SEQ ID NO: 30828 - RNA, 24 nt, Artificial Sequence
  Synthetic oligonucleotide: FAS-3907
cagcaacuuggccugcgcgcgggu

SEQ ID NO: 30829 - RNA, 18 nt, Artificial Sequence
  Synthetic oligonucleotide: FAS-3908
acgaaaagccccgguggu

SEQ ID NO: 30830 - RNA, 19 nt, Artificial Sequence
  Synthetic oligonucleotide: FAS-3909
cacgaaaagccccgguggu

SEQ ID NO: 30831 - RNA, 20 nt, Artificial Sequence
  Synthetic oligonucleotide: FAS-1191
ucacgaaaagccccgguggu

SEQ ID NO: 30832 - RNA, 21 nt, Artificial Sequence
  Synthetic oligonucleotide: FAS-3910
cucacgaaaagccccgguggu

SEQ ID NO: 30833 - RNA, 22 nt, Artificial Sequence
  Synthetic oligonucleotide: FAS-3911
gcucacgaaaagccccgguggu

SEQ ID NO: 30834 - RNA, 23 nt, Artificial Sequence
  Synthetic oligonucleotide: FAS-3912
agcucacgaaaagccccgguggu

SEQ ID NO: 30835 - RNA, 24 nt, Artificial Sequence
  Synthetic oligonucleotide: FAS-3913
gagcucacgaaaagccccgguggu

SEQ ID NO: 30836 - RNA, 18 nt, Artificial Sequence
  Synthetic oligonucleotide: FAS-3914
ucacucagagaaagacuu

SEQ ID NO: 30837 - RNA, 19 nt, Artificial Sequence
  Synthetic oligonucleotide: FAS-3915
gucacucagagaaagacuu

SEQ ID NO: 30838 - RNA, 20 nt, Artificial Sequence
  Synthetic oligonucleotide: FAS-1255
agucacucagagaaagacuu

SEQ ID NO: 30839 - RNA, 21 nt, Artificial Sequence
  Synthetic oligonucleotide: FAS-3916
gagucacucagagaaagacuu

SEQ ID NO: 30840 - RNA, 22 nt, Artificial Sequence
  Synthetic oligonucleotide: FAS-3917
ggagucacucagagaaagacuu

SEQ ID NO: 30841 - RNA, 23 nt, Artificial Sequence
  Synthetic oligonucleotide: FAS-3918
uggagucacucagagaaagacuu

SEQ ID NO: 30842 - RNA, 24 nt, Artificial Sequence
  Synthetic oligonucleotide: FAS-3919
cuggagucacucagagaaagacuu

SEQ ID NO: 30843 - RNA, 18 nt, Artificial Sequence
  Synthetic oligonucleotide: FAS-3920
aguucaaccugggaaguu

SEQ ID NO: 30844 - RNA, 19 nt, Artificial Sequence
  Synthetic oligonucleotide: FAS-3921
uaguucaaccugggaaguu

SEQ ID NO: 30845 - RNA, 20 nt, Artificial Sequence
  Synthetic oligonucleotide: FAS-761
guaguucaaccugggaaguu

SEQ ID NO: 30846 - RNA, 21 nt, Artificial Sequence
  Synthetic oligonucleotide: FAS-3922
uguaguucaaccugggaaguu

SEQ ID NO: 30847 - RNA, 22 nt, Artificial Sequence
  Synthetic oligonucleotide: FAS-3923
cuguaguucaaccugggaaguu

SEQ ID NO: 30848 - RNA, 23 nt, Artificial Sequence
  Synthetic oligonucleotide: FAS-3924
gcuguaguucaaccugggaaguu

SEQ ID NO: 30849 - RNA, 24 nt, Artificial Sequence
  Synthetic oligonucleotide: FAS-3925
ugcuguaguucaaccugggaaguu

SEQ ID NO: 30850 - RNA, 18 nt, Artificial Sequence
  Synthetic oligonucleotide: FAS-3926
cuggggaacgcccggguu

SEQ ID NO: 30851 - RNA, 19 nt, Artificial Sequence
  Synthetic oligonucleotide: FAS-3927
gcuggggaacgcccggguu

SEQ ID NO: 30852 - RNA, 20 nt, Artificial Sequence
  Synthetic oligonucleotide: FAS-728
cgcuggggaacgcccggguu

SEQ ID NO: 30853 - RNA, 21 nt, Artificial Sequence
  Synthetic oligonucleotide: FAS-3928
ucgcuggggaacgcccggguu

SEQ ID NO: 30854 - RNA, 22 nt, Artificial Sequence
  Synthetic oligonucleotide: FAS-3929
cucgcuggggaacgcccggguu

SEQ ID NO: 30855 - RNA, 23 nt, Artificial Sequence
  Synthetic oligonucleotide: FAS-3930
ccucgcuggggaacgcccggguu

SEQ ID NO: 30856 - RNA, 24 nt, Artificial Sequence
  Synthetic oligonucleotide: FAS-3931
gccucgcuggggaacgcccggguu

SEQ ID NO: 30857 - RNA, 18 nt, Artificial Sequence
  Synthetic oligonucleotide: FAS-3932
agaggcucacagacguuu

SEQ ID NO: 30858 - RNA, 19 nt, Artificial Sequence
  Synthetic oligonucleotide: FAS-3933
gagaggcucacagacguuu

SEQ ID NO: 30859 - RNA, 20 nt, Artificial Sequence
  Synthetic oligonucleotide: FAS-1260
ugagaggcucacagacguuu

SEQ ID NO: 30860 - RNA, 21 nt, Artificial Sequence
  Synthetic oligonucleotide: FAS-3934
augagaggcucacagacguuu

SEQ ID NO: 30861 - RNA, 22 nt, Artificial Sequence
  Synthetic oligonucleotide: FAS-3935
caugagaggcucacagacguuu

SEQ ID NO: 30862 - RNA, 23 nt, Artificial Sequence
  Synthetic oligonucleotide: FAS-3936
acaugagaggcucacagacguuu

SEQ ID NO: 30863 - RNA, 24 nt, Artificial Sequence
  Synthetic oligonucleotide: FAS-3937
aacaugagaggcucacagacguuu

SEQ ID NO: 30864 - RNA, 18 nt, Artificial Sequence
  Synthetic oligonucleotide: FAS-3938
gucccggggauaggcaaa

SEQ ID NO: 30865 - RNA, 19 nt, Artificial Sequence
  Synthetic oligonucleotide: FAS-3939
agucccggggauaggcaaa

SEQ ID NO: 30866 - RNA, 20 nt, Artificial Sequence
  Synthetic oligonucleotide: FAS-1057
uagucccggggauaggcaaa

SEQ ID NO: 30867 - RNA, 21 nt, Artificial Sequence
  Synthetic oligonucleotide: FAS-3940
uuagucccggggauaggcaaa

SEQ ID NO: 30868 - RNA, 22 nt, Artificial Sequence
  Synthetic oligonucleotide: FAS-3941
cuuagucccggggauaggcaaa

SEQ ID NO: 30869 - RNA, 23 nt, Artificial Sequence
  Synthetic oligonucleotide: FAS-3942
ucuuagucccggggauaggcaaa

SEQ ID NO: 30870 - RNA, 24 nt, Artificial Sequence
  Synthetic oligonucleotide: FAS-3943
gucuuagucccggggauaggcaaa

SEQ ID NO: 30871 - RNA, 18 nt, Artificial Sequence
  Synthetic oligonucleotide: FAS-3944
gccaaguugcugaaucaa

SEQ ID NO: 30872 - RNA, 19 nt, Artificial Sequence
  Synthetic oligonucleotide: FAS-3945
ggccaaguugcugaaucaa

SEQ ID NO: 30873 - RNA, 20 nt, Artificial Sequence
  Synthetic oligonucleotide: FAS-622
aggccaaguugcugaaucaa

SEQ ID NO: 30874 - RNA, 21 nt, Artificial Sequence
  Synthetic oligonucleotide: FAS-3946
caggccaaguugcugaaucaa

SEQ ID NO: 30875 - RNA, 22 nt, Artificial Sequence
  Synthetic oligonucleotide: FAS-3947
gcaggccaaguugcugaaucaa

SEQ ID NO: 30876 - RNA, 23 nt, Artificial Sequence
  Synthetic oligonucleotide: FAS-3948
cgcaggccaaguugcugaaucaa

SEQ ID NO: 30877 - RNA, 24 nt, Artificial Sequence
  Synthetic oligonucleotide: FAS-3949
gcgcaggccaaguugcugaaucaa

SEQ ID NO: 30878 - RNA, 18 nt, Artificial Sequence
  Synthetic oligonucleotide: FAS-3950
ucgagguccucaccugaa

SEQ ID NO: 30879 - RNA, 19 nt, Artificial Sequence
  Synthetic oligonucleotide: FAS-3951
cucgagguccucaccugaa

SEQ ID NO: 30880 - RNA, 20 nt, Artificial Sequence
  Synthetic oligonucleotide: FAS-1001
ucucgagguccucaccugaa

SEQ ID NO: 30881 - RNA, 21 nt, Artificial Sequence
  Synthetic oligonucleotide: FAS-3952
cucucgagguccucaccugaa

SEQ ID NO: 30882 - RNA, 22 nt, Artificial Sequence
  Synthetic oligonucleotide: FAS-3953
gcucucgagguccucaccugaa

SEQ ID NO: 30883 - RNA, 23 nt, Artificial Sequence
  Synthetic oligonucleotide: FAS-3954
ggcucucgagguccucaccugaa

SEQ ID NO: 30884 - RNA, 24 nt, Artificial Sequence
  Synthetic oligonucleotide: FAS-3955
cggcucucgagguccucaccugaa

SEQ ID NO: 30885 - RNA, 18 nt, Artificial Sequence
  Synthetic oligonucleotide: FAS-3956
uucccauccuccugacca

SEQ ID NO: 30886 - RNA, 19 nt, Artificial Sequence
  Synthetic oligonucleotide: FAS-3957
cuucccauccuccugacca

SEQ ID NO: 30887 - RNA, 20 nt, Artificial Sequence
  Synthetic oligonucleotide: FAS-1014
ccuucccauccuccugacca

SEQ ID NO: 30888 - RNA, 21 nt, Artificial Sequence
  Synthetic oligonucleotide: FAS-3958
uccuucccauccuccugacca

SEQ ID NO: 30889 - RNA, 22 nt, Artificial Sequence
  Synthetic oligonucleotide: FAS-3959
uuccuucccauccuccugacca

SEQ ID NO: 30890 - RNA, 23 nt, Artificial Sequence
  Synthetic oligonucleotide: FAS-3960
cuuccuucccauccuccugacca

SEQ ID NO: 30891 - RNA, 24 nt, Artificial Sequence
  Synthetic oligonucleotide: FAS-3961
gcuuccuucccauccuccugacca

SEQ ID NO: 30892 - RNA, 18 nt, Artificial Sequence
  Synthetic oligonucleotide: FAS-3962
caacccgggcguucccca

SEQ ID NO: 30893 - RNA, 19 nt, Artificial Sequence
  Synthetic oligonucleotide: FAS-3963
ccaacccgggcguucccca

SEQ ID NO: 30894 - RNA, 20 nt, Artificial Sequence
  Synthetic oligonucleotide: FAS-1013
cccaacccgggcguucccca

SEQ ID NO: 30895 - RNA, 21 nt, Artificial Sequence
  Synthetic oligonucleotide: FAS-3964
ccccaacccgggcguucccca

SEQ ID NO: 30896 - RNA, 22 nt, Artificial Sequence
  Synthetic oligonucleotide: FAS-3965
uccccaacccgggcguucccca

SEQ ID NO: 30897 - RNA, 23 nt, Artificial Sequence
  Synthetic oligonucleotide: FAS-3966
cuccccaacccgggcguucccca

SEQ ID NO: 30898 - RNA, 24 nt, Artificial Sequence
  Synthetic oligonucleotide: FAS-3967
ccuccccaacccgggcguucccca

SEQ ID NO: 30899 - RNA, 18 nt, Artificial Sequence
  Synthetic oligonucleotide: FAS-3968
caggggcgggcacuggca

SEQ ID NO: 30900 - RNA, 19 nt, Artificial Sequence
  Synthetic oligonucleotide: FAS-3969
ucaggggcgggcacuggca

SEQ ID NO: 30901 - RNA, 20 nt, Artificial Sequence
  Synthetic oligonucleotide: FAS-644
cucaggggcgggcacuggca

SEQ ID NO: 30902 - RNA, 21 nt, Artificial Sequence
  Synthetic oligonucleotide: FAS-3970
ccucaggggcgggcacuggca

SEQ ID NO: 30903 - RNA, 22 nt, Artificial Sequence
  Synthetic oligonucleotide: FAS-3971
gccucaggggcgggcacuggca

SEQ ID NO: 30904 - RNA, 23 nt, Artificial Sequence
  Synthetic oligonucleotide: FAS-3972
agccucaggggcgggcacuggca

SEQ ID NO: 30905 - RNA, 24 nt, Artificial Sequence
  Synthetic oligonucleotide: FAS-3973
gagccucaggggcgggcacuggca

SEQ ID NO: 30906 - RNA, 18 nt, Artificial Sequence
  Synthetic oligonucleotide: FAS-3974
ggaaugcccauuugugca

SEQ ID NO: 30907 - RNA, 19 nt, Artificial Sequence
  Synthetic oligonucleotide: FAS-3975
aggaaugcccauuugugca

SEQ ID NO: 30908 - RNA, 20 nt, Artificial Sequence
  Synthetic oligonucleotide: FAS-1008
caggaaugcccauuugugca

SEQ ID NO: 30909 - RNA, 21 nt, Artificial Sequence
  Synthetic oligonucleotide: FAS-3976
acaggaaugcccauuugugca

SEQ ID NO: 30910 - RNA, 22 nt, Artificial Sequence
  Synthetic oligonucleotide: FAS-3977
gacaggaaugcccauuugugca

SEQ ID NO: 30911 - RNA, 23 nt, Artificial Sequence
  Synthetic oligonucleotide: FAS-3978
ggacaggaaugcccauuugugca

SEQ ID NO: 30912 - RNA, 24 nt, Artificial Sequence
  Synthetic oligonucleotide: FAS-3979
gggacaggaaugcccauuugugca

SEQ ID NO: 30913 - RNA, 18 nt, Artificial Sequence
  Synthetic oligonucleotide: FAS-3980
ggccaaguugcugaauca

SEQ ID NO: 30914 - RNA, 19 nt, Artificial Sequence
  Synthetic oligonucleotide: FAS-3981
aggccaaguugcugaauca

SEQ ID NO: 30915 - RNA, 20 nt, Artificial Sequence
  Synthetic oligonucleotide: FAS-1010
caggccaaguugcugaauca

SEQ ID NO: 30916 - RNA, 21 nt, Artificial Sequence
  Synthetic oligonucleotide: FAS-3982
gcaggccaaguugcugaauca

SEQ ID NO: 30917 - RNA, 22 nt, Artificial Sequence
  Synthetic oligonucleotide: FAS-3983
cgcaggccaaguugcugaauca

SEQ ID NO: 30918 - RNA, 23 nt, Artificial Sequence
  Synthetic oligonucleotide: FAS-3984
gcgcaggccaaguugcugaauca

SEQ ID NO: 30919 - RNA, 24 nt, Artificial Sequence
  Synthetic oligonucleotide: FAS-3985
cgcgcaggccaaguugcugaauca

SEQ ID NO: 30920 - RNA, 18 nt, Artificial Sequence
  Synthetic oligonucleotide: FAS-3986
acagcagaagccuuuaga

SEQ ID NO: 30921 - RNA, 19 nt, Artificial Sequence
  Synthetic oligonucleotide: FAS-3987
uacagcagaagccuuuaga

SEQ ID NO: 30922 - RNA, 20 nt, Artificial Sequence
  Synthetic oligonucleotide: FAS-996
cuacagcagaagccuuuaga

SEQ ID NO: 30923 - RNA, 21 nt, Artificial Sequence
  Synthetic oligonucleotide: FAS-3988
acuacagcagaagccuuuaga

SEQ ID NO: 30924 - RNA, 22 nt, Artificial Sequence
  Synthetic oligonucleotide: FAS-3989
aacuacagcagaagccuuuaga

SEQ ID NO: 30925 - RNA, 23 nt, Artificial Sequence
  Synthetic oligonucleotide: FAS-3990
gaacuacagcagaagccuuuaga

SEQ ID NO: 30926 - RNA, 24 nt, Artificial Sequence
  Synthetic oligonucleotide: FAS-3991
ugaacuacagcagaagccuuuaga

SEQ ID NO: 30927 - RNA, 18 nt, Artificial Sequence
  Synthetic oligonucleotide: FAS-3992
ugcaggaacgccccggga

SEQ ID NO: 30928 - RNA, 19 nt, Artificial Sequence
  Synthetic oligonucleotide: FAS-3993
cugcaggaacgccccggga

SEQ ID NO: 30929 - RNA, 20 nt, Artificial Sequence
  Synthetic oligonucleotide: FAS-1006
acugcaggaacgccccggga

SEQ ID NO: 30930 - RNA, 21 nt, Artificial Sequence
  Synthetic oligonucleotide: FAS-3994
cacugcaggaacgccccggga

SEQ ID NO: 30931 - RNA, 22 nt, Artificial Sequence
  Synthetic oligonucleotide: FAS-3995
ccacugcaggaacgccccggga

SEQ ID NO: 30932 - RNA, 23 nt, Artificial Sequence
  Synthetic oligonucleotide: FAS-3996
gccacugcaggaacgccccggga

SEQ ID NO: 30933 - RNA, 24 nt, Artificial Sequence
  Synthetic oligonucleotide: FAS-3997
agccacugcaggaacgccccggga

SEQ ID NO: 30934 - RNA, 18 nt, Artificial Sequence
  Synthetic oligonucleotide: FAS-3998
caaagacgcuucugggga

SEQ ID NO: 30935 - RNA, 19 nt, Artificial Sequence
  Synthetic oligonucleotide: FAS-3999
ucaaagacgcuucugggga

SEQ ID NO: 30936 - RNA, 20 nt, Artificial Sequence
  Synthetic oligonucleotide: FAS-1022
uucaaagacgcuucugggga

SEQ ID NO: 30937 - RNA, 21 nt, Artificial Sequence
  Synthetic oligonucleotide: FAS-4000
guucaaagacgcuucugggga

SEQ ID NO: 30938 - RNA, 22 nt, Artificial Sequence
  Synthetic oligonucleotide: FAS-4001
uguucaaagacgcuucugggga

SEQ ID NO: 30939 - RNA, 23 nt, Artificial Sequence
  Synthetic oligonucleotide: FAS-4002
guguucaaagacgcuucugggga

SEQ ID NO: 30940 - RNA, 24 nt, Artificial Sequence
  Synthetic oligonucleotide: FAS-4003
gguguucaaagacgcuucugggga

SEQ ID NO: 30941 - RNA, 18 nt, Artificial Sequence
  Synthetic oligonucleotide: FAS-4004
gacgcuucuggggaguga

SEQ ID NO: 30942 - RNA, 19 nt, Artificial Sequence
  Synthetic oligonucleotide: FAS-4005
agacgcuucuggggaguga

SEQ ID NO: 30943 - RNA, 20 nt, Artificial Sequence
  Synthetic oligonucleotide: FAS-634
aagacgcuucuggggaguga

SEQ ID NO: 30944 - RNA, 21 nt, Artificial Sequence
  Synthetic oligonucleotide: FAS-4006
aaagacgcuucuggggaguga

SEQ ID NO: 30945 - RNA, 22 nt, Artificial Sequence
  Synthetic oligonucleotide: FAS-4007
caaagacgcuucuggggaguga

SEQ ID NO: 30946 - RNA, 23 nt, Artificial Sequence
  Synthetic oligonucleotide: FAS-4008
ucaaagacgcuucuggggaguga

SEQ ID NO: 30947 - RNA, 24 nt, Artificial Sequence
  Synthetic oligonucleotide: FAS-4009
uucaaagacgcuucuggggaguga

SEQ ID NO: 30948 - RNA, 18 nt, Artificial Sequence
  Synthetic oligonucleotide: FAS-4010
cuugagaaauaaaaacua

SEQ ID NO: 30949 - RNA, 19 nt, Artificial Sequence
  Synthetic oligonucleotide: FAS-4011
ucuugagaaauaaaaacua

SEQ ID NO: 30950 - RNA, 20 nt, Artificial Sequence
  Synthetic oligonucleotide: FAS-601
cucuugagaaauaaaaacua

SEQ ID NO: 30951 - RNA, 21 nt, Artificial Sequence
  Synthetic oligonucleotide: FAS-4012
ccucuugagaaauaaaaacua

SEQ ID NO: 30952 - RNA, 22 nt, Artificial Sequence
  Synthetic oligonucleotide: FAS-4013
uccucuugagaaauaaaaacua

SEQ ID NO: 30953 - RNA, 23 nt, Artificial Sequence
  Synthetic oligonucleotide: FAS-4014
uuccucuugagaaauaaaaacua

SEQ ID NO: 30954 - RNA, 24 nt, Artificial Sequence
  Synthetic oligonucleotide: FAS-4015
uuuccucuugagaaauaaaaacua

SEQ ID NO: 30955 - RNA, 18 nt, Artificial Sequence
  Synthetic oligonucleotide: FAS-4016
ucauguugcagccacaac

SEQ ID NO: 30956 - RNA, 19 nt, Artificial Sequence
  Synthetic oligonucleotide: FAS-4017
cucauguugcagccacaac

SEQ ID NO: 30957 - RNA, 20 nt, Artificial Sequence
  Synthetic oligonucleotide: FAS-989
ucucauguugcagccacaac

SEQ ID NO: 30958 - RNA, 21 nt, Artificial Sequence
  Synthetic oligonucleotide: FAS-4018
cucucauguugcagccacaac

SEQ ID NO: 30959 - RNA, 22 nt, Artificial Sequence
  Synthetic oligonucleotide: FAS-4019
ccucucauguugcagccacaac

SEQ ID NO: 30960 - RNA, 23 nt, Artificial Sequence
  Synthetic oligonucleotide: FAS-4020
gccucucauguugcagccacaac

SEQ ID NO: 30961 - RNA, 24 nt, Artificial Sequence
  Synthetic oligonucleotide: FAS-4021
agccucucauguugcagccacaac

SEQ ID NO: 30962 - RNA, 18 nt, Artificial Sequence
  Synthetic oligonucleotide: FAS-4022
aauggagcccuccccaac

SEQ ID NO: 30963 - RNA, 19 nt, Artificial Sequence
  Synthetic oligonucleotide: FAS-4023
caauggagcccuccccaac

SEQ ID NO: 30964 - RNA, 20 nt, Artificial Sequence
  Synthetic oligonucleotide: FAS-1012
ucaauggagcccuccccaac

SEQ ID NO: 30965 - RNA, 21 nt, Artificial Sequence
  Synthetic oligonucleotide: FAS-4024
aucaauggagcccuccccaac

SEQ ID NO: 30966 - RNA, 22 nt, Artificial Sequence
  Synthetic oligonucleotide: FAS-4025
aaucaauggagcccuccccaac

SEQ ID NO: 30967 - RNA, 23 nt, Artificial Sequence
  Synthetic oligonucleotide: FAS-4026
gaaucaauggagcccuccccaac

SEQ ID NO: 30968 - RNA, 24 nt, Artificial Sequence
  Synthetic oligonucleotide: FAS-4027
ugaaucaauggagcccuccccaac

SEQ ID NO: 30969 - RNA, 18 nt, Artificial Sequence
  Synthetic oligonucleotide: FAS-4028
ucccauccuccugaccac

SEQ ID NO: 30970 - RNA, 19 nt, Artificial Sequence
  Synthetic oligonucleotide: FAS-4029
uucccauccuccugaccac

SEQ ID NO: 30971 - RNA, 20 nt, Artificial Sequence
  Synthetic oligonucleotide: FAS-626
cuucccauccuccugaccac

SEQ ID NO: 30972 - RNA, 21 nt, Artificial Sequence
  Synthetic oligonucleotide: FAS-4030
ccuucccauccuccugaccac

SEQ ID NO: 30973 - RNA, 22 nt, Artificial Sequence
  Synthetic oligonucleotide: FAS-4031
uccuucccauccuccugaccac

SEQ ID NO: 30974 - RNA, 23 nt, Artificial Sequence
  Synthetic oligonucleotide: FAS-4032
uuccuucccauccuccugaccac

SEQ ID NO: 30975 - RNA, 24 nt, Artificial Sequence
  Synthetic oligonucleotide: FAS-4033
cuuccuucccauccuccugaccac

SEQ ID NO: 30976 - RNA, 18 nt, Artificial Sequence
  Synthetic oligonucleotide: FAS-4034
gcggcggcagcggcgcac

SEQ ID NO: 30977 - RNA, 19 nt, Artificial Sequence
  Synthetic oligonucleotide: FAS-4035
ugcggcggcagcggcgcac

SEQ ID NO: 30978 - RNA, 20 nt, Artificial Sequence
  Synthetic oligonucleotide: FAS-1064
uugcggcggcagcggcgcac

SEQ ID NO: 30979 - RNA, 21 nt, Artificial Sequence
  Synthetic oligonucleotide: FAS-4036
auugcggcggcagcggcgcac

SEQ ID NO: 30980 - RNA, 22 nt, Artificial Sequence
  Synthetic oligonucleotide: FAS-4037
gauugcggcggcagcggcgcac

SEQ ID NO: 30981 - RNA, 23 nt, Artificial Sequence
  Synthetic oligonucleotide: FAS-4038
ggauugcggcggcagcggcgcac

SEQ ID NO: 30982 - RNA, 24 nt, Artificial Sequence
  Synthetic oligonucleotide: FAS-4039
gggauugcggcggcagcggcgcac

SEQ ID NO: 30983 - RNA, 18 nt, Artificial Sequence
  Synthetic oligonucleotide: FAS-4040
agcggcgcacgcgggcac

SEQ ID NO: 30984 - RNA, 19 nt, Artificial Sequence
  Synthetic oligonucleotide: FAS-4041
cagcggcgcacgcgggcac

SEQ ID NO: 30985 - RNA, 20 nt, Artificial Sequence
  Synthetic oligonucleotide: FAS-1065
gcagcggcgcacgcgggcac

SEQ ID NO: 30986 - RNA, 21 nt, Artificial Sequence
  Synthetic oligonucleotide: FAS-4042
ggcagcggcgcacgcgggcac

SEQ ID NO: 30987 - RNA, 22 nt, Artificial Sequence
  Synthetic oligonucleotide: FAS-4043
cggcagcggcgcacgcgggcac

SEQ ID NO: 30988 - RNA, 23 nt, Artificial Sequence
  Synthetic oligonucleotide: FAS-4044
gcggcagcggcgcacgcgggcac

SEQ ID NO: 30989 - RNA, 24 nt, Artificial Sequence
  Synthetic oligonucleotide: FAS-4045
ggcggcagcggcgcacgcgggcac

SEQ ID NO: 30990 - RNA, 18 nt, Artificial Sequence
  Synthetic oligonucleotide: FAS-4046
ggcucucgagguccucac

SEQ ID NO: 30991 - RNA, 19 nt, Artificial Sequence
  Synthetic oligonucleotide: FAS-4047
cggcucucgagguccucac

SEQ ID NO: 30992 - RNA, 20 nt, Artificial Sequence
  Synthetic oligonucleotide: FAS-1000
ccggcucucgagguccucac

SEQ ID NO: 30993 - RNA, 21 nt, Artificial Sequence
  Synthetic oligonucleotide: FAS-4048
gccggcucucgagguccucac

SEQ ID NO: 30994 - RNA, 22 nt, Artificial Sequence
  Synthetic oligonucleotide: FAS-4049
ggccggcucucgagguccucac

SEQ ID NO: 30995 - RNA, 23 nt, Artificial Sequence
  Synthetic oligonucleotide: FAS-4050
aggccggcucucgagguccucac

SEQ ID NO: 30996 - RNA, 24 nt, Artificial Sequence
  Synthetic oligonucleotide: FAS-4051
gaggccggcucucgagguccucac

SEQ ID NO: 30997 - RNA, 18 nt, Artificial Sequence
  Synthetic oligonucleotide: FAS-4052
acuggcacggaacacacc

SEQ ID NO: 30998 - RNA, 19 nt, Artificial Sequence
  Synthetic oligonucleotide: FAS-4053
cacuggcacggaacacacc

SEQ ID NO: 30999 - RNA, 20 nt, Artificial Sequence
  Synthetic oligonucleotide: FAS-1034
gcacuggcacggaacacacc

SEQ ID NO: 31000 - RNA, 21 nt, Artificial Sequence
  Synthetic oligonucleotide: FAS-4054
ggcacuggcacggaacacacc

SEQ ID NO: 31001 - RNA, 22 nt, Artificial Sequence
  Synthetic oligonucleotide: FAS-4055
gggcacuggcacggaacacacc

SEQ ID NO: 31002 - RNA, 23 nt, Artificial Sequence
  Synthetic oligonucleotide: FAS-4056
cgggcacuggcacggaacacacc

SEQ ID NO: 31003 - RNA, 24 nt, Artificial Sequence
  Synthetic oligonucleotide: FAS-4057
gcgggcacuggcacggaacacacc

SEQ ID NO: 31004 - RNA, 18 nt, Artificial Sequence
  Synthetic oligonucleotide: FAS-4058
gcggcgcacgcgggcacc

SEQ ID NO: 31005 - RNA, 19 nt, Artificial Sequence
  Synthetic oligonucleotide: FAS-4059
agcggcgcacgcgggcacc

SEQ ID NO: 31006 - RNA, 20 nt, Artificial Sequence
  Synthetic oligonucleotide: FAS-685
cagcggcgcacgcgggcacc

SEQ ID NO: 31007 - RNA, 21 nt, Artificial Sequence
  Synthetic oligonucleotide: FAS-4060
gcagcggcgcacgcgggcacc

SEQ ID NO: 31008 - RNA, 22 nt, Artificial Sequence
  Synthetic oligonucleotide: FAS-4061
ggcagcggcgcacgcgggcacc

SEQ ID NO: 31009 - RNA, 23 nt, Artificial Sequence
  Synthetic oligonucleotide: FAS-4062
cggcagcggcgcacgcgggcacc

SEQ ID NO: 31010 - RNA, 24 nt, Artificial Sequence
  Synthetic oligonucleotide: FAS-4063
gcggcagcggcgcacgcgggcacc

SEQ ID NO: 31011 - RNA, 18 nt, Artificial Sequence
  Synthetic oligonucleotide: FAS-4064
gccacugcaggaacgccc

SEQ ID NO: 31012 - RNA, 19 nt, Artificial Sequence
  Synthetic oligonucleotide: FAS-4065
agccacugcaggaacgccc

SEQ ID NO: 31013 - RNA, 20 nt, Artificial Sequence
  Synthetic oligonucleotide: FAS-618
cagccacugcaggaacgccc

SEQ ID NO: 31014 - RNA, 21 nt, Artificial Sequence
  Synthetic oligonucleotide: FAS-4066
ccagccacugcaggaacgccc

SEQ ID NO: 31015 - RNA, 22 nt, Artificial Sequence
  Synthetic oligonucleotide: FAS-4067
gccagccacugcaggaacgccc

SEQ ID NO: 31016 - RNA, 23 nt, Artificial Sequence
  Synthetic oligonucleotide: FAS-4068
ugccagccacugcaggaacgccc

SEQ ID NO: 31017 - RNA, 24 nt, Artificial Sequence
  Synthetic oligonucleotide: FAS-4069
augccagccacugcaggaacgccc

SEQ ID NO: 31018 - RNA, 18 nt, Artificial Sequence
  Synthetic oligonucleotide: FAS-4070
agccacugcaggaacgcc

SEQ ID NO: 31019 - RNA, 19 nt, Artificial Sequence
  Synthetic oligonucleotide: FAS-4071
cagccacugcaggaacgcc

SEQ ID NO: 31020 - RNA, 20 nt, Artificial Sequence
  Synthetic oligonucleotide: FAS-1004
ccagccacugcaggaacgcc

SEQ ID NO: 31021 - RNA, 21 nt, Artificial Sequence
  Synthetic oligonucleotide: FAS-4072
gccagccacugcaggaacgcc

SEQ ID NO: 31022 - RNA, 22 nt, Artificial Sequence
  Synthetic oligonucleotide: FAS-4073
ugccagccacugcaggaacgcc

SEQ ID NO: 31023 - RNA, 23 nt, Artificial Sequence
  Synthetic oligonucleotide: FAS-4074
augccagccacugcaggaacgcc

SEQ ID NO: 31024 - RNA, 24 nt, Artificial Sequence
  Synthetic oligonucleotide: FAS-4075
caugccagccacugcaggaacgcc

SEQ ID NO: 31025 - RNA, 18 nt, Artificial Sequence
  Synthetic oligonucleotide: FAS-4076
cuuaccccgucuuagucc

SEQ ID NO: 31026 - RNA, 19 nt, Artificial Sequence
  Synthetic oligonucleotide: FAS-4077
gcuuaccccgucuuagucc

SEQ ID NO: 31027 - RNA, 20 nt, Artificial Sequence
  Synthetic oligonucleotide: FAS-667
ggcuuaccccgucuuagucc

SEQ ID NO: 31028 - RNA, 21 nt, Artificial Sequence
  Synthetic oligonucleotide: FAS-4078
aggcuuaccccgucuuagucc

SEQ ID NO: 31029 - RNA, 22 nt, Artificial Sequence
  Synthetic oligonucleotide: FAS-4079
gaggcuuaccccgucuuagucc

SEQ ID NO: 31030 - RNA, 23 nt, Artificial Sequence
  Synthetic oligonucleotide: FAS-4080
ggaggcuuaccccgucuuagucc

SEQ ID NO: 31031 - RNA, 24 nt, Artificial Sequence
  Synthetic oligonucleotide: FAS-4081
uggaggcuuaccccgucuuagucc

SEQ ID NO: 31032 - RNA, 18 nt, Artificial Sequence
  Synthetic oligonucleotide: FAS-4082
gugaauguuuaauauagc

SEQ ID NO: 31033 - RNA, 19 nt, Artificial Sequence
  Synthetic oligonucleotide: FAS-4083
ugugaauguuuaauauagc

SEQ ID NO: 31034 - RNA, 20 nt, Artificial Sequence
  Synthetic oligonucleotide: FAS-597
uugugaauguuuaauauagc

SEQ ID NO: 31035 - RNA, 21 nt, Artificial Sequence
  Synthetic oligonucleotide: FAS-4084
auugugaauguuuaauauagc

SEQ ID NO: 31036 - RNA, 22 nt, Artificial Sequence
  Synthetic oligonucleotide: FAS-4085
aauugugaauguuuaauauagc

SEQ ID NO: 31037 - RNA, 23 nt, Artificial Sequence
  Synthetic oligonucleotide: FAS-4086
uaauugugaauguuuaauauagc

SEQ ID NO: 31038 - RNA, 24 nt, Artificial Sequence
  Synthetic oligonucleotide: FAS-4087
guaauugugaauguuuaauauagc

SEQ ID NO: 31039 - RNA, 18 nt, Artificial Sequence
  Synthetic oligonucleotide: FAS-4088
gaagccuuuagaaagggc

SEQ ID NO: 31040 - RNA, 19 nt, Artificial Sequence
  Synthetic oligonucleotide: FAS-4089
agaagccuuuagaaagggc

SEQ ID NO: 31041 - RNA, 20 nt, Artificial Sequence
  Synthetic oligonucleotide: FAS-613
cagaagccuuuagaaagggc

SEQ ID NO: 31042 - RNA, 21 nt, Artificial Sequence
  Synthetic oligonucleotide: FAS-4090
gcagaagccuuuagaaagggc

SEQ ID NO: 31043 - RNA, 22 nt, Artificial Sequence
  Synthetic oligonucleotide: FAS-4091
agcagaagccuuuagaaagggc

SEQ ID NO: 31044 - RNA, 23 nt, Artificial Sequence
  Synthetic oligonucleotide: FAS-4092
cagcagaagccuuuagaaagggc

SEQ ID NO: 31045 - RNA, 24 nt, Artificial Sequence
  Synthetic oligonucleotide: FAS-4093
acagcagaagccuuuagaaagggc

SEQ ID NO: 31046 - RNA, 18 nt, Artificial Sequence
  Synthetic oligonucleotide: FAS-4094
aggcaaaguggggcgggc

SEQ ID NO: 31047 - RNA, 19 nt, Artificial Sequence
  Synthetic oligonucleotide: FAS-4095
uaggcaaaguggggcgggc

SEQ ID NO: 31048 - RNA, 20 nt, Artificial Sequence
  Synthetic oligonucleotide: FAS-1060
auaggcaaaguggggcgggc

SEQ ID NO: 31049 - RNA, 21 nt, Artificial Sequence
  Synthetic oligonucleotide: FAS-4096
gauaggcaaaguggggcgggc

SEQ ID NO: 31050 - RNA, 22 nt, Artificial Sequence
  Synthetic oligonucleotide: FAS-4097
ggauaggcaaaguggggcgggc

SEQ ID NO: 31051 - RNA, 23 nt, Artificial Sequence
  Synthetic oligonucleotide: FAS-4098
gggauaggcaaaguggggcgggc

SEQ ID NO: 31052 - RNA, 24 nt, Artificial Sequence
  Synthetic oligonucleotide: FAS-4099
ggggauaggcaaaguggggcgggc

SEQ ID NO: 31053 - RNA, 18 nt, Artificial Sequence
  Synthetic oligonucleotide: FAS-4100
ucaggggcgggcacuggc

SEQ ID NO: 31054 - RNA, 19 nt, Artificial Sequence
  Synthetic oligonucleotide: FAS-4101
cucaggggcgggcacuggc

SEQ ID NO: 31055 - RNA, 20 nt, Artificial Sequence
  Synthetic oligonucleotide: FAS-1032
ccucaggggcgggcacuggc

SEQ ID NO: 31056 - RNA, 21 nt, Artificial Sequence
  Synthetic oligonucleotide: FAS-4102
gccucaggggcgggcacuggc

SEQ ID NO: 31057 - RNA, 22 nt, Artificial Sequence
  Synthetic oligonucleotide: FAS-4103
agccucaggggcgggcacuggc

SEQ ID NO: 31058 - RNA, 23 nt, Artificial Sequence
  Synthetic oligonucleotide: FAS-4104
gagccucaggggcgggcacuggc

SEQ ID NO: 31059 - RNA, 24 nt, Artificial Sequence
  Synthetic oligonucleotide: FAS-4105
ggagccucaggggcgggcacuggc

SEQ ID NO: 31060 - RNA, 18 nt, Artificial Sequence
  Synthetic oligonucleotide: FAS-4106
guuuacgagugacuuggc

SEQ ID NO: 31061 - RNA, 19 nt, Artificial Sequence
  Synthetic oligonucleotide: FAS-4107
gguuuacgagugacuuggc

SEQ ID NO: 31062 - RNA, 20 nt, Artificial Sequence
  Synthetic oligonucleotide: FAS-637
cgguuuacgagugacuuggc

SEQ ID NO: 31063 - RNA, 21 nt, Artificial Sequence
  Synthetic oligonucleotide: FAS-4108
gcgguuuacgagugacuuggc

SEQ ID NO: 31064 - RNA, 22 nt, Artificial Sequence
  Synthetic oligonucleotide: FAS-4109
agcgguuuacgagugacuuggc

SEQ ID NO: 31065 - RNA, 23 nt, Artificial Sequence
  Synthetic oligonucleotide: FAS-4110
aagcgguuuacgagugacuuggc

SEQ ID NO: 31066 - RNA, 24 nt, Artificial Sequence
  Synthetic oligonucleotide: FAS-4111
gaagcgguuuacgagugacuuggc

SEQ ID NO: 31067 - RNA, 18 nt, Artificial Sequence
  Synthetic oligonucleotide: FAS-4112
gagcaugccagccacugc

SEQ ID NO: 31068 - RNA, 19 nt, Artificial Sequence
  Synthetic oligonucleotide: FAS-4113
ugagcaugccagccacugc

SEQ ID NO: 31069 - RNA, 20 nt, Artificial Sequence
  Synthetic oligonucleotide: FAS-617
gugagcaugccagccacugc

SEQ ID NO: 31070 - RNA, 21 nt, Artificial Sequence
  Synthetic oligonucleotide: FAS-4114
agugagcaugccagccacugc

SEQ ID NO: 31071 - RNA, 22 nt, Artificial Sequence
  Synthetic oligonucleotide: FAS-4115
aagugagcaugccagccacugc

SEQ ID NO: 31072 - RNA, 23 nt, Artificial Sequence
  Synthetic oligonucleotide: FAS-4116
gaagugagcaugccagccacugc

SEQ ID NO: 31073 - RNA, 24 nt, Artificial Sequence
  Synthetic oligonucleotide: FAS-4117
ugaagugagcaugccagccacugc

SEQ ID NO: 31074 - RNA, 18 nt, Artificial Sequence
  Synthetic oligonucleotide: FAS-4118
ugacuuggcuggagccuc

SEQ ID NO: 31075 - RNA, 19 nt, Artificial Sequence
  Synthetic oligonucleotide: FAS-4119
gugacuuggcuggagccuc

SEQ ID NO: 31076 - RNA, 20 nt, Artificial Sequence
  Synthetic oligonucleotide: FAS-638
agugacuuggcuggagccuc

SEQ ID NO: 31077 - RNA, 21 nt, Artificial Sequence
  Synthetic oligonucleotide: FAS-4120
gagugacuuggcuggagccuc

SEQ ID NO: 31078 - RNA, 22 nt, Artificial Sequence
  Synthetic oligonucleotide: FAS-4121
cgagugacuuggcuggagccuc

SEQ ID NO: 31079 - RNA, 23 nt, Artificial Sequence
  Synthetic oligonucleotide: FAS-4122
acgagugacuuggcuggagccuc

SEQ ID NO: 31080 - RNA, 24 nt, Artificial Sequence
  Synthetic oligonucleotide: FAS-4123
uacgagugacuuggcuggagccuc

SEQ ID NO: 31081 - RNA, 18 nt, Artificial Sequence
  Synthetic oligonucleotide: FAS-4124
guuagcuuuguuuuccuc

SEQ ID NO: 31082 - RNA, 19 nt, Artificial Sequence
  Synthetic oligonucleotide: FAS-4125
uguuagcuuuguuuuccuc

SEQ ID NO: 31083 - RNA, 20 nt, Artificial Sequence
  Synthetic oligonucleotide: FAS-982
uuguuagcuuuguuuuccuc

SEQ ID NO: 31084 - RNA, 21 nt, Artificial Sequence
  Synthetic oligonucleotide: FAS-4126
guuguuagcuuuguuuuccuc

SEQ ID NO: 31085 - RNA, 22 nt, Artificial Sequence
  Synthetic oligonucleotide: FAS-4127
aguuguuagcuuuguuuuccuc

SEQ ID NO: 31086 - RNA, 23 nt, Artificial Sequence
  Synthetic oligonucleotide: FAS-4128
aaguuguuagcuuuguuuuccuc

SEQ ID NO: 31087 - RNA, 24 nt, Artificial Sequence
  Synthetic oligonucleotide: FAS-4129
uaaguuguuagcuuuguuuuccuc

SEQ ID NO: 31088 - RNA, 18 nt, Artificial Sequence
  Synthetic oligonucleotide: FAS-4130
agggcaggaggccggcuc

SEQ ID NO: 31089 - RNA, 19 nt, Artificial Sequence
  Synthetic oligonucleotide: FAS-4131
aagggcaggaggccggcuc

SEQ ID NO: 31090 - RNA, 20 nt, Artificial Sequence
  Synthetic oligonucleotide: FAS-999
aaagggcaggaggccggcuc

SEQ ID NO: 31091 - RNA, 21 nt, Artificial Sequence
  Synthetic oligonucleotide: FAS-4132
gaaagggcaggaggccggcuc

SEQ ID NO: 31092 - RNA, 22 nt, Artificial Sequence
  Synthetic oligonucleotide: FAS-4133
agaaagggcaggaggccggcuc

SEQ ID NO: 31093 - RNA, 23 nt, Artificial Sequence
  Synthetic oligonucleotide: FAS-4134
uagaaagggcaggaggccggcuc

SEQ ID NO: 31094 - RNA, 24 nt, Artificial Sequence
  Synthetic oligonucleotide: FAS-4135
uuagaaagggcaggaggccggcuc

SEQ ID NO: 31095 - RNA, 18 nt, Artificial Sequence
  Synthetic oligonucleotide: FAS-4136
gcuuaccccgucuuaguc

SEQ ID NO: 31096 - RNA, 19 nt, Artificial Sequence
  Synthetic oligonucleotide: FAS-4137
ggcuuaccccgucuuaguc

SEQ ID NO: 31097 - RNA, 20 nt, Artificial Sequence
  Synthetic oligonucleotide: FAS-1054
aggcuuaccccgucuuaguc

SEQ ID NO: 31098 - RNA, 21 nt, Artificial Sequence
  Synthetic oligonucleotide: FAS-4138
gaggcuuaccccgucuuaguc

SEQ ID NO: 31099 - RNA, 22 nt, Artificial Sequence
  Synthetic oligonucleotide: FAS-4139
ggaggcuuaccccgucuuaguc

SEQ ID NO: 31100 - RNA, 23 nt, Artificial Sequence
  Synthetic oligonucleotide: FAS-4140
uggaggcuuaccccgucuuaguc

SEQ ID NO: 31101 - RNA, 24 nt, Artificial Sequence
  Synthetic oligonucleotide: FAS-4141
guggaggcuuaccccgucuuaguc

SEQ ID NO: 31102 - RNA, 18 nt, Artificial Sequence
  Synthetic oligonucleotide: FAS-4142
augguuaacuguccauuc

SEQ ID NO: 31103 - RNA, 19 nt, Artificial Sequence
  Synthetic oligonucleotide: FAS-4143
uaugguuaacuguccauuc

SEQ ID NO: 31104 - RNA, 20 nt, Artificial Sequence
  Synthetic oligonucleotide: FAS-987
auaugguuaacuguccauuc

SEQ ID NO: 31105 - RNA, 21 nt, Artificial Sequence
  Synthetic oligonucleotide: FAS-4144
cauaugguuaacuguccauuc

SEQ ID NO: 31106 - RNA, 22 nt, Artificial Sequence
  Synthetic oligonucleotide: FAS-4145
ucauaugguuaacuguccauuc

SEQ ID NO: 31107 - RNA, 23 nt, Artificial Sequence
  Synthetic oligonucleotide: FAS-4146
uucauaugguuaacuguccauuc

SEQ ID NO: 31108 - RNA, 24 nt, Artificial Sequence
  Synthetic oligonucleotide: FAS-4147
uuucauaugguuaacuguccauuc

SEQ ID NO: 31109 - RNA, 18 nt, Artificial Sequence
  Synthetic oligonucleotide: FAS-4148
gguguucaaagacgcuuc

SEQ ID NO: 31110 - RNA, 19 nt, Artificial Sequence
  Synthetic oligonucleotide: FAS-4149
agguguucaaagacgcuuc

SEQ ID NO: 31111 - RNA, 20 nt, Artificial Sequence
  Synthetic oligonucleotide: FAS-630
cagguguucaaagacgcuuc

SEQ ID NO: 31112 - RNA, 21 nt, Artificial Sequence
  Synthetic oligonucleotide: FAS-4150
acagguguucaaagacgcuuc

SEQ ID NO: 31113 - RNA, 22 nt, Artificial Sequence
  Synthetic oligonucleotide: FAS-4151
cacagguguucaaagacgcuuc

SEQ ID NO: 31114 - RNA, 23 nt, Artificial Sequence
  Synthetic oligonucleotide: FAS-4152
acacagguguucaaagacgcuuc

SEQ ID NO: 31115 - RNA, 24 nt, Artificial Sequence
  Synthetic oligonucleotide: FAS-4153
cacacagguguucaaagacgcuuc

SEQ ID NO: 31116 - RNA, 18 nt, Artificial Sequence
  Synthetic oligonucleotide: FAS-4154
ugaccaccggggcuuuuc

SEQ ID NO: 31117 - RNA, 19 nt, Artificial Sequence
  Synthetic oligonucleotide: FAS-4155
cugaccaccggggcuuuuc

SEQ ID NO: 31118 - RNA, 20 nt, Artificial Sequence
  Synthetic oligonucleotide: FAS-1016
ccugaccaccggggcuuuuc

SEQ ID NO: 31119 - RNA, 21 nt, Artificial Sequence
  Synthetic oligonucleotide: FAS-4156
uccugaccaccggggcuuuuc

SEQ ID NO: 31120 - RNA, 22 nt, Artificial Sequence
  Synthetic oligonucleotide: FAS-4157
cuccugaccaccggggcuuuuc

SEQ ID NO: 31121 - RNA, 23 nt, Artificial Sequence
  Synthetic oligonucleotide: FAS-4158
ccuccugaccaccggggcuuuuc

SEQ ID NO: 31122 - RNA, 24 nt, Artificial Sequence
  Synthetic oligonucleotide: FAS-4159
uccuccugaccaccggggcuuuuc

SEQ ID NO: 31123 - RNA, 18 nt, Artificial Sequence
  Synthetic oligonucleotide: FAS-4160
ucccggggauaggcaaag

SEQ ID NO: 31124 - RNA, 19 nt, Artificial Sequence
  Synthetic oligonucleotide: FAS-4161
gucccggggauaggcaaag

SEQ ID NO: 31125 - RNA, 20 nt, Artificial Sequence
  Synthetic oligonucleotide: FAS-671
agucccggggauaggcaaag

SEQ ID NO: 31126 - RNA, 21 nt, Artificial Sequence
  Synthetic oligonucleotide: FAS-4162
uagucccggggauaggcaaag

SEQ ID NO: 31127 - RNA, 22 nt, Artificial Sequence
  Synthetic oligonucleotide: FAS-4163
uuagucccggggauaggcaaag

SEQ ID NO: 31128 - RNA, 23 nt, Artificial Sequence
  Synthetic oligonucleotide: FAS-4164
cuuagucccggggauaggcaaag

SEQ ID NO: 31129 - RNA, 24 nt, Artificial Sequence
  Synthetic oligonucleotide: FAS-4165
ucuuagucccggggauaggcaaag

SEQ ID NO: 31130 - RNA, 18 nt, Artificial Sequence
  Synthetic oligonucleotide: FAS-4166
ucccagguugaacuacag

SEQ ID NO: 31131 - RNA, 19 nt, Artificial Sequence
  Synthetic oligonucleotide: FAS-4167
uucccagguugaacuacag

SEQ ID NO: 31132 - RNA, 20 nt, Artificial Sequence
  Synthetic oligonucleotide: FAS-994
cuucccagguugaacuacag

SEQ ID NO: 31133 - RNA, 21 nt, Artificial Sequence
  Synthetic oligonucleotide: FAS-4168
acuucccagguugaacuacag

SEQ ID NO: 31134 - RNA, 22 nt, Artificial Sequence
  Synthetic oligonucleotide: FAS-4169
aacuucccagguugaacuacag

SEQ ID NO: 31135 - RNA, 23 nt, Artificial Sequence
  Synthetic oligonucleotide: FAS-4170
caacuucccagguugaacuacag

SEQ ID NO: 31136 - RNA, 24 nt, Artificial Sequence
  Synthetic oligonucleotide: FAS-4171
ccaacuucccagguugaacuacag

SEQ ID NO: 31137 - RNA, 18 nt, Artificial Sequence
  Synthetic oligonucleotide: FAS-4172
ccagcccuggcugcccag

SEQ ID NO: 31138 - RNA, 19 nt, Artificial Sequence
  Synthetic oligonucleotide: FAS-4173
gccagcccuggcugcccag

SEQ ID NO: 31139 - RNA, 20 nt, Artificial Sequence
  Synthetic oligonucleotide: FAS-1035
ggccagcccuggcugcccag

SEQ ID NO: 31140 - RNA, 21 nt, Artificial Sequence
  Synthetic oligonucleotide: FAS-4174
aggccagcccuggcugcccag

SEQ ID NO: 31141 - RNA, 22 nt, Artificial Sequence
  Synthetic oligonucleotide: FAS-4175
gaggccagcccuggcugcccag

SEQ ID NO: 31142 - RNA, 23 nt, Artificial Sequence
  Synthetic oligonucleotide: FAS-4176
ugaggccagcccuggcugcccag

SEQ ID NO: 31143 - RNA, 24 nt, Artificial Sequence
  Synthetic oligonucleotide: FAS-4177
cugaggccagcccuggcugcccag

SEQ ID NO: 31144 - RNA, 18 nt, Artificial Sequence
  Synthetic oligonucleotide: FAS-4178
gacccgcucaguacggag

SEQ ID NO: 31145 - RNA, 19 nt, Artificial Sequence
  Synthetic oligonucleotide: FAS-4179
ggacccgcucaguacggag

SEQ ID NO: 31146 - RNA, 20 nt, Artificial Sequence
  Synthetic oligonucleotide: FAS-1041
uggacccgcucaguacggag

SEQ ID NO: 31147 - RNA, 21 nt, Artificial Sequence
  Synthetic oligonucleotide: FAS-4180
guggacccgcucaguacggag

SEQ ID NO: 31148 - RNA, 22 nt, Artificial Sequence
  Synthetic oligonucleotide: FAS-4181
gguggacccgcucaguacggag

SEQ ID NO: 31149 - RNA, 23 nt, Artificial Sequence
  Synthetic oligonucleotide: FAS-4182
ugguggacccgcucaguacggag

SEQ ID NO: 31150 - RNA, 24 nt, Artificial Sequence
  Synthetic oligonucleotide: FAS-4183
uugguggacccgcucaguacggag

SEQ ID NO: 31151 - RNA, 18 nt, Artificial Sequence
  Synthetic oligonucleotide: FAS-4184
ugugaauguuuaauauag

SEQ ID NO: 31152 - RNA, 19 nt, Artificial Sequence
  Synthetic oligonucleotide: FAS-4185
uugugaauguuuaauauag

SEQ ID NO: 31153 - RNA, 20 nt, Artificial Sequence
  Synthetic oligonucleotide: FAS-980
auugugaauguuuaauauag

SEQ ID NO: 31154 - RNA, 21 nt, Artificial Sequence
  Synthetic oligonucleotide: FAS-4186
aauugugaauguuuaauauag

SEQ ID NO: 31155 - RNA, 22 nt, Artificial Sequence
  Synthetic oligonucleotide: FAS-4187
uaauugugaauguuuaauauag

SEQ ID NO: 31156 - RNA, 23 nt, Artificial Sequence
  Synthetic oligonucleotide: FAS-4188
guaauugugaauguuuaauauag

SEQ ID NO: 31157 - RNA, 24 nt, Artificial Sequence
  Synthetic oligonucleotide: FAS-4189
aguaauugugaauguuuaauauag

SEQ ID NO: 31158 - RNA, 18 nt, Artificial Sequence
  Synthetic oligonucleotide: FAS-4190
ggcaaaguggggcgggcg

SEQ ID NO: 31159 - RNA, 19 nt, Artificial Sequence
  Synthetic oligonucleotide: FAS-4191
aggcaaaguggggcgggcg

SEQ ID NO: 31160 - RNA, 20 nt, Artificial Sequence
  Synthetic oligonucleotide: FAS-676
uaggcaaaguggggcgggcg

SEQ ID NO: 31161 - RNA, 21 nt, Artificial Sequence
  Synthetic oligonucleotide: FAS-4192
auaggcaaaguggggcgggcg

SEQ ID NO: 31162 - RNA, 22 nt, Artificial Sequence
  Synthetic oligonucleotide: FAS-4193
gauaggcaaaguggggcgggcg

SEQ ID NO: 31163 - RNA, 23 nt, Artificial Sequence
  Synthetic oligonucleotide: FAS-4194
ggauaggcaaaguggggcgggcg

SEQ ID NO: 31164 - RNA, 24 nt, Artificial Sequence
  Synthetic oligonucleotide: FAS-4195
gggauaggcaaaguggggcgggcg

SEQ ID NO: 31165 - RNA, 18 nt, Artificial Sequence
  Synthetic oligonucleotide: FAS-4196
aaggcuccuguacccagg

SEQ ID NO: 31166 - RNA, 19 nt, Artificial Sequence
  Synthetic oligonucleotide: FAS-4197
caaggcuccuguacccagg

SEQ ID NO: 31167 - RNA, 20 nt, Artificial Sequence
  Synthetic oligonucleotide: FAS-991
ccaaggcuccuguacccagg

SEQ ID NO: 31168 - RNA, 21 nt, Artificial Sequence
  Synthetic oligonucleotide: FAS-4198
gccaaggcuccuguacccagg

SEQ ID NO: 31169 - RNA, 22 nt, Artificial Sequence
  Synthetic oligonucleotide: FAS-4199
agccaaggcuccuguacccagg

SEQ ID NO: 31170 - RNA, 23 nt, Artificial Sequence
  Synthetic oligonucleotide: FAS-4200
uagccaaggcuccuguacccagg

SEQ ID NO: 31171 - RNA, 24 nt, Artificial Sequence
  Synthetic oligonucleotide: FAS-4201
uuagccaaggcuccuguacccagg

SEQ ID NO: 31172 - RNA, 18 nt, Artificial Sequence
  Synthetic oligonucleotide: FAS-4202
cagcccuggcugcccagg

SEQ ID NO: 31173 - RNA, 19 nt, Artificial Sequence
  Synthetic oligonucleotide: FAS-4203
ccagcccuggcugcccagg

SEQ ID NO: 31174 - RNA, 20 nt, Artificial Sequence
  Synthetic oligonucleotide: FAS-648
gccagcccuggcugcccagg

SEQ ID NO: 31175 - RNA, 21 nt, Artificial Sequence
  Synthetic oligonucleotide: FAS-4204
ggccagcccuggcugcccagg

SEQ ID NO: 31176 - RNA, 22 nt, Artificial Sequence
  Synthetic oligonucleotide: FAS-4205
aggccagcccuggcugcccagg

SEQ ID NO: 31177 - RNA, 23 nt, Artificial Sequence
  Synthetic oligonucleotide: FAS-4206
gaggccagcccuggcugcccagg

SEQ ID NO: 31178 - RNA, 24 nt, Artificial Sequence
  Synthetic oligonucleotide: FAS-4207
ugaggccagcccuggcugcccagg

SEQ ID NO: 31179 - RNA, 18 nt, Artificial Sequence
  Synthetic oligonucleotide: FAS-4208
ccuccccaacuucccagg

SEQ ID NO: 31180 - RNA, 19 nt, Artificial Sequence
  Synthetic oligonucleotide: FAS-4209
accuccccaacuucccagg

SEQ ID NO: 31181 - RNA, 20 nt, Artificial Sequence
  Synthetic oligonucleotide: FAS-993
gaccuccccaacuucccagg

SEQ ID NO: 31182 - RNA, 21 nt, Artificial Sequence
  Synthetic oligonucleotide: FAS-4210
agaccuccccaacuucccagg

SEQ ID NO: 31183 - RNA, 22 nt, Artificial Sequence
  Synthetic oligonucleotide: FAS-4211
aagaccuccccaacuucccagg

SEQ ID NO: 31184 - RNA, 23 nt, Artificial Sequence
  Synthetic oligonucleotide: FAS-4212
caagaccuccccaacuucccagg

SEQ ID NO: 31185 - RNA, 24 nt, Artificial Sequence
  Synthetic oligonucleotide: FAS-4213
ucaagaccuccccaacuucccagg

SEQ ID NO: 31186 - RNA, 18 nt, Artificial Sequence
  Synthetic oligonucleotide: FAS-2587
gagcccucuccugcccgg

SEQ ID NO: 31187 - RNA, 19 nt, Artificial Sequence
  Synthetic oligonucleotide: FAS-2588
ugagcccucuccugcccgg

SEQ ID NO: 31188 - RNA, 20 nt, Artificial Sequence
  Synthetic oligonucleotide: FAS-1052
gugagcccucuccugcccgg

SEQ ID NO: 31189 - RNA, 21 nt, Artificial Sequence
  Synthetic oligonucleotide: FAS-2589
ggugagcccucuccugcccgg

SEQ ID NO: 31190 - RNA, 22 nt, Artificial Sequence
  Synthetic oligonucleotide: FAS-2590
uggugagcccucuccugcccgg

SEQ ID NO: 31191 - RNA, 23 nt, Artificial Sequence
  Synthetic oligonucleotide: FAS-2591
cuggugagcccucuccugcccgg

SEQ ID NO: 31192 - RNA, 24 nt, Artificial Sequence
  Synthetic oligonucleotide: FAS-2592
ucuggugagcccucuccugcccgg

SEQ ID NO: 31193 - RNA, 18 nt, Artificial Sequence
  Synthetic oligonucleotide: FAS-4214
agaagccuuuagaaaggg

SEQ ID NO: 31194 - RNA, 19 nt, Artificial Sequence
  Synthetic oligonucleotide: FAS-4215
cagaagccuuuagaaaggg

SEQ ID NO: 31195 - RNA, 20 nt, Artificial Sequence
  Synthetic oligonucleotide: FAS-997
gcagaagccuuuagaaaggg

SEQ ID NO: 31196 - RNA, 21 nt, Artificial Sequence
  Synthetic oligonucleotide: FAS-4216
agcagaagccuuuagaaaggg

SEQ ID NO: 31197 - RNA, 22 nt, Artificial Sequence
  Synthetic oligonucleotide: FAS-4217
cagcagaagccuuuagaaaggg

SEQ ID NO: 31198 - RNA, 23 nt, Artificial Sequence
  Synthetic oligonucleotide: FAS-4218
acagcagaagccuuuagaaaggg

SEQ ID NO: 31199 - RNA, 24 nt, Artificial Sequence
  Synthetic oligonucleotide: FAS-4219
uacagcagaagccuuuagaaaggg

SEQ ID NO: 31200 - RNA, 18 nt, Artificial Sequence
  Synthetic oligonucleotide: FAS-4220
uuggcuggagccucaggg

SEQ ID NO: 31201 - RNA, 19 nt, Artificial Sequence
  Synthetic oligonucleotide: FAS-4221
cuuggcuggagccucaggg

SEQ ID NO: 31202 - RNA, 20 nt, Artificial Sequence
  Synthetic oligonucleotide: FAS-1031
acuuggcuggagccucaggg

SEQ ID NO: 31203 - RNA, 21 nt, Artificial Sequence
  Synthetic oligonucleotide: FAS-4222
gacuuggcuggagccucaggg

SEQ ID NO: 31204 - RNA, 22 nt, Artificial Sequence
  Synthetic oligonucleotide: FAS-4223
ugacuuggcuggagccucaggg

SEQ ID NO: 31205 - RNA, 23 nt, Artificial Sequence
  Synthetic oligonucleotide: FAS-4224
gugacuuggcuggagccucaggg

SEQ ID NO: 31206 - RNA, 24 nt, Artificial Sequence
  Synthetic oligonucleotide: FAS-4225
agugacuuggcuggagccucaggg

SEQ ID NO: 31207 - RNA, 18 nt, Artificial Sequence
  Synthetic oligonucleotide: FAS-2599
agcccucuccugcccggg

SEQ ID NO: 31208 - RNA, 19 nt, Artificial Sequence
  Synthetic oligonucleotide: FAS-2600
gagcccucuccugcccggg

SEQ ID NO: 31209 - RNA, 20 nt, Artificial Sequence
  Synthetic oligonucleotide: FAS-665
ugagcccucuccugcccggg

SEQ ID NO: 31210 - RNA, 21 nt, Artificial Sequence
  Synthetic oligonucleotide: FAS-2601
gugagcccucuccugcccggg

SEQ ID NO: 31211 - RNA, 22 nt, Artificial Sequence
  Synthetic oligonucleotide: FAS-2602
ggugagcccucuccugcccggg

SEQ ID NO: 31212 - RNA, 23 nt, Artificial Sequence
  Synthetic oligonucleotide: FAS-2603
uggugagcccucuccugcccggg

SEQ ID NO: 31213 - RNA, 24 nt, Artificial Sequence
  Synthetic oligonucleotide: FAS-2604
cuggugagcccucuccugcccggg

SEQ ID NO: 31214 - RNA, 18 nt, Artificial Sequence
  Synthetic oligonucleotide: FAS-4226
ggggauaggcaaaguggg

SEQ ID NO: 31215 - RNA, 19 nt, Artificial Sequence
  Synthetic oligonucleotide: FAS-4227
cggggauaggcaaaguggg

SEQ ID NO: 31216 - RNA, 20 nt, Artificial Sequence
  Synthetic oligonucleotide: FAS-1059
ccggggauaggcaaaguggg

SEQ ID NO: 31217 - RNA, 21 nt, Artificial Sequence
  Synthetic oligonucleotide: FAS-4228
cccggggauaggcaaaguggg

SEQ ID NO: 31218 - RNA, 22 nt, Artificial Sequence
  Synthetic oligonucleotide: FAS-4229
ucccggggauaggcaaaguggg

SEQ ID NO: 31219 - RNA, 23 nt, Artificial Sequence
  Synthetic oligonucleotide: FAS-4230
gucccggggauaggcaaaguggg

SEQ ID NO: 31220 - RNA, 24 nt, Artificial Sequence
  Synthetic oligonucleotide: FAS-4231
agucccggggauaggcaaaguggg

SEQ ID NO: 31221 - RNA, 18 nt, Artificial Sequence
  Synthetic oligonucleotide: FAS-4232
gguuuacgagugacuugg

SEQ ID NO: 31222 - RNA, 19 nt, Artificial Sequence
  Synthetic oligonucleotide: FAS-4233
cgguuuacgagugacuugg

SEQ ID NO: 31223 - RNA, 20 nt, Artificial Sequence
  Synthetic oligonucleotide: FAS-1027
gcgguuuacgagugacuugg

SEQ ID NO: 31224 - RNA, 21 nt, Artificial Sequence
  Synthetic oligonucleotide: FAS-4234
agcgguuuacgagugacuugg

SEQ ID NO: 31225 - RNA, 22 nt, Artificial Sequence
  Synthetic oligonucleotide: FAS-4235
aagcgguuuacgagugacuugg

SEQ ID NO: 31226 - RNA, 23 nt, Artificial Sequence
  Synthetic oligonucleotide: FAS-4236
gaagcgguuuacgagugacuugg

SEQ ID NO: 31227 - RNA, 24 nt, Artificial Sequence
  Synthetic oligonucleotide: FAS-4237
ggaagcgguuuacgagugacuugg

SEQ ID NO: 31228 - RNA, 18 nt, Artificial Sequence
  Synthetic oligonucleotide: FAS-2617
gauugcucaacaaccaug

SEQ ID NO: 31229 - RNA, 19 nt, Artificial Sequence
  Synthetic oligonucleotide: FAS-2618
ggauugcucaacaaccaug

SEQ ID NO: 31230 - RNA, 20 nt, Artificial Sequence
  Synthetic oligonucleotide: FAS-1048
aggauugcucaacaaccaug

SEQ ID NO: 31231 - RNA, 21 nt, Artificial Sequence
  Synthetic oligonucleotide: FAS-2619
gaggauugcucaacaaccaug

SEQ ID NO: 31232 - RNA, 22 nt, Artificial Sequence
  Synthetic oligonucleotide: FAS-2620
ggaggauugcucaacaaccaug

SEQ ID NO: 31233 - RNA, 23 nt, Artificial Sequence
  Synthetic oligonucleotide: FAS-2621
cggaggauugcucaacaaccaug

SEQ ID NO: 31234 - RNA, 24 nt, Artificial Sequence
  Synthetic oligonucleotide: FAS-2622
ucggaggauugcucaacaaccaug

SEQ ID NO: 31235 - RNA, 18 nt, Artificial Sequence
  Synthetic oligonucleotide: FAS-4238
ugagcaugccagccacug

SEQ ID NO: 31236 - RNA, 19 nt, Artificial Sequence
  Synthetic oligonucleotide: FAS-4239
gugagcaugccagccacug

SEQ ID NO: 31237 - RNA, 20 nt, Artificial Sequence
  Synthetic oligonucleotide: FAS-1002
agugagcaugccagccacug

SEQ ID NO: 31238 - RNA, 21 nt, Artificial Sequence
  Synthetic oligonucleotide: FAS-4240
aagugagcaugccagccacug

SEQ ID NO: 31239 - RNA, 22 nt, Artificial Sequence
  Synthetic oligonucleotide: FAS-4241
gaagugagcaugccagccacug

SEQ ID NO: 31240 - RNA, 23 nt, Artificial Sequence
  Synthetic oligonucleotide: FAS-4242
ugaagugagcaugccagccacug

SEQ ID NO: 31241 - RNA, 24 nt, Artificial Sequence
  Synthetic oligonucleotide: FAS-4243
cugaagugagcaugccagccacug

SEQ ID NO: 31242 - RNA, 18 nt, Artificial Sequence
  Synthetic oligonucleotide: FAS-2629
uggacccuccuaccucug

SEQ ID NO: 31243 - RNA, 19 nt, Artificial Sequence
  Synthetic oligonucleotide: FAS-2630
cuggacccuccuaccucug

SEQ ID NO: 31244 - RNA, 20 nt, Artificial Sequence
  Synthetic oligonucleotide: FAS-100
ucuggacccuccuaccucug

SEQ ID NO: 31245 - RNA, 21 nt, Artificial Sequence
  Synthetic oligonucleotide: FAS-2631
aucuggacccuccuaccucug

SEQ ID NO: 31246 - RNA, 22 nt, Artificial Sequence
  Synthetic oligonucleotide: FAS-2632
caucuggacccuccuaccucug

SEQ ID NO: 31247 - RNA, 23 nt, Artificial Sequence
  Synthetic oligonucleotide: FAS-2633
gcaucuggacccuccuaccucug

SEQ ID NO: 31248 - RNA, 24 nt, Artificial Sequence
  Synthetic oligonucleotide: FAS-2634
ggcaucuggacccuccuaccucug

SEQ ID NO: 31249 - RNA, 18 nt, Artificial Sequence
  Synthetic oligonucleotide: FAS-4244
agacgcuucuggggagug

SEQ ID NO: 31250 - RNA, 19 nt, Artificial Sequence
  Synthetic oligonucleotide: FAS-4245
aagacgcuucuggggagug

SEQ ID NO: 31251 - RNA, 20 nt, Artificial Sequence
  Synthetic oligonucleotide: FAS-633
aaagacgcuucuggggagug

SEQ ID NO: 31252 - RNA, 21 nt, Artificial Sequence
  Synthetic oligonucleotide: FAS-4246
caaagacgcuucuggggagug

SEQ ID NO: 31253 - RNA, 22 nt, Artificial Sequence
  Synthetic oligonucleotide: FAS-4247
ucaaagacgcuucuggggagug

SEQ ID NO: 31254 - RNA, 23 nt, Artificial Sequence
  Synthetic oligonucleotide: FAS-4248
uucaaagacgcuucuggggagug

SEQ ID NO: 31255 - RNA, 24 nt, Artificial Sequence
  Synthetic oligonucleotide: FAS-4249
guucaaagacgcuucuggggagug

SEQ ID NO: 31256 - RNA, 18 nt, Artificial Sequence
  Synthetic oligonucleotide: FAS-4250
ccgcucaguacggaguug

SEQ ID NO: 31257 - RNA, 19 nt, Artificial Sequence
  Synthetic oligonucleotide: FAS-4251
cccgcucaguacggaguug

SEQ ID NO: 31258 - RNA, 20 nt, Artificial Sequence
  Synthetic oligonucleotide: FAS-656
acccgcucaguacggaguug

SEQ ID NO: 31259 - RNA, 21 nt, Artificial Sequence
  Synthetic oligonucleotide: FAS-4252
gacccgcucaguacggaguug

SEQ ID NO: 31260 - RNA, 22 nt, Artificial Sequence
  Synthetic oligonucleotide: FAS-4253
ggacccgcucaguacggaguug

SEQ ID NO: 31261 - RNA, 23 nt, Artificial Sequence
  Synthetic oligonucleotide: FAS-4254
uggacccgcucaguacggaguug

SEQ ID NO: 31262 - RNA, 24 nt, Artificial Sequence
  Synthetic oligonucleotide: FAS-4255
guggacccgcucaguacggaguug

SEQ ID NO: 31263 - RNA, 18 nt, Artificial Sequence
  Synthetic oligonucleotide: FAS-4256
cucuucucccgcggguug

SEQ ID NO: 31264 - RNA, 19 nt, Artificial Sequence
  Synthetic oligonucleotide: FAS-4257
ccucuucucccgcggguug

SEQ ID NO: 31265 - RNA, 20 nt, Artificial Sequence
  Synthetic oligonucleotide: FAS-1038
gccucuucucccgcggguug

SEQ ID NO: 31266 - RNA, 21 nt, Artificial Sequence
  Synthetic oligonucleotide: FAS-4258
ugccucuucucccgcggguug

SEQ ID NO: 31267 - RNA, 22 nt, Artificial Sequence
  Synthetic oligonucleotide: FAS-4259
cugccucuucucccgcggguug

SEQ ID NO: 31268 - RNA, 23 nt, Artificial Sequence
  Synthetic oligonucleotide: FAS-4260
gcugccucuucucccgcggguug

SEQ ID NO: 31269 - RNA, 24 nt, Artificial Sequence
  Synthetic oligonucleotide: FAS-4261
agcugccucuucucccgcggguug

SEQ ID NO: 31270 - RNA, 18 nt, Artificial Sequence
  Synthetic oligonucleotide: FAS-2647
aacaaccaugcugggcau

SEQ ID NO: 31271 - RNA, 19 nt, Artificial Sequence
  Synthetic oligonucleotide: FAS-2648
caacaaccaugcugggcau

SEQ ID NO: 31272 - RNA, 20 nt, Artificial Sequence
  Synthetic oligonucleotide: FAS-99
ucaacaaccaugcugggcau

SEQ ID NO: 31273 - RNA, 21 nt, Artificial Sequence
  Synthetic oligonucleotide: FAS-2649
cucaacaaccaugcugggcau

SEQ ID NO: 31274 - RNA, 22 nt, Artificial Sequence
  Synthetic oligonucleotide: FAS-2650
gcucaacaaccaugcugggcau

SEQ ID NO: 31275 - RNA, 23 nt, Artificial Sequence
  Synthetic oligonucleotide: FAS-2651
ugcucaacaaccaugcugggcau

SEQ ID NO: 31276 - RNA, 24 nt, Artificial Sequence
  Synthetic oligonucleotide: FAS-2652
uugcucaacaaccaugcugggcau

SEQ ID NO: 31277 - RNA, 18 nt, Artificial Sequence
  Synthetic oligonucleotide: FAS-4262
ucuugagaaauaaaaacu

SEQ ID NO: 31278 - RNA, 19 nt, Artificial Sequence
  Synthetic oligonucleotide: FAS-4263
cucuugagaaauaaaaacu

SEQ ID NO: 31279 - RNA, 20 nt, Artificial Sequence
  Synthetic oligonucleotide: FAS-984
ccucuugagaaauaaaaacu

SEQ ID NO: 31280 - RNA, 21 nt, Artificial Sequence
  Synthetic oligonucleotide: FAS-4264
uccucuugagaaauaaaaacu

SEQ ID NO: 31281 - RNA, 22 nt, Artificial Sequence
  Synthetic oligonucleotide: FAS-4265
uuccucuugagaaauaaaaacu

SEQ ID NO: 31282 - RNA, 23 nt, Artificial Sequence
  Synthetic oligonucleotide: FAS-4266
uuuccucuugagaaauaaaaacu

SEQ ID NO: 31283 - RNA, 24 nt, Artificial Sequence
  Synthetic oligonucleotide: FAS-4267
uuuuccucuugagaaauaaaaacu

SEQ ID NO: 31284 - RNA, 18 nt, Artificial Sequence
  Synthetic oligonucleotide: FAS-4268
uggggaagcucuuucacu

SEQ ID NO: 31285 - RNA, 19 nt, Artificial Sequence
  Synthetic oligonucleotide: FAS-4269
uuggggaagcucuuucacu

SEQ ID NO: 31286 - RNA, 20 nt, Artificial Sequence
  Synthetic oligonucleotide: FAS-1045
guuggggaagcucuuucacu

SEQ ID NO: 31287 - RNA, 21 nt, Artificial Sequence
  Synthetic oligonucleotide: FAS-4270
aguuggggaagcucuuucacu

SEQ ID NO: 31288 - RNA, 22 nt, Artificial Sequence
  Synthetic oligonucleotide: FAS-4271
gaguuggggaagcucuuucacu

SEQ ID NO: 31289 - RNA, 23 nt, Artificial Sequence
  Synthetic oligonucleotide: FAS-4272
ggaguuggggaagcucuuucacu

SEQ ID NO: 31290 - RNA, 24 nt, Artificial Sequence
  Synthetic oligonucleotide: FAS-4273
cggaguuggggaagcucuuucacu

SEQ ID NO: 31291 - RNA, 18 nt, Artificial Sequence
  Synthetic oligonucleotide: FAS-4274
cggcgcacgcgggcaccu

SEQ ID NO: 31292 - RNA, 19 nt, Artificial Sequence
  Synthetic oligonucleotide: FAS-4275
gcggcgcacgcgggcaccu

SEQ ID NO: 31293 - RNA, 20 nt, Artificial Sequence
  Synthetic oligonucleotide: FAS-686
agcggcgcacgcgggcaccu

SEQ ID NO: 31294 - RNA, 21 nt, Artificial Sequence
  Synthetic oligonucleotide: FAS-4276
cagcggcgcacgcgggcaccu

SEQ ID NO: 31295 - RNA, 22 nt, Artificial Sequence
  Synthetic oligonucleotide: FAS-4277
gcagcggcgcacgcgggcaccu

SEQ ID NO: 31296 - RNA, 23 nt, Artificial Sequence
  Synthetic oligonucleotide: FAS-4278
ggcagcggcgcacgcgggcaccu

SEQ ID NO: 31297 - RNA, 24 nt, Artificial Sequence
  Synthetic oligonucleotide: FAS-4279
cggcagcggcgcacgcgggcaccu

SEQ ID NO: 31298 - RNA, 18 nt, Artificial Sequence
  Synthetic oligonucleotide: FAS-4280
gugacuuggcuggagccu

SEQ ID NO: 31299 - RNA, 19 nt, Artificial Sequence
  Synthetic oligonucleotide: FAS-4281
agugacuuggcuggagccu

SEQ ID NO: 31300 - RNA, 20 nt, Artificial Sequence
  Synthetic oligonucleotide: FAS-1029
gagugacuuggcuggagccu

SEQ ID NO: 31301 - RNA, 21 nt, Artificial Sequence
  Synthetic oligonucleotide: FAS-4282
cgagugacuuggcuggagccu

SEQ ID NO: 31302 - RNA, 22 nt, Artificial Sequence
  Synthetic oligonucleotide: FAS-4283
acgagugacuuggcuggagccu

SEQ ID NO: 31303 - RNA, 23 nt, Artificial Sequence
  Synthetic oligonucleotide: FAS-4284
uacgagugacuuggcuggagccu

SEQ ID NO: 31304 - RNA, 24 nt, Artificial Sequence
  Synthetic oligonucleotide: FAS-4285
uuacgagugacuuggcuggagccu

SEQ ID NO: 31305 - RNA, 18 nt, Artificial Sequence
  Synthetic oligonucleotide: FAS-4286
aggcaggaccucugcgcu

SEQ ID NO: 31306 - RNA, 19 nt, Artificial Sequence
  Synthetic oligonucleotide: FAS-4287
caggcaggaccucugcgcu

SEQ ID NO: 31307 - RNA, 20 nt, Artificial Sequence
  Synthetic oligonucleotide: FAS-992
ccaggcaggaccucugcgcu

SEQ ID NO: 31308 - RNA, 21 nt, Artificial Sequence
  Synthetic oligonucleotide: FAS-4288
cccaggcaggaccucugcgcu

SEQ ID NO: 31309 - RNA, 22 nt, Artificial Sequence
  Synthetic oligonucleotide: FAS-4289
acccaggcaggaccucugcgcu

SEQ ID NO: 31310 - RNA, 23 nt, Artificial Sequence
  Synthetic oligonucleotide: FAS-4290
uacccaggcaggaccucugcgcu

SEQ ID NO: 31311 - RNA, 24 nt, Artificial Sequence
  Synthetic oligonucleotide: FAS-4291
guacccaggcaggaccucugcgcu

SEQ ID NO: 31312 - RNA, 18 nt, Artificial Sequence
  Synthetic oligonucleotide: FAS-4292
uccauuccagaaacgucu

SEQ ID NO: 31313 - RNA, 19 nt, Artificial Sequence
  Synthetic oligonucleotide: FAS-4293
guccauuccagaaacgucu

SEQ ID NO: 31314 - RNA, 20 nt, Artificial Sequence
  Synthetic oligonucleotide: FAS-988
uguccauuccagaaacgucu

SEQ ID NO: 31315 - RNA, 21 nt, Artificial Sequence
  Synthetic oligonucleotide: FAS-4294
cuguccauuccagaaacgucu

SEQ ID NO: 31316 - RNA, 22 nt, Artificial Sequence
  Synthetic oligonucleotide: FAS-4295
acuguccauuccagaaacgucu

SEQ ID NO: 31317 - RNA, 23 nt, Artificial Sequence
  Synthetic oligonucleotide: FAS-4296
aacuguccauuccagaaacgucu

SEQ ID NO: 31318 - RNA, 24 nt, Artificial Sequence
  Synthetic oligonucleotide: FAS-4297
uaacuguccauuccagaaacgucu

SEQ ID NO: 31319 - RNA, 18 nt, Artificial Sequence
  Synthetic oligonucleotide: FAS-4298
guguucaaagacgcuucu

SEQ ID NO: 31320 - RNA, 19 nt, Artificial Sequence
  Synthetic oligonucleotide: FAS-4299
gguguucaaagacgcuucu

SEQ ID NO: 31321 - RNA, 20 nt, Artificial Sequence
  Synthetic oligonucleotide: FAS-631
agguguucaaagacgcuucu

SEQ ID NO: 31322 - RNA, 21 nt, Artificial Sequence
  Synthetic oligonucleotide: FAS-4300
cagguguucaaagacgcuucu

SEQ ID NO: 31323 - RNA, 22 nt, Artificial Sequence
  Synthetic oligonucleotide: FAS-4301
acagguguucaaagacgcuucu

SEQ ID NO: 31324 - RNA, 23 nt, Artificial Sequence
  Synthetic oligonucleotide: FAS-4302
cacagguguucaaagacgcuucu

SEQ ID NO: 31325 - RNA, 24 nt, Artificial Sequence
  Synthetic oligonucleotide: FAS-4303
acacagguguucaaagacgcuucu

SEQ ID NO: 31326 - RNA, 18 nt, Artificial Sequence
  Synthetic oligonucleotide: FAS-4304
uugguggacccgcucagu

SEQ ID NO: 31327 - RNA, 19 nt, Artificial Sequence
  Synthetic oligonucleotide: FAS-4305
guugguggacccgcucagu

SEQ ID NO: 31328 - RNA, 20 nt, Artificial Sequence
  Synthetic oligonucleotide: FAS-1039
gguugguggacccgcucagu

SEQ ID NO: 31329 - RNA, 21 nt, Artificial Sequence
  Synthetic oligonucleotide: FAS-4306
ggguugguggacccgcucagu

SEQ ID NO: 31330 - RNA, 22 nt, Artificial Sequence
  Synthetic oligonucleotide: FAS-4307
cggguugguggacccgcucagu

SEQ ID NO: 31331 - RNA, 23 nt, Artificial Sequence
  Synthetic oligonucleotide: FAS-4308
gcggguugguggacccgcucagu

SEQ ID NO: 31332 - RNA, 24 nt, Artificial Sequence
  Synthetic oligonucleotide: FAS-4309
cgcggguugguggacccgcucagu

SEQ ID NO: 31333 - RNA, 18 nt, Artificial Sequence
  Synthetic oligonucleotide: FAS-4310
acccgcucaguacggagu

SEQ ID NO: 31334 - RNA, 19 nt, Artificial Sequence
  Synthetic oligonucleotide: FAS-4311
gacccgcucaguacggagu

SEQ ID NO: 31335 - RNA, 20 nt, Artificial Sequence
  Synthetic oligonucleotide: FAS-654
ggacccgcucaguacggagu

SEQ ID NO: 31336 - RNA, 21 nt, Artificial Sequence
  Synthetic oligonucleotide: FAS-4312
uggacccgcucaguacggagu

SEQ ID NO: 31337 - RNA, 22 nt, Artificial Sequence
  Synthetic oligonucleotide: FAS-4313
guggacccgcucaguacggagu

SEQ ID NO: 31338 - RNA, 23 nt, Artificial Sequence
  Synthetic oligonucleotide: FAS-4314
gguggacccgcucaguacggagu

SEQ ID NO: 31339 - RNA, 24 nt, Artificial Sequence
  Synthetic oligonucleotide: FAS-4315
ugguggacccgcucaguacggagu

SEQ ID NO: 31340 - RNA, 18 nt, Artificial Sequence
  Synthetic oligonucleotide: FAS-4316
aagacgcuucuggggagu

SEQ ID NO: 31341 - RNA, 19 nt, Artificial Sequence
  Synthetic oligonucleotide: FAS-4317
aaagacgcuucuggggagu

SEQ ID NO: 31342 - RNA, 20 nt, Artificial Sequence
  Synthetic oligonucleotide: FAS-1023
caaagacgcuucuggggagu

SEQ ID NO: 31343 - RNA, 21 nt, Artificial Sequence
  Synthetic oligonucleotide: FAS-4318
ucaaagacgcuucuggggagu

SEQ ID NO: 31344 - RNA, 22 nt, Artificial Sequence
  Synthetic oligonucleotide: FAS-4319
uucaaagacgcuucuggggagu

SEQ ID NO: 31345 - RNA, 23 nt, Artificial Sequence
  Synthetic oligonucleotide: FAS-4320
guucaaagacgcuucuggggagu

SEQ ID NO: 31346 - RNA, 24 nt, Artificial Sequence
  Synthetic oligonucleotide: FAS-4321
uguucaaagacgcuucuggggagu

SEQ ID NO: 31347 - RNA, 18 nt, Artificial Sequence
  Synthetic oligonucleotide: FAS-4322
ggcgggcgcgggacgcgu

SEQ ID NO: 31348 - RNA, 19 nt, Artificial Sequence
  Synthetic oligonucleotide: FAS-4323
gggcgggcgcgggacgcgu

SEQ ID NO: 31349 - RNA, 20 nt, Artificial Sequence
  Synthetic oligonucleotide: FAS-1062
ggggcgggcgcgggacgcgu

SEQ ID NO: 31350 - RNA, 21 nt, Artificial Sequence
  Synthetic oligonucleotide: FAS-4324
uggggcgggcgcgggacgcgu

SEQ ID NO: 31351 - RNA, 22 nt, Artificial Sequence
  Synthetic oligonucleotide: FAS-4325
guggggcgggcgcgggacgcgu

SEQ ID NO: 31352 - RNA, 23 nt, Artificial Sequence
  Synthetic oligonucleotide: FAS-4326
aguggggcgggcgcgggacgcgu

SEQ ID NO: 31353 - RNA, 24 nt, Artificial Sequence
  Synthetic oligonucleotide: FAS-4327
aaguggggcgggcgcgggacgcgu

SEQ ID NO: 31354 - RNA, 18 nt, Artificial Sequence
  Synthetic oligonucleotide: FAS-4328
ggggaagcucuuucacuu

SEQ ID NO: 31355 - RNA, 19 nt, Artificial Sequence
  Synthetic oligonucleotide: FAS-4329
uggggaagcucuuucacuu

SEQ ID NO: 31356 - RNA, 20 nt, Artificial Sequence
  Synthetic oligonucleotide: FAS-657
uuggggaagcucuuucacuu

SEQ ID NO: 31357 - RNA, 21 nt, Artificial Sequence
  Synthetic oligonucleotide: FAS-4330
guuggggaagcucuuucacuu

SEQ ID NO: 31358 - RNA, 22 nt, Artificial Sequence
  Synthetic oligonucleotide: FAS-4331
aguuggggaagcucuuucacuu

SEQ ID NO: 31359 - RNA, 23 nt, Artificial Sequence
  Synthetic oligonucleotide: FAS-4332
gaguuggggaagcucuuucacuu

SEQ ID NO: 31360 - RNA, 24 nt, Artificial Sequence
  Synthetic oligonucleotide: FAS-4333
ggaguuggggaagcucuuucacuu

SEQ ID NO: 31361 - RNA, 18 nt, Artificial Sequence
  Synthetic oligonucleotide: FAS-4334
aacuacagcagaagccuu

SEQ ID NO: 31362 - RNA, 19 nt, Artificial Sequence
  Synthetic oligonucleotide: FAS-4335
gaacuacagcagaagccuu

SEQ ID NO: 31363 - RNA, 20 nt, Artificial Sequence
  Synthetic oligonucleotide: FAS-995
ugaacuacagcagaagccuu

SEQ ID NO: 31364 - RNA, 21 nt, Artificial Sequence
  Synthetic oligonucleotide: FAS-4336
uugaacuacagcagaagccuu

SEQ ID NO: 31365 - RNA, 22 nt, Artificial Sequence
  Synthetic oligonucleotide: FAS-4337
guugaacuacagcagaagccuu

SEQ ID NO: 31366 - RNA, 23 nt, Artificial Sequence
  Synthetic oligonucleotide: FAS-4338
gguugaacuacagcagaagccuu

SEQ ID NO: 31367 - RNA, 24 nt, Artificial Sequence
  Synthetic oligonucleotide: FAS-4339
agguugaacuacagcagaagccuu

SEQ ID NO: 31368 - RNA, 18 nt, Artificial Sequence
  Synthetic oligonucleotide: FAS-4340
agguguucaaagacgcuu

SEQ ID NO: 31369 - RNA, 19 nt, Artificial Sequence
  Synthetic oligonucleotide: FAS-4341
cagguguucaaagacgcuu

SEQ ID NO: 31370 - RNA, 20 nt, Artificial Sequence
  Synthetic oligonucleotide: FAS-1018
acagguguucaaagacgcuu

SEQ ID NO: 31371 - RNA, 21 nt, Artificial Sequence
  Synthetic oligonucleotide: FAS-4342
cacagguguucaaagacgcuu

SEQ ID NO: 31372 - RNA, 22 nt, Artificial Sequence
  Synthetic oligonucleotide: FAS-4343
acacagguguucaaagacgcuu

SEQ ID NO: 31373 - RNA, 23 nt, Artificial Sequence
  Synthetic oligonucleotide: FAS-4344
cacacagguguucaaagacgcuu

SEQ ID NO: 31374 - RNA, 24 nt, Artificial Sequence
  Synthetic oligonucleotide: FAS-4345
acacacagguguucaaagacgcuu

SEQ ID NO: 31375 - RNA, 18 nt, Artificial Sequence
  Synthetic oligonucleotide: FAS-4346
uagcuuuguuuuccucuu

SEQ ID NO: 31376 - RNA, 19 nt, Artificial Sequence
  Synthetic oligonucleotide: FAS-4347
uuagcuuuguuuuccucuu

SEQ ID NO: 31377 - RNA, 20 nt, Artificial Sequence
  Synthetic oligonucleotide: FAS-983
guuagcuuuguuuuccucuu

SEQ ID NO: 31378 - RNA, 21 nt, Artificial Sequence
  Synthetic oligonucleotide: FAS-4348
uguuagcuuuguuuuccucuu

SEQ ID NO: 31379 - RNA, 22 nt, Artificial Sequence
  Synthetic oligonucleotide: FAS-4349
uuguuagcuuuguuuuccucuu

SEQ ID NO: 31380 - RNA, 23 nt, Artificial Sequence
  Synthetic oligonucleotide: FAS-4350
guuguuagcuuuguuuuccucuu

SEQ ID NO: 31381 - RNA, 24 nt, Artificial Sequence
  Synthetic oligonucleotide: FAS-4351
aguuguuagcuuuguuuuccucuu

SEQ ID NO: 31382 - RNA, 18 nt, Artificial Sequence
  Synthetic oligonucleotide: FAS-4352
cccgcucaguacggaguu

SEQ ID NO: 31383 - RNA, 19 nt, Artificial Sequence
  Synthetic oligonucleotide: FAS-4353
acccgcucaguacggaguu

SEQ ID NO: 31384 - RNA, 20 nt, Artificial Sequence
  Synthetic oligonucleotide: FAS-655
gacccgcucaguacggaguu

SEQ ID NO: 31385 - RNA, 21 nt, Artificial Sequence
  Synthetic oligonucleotide: FAS-4354
ggacccgcucaguacggaguu

SEQ ID NO: 31386 - RNA, 22 nt, Artificial Sequence
  Synthetic oligonucleotide: FAS-4355
uggacccgcucaguacggaguu

SEQ ID NO: 31387 - RNA, 23 nt, Artificial Sequence
  Synthetic oligonucleotide: FAS-4356
guggacccgcucaguacggaguu

SEQ ID NO: 31388 - RNA, 24 nt, Artificial Sequence
  Synthetic oligonucleotide: FAS-4357
gguggacccgcucaguacggaguu

SEQ ID NO: 31389 - RNA, 18 nt, Artificial Sequence
  Synthetic oligonucleotide: FAS-4358
uaaggggcccucccuuuu

SEQ ID NO: 31390 - RNA, 19 nt, Artificial Sequence
  Synthetic oligonucleotide: FAS-4359
cuaaggggcccucccuuuu

SEQ ID NO: 31391 - RNA, 20 nt, Artificial Sequence
  Synthetic oligonucleotide: FAS-986
acuaaggggcccucccuuuu

SEQ ID NO: 31392 - RNA, 21 nt, Artificial Sequence
  Synthetic oligonucleotide: FAS-4360
aacuaaggggcccucccuuuu

SEQ ID NO: 31393 - RNA, 22 nt, Artificial Sequence
  Synthetic oligonucleotide: FAS-4361
aaacuaaggggcccucccuuuu

SEQ ID NO: 31394 - RNA, 23 nt, Artificial Sequence
  Synthetic oligonucleotide: FAS-4362
aaaacuaaggggcccucccuuuu

SEQ ID NO: 31395 - RNA, 24 nt, Artificial Sequence
  Synthetic oligonucleotide: FAS-4363
aaaaacuaaggggcccucccuuuu

SEQ ID NO: 31396 - RNA, 18 nt, Artificial Sequence
  Synthetic oligonucleotide: FAS-4364
cuugguggacgaugccaa

SEQ ID NO: 31397 - RNA, 19 nt, Artificial Sequence
  Synthetic oligonucleotide: FAS-4365
gcuugguggacgaugccaa

SEQ ID NO: 31398 - RNA, 20 nt, Artificial Sequence
  Synthetic oligonucleotide: FAS-1806
agcuugguggacgaugccaa

SEQ ID NO: 31399 - RNA, 21 nt, Artificial Sequence
  Synthetic oligonucleotide: FAS-4366
gagcuugguggacgaugccaa

SEQ ID NO: 31400 - RNA, 22 nt, Artificial Sequence
  Synthetic oligonucleotide: FAS-4367
agagcuugguggacgaugccaa

SEQ ID NO: 31401 - RNA, 23 nt, Artificial Sequence
  Synthetic oligonucleotide: FAS-4368
cagagcuugguggacgaugccaa

SEQ ID NO: 31402 - RNA, 24 nt, Artificial Sequence
  Synthetic oligonucleotide: FAS-4369
gcagagcuugguggacgaugccaa

SEQ ID NO: 31403 - RNA, 18 nt, Artificial Sequence
  Synthetic oligonucleotide: FAS-4370
agugacagaugcaaaaca

SEQ ID NO: 31404 - RNA, 19 nt, Artificial Sequence
  Synthetic oligonucleotide: FAS-4371
cagugacagaugcaaaaca

SEQ ID NO: 31405 - RNA, 20 nt, Artificial Sequence
  Synthetic oligonucleotide: FAS-1389
gcagugacagaugcaaaaca

SEQ ID NO: 31406 - RNA, 21 nt, Artificial Sequence
  Synthetic oligonucleotide: FAS-4372
ugcagugacagaugcaaaaca

SEQ ID NO: 31407 - RNA, 22 nt, Artificial Sequence
  Synthetic oligonucleotide: FAS-4373
gugcagugacagaugcaaaaca

SEQ ID NO: 31408 - RNA, 23 nt, Artificial Sequence
  Synthetic oligonucleotide: FAS-4374
agugcagugacagaugcaaaaca

SEQ ID NO: 31409 - RNA, 24 nt, Artificial Sequence
  Synthetic oligonucleotide: FAS-4375
aagugcagugacagaugcaaaaca

SEQ ID NO: 31410 - RNA, 18 nt, Artificial Sequence
  Synthetic oligonucleotide: FAS-4376
ugaacagugggcuaagca

SEQ ID NO: 31411 - RNA, 19 nt, Artificial Sequence
  Synthetic oligonucleotide: FAS-4377
augaacagugggcuaagca

SEQ ID NO: 31412 - RNA, 20 nt, Artificial Sequence
  Synthetic oligonucleotide: FAS-1407
gaugaacagugggcuaagca

SEQ ID NO: 31413 - RNA, 21 nt, Artificial Sequence
  Synthetic oligonucleotide: FAS-4378
ggaugaacagugggcuaagca

SEQ ID NO: 31414 - RNA, 22 nt, Artificial Sequence
  Synthetic oligonucleotide: FAS-4379
aggaugaacagugggcuaagca

SEQ ID NO: 31415 - RNA, 23 nt, Artificial Sequence
  Synthetic oligonucleotide: FAS-4380
aaggaugaacagugggcuaagca

SEQ ID NO: 31416 - RNA, 24 nt, Artificial Sequence
  Synthetic oligonucleotide: FAS-4381
gaaggaugaacagugggcuaagca

SEQ ID NO: 31417 - RNA, 18 nt, Artificial Sequence
  Synthetic oligonucleotide: FAS-4382
guguucaccagagcacga

SEQ ID NO: 31418 - RNA, 19 nt, Artificial Sequence
  Synthetic oligonucleotide: FAS-4383
aguguucaccagagcacga

SEQ ID NO: 31419 - RNA, 20 nt, Artificial Sequence
  Synthetic oligonucleotide: FAS-1431
caguguucaccagagcacga

SEQ ID NO: 31420 - RNA, 21 nt, Artificial Sequence
  Synthetic oligonucleotide: FAS-4384
acaguguucaccagagcacga

SEQ ID NO: 31421 - RNA, 22 nt, Artificial Sequence
  Synthetic oligonucleotide: FAS-4385
aacaguguucaccagagcacga

SEQ ID NO: 31422 - RNA, 23 nt, Artificial Sequence
  Synthetic oligonucleotide: FAS-4386
gaacaguguucaccagagcacga

SEQ ID NO: 31423 - RNA, 24 nt, Artificial Sequence
  Synthetic oligonucleotide: FAS-4387
ugaacaguguucaccagagcacga

SEQ ID NO: 31424 - RNA, 18 nt, Artificial Sequence
  Synthetic oligonucleotide: FAS-4388
guuauuaauguguuauua

SEQ ID NO: 31425 - RNA, 19 nt, Artificial Sequence
  Synthetic oligonucleotide: FAS-4389
gguuauuaauguguuauua

SEQ ID NO: 31426 - RNA, 20 nt, Artificial Sequence
  Synthetic oligonucleotide: FAS-1408
ggguuauuaauguguuauua

SEQ ID NO: 31427 - RNA, 21 nt, Artificial Sequence
  Synthetic oligonucleotide: FAS-4390
aggguuauuaauguguuauua

SEQ ID NO: 31428 - RNA, 22 nt, Artificial Sequence
  Synthetic oligonucleotide: FAS-4391
aaggguuauuaauguguuauua

SEQ ID NO: 31429 - RNA, 23 nt, Artificial Sequence
  Synthetic oligonucleotide: FAS-4392
aaaggguuauuaauguguuauua

SEQ ID NO: 31430 - RNA, 24 nt, Artificial Sequence
  Synthetic oligonucleotide: FAS-4393
caaaggguuauuaauguguuauua

SEQ ID NO: 31431 - RNA, 18 nt, Artificial Sequence
  Synthetic oligonucleotide: FAS-4394
uccgcuccucucuccaac

SEQ ID NO: 31432 - RNA, 19 nt, Artificial Sequence
  Synthetic oligonucleotide: FAS-4395
uuccgcuccucucuccaac

SEQ ID NO: 31433 - RNA, 20 nt, Artificial Sequence
  Synthetic oligonucleotide: FAS-2067
guuccgcuccucucuccaac

SEQ ID NO: 31434 - RNA, 21 nt, Artificial Sequence
  Synthetic oligonucleotide: FAS-4396
aguuccgcuccucucuccaac

SEQ ID NO: 31435 - RNA, 22 nt, Artificial Sequence
  Synthetic oligonucleotide: FAS-4397
gaguuccgcuccucucuccaac

SEQ ID NO: 31436 - RNA, 23 nt, Artificial Sequence
  Synthetic oligonucleotide: FAS-4398
ggaguuccgcuccucucuccaac

SEQ ID NO: 31437 - RNA, 24 nt, Artificial Sequence
  Synthetic oligonucleotide: FAS-4399
aggaguuccgcuccucucuccaac

SEQ ID NO: 31438 - RNA, 18 nt, Artificial Sequence
  Synthetic oligonucleotide: FAS-4400
gcuugucagggcuugucc

SEQ ID NO: 31439 - RNA, 19 nt, Artificial Sequence
  Synthetic oligonucleotide: FAS-4401
ggcuugucagggcuugucc

SEQ ID NO: 31440 - RNA, 20 nt, Artificial Sequence
  Synthetic oligonucleotide: FAS-2066
uggcuugucagggcuugucc

SEQ ID NO: 31441 - RNA, 21 nt, Artificial Sequence
  Synthetic oligonucleotide: FAS-4402
uuggcuugucagggcuugucc

SEQ ID NO: 31442 - RNA, 22 nt, Artificial Sequence
  Synthetic oligonucleotide: FAS-4403
cuuggcuugucagggcuugucc

SEQ ID NO: 31443 - RNA, 23 nt, Artificial Sequence
  Synthetic oligonucleotide: FAS-4404
gcuuggcuugucagggcuugucc

SEQ ID NO: 31444 - RNA, 24 nt, Artificial Sequence
  Synthetic oligonucleotide: FAS-4405
ggcuuggcuugucagggcuugucc

SEQ ID NO: 31445 - RNA, 18 nt, Artificial Sequence
  Synthetic oligonucleotide: FAS-4406
gcugccccgccugcccag

SEQ ID NO: 31446 - RNA, 19 nt, Artificial Sequence
  Synthetic oligonucleotide: FAS-4407
agcugccccgccugcccag

SEQ ID NO: 31447 - RNA, 20 nt, Artificial Sequence
  Synthetic oligonucleotide: FAS-2074
gagcugccccgccugcccag

SEQ ID NO: 31448 - RNA, 21 nt, Artificial Sequence
  Synthetic oligonucleotide: FAS-4408
ggagcugccccgccugcccag

SEQ ID NO: 31449 - RNA, 22 nt, Artificial Sequence
  Synthetic oligonucleotide: FAS-4409
cggagcugccccgccugcccag

SEQ ID NO: 31450 - RNA, 23 nt, Artificial Sequence
  Synthetic oligonucleotide: FAS-4410
ccggagcugccccgccugcccag

SEQ ID NO: 31451 - RNA, 24 nt, Artificial Sequence
  Synthetic oligonucleotide: FAS-4411
gccggagcugccccgccugcccag

SEQ ID NO: 31452 - RNA, 18 nt, Artificial Sequence
  Synthetic oligonucleotide: FAS-4412
gugauggaaagcccucag

SEQ ID NO: 31453 - RNA, 19 nt, Artificial Sequence
  Synthetic oligonucleotide: FAS-4413
ggugauggaaagcccucag

SEQ ID NO: 31454 - RNA, 20 nt, Artificial Sequence
  Synthetic oligonucleotide: FAS-1394
gggugauggaaagcccucag

SEQ ID NO: 31455 - RNA, 21 nt, Artificial Sequence
  Synthetic oligonucleotide: FAS-4414
agggugauggaaagcccucag

SEQ ID NO: 31456 - RNA, 22 nt, Artificial Sequence
  Synthetic oligonucleotide: FAS-4415
cagggugauggaaagcccucag

SEQ ID NO: 31457 - RNA, 23 nt, Artificial Sequence
  Synthetic oligonucleotide: FAS-4416
acagggugauggaaagcccucag

SEQ ID NO: 31458 - RNA, 24 nt, Artificial Sequence
  Synthetic oligonucleotide: FAS-4417
cacagggugauggaaagcccucag

SEQ ID NO: 31459 - RNA, 18 nt, Artificial Sequence
  Synthetic oligonucleotide: FAS-4418
uaauguguuauuaauggg

SEQ ID NO: 31460 - RNA, 19 nt, Artificial Sequence
  Synthetic oligonucleotide: FAS-4419
uuaauguguuauuaauggg

SEQ ID NO: 31461 - RNA, 20 nt, Artificial Sequence
  Synthetic oligonucleotide: FAS-1409
auuaauguguuauuaauggg

SEQ ID NO: 31462 - RNA, 21 nt, Artificial Sequence
  Synthetic oligonucleotide: FAS-4420
uauuaauguguuauuaauggg

SEQ ID NO: 31463 - RNA, 22 nt, Artificial Sequence
  Synthetic oligonucleotide: FAS-4421
uuauuaauguguuauuaauggg

SEQ ID NO: 31464 - RNA, 23 nt, Artificial Sequence
  Synthetic oligonucleotide: FAS-4422
guuauuaauguguuauuaauggg

SEQ ID NO: 31465 - RNA, 24 nt, Artificial Sequence
  Synthetic oligonucleotide: FAS-4423
gguuauuaauguguuauuaauggg

SEQ ID NO: 31466 - RNA, 18 nt, Artificial Sequence
  Synthetic oligonucleotide: FAS-4424
caacugagaggaagccug

SEQ ID NO: 31467 - RNA, 19 nt, Artificial Sequence
  Synthetic oligonucleotide: FAS-4425
ucaacugagaggaagccug

SEQ ID NO: 31468 - RNA, 20 nt, Artificial Sequence
  Synthetic oligonucleotide: FAS-1404
gucaacugagaggaagccug

SEQ ID NO: 31469 - RNA, 21 nt, Artificial Sequence
  Synthetic oligonucleotide: FAS-4426
ugucaacugagaggaagccug

SEQ ID NO: 31470 - RNA, 22 nt, Artificial Sequence
  Synthetic oligonucleotide: FAS-4427
augucaacugagaggaagccug

SEQ ID NO: 31471 - RNA, 23 nt, Artificial Sequence
  Synthetic oligonucleotide: FAS-4428
aaugucaacugagaggaagccug

SEQ ID NO: 31472 - RNA, 24 nt, Artificial Sequence
  Synthetic oligonucleotide: FAS-4429
aaaugucaacugagaggaagccug

SEQ ID NO: 31473 - RNA, 18 nt, Artificial Sequence
  Synthetic oligonucleotide: FAS-4430
gggaagggagagagguug

SEQ ID NO: 31474 - RNA, 19 nt, Artificial Sequence
  Synthetic oligonucleotide: FAS-4431
ugggaagggagagagguug

SEQ ID NO: 31475 - RNA, 20 nt, Artificial Sequence
  Synthetic oligonucleotide: FAS-1418
uugggaagggagagagguug

SEQ ID NO: 31476 - RNA, 21 nt, Artificial Sequence
  Synthetic oligonucleotide: FAS-4432
auugggaagggagagagguug

SEQ ID NO: 31477 - RNA, 22 nt, Artificial Sequence
  Synthetic oligonucleotide: FAS-4433
aauugggaagggagagagguug

SEQ ID NO: 31478 - RNA, 23 nt, Artificial Sequence
  Synthetic oligonucleotide: FAS-4434
uaauugggaagggagagagguug

SEQ ID NO: 31479 - RNA, 24 nt, Artificial Sequence
  Synthetic oligonucleotide: FAS-4435
cuaauugggaagggagagagguug

SEQ ID NO: 31480 - RNA, 18 nt, Artificial Sequence
  Synthetic oligonucleotide: FAS-4436
augacaucauuacugaac

SEQ ID NO: 31481 - RNA, 19 nt, Artificial Sequence
  Synthetic oligonucleotide: FAS-4437
aaugacaucauuacugaac

SEQ ID NO: 31482 - RNA, 20 nt, Artificial Sequence
  Synthetic oligonucleotide: FAS-1500
uaaugacaucauuacugaac

SEQ ID NO: 31483 - RNA, 21 nt, Artificial Sequence
  Synthetic oligonucleotide: FAS-4438
auaaugacaucauuacugaac

SEQ ID NO: 31484 - RNA, 22 nt, Artificial Sequence
  Synthetic oligonucleotide: FAS-4439
gauaaugacaucauuacugaac

SEQ ID NO: 31485 - RNA, 23 nt, Artificial Sequence
  Synthetic oligonucleotide: FAS-4440
ggauaaugacaucauuacugaac

SEQ ID NO: 31486 - RNA, 24 nt, Artificial Sequence
  Synthetic oligonucleotide: FAS-4441
uggauaaugacaucauuacugaac

SEQ ID NO: 31487 - RNA, 18 nt, Artificial Sequence
  Synthetic oligonucleotide: FAS-4442
ugggcguggggugcggac

SEQ ID NO: 31488 - RNA, 19 nt, Artificial Sequence
  Synthetic oligonucleotide: FAS-4443
gugggcguggggugcggac

SEQ ID NO: 31489 - RNA, 20 nt, Artificial Sequence
  Synthetic oligonucleotide: FAS-1926
ggugggcguggggugcggac

SEQ ID NO: 31490 - RNA, 21 nt, Artificial Sequence
  Synthetic oligonucleotide: FAS-4444
aggugggcguggggugcggac

SEQ ID NO: 31491 - RNA, 22 nt, Artificial Sequence
  Synthetic oligonucleotide: FAS-4445
gaggugggcguggggugcggac

SEQ ID NO: 31492 - RNA, 23 nt, Artificial Sequence
  Synthetic oligonucleotide: FAS-4446
ugaggugggcguggggugcggac

SEQ ID NO: 31493 - RNA, 24 nt, Artificial Sequence
  Synthetic oligonucleotide: FAS-4447
uugaggugggcguggggugcggac

SEQ ID NO: 31494 - RNA, 18 nt, Artificial Sequence
  Synthetic oligonucleotide: FAS-4448
gcucuuagguaguuuagc

SEQ ID NO: 31495 - RNA, 19 nt, Artificial Sequence
  Synthetic oligonucleotide: FAS-4449
agcucuuagguaguuuagc

SEQ ID NO: 31496 - RNA, 20 nt, Artificial Sequence
  Synthetic oligonucleotide: FAS-1496
uagcucuuagguaguuuagc

SEQ ID NO: 31497 - RNA, 21 nt, Artificial Sequence
  Synthetic oligonucleotide: FAS-4450
auagcucuuagguaguuuagc

SEQ ID NO: 31498 - RNA, 22 nt, Artificial Sequence
  Synthetic oligonucleotide: FAS-4451
gauagcucuuagguaguuuagc

SEQ ID NO: 31499 - RNA, 23 nt, Artificial Sequence
  Synthetic oligonucleotide: FAS-4452
agauagcucuuagguaguuuagc

SEQ ID NO: 31500 - RNA, 24 nt, Artificial Sequence
  Synthetic oligonucleotide: FAS-4453
uagauagcucuuagguaguuuagc

SEQ ID NO: 31501 - RNA, 18 nt, Artificial Sequence
  Synthetic oligonucleotide: FAS-4454
uaggaccuucccucaggc

SEQ ID NO: 31502 - RNA, 19 nt, Artificial Sequence
  Synthetic oligonucleotide: FAS-4455
uuaggaccuucccucaggc

SEQ ID NO: 31503 - RNA, 20 nt, Artificial Sequence
  Synthetic oligonucleotide: FAS-1536
guuaggaccuucccucaggc

SEQ ID NO: 31504 - RNA, 21 nt, Artificial Sequence
  Synthetic oligonucleotide: FAS-4456
uguuaggaccuucccucaggc

SEQ ID NO: 31505 - RNA, 22 nt, Artificial Sequence
  Synthetic oligonucleotide: FAS-4457
cuguuaggaccuucccucaggc

SEQ ID NO: 31506 - RNA, 23 nt, Artificial Sequence
  Synthetic oligonucleotide: FAS-4458
gcuguuaggaccuucccucaggc

SEQ ID NO: 31507 - RNA, 24 nt, Artificial Sequence
  Synthetic oligonucleotide: FAS-4459
ggcuguuaggaccuucccucaggc

SEQ ID NO: 31508 - RNA, 18 nt, Artificial Sequence
  Synthetic oligonucleotide: FAS-4460
ccaaagguccgcuccggc

SEQ ID NO: 31509 - RNA, 19 nt, Artificial Sequence
  Synthetic oligonucleotide: FAS-4461
gccaaagguccgcuccggc

SEQ ID NO: 31510 - RNA, 20 nt, Artificial Sequence
  Synthetic oligonucleotide: FAS-1577
agccaaagguccgcuccggc

SEQ ID NO: 31511 - RNA, 21 nt, Artificial Sequence
  Synthetic oligonucleotide: FAS-4462
aagccaaagguccgcuccggc

SEQ ID NO: 31512 - RNA, 22 nt, Artificial Sequence
  Synthetic oligonucleotide: FAS-4463
caagccaaagguccgcuccggc

SEQ ID NO: 31513 - RNA, 23 nt, Artificial Sequence
  Synthetic oligonucleotide: FAS-4464
ccaagccaaagguccgcuccggc

SEQ ID NO: 31514 - RNA, 24 nt, Artificial Sequence
  Synthetic oligonucleotide: FAS-4465
gccaagccaaagguccgcuccggc

SEQ ID NO: 31515 - RNA, 18 nt, Artificial Sequence
  Synthetic oligonucleotide: FAS-4466
uccacguugaggugggcg

SEQ ID NO: 31516 - RNA, 19 nt, Artificial Sequence
  Synthetic oligonucleotide: FAS-4467
cuccacguugaggugggcg

SEQ ID NO: 31517 - RNA, 20 nt, Artificial Sequence
  Synthetic oligonucleotide: FAS-1922
gcuccacguugaggugggcg

SEQ ID NO: 31518 - RNA, 21 nt, Artificial Sequence
  Synthetic oligonucleotide: FAS-4468
cgcuccacguugaggugggcg

SEQ ID NO: 31519 - RNA, 22 nt, Artificial Sequence
  Synthetic oligonucleotide: FAS-4469
gcgcuccacguugaggugggcg

SEQ ID NO: 31520 - RNA, 23 nt, Artificial Sequence
  Synthetic oligonucleotide: FAS-4470
ugcgcuccacguugaggugggcg

SEQ ID NO: 31521 - RNA, 24 nt, Artificial Sequence
  Synthetic oligonucleotide: FAS-4471
cugcgcuccacguugaggugggcg

SEQ ID NO: 31522 - RNA, 18 nt, Artificial Sequence
  Synthetic oligonucleotide: FAS-4472
agguccgcuccggcgcgg

SEQ ID NO: 31523 - RNA, 19 nt, Artificial Sequence
  Synthetic oligonucleotide: FAS-4473
aagguccgcuccggcgcgg

SEQ ID NO: 31524 - RNA, 20 nt, Artificial Sequence
  Synthetic oligonucleotide: FAS-1578
aaagguccgcuccggcgcgg

SEQ ID NO: 31525 - RNA, 21 nt, Artificial Sequence
  Synthetic oligonucleotide: FAS-4474
caaagguccgcuccggcgcgg

SEQ ID NO: 31526 - RNA, 22 nt, Artificial Sequence
  Synthetic oligonucleotide: FAS-4475
ccaaagguccgcuccggcgcgg

SEQ ID NO: 31527 - RNA, 23 nt, Artificial Sequence
  Synthetic oligonucleotide: FAS-4476
gccaaagguccgcuccggcgcgg

SEQ ID NO: 31528 - RNA, 24 nt, Artificial Sequence
  Synthetic oligonucleotide: FAS-4477
agccaaagguccgcuccggcgcgg

SEQ ID NO: 31529 - RNA, 18 nt, Artificial Sequence
  Synthetic oligonucleotide: FAS-4478
ccgcuccggcgcgggugg

SEQ ID NO: 31530 - RNA, 19 nt, Artificial Sequence
  Synthetic oligonucleotide: FAS-4479
uccgcuccggcgcgggugg

SEQ ID NO: 31531 - RNA, 20 nt, Artificial Sequence
  Synthetic oligonucleotide: FAS-1579
guccgcuccggcgcgggugg

SEQ ID NO: 31532 - RNA, 21 nt, Artificial Sequence
  Synthetic oligonucleotide: FAS-4480
gguccgcuccggcgcgggugg

SEQ ID NO: 31533 - RNA, 22 nt, Artificial Sequence
  Synthetic oligonucleotide: FAS-4481
agguccgcuccggcgcgggugg

SEQ ID NO: 31534 - RNA, 23 nt, Artificial Sequence
  Synthetic oligonucleotide: FAS-4482
aagguccgcuccggcgcgggugg

SEQ ID NO: 31535 - RNA, 24 nt, Artificial Sequence
  Synthetic oligonucleotide: FAS-4483
aaagguccgcuccggcgcgggugg

SEQ ID NO: 31536 - RNA, 18 nt, Artificial Sequence
  Synthetic oligonucleotide: FAS-4484
ucauuacugaaccugaau

SEQ ID NO: 31537 - RNA, 19 nt, Artificial Sequence
  Synthetic oligonucleotide: FAS-4485
aucauuacugaaccugaau

SEQ ID NO: 31538 - RNA, 20 nt, Artificial Sequence
  Synthetic oligonucleotide: FAS-1501
caucauuacugaaccugaau

SEQ ID NO: 31539 - RNA, 21 nt, Artificial Sequence
  Synthetic oligonucleotide: FAS-4486
acaucauuacugaaccugaau

SEQ ID NO: 31540 - RNA, 22 nt, Artificial Sequence
  Synthetic oligonucleotide: FAS-4487
gacaucauuacugaaccugaau

SEQ ID NO: 31541 - RNA, 23 nt, Artificial Sequence
  Synthetic oligonucleotide: FAS-4488
ugacaucauuacugaaccugaau

SEQ ID NO: 31542 - RNA, 24 nt, Artificial Sequence
  Synthetic oligonucleotide: FAS-4489
augacaucauuacugaaccugaau

SEQ ID NO: 31543 - RNA, 18 nt, Artificial Sequence
  Synthetic oligonucleotide: FAS-4490
auuuuacagaagguaugu

SEQ ID NO: 31544 - RNA, 19 nt, Artificial Sequence
  Synthetic oligonucleotide: FAS-4491
aauuuuacagaagguaugu

SEQ ID NO: 31545 - RNA, 20 nt, Artificial Sequence
  Synthetic oligonucleotide: FAS-1498
gaauuuuacagaagguaugu

SEQ ID NO: 31546 - RNA, 21 nt, Artificial Sequence
  Synthetic oligonucleotide: FAS-4492
ugaauuuuacagaagguaugu

SEQ ID NO: 31547 - RNA, 22 nt, Artificial Sequence
  Synthetic oligonucleotide: FAS-4493
augaauuuuacagaagguaugu

SEQ ID NO: 31548 - RNA, 23 nt, Artificial Sequence
  Synthetic oligonucleotide: FAS-4494
caugaauuuuacagaagguaugu

SEQ ID NO: 31549 - RNA, 24 nt, Artificial Sequence
  Synthetic oligonucleotide: FAS-4495
gcaugaauuuuacagaagguaugu

SEQ ID NO: 31550 - RNA, 18 nt, Artificial Sequence
  Synthetic oligonucleotide: FAS-4496
cggaagucugggaagcuu

SEQ ID NO: 31551 - RNA, 19 nt, Artificial Sequence
  Synthetic oligonucleotide: FAS-4497
gcggaagucugggaagcuu

SEQ ID NO: 31552 - RNA, 20 nt, Artificial Sequence
  Synthetic oligonucleotide: FAS-1561
agcggaagucugggaagcuu

SEQ ID NO: 31553 - RNA, 21 nt, Artificial Sequence
  Synthetic oligonucleotide: FAS-4498
aagcggaagucugggaagcuu

SEQ ID NO: 31554 - RNA, 22 nt, Artificial Sequence
  Synthetic oligonucleotide: FAS-4499
gaagcggaagucugggaagcuu

SEQ ID NO: 31555 - RNA, 23 nt, Artificial Sequence
  Synthetic oligonucleotide: FAS-4500
ugaagcggaagucugggaagcuu

SEQ ID NO: 31556 - RNA, 24 nt, Artificial Sequence
  Synthetic oligonucleotide: FAS-4501
uugaagcggaagucugggaagcuu

SEQ ID NO: 31557 - RNA, 18 nt, Artificial Sequence
  Synthetic oligonucleotide: FAS-4502
ucugagaacugccagaaa

SEQ ID NO: 31558 - RNA, 19 nt, Artificial Sequence
  Synthetic oligonucleotide: FAS-4503
gucugagaacugccagaaa

SEQ ID NO: 31559 - RNA, 20 nt, Artificial Sequence
  Synthetic oligonucleotide: FAS-1698
cgucugagaacugccagaaa

SEQ ID NO: 31560 - RNA, 21 nt, Artificial Sequence
  Synthetic oligonucleotide: FAS-4504
acgucugagaacugccagaaa

SEQ ID NO: 31561 - RNA, 22 nt, Artificial Sequence
  Synthetic oligonucleotide: FAS-4505
uacgucugagaacugccagaaa

SEQ ID NO: 31562 - RNA, 23 nt, Artificial Sequence
  Synthetic oligonucleotide: FAS-4506
cuacgucugagaacugccagaaa

SEQ ID NO: 31563 - RNA, 24 nt, Artificial Sequence
  Synthetic oligonucleotide: FAS-4507
ccuacgucugagaacugccagaaa

SEQ ID NO: 31564 - RNA, 18 nt, Artificial Sequence
  Synthetic oligonucleotide: FAS-4508
uuccgcuccucucuccaa

SEQ ID NO: 31565 - RNA, 19 nt, Artificial Sequence
  Synthetic oligonucleotide: FAS-4509
guuccgcuccucucuccaa

SEQ ID NO: 31566 - RNA, 20 nt, Artificial Sequence
  Synthetic oligonucleotide: FAS-1708
aguuccgcuccucucuccaa

SEQ ID NO: 31567 - RNA, 21 nt, Artificial Sequence
  Synthetic oligonucleotide: FAS-4510
gaguuccgcuccucucuccaa

SEQ ID NO: 31568 - RNA, 22 nt, Artificial Sequence
  Synthetic oligonucleotide: FAS-4511
ggaguuccgcuccucucuccaa

SEQ ID NO: 31569 - RNA, 23 nt, Artificial Sequence
  Synthetic oligonucleotide: FAS-4512
aggaguuccgcuccucucuccaa

SEQ ID NO: 31570 - RNA, 24 nt, Artificial Sequence
  Synthetic oligonucleotide: FAS-4513
caggaguuccgcuccucucuccaa

SEQ ID NO: 31571 - RNA, 18 nt, Artificial Sequence
  Synthetic oligonucleotide: FAS-4514
uccagaagaaaaugucaa

SEQ ID NO: 31572 - RNA, 19 nt, Artificial Sequence
  Synthetic oligonucleotide: FAS-4515
cuccagaagaaaaugucaa

SEQ ID NO: 31573 - RNA, 20 nt, Artificial Sequence
  Synthetic oligonucleotide: FAS-1399
gcuccagaagaaaaugucaa

SEQ ID NO: 31574 - RNA, 21 nt, Artificial Sequence
  Synthetic oligonucleotide: FAS-4516
ggcuccagaagaaaaugucaa

SEQ ID NO: 31575 - RNA, 22 nt, Artificial Sequence
  Synthetic oligonucleotide: FAS-4517
aggcuccagaagaaaaugucaa

SEQ ID NO: 31576 - RNA, 23 nt, Artificial Sequence
  Synthetic oligonucleotide: FAS-4518
caggcuccagaagaaaaugucaa

SEQ ID NO: 31577 - RNA, 24 nt, Artificial Sequence
  Synthetic oligonucleotide: FAS-4519
acaggcuccagaagaaaaugucaa

SEQ ID NO: 31578 - RNA, 18 nt, Artificial Sequence
  Synthetic oligonucleotide: FAS-4520
guugaaucuaauugggaa

SEQ ID NO: 31579 - RNA, 19 nt, Artificial Sequence
  Synthetic oligonucleotide: FAS-4521
gguugaaucuaauugggaa

SEQ ID NO: 31580 - RNA, 20 nt, Artificial Sequence
  Synthetic oligonucleotide: FAS-1801
ggguugaaucuaauugggaa

SEQ ID NO: 31581 - RNA, 21 nt, Artificial Sequence
  Synthetic oligonucleotide: FAS-4522
uggguugaaucuaauugggaa

SEQ ID NO: 31582 - RNA, 22 nt, Artificial Sequence
  Synthetic oligonucleotide: FAS-4523
auggguugaaucuaauugggaa

SEQ ID NO: 31583 - RNA, 23 nt, Artificial Sequence
  Synthetic oligonucleotide: FAS-4524
aauggguugaaucuaauugggaa

SEQ ID NO: 31584 - RNA, 24 nt, Artificial Sequence
  Synthetic oligonucleotide: FAS-4525
uaauggguugaaucuaauugggaa

SEQ ID NO: 31585 - RNA, 18 nt, Artificial Sequence
  Synthetic oligonucleotide: FAS-4526
uuaauggguugaaucuaa

SEQ ID NO: 31586 - RNA, 19 nt, Artificial Sequence
  Synthetic oligonucleotide: FAS-4527
auuaauggguugaaucuaa

SEQ ID NO: 31587 - RNA, 20 nt, Artificial Sequence
  Synthetic oligonucleotide: FAS-1410
uauuaauggguugaaucuaa

SEQ ID NO: 31588 - RNA, 21 nt, Artificial Sequence
  Synthetic oligonucleotide: FAS-4528
uuauuaauggguugaaucuaa

SEQ ID NO: 31589 - RNA, 22 nt, Artificial Sequence
  Synthetic oligonucleotide: FAS-4529
guuauuaauggguugaaucuaa

SEQ ID NO: 31590 - RNA, 23 nt, Artificial Sequence
  Synthetic oligonucleotide: FAS-4530
uguuauuaauggguugaaucuaa

SEQ ID NO: 31591 - RNA, 24 nt, Artificial Sequence
  Synthetic oligonucleotide: FAS-4531
guguuauuaauggguugaaucuaa

SEQ ID NO: 31592 - RNA, 18 nt, Artificial Sequence
  Synthetic oligonucleotide: FAS-4532
aagccugaaggaugaaca

SEQ ID NO: 31593 - RNA, 19 nt, Artificial Sequence
  Synthetic oligonucleotide: FAS-4533
gaagccugaaggaugaaca

SEQ ID NO: 31594 - RNA, 20 nt, Artificial Sequence
  Synthetic oligonucleotide: FAS-1406
ggaagccugaaggaugaaca

SEQ ID NO: 31595 - RNA, 21 nt, Artificial Sequence
  Synthetic oligonucleotide: FAS-4534
aggaagccugaaggaugaaca

SEQ ID NO: 31596 - RNA, 22 nt, Artificial Sequence
  Synthetic oligonucleotide: FAS-4535
gaggaagccugaaggaugaaca

SEQ ID NO: 31597 - RNA, 23 nt, Artificial Sequence
  Synthetic oligonucleotide: FAS-4536
agaggaagccugaaggaugaaca

SEQ ID NO: 31598 - RNA, 24 nt, Artificial Sequence
  Synthetic oligonucleotide: FAS-4537
gagaggaagccugaaggaugaaca

SEQ ID NO: 31599 - RNA, 18 nt, Artificial Sequence
  Synthetic oligonucleotide: FAS-4538
agcugccccgccugccca

SEQ ID NO: 31600 - RNA, 19 nt, Artificial Sequence
  Synthetic oligonucleotide: FAS-4539
gagcugccccgccugccca

SEQ ID NO: 31601 - RNA, 20 nt, Artificial Sequence
  Synthetic oligonucleotide: FAS-1717
ggagcugccccgccugccca

SEQ ID NO: 31602 - RNA, 21 nt, Artificial Sequence
  Synthetic oligonucleotide: FAS-4540
cggagcugccccgccugccca

SEQ ID NO: 31603 - RNA, 22 nt, Artificial Sequence
  Synthetic oligonucleotide: FAS-4541
ccggagcugccccgccugccca

SEQ ID NO: 31604 - RNA, 23 nt, Artificial Sequence
  Synthetic oligonucleotide: FAS-4542
gccggagcugccccgccugccca

SEQ ID NO: 31605 - RNA, 24 nt, Artificial Sequence
  Synthetic oligonucleotide: FAS-4543
cgccggagcugccccgccugccca

SEQ ID NO: 31606 - RNA, 18 nt, Artificial Sequence
  Synthetic oligonucleotide: FAS-4544
gcuugguggacgaugcca

SEQ ID NO: 31607 - RNA, 19 nt, Artificial Sequence
  Synthetic oligonucleotide: FAS-4545
agcuugguggacgaugcca

SEQ ID NO: 31608 - RNA, 20 nt, Artificial Sequence
  Synthetic oligonucleotide: FAS-1422
gagcuugguggacgaugcca

SEQ ID NO: 31609 - RNA, 21 nt, Artificial Sequence
  Synthetic oligonucleotide: FAS-4546
agagcuugguggacgaugcca

SEQ ID NO: 31610 - RNA, 22 nt, Artificial Sequence
  Synthetic oligonucleotide: FAS-4547
cagagcuugguggacgaugcca

SEQ ID NO: 31611 - RNA, 23 nt, Artificial Sequence
  Synthetic oligonucleotide: FAS-4548
gcagagcuugguggacgaugcca

SEQ ID NO: 31612 - RNA, 24 nt, Artificial Sequence
  Synthetic oligonucleotide: FAS-4549
ugcagagcuugguggacgaugcca

SEQ ID NO: 31613 - RNA, 18 nt, Artificial Sequence
  Synthetic oligonucleotide: FAS-4550
agggagagagguugcaga

SEQ ID NO: 31614 - RNA, 19 nt, Artificial Sequence
  Synthetic oligonucleotide: FAS-4551
aagggagagagguugcaga

SEQ ID NO: 31615 - RNA, 20 nt, Artificial Sequence
  Synthetic oligonucleotide: FAS-1419
gaagggagagagguugcaga

SEQ ID NO: 31616 - RNA, 21 nt, Artificial Sequence
  Synthetic oligonucleotide: FAS-4552
ggaagggagagagguugcaga

SEQ ID NO: 31617 - RNA, 22 nt, Artificial Sequence
  Synthetic oligonucleotide: FAS-4553
gggaagggagagagguugcaga

SEQ ID NO: 31618 - RNA, 23 nt, Artificial Sequence
  Synthetic oligonucleotide: FAS-4554
ugggaagggagagagguugcaga

SEQ ID NO: 31619 - RNA, 24 nt, Artificial Sequence
  Synthetic oligonucleotide: FAS-4555
uugggaagggagagagguugcaga

SEQ ID NO: 31620 - RNA, 18 nt, Artificial Sequence
  Synthetic oligonucleotide: FAS-4556
cauauaacuuuuucgaga

SEQ ID NO: 31621 - RNA, 19 nt, Artificial Sequence
  Synthetic oligonucleotide: FAS-4557
ccauauaacuuuuucgaga

SEQ ID NO: 31622 - RNA, 20 nt, Artificial Sequence
  Synthetic oligonucleotide: FAS-1693
cccauauaacuuuuucgaga

SEQ ID NO: 31623 - RNA, 18 nt, Artificial Sequence
  Synthetic oligonucleotide: FAS-4558
ucacccacccgcgccgga

SEQ ID NO: 31624 - RNA, 19 nt, Artificial Sequence
  Synthetic oligonucleotide: FAS-4559
cucacccacccgcgccgga

SEQ ID NO: 31625 - RNA, 20 nt, Artificial Sequence
  Synthetic oligonucleotide: FAS-1704
acucacccacccgcgccgga

SEQ ID NO: 31626 - RNA, 21 nt, Artificial Sequence
  Synthetic oligonucleotide: FAS-4560
cacucacccacccgcgccgga

SEQ ID NO: 31627 - RNA, 22 nt, Artificial Sequence
  Synthetic oligonucleotide: FAS-4561
gcacucacccacccgcgccgga

SEQ ID NO: 31628 - RNA, 23 nt, Artificial Sequence
  Synthetic oligonucleotide: FAS-4562
cgcacucacccacccgcgccgga

SEQ ID NO: 31629 - RNA, 24 nt, Artificial Sequence
  Synthetic oligonucleotide: FAS-4563
gcgcacucacccacccgcgccgga

SEQ ID NO: 31630 - RNA, 18 nt, Artificial Sequence
  Synthetic oligonucleotide: FAS-4564
aaucuaauugggaaggga

SEQ ID NO: 31631 - RNA, 19 nt, Artificial Sequence
  Synthetic oligonucleotide: FAS-4565
gaaucuaauugggaaggga

SEQ ID NO: 31632 - RNA, 20 nt, Artificial Sequence
  Synthetic oligonucleotide: FAS-1417
ugaaucuaauugggaaggga

SEQ ID NO: 31633 - RNA, 21 nt, Artificial Sequence
  Synthetic oligonucleotide: FAS-4566
uugaaucuaauugggaaggga

SEQ ID NO: 31634 - RNA, 22 nt, Artificial Sequence
  Synthetic oligonucleotide: FAS-4567
guugaaucuaauugggaaggga

SEQ ID NO: 31635 - RNA, 23 nt, Artificial Sequence
  Synthetic oligonucleotide: FAS-4568
gguugaaucuaauugggaaggga

SEQ ID NO: 31636 - RNA, 24 nt, Artificial Sequence
  Synthetic oligonucleotide: FAS-4569
ggguugaaucuaauugggaaggga

SEQ ID NO: 31637 - RNA, 18 nt, Artificial Sequence
  Synthetic oligonucleotide: FAS-4570
gguugaaucuaauuggga

SEQ ID NO: 31638 - RNA, 19 nt, Artificial Sequence
  Synthetic oligonucleotide: FAS-4571
ggguugaaucuaauuggga

SEQ ID NO: 31639 - RNA, 20 nt, Artificial Sequence
  Synthetic oligonucleotide: FAS-1800
uggguugaaucuaauuggga

SEQ ID NO: 31640 - RNA, 21 nt, Artificial Sequence
  Synthetic oligonucleotide: FAS-4572
auggguugaaucuaauuggga

SEQ ID NO: 31641 - RNA, 22 nt, Artificial Sequence
  Synthetic oligonucleotide: FAS-4573
aauggguugaaucuaauuggga

SEQ ID NO: 31642 - RNA, 23 nt, Artificial Sequence
  Synthetic oligonucleotide: FAS-4574
uaauggguugaaucuaauuggga

SEQ ID NO: 31643 - RNA, 24 nt, Artificial Sequence
  Synthetic oligonucleotide: FAS-4575
uuaauggguugaaucuaauuggga

SEQ ID NO: 31644 - RNA, 18 nt, Artificial Sequence
  Synthetic oligonucleotide: FAS-4576
gaagaaaaugucaacuga

SEQ ID NO: 31645 - RNA, 19 nt, Artificial Sequence
  Synthetic oligonucleotide: FAS-4577
agaagaaaaugucaacuga

SEQ ID NO: 31646 - RNA, 20 nt, Artificial Sequence
  Synthetic oligonucleotide: FAS-1401
cagaagaaaaugucaacuga

SEQ ID NO: 31647 - RNA, 21 nt, Artificial Sequence
  Synthetic oligonucleotide: FAS-4578
ccagaagaaaaugucaacuga

SEQ ID NO: 31648 - RNA, 22 nt, Artificial Sequence
  Synthetic oligonucleotide: FAS-4579
uccagaagaaaaugucaacuga

SEQ ID NO: 31649 - RNA, 23 nt, Artificial Sequence
  Synthetic oligonucleotide: FAS-4580
cuccagaagaaaaugucaacuga

SEQ ID NO: 31650 - RNA, 24 nt, Artificial Sequence
  Synthetic oligonucleotide: FAS-4581
gcuccagaagaaaaugucaacuga

SEQ ID NO: 31651 - RNA, 18 nt, Artificial Sequence
  Synthetic oligonucleotide: FAS-4582
cugagcacccgggccuga

SEQ ID NO: 31652 - RNA, 19 nt, Artificial Sequence
  Synthetic oligonucleotide: FAS-4583
ucugagcacccgggccuga

SEQ ID NO: 31653 - RNA, 20 nt, Artificial Sequence
  Synthetic oligonucleotide: FAS-2081
uucugagcacccgggccuga

SEQ ID NO: 31654 - RNA, 21 nt, Artificial Sequence
  Synthetic oligonucleotide: FAS-4584
guucugagcacccgggccuga

SEQ ID NO: 31655 - RNA, 22 nt, Artificial Sequence
  Synthetic oligonucleotide: FAS-4585
cguucugagcacccgggccuga

SEQ ID NO: 31656 - RNA, 23 nt, Artificial Sequence
  Synthetic oligonucleotide: FAS-4586
gcguucugagcacccgggccuga

SEQ ID NO: 31657 - RNA, 24 nt, Artificial Sequence
  Synthetic oligonucleotide: FAS-4587
agcguucugagcacccgggccuga

SEQ ID NO: 31658 - RNA, 18 nt, Artificial Sequence
  Synthetic oligonucleotide: FAS-4588
augcaaaacacaggguga

SEQ ID NO: 31659 - RNA, 19 nt, Artificial Sequence
  Synthetic oligonucleotide: FAS-4589
gaugcaaaacacaggguga

SEQ ID NO: 31660 - RNA, 20 nt, Artificial Sequence
  Synthetic oligonucleotide: FAS-1783
agaugcaaaacacaggguga

SEQ ID NO: 31661 - RNA, 21 nt, Artificial Sequence
  Synthetic oligonucleotide: FAS-4590
cagaugcaaaacacaggguga

SEQ ID NO: 31662 - RNA, 22 nt, Artificial Sequence
  Synthetic oligonucleotide: FAS-4591
acagaugcaaaacacaggguga

SEQ ID NO: 31663 - RNA, 23 nt, Artificial Sequence
  Synthetic oligonucleotide: FAS-4592
gacagaugcaaaacacaggguga

SEQ ID NO: 31664 - RNA, 24 nt, Artificial Sequence
  Synthetic oligonucleotide: FAS-4593
ugacagaugcaaaacacaggguga

SEQ ID NO: 31665 - RNA, 18 nt, Artificial Sequence
  Synthetic oligonucleotide: FAS-4594
gacgaugccaaaggaaua

SEQ ID NO: 31666 - RNA, 19 nt, Artificial Sequence
  Synthetic oligonucleotide: FAS-4595
ggacgaugccaaaggaaua

SEQ ID NO: 31667 - RNA, 20 nt, Artificial Sequence
  Synthetic oligonucleotide: FAS-1424
uggacgaugccaaaggaaua

SEQ ID NO: 31668 - RNA, 21 nt, Artificial Sequence
  Synthetic oligonucleotide: FAS-4596
guggacgaugccaaaggaaua

SEQ ID NO: 31669 - RNA, 22 nt, Artificial Sequence
  Synthetic oligonucleotide: FAS-4597
gguggacgaugccaaaggaaua

SEQ ID NO: 31670 - RNA, 23 nt, Artificial Sequence
  Synthetic oligonucleotide: FAS-4598
ugguggacgaugccaaaggaaua

SEQ ID NO: 31671 - RNA, 24 nt, Artificial Sequence
  Synthetic oligonucleotide: FAS-4599
uugguggacgaugccaaaggaaua

SEQ ID NO: 31672 - RNA, 18 nt, Artificial Sequence
  Synthetic oligonucleotide: FAS-4600
uuacaagauuuuuuuuua

SEQ ID NO: 31673 - RNA, 19 nt, Artificial Sequence
  Synthetic oligonucleotide: FAS-4601
auuacaagauuuuuuuuua

SEQ ID NO: 31674 - RNA, 20 nt, Artificial Sequence
  Synthetic oligonucleotide: FAS-1432
aauuacaagauuuuuuuuua

SEQ ID NO: 31675 - RNA, 21 nt, Artificial Sequence
  Synthetic oligonucleotide: FAS-4602
gaauuacaagauuuuuuuuua

SEQ ID NO: 31676 - RNA, 22 nt, Artificial Sequence
  Synthetic oligonucleotide: FAS-4603
agaauuacaagauuuuuuuuua

SEQ ID NO: 31677 - RNA, 23 nt, Artificial Sequence
  Synthetic oligonucleotide: FAS-4604
aagaauuacaagauuuuuuuuua

SEQ ID NO: 31678 - RNA, 24 nt, Artificial Sequence
  Synthetic oligonucleotide: FAS-4605
aaagaauuacaagauuuuuuuuua

SEQ ID NO: 31679 - RNA, 18 nt, Artificial Sequence
  Synthetic oligonucleotide: FAS-4606
ccccacgcccaccucaac

SEQ ID NO: 31680 - RNA, 19 nt, Artificial Sequence
  Synthetic oligonucleotide: FAS-4607
accccacgcccaccucaac

SEQ ID NO: 31681 - RNA, 20 nt, Artificial Sequence
  Synthetic oligonucleotide: FAS-1710
caccccacgcccaccucaac

SEQ ID NO: 31682 - RNA, 21 nt, Artificial Sequence
  Synthetic oligonucleotide: FAS-4608
gcaccccacgcccaccucaac

SEQ ID NO: 31683 - RNA, 22 nt, Artificial Sequence
  Synthetic oligonucleotide: FAS-4609
cgcaccccacgcccaccucaac

SEQ ID NO: 31684 - RNA, 23 nt, Artificial Sequence
  Synthetic oligonucleotide: FAS-4610
ccgcaccccacgcccaccucaac

SEQ ID NO: 31685 - RNA, 24 nt, Artificial Sequence
  Synthetic oligonucleotide: FAS-4611
uccgcaccccacgcccaccucaac

SEQ ID NO: 31686 - RNA, 18 nt, Artificial Sequence
  Synthetic oligonucleotide: FAS-4612
cuccagcguucugagcac

SEQ ID NO: 31687 - RNA, 19 nt, Artificial Sequence
  Synthetic oligonucleotide: FAS-4613
ccuccagcguucugagcac

SEQ ID NO: 31688 - RNA, 20 nt, Artificial Sequence
  Synthetic oligonucleotide: FAS-1721
uccuccagcguucugagcac

SEQ ID NO: 31689 - RNA, 21 nt, Artificial Sequence
  Synthetic oligonucleotide: FAS-4614
guccuccagcguucugagcac

SEQ ID NO: 31690 - RNA, 22 nt, Artificial Sequence
  Synthetic oligonucleotide: FAS-4615
aguccuccagcguucugagcac

SEQ ID NO: 31691 - RNA, 23 nt, Artificial Sequence
  Synthetic oligonucleotide: FAS-4616
aaguccuccagcguucugagcac

SEQ ID NO: 31692 - RNA, 24 nt, Artificial Sequence
  Synthetic oligonucleotide: FAS-4617
caaguccuccagcguucugagcac

SEQ ID NO: 31693 - RNA, 18 nt, Artificial Sequence
  Synthetic oligonucleotide: FAS-4618
acuuugaacaguguucac

SEQ ID NO: 31694 - RNA, 19 nt, Artificial Sequence
  Synthetic oligonucleotide: FAS-4619
gacuuugaacaguguucac

SEQ ID NO: 31695 - RNA, 20 nt, Artificial Sequence
  Synthetic oligonucleotide: FAS-1429
ugacuuugaacaguguucac

SEQ ID NO: 31696 - RNA, 21 nt, Artificial Sequence
  Synthetic oligonucleotide: FAS-4620
gugacuuugaacaguguucac

SEQ ID NO: 31697 - RNA, 22 nt, Artificial Sequence
  Synthetic oligonucleotide: FAS-4621
agugacuuugaacaguguucac

SEQ ID NO: 31698 - RNA, 23 nt, Artificial Sequence
  Synthetic oligonucleotide: FAS-4622
uagugacuuugaacaguguucac

SEQ ID NO: 31699 - RNA, 24 nt, Artificial Sequence
  Synthetic oligonucleotide: FAS-4623
auagugacuuugaacaguguucac

SEQ ID NO: 31700 - RNA, 18 nt, Artificial Sequence
  Synthetic oligonucleotide: FAS-4624
aagguccuaacagccccc

SEQ ID NO: 31701 - RNA, 19 nt, Artificial Sequence
  Synthetic oligonucleotide: FAS-4625
gaagguccuaacagccccc

SEQ ID NO: 31702 - RNA, 20 nt, Artificial Sequence
  Synthetic oligonucleotide: FAS-2084
ggaagguccuaacagccccc

SEQ ID NO: 31703 - RNA, 21 nt, Artificial Sequence
  Synthetic oligonucleotide: FAS-4626
gggaagguccuaacagccccc

SEQ ID NO: 31704 - RNA, 22 nt, Artificial Sequence
  Synthetic oligonucleotide: FAS-4627
agggaagguccuaacagccccc

SEQ ID NO: 31705 - RNA, 23 nt, Artificial Sequence
  Synthetic oligonucleotide: FAS-4628
gagggaagguccuaacagccccc

SEQ ID NO: 31706 - RNA, 24 nt, Artificial Sequence
  Synthetic oligonucleotide: FAS-4629
ugagggaagguccuaacagccccc

SEQ ID NO: 31707 - RNA, 18 nt, Artificial Sequence
  Synthetic oligonucleotide: FAS-4630
ggcucucuccccgccccc

SEQ ID NO: 31708 - RNA, 19 nt, Artificial Sequence
  Synthetic oligonucleotide: FAS-4631
aggcucucuccccgccccc

SEQ ID NO: 31709 - RNA, 20 nt, Artificial Sequence
  Synthetic oligonucleotide: FAS-1700
caggcucucuccccgccccc

SEQ ID NO: 31710 - RNA, 21 nt, Artificial Sequence
  Synthetic oligonucleotide: FAS-4632
gcaggcucucuccccgccccc

SEQ ID NO: 31711 - RNA, 22 nt, Artificial Sequence
  Synthetic oligonucleotide: FAS-4633
ugcaggcucucuccccgccccc

SEQ ID NO: 31712 - RNA, 23 nt, Artificial Sequence
  Synthetic oligonucleotide: FAS-4634
cugcaggcucucuccccgccccc

SEQ ID NO: 31713 - RNA, 24 nt, Artificial Sequence
  Synthetic oligonucleotide: FAS-4635
gcugcaggcucucuccccgccccc

SEQ ID NO: 31714 - RNA, 18 nt, Artificial Sequence
  Synthetic oligonucleotide: FAS-4636
gaagguccuaacagcccc

SEQ ID NO: 31715 - RNA, 19 nt, Artificial Sequence
  Synthetic oligonucleotide: FAS-4637
ggaagguccuaacagcccc

SEQ ID NO: 31716 - RNA, 20 nt, Artificial Sequence
  Synthetic oligonucleotide: FAS-2083
gggaagguccuaacagcccc

SEQ ID NO: 31717 - RNA, 21 nt, Artificial Sequence
  Synthetic oligonucleotide: FAS-4638
agggaagguccuaacagcccc

SEQ ID NO: 31718 - RNA, 22 nt, Artificial Sequence
  Synthetic oligonucleotide: FAS-4639
gagggaagguccuaacagcccc

SEQ ID NO: 31719 - RNA, 23 nt, Artificial Sequence
  Synthetic oligonucleotide: FAS-4640
ugagggaagguccuaacagcccc

SEQ ID NO: 31720 - RNA, 24 nt, Artificial Sequence
  Synthetic oligonucleotide: FAS-4641
cugagggaagguccuaacagcccc

SEQ ID NO: 31721 - RNA, 18 nt, Artificial Sequence
  Synthetic oligonucleotide: FAS-4642
ggaagguccuaacagccc

SEQ ID NO: 31722 - RNA, 19 nt, Artificial Sequence
  Synthetic oligonucleotide: FAS-4643
gggaagguccuaacagccc

SEQ ID NO: 31723 - RNA, 20 nt, Artificial Sequence
  Synthetic oligonucleotide: FAS-1726
agggaagguccuaacagccc

SEQ ID NO: 31724 - RNA, 21 nt, Artificial Sequence
  Synthetic oligonucleotide: FAS-4644
gagggaagguccuaacagccc

SEQ ID NO: 31725 - RNA, 22 nt, Artificial Sequence
  Synthetic oligonucleotide: FAS-4645
ugagggaagguccuaacagccc

SEQ ID NO: 31726 - RNA, 23 nt, Artificial Sequence
  Synthetic oligonucleotide: FAS-4646
cugagggaagguccuaacagccc

SEQ ID NO: 31727 - RNA, 24 nt, Artificial Sequence
  Synthetic oligonucleotide: FAS-4647
ccugagggaagguccuaacagccc

SEQ ID NO: 31728 - RNA, 18 nt, Artificial Sequence
  Synthetic oligonucleotide: FAS-4648
cacuucgcaucaaggccc

SEQ ID NO: 31729 - RNA, 19 nt, Artificial Sequence
  Synthetic oligonucleotide: FAS-4649
gcacuucgcaucaaggccc

SEQ ID NO: 31730 - RNA, 20 nt, Artificial Sequence
  Synthetic oligonucleotide: FAS-1719
agcacuucgcaucaaggccc

SEQ ID NO: 31731 - RNA, 21 nt, Artificial Sequence
  Synthetic oligonucleotide: FAS-4650
cagcacuucgcaucaaggccc

SEQ ID NO: 31732 - RNA, 22 nt, Artificial Sequence
  Synthetic oligonucleotide: FAS-4651
ucagcacuucgcaucaaggccc

SEQ ID NO: 31733 - RNA, 23 nt, Artificial Sequence
  Synthetic oligonucleotide: FAS-4652
gucagcacuucgcaucaaggccc

SEQ ID NO: 31734 - RNA, 24 nt, Artificial Sequence
  Synthetic oligonucleotide: FAS-4653
ggucagcacuucgcaucaaggccc

SEQ ID NO: 31735 - RNA, 18 nt, Artificial Sequence
  Synthetic oligonucleotide: FAS-4654
uuuuaaagaaaauuggcc

SEQ ID NO: 31736 - RNA, 19 nt, Artificial Sequence
  Synthetic oligonucleotide: FAS-4655
uuuuuaaagaaaauuggcc

SEQ ID NO: 31737 - RNA, 20 nt, Artificial Sequence
  Synthetic oligonucleotide: FAS-1810
uuuuuuaaagaaaauuggcc

SEQ ID NO: 31738 - RNA, 21 nt, Artificial Sequence
  Synthetic oligonucleotide: FAS-4656
uuuuuuuaaagaaaauuggcc

SEQ ID NO: 31739 - RNA, 22 nt, Artificial Sequence
  Synthetic oligonucleotide: FAS-4657
uuuuuuuuaaagaaaauuggcc

SEQ ID NO: 31740 - RNA, 23 nt, Artificial Sequence
  Synthetic oligonucleotide: FAS-4658
uuuuuuuuuaaagaaaauuggcc

SEQ ID NO: 31741 - RNA, 24 nt, Artificial Sequence
  Synthetic oligonucleotide: FAS-4659
auuuuuuuuuaaagaaaauuggcc

SEQ ID NO: 31742 - RNA, 18 nt, Artificial Sequence
  Synthetic oligonucleotide: FAS-4660
uggagcgcaguggucucc

SEQ ID NO: 31743 - RNA, 19 nt, Artificial Sequence
  Synthetic oligonucleotide: FAS-4661
guggagcgcaguggucucc

SEQ ID NO: 31744 - RNA, 20 nt, Artificial Sequence
  Synthetic oligonucleotide: FAS-1713
cguggagcgcaguggucucc

SEQ ID NO: 31745 - RNA, 21 nt, Artificial Sequence
  Synthetic oligonucleotide: FAS-4662
acguggagcgcaguggucucc

SEQ ID NO: 31746 - RNA, 22 nt, Artificial Sequence
  Synthetic oligonucleotide: FAS-4663
aacguggagcgcaguggucucc

SEQ ID NO: 31747 - RNA, 23 nt, Artificial Sequence
  Synthetic oligonucleotide: FAS-4664
caacguggagcgcaguggucucc

SEQ ID NO: 31748 - RNA, 24 nt, Artificial Sequence
  Synthetic oligonucleotide: FAS-4665
ucaacguggagcgcaguggucucc

SEQ ID NO: 31749 - RNA, 18 nt, Artificial Sequence
  Synthetic oligonucleotide: FAS-4666
ugucaacugagaggaagc

SEQ ID NO: 31750 - RNA, 19 nt, Artificial Sequence
  Synthetic oligonucleotide: FAS-4667
augucaacugagaggaagc

SEQ ID NO: 31751 - RNA, 20 nt, Artificial Sequence
  Synthetic oligonucleotide: FAS-1403
aaugucaacugagaggaagc

SEQ ID NO: 31752 - RNA, 21 nt, Artificial Sequence
  Synthetic oligonucleotide: FAS-4668
aaaugucaacugagaggaagc

SEQ ID NO: 31753 - RNA, 22 nt, Artificial Sequence
  Synthetic oligonucleotide: FAS-4669
aaaaugucaacugagaggaagc

SEQ ID NO: 31754 - RNA, 23 nt, Artificial Sequence
  Synthetic oligonucleotide: FAS-4670
gaaaaugucaacugagaggaagc

SEQ ID NO: 31755 - RNA, 24 nt, Artificial Sequence
  Synthetic oligonucleotide: FAS-4671
agaaaaugucaacugagaggaagc

SEQ ID NO: 31756 - RNA, 18 nt, Artificial Sequence
  Synthetic oligonucleotide: FAS-4672
aacaguguucaccagagc

SEQ ID NO: 31757 - RNA, 19 nt, Artificial Sequence
  Synthetic oligonucleotide: FAS-4673
gaacaguguucaccagagc

SEQ ID NO: 31758 - RNA, 20 nt, Artificial Sequence
  Synthetic oligonucleotide: FAS-1430
ugaacaguguucaccagagc

SEQ ID NO: 31759 - RNA, 21 nt, Artificial Sequence
  Synthetic oligonucleotide: FAS-4674
uugaacaguguucaccagagc

SEQ ID NO: 31760 - RNA, 22 nt, Artificial Sequence
  Synthetic oligonucleotide: FAS-4675
uuugaacaguguucaccagagc

SEQ ID NO: 31761 - RNA, 23 nt, Artificial Sequence
  Synthetic oligonucleotide: FAS-4676
cuuugaacaguguucaccagagc

SEQ ID NO: 31762 - RNA, 24 nt, Artificial Sequence
  Synthetic oligonucleotide: FAS-4677
acuuugaacaguguucaccagagc

SEQ ID NO: 31763 - RNA, 18 nt, Artificial Sequence
  Synthetic oligonucleotide: FAS-4678
guggucuccgaggagcgc

SEQ ID NO: 31764 - RNA, 19 nt, Artificial Sequence
  Synthetic oligonucleotide: FAS-4679
aguggucuccgaggagcgc

SEQ ID NO: 31765 - RNA, 20 nt, Artificial Sequence
  Synthetic oligonucleotide: FAS-2073
caguggucuccgaggagcgc

SEQ ID NO: 31766 - RNA, 21 nt, Artificial Sequence
  Synthetic oligonucleotide: FAS-4680
gcaguggucuccgaggagcgc

SEQ ID NO: 31767 - RNA, 22 nt, Artificial Sequence
  Synthetic oligonucleotide: FAS-4681
cgcaguggucuccgaggagcgc

SEQ ID NO: 31768 - RNA, 23 nt, Artificial Sequence
  Synthetic oligonucleotide: FAS-4682
gcgcaguggucuccgaggagcgc

SEQ ID NO: 31769 - RNA, 24 nt, Artificial Sequence
  Synthetic oligonucleotide: FAS-4683
agcgcaguggucuccgaggagcgc

SEQ ID NO: 31770 - RNA, 18 nt, Artificial Sequence
  Synthetic oligonucleotide: FAS-4684
gcacucacccacccgcgc

SEQ ID NO: 31771 - RNA, 19 nt, Artificial Sequence
  Synthetic oligonucleotide: FAS-4685
cgcacucacccacccgcgc

SEQ ID NO: 31772 - RNA, 20 nt, Artificial Sequence
  Synthetic oligonucleotide: FAS-2060
gcgcacucacccacccgcgc

SEQ ID NO: 31773 - RNA, 21 nt, Artificial Sequence
  Synthetic oligonucleotide: FAS-4686
cgcgcacucacccacccgcgc

SEQ ID NO: 31774 - RNA, 22 nt, Artificial Sequence
  Synthetic oligonucleotide: FAS-4687
gcgcgcacucacccacccgcgc

SEQ ID NO: 31775 - RNA, 23 nt, Artificial Sequence
  Synthetic oligonucleotide: FAS-4688
ggcgcgcacucacccacccgcgc

SEQ ID NO: 31776 - RNA, 24 nt, Artificial Sequence
  Synthetic oligonucleotide: FAS-4689
cggcgcgcacucacccacccgcgc

SEQ ID NO: 31777 - RNA, 18 nt, Artificial Sequence
  Synthetic oligonucleotide: FAS-4690
cguucugagcacccgggc

SEQ ID NO: 31778 - RNA, 19 nt, Artificial Sequence
  Synthetic oligonucleotide: FAS-4691
gcguucugagcacccgggc

SEQ ID NO: 31779 - RNA, 20 nt, Artificial Sequence
  Synthetic oligonucleotide: FAS-1722
agcguucugagcacccgggc

SEQ ID NO: 31780 - RNA, 21 nt, Artificial Sequence
  Synthetic oligonucleotide: FAS-4692
cagcguucugagcacccgggc

SEQ ID NO: 31781 - RNA, 22 nt, Artificial Sequence
  Synthetic oligonucleotide: FAS-4693
ccagcguucugagcacccgggc

SEQ ID NO: 31782 - RNA, 23 nt, Artificial Sequence
  Synthetic oligonucleotide: FAS-4694
uccagcguucugagcacccgggc

SEQ ID NO: 31783 - RNA, 24 nt, Artificial Sequence
  Synthetic oligonucleotide: FAS-4695
cuccagcguucugagcacccgggc

SEQ ID NO: 31784 - RNA, 18 nt, Artificial Sequence
  Synthetic oligonucleotide: FAS-4696
uuuuuaaagaaaauuggc

SEQ ID NO: 31785 - RNA, 19 nt, Artificial Sequence
  Synthetic oligonucleotide: FAS-4697
uuuuuuaaagaaaauuggc

SEQ ID NO: 31786 - RNA, 20 nt, Artificial Sequence
  Synthetic oligonucleotide: FAS-1433
uuuuuuuaaagaaaauuggc

SEQ ID NO: 31787 - RNA, 21 nt, Artificial Sequence
  Synthetic oligonucleotide: FAS-4698
uuuuuuuuaaagaaaauuggc

SEQ ID NO: 31788 - RNA, 22 nt, Artificial Sequence
  Synthetic oligonucleotide: FAS-4699
uuuuuuuuuaaagaaaauuggc

SEQ ID NO: 31789 - RNA, 23 nt, Artificial Sequence
  Synthetic oligonucleotide: FAS-4700
auuuuuuuuuaaagaaaauuggc

SEQ ID NO: 31790 - RNA, 24 nt, Artificial Sequence
  Synthetic oligonucleotide: FAS-4701
gauuuuuuuuuaaagaaaauuggc

SEQ ID NO: 31791 - RNA, 18 nt, Artificial Sequence
  Synthetic oligonucleotide: FAS-4702
ccuacgucugagaacugc

SEQ ID NO: 31792 - RNA, 19 nt, Artificial Sequence
  Synthetic oligonucleotide: FAS-4703
uccuacgucugagaacugc

SEQ ID NO: 31793 - RNA, 20 nt, Artificial Sequence
  Synthetic oligonucleotide: FAS-1697
uuccuacgucugagaacugc

SEQ ID NO: 31794 - RNA, 21 nt, Artificial Sequence
  Synthetic oligonucleotide: FAS-4704
uuuccuacgucugagaacugc

SEQ ID NO: 31795 - RNA, 22 nt, Artificial Sequence
  Synthetic oligonucleotide: FAS-4705
auuuccuacgucugagaacugc

SEQ ID NO: 31796 - RNA, 23 nt, Artificial Sequence
  Synthetic oligonucleotide: FAS-4706
uauuuccuacgucugagaacugc

SEQ ID NO: 31797 - RNA, 24 nt, Artificial Sequence
  Synthetic oligonucleotide: FAS-4707
uuauuuccuacgucugagaacugc

SEQ ID NO: 31798 - RNA, 18 nt, Artificial Sequence
  Synthetic oligonucleotide: FAS-4708
gggugauggaaagcccuc

SEQ ID NO: 31799 - RNA, 19 nt, Artificial Sequence
  Synthetic oligonucleotide: FAS-4709
agggugauggaaagcccuc

SEQ ID NO: 31800 - RNA, 20 nt, Artificial Sequence
  Synthetic oligonucleotide: FAS-1784
cagggugauggaaagcccuc

SEQ ID NO: 31801 - RNA, 21 nt, Artificial Sequence
  Synthetic oligonucleotide: FAS-4710
acagggugauggaaagcccuc

SEQ ID NO: 31802 - RNA, 22 nt, Artificial Sequence
  Synthetic oligonucleotide: FAS-4711
cacagggugauggaaagcccuc

SEQ ID NO: 31803 - RNA, 23 nt, Artificial Sequence
  Synthetic oligonucleotide: FAS-4712
acacagggugauggaaagcccuc

SEQ ID NO: 31804 - RNA, 24 nt, Artificial Sequence
  Synthetic oligonucleotide: FAS-4713
aacacagggugauggaaagcccuc

SEQ ID NO: 31805 - RNA, 18 nt, Artificial Sequence
  Synthetic oligonucleotide: FAS-4714
gagggcccaaacaggcuc

SEQ ID NO: 31806 - RNA, 19 nt, Artificial Sequence
  Synthetic oligonucleotide: FAS-4715
ugagggcccaaacaggcuc

SEQ ID NO: 31807 - RNA, 20 nt, Artificial Sequence
  Synthetic oligonucleotide: FAS-1397
uugagggcccaaacaggcuc

SEQ ID NO: 31808 - RNA, 21 nt, Artificial Sequence
  Synthetic oligonucleotide: FAS-4716
uuugagggcccaaacaggcuc

SEQ ID NO: 31809 - RNA, 22 nt, Artificial Sequence
  Synthetic oligonucleotide: FAS-4717
auuugagggcccaaacaggcuc

SEQ ID NO: 31810 - RNA, 23 nt, Artificial Sequence
  Synthetic oligonucleotide: FAS-4718
gauuugagggcccaaacaggcuc

SEQ ID NO: 31811 - RNA, 24 nt, Artificial Sequence
  Synthetic oligonucleotide: FAS-4719
agauuugagggcccaaacaggcuc

SEQ ID NO: 31812 - RNA, 18 nt, Artificial Sequence
  Synthetic oligonucleotide: FAS-4720
ccuuuaguguguccaguc

SEQ ID NO: 31813 - RNA, 19 nt, Artificial Sequence
  Synthetic oligonucleotide: FAS-4721
accuuuaguguguccaguc

SEQ ID NO: 31814 - RNA, 20 nt, Artificial Sequence
  Synthetic oligonucleotide: FAS-1807
aaccuuuaguguguccaguc

SEQ ID NO: 31815 - RNA, 21 nt, Artificial Sequence
  Synthetic oligonucleotide: FAS-4722
aaaccuuuaguguguccaguc

SEQ ID NO: 31816 - RNA, 22 nt, Artificial Sequence
  Synthetic oligonucleotide: FAS-4723
gaaaccuuuaguguguccaguc

SEQ ID NO: 31817 - RNA, 23 nt, Artificial Sequence
  Synthetic oligonucleotide: FAS-4724
ugaaaccuuuaguguguccaguc

SEQ ID NO: 31818 - RNA, 24 nt, Artificial Sequence
  Synthetic oligonucleotide: FAS-4725
cugaaaccuuuaguguguccaguc

SEQ ID NO: 31819 - RNA, 18 nt, Artificial Sequence
  Synthetic oligonucleotide: FAS-4726
ggcuugucagggcuuguc

SEQ ID NO: 31820 - RNA, 19 nt, Artificial Sequence
  Synthetic oligonucleotide: FAS-4727
uggcuugucagggcuuguc

SEQ ID NO: 31821 - RNA, 20 nt, Artificial Sequence
  Synthetic oligonucleotide: FAS-1706
uuggcuugucagggcuuguc

SEQ ID NO: 31822 - RNA, 21 nt, Artificial Sequence
  Synthetic oligonucleotide: FAS-4728
cuuggcuugucagggcuuguc

SEQ ID NO: 31823 - RNA, 22 nt, Artificial Sequence
  Synthetic oligonucleotide: FAS-4729
gcuuggcuugucagggcuuguc

SEQ ID NO: 31824 - RNA, 23 nt, Artificial Sequence
  Synthetic oligonucleotide: FAS-4730
ggcuuggcuugucagggcuuguc

SEQ ID NO: 31825 - RNA, 24 nt, Artificial Sequence
  Synthetic oligonucleotide: FAS-4731
uggcuuggcuugucagggcuuguc

SEQ ID NO: 31826 - RNA, 18 nt, Artificial Sequence
  Synthetic oligonucleotide: FAS-4732
ggcccaaacaggcuccag

SEQ ID NO: 31827 - RNA, 19 nt, Artificial Sequence
  Synthetic oligonucleotide: FAS-4733
gggcccaaacaggcuccag

SEQ ID NO: 31828 - RNA, 20 nt, Artificial Sequence
  Synthetic oligonucleotide: FAS-1398
agggcccaaacaggcuccag

SEQ ID NO: 31829 - RNA, 21 nt, Artificial Sequence
  Synthetic oligonucleotide: FAS-4734
gagggcccaaacaggcuccag

SEQ ID NO: 31830 - RNA, 22 nt, Artificial Sequence
  Synthetic oligonucleotide: FAS-4735
ugagggcccaaacaggcuccag

SEQ ID NO: 31831 - RNA, 23 nt, Artificial Sequence
  Synthetic oligonucleotide: FAS-4736
uugagggcccaaacaggcuccag

SEQ ID NO: 31832 - RNA, 24 nt, Artificial Sequence
  Synthetic oligonucleotide: FAS-4737
uuugagggcccaaacaggcuccag

SEQ ID NO: 31833 - RNA, 18 nt, Artificial Sequence
  Synthetic oligonucleotide: FAS-4738
aagaaaaugucaacugag

SEQ ID NO: 31834 - RNA, 19 nt, Artificial Sequence
  Synthetic oligonucleotide: FAS-4739
gaagaaaaugucaacugag

SEQ ID NO: 31835 - RNA, 20 nt, Artificial Sequence
  Synthetic oligonucleotide: FAS-1790
agaagaaaaugucaacugag

SEQ ID NO: 31836 - RNA, 21 nt, Artificial Sequence
  Synthetic oligonucleotide: FAS-4740
cagaagaaaaugucaacugag

SEQ ID NO: 31837 - RNA, 22 nt, Artificial Sequence
  Synthetic oligonucleotide: FAS-4741
ccagaagaaaaugucaacugag

SEQ ID NO: 31838 - RNA, 23 nt, Artificial Sequence
  Synthetic oligonucleotide: FAS-4742
uccagaagaaaaugucaacugag

SEQ ID NO: 31839 - RNA, 24 nt, Artificial Sequence
  Synthetic oligonucleotide: FAS-4743
cuccagaagaaaaugucaacugag

SEQ ID NO: 31840 - RNA, 18 nt, Artificial Sequence
  Synthetic oligonucleotide: FAS-4744
cccacgcccaccucaacg

SEQ ID NO: 31841 - RNA, 19 nt, Artificial Sequence
  Synthetic oligonucleotide: FAS-4745
ccccacgcccaccucaacg

SEQ ID NO: 31842 - RNA, 20 nt, Artificial Sequence
  Synthetic oligonucleotide: FAS-2070
accccacgcccaccucaacg

SEQ ID NO: 31843 - RNA, 21 nt, Artificial Sequence
  Synthetic oligonucleotide: FAS-4746
caccccacgcccaccucaacg

SEQ ID NO: 31844 - RNA, 22 nt, Artificial Sequence
  Synthetic oligonucleotide: FAS-4747
gcaccccacgcccaccucaacg

SEQ ID NO: 31845 - RNA, 23 nt, Artificial Sequence
  Synthetic oligonucleotide: FAS-4748
cgcaccccacgcccaccucaacg

SEQ ID NO: 31846 - RNA, 24 nt, Artificial Sequence
  Synthetic oligonucleotide: FAS-4749
ccgcaccccacgcccaccucaacg

SEQ ID NO: 31847 - RNA, 18 nt, Artificial Sequence
  Synthetic oligonucleotide: FAS-4750
gcucucuccccgcccccg

SEQ ID NO: 31848 - RNA, 19 nt, Artificial Sequence
  Synthetic oligonucleotide: FAS-4751
ggcucucuccccgcccccg

SEQ ID NO: 31849 - RNA, 20 nt, Artificial Sequence
  Synthetic oligonucleotide: FAS-2056
aggcucucuccccgcccccg

SEQ ID NO: 31850 - RNA, 21 nt, Artificial Sequence
  Synthetic oligonucleotide: FAS-4752
caggcucucuccccgcccccg

SEQ ID NO: 31851 - RNA, 22 nt, Artificial Sequence
  Synthetic oligonucleotide: FAS-4753
gcaggcucucuccccgcccccg

SEQ ID NO: 31852 - RNA, 23 nt, Artificial Sequence
  Synthetic oligonucleotide: FAS-4754
ugcaggcucucuccccgcccccg

SEQ ID NO: 31853 - RNA, 24 nt, Artificial Sequence
  Synthetic oligonucleotide: FAS-4755
cugcaggcucucuccccgcccccg

SEQ ID NO: 31854 - RNA, 18 nt, Artificial Sequence
  Synthetic oligonucleotide: FAS-4756
ggagcgcaguggucuccg

SEQ ID NO: 31855 - RNA, 19 nt, Artificial Sequence
  Synthetic oligonucleotide: FAS-4757
uggagcgcaguggucuccg

SEQ ID NO: 31856 - RNA, 20 nt, Artificial Sequence
  Synthetic oligonucleotide: FAS-2072
guggagcgcaguggucuccg

SEQ ID NO: 31857 - RNA, 21 nt, Artificial Sequence
  Synthetic oligonucleotide: FAS-4758
cguggagcgcaguggucuccg

SEQ ID NO: 31858 - RNA, 22 nt, Artificial Sequence
  Synthetic oligonucleotide: FAS-4759
acguggagcgcaguggucuccg

SEQ ID NO: 31859 - RNA, 23 nt, Artificial Sequence
  Synthetic oligonucleotide: FAS-4760
aacguggagcgcaguggucuccg

SEQ ID NO: 31860 - RNA, 24 nt, Artificial Sequence
  Synthetic oligonucleotide: FAS-4761
caacguggagcgcaguggucuccg

SEQ ID NO: 31861 - RNA, 18 nt, Artificial Sequence
  Synthetic oligonucleotide: FAS-4762
aguggucuccgaggagcg

SEQ ID NO: 31862 - RNA, 19 nt, Artificial Sequence
  Synthetic oligonucleotide: FAS-4763
caguggucuccgaggagcg

SEQ ID NO: 31863 - RNA, 20 nt, Artificial Sequence
  Synthetic oligonucleotide: FAS-1715
gcaguggucuccgaggagcg

SEQ ID NO: 31864 - RNA, 21 nt, Artificial Sequence
  Synthetic oligonucleotide: FAS-4764
cgcaguggucuccgaggagcg

SEQ ID NO: 31865 - RNA, 22 nt, Artificial Sequence
  Synthetic oligonucleotide: FAS-4765
gcgcaguggucuccgaggagcg

SEQ ID NO: 31866 - RNA, 23 nt, Artificial Sequence
  Synthetic oligonucleotide: FAS-4766
agcgcaguggucuccgaggagcg

SEQ ID NO: 31867 - RNA, 24 nt, Artificial Sequence
  Synthetic oligonucleotide: FAS-4767
gagcgcaguggucuccgaggagcg

SEQ ID NO: 31868 - RNA, 18 nt, Artificial Sequence
  Synthetic oligonucleotide: FAS-4768
cgcacucacccacccgcg

SEQ ID NO: 31869 - RNA, 19 nt, Artificial Sequence
  Synthetic oligonucleotide: FAS-4769
gcgcacucacccacccgcg

SEQ ID NO: 31870 - RNA, 20 nt, Artificial Sequence
  Synthetic oligonucleotide: FAS-1702
cgcgcacucacccacccgcg

SEQ ID NO: 31871 - RNA, 21 nt, Artificial Sequence
  Synthetic oligonucleotide: FAS-4770
gcgcgcacucacccacccgcg

SEQ ID NO: 31872 - RNA, 22 nt, Artificial Sequence
  Synthetic oligonucleotide: FAS-4771
ggcgcgcacucacccacccgcg

SEQ ID NO: 31873 - RNA, 23 nt, Artificial Sequence
  Synthetic oligonucleotide: FAS-4772
cggcgcgcacucacccacccgcg

SEQ ID NO: 31874 - RNA, 24 nt, Artificial Sequence
  Synthetic oligonucleotide: FAS-4773
gcggcgcgcacucacccacccgcg

SEQ ID NO: 31875 - RNA, 18 nt, Artificial Sequence
  Synthetic oligonucleotide: FAS-4774
ugaaucuaauugggaagg

SEQ ID NO: 31876 - RNA, 19 nt, Artificial Sequence
  Synthetic oligonucleotide: FAS-4775
uugaaucuaauugggaagg

SEQ ID NO: 31877 - RNA, 20 nt, Artificial Sequence
  Synthetic oligonucleotide: FAS-1416
guugaaucuaauugggaagg

SEQ ID NO: 31878 - RNA, 21 nt, Artificial Sequence
  Synthetic oligonucleotide: FAS-4776
gguugaaucuaauugggaagg

SEQ ID NO: 31879 - RNA, 22 nt, Artificial Sequence
  Synthetic oligonucleotide: FAS-4777
ggguugaaucuaauugggaagg

SEQ ID NO: 31880 - RNA, 23 nt, Artificial Sequence
  Synthetic oligonucleotide: FAS-4778
uggguugaaucuaauugggaagg

SEQ ID NO: 31881 - RNA, 24 nt, Artificial Sequence
  Synthetic oligonucleotide: FAS-4779
auggguugaaucuaauugggaagg

SEQ ID NO: 31882 - RNA, 18 nt, Artificial Sequence
  Synthetic oligonucleotide: FAS-4780
ugagaggaagccugaagg

SEQ ID NO: 31883 - RNA, 19 nt, Artificial Sequence
  Synthetic oligonucleotide: FAS-4781
cugagaggaagccugaagg

SEQ ID NO: 31884 - RNA, 20 nt, Artificial Sequence
  Synthetic oligonucleotide: FAS-1405
acugagaggaagccugaagg

SEQ ID NO: 31885 - RNA, 21 nt, Artificial Sequence
  Synthetic oligonucleotide: FAS-4782
aacugagaggaagccugaagg

SEQ ID NO: 31886 - RNA, 22 nt, Artificial Sequence
  Synthetic oligonucleotide: FAS-4783
caacugagaggaagccugaagg

SEQ ID NO: 31887 - RNA, 23 nt, Artificial Sequence
  Synthetic oligonucleotide: FAS-4784
ucaacugagaggaagccugaagg

SEQ ID NO: 31888 - RNA, 24 nt, Artificial Sequence
  Synthetic oligonucleotide: FAS-4785
gucaacugagaggaagccugaagg

SEQ ID NO: 31889 - RNA, 18 nt, Artificial Sequence
  Synthetic oligonucleotide: FAS-4786
ggguugaaucuaauuggg

SEQ ID NO: 31890 - RNA, 19 nt, Artificial Sequence
  Synthetic oligonucleotide: FAS-4787
uggguugaaucuaauuggg

SEQ ID NO: 31891 - RNA, 20 nt, Artificial Sequence
  Synthetic oligonucleotide: FAS-1413
auggguugaaucuaauuggg

SEQ ID NO: 31892 - RNA, 21 nt, Artificial Sequence
  Synthetic oligonucleotide: FAS-4788
aauggguugaaucuaauuggg

SEQ ID NO: 31893 - RNA, 22 nt, Artificial Sequence
  Synthetic oligonucleotide: FAS-4789
uaauggguugaaucuaauuggg

SEQ ID NO: 31894 - RNA, 23 nt, Artificial Sequence
  Synthetic oligonucleotide: FAS-4790
uuaauggguugaaucuaauuggg

SEQ ID NO: 31895 - RNA, 24 nt, Artificial Sequence
  Synthetic oligonucleotide: FAS-4791
auuaauggguugaaucuaauuggg

SEQ ID NO: 31896 - RNA, 18 nt, Artificial Sequence
  Synthetic oligonucleotide: FAS-4792
ucugagcacccgggccug

SEQ ID NO: 31897 - RNA, 19 nt, Artificial Sequence
  Synthetic oligonucleotide: FAS-4793
uucugagcacccgggccug

SEQ ID NO: 31898 - RNA, 20 nt, Artificial Sequence
  Synthetic oligonucleotide: FAS-2080
guucugagcacccgggccug

SEQ ID NO: 31899 - RNA, 21 nt, Artificial Sequence
  Synthetic oligonucleotide: FAS-4794
cguucugagcacccgggccug

SEQ ID NO: 31900 - RNA, 22 nt, Artificial Sequence
  Synthetic oligonucleotide: FAS-4795
gcguucugagcacccgggccug

SEQ ID NO: 31901 - RNA, 23 nt, Artificial Sequence
  Synthetic oligonucleotide: FAS-4796
agcguucugagcacccgggccug

SEQ ID NO: 31902 - RNA, 24 nt, Artificial Sequence
  Synthetic oligonucleotide: FAS-4797
cagcguucugagcacccgggccug

SEQ ID NO: 31903 - RNA, 18 nt, Artificial Sequence
  Synthetic oligonucleotide: FAS-4798
agguugcagagugaggug

SEQ ID NO: 31904 - RNA, 19 nt, Artificial Sequence
  Synthetic oligonucleotide: FAS-4799
gagguugcagagugaggug

SEQ ID NO: 31905 - RNA, 20 nt, Artificial Sequence
  Synthetic oligonucleotide: FAS-1420
agagguugcagagugaggug

SEQ ID NO: 31906 - RNA, 21 nt, Artificial Sequence
  Synthetic oligonucleotide: FAS-4800
gagagguugcagagugaggug

SEQ ID NO: 31907 - RNA, 22 nt, Artificial Sequence
  Synthetic oligonucleotide: FAS-4801
agagagguugcagagugaggug

SEQ ID NO: 31908 - RNA, 23 nt, Artificial Sequence
  Synthetic oligonucleotide: FAS-4802
gagagagguugcagagugaggug

SEQ ID NO: 31909 - RNA, 24 nt, Artificial Sequence
  Synthetic oligonucleotide: FAS-4803
ggagagagguugcagagugaggug

SEQ ID NO: 31910 - RNA, 18 nt, Artificial Sequence
  Synthetic oligonucleotide: FAS-4804
gaugcaaaacacagggug

SEQ ID NO: 31911 - RNA, 19 nt, Artificial Sequence
  Synthetic oligonucleotide: FAS-4805
agaugcaaaacacagggug

SEQ ID NO: 31912 - RNA, 20 nt, Artificial Sequence
  Synthetic oligonucleotide: FAS-1390
cagaugcaaaacacagggug

SEQ ID NO: 31913 - RNA, 21 nt, Artificial Sequence
  Synthetic oligonucleotide: FAS-4806
acagaugcaaaacacagggug

SEQ ID NO: 31914 - RNA, 22 nt, Artificial Sequence
  Synthetic oligonucleotide: FAS-4807
gacagaugcaaaacacagggug

SEQ ID NO: 31915 - RNA, 23 nt, Artificial Sequence
  Synthetic oligonucleotide: FAS-4808
ugacagaugcaaaacacagggug

SEQ ID NO: 31916 - RNA, 24 nt, Artificial Sequence
  Synthetic oligonucleotide: FAS-4809
gugacagaugcaaaacacagggug

SEQ ID NO: 31917 - RNA, 18 nt, Artificial Sequence
  Synthetic oligonucleotide: FAS-4810
agugaggugcagagcuug

SEQ ID NO: 31918 - RNA, 19 nt, Artificial Sequence
  Synthetic oligonucleotide: FAS-4811
gagugaggugcagagcuug

SEQ ID NO: 31919 - RNA, 20 nt, Artificial Sequence
  Synthetic oligonucleotide: FAS-1421
agagugaggugcagagcuug

SEQ ID NO: 31920 - RNA, 21 nt, Artificial Sequence
  Synthetic oligonucleotide: FAS-4812
cagagugaggugcagagcuug

SEQ ID NO: 31921 - RNA, 22 nt, Artificial Sequence
  Synthetic oligonucleotide: FAS-4813
gcagagugaggugcagagcuug

SEQ ID NO: 31922 - RNA, 23 nt, Artificial Sequence
  Synthetic oligonucleotide: FAS-4814
ugcagagugaggugcagagcuug

SEQ ID NO: 31923 - RNA, 24 nt, Artificial Sequence
  Synthetic oligonucleotide: FAS-4815
uugcagagugaggugcagagcuug

SEQ ID NO: 31924 - RNA, 18 nt, Artificial Sequence
  Synthetic oligonucleotide: FAS-4816
uaauggguugaaucuaau

SEQ ID NO: 31925 - RNA, 19 nt, Artificial Sequence
  Synthetic oligonucleotide: FAS-4817
uuaauggguugaaucuaau

SEQ ID NO: 31926 - RNA, 20 nt, Artificial Sequence
  Synthetic oligonucleotide: FAS-1798
auuaauggguugaaucuaau

SEQ ID NO: 31927 - RNA, 21 nt, Artificial Sequence
  Synthetic oligonucleotide: FAS-4818
uauuaauggguugaaucuaau

SEQ ID NO: 31928 - RNA, 22 nt, Artificial Sequence
  Synthetic oligonucleotide: FAS-4819
uuauuaauggguugaaucuaau

SEQ ID NO: 31929 - RNA, 23 nt, Artificial Sequence
  Synthetic oligonucleotide: FAS-4820
guuauuaauggguugaaucuaau

SEQ ID NO: 31930 - RNA, 24 nt, Artificial Sequence
  Synthetic oligonucleotide: FAS-4821
uguuauuaauggguugaaucuaau

SEQ ID NO: 31931 - RNA, 18 nt, Artificial Sequence
  Synthetic oligonucleotide: FAS-4822
ggguaaccuaaccuagau

SEQ ID NO: 31932 - RNA, 19 nt, Artificial Sequence
  Synthetic oligonucleotide: FAS-4823
aggguaaccuaaccuagau

SEQ ID NO: 31933 - RNA, 20 nt, Artificial Sequence
  Synthetic oligonucleotide: FAS-1395
gaggguaaccuaaccuagau

SEQ ID NO: 31934 - RNA, 21 nt, Artificial Sequence
  Synthetic oligonucleotide: FAS-4824
ggaggguaaccuaaccuagau

SEQ ID NO: 31935 - RNA, 22 nt, Artificial Sequence
  Synthetic oligonucleotide: FAS-4825
aggaggguaaccuaaccuagau

SEQ ID NO: 31936 - RNA, 23 nt, Artificial Sequence
  Synthetic oligonucleotide: FAS-4826
caggaggguaaccuaaccuagau

SEQ ID NO: 31937 - RNA, 24 nt, Artificial Sequence
  Synthetic oligonucleotide: FAS-4827
ucaggaggguaaccuaaccuagau

SEQ ID NO: 31938 - RNA, 18 nt, Artificial Sequence
  Synthetic oligonucleotide: FAS-4828
cagaagaaaaugucaacu

SEQ ID NO: 31939 - RNA, 19 nt, Artificial Sequence
  Synthetic oligonucleotide: FAS-4829
ccagaagaaaaugucaacu

SEQ ID NO: 31940 - RNA, 20 nt, Artificial Sequence
  Synthetic oligonucleotide: FAS-1400
uccagaagaaaaugucaacu

SEQ ID NO: 31941 - RNA, 21 nt, Artificial Sequence
  Synthetic oligonucleotide: FAS-4830
cuccagaagaaaaugucaacu

SEQ ID NO: 31942 - RNA, 22 nt, Artificial Sequence
  Synthetic oligonucleotide: FAS-4831
gcuccagaagaaaaugucaacu

SEQ ID NO: 31943 - RNA, 23 nt, Artificial Sequence
  Synthetic oligonucleotide: FAS-4832
ggcuccagaagaaaaugucaacu

SEQ ID NO: 31944 - RNA, 24 nt, Artificial Sequence
  Synthetic oligonucleotide: FAS-4833
aggcuccagaagaaaaugucaacu

SEQ ID NO: 31945 - RNA, 18 nt, Artificial Sequence
  Synthetic oligonucleotide: FAS-4834
uccaaagcaauagugacu

SEQ ID NO: 31946 - RNA, 19 nt, Artificial Sequence
  Synthetic oligonucleotide: FAS-4835
uuccaaagcaauagugacu

SEQ ID NO: 31947 - RNA, 20 nt, Artificial Sequence
  Synthetic oligonucleotide: FAS-1428
guuccaaagcaauagugacu

SEQ ID NO: 31948 - RNA, 21 nt, Artificial Sequence
  Synthetic oligonucleotide: FAS-4836
cguuccaaagcaauagugacu

SEQ ID NO: 31949 - RNA, 22 nt, Artificial Sequence
  Synthetic oligonucleotide: FAS-4837
ccguuccaaagcaauagugacu

SEQ ID NO: 31950 - RNA, 23 nt, Artificial Sequence
  Synthetic oligonucleotide: FAS-4838
accguuccaaagcaauagugacu

SEQ ID NO: 31951 - RNA, 24 nt, Artificial Sequence
  Synthetic oligonucleotide: FAS-4839
uaccguuccaaagcaauagugacu

SEQ ID NO: 31952 - RNA, 18 nt, Artificial Sequence
  Synthetic oligonucleotide: FAS-4840
auucaugcuaaacuaccu

SEQ ID NO: 31953 - RNA, 19 nt, Artificial Sequence
  Synthetic oligonucleotide: FAS-4841
aauucaugcuaaacuaccu

SEQ ID NO: 31954 - RNA, 20 nt, Artificial Sequence
  Synthetic oligonucleotide: FAS-1427
aaauucaugcuaaacuaccu

SEQ ID NO: 31955 - RNA, 21 nt, Artificial Sequence
  Synthetic oligonucleotide: FAS-4842
aaaauucaugcuaaacuaccu

SEQ ID NO: 31956 - RNA, 22 nt, Artificial Sequence
  Synthetic oligonucleotide: FAS-4843
uaaaauucaugcuaaacuaccu

SEQ ID NO: 31957 - RNA, 23 nt, Artificial Sequence
  Synthetic oligonucleotide: FAS-4844
guaaaauucaugcuaaacuaccu

SEQ ID NO: 31958 - RNA, 24 nt, Artificial Sequence
  Synthetic oligonucleotide: FAS-4845
uguaaaauucaugcuaaacuaccu

SEQ ID NO: 31959 - RNA, 18 nt, Artificial Sequence
  Synthetic oligonucleotide: FAS-4846
agggugauggaaagcccu

SEQ ID NO: 31960 - RNA, 19 nt, Artificial Sequence
  Synthetic oligonucleotide: FAS-4847
cagggugauggaaagcccu

SEQ ID NO: 31961 - RNA, 20 nt, Artificial Sequence
  Synthetic oligonucleotide: FAS-1392
acagggugauggaaagcccu

SEQ ID NO: 31962 - RNA, 21 nt, Artificial Sequence
  Synthetic oligonucleotide: FAS-4848
cacagggugauggaaagcccu

SEQ ID NO: 31963 - RNA, 22 nt, Artificial Sequence
  Synthetic oligonucleotide: FAS-4849
acacagggugauggaaagcccu

SEQ ID NO: 31964 - RNA, 23 nt, Artificial Sequence
  Synthetic oligonucleotide: FAS-4850
aacacagggugauggaaagcccu

SEQ ID NO: 31965 - RNA, 24 nt, Artificial Sequence
  Synthetic oligonucleotide: FAS-4851
aaacacagggugauggaaagcccu

SEQ ID NO: 31966 - RNA, 18 nt, Artificial Sequence
  Synthetic oligonucleotide: FAS-4852
uucugagcacccgggccu

SEQ ID NO: 31967 - RNA, 19 nt, Artificial Sequence
  Synthetic oligonucleotide: FAS-4853
guucugagcacccgggccu

SEQ ID NO: 31968 - RNA, 20 nt, Artificial Sequence
  Synthetic oligonucleotide: FAS-1723
cguucugagcacccgggccu

SEQ ID NO: 31969 - RNA, 21 nt, Artificial Sequence
  Synthetic oligonucleotide: FAS-4854
gcguucugagcacccgggccu

SEQ ID NO: 31970 - RNA, 22 nt, Artificial Sequence
  Synthetic oligonucleotide: FAS-4855
agcguucugagcacccgggccu

SEQ ID NO: 31971 - RNA, 23 nt, Artificial Sequence
  Synthetic oligonucleotide: FAS-4856
cagcguucugagcacccgggccu

SEQ ID NO: 31972 - RNA, 24 nt, Artificial Sequence
  Synthetic oligonucleotide: FAS-4857
ccagcguucugagcacccgggccu

SEQ ID NO: 31973 - RNA, 18 nt, Artificial Sequence
  Synthetic oligonucleotide: FAS-4858
gacuuauuuccuacgucu

SEQ ID NO: 31974 - RNA, 19 nt, Artificial Sequence
  Synthetic oligonucleotide: FAS-4859
ugacuuauuuccuacgucu

SEQ ID NO: 31975 - RNA, 20 nt, Artificial Sequence
  Synthetic oligonucleotide: FAS-1696
cugacuuauuuccuacgucu

SEQ ID NO: 31976 - RNA, 21 nt, Artificial Sequence
  Synthetic oligonucleotide: FAS-4860
gcugacuuauuuccuacgucu

SEQ ID NO: 31977 - RNA, 22 nt, Artificial Sequence
  Synthetic oligonucleotide: FAS-4861
ugcugacuuauuuccuacgucu

SEQ ID NO: 31978 - RNA, 23 nt, Artificial Sequence
  Synthetic oligonucleotide: FAS-4862
gugcugacuuauuuccuacgucu

SEQ ID NO: 31979 - RNA, 24 nt, Artificial Sequence
  Synthetic oligonucleotide: FAS-4863
ggugcugacuuauuuccuacgucu

SEQ ID NO: 31980 - RNA, 18 nt, Artificial Sequence
  Synthetic oligonucleotide: FAS-4864
cguggagcgcaguggucu

SEQ ID NO: 31981 - RNA, 19 nt, Artificial Sequence
  Synthetic oligonucleotide: FAS-4865
acguggagcgcaguggucu

SEQ ID NO: 31982 - RNA, 20 nt, Artificial Sequence
  Synthetic oligonucleotide: FAS-1712
aacguggagcgcaguggucu

SEQ ID NO: 31983 - RNA, 21 nt, Artificial Sequence
  Synthetic oligonucleotide: FAS-4866
caacguggagcgcaguggucu

SEQ ID NO: 31984 - RNA, 22 nt, Artificial Sequence
  Synthetic oligonucleotide: FAS-4867
ucaacguggagcgcaguggucu

SEQ ID NO: 31985 - RNA, 23 nt, Artificial Sequence
  Synthetic oligonucleotide: FAS-4868
cucaacguggagcgcaguggucu

SEQ ID NO: 31986 - RNA, 24 nt, Artificial Sequence
  Synthetic oligonucleotide: FAS-4869
ccucaacguggagcgcaguggucu

SEQ ID NO: 31987 - RNA, 18 nt, Artificial Sequence
  Synthetic oligonucleotide: FAS-4870
accuuuaguguguccagu

SEQ ID NO: 31988 - RNA, 19 nt, Artificial Sequence
  Synthetic oligonucleotide: FAS-4871
aaccuuuaguguguccagu

SEQ ID NO: 31989 - RNA, 20 nt, Artificial Sequence
  Synthetic oligonucleotide: FAS-1425
aaaccuuuaguguguccagu

SEQ ID NO: 31990 - RNA, 21 nt, Artificial Sequence
  Synthetic oligonucleotide: FAS-4872
gaaaccuuuaguguguccagu

SEQ ID NO: 31991 - RNA, 22 nt, Artificial Sequence
  Synthetic oligonucleotide: FAS-4873
ugaaaccuuuaguguguccagu

SEQ ID NO: 31992 - RNA, 23 nt, Artificial Sequence
  Synthetic oligonucleotide: FAS-4874
cugaaaccuuuaguguguccagu

SEQ ID NO: 31993 - RNA, 24 nt, Artificial Sequence
  Synthetic oligonucleotide: FAS-4875
acugaaaccuuuaguguguccagu

SEQ ID NO: 31994 - RNA, 18 nt, Artificial Sequence
  Synthetic oligonucleotide: FAS-4876
cugacuuauuuccuacgu

SEQ ID NO: 31995 - RNA, 19 nt, Artificial Sequence
  Synthetic oligonucleotide: FAS-4877
gcugacuuauuuccuacgu

SEQ ID NO: 31996 - RNA, 20 nt, Artificial Sequence
  Synthetic oligonucleotide: FAS-1695
ugcugacuuauuuccuacgu

SEQ ID NO: 31997 - RNA, 21 nt, Artificial Sequence
  Synthetic oligonucleotide: FAS-4878
gugcugacuuauuuccuacgu

SEQ ID NO: 31998 - RNA, 22 nt, Artificial Sequence
  Synthetic oligonucleotide: FAS-4879
ggugcugacuuauuuccuacgu

SEQ ID NO: 31999 - RNA, 23 nt, Artificial Sequence
  Synthetic oligonucleotide: FAS-4880
cggugcugacuuauuuccuacgu

SEQ ID NO: 32000 - RNA, 24 nt, Artificial Sequence
  Synthetic oligonucleotide: FAS-4881
ucggugcugacuuauuuccuacgu

SEQ ID NO: 32001 - RNA, 18 nt, Artificial Sequence
  Synthetic oligonucleotide: FAS-4882
accuuuggcuuggcuugu

SEQ ID NO: 32002 - RNA, 19 nt, Artificial Sequence
  Synthetic oligonucleotide: FAS-4883
gaccuuuggcuuggcuugu

SEQ ID NO: 32003 - RNA, 20 nt, Artificial Sequence
  Synthetic oligonucleotide: FAS-1705
ggaccuuuggcuuggcuugu

SEQ ID NO: 32004 - RNA, 21 nt, Artificial Sequence
  Synthetic oligonucleotide: FAS-4884
cggaccuuuggcuuggcuugu

SEQ ID NO: 32005 - RNA, 22 nt, Artificial Sequence
  Synthetic oligonucleotide: FAS-4885
gcggaccuuuggcuuggcuugu

SEQ ID NO: 32006 - RNA, 23 nt, Artificial Sequence
  Synthetic oligonucleotide: FAS-4886
agcggaccuuuggcuuggcuugu

SEQ ID NO: 32007 - RNA, 24 nt, Artificial Sequence
  Synthetic oligonucleotide: FAS-4887
gagcggaccuuuggcuuggcuugu

SEQ ID NO: 32008 - RNA, 18 nt, Artificial Sequence
  Synthetic oligonucleotide: FAS-4888
aauggguugaaucuaauu

SEQ ID NO: 32009 - RNA, 19 nt, Artificial Sequence
  Synthetic oligonucleotide: FAS-4889
uaauggguugaaucuaauu

SEQ ID NO: 32010 - RNA, 20 nt, Artificial Sequence
  Synthetic oligonucleotide: FAS-1799
uuaauggguugaaucuaauu

SEQ ID NO: 32011 - RNA, 21 nt, Artificial Sequence
  Synthetic oligonucleotide: FAS-4890
auuaauggguugaaucuaauu

SEQ ID NO: 32012 - RNA, 22 nt, Artificial Sequence
  Synthetic oligonucleotide: FAS-4891
uauuaauggguugaaucuaauu

SEQ ID NO: 32013 - RNA, 23 nt, Artificial Sequence
  Synthetic oligonucleotide: FAS-4892
uuauuaauggguugaaucuaauu

SEQ ID NO: 32014 - RNA, 24 nt, Artificial Sequence
  Synthetic oligonucleotide: FAS-4893
guuauuaauggguugaaucuaauu

SEQ ID NO: 32015 - RNA, 18 nt, Artificial Sequence
  Synthetic oligonucleotide: FAS-4894
agaaaaggugccguucuu

SEQ ID NO: 32016 - RNA, 19 nt, Artificial Sequence
  Synthetic oligonucleotide: FAS-4895
aagaaaaggugccguucuu

SEQ ID NO: 32017 - RNA, 20 nt, Artificial Sequence
  Synthetic oligonucleotide: FAS-1694
aaagaaaaggugccguucuu

SEQ ID NO: 32018 - RNA, 21 nt, Artificial Sequence
  Synthetic oligonucleotide: FAS-4896
gaaagaaaaggugccguucuu

SEQ ID NO: 32019 - RNA, 22 nt, Artificial Sequence
  Synthetic oligonucleotide: FAS-4897
agaaagaaaaggugccguucuu

SEQ ID NO: 32020 - RNA, 23 nt, Artificial Sequence
  Synthetic oligonucleotide: FAS-4898
gagaaagaaaaggugccguucuu

SEQ ID NO: 32021 - RNA, 24 nt, Artificial Sequence
  Synthetic oligonucleotide: FAS-4899
cgagaaagaaaaggugccguucuu

SEQ ID NO: 32022 - RNA, 18 nt, Artificial Sequence
  Synthetic oligonucleotide: FAS-4900
agcaaguccuccagcguu

SEQ ID NO: 32023 - RNA, 19 nt, Artificial Sequence
  Synthetic oligonucleotide: FAS-4901
aagcaaguccuccagcguu

SEQ ID NO: 32024 - RNA, 20 nt, Artificial Sequence
  Synthetic oligonucleotide: FAS-1720
aaagcaaguccuccagcguu

SEQ ID NO: 32025 - RNA, 21 nt, Artificial Sequence
  Synthetic oligonucleotide: FAS-4902
aaaagcaaguccuccagcguu

SEQ ID NO: 32026 - RNA, 22 nt, Artificial Sequence
  Synthetic oligonucleotide: FAS-4903
gaaaagcaaguccuccagcguu

SEQ ID NO: 32027 - RNA, 23 nt, Artificial Sequence
  Synthetic oligonucleotide: FAS-4904
agaaaagcaaguccuccagcguu

SEQ ID NO: 32028 - RNA, 24 nt, Artificial Sequence
  Synthetic oligonucleotide: FAS-4905
aagaaaagcaaguccuccagcguu

SEQ ID NO: 32029 - RNA, 18 nt, Artificial Sequence
  Synthetic oligonucleotide: FAS-4906
aaaugagcaauaucuguu

SEQ ID NO: 32030 - RNA, 19 nt, Artificial Sequence
  Synthetic oligonucleotide: FAS-4907
aaaaugagcaauaucuguu

SEQ ID NO: 32031 - RNA, 20 nt, Artificial Sequence
  Synthetic oligonucleotide: FAS-1699
gaaaaugagcaauaucuguu

SEQ ID NO: 32032 - RNA, 21 nt, Artificial Sequence
  Synthetic oligonucleotide: FAS-4908
agaaaaugagcaauaucuguu

SEQ ID NO: 32033 - RNA, 22 nt, Artificial Sequence
  Synthetic oligonucleotide: FAS-4909
cagaaaaugagcaauaucuguu

SEQ ID NO: 32034 - RNA, 23 nt, Artificial Sequence
  Synthetic oligonucleotide: FAS-4910
ccagaaaaugagcaauaucuguu

SEQ ID NO: 32035 - RNA, 24 nt, Artificial Sequence
  Synthetic oligonucleotide: FAS-4911
gccagaaaaugagcaauaucuguu

SEQ ID NO: 32036 - RNA, 18 nt, Artificial Sequence
  Synthetic oligonucleotide: FAS-4912
guaaccuaaccuagauuu

SEQ ID NO: 32037 - RNA, 19 nt, Artificial Sequence
  Synthetic oligonucleotide: FAS-4913
gguaaccuaaccuagauuu

SEQ ID NO: 32038 - RNA, 20 nt, Artificial Sequence
  Synthetic oligonucleotide: FAS-1396
ggguaaccuaaccuagauuu

SEQ ID NO: 32039 - RNA, 21 nt, Artificial Sequence
  Synthetic oligonucleotide: FAS-4914
aggguaaccuaaccuagauuu

SEQ ID NO: 32040 - RNA, 22 nt, Artificial Sequence
  Synthetic oligonucleotide: FAS-4915
gaggguaaccuaaccuagauuu

SEQ ID NO: 32041 - RNA, 23 nt, Artificial Sequence
  Synthetic oligonucleotide: FAS-4916
ggaggguaaccuaaccuagauuu

SEQ ID NO: 32042 - RNA, 24 nt, Artificial Sequence
  Synthetic oligonucleotide: FAS-4917
aggaggguaaccuaaccuagauuu

SEQ ID NO: 32043 - RNA, 18 nt, Artificial Sequence
  Synthetic oligonucleotide: FAS-4918
guggggugcggacaggaa

SEQ ID NO: 32044 - RNA, 19 nt, Artificial Sequence
  Synthetic oligonucleotide: FAS-4919
cguggggugcggacaggaa

SEQ ID NO: 32045 - RNA, 20 nt, Artificial Sequence
  Synthetic oligonucleotide: FAS-1555
gcguggggugcggacaggaa

SEQ ID NO: 32046 - RNA, 21 nt, Artificial Sequence
  Synthetic oligonucleotide: FAS-4920
ggcguggggugcggacaggaa

SEQ ID NO: 32047 - RNA, 22 nt, Artificial Sequence
  Synthetic oligonucleotide: FAS-4921
gggcguggggugcggacaggaa

SEQ ID NO: 32048 - RNA, 23 nt, Artificial Sequence
  Synthetic oligonucleotide: FAS-4922
ugggcguggggugcggacaggaa

SEQ ID NO: 32049 - RNA, 24 nt, Artificial Sequence
  Synthetic oligonucleotide: FAS-4923
gugggcguggggugcggacaggaa

SEQ ID NO: 32050 - RNA, 18 nt, Artificial Sequence
  Synthetic oligonucleotide: FAS-4924
gugcggacaggaauugaa

SEQ ID NO: 32051 - RNA, 19 nt, Artificial Sequence
  Synthetic oligonucleotide: FAS-4925
ggugcggacaggaauugaa

SEQ ID NO: 32052 - RNA, 20 nt, Artificial Sequence
  Synthetic oligonucleotide: FAS-1556
gggugcggacaggaauugaa

SEQ ID NO: 32053 - RNA, 21 nt, Artificial Sequence
  Synthetic oligonucleotide: FAS-4926
ggggugcggacaggaauugaa

SEQ ID NO: 32054 - RNA, 22 nt, Artificial Sequence
  Synthetic oligonucleotide: FAS-4927
uggggugcggacaggaauugaa

SEQ ID NO: 32055 - RNA, 23 nt, Artificial Sequence
  Synthetic oligonucleotide: FAS-4928
guggggugcggacaggaauugaa

SEQ ID NO: 32056 - RNA, 24 nt, Artificial Sequence
  Synthetic oligonucleotide: FAS-4929
cguggggugcggacaggaauugaa

SEQ ID NO: 32057 - RNA, 18 nt, Artificial Sequence
  Synthetic oligonucleotide: FAS-4930
guaggaaauaagucagca

SEQ ID NO: 32058 - RNA, 19 nt, Artificial Sequence
  Synthetic oligonucleotide: FAS-4931
cguaggaaauaagucagca

SEQ ID NO: 32059 - RNA, 20 nt, Artificial Sequence
  Synthetic oligonucleotide: FAS-1592
acguaggaaauaagucagca

SEQ ID NO: 32060 - RNA, 21 nt, Artificial Sequence
  Synthetic oligonucleotide: FAS-4932
gacguaggaaauaagucagca

SEQ ID NO: 32061 - RNA, 22 nt, Artificial Sequence
  Synthetic oligonucleotide: FAS-4933
agacguaggaaauaagucagca

SEQ ID NO: 32062 - RNA, 23 nt, Artificial Sequence
  Synthetic oligonucleotide: FAS-4934
cagacguaggaaauaagucagca

SEQ ID NO: 32063 - RNA, 24 nt, Artificial Sequence
  Synthetic oligonucleotide: FAS-4935
ucagacguaggaaauaagucagca

SEQ ID NO: 32064 - RNA, 18 nt, Artificial Sequence
  Synthetic oligonucleotide: FAS-4936
uuuggaugcaguuccaga

SEQ ID NO: 32065 - RNA, 19 nt, Artificial Sequence
  Synthetic oligonucleotide: FAS-4937
auuuggaugcaguuccaga

SEQ ID NO: 32066 - RNA, 20 nt, Artificial Sequence
  Synthetic oligonucleotide: FAS-1502
aauuuggaugcaguuccaga

SEQ ID NO: 32067 - RNA, 21 nt, Artificial Sequence
  Synthetic oligonucleotide: FAS-4938
gaauuuggaugcaguuccaga

SEQ ID NO: 32068 - RNA, 22 nt, Artificial Sequence
  Synthetic oligonucleotide: FAS-4939
ugaauuuggaugcaguuccaga

SEQ ID NO: 32069 - RNA, 23 nt, Artificial Sequence
  Synthetic oligonucleotide: FAS-4940
cugaauuuggaugcaguuccaga

SEQ ID NO: 32070 - RNA, 24 nt, Artificial Sequence
  Synthetic oligonucleotide: FAS-4941
ccugaauuuggaugcaguuccaga

SEQ ID NO: 32071 - RNA, 18 nt, Artificial Sequence
  Synthetic oligonucleotide: FAS-4942
ggggaccccgguuggaga

SEQ ID NO: 32072 - RNA, 19 nt, Artificial Sequence
  Synthetic oligonucleotide: FAS-4943
gggggaccccgguuggaga

SEQ ID NO: 32073 - RNA, 20 nt, Artificial Sequence
  Synthetic oligonucleotide: FAS-1572
agggggaccccgguuggaga

SEQ ID NO: 32074 - RNA, 21 nt, Artificial Sequence
  Synthetic oligonucleotide: FAS-4944
gagggggaccccgguuggaga

SEQ ID NO: 32075 - RNA, 22 nt, Artificial Sequence
  Synthetic oligonucleotide: FAS-4945
ggagggggaccccgguuggaga

SEQ ID NO: 32076 - RNA, 23 nt, Artificial Sequence
  Synthetic oligonucleotide: FAS-4946
uggagggggaccccgguuggaga

SEQ ID NO: 32077 - RNA, 24 nt, Artificial Sequence
  Synthetic oligonucleotide: FAS-4947
cuggagggggaccccgguuggaga

SEQ ID NO: 32078 - RNA, 18 nt, Artificial Sequence
  Synthetic oligonucleotide: FAS-4948
ccccgguuggagagagga

SEQ ID NO: 32079 - RNA, 19 nt, Artificial Sequence
  Synthetic oligonucleotide: FAS-4949
accccgguuggagagagga

SEQ ID NO: 32080 - RNA, 20 nt, Artificial Sequence
  Synthetic oligonucleotide: FAS-1574
gaccccgguuggagagagga

SEQ ID NO: 32081 - RNA, 21 nt, Artificial Sequence
  Synthetic oligonucleotide: FAS-4950
ggaccccgguuggagagagga

SEQ ID NO: 32082 - RNA, 22 nt, Artificial Sequence
  Synthetic oligonucleotide: FAS-4951
gggaccccgguuggagagagga

SEQ ID NO: 32083 - RNA, 23 nt, Artificial Sequence
  Synthetic oligonucleotide: FAS-4952
ggggaccccgguuggagagagga

SEQ ID NO: 32084 - RNA, 24 nt, Artificial Sequence
  Synthetic oligonucleotide: FAS-4953
gggggaccccgguuggagagagga

SEQ ID NO: 32085 - RNA, 18 nt, Artificial Sequence
  Synthetic oligonucleotide: FAS-4954
gugggcguggggugcgga

SEQ ID NO: 32086 - RNA, 19 nt, Artificial Sequence
  Synthetic oligonucleotide: FAS-4955
ggugggcguggggugcgga

SEQ ID NO: 32087 - RNA, 20 nt, Artificial Sequence
  Synthetic oligonucleotide: FAS-1553
aggugggcguggggugcgga

SEQ ID NO: 32088 - RNA, 21 nt, Artificial Sequence
  Synthetic oligonucleotide: FAS-4956
gaggugggcguggggugcgga

SEQ ID NO: 32089 - RNA, 22 nt, Artificial Sequence
  Synthetic oligonucleotide: FAS-4957
ugaggugggcguggggugcgga

SEQ ID NO: 32090 - RNA, 23 nt, Artificial Sequence
  Synthetic oligonucleotide: FAS-4958
uugaggugggcguggggugcgga

SEQ ID NO: 32091 - RNA, 24 nt, Artificial Sequence
  Synthetic oligonucleotide: FAS-4959
guugaggugggcguggggugcgga

SEQ ID NO: 32092 - RNA, 18 nt, Artificial Sequence
  Synthetic oligonucleotide: FAS-4960
gccccgcgggggcgggga

SEQ ID NO: 32093 - RNA, 19 nt, Artificial Sequence
  Synthetic oligonucleotide: FAS-4961
cgccccgcgggggcgggga

SEQ ID NO: 32094 - RNA, 20 nt, Artificial Sequence
  Synthetic oligonucleotide: FAS-1588
ccgccccgcgggggcgggga

SEQ ID NO: 32095 - RNA, 21 nt, Artificial Sequence
  Synthetic oligonucleotide: FAS-4962
gccgccccgcgggggcgggga

SEQ ID NO: 32096 - RNA, 22 nt, Artificial Sequence
  Synthetic oligonucleotide: FAS-4963
cgccgccccgcgggggcgggga

SEQ ID NO: 32097 - RNA, 23 nt, Artificial Sequence
  Synthetic oligonucleotide: FAS-4964
gcgccgccccgcgggggcgggga

SEQ ID NO: 32098 - RNA, 24 nt, Artificial Sequence
  Synthetic oligonucleotide: FAS-4965
cgcgccgccccgcgggggcgggga

SEQ ID NO: 32099 - RNA, 18 nt, Artificial Sequence
  Synthetic oligonucleotide: FAS-4966
agcuuuagggucgcugga

SEQ ID NO: 32100 - RNA, 19 nt, Artificial Sequence
  Synthetic oligonucleotide: FAS-4967
aagcuuuagggucgcugga

SEQ ID NO: 32101 - RNA, 20 nt, Artificial Sequence
  Synthetic oligonucleotide: FAS-1934
gaagcuuuagggucgcugga

SEQ ID NO: 32102 - RNA, 21 nt, Artificial Sequence
  Synthetic oligonucleotide: FAS-4968
ggaagcuuuagggucgcugga

SEQ ID NO: 32103 - RNA, 22 nt, Artificial Sequence
  Synthetic oligonucleotide: FAS-4969
gggaagcuuuagggucgcugga

SEQ ID NO: 32104 - RNA, 23 nt, Artificial Sequence
  Synthetic oligonucleotide: FAS-4970
ugggaagcuuuagggucgcugga

SEQ ID NO: 32105 - RNA, 24 nt, Artificial Sequence
  Synthetic oligonucleotide: FAS-4971
cugggaagcuuuagggucgcugga

SEQ ID NO: 32106 - RNA, 18 nt, Artificial Sequence
  Synthetic oligonucleotide: FAS-4972
agggggaccccgguugga

SEQ ID NO: 32107 - RNA, 19 nt, Artificial Sequence
  Synthetic oligonucleotide: FAS-4973
gagggggaccccgguugga

SEQ ID NO: 32108 - RNA, 20 nt, Artificial Sequence
  Synthetic oligonucleotide: FAS-1571
ggagggggaccccgguugga

SEQ ID NO: 32109 - RNA, 21 nt, Artificial Sequence
  Synthetic oligonucleotide: FAS-4974
uggagggggaccccgguugga

SEQ ID NO: 32110 - RNA, 22 nt, Artificial Sequence
  Synthetic oligonucleotide: FAS-4975
cuggagggggaccccgguugga

SEQ ID NO: 32111 - RNA, 23 nt, Artificial Sequence
  Synthetic oligonucleotide: FAS-4976
gcuggagggggaccccgguugga

SEQ ID NO: 32112 - RNA, 24 nt, Artificial Sequence
  Synthetic oligonucleotide: FAS-4977
cgcuggagggggaccccgguugga

SEQ ID NO: 32113 - RNA, 18 nt, Artificial Sequence
  Synthetic oligonucleotide: FAS-4978
uuucucgaaaaaguuaua

SEQ ID NO: 32114 - RNA, 19 nt, Artificial Sequence
  Synthetic oligonucleotide: FAS-4979
cuuucucgaaaaaguuaua

SEQ ID NO: 32115 - RNA, 20 nt, Artificial Sequence
  Synthetic oligonucleotide: FAS-1963
ucuuucucgaaaaaguuaua

SEQ ID NO: 32116 - RNA, 21 nt, Artificial Sequence
  Synthetic oligonucleotide: FAS-4980
uucuuucucgaaaaaguuaua

SEQ ID NO: 32117 - RNA, 22 nt, Artificial Sequence
  Synthetic oligonucleotide: FAS-4981
uuucuuucucgaaaaaguuaua

SEQ ID NO: 32118 - RNA, 23 nt, Artificial Sequence
  Synthetic oligonucleotide: FAS-4982
uuuucuuucucgaaaaaguuaua

SEQ ID NO: 32119 - RNA, 24 nt, Artificial Sequence
  Synthetic oligonucleotide: FAS-4983
cuuuucuuucucgaaaaaguuaua

SEQ ID NO: 32120 - RNA, 18 nt, Artificial Sequence
  Synthetic oligonucleotide: FAS-4984
uggauaaugacaucauua

SEQ ID NO: 32121 - RNA, 19 nt, Artificial Sequence
  Synthetic oligonucleotide: FAS-4985
uuggauaaugacaucauua

SEQ ID NO: 32122 - RNA, 20 nt, Artificial Sequence
  Synthetic oligonucleotide: FAS-1499
uuuggauaaugacaucauua

SEQ ID NO: 32123 - RNA, 21 nt, Artificial Sequence
  Synthetic oligonucleotide: FAS-4986
guuuggauaaugacaucauua

SEQ ID NO: 32124 - RNA, 22 nt, Artificial Sequence
  Synthetic oligonucleotide: FAS-4987
uguuuggauaaugacaucauua

SEQ ID NO: 32125 - RNA, 23 nt, Artificial Sequence
  Synthetic oligonucleotide: FAS-4988
auguuuggauaaugacaucauua

SEQ ID NO: 32126 - RNA, 24 nt, Artificial Sequence
  Synthetic oligonucleotide: FAS-4989
uauguuuggauaaugacaucauua

SEQ ID NO: 32127 - RNA, 18 nt, Artificial Sequence
  Synthetic oligonucleotide: FAS-4990
aguuuagcaugaauuuua

SEQ ID NO: 32128 - RNA, 19 nt, Artificial Sequence
  Synthetic oligonucleotide: FAS-4991
uaguuuagcaugaauuuua

SEQ ID NO: 32129 - RNA, 20 nt, Artificial Sequence
  Synthetic oligonucleotide: FAS-1497
guaguuuagcaugaauuuua

SEQ ID NO: 32130 - RNA, 21 nt, Artificial Sequence
  Synthetic oligonucleotide: FAS-4992
gguaguuuagcaugaauuuua

SEQ ID NO: 32131 - RNA, 22 nt, Artificial Sequence
  Synthetic oligonucleotide: FAS-4993
agguaguuuagcaugaauuuua

SEQ ID NO: 32132 - RNA, 23 nt, Artificial Sequence
  Synthetic oligonucleotide: FAS-4994
uagguaguuuagcaugaauuuua

SEQ ID NO: 32133 - RNA, 24 nt, Artificial Sequence
  Synthetic oligonucleotide: FAS-4995
uuagguaguuuagcaugaauuuua

SEQ ID NO: 32134 - RNA, 18 nt, Artificial Sequence
  Synthetic oligonucleotide: FAS-4996
gugagugcgcgccgcccc

SEQ ID NO: 32135 - RNA, 19 nt, Artificial Sequence
  Synthetic oligonucleotide: FAS-4997
ggugagugcgcgccgcccc

SEQ ID NO: 32136 - RNA, 20 nt, Artificial Sequence
  Synthetic oligonucleotide: FAS-1580
gggugagugcgcgccgcccc

SEQ ID NO: 32137 - RNA, 21 nt, Artificial Sequence
  Synthetic oligonucleotide: FAS-4998
ugggugagugcgcgccgcccc

SEQ ID NO: 32138 - RNA, 22 nt, Artificial Sequence
  Synthetic oligonucleotide: FAS-4999
gugggugagugcgcgccgcccc

SEQ ID NO: 32139 - RNA, 23 nt, Artificial Sequence
  Synthetic oligonucleotide: FAS-5000
ggugggugagugcgcgccgcccc

SEQ ID NO: 32140 - RNA, 24 nt, Artificial Sequence
  Synthetic oligonucleotide: FAS-5001
gggugggugagugcgcgccgcccc

SEQ ID NO: 32141 - RNA, 18 nt, Artificial Sequence
  Synthetic oligonucleotide: FAS-5002
cguuggagacuggcuccc

SEQ ID NO: 32142 - RNA, 19 nt, Artificial Sequence
  Synthetic oligonucleotide: FAS-5003
gcguuggagacuggcuccc

SEQ ID NO: 32143 - RNA, 20 nt, Artificial Sequence
  Synthetic oligonucleotide: FAS-1900
ggcguuggagacuggcuccc

SEQ ID NO: 32144 - RNA, 21 nt, Artificial Sequence
  Synthetic oligonucleotide: FAS-5004
aggcguuggagacuggcuccc

SEQ ID NO: 32145 - RNA, 22 nt, Artificial Sequence
  Synthetic oligonucleotide: FAS-5005
gaggcguuggagacuggcuccc

SEQ ID NO: 32146 - RNA, 23 nt, Artificial Sequence
  Synthetic oligonucleotide: FAS-5006
ggaggcguuggagacuggcuccc

SEQ ID NO: 32147 - RNA, 24 nt, Artificial Sequence
  Synthetic oligonucleotide: FAS-5007
gggaggcguuggagacuggcuccc

SEQ ID NO: 32148 - RNA, 18 nt, Artificial Sequence
  Synthetic oligonucleotide: FAS-5008
gggcagcuccggcgcucc

SEQ ID NO: 32149 - RNA, 19 nt, Artificial Sequence
  Synthetic oligonucleotide: FAS-5009
ggggcagcuccggcgcucc

SEQ ID NO: 32150 - RNA, 20 nt, Artificial Sequence
  Synthetic oligonucleotide: FAS-1546
cggggcagcuccggcgcucc

SEQ ID NO: 32151 - RNA, 21 nt, Artificial Sequence
  Synthetic oligonucleotide: FAS-5010
gcggggcagcuccggcgcucc

SEQ ID NO: 32152 - RNA, 22 nt, Artificial Sequence
  Synthetic oligonucleotide: FAS-5011
ggcggggcagcuccggcgcucc

SEQ ID NO: 32153 - RNA, 23 nt, Artificial Sequence
  Synthetic oligonucleotide: FAS-5012
aggcggggcagcuccggcgcucc

SEQ ID NO: 32154 - RNA, 24 nt, Artificial Sequence
  Synthetic oligonucleotide: FAS-5013
caggcggggcagcuccggcgcucc

SEQ ID NO: 32155 - RNA, 18 nt, Artificial Sequence
  Synthetic oligonucleotide: FAS-5014
gcguuggagacuggcucc

SEQ ID NO: 32156 - RNA, 19 nt, Artificial Sequence
  Synthetic oligonucleotide: FAS-5015
ggcguuggagacuggcucc

SEQ ID NO: 32157 - RNA, 20 nt, Artificial Sequence
  Synthetic oligonucleotide: FAS-1899
aggcguuggagacuggcucc

SEQ ID NO: 32158 - RNA, 21 nt, Artificial Sequence
  Synthetic oligonucleotide: FAS-5016
gaggcguuggagacuggcucc

SEQ ID NO: 32159 - RNA, 22 nt, Artificial Sequence
  Synthetic oligonucleotide: FAS-5017
ggaggcguuggagacuggcucc

SEQ ID NO: 32160 - RNA, 23 nt, Artificial Sequence
  Synthetic oligonucleotide: FAS-5018
gggaggcguuggagacuggcucc

SEQ ID NO: 32161 - RNA, 24 nt, Artificial Sequence
  Synthetic oligonucleotide: FAS-5019
cgggaggcguuggagacuggcucc

SEQ ID NO: 32162 - RNA, 18 nt, Artificial Sequence
  Synthetic oligonucleotide: FAS-5020
ccgaagcagugguuaagc

SEQ ID NO: 32163 - RNA, 19 nt, Artificial Sequence
  Synthetic oligonucleotide: FAS-5021
accgaagcagugguuaagc

SEQ ID NO: 32164 - RNA, 20 nt, Artificial Sequence
  Synthetic oligonucleotide: FAS-1958
caccgaagcagugguuaagc

SEQ ID NO: 32165 - RNA, 21 nt, Artificial Sequence
  Synthetic oligonucleotide: FAS-5022
gcaccgaagcagugguuaagc

SEQ ID NO: 32166 - RNA, 22 nt, Artificial Sequence
  Synthetic oligonucleotide: FAS-5023
agcaccgaagcagugguuaagc

SEQ ID NO: 32167 - RNA, 23 nt, Artificial Sequence
  Synthetic oligonucleotide: FAS-5024
cagcaccgaagcagugguuaagc

SEQ ID NO: 32168 - RNA, 24 nt, Artificial Sequence
  Synthetic oligonucleotide: FAS-5025
ucagcaccgaagcagugguuaagc

SEQ ID NO: 32169 - RNA, 18 nt, Artificial Sequence
  Synthetic oligonucleotide: FAS-5026
cccgggugcucagaacgc

SEQ ID NO: 32170 - RNA, 19 nt, Artificial Sequence
  Synthetic oligonucleotide: FAS-5027
gcccgggugcucagaacgc

SEQ ID NO: 32171 - RNA, 20 nt, Artificial Sequence
  Synthetic oligonucleotide: FAS-1907
ggcccgggugcucagaacgc

SEQ ID NO: 32172 - RNA, 21 nt, Artificial Sequence
  Synthetic oligonucleotide: FAS-5028
aggcccgggugcucagaacgc

SEQ ID NO: 32173 - RNA, 22 nt, Artificial Sequence
  Synthetic oligonucleotide: FAS-5029
caggcccgggugcucagaacgc

SEQ ID NO: 32174 - RNA, 23 nt, Artificial Sequence
  Synthetic oligonucleotide: FAS-5030
ucaggcccgggugcucagaacgc

SEQ ID NO: 32175 - RNA, 24 nt, Artificial Sequence
  Synthetic oligonucleotide: FAS-5031
cucaggcccgggugcucagaacgc

SEQ ID NO: 32176 - RNA, 18 nt, Artificial Sequence
  Synthetic oligonucleotide: FAS-5032
gagugcgcgccgccccgc

SEQ ID NO: 32177 - RNA, 19 nt, Artificial Sequence
  Synthetic oligonucleotide: FAS-5033
ugagugcgcgccgccccgc

SEQ ID NO: 32178 - RNA, 20 nt, Artificial Sequence
  Synthetic oligonucleotide: FAS-1949
gugagugcgcgccgccccgc

SEQ ID NO: 32179 - RNA, 21 nt, Artificial Sequence
  Synthetic oligonucleotide: FAS-5034
ggugagugcgcgccgccccgc

SEQ ID NO: 32180 - RNA, 22 nt, Artificial Sequence
  Synthetic oligonucleotide: FAS-5035
gggugagugcgcgccgccccgc

SEQ ID NO: 32181 - RNA, 23 nt, Artificial Sequence
  Synthetic oligonucleotide: FAS-5036
ugggugagugcgcgccgccccgc

SEQ ID NO: 32182 - RNA, 24 nt, Artificial Sequence
  Synthetic oligonucleotide: FAS-5037
gugggugagugcgcgccgccccgc

SEQ ID NO: 32183 - RNA, 18 nt, Artificial Sequence
  Synthetic oligonucleotide: FAS-5038
gggaagcuuuagggucgc

SEQ ID NO: 32184 - RNA, 19 nt, Artificial Sequence
  Synthetic oligonucleotide: FAS-5039
ugggaagcuuuagggucgc

SEQ ID NO: 32185 - RNA, 20 nt, Artificial Sequence
  Synthetic oligonucleotide: FAS-1932
cugggaagcuuuagggucgc

SEQ ID NO: 32186 - RNA, 21 nt, Artificial Sequence
  Synthetic oligonucleotide: FAS-5040
ucugggaagcuuuagggucgc

SEQ ID NO: 32187 - RNA, 22 nt, Artificial Sequence
  Synthetic oligonucleotide: FAS-5041
gucugggaagcuuuagggucgc

SEQ ID NO: 32188 - RNA, 23 nt, Artificial Sequence
  Synthetic oligonucleotide: FAS-5042
agucugggaagcuuuagggucgc

SEQ ID NO: 32189 - RNA, 24 nt, Artificial Sequence
  Synthetic oligonucleotide: FAS-5043
aagucugggaagcuuuagggucgc

SEQ ID NO: 32190 - RNA, 18 nt, Artificial Sequence
  Synthetic oligonucleotide: FAS-5044
gugguuaagccggagggc

SEQ ID NO: 32191 - RNA, 19 nt, Artificial Sequence
  Synthetic oligonucleotide: FAS-5045
agugguuaagccggagggc

SEQ ID NO: 32192 - RNA, 20 nt, Artificial Sequence
  Synthetic oligonucleotide: FAS-1596
cagugguuaagccggagggc

SEQ ID NO: 32193 - RNA, 21 nt, Artificial Sequence
  Synthetic oligonucleotide: FAS-5046
gcagugguuaagccggagggc

SEQ ID NO: 32194 - RNA, 22 nt, Artificial Sequence
  Synthetic oligonucleotide: FAS-5047
agcagugguuaagccggagggc

SEQ ID NO: 32195 - RNA, 23 nt, Artificial Sequence
  Synthetic oligonucleotide: FAS-5048
aagcagugguuaagccggagggc

SEQ ID NO: 32196 - RNA, 24 nt, Artificial Sequence
  Synthetic oligonucleotide: FAS-5049
gaagcagugguuaagccggagggc

SEQ ID NO: 32197 - RNA, 18 nt, Artificial Sequence
  Synthetic oligonucleotide: FAS-5050
gcgccgccccgcgggggc

SEQ ID NO: 32198 - RNA, 19 nt, Artificial Sequence
  Synthetic oligonucleotide: FAS-5051
cgcgccgccccgcgggggc

SEQ ID NO: 32199 - RNA, 20 nt, Artificial Sequence
  Synthetic oligonucleotide: FAS-1953
gcgcgccgccccgcgggggc

SEQ ID NO: 32200 - RNA, 21 nt, Artificial Sequence
  Synthetic oligonucleotide: FAS-5052
ugcgcgccgccccgcgggggc

SEQ ID NO: 32201 - RNA, 22 nt, Artificial Sequence
  Synthetic oligonucleotide: FAS-5053
gugcgcgccgccccgcgggggc

SEQ ID NO: 32202 - RNA, 23 nt, Artificial Sequence
  Synthetic oligonucleotide: FAS-5054
agugcgcgccgccccgcgggggc

SEQ ID NO: 32203 - RNA, 24 nt, Artificial Sequence
  Synthetic oligonucleotide: FAS-5055
gagugcgcgccgccccgcgggggc

SEQ ID NO: 32204 - RNA, 18 nt, Artificial Sequence
  Synthetic oligonucleotide: FAS-5056
cuccacguugaggugggc

SEQ ID NO: 32205 - RNA, 19 nt, Artificial Sequence
  Synthetic oligonucleotide: FAS-5057
gcuccacguugaggugggc

SEQ ID NO: 32206 - RNA, 20 nt, Artificial Sequence
  Synthetic oligonucleotide: FAS-1550
cgcuccacguugaggugggc

SEQ ID NO: 32207 - RNA, 21 nt, Artificial Sequence
  Synthetic oligonucleotide: FAS-5058
gcgcuccacguugaggugggc

SEQ ID NO: 32208 - RNA, 22 nt, Artificial Sequence
  Synthetic oligonucleotide: FAS-5059
ugcgcuccacguugaggugggc

SEQ ID NO: 32209 - RNA, 23 nt, Artificial Sequence
  Synthetic oligonucleotide: FAS-5060
cugcgcuccacguugaggugggc

SEQ ID NO: 32210 - RNA, 24 nt, Artificial Sequence
  Synthetic oligonucleotide: FAS-5061
acugcgcuccacguugaggugggc

SEQ ID NO: 32211 - RNA, 18 nt, Artificial Sequence
  Synthetic oligonucleotide: FAS-5062
gagagaggagcggaacuc

SEQ ID NO: 32212 - RNA, 19 nt, Artificial Sequence
  Synthetic oligonucleotide: FAS-5063
ggagagaggagcggaacuc

SEQ ID NO: 32213 - RNA, 20 nt, Artificial Sequence
  Synthetic oligonucleotide: FAS-1576
uggagagaggagcggaacuc

SEQ ID NO: 32214 - RNA, 21 nt, Artificial Sequence
  Synthetic oligonucleotide: FAS-5064
uuggagagaggagcggaacuc

SEQ ID NO: 32215 - RNA, 22 nt, Artificial Sequence
  Synthetic oligonucleotide: FAS-5065
guuggagagaggagcggaacuc

SEQ ID NO: 32216 - RNA, 23 nt, Artificial Sequence
  Synthetic oligonucleotide: FAS-5066
gguuggagagaggagcggaacuc

SEQ ID NO: 32217 - RNA, 24 nt, Artificial Sequence
  Synthetic oligonucleotide: FAS-5067
cgguuggagagaggagcggaacuc

SEQ ID NO: 32218 - RNA, 18 nt, Artificial Sequence
  Synthetic oligonucleotide: FAS-5068
cuagguuagguuacccuc

SEQ ID NO: 32219 - RNA, 19 nt, Artificial Sequence
  Synthetic oligonucleotide: FAS-5069
ucuagguuagguuacccuc

SEQ ID NO: 32220 - RNA, 20 nt, Artificial Sequence
  Synthetic oligonucleotide: FAS-1506
aucuagguuagguuacccuc

SEQ ID NO: 32221 - RNA, 21 nt, Artificial Sequence
  Synthetic oligonucleotide: FAS-5070
aaucuagguuagguuacccuc

SEQ ID NO: 32222 - RNA, 22 nt, Artificial Sequence
  Synthetic oligonucleotide: FAS-5071
aaaucuagguuagguuacccuc

SEQ ID NO: 32223 - RNA, 23 nt, Artificial Sequence
  Synthetic oligonucleotide: FAS-5072
caaaucuagguuagguuacccuc

SEQ ID NO: 32224 - RNA, 24 nt, Artificial Sequence
  Synthetic oligonucleotide: FAS-5073
ucaaaucuagguuagguuacccuc

SEQ ID NO: 32225 - RNA, 18 nt, Artificial Sequence
  Synthetic oligonucleotide: FAS-5074
ggcguuggagacuggcuc

SEQ ID NO: 32226 - RNA, 19 nt, Artificial Sequence
  Synthetic oligonucleotide: FAS-5075
aggcguuggagacuggcuc

SEQ ID NO: 32227 - RNA, 20 nt, Artificial Sequence
  Synthetic oligonucleotide: FAS-1532
gaggcguuggagacuggcuc

SEQ ID NO: 32228 - RNA, 21 nt, Artificial Sequence
  Synthetic oligonucleotide: FAS-5076
ggaggcguuggagacuggcuc

SEQ ID NO: 32229 - RNA, 22 nt, Artificial Sequence
  Synthetic oligonucleotide: FAS-5077
gggaggcguuggagacuggcuc

SEQ ID NO: 32230 - RNA, 23 nt, Artificial Sequence
  Synthetic oligonucleotide: FAS-5078
cgggaggcguuggagacuggcuc

SEQ ID NO: 32231 - RNA, 24 nt, Artificial Sequence
  Synthetic oligonucleotide: FAS-5079
gcgggaggcguuggagacuggcuc

SEQ ID NO: 32232 - RNA, 18 nt, Artificial Sequence
  Synthetic oligonucleotide: FAS-5080
ggaauugaagcggaaguc

SEQ ID NO: 32233 - RNA, 19 nt, Artificial Sequence
  Synthetic oligonucleotide: FAS-5081
aggaauugaagcggaaguc

SEQ ID NO: 32234 - RNA, 20 nt, Artificial Sequence
  Synthetic oligonucleotide: FAS-1928
caggaauugaagcggaaguc

SEQ ID NO: 32235 - RNA, 21 nt, Artificial Sequence
  Synthetic oligonucleotide: FAS-5082
acaggaauugaagcggaaguc

SEQ ID NO: 32236 - RNA, 22 nt, Artificial Sequence
  Synthetic oligonucleotide: FAS-5083
gacaggaauugaagcggaaguc

SEQ ID NO: 32237 - RNA, 23 nt, Artificial Sequence
  Synthetic oligonucleotide: FAS-5084
ggacaggaauugaagcggaaguc

SEQ ID NO: 32238 - RNA, 24 nt, Artificial Sequence
  Synthetic oligonucleotide: FAS-5085
cggacaggaauugaagcggaaguc

SEQ ID NO: 32239 - RNA, 18 nt, Artificial Sequence
  Synthetic oligonucleotide: FAS-5086
ucaguugacauuuucuuc

SEQ ID NO: 32240 - RNA, 19 nt, Artificial Sequence
  Synthetic oligonucleotide: FAS-5087
cucaguugacauuuucuuc

SEQ ID NO: 32241 - RNA, 20 nt, Artificial Sequence
  Synthetic oligonucleotide: FAS-1859
ucucaguugacauuuucuuc

SEQ ID NO: 32242 - RNA, 21 nt, Artificial Sequence
  Synthetic oligonucleotide: FAS-5088
cucucaguugacauuuucuuc

SEQ ID NO: 32243 - RNA, 22 nt, Artificial Sequence
  Synthetic oligonucleotide: FAS-5089
ccucucaguugacauuuucuuc

SEQ ID NO: 32244 - RNA, 23 nt, Artificial Sequence
  Synthetic oligonucleotide: FAS-5090
uccucucaguugacauuuucuuc

SEQ ID NO: 32245 - RNA, 24 nt, Artificial Sequence
  Synthetic oligonucleotide: FAS-5091
uuccucucaguugacauuuucuuc

SEQ ID NO: 32246 - RNA, 18 nt, Artificial Sequence
  Synthetic oligonucleotide: FAS-5092
aacggcaccuuuucuuuc

SEQ ID NO: 32247 - RNA, 19 nt, Artificial Sequence
  Synthetic oligonucleotide: FAS-5093
gaacggcaccuuuucuuuc

SEQ ID NO: 32248 - RNA, 20 nt, Artificial Sequence
  Synthetic oligonucleotide: FAS-1599
agaacggcaccuuuucuuuc

SEQ ID NO: 32249 - RNA, 21 nt, Artificial Sequence
  Synthetic oligonucleotide: FAS-5094
aagaacggcaccuuuucuuuc

SEQ ID NO: 32250 - RNA, 22 nt, Artificial Sequence
  Synthetic oligonucleotide: FAS-5095
gaagaacggcaccuuuucuuuc

SEQ ID NO: 32251 - RNA, 23 nt, Artificial Sequence
  Synthetic oligonucleotide: FAS-5096
ggaagaacggcaccuuuucuuuc

SEQ ID NO: 32252 - RNA, 24 nt, Artificial Sequence
  Synthetic oligonucleotide: FAS-5097
cggaagaacggcaccuuuucuuuc

SEQ ID NO: 32253 - RNA, 18 nt, Artificial Sequence
  Synthetic oligonucleotide: FAS-5098
cuggaggacuugcuuuuc

SEQ ID NO: 32254 - RNA, 19 nt, Artificial Sequence
  Synthetic oligonucleotide: FAS-5099
gcuggaggacuugcuuuuc

SEQ ID NO: 32255 - RNA, 20 nt, Artificial Sequence
  Synthetic oligonucleotide: FAS-1541
cgcuggaggacuugcuuuuc

SEQ ID NO: 32256 - RNA, 21 nt, Artificial Sequence
  Synthetic oligonucleotide: FAS-5100
acgcuggaggacuugcuuuuc

SEQ ID NO: 32257 - RNA, 22 nt, Artificial Sequence
  Synthetic oligonucleotide: FAS-5101
aacgcuggaggacuugcuuuuc

SEQ ID NO: 32258 - RNA, 23 nt, Artificial Sequence
  Synthetic oligonucleotide: FAS-5102
gaacgcuggaggacuugcuuuuc

SEQ ID NO: 32259 - RNA, 24 nt, Artificial Sequence
  Synthetic oligonucleotide: FAS-5103
agaacgcuggaggacuugcuuuuc

SEQ ID NO: 32260 - RNA, 18 nt, Artificial Sequence
  Synthetic oligonucleotide: FAS-5104
ugcggacaggaauugaag

SEQ ID NO: 32261 - RNA, 19 nt, Artificial Sequence
  Synthetic oligonucleotide: FAS-5105
gugcggacaggaauugaag

SEQ ID NO: 32262 - RNA, 20 nt, Artificial Sequence
  Synthetic oligonucleotide: FAS-1927
ggugcggacaggaauugaag

SEQ ID NO: 32263 - RNA, 21 nt, Artificial Sequence
  Synthetic oligonucleotide: FAS-5106
gggugcggacaggaauugaag

SEQ ID NO: 32264 - RNA, 22 nt, Artificial Sequence
  Synthetic oligonucleotide: FAS-5107
ggggugcggacaggaauugaag

SEQ ID NO: 32265 - RNA, 23 nt, Artificial Sequence
  Synthetic oligonucleotide: FAS-5108
uggggugcggacaggaauugaag

SEQ ID NO: 32266 - RNA, 24 nt, Artificial Sequence
  Synthetic oligonucleotide: FAS-5109
guggggugcggacaggaauugaag

SEQ ID NO: 32267 - RNA, 18 nt, Artificial Sequence
  Synthetic oligonucleotide: FAS-5110
accgaagcagugguuaag

SEQ ID NO: 32268 - RNA, 19 nt, Artificial Sequence
  Synthetic oligonucleotide: FAS-5111
caccgaagcagugguuaag

SEQ ID NO: 32269 - RNA, 20 nt, Artificial Sequence
  Synthetic oligonucleotide: FAS-1593
gcaccgaagcagugguuaag

SEQ ID NO: 32270 - RNA, 21 nt, Artificial Sequence
  Synthetic oligonucleotide: FAS-5112
agcaccgaagcagugguuaag

SEQ ID NO: 32271 - RNA, 22 nt, Artificial Sequence
  Synthetic oligonucleotide: FAS-5113
cagcaccgaagcagugguuaag

SEQ ID NO: 32272 - RNA, 23 nt, Artificial Sequence
  Synthetic oligonucleotide: FAS-5114
ucagcaccgaagcagugguuaag

SEQ ID NO: 32273 - RNA, 24 nt, Artificial Sequence
  Synthetic oligonucleotide: FAS-5115
gucagcaccgaagcagugguuaag

SEQ ID NO: 32274 - RNA, 18 nt, Artificial Sequence
  Synthetic oligonucleotide: FAS-5116
gcugaccccgcugggcag

SEQ ID NO: 32275 - RNA, 19 nt, Artificial Sequence
  Synthetic oligonucleotide: FAS-5117
ugcugaccccgcugggcag

SEQ ID NO: 32276 - RNA, 20 nt, Artificial Sequence
  Synthetic oligonucleotide: FAS-1544
gugcugaccccgcugggcag

SEQ ID NO: 32277 - RNA, 21 nt, Artificial Sequence
  Synthetic oligonucleotide: FAS-5118
agugcugaccccgcugggcag

SEQ ID NO: 32278 - RNA, 22 nt, Artificial Sequence
  Synthetic oligonucleotide: FAS-5119
aagugcugaccccgcugggcag

SEQ ID NO: 32279 - RNA, 23 nt, Artificial Sequence
  Synthetic oligonucleotide: FAS-5120
gaagugcugaccccgcugggcag

SEQ ID NO: 32280 - RNA, 24 nt, Artificial Sequence
  Synthetic oligonucleotide: FAS-5121
cgaagugcugaccccgcugggcag

SEQ ID NO: 32281 - RNA, 18 nt, Artificial Sequence
  Synthetic oligonucleotide: FAS-5122
gggaccccgguuggagag

SEQ ID NO: 32282 - RNA, 19 nt, Artificial Sequence
  Synthetic oligonucleotide: FAS-5123
ggggaccccgguuggagag

SEQ ID NO: 32283 - RNA, 20 nt, Artificial Sequence
  Synthetic oligonucleotide: FAS-1939
gggggaccccgguuggagag

SEQ ID NO: 32284 - RNA, 21 nt, Artificial Sequence
  Synthetic oligonucleotide: FAS-5124
agggggaccccgguuggagag

SEQ ID NO: 32285 - RNA, 22 nt, Artificial Sequence
  Synthetic oligonucleotide: FAS-5125
gagggggaccccgguuggagag

SEQ ID NO: 32286 - RNA, 23 nt, Artificial Sequence
  Synthetic oligonucleotide: FAS-5126
ggagggggaccccgguuggagag

SEQ ID NO: 32287 - RNA, 24 nt, Artificial Sequence
  Synthetic oligonucleotide: FAS-5127
uggagggggaccccgguuggagag

SEQ ID NO: 32288 - RNA, 18 nt, Artificial Sequence
  Synthetic oligonucleotide: FAS-5128
cccgguuggagagaggag

SEQ ID NO: 32289 - RNA, 19 nt, Artificial Sequence
  Synthetic oligonucleotide: FAS-5129
ccccgguuggagagaggag

SEQ ID NO: 32290 - RNA, 20 nt, Artificial Sequence
  Synthetic oligonucleotide: FAS-1940
accccgguuggagagaggag

SEQ ID NO: 32291 - RNA, 21 nt, Artificial Sequence
  Synthetic oligonucleotide: FAS-5130
gaccccgguuggagagaggag

SEQ ID NO: 32292 - RNA, 22 nt, Artificial Sequence
  Synthetic oligonucleotide: FAS-5131
ggaccccgguuggagagaggag

SEQ ID NO: 32293 - RNA, 23 nt, Artificial Sequence
  Synthetic oligonucleotide: FAS-5132
gggaccccgguuggagagaggag

SEQ ID NO: 32294 - RNA, 24 nt, Artificial Sequence
  Synthetic oligonucleotide: FAS-5133
ggggaccccgguuggagagaggag

SEQ ID NO: 32295 - RNA, 18 nt, Artificial Sequence
  Synthetic oligonucleotide: FAS-5134
gcuuuagggucgcuggag

SEQ ID NO: 32296 - RNA, 19 nt, Artificial Sequence
  Synthetic oligonucleotide: FAS-5135
agcuuuagggucgcuggag

SEQ ID NO: 32297 - RNA, 20 nt, Artificial Sequence
  Synthetic oligonucleotide: FAS-1935
aagcuuuagggucgcuggag

SEQ ID NO: 32298 - RNA, 21 nt, Artificial Sequence
  Synthetic oligonucleotide: FAS-5136
gaagcuuuagggucgcuggag

SEQ ID NO: 32299 - RNA, 22 nt, Artificial Sequence
  Synthetic oligonucleotide: FAS-5137
ggaagcuuuagggucgcuggag

SEQ ID NO: 32300 - RNA, 23 nt, Artificial Sequence
  Synthetic oligonucleotide: FAS-5138
gggaagcuuuagggucgcuggag

SEQ ID NO: 32301 - RNA, 24 nt, Artificial Sequence
  Synthetic oligonucleotide: FAS-5139
ugggaagcuuuagggucgcuggag

SEQ ID NO: 32302 - RNA, 18 nt, Artificial Sequence
  Synthetic oligonucleotide: FAS-5140
acugcgcuccacguugag

SEQ ID NO: 32303 - RNA, 19 nt, Artificial Sequence
  Synthetic oligonucleotide: FAS-5141
cacugcgcuccacguugag

SEQ ID NO: 32304 - RNA, 20 nt, Artificial Sequence
  Synthetic oligonucleotide: FAS-1549
ccacugcgcuccacguugag

SEQ ID NO: 32305 - RNA, 21 nt, Artificial Sequence
  Synthetic oligonucleotide: FAS-5142
accacugcgcuccacguugag

SEQ ID NO: 32306 - RNA, 22 nt, Artificial Sequence
  Synthetic oligonucleotide: FAS-5143
gaccacugcgcuccacguugag

SEQ ID NO: 32307 - RNA, 23 nt, Artificial Sequence
  Synthetic oligonucleotide: FAS-5144
agaccacugcgcuccacguugag

SEQ ID NO: 32308 - RNA, 24 nt, Artificial Sequence
  Synthetic oligonucleotide: FAS-5145
gagaccacugcgcuccacguugag

SEQ ID NO: 32309 - RNA, 18 nt, Artificial Sequence
  Synthetic oligonucleotide: FAS-5146
gcccgggugcucagaacg

SEQ ID NO: 32310 - RNA, 19 nt, Artificial Sequence
  Synthetic oligonucleotide: FAS-5147
ggcccgggugcucagaacg

SEQ ID NO: 32311 - RNA, 20 nt, Artificial Sequence
  Synthetic oligonucleotide: FAS-1538
aggcccgggugcucagaacg

SEQ ID NO: 32312 - RNA, 21 nt, Artificial Sequence
  Synthetic oligonucleotide: FAS-5148
caggcccgggugcucagaacg

SEQ ID NO: 32313 - RNA, 22 nt, Artificial Sequence
  Synthetic oligonucleotide: FAS-5149
ucaggcccgggugcucagaacg

SEQ ID NO: 32314 - RNA, 23 nt, Artificial Sequence
  Synthetic oligonucleotide: FAS-5150
cucaggcccgggugcucagaacg

SEQ ID NO: 32315 - RNA, 24 nt, Artificial Sequence
  Synthetic oligonucleotide: FAS-5151
ccucaggcccgggugcucagaacg

SEQ ID NO: 32316 - RNA, 18 nt, Artificial Sequence
  Synthetic oligonucleotide: FAS-5152
agaccacugcgcuccacg

SEQ ID NO: 32317 - RNA, 19 nt, Artificial Sequence
  Synthetic oligonucleotide: FAS-5153
gagaccacugcgcuccacg

SEQ ID NO: 32318 - RNA, 20 nt, Artificial Sequence
  Synthetic oligonucleotide: FAS-1548
ggagaccacugcgcuccacg

SEQ ID NO: 32319 - RNA, 21 nt, Artificial Sequence
  Synthetic oligonucleotide: FAS-5154
cggagaccacugcgcuccacg

SEQ ID NO: 32320 - RNA, 22 nt, Artificial Sequence
  Synthetic oligonucleotide: FAS-5155
ucggagaccacugcgcuccacg

SEQ ID NO: 32321 - RNA, 23 nt, Artificial Sequence
  Synthetic oligonucleotide: FAS-5156
cucggagaccacugcgcuccacg

SEQ ID NO: 32322 - RNA, 24 nt, Artificial Sequence
  Synthetic oligonucleotide: FAS-5157
ccucggagaccacugcgcuccacg

SEQ ID NO: 32323 - RNA, 18 nt, Artificial Sequence
  Synthetic oligonucleotide: FAS-5158
ucuggcaguucucagacg

SEQ ID NO: 32324 - RNA, 19 nt, Artificial Sequence
  Synthetic oligonucleotide: FAS-5159
uucuggcaguucucagacg

SEQ ID NO: 32325 - RNA, 20 nt, Artificial Sequence
  Synthetic oligonucleotide: FAS-1590
uuucuggcaguucucagacg

SEQ ID NO: 32326 - RNA, 21 nt, Artificial Sequence
  Synthetic oligonucleotide: FAS-5160
uuuucuggcaguucucagacg

SEQ ID NO: 32327 - RNA, 22 nt, Artificial Sequence
  Synthetic oligonucleotide: FAS-5161
auuuucuggcaguucucagacg

SEQ ID NO: 32328 - RNA, 23 nt, Artificial Sequence
  Synthetic oligonucleotide: FAS-5162
cauuuucuggcaguucucagacg

SEQ ID NO: 32329 - RNA, 24 nt, Artificial Sequence
  Synthetic oligonucleotide: FAS-5163
ucauuuucuggcaguucucagacg

SEQ ID NO: 32330 - RNA, 18 nt, Artificial Sequence
  Synthetic oligonucleotide: FAS-5164
ugcgaagugcugaccccg

SEQ ID NO: 32331 - RNA, 19 nt, Artificial Sequence
  Synthetic oligonucleotide: FAS-5165
augcgaagugcugaccccg

SEQ ID NO: 32332 - RNA, 20 nt, Artificial Sequence
  Synthetic oligonucleotide: FAS-1543
gaugcgaagugcugaccccg

SEQ ID NO: 32333 - RNA, 21 nt, Artificial Sequence
  Synthetic oligonucleotide: FAS-5166
ugaugcgaagugcugaccccg

SEQ ID NO: 32334 - RNA, 22 nt, Artificial Sequence
  Synthetic oligonucleotide: FAS-5167
uugaugcgaagugcugaccccg

SEQ ID NO: 32335 - RNA, 23 nt, Artificial Sequence
  Synthetic oligonucleotide: FAS-5168
cuugaugcgaagugcugaccccg

SEQ ID NO: 32336 - RNA, 24 nt, Artificial Sequence
  Synthetic oligonucleotide: FAS-5169
ccuugaugcgaagugcugaccccg

SEQ ID NO: 32337 - RNA, 18 nt, Artificial Sequence
  Synthetic oligonucleotide: FAS-5170
ugagugcgcgccgccccg

SEQ ID NO: 32338 - RNA, 19 nt, Artificial Sequence
  Synthetic oligonucleotide: FAS-5171
gugagugcgcgccgccccg

SEQ ID NO: 32339 - RNA, 20 nt, Artificial Sequence
  Synthetic oligonucleotide: FAS-1948
ggugagugcgcgccgccccg

SEQ ID NO: 32340 - RNA, 21 nt, Artificial Sequence
  Synthetic oligonucleotide: FAS-5172
gggugagugcgcgccgccccg

SEQ ID NO: 32341 - RNA, 22 nt, Artificial Sequence
  Synthetic oligonucleotide: FAS-5173
ugggugagugcgcgccgccccg

SEQ ID NO: 32342 - RNA, 23 nt, Artificial Sequence
  Synthetic oligonucleotide: FAS-5174
gugggugagugcgcgccgccccg

SEQ ID NO: 32343 - RNA, 24 nt, Artificial Sequence
  Synthetic oligonucleotide: FAS-5175
ggugggugagugcgcgccgccccg

SEQ ID NO: 32344 - RNA, 18 nt, Artificial Sequence
  Synthetic oligonucleotide: FAS-5176
gaagcagugguuaagccg

SEQ ID NO: 32345 - RNA, 19 nt, Artificial Sequence
  Synthetic oligonucleotide: FAS-5177
cgaagcagugguuaagccg

SEQ ID NO: 32346 - RNA, 20 nt, Artificial Sequence
  Synthetic oligonucleotide: FAS-1595
ccgaagcagugguuaagccg

SEQ ID NO: 32347 - RNA, 21 nt, Artificial Sequence
  Synthetic oligonucleotide: FAS-5178
accgaagcagugguuaagccg

SEQ ID NO: 32348 - RNA, 22 nt, Artificial Sequence
  Synthetic oligonucleotide: FAS-5179
caccgaagcagugguuaagccg

SEQ ID NO: 32349 - RNA, 23 nt, Artificial Sequence
  Synthetic oligonucleotide: FAS-5180
gcaccgaagcagugguuaagccg

SEQ ID NO: 32350 - RNA, 24 nt, Artificial Sequence
  Synthetic oligonucleotide: FAS-5181
agcaccgaagcagugguuaagccg

SEQ ID NO: 32351 - RNA, 18 nt, Artificial Sequence
  Synthetic oligonucleotide: FAS-5182
gggcugcugcgggaggcg

SEQ ID NO: 32352 - RNA, 19 nt, Artificial Sequence
  Synthetic oligonucleotide: FAS-5183
cgggcugcugcgggaggcg

SEQ ID NO: 32353 - RNA, 20 nt, Artificial Sequence
  Synthetic oligonucleotide: FAS-1530
gcgggcugcugcgggaggcg

SEQ ID NO: 32354 - RNA, 18 nt, Artificial Sequence
  Synthetic oligonucleotide: FAS-5184
cgccgccccgcgggggcg

SEQ ID NO: 32355 - RNA, 19 nt, Artificial Sequence
  Synthetic oligonucleotide: FAS-5185
gcgccgccccgcgggggcg

SEQ ID NO: 32356 - RNA, 20 nt, Artificial Sequence
  Synthetic oligonucleotide: FAS-1954
cgcgccgccccgcgggggcg

SEQ ID NO: 32357 - RNA, 21 nt, Artificial Sequence
  Synthetic oligonucleotide: FAS-5186
gcgcgccgccccgcgggggcg

SEQ ID NO: 32358 - RNA, 22 nt, Artificial Sequence
  Synthetic oligonucleotide: FAS-5187
ugcgcgccgccccgcgggggcg

SEQ ID NO: 32359 - RNA, 23 nt, Artificial Sequence
  Synthetic oligonucleotide: FAS-5188
gugcgcgccgccccgcgggggcg

SEQ ID NO: 32360 - RNA, 24 nt, Artificial Sequence
  Synthetic oligonucleotide: FAS-5189
agugcgcgccgccccgcgggggcg

SEQ ID NO: 32361 - RNA, 18 nt, Artificial Sequence
  Synthetic oligonucleotide: FAS-5190
ugggaagcuuuagggucg

SEQ ID NO: 32362 - RNA, 19 nt, Artificial Sequence
  Synthetic oligonucleotide: FAS-5191
cugggaagcuuuagggucg

SEQ ID NO: 32363 - RNA, 20 nt, Artificial Sequence
  Synthetic oligonucleotide: FAS-1562
ucugggaagcuuuagggucg

SEQ ID NO: 32364 - RNA, 21 nt, Artificial Sequence
  Synthetic oligonucleotide: FAS-5192
gucugggaagcuuuagggucg

SEQ ID NO: 32365 - RNA, 22 nt, Artificial Sequence
  Synthetic oligonucleotide: FAS-5193
agucugggaagcuuuagggucg

SEQ ID NO: 32366 - RNA, 23 nt, Artificial Sequence
  Synthetic oligonucleotide: FAS-5194
aagucugggaagcuuuagggucg

SEQ ID NO: 32367 - RNA, 24 nt, Artificial Sequence
  Synthetic oligonucleotide: FAS-5195
gaagucugggaagcuuuagggucg

SEQ ID NO: 32368 - RNA, 18 nt, Artificial Sequence
  Synthetic oligonucleotide: FAS-5196
cugaccccgcugggcagg

SEQ ID NO: 32369 - RNA, 19 nt, Artificial Sequence
  Synthetic oligonucleotide: FAS-5197
gcugaccccgcugggcagg

SEQ ID NO: 32370 - RNA, 20 nt, Artificial Sequence
  Synthetic oligonucleotide: FAS-1914
ugcugaccccgcugggcagg

SEQ ID NO: 32371 - RNA, 21 nt, Artificial Sequence
  Synthetic oligonucleotide: FAS-5198
gugcugaccccgcugggcagg

SEQ ID NO: 32372 - RNA, 22 nt, Artificial Sequence
  Synthetic oligonucleotide: FAS-5199
agugcugaccccgcugggcagg

SEQ ID NO: 32373 - RNA, 23 nt, Artificial Sequence
  Synthetic oligonucleotide: FAS-5200
aagugcugaccccgcugggcagg

SEQ ID NO: 32374 - RNA, 24 nt, Artificial Sequence
  Synthetic oligonucleotide: FAS-5201
gaagugcugaccccgcugggcagg

SEQ ID NO: 32375 - RNA, 18 nt, Artificial Sequence
  Synthetic oligonucleotide: FAS-5202
gcuggagggggaccccgg

SEQ ID NO: 32376 - RNA, 19 nt, Artificial Sequence
  Synthetic oligonucleotide: FAS-5203
cgcuggagggggaccccgg

SEQ ID NO: 32377 - RNA, 20 nt, Artificial Sequence
  Synthetic oligonucleotide: FAS-1568
ucgcuggagggggaccccgg

SEQ ID NO: 32378 - RNA, 21 nt, Artificial Sequence
  Synthetic oligonucleotide: FAS-5204
gucgcuggagggggaccccgg

SEQ ID NO: 32379 - RNA, 22 nt, Artificial Sequence
  Synthetic oligonucleotide: FAS-5205
ggucgcuggagggggaccccgg

SEQ ID NO: 32380 - RNA, 23 nt, Artificial Sequence
  Synthetic oligonucleotide: FAS-5206
gggucgcuggagggggaccccgg

SEQ ID NO: 32381 - RNA, 24 nt, Artificial Sequence
  Synthetic oligonucleotide: FAS-5207
agggucgcuggagggggaccccgg

SEQ ID NO: 32382 - RNA, 18 nt, Artificial Sequence
  Synthetic oligonucleotide: FAS-5208
uuaagccggagggcucgg

SEQ ID NO: 32383 - RNA, 19 nt, Artificial Sequence
  Synthetic oligonucleotide: FAS-5209
guuaagccggagggcucgg

SEQ ID NO: 32384 - RNA, 20 nt, Artificial Sequence
  Synthetic oligonucleotide: FAS-1598
gguuaagccggagggcucgg

SEQ ID NO: 32385 - RNA, 21 nt, Artificial Sequence
  Synthetic oligonucleotide: FAS-5210
ugguuaagccggagggcucgg

SEQ ID NO: 32386 - RNA, 22 nt, Artificial Sequence
  Synthetic oligonucleotide: FAS-5211
gugguuaagccggagggcucgg

SEQ ID NO: 32387 - RNA, 23 nt, Artificial Sequence
  Synthetic oligonucleotide: FAS-5212
agugguuaagccggagggcucgg

SEQ ID NO: 32388 - RNA, 24 nt, Artificial Sequence
  Synthetic oligonucleotide: FAS-5213
cagugguuaagccggagggcucgg

SEQ ID NO: 32389 - RNA, 18 nt, Artificial Sequence
  Synthetic oligonucleotide: FAS-5214
ccgccccgcgggggcggg

SEQ ID NO: 32390 - RNA, 19 nt, Artificial Sequence
  Synthetic oligonucleotide: FAS-5215
gccgccccgcgggggcggg

SEQ ID NO: 32391 - RNA, 20 nt, Artificial Sequence
  Synthetic oligonucleotide: FAS-1587
cgccgccccgcgggggcggg

SEQ ID NO: 32392 - RNA, 21 nt, Artificial Sequence
  Synthetic oligonucleotide: FAS-5216
gcgccgccccgcgggggcggg

SEQ ID NO: 32393 - RNA, 22 nt, Artificial Sequence
  Synthetic oligonucleotide: FAS-5217
cgcgccgccccgcgggggcggg

SEQ ID NO: 32394 - RNA, 23 nt, Artificial Sequence
  Synthetic oligonucleotide: FAS-5218
gcgcgccgccccgcgggggcggg

SEQ ID NO: 32395 - RNA, 24 nt, Artificial Sequence
  Synthetic oligonucleotide: FAS-5219
ugcgcgccgccccgcgggggcggg

SEQ ID NO: 32396 - RNA, 18 nt, Artificial Sequence
  Synthetic oligonucleotide: FAS-5220
gcgcgccgccccgcgggg

SEQ ID NO: 32397 - RNA, 19 nt, Artificial Sequence
  Synthetic oligonucleotide: FAS-5221
ugcgcgccgccccgcgggg

SEQ ID NO: 32398 - RNA, 20 nt, Artificial Sequence
  Synthetic oligonucleotide: FAS-1583
gugcgcgccgccccgcgggg

SEQ ID NO: 32399 - RNA, 21 nt, Artificial Sequence
  Synthetic oligonucleotide: FAS-5222
agugcgcgccgccccgcgggg

SEQ ID NO: 32400 - RNA, 22 nt, Artificial Sequence
  Synthetic oligonucleotide: FAS-5223
gagugcgcgccgccccgcgggg

SEQ ID NO: 32401 - RNA, 23 nt, Artificial Sequence
  Synthetic oligonucleotide: FAS-5224
ugagugcgcgccgccccgcgggg

SEQ ID NO: 32402 - RNA, 24 nt, Artificial Sequence
  Synthetic oligonucleotide: FAS-5225
gugagugcgcgccgccccgcgggg

SEQ ID NO: 32403 - RNA, 18 nt, Artificial Sequence
  Synthetic oligonucleotide: FAS-5226
cgcgccgccccgcggggg

SEQ ID NO: 32404 - RNA, 19 nt, Artificial Sequence
  Synthetic oligonucleotide: FAS-5227
gcgcgccgccccgcggggg

SEQ ID NO: 32405 - RNA, 20 nt, Artificial Sequence
  Synthetic oligonucleotide: FAS-1952
ugcgcgccgccccgcggggg

SEQ ID NO: 32406 - RNA, 21 nt, Artificial Sequence
  Synthetic oligonucleotide: FAS-5228
gugcgcgccgccccgcggggg

SEQ ID NO: 32407 - RNA, 22 nt, Artificial Sequence
  Synthetic oligonucleotide: FAS-5229
agugcgcgccgccccgcggggg

SEQ ID NO: 32408 - RNA, 23 nt, Artificial Sequence
  Synthetic oligonucleotide: FAS-5230
gagugcgcgccgccccgcggggg

SEQ ID NO: 32409 - RNA, 24 nt, Artificial Sequence
  Synthetic oligonucleotide: FAS-5231
ugagugcgcgccgccccgcggggg

SEQ ID NO: 32410 - RNA, 18 nt, Artificial Sequence
  Synthetic oligonucleotide: FAS-5232
aagcuuuagggucgcugg

SEQ ID NO: 32411 - RNA, 19 nt, Artificial Sequence
  Synthetic oligonucleotide: FAS-5233
gaagcuuuagggucgcugg

SEQ ID NO: 32412 - RNA, 20 nt, Artificial Sequence
  Synthetic oligonucleotide: FAS-1933
ggaagcuuuagggucgcugg

SEQ ID NO: 32413 - RNA, 21 nt, Artificial Sequence
  Synthetic oligonucleotide: FAS-5234
gggaagcuuuagggucgcugg

SEQ ID NO: 32414 - RNA, 22 nt, Artificial Sequence
  Synthetic oligonucleotide: FAS-5235
ugggaagcuuuagggucgcugg

SEQ ID NO: 32415 - RNA, 23 nt, Artificial Sequence
  Synthetic oligonucleotide: FAS-5236
cugggaagcuuuagggucgcugg

SEQ ID NO: 32416 - RNA, 24 nt, Artificial Sequence
  Synthetic oligonucleotide: FAS-5237
ucugggaagcuuuagggucgcugg

SEQ ID NO: 32417 - RNA, 18 nt, Artificial Sequence
  Synthetic oligonucleotide: FAS-5238
cgggugcucagaacgcug

SEQ ID NO: 32418 - RNA, 19 nt, Artificial Sequence
  Synthetic oligonucleotide: FAS-5239
ccgggugcucagaacgcug

SEQ ID NO: 32419 - RNA, 20 nt, Artificial Sequence
  Synthetic oligonucleotide: FAS-1540
cccgggugcucagaacgcug

SEQ ID NO: 32420 - RNA, 21 nt, Artificial Sequence
  Synthetic oligonucleotide: FAS-5240
gcccgggugcucagaacgcug

SEQ ID NO: 32421 - RNA, 22 nt, Artificial Sequence
  Synthetic oligonucleotide: FAS-5241
ggcccgggugcucagaacgcug

SEQ ID NO: 32422 - RNA, 23 nt, Artificial Sequence
  Synthetic oligonucleotide: FAS-5242
aggcccgggugcucagaacgcug

SEQ ID NO: 32423 - RNA, 24 nt, Artificial Sequence
  Synthetic oligonucleotide: FAS-5243
caggcccgggugcucagaacgcug

SEQ ID NO: 32424 - RNA, 18 nt, Artificial Sequence
  Synthetic oligonucleotide: FAS-5244
gaagcuuuagggucgcug

SEQ ID NO: 32425 - RNA, 19 nt, Artificial Sequence
  Synthetic oligonucleotide: FAS-5245
ggaagcuuuagggucgcug

SEQ ID NO: 32426 - RNA, 20 nt, Artificial Sequence
  Synthetic oligonucleotide: FAS-1564
gggaagcuuuagggucgcug

SEQ ID NO: 32427 - RNA, 21 nt, Artificial Sequence
  Synthetic oligonucleotide: FAS-5246
ugggaagcuuuagggucgcug

SEQ ID NO: 32428 - RNA, 22 nt, Artificial Sequence
  Synthetic oligonucleotide: FAS-5247
cugggaagcuuuagggucgcug

SEQ ID NO: 32429 - RNA, 23 nt, Artificial Sequence
  Synthetic oligonucleotide: FAS-5248
ucugggaagcuuuagggucgcug

SEQ ID NO: 32430 - RNA, 24 nt, Artificial Sequence
  Synthetic oligonucleotide: FAS-5249
gucugggaagcuuuagggucgcug

SEQ ID NO: 32431 - RNA, 18 nt, Artificial Sequence
  Synthetic oligonucleotide: FAS-5250
uaauucuuucgugcucug

SEQ ID NO: 32432 - RNA, 19 nt, Artificial Sequence
  Synthetic oligonucleotide: FAS-5251
guaauucuuucgugcucug

SEQ ID NO: 32433 - RNA, 20 nt, Artificial Sequence
  Synthetic oligonucleotide: FAS-1493
uguaauucuuucgugcucug

SEQ ID NO: 32434 - RNA, 21 nt, Artificial Sequence
  Synthetic oligonucleotide: FAS-5252
uuguaauucuuucgugcucug

SEQ ID NO: 32435 - RNA, 22 nt, Artificial Sequence
  Synthetic oligonucleotide: FAS-5253
cuuguaauucuuucgugcucug

SEQ ID NO: 32436 - RNA, 23 nt, Artificial Sequence
  Synthetic oligonucleotide: FAS-5254
ucuuguaauucuuucgugcucug

SEQ ID NO: 32437 - RNA, 24 nt, Artificial Sequence
  Synthetic oligonucleotide: FAS-5255
aucuuguaauucuuucgugcucug

SEQ ID NO: 32438 - RNA, 18 nt, Artificial Sequence
  Synthetic oligonucleotide: FAS-5256
ggagggggaccccgguug

SEQ ID NO: 32439 - RNA, 19 nt, Artificial Sequence
  Synthetic oligonucleotide: FAS-5257
uggagggggaccccgguug

SEQ ID NO: 32440 - RNA, 20 nt, Artificial Sequence
  Synthetic oligonucleotide: FAS-1570
cuggagggggaccccgguug

SEQ ID NO: 32441 - RNA, 21 nt, Artificial Sequence
  Synthetic oligonucleotide: FAS-5258
gcuggagggggaccccgguug

SEQ ID NO: 32442 - RNA, 22 nt, Artificial Sequence
  Synthetic oligonucleotide: FAS-5259
cgcuggagggggaccccgguug

SEQ ID NO: 32443 - RNA, 23 nt, Artificial Sequence
  Synthetic oligonucleotide: FAS-5260
ucgcuggagggggaccccgguug

SEQ ID NO: 32444 - RNA, 24 nt, Artificial Sequence
  Synthetic oligonucleotide: FAS-5261
gucgcuggagggggaccccgguug

SEQ ID NO: 32445 - RNA, 18 nt, Artificial Sequence
  Synthetic oligonucleotide: FAS-5262
cuuuucuugggccuugau

SEQ ID NO: 32446 - RNA, 19 nt, Artificial Sequence
  Synthetic oligonucleotide: FAS-5263
gcuuuucuugggccuugau

SEQ ID NO: 32447 - RNA, 20 nt, Artificial Sequence
  Synthetic oligonucleotide: FAS-1542
ugcuuuucuugggccuugau

SEQ ID NO: 32448 - RNA, 21 nt, Artificial Sequence
  Synthetic oligonucleotide: FAS-5264
uugcuuuucuugggccuugau

SEQ ID NO: 32449 - RNA, 22 nt, Artificial Sequence
  Synthetic oligonucleotide: FAS-5265
cuugcuuuucuugggccuugau

SEQ ID NO: 32450 - RNA, 23 nt, Artificial Sequence
  Synthetic oligonucleotide: FAS-5266
acuugcuuuucuugggccuugau

SEQ ID NO: 32451 - RNA, 24 nt, Artificial Sequence
  Synthetic oligonucleotide: FAS-5267
gacuugcuuuucuugggccuugau

SEQ ID NO: 32452 - RNA, 18 nt, Artificial Sequence
  Synthetic oligonucleotide: FAS-5268
uucucgaaaaaguuauau

SEQ ID NO: 32453 - RNA, 19 nt, Artificial Sequence
  Synthetic oligonucleotide: FAS-5269
uuucucgaaaaaguuauau

SEQ ID NO: 32454 - RNA, 20 nt, Artificial Sequence
  Synthetic oligonucleotide: FAS-1964
cuuucucgaaaaaguuauau

SEQ ID NO: 32455 - RNA, 21 nt, Artificial Sequence
  Synthetic oligonucleotide: FAS-5270
ucuuucucgaaaaaguuauau

SEQ ID NO: 32456 - RNA, 22 nt, Artificial Sequence
  Synthetic oligonucleotide: FAS-5271
uucuuucucgaaaaaguuauau

SEQ ID NO: 32457 - RNA, 23 nt, Artificial Sequence
  Synthetic oligonucleotide: FAS-5272
uuucuuucucgaaaaaguuauau

SEQ ID NO: 32458 - RNA, 24 nt, Artificial Sequence
  Synthetic oligonucleotide: FAS-5273
uuuucuuucucgaaaaaguuauau

SEQ ID NO: 32459 - RNA, 18 nt, Artificial Sequence
  Synthetic oligonucleotide: FAS-5274
cuuucucgaaaaaguuau

SEQ ID NO: 32460 - RNA, 19 nt, Artificial Sequence
  Synthetic oligonucleotide: FAS-5275
ucuuucucgaaaaaguuau

SEQ ID NO: 32461 - RNA, 20 nt, Artificial Sequence
  Synthetic oligonucleotide: FAS-1600
uucuuucucgaaaaaguuau

SEQ ID NO: 32462 - RNA, 21 nt, Artificial Sequence
  Synthetic oligonucleotide: FAS-5276
uuucuuucucgaaaaaguuau

SEQ ID NO: 32463 - RNA, 22 nt, Artificial Sequence
  Synthetic oligonucleotide: FAS-5277
uuuucuuucucgaaaaaguuau

SEQ ID NO: 32464 - RNA, 23 nt, Artificial Sequence
  Synthetic oligonucleotide: FAS-5278
cuuuucuuucucgaaaaaguuau

SEQ ID NO: 32465 - RNA, 24 nt, Artificial Sequence
  Synthetic oligonucleotide: FAS-5279
ccuuuucuuucucgaaaaaguuau

SEQ ID NO: 32466 - RNA, 18 nt, Artificial Sequence
  Synthetic oligonucleotide: FAS-5280
agguuagguuacccuccu

SEQ ID NO: 32467 - RNA, 19 nt, Artificial Sequence
  Synthetic oligonucleotide: FAS-5281
uagguuagguuacccuccu

SEQ ID NO: 32468 - RNA, 20 nt, Artificial Sequence
  Synthetic oligonucleotide: FAS-1507
cuagguuagguuacccuccu

SEQ ID NO: 32469 - RNA, 21 nt, Artificial Sequence
  Synthetic oligonucleotide: FAS-5282
ucuagguuagguuacccuccu

SEQ ID NO: 32470 - RNA, 22 nt, Artificial Sequence
  Synthetic oligonucleotide: FAS-5283
aucuagguuagguuacccuccu

SEQ ID NO: 32471 - RNA, 23 nt, Artificial Sequence
  Synthetic oligonucleotide: FAS-5284
aaucuagguuagguuacccuccu

SEQ ID NO: 32472 - RNA, 24 nt, Artificial Sequence
  Synthetic oligonucleotide: FAS-5285
aaaucuagguuagguuacccuccu

SEQ ID NO: 32473 - RNA, 18 nt, Artificial Sequence
  Synthetic oligonucleotide: FAS-5286
ggcagcuccggcgcuccu

SEQ ID NO: 32474 - RNA, 19 nt, Artificial Sequence
  Synthetic oligonucleotide: FAS-5287
gggcagcuccggcgcuccu

SEQ ID NO: 32475 - RNA, 20 nt, Artificial Sequence
  Synthetic oligonucleotide: FAS-1918
ggggcagcuccggcgcuccu

SEQ ID NO: 32476 - RNA, 21 nt, Artificial Sequence
  Synthetic oligonucleotide: FAS-5288
cggggcagcuccggcgcuccu

SEQ ID NO: 32477 - RNA, 22 nt, Artificial Sequence
  Synthetic oligonucleotide: FAS-5289
gcggggcagcuccggcgcuccu

SEQ ID NO: 32478 - RNA, 23 nt, Artificial Sequence
  Synthetic oligonucleotide: FAS-5290
ggcggggcagcuccggcgcuccu

SEQ ID NO: 32479 - RNA, 24 nt, Artificial Sequence
  Synthetic oligonucleotide: FAS-5291
aggcggggcagcuccggcgcuccu

SEQ ID NO: 32480 - RNA, 18 nt, Artificial Sequence
  Synthetic oligonucleotide: FAS-5292
ugguuaagccggagggcu

SEQ ID NO: 32481 - RNA, 19 nt, Artificial Sequence
  Synthetic oligonucleotide: FAS-5293
gugguuaagccggagggcu

SEQ ID NO: 32482 - RNA, 20 nt, Artificial Sequence
  Synthetic oligonucleotide: FAS-1961
agugguuaagccggagggcu

SEQ ID NO: 32483 - RNA, 21 nt, Artificial Sequence
  Synthetic oligonucleotide: FAS-5294
cagugguuaagccggagggcu

SEQ ID NO: 32484 - RNA, 22 nt, Artificial Sequence
  Synthetic oligonucleotide: FAS-5295
gcagugguuaagccggagggcu

SEQ ID NO: 32485 - RNA, 23 nt, Artificial Sequence
  Synthetic oligonucleotide: FAS-5296
agcagugguuaagccggagggcu

SEQ ID NO: 32486 - RNA, 24 nt, Artificial Sequence
  Synthetic oligonucleotide: FAS-5297
aagcagugguuaagccggagggcu

SEQ ID NO: 32487 - RNA, 18 nt, Artificial Sequence
  Synthetic oligonucleotide: FAS-5298
cccucaggcccgggugcu

SEQ ID NO: 32488 - RNA, 19 nt, Artificial Sequence
  Synthetic oligonucleotide: FAS-5299
ucccucaggcccgggugcu

SEQ ID NO: 32489 - RNA, 20 nt, Artificial Sequence
  Synthetic oligonucleotide: FAS-1537
uucccucaggcccgggugcu

SEQ ID NO: 32490 - RNA, 21 nt, Artificial Sequence
  Synthetic oligonucleotide: FAS-5300
cuucccucaggcccgggugcu

SEQ ID NO: 32491 - RNA, 22 nt, Artificial Sequence
  Synthetic oligonucleotide: FAS-5301
ccuucccucaggcccgggugcu

SEQ ID NO: 32492 - RNA, 23 nt, Artificial Sequence
  Synthetic oligonucleotide: FAS-5302
accuucccucaggcccgggugcu

SEQ ID NO: 32493 - RNA, 24 nt, Artificial Sequence
  Synthetic oligonucleotide: FAS-5303
gaccuucccucaggcccgggugcu

SEQ ID NO: 32494 - RNA, 18 nt, Artificial Sequence
  Synthetic oligonucleotide: FAS-5304
uucaaagucacuauugcu

SEQ ID NO: 32495 - RNA, 19 nt, Artificial Sequence
  Synthetic oligonucleotide: FAS-5305
guucaaagucacuauugcu

SEQ ID NO: 32496 - RNA, 20 nt, Artificial Sequence
  Synthetic oligonucleotide: FAS-1494
uguucaaagucacuauugcu

SEQ ID NO: 32497 - RNA, 21 nt, Artificial Sequence
  Synthetic oligonucleotide: FAS-5306
cuguucaaagucacuauugcu

SEQ ID NO: 32498 - RNA, 22 nt, Artificial Sequence
  Synthetic oligonucleotide: FAS-5307
acuguucaaagucacuauugcu

SEQ ID NO: 32499 - RNA, 23 nt, Artificial Sequence
  Synthetic oligonucleotide: FAS-5308
cacuguucaaagucacuauugcu

SEQ ID NO: 32500 - RNA, 24 nt, Artificial Sequence
  Synthetic oligonucleotide: FAS-5309
acacuguucaaagucacuauugcu

SEQ ID NO: 32501 - RNA, 18 nt, Artificial Sequence
  Synthetic oligonucleotide: FAS-5310
gaauugaagcggaagucu

SEQ ID NO: 32502 - RNA, 19 nt, Artificial Sequence
  Synthetic oligonucleotide: FAS-5311
ggaauugaagcggaagucu

SEQ ID NO: 32503 - RNA, 20 nt, Artificial Sequence
  Synthetic oligonucleotide: FAS-1929
aggaauugaagcggaagucu

SEQ ID NO: 32504 - RNA, 21 nt, Artificial Sequence
  Synthetic oligonucleotide: FAS-5312
caggaauugaagcggaagucu

SEQ ID NO: 32505 - RNA, 22 nt, Artificial Sequence
  Synthetic oligonucleotide: FAS-5313
acaggaauugaagcggaagucu

SEQ ID NO: 32506 - RNA, 23 nt, Artificial Sequence
  Synthetic oligonucleotide: FAS-5314
gacaggaauugaagcggaagucu

SEQ ID NO: 32507 - RNA, 24 nt, Artificial Sequence
  Synthetic oligonucleotide: FAS-5315
ggacaggaauugaagcggaagucu

SEQ ID NO: 32508 - RNA, 18 nt, Artificial Sequence
  Synthetic oligonucleotide: FAS-5316
aggaauugaagcggaagu

SEQ ID NO: 32509 - RNA, 19 nt, Artificial Sequence
  Synthetic oligonucleotide: FAS-5317
caggaauugaagcggaagu

SEQ ID NO: 32510 - RNA, 20 nt, Artificial Sequence
  Synthetic oligonucleotide: FAS-1558
acaggaauugaagcggaagu

SEQ ID NO: 32511 - RNA, 21 nt, Artificial Sequence
  Synthetic oligonucleotide: FAS-5318
gacaggaauugaagcggaagu

SEQ ID NO: 32512 - RNA, 22 nt, Artificial Sequence
  Synthetic oligonucleotide: FAS-5319
ggacaggaauugaagcggaagu

SEQ ID NO: 32513 - RNA, 23 nt, Artificial Sequence
  Synthetic oligonucleotide: FAS-5320
cggacaggaauugaagcggaagu

SEQ ID NO: 32514 - RNA, 24 nt, Artificial Sequence
  Synthetic oligonucleotide: FAS-5321
gcggacaggaauugaagcggaagu

SEQ ID NO: 32515 - RNA, 18 nt, Artificial Sequence
  Synthetic oligonucleotide: FAS-5322
cuggcaguucucagacgu

SEQ ID NO: 32516 - RNA, 19 nt, Artificial Sequence
  Synthetic oligonucleotide: FAS-5323
ucuggcaguucucagacgu

SEQ ID NO: 32517 - RNA, 20 nt, Artificial Sequence
  Synthetic oligonucleotide: FAS-1956
uucuggcaguucucagacgu

SEQ ID NO: 32518 - RNA, 21 nt, Artificial Sequence
  Synthetic oligonucleotide: FAS-5324
uuucuggcaguucucagacgu

SEQ ID NO: 32519 - RNA, 22 nt, Artificial Sequence
  Synthetic oligonucleotide: FAS-5325
uuuucuggcaguucucagacgu

SEQ ID NO: 32520 - RNA, 23 nt, Artificial Sequence
  Synthetic oligonucleotide: FAS-5326
auuuucuggcaguucucagacgu

SEQ ID NO: 32521 - RNA, 24 nt, Artificial Sequence
  Synthetic oligonucleotide: FAS-5327
cauuuucuggcaguucucagacgu

SEQ ID NO: 32522 - RNA, 18 nt, Artificial Sequence
  Synthetic oligonucleotide: FAS-5328
ggcugcugcgggaggcgu

SEQ ID NO: 32523 - RNA, 19 nt, Artificial Sequence
  Synthetic oligonucleotide: FAS-5329
gggcugcugcgggaggcgu

SEQ ID NO: 32524 - RNA, 20 nt, Artificial Sequence
  Synthetic oligonucleotide: FAS-1897
cgggcugcugcgggaggcgu

SEQ ID NO: 32525 - RNA, 18 nt, Artificial Sequence
  Synthetic oligonucleotide: FAS-5330
cuggagggggaccccggu

SEQ ID NO: 32526 - RNA, 19 nt, Artificial Sequence
  Synthetic oligonucleotide: FAS-5331
gcuggagggggaccccggu

SEQ ID NO: 32527 - RNA, 20 nt, Artificial Sequence
  Synthetic oligonucleotide: FAS-1938
cgcuggagggggaccccggu

SEQ ID NO: 32528 - RNA, 21 nt, Artificial Sequence
  Synthetic oligonucleotide: FAS-5332
ucgcuggagggggaccccggu

SEQ ID NO: 32529 - RNA, 22 nt, Artificial Sequence
  Synthetic oligonucleotide: FAS-5333
gucgcuggagggggaccccggu

SEQ ID NO: 32530 - RNA, 23 nt, Artificial Sequence
  Synthetic oligonucleotide: FAS-5334
ggucgcuggagggggaccccggu

SEQ ID NO: 32531 - RNA, 24 nt, Artificial Sequence
  Synthetic oligonucleotide: FAS-5335
gggucgcuggagggggaccccggu

SEQ ID NO: 32532 - RNA, 18 nt, Artificial Sequence
  Synthetic oligonucleotide: FAS-5336
uugaggugggcguggggu

SEQ ID NO: 32533 - RNA, 19 nt, Artificial Sequence
  Synthetic oligonucleotide: FAS-5337
guugaggugggcguggggu

SEQ ID NO: 32534 - RNA, 20 nt, Artificial Sequence
  Synthetic oligonucleotide: FAS-1552
cguugaggugggcguggggu

SEQ ID NO: 32535 - RNA, 21 nt, Artificial Sequence
  Synthetic oligonucleotide: FAS-5338
acguugaggugggcguggggu

SEQ ID NO: 32536 - RNA, 22 nt, Artificial Sequence
  Synthetic oligonucleotide: FAS-5339
cacguugaggugggcguggggu

SEQ ID NO: 32537 - RNA, 23 nt, Artificial Sequence
  Synthetic oligonucleotide: FAS-5340
ccacguugaggugggcguggggu

SEQ ID NO: 32538 - RNA, 24 nt, Artificial Sequence
  Synthetic oligonucleotide: FAS-5341
uccacguugaggugggcguggggu

SEQ ID NO: 32539 - RNA, 18 nt, Artificial Sequence
  Synthetic oligonucleotide: FAS-5342
uuuucuucuggagccugu

SEQ ID NO: 32540 - RNA, 19 nt, Artificial Sequence
  Synthetic oligonucleotide: FAS-5343
auuuucuucuggagccugu

SEQ ID NO: 32541 - RNA, 20 nt, Artificial Sequence
  Synthetic oligonucleotide: FAS-1505
cauuuucuucuggagccugu

SEQ ID NO: 32542 - RNA, 21 nt, Artificial Sequence
  Synthetic oligonucleotide: FAS-5344
acauuuucuucuggagccugu

SEQ ID NO: 32543 - RNA, 22 nt, Artificial Sequence
  Synthetic oligonucleotide: FAS-5345
gacauuuucuucuggagccugu

SEQ ID NO: 32544 - RNA, 23 nt, Artificial Sequence
  Synthetic oligonucleotide: FAS-5346
ugacauuuucuucuggagccugu

SEQ ID NO: 32545 - RNA, 24 nt, Artificial Sequence
  Synthetic oligonucleotide: FAS-5347
uugacauuuucuucuggagccugu

SEQ ID NO: 32546 - RNA, 18 nt, Artificial Sequence
  Synthetic oligonucleotide: FAS-5348
cuggcucccgggggcugu

SEQ ID NO: 32547 - RNA, 19 nt, Artificial Sequence
  Synthetic oligonucleotide: FAS-5349
acuggcucccgggggcugu

SEQ ID NO: 32548 - RNA, 20 nt, Artificial Sequence
  Synthetic oligonucleotide: FAS-1535
gacuggcucccgggggcugu

SEQ ID NO: 32549 - RNA, 21 nt, Artificial Sequence
  Synthetic oligonucleotide: FAS-5350
agacuggcucccgggggcugu

SEQ ID NO: 32550 - RNA, 22 nt, Artificial Sequence
  Synthetic oligonucleotide: FAS-5351
gagacuggcucccgggggcugu

SEQ ID NO: 32551 - RNA, 23 nt, Artificial Sequence
  Synthetic oligonucleotide: FAS-5352
ggagacuggcucccgggggcugu

SEQ ID NO: 32552 - RNA, 24 nt, Artificial Sequence
  Synthetic oligonucleotide: FAS-5353
uggagacuggcucccgggggcugu

SEQ ID NO: 32553 - RNA, 18 nt, Artificial Sequence
  Synthetic oligonucleotide: FAS-5354
gagagagccugcagccuu

SEQ ID NO: 32554 - RNA, 19 nt, Artificial Sequence
  Synthetic oligonucleotide: FAS-5355
ggagagagccugcagccuu

SEQ ID NO: 32555 - RNA, 20 nt, Artificial Sequence
  Synthetic oligonucleotide: FAS-1589
gggagagagccugcagccuu

SEQ ID NO: 32556 - RNA, 21 nt, Artificial Sequence
  Synthetic oligonucleotide: FAS-5356
ggggagagagccugcagccuu

SEQ ID NO: 32557 - RNA, 22 nt, Artificial Sequence
  Synthetic oligonucleotide: FAS-5357
cggggagagagccugcagccuu

SEQ ID NO: 32558 - RNA, 23 nt, Artificial Sequence
  Synthetic oligonucleotide: FAS-5358
gcggggagagagccugcagccuu

SEQ ID NO: 32559 - RNA, 24 nt, Artificial Sequence
  Synthetic oligonucleotide: FAS-5359
ggcggggagagagccugcagccuu

SEQ ID NO: 32560 - RNA, 18 nt, Artificial Sequence
  Synthetic oligonucleotide: FAS-5360
ucaaagucacuauugcuu

SEQ ID NO: 32561 - RNA, 19 nt, Artificial Sequence
  Synthetic oligonucleotide: FAS-5361
uucaaagucacuauugcuu

SEQ ID NO: 32562 - RNA, 20 nt, Artificial Sequence
  Synthetic oligonucleotide: FAS-1849
guucaaagucacuauugcuu

SEQ ID NO: 32563 - RNA, 21 nt, Artificial Sequence
  Synthetic oligonucleotide: FAS-5362
uguucaaagucacuauugcuu

SEQ ID NO: 32564 - RNA, 22 nt, Artificial Sequence
  Synthetic oligonucleotide: FAS-5363
cuguucaaagucacuauugcuu

SEQ ID NO: 32565 - RNA, 23 nt, Artificial Sequence
  Synthetic oligonucleotide: FAS-5364
acuguucaaagucacuauugcuu

SEQ ID NO: 32566 - RNA, 24 nt, Artificial Sequence
  Synthetic oligonucleotide: FAS-5365
cacuguucaaagucacuauugcuu

SEQ ID NO: 32567 - RNA, 18 nt, Artificial Sequence
  Synthetic oligonucleotide: FAS-5366
cucaguugacauuuucuu

SEQ ID NO: 32568 - RNA, 19 nt, Artificial Sequence
  Synthetic oligonucleotide: FAS-5367
ucucaguugacauuuucuu

SEQ ID NO: 32569 - RNA, 20 nt, Artificial Sequence
  Synthetic oligonucleotide: FAS-1503
cucucaguugacauuuucuu

SEQ ID NO: 32570 - RNA, 21 nt, Artificial Sequence
  Synthetic oligonucleotide: FAS-5368
ccucucaguugacauuuucuu

SEQ ID NO: 32571 - RNA, 22 nt, Artificial Sequence
  Synthetic oligonucleotide: FAS-5369
uccucucaguugacauuuucuu

SEQ ID NO: 32572 - RNA, 23 nt, Artificial Sequence
  Synthetic oligonucleotide: FAS-5370
uuccucucaguugacauuuucuu

SEQ ID NO: 32573 - RNA, 24 nt, Artificial Sequence
  Synthetic oligonucleotide: FAS-5371
cuuccucucaguugacauuuucuu

SEQ ID NO: 32574 - RNA, 17 nt, Artificial Sequence
  Synthetic oligonucleotide: FAS-5372
gacacacagguguucaa

SEQ ID NO: 32575 - RNA, 17 nt, Artificial Sequence
  Synthetic oligonucleotide: FAS-5373
uagcuggggcuaugcga

SEQ ID NO: 32576 - RNA, 17 nt, Artificial Sequence
  Synthetic oligonucleotide: FAS-1289
gcaauccuccgaaguga

SEQ ID NO: 32577 - RNA, 17 nt, Artificial Sequence
  Synthetic oligonucleotide: FAS-5374
cagccaagucacucgua

SEQ ID NO: 32578 - RNA, 17 nt, Artificial Sequence
  Synthetic oligonucleotide: FAS-817
cccauccuccugaccac

SEQ ID NO: 32579 - RNA, 17 nt, Artificial Sequence
  Synthetic oligonucleotide: FAS-1772
cggguuggggagggcuc

SEQ ID NO: 32580 - RNA, 17 nt, Artificial Sequence
  Synthetic oligonucleotide: FAS-5375
acccgggcguuccccag

SEQ ID NO: 32581 - RNA, 17 nt, Artificial Sequence
  Synthetic oligonucleotide: FAS-1768
uuaauauagcuggggcu

SEQ ID NO: 32582 - RNA, 17 nt, Artificial Sequence
  Synthetic oligonucleotide: FAS-5376
ggccuccugcccuuucu

SEQ ID NO: 32583 - RNA, 17 nt, Artificial Sequence
  Synthetic oligonucleotide: FAS-1151
gcgggcgcgggacgcgu

SEQ ID NO: 32584 - RNA, 17 nt, Artificial Sequence
  Synthetic oligonucleotide: FAS-3184
cccucuccugcccgggu

SEQ ID NO: 32585 - RNA, 17 nt, Artificial Sequence
  Synthetic oligonucleotide: FAS-5377
gcgauuuggcuuaaguu

SEQ ID NO: 32586 - RNA, 20 nt, Artificial Sequence
  Synthetic oligonucleotide: FAS-5378
agugacacacagguguucaa

SEQ ID NO: 32587 - RNA, 20 nt, Artificial Sequence
  Synthetic oligonucleotide: FAS-5379
auauagcuggggcuaugcga

SEQ ID NO: 32588 - RNA, 20 nt, Artificial Sequence
  Synthetic oligonucleotide: FAS-1173
ugagcaauccuccgaaguga

SEQ ID NO: 32589 - RNA, 20 nt, Artificial Sequence
  Synthetic oligonucleotide: FAS-5380
cuccagccaagucacucgua

SEQ ID NO: 32590 - RNA, 20 nt, Artificial Sequence
  Synthetic oligonucleotide: FAS-626
cuucccauccuccugaccac

SEQ ID NO: 32591 - RNA, 20 nt, Artificial Sequence
  Synthetic oligonucleotide: FAS-1771
gcccggguuggggagggcuc

SEQ ID NO: 32592 - RNA, 20 nt, Artificial Sequence
  Synthetic oligonucleotide: FAS-5381
ccaacccgggcguuccccag

SEQ ID NO: 32593 - RNA, 20 nt, Artificial Sequence
  Synthetic oligonucleotide: FAS-1765
uguuuaauauagcuggggcu

SEQ ID NO: 32594 - RNA, 20 nt, Artificial Sequence
  Synthetic oligonucleotide: FAS-5382
gccggccuccugcccuuucu

SEQ ID NO: 32595 - RNA, 20 nt, Artificial Sequence
  Synthetic oligonucleotide: FAS-1062
ggggcgggcgcgggacgcgu

SEQ ID NO: 32596 - RNA, 20 nt, Artificial Sequence
  Synthetic oligonucleotide: FAS-3187
gagcccucuccugcccgggu

SEQ ID NO: 32597 - RNA, 20 nt, Artificial Sequence
  Synthetic oligonucleotide: FAS-5383
uaugcgauuuggcuuaaguu

SEQ ID NO: 32598 - RNA, 17 nt, Artificial Sequence
  Synthetic oligonucleotide: FAS-1769
ggaagcucuuucacuuc

SEQ ID NO: 32599 - RNA, 20 nt, Artificial Sequence
  Synthetic oligonucleotide: FAS-1766
uggggaagcucuuucacuuc

SEQ ID NO: 32600 - RNA, 17 nt, Artificial Sequence
  Synthetic oligonucleotide: FAS-1775
ucaggaggguaaccuaa

SEQ ID NO: 32601 - RNA, 17 nt, Artificial Sequence
  Synthetic oligonucleotide: FAS-1778
accucucucccuuccca

SEQ ID NO: 32602 - RNA, 17 nt, Artificial Sequence
  Synthetic oligonucleotide: FAS-5384
gagcccuccggcuuaac

SEQ ID NO: 32603 - RNA, 17 nt, Artificial Sequence
  Synthetic oligonucleotide: FAS-5385
acacuguucaaagucac

SEQ ID NO: 32604 - RNA, 17 nt, Artificial Sequence
  Synthetic oligonucleotide: FAS-5386
ccuaaagcuucccagac

SEQ ID NO: 32605 - RNA, 17 nt, Artificial Sequence
  Synthetic oligonucleotide: FAS-5387
auaacacauuaauaacc

SEQ ID NO: 32606 - RNA, 17 nt, Artificial Sequence
  Synthetic oligonucleotide: FAS-5388
ccgcgccggagcggacc

SEQ ID NO: 32607 - RNA, 17 nt, Artificial Sequence
  Synthetic oligonucleotide: FAS-5389
ucccccuccagcgaccc

SEQ ID NO: 32608 - RNA, 17 nt, Artificial Sequence
  Synthetic oligonucleotide: FAS-5390
gccguucuuccgagccc

SEQ ID NO: 32609 - RNA, 17 nt, Artificial Sequence
  Synthetic oligonucleotide: FAS-5391
gcucagaacgcuggagg

SEQ ID NO: 32610 - RNA, 17 nt, Artificial Sequence
  Synthetic oligonucleotide: FAS-5392
ccggagcggaccuuugg

SEQ ID NO: 32611 - RNA, 17 nt, Artificial Sequence
  Synthetic oligonucleotide: FAS-5393
auugaagcggaagucug

SEQ ID NO: 32612 - RNA, 17 nt, Artificial Sequence
  Synthetic oligonucleotide: FAS-1472
gguugcagagugaggug

SEQ ID NO: 32613 - RNA, 17 nt, Artificial Sequence
  Synthetic oligonucleotide: FAS-5394
cagucuuguagguguug

SEQ ID NO: 32614 - RNA, 17 nt, Artificial Sequence
  Synthetic oligonucleotide: FAS-5395
agcccacuguucauccu

SEQ ID NO: 32615 - RNA, 17 nt, Artificial Sequence
  Synthetic oligonucleotide: FAS-1522
gguuagguuacccuccu

SEQ ID NO: 32616 - RNA, 17 nt, Artificial Sequence
  Synthetic oligonucleotide: FAS-1741
ccuuuggcuuggcuugu

SEQ ID NO: 32617 - RNA, 17 nt, Artificial Sequence
  Synthetic oligonucleotide: FAS-1776
cagagcacgaaagaauu

SEQ ID NO: 32618 - RNA, 20 nt, Artificial Sequence
  Synthetic oligonucleotide: FAS-1773
cccucaggaggguaaccuaa

SEQ ID NO: 32619 - RNA, 20 nt, Artificial Sequence
  Synthetic oligonucleotide: FAS-1777
gcaaccucucucccuuccca

SEQ ID NO: 32620 - RNA, 20 nt, Artificial Sequence
  Synthetic oligonucleotide: FAS-5396
uccgagcccuccggcuuaac

SEQ ID NO: 32621 - RNA, 20 nt, Artificial Sequence
  Synthetic oligonucleotide: FAS-5397
ugaacacuguucaaagucac

SEQ ID NO: 32622 - RNA, 20 nt, Artificial Sequence
  Synthetic oligonucleotide: FAS-5398
gacccuaaagcuucccagac

SEQ ID NO: 32623 - RNA, 20 nt, Artificial Sequence
  Synthetic oligonucleotide: FAS-5399
uuaauaacacauuaauaacc

SEQ ID NO: 32624 - RNA, 20 nt, Artificial Sequence
  Synthetic oligonucleotide: FAS-5400
cacccgcgccggagcggacc

SEQ ID NO: 32625 - RNA, 20 nt, Artificial Sequence
  Synthetic oligonucleotide: FAS-5401
gggucccccuccagcgaccc

SEQ ID NO: 32626 - RNA, 20 nt, Artificial Sequence
  Synthetic oligonucleotide: FAS-5402
ggugccguucuuccgagccc

SEQ ID NO: 32627 - RNA, 20 nt, Artificial Sequence
  Synthetic oligonucleotide: FAS-5403
ggugcucagaacgcuggagg

SEQ ID NO: 32628 - RNA, 20 nt, Artificial Sequence
  Synthetic oligonucleotide: FAS-5404
gcgccggagcggaccuuugg

SEQ ID NO: 32629 - RNA, 20 nt, Artificial Sequence
  Synthetic oligonucleotide: FAS-5405
ggaauugaagcggaagucug

SEQ ID NO: 32630 - RNA, 20 nt, Artificial Sequence
  Synthetic oligonucleotide: FAS-1420
agagguugcagagugaggug

SEQ ID NO: 32631 - RNA, 20 nt, Artificial Sequence
  Synthetic oligonucleotide: FAS-5406
caccagucuuguagguguug

SEQ ID NO: 32632 - RNA, 20 nt, Artificial Sequence
  Synthetic oligonucleotide: FAS-5407
cuuagcccacuguucauccu

SEQ ID NO: 32633 - RNA, 20 nt, Artificial Sequence
  Synthetic oligonucleotide: FAS-1507
cuagguuagguuacccuccu

SEQ ID NO: 32634 - RNA, 20 nt, Artificial Sequence
  Synthetic oligonucleotide: FAS-1705
ggaccuuuggcuuggcuugu

SEQ ID NO: 32635 - RNA, 20 nt, Artificial Sequence
  Synthetic oligonucleotide: FAS-1774
caccagagcacgaaagaauu

SEQ ID NO: 32636 - RNA, 17 nt, Artificial Sequence
  Synthetic oligonucleotide: CBLB-2522
cugcggcagcuugcuua

SEQ ID NO: 32637 - RNA, 17 nt, Artificial Sequence
  Synthetic oligonucleotide: CBLB-2523
aagcugccgcagaucgc

SEQ ID NO: 32638 - RNA, 17 nt, Artificial Sequence
  Synthetic oligonucleotide: CBLB-2524
ugcggcagcuugcuuag

SEQ ID NO: 32639 - RNA, 17 nt, Artificial Sequence
  Synthetic oligonucleotide: CBLB-2525
aaaauucgaccuuuucg

SEQ ID NO: 32640 - RNA, 17 nt, Artificial Sequence
  Synthetic oligonucleotide: CBLB-2526
gcggcagcuugcuuagg

SEQ ID NO: 32641 - RNA, 17 nt, Artificial Sequence
  Synthetic oligonucleotide: CBLB-2527
ccgaaaaggucgaauuu

SEQ ID NO: 32642 - RNA, 17 nt, Artificial Sequence
  Synthetic oligonucleotide: CBLB-2528
cgaaaaggucgaauuuu

SEQ ID NO: 32643 - RNA, 20 nt, Artificial Sequence
  Synthetic oligonucleotide: CBLB-2529
cccguuuugacuuuuucaua

SEQ ID NO: 32644 - RNA, 20 nt, Artificial Sequence
  Synthetic oligonucleotide: CBLB-2530
gaucugcggcagcuugcuua

SEQ ID NO: 32645 - RNA, 20 nt, Artificial Sequence
  Synthetic oligonucleotide: CBLB-2531
ggauuuccuccucgaccacc

SEQ ID NO: 32646 - RNA, 20 nt, Artificial Sequence
  Synthetic oligonucleotide: CBLB-2532
agcaagcugccgcagaucgc

SEQ ID NO: 32647 - RNA, 20 nt, Artificial Sequence
  Synthetic oligonucleotide: CBLB-2533
cguaaaugcugauauguauc

SEQ ID NO: 32648 - RNA, 20 nt, Artificial Sequence
  Synthetic oligonucleotide: CBLB-2534
ggguauuauugaugcuauuc

SEQ ID NO: 32649 - RNA, 20 nt, Artificial Sequence
  Synthetic oligonucleotide: CBLB-2535
aucugcggcagcuugcuuag

SEQ ID NO: 32650 - RNA, 20 nt, Artificial Sequence
  Synthetic oligonucleotide: CBLB-2536
ggcagaaacccugguggucg

SEQ ID NO: 32651 - RNA, 20 nt, Artificial Sequence
  Synthetic oligonucleotide: CBLB-2537
cgaucugcggcagcuugcuu

SEQ ID NO: 32652 - RNA, 20 nt, Artificial Sequence
  Synthetic oligonucleotide: CBLB-2538
uacccaaaauucgaccuuuu

SEQ ID NO: 32653 - RNA, 17 nt, Artificial Sequence
  Synthetic oligonucleotide: CBLB-2539
uuaugaaaaagucaaaa

SEQ ID NO: 32654 - RNA, 17 nt, Artificial Sequence
  Synthetic oligonucleotide: CBLB-2540
ggaggaaauccccgaaa

SEQ ID NO: 32655 - RNA, 17 nt, Artificial Sequence
  Synthetic oligonucleotide: CBLB-2541
aauuuuaguucuuuaaa

SEQ ID NO: 32656 - RNA, 17 nt, Artificial Sequence
  Synthetic oligonucleotide: CBLB-2542
auggcaaacucaaugaa

SEQ ID NO: 32657 - RNA, 17 nt, Artificial Sequence
  Synthetic oligonucleotide: CBLB-2543
uuccuccucgaccacca

SEQ ID NO: 32658 - RNA, 17 nt, Artificial Sequence
  Synthetic oligonucleotide: CBLB-2544
cuuccaagucuucucca

SEQ ID NO: 32659 - RNA, 17 nt, Artificial Sequence
  Synthetic oligonucleotide: CBLB-2545
acucuuuaaagaaggca

SEQ ID NO: 32660 - RNA, 17 nt, Artificial Sequence
  Synthetic oligonucleotide: CBLB-2546
gaagacuuggaagcuca

SEQ ID NO: 32661 - RNA, 17 nt, Artificial Sequence
  Synthetic oligonucleotide: CBLB-2547
auaagacucuuuaaaga

SEQ ID NO: 32662 - RNA, 17 nt, Artificial Sequence
  Synthetic oligonucleotide: CBLB-2548
agaacuaaaauuccaga

SEQ ID NO: 32663 - RNA, 17 nt, Artificial Sequence
  Synthetic oligonucleotide: CBLB-2549
guuuugacuuuuucaua

SEQ ID NO: 32664 - RNA, 17 nt, Artificial Sequence
  Synthetic oligonucleotide: CBLB-2550
aaaauaucaaguauaua

SEQ ID NO: 32665 - RNA, 17 nt, Artificial Sequence
  Synthetic oligonucleotide: CBLB-2551
uaugaaaaagucaaaac

SEQ ID NO: 32666 - RNA, 17 nt, Artificial Sequence
  Synthetic oligonucleotide: CBLB-2552
guaugaagaacagucac

SEQ ID NO: 32667 - RNA, 17 nt, Artificial Sequence
  Synthetic oligonucleotide: CBLB-2553
aagaacagucacaggac

SEQ ID NO: 32668 - RNA, 17 nt, Artificial Sequence
  Synthetic oligonucleotide: CBLB-2554
uuuccuccucgaccacc

SEQ ID NO: 32669 - RNA, 17 nt, Artificial Sequence
  Synthetic oligonucleotide: CBLB-2555
augaauggcagaaaccc

SEQ ID NO: 32670 - RNA, 17 nt, Artificial Sequence
  Synthetic oligonucleotide: CBLB-2556
ucauugaguuugccauc

SEQ ID NO: 32671 - RNA, 17 nt, Artificial Sequence
  Synthetic oligonucleotide: CBLB-2557
aaaugcugauauguauc

SEQ ID NO: 32672 - RNA, 17 nt, Artificial Sequence
  Synthetic oligonucleotide: CBLB-2558
uauuauugaugcuauuc

SEQ ID NO: 32673 - RNA, 17 nt, Artificial Sequence
  Synthetic oligonucleotide: CBLB-2559
ugaguugggcaaguuuc

SEQ ID NO: 32674 - RNA, 17 nt, Artificial Sequence
  Synthetic oligonucleotide: CBLB-2560
caaaauucgaccuuuuc

SEQ ID NO: 32675 - RNA, 17 nt, Artificial Sequence
  Synthetic oligonucleotide: CBLB-2561
gaagcucauggacaaag

SEQ ID NO: 32676 - RNA, 17 nt, Artificial Sequence
  Synthetic oligonucleotide: CBLB-2562
cgcagaucgcaggaccg

SEQ ID NO: 32677 - RNA, 17 nt, Artificial Sequence
  Synthetic oligonucleotide: CBLB-2563
agaaacccugguggucg

SEQ ID NO: 32678 - RNA, 17 nt, Artificial Sequence
  Synthetic oligonucleotide: CBLB-2564
aacccugguggucgagg

SEQ ID NO: 32679 - RNA, 17 nt, Artificial Sequence
  Synthetic oligonucleotide: CBLB-2565
auaucaaguauauaugg

SEQ ID NO: 32680 - RNA, 17 nt, Artificial Sequence
  Synthetic oligonucleotide: CBLB-2566
aauggcagaaacccugg

SEQ ID NO: 32681 - RNA, 17 nt, Artificial Sequence
  Synthetic oligonucleotide: CBLB-2567
cacgguccugcgaucug

SEQ ID NO: 32682 - RNA, 17 nt, Artificial Sequence
  Synthetic oligonucleotide: CBLB-2568
ggaccguggagaagacu

SEQ ID NO: 32683 - RNA, 17 nt, Artificial Sequence
  Synthetic oligonucleotide: CBLB-2569
gcuauucaggaugcagu

SEQ ID NO: 32684 - RNA, 17 nt, Artificial Sequence
  Synthetic oligonucleotide: CBLB-2570
acucauucucacugagu

SEQ ID NO: 32685 - RNA, 17 nt, Artificial Sequence
  Synthetic oligonucleotide: CBLB-2571
uaucaaguauauauggu

SEQ ID NO: 32686 - RNA, 17 nt, Artificial Sequence
  Synthetic oligonucleotide: CBLB-2572
ucugcggcagcuugcuu

SEQ ID NO: 32687 - RNA, 17 nt, Artificial Sequence
  Synthetic oligonucleotide: CBLB-2573
auuuuucaacugaaguu

SEQ ID NO: 32688 - RNA, 17 nt, Artificial Sequence
  Synthetic oligonucleotide: CBLB-2574
cucauucucacugaguu

SEQ ID NO: 32689 - RNA, 17 nt, Artificial Sequence
  Synthetic oligonucleotide: CBLB-2575
acugaaguuugggauuu

SEQ ID NO: 32690 - RNA, 17 nt, Artificial Sequence
  Synthetic oligonucleotide: CBLB-2576
uuuuucaacugaaguuu

SEQ ID NO: 32691 - RNA, 17 nt, Artificial Sequence
  Synthetic oligonucleotide: CBLB-2577
gaauauuucagauguuu

SEQ ID NO: 32692 - RNA, 17 nt, Artificial Sequence
  Synthetic oligonucleotide: CBLB-2578
ccaaaauucgaccuuuu

SEQ ID NO: 32693 - RNA, 17 nt, Artificial Sequence
  Synthetic oligonucleotide: CBLB-2579
uuuuuaucuuuguuuuu

SEQ ID NO: 32694 - RNA, 20 nt, Artificial Sequence
  Synthetic oligonucleotide: CBLB-2580
gccuuaugaaaaagucaaaa

SEQ ID NO: 32695 - RNA, 20 nt, Artificial Sequence
  Synthetic oligonucleotide: CBLB-2581
cgaggaggaaauccccgaaa

SEQ ID NO: 32696 - RNA, 20 nt, Artificial Sequence
  Synthetic oligonucleotide: CBLB-2582
uggaauuuuaguucuuuaaa

SEQ ID NO: 32697 - RNA, 20 nt, Artificial Sequence
  Synthetic oligonucleotide: CBLB-2583
cagauggcaaacucaaugaa

SEQ ID NO: 32698 - RNA, 20 nt, Artificial Sequence
  Synthetic oligonucleotide: CBLB-2584
gauuuccuccucgaccacca

SEQ ID NO: 32699 - RNA, 20 nt, Artificial Sequence
  Synthetic oligonucleotide: CBLB-2585
gagcuuccaagucuucucca

SEQ ID NO: 32700 - RNA, 20 nt, Artificial Sequence
  Synthetic oligonucleotide: CBLB-2586
aagacucuuuaaagaaggca

SEQ ID NO: 32701 - RNA, 20 nt, Artificial Sequence
  Synthetic oligonucleotide: CBLB-2587
ggagaagacuuggaagcuca

SEQ ID NO: 32702 - RNA, 20 nt, Artificial Sequence
  Synthetic oligonucleotide: CBLB-2588
gcaauaagacucuuuaaaga

SEQ ID NO: 32703 - RNA, 20 nt, Artificial Sequence
  Synthetic oligonucleotide: CBLB-2589
uaaagaacuaaaauuccaga

SEQ ID NO: 32704 - RNA, 20 nt, Artificial Sequence
  Synthetic oligonucleotide: CBLB-2590
ggcaaaauaucaaguauaua

SEQ ID NO: 32705 - RNA, 20 nt, Artificial Sequence
  Synthetic oligonucleotide: CBLB-2591
ccuuaugaaaaagucaaaac

SEQ ID NO: 32706 - RNA, 20 nt, Artificial Sequence
  Synthetic oligonucleotide: CBLB-2592
aauguaugaagaacagucac

SEQ ID NO: 32707 - RNA, 20 nt, Artificial Sequence
  Synthetic oligonucleotide: CBLB-2593
augaagaacagucacaggac

SEQ ID NO: 32708 - RNA, 20 nt, Artificial Sequence
  Synthetic oligonucleotide: CBLB-2594
ucaaugaauggcagaaaccc

SEQ ID NO: 32709 - RNA, 20 nt, Artificial Sequence
  Synthetic oligonucleotide: CBLB-2595
cauucauugaguuugccauc

SEQ ID NO: 32710 - RNA, 20 nt, Artificial Sequence
  Synthetic oligonucleotide: CBLB-2596
cacugaguugggcaaguuuc

SEQ ID NO: 32711 - RNA, 20 nt, Artificial Sequence
  Synthetic oligonucleotide: CBLB-2597
acccaaaauucgaccuuuuc

SEQ ID NO: 32712 - RNA, 20 nt, Artificial Sequence
  Synthetic oligonucleotide: CBLB-2598
uuggaagcucauggacaaag

SEQ ID NO: 32713 - RNA, 20 nt, Artificial Sequence
  Synthetic oligonucleotide: CBLB-2599
ugccgcagaucgcaggaccg

SEQ ID NO: 32714 - RNA, 20 nt, Artificial Sequence
  Synthetic oligonucleotide: CBLB-2600
cccaaaauucgaccuuuucg

SEQ ID NO: 32715 - RNA, 20 nt, Artificial Sequence
  Synthetic oligonucleotide: CBLB-2601
agaaacccugguggucgagg

SEQ ID NO: 32716 - RNA, 20 nt, Artificial Sequence
  Synthetic oligonucleotide: CBLB-2602
ucugcggcagcuugcuuagg

SEQ ID NO: 32717 - RNA, 20 nt, Artificial Sequence
  Synthetic oligonucleotide: CBLB-2603
aaaauaucaaguauauaugg

SEQ ID NO: 32718 - RNA, 20 nt, Artificial Sequence
  Synthetic oligonucleotide: CBLB-2604
augaauggcagaaacccugg

SEQ ID NO: 32719 - RNA, 20 nt, Artificial Sequence
  Synthetic oligonucleotide: CBLB-2605
cuccacgguccugcgaucug

SEQ ID NO: 32720 - RNA, 20 nt, Artificial Sequence
  Synthetic oligonucleotide: CBLB-2606
gcaggaccguggagaagacu

SEQ ID NO: 32721 - RNA, 20 nt, Artificial Sequence
  Synthetic oligonucleotide: CBLB-2607
gaugcuauucaggaugcagu

SEQ ID NO: 32722 - RNA, 20 nt, Artificial Sequence
  Synthetic oligonucleotide: CBLB-2608
aguacucauucucacugagu

SEQ ID NO: 32723 - RNA, 20 nt, Artificial Sequence
  Synthetic oligonucleotide: CBLB-2609
aaauaucaaguauauauggu

SEQ ID NO: 32724 - RNA, 20 nt, Artificial Sequence
  Synthetic oligonucleotide: CBLB-2610
gcuauuuuucaacugaaguu

SEQ ID NO: 32725 - RNA, 20 nt, Artificial Sequence
  Synthetic oligonucleotide: CBLB-2611
guacucauucucacugaguu

SEQ ID NO: 32726 - RNA, 20 nt, Artificial Sequence
  Synthetic oligonucleotide: CBLB-2612
uccccgaaaaggucgaauuu

SEQ ID NO: 32727 - RNA, 20 nt, Artificial Sequence
  Synthetic oligonucleotide: CBLB-2613
ucaacugaaguuugggauuu

SEQ ID NO: 32728 - RNA, 20 nt, Artificial Sequence
  Synthetic oligonucleotide: CBLB-2614
cuauuuuucaacugaaguuu

SEQ ID NO: 32729 - RNA, 20 nt, Artificial Sequence
  Synthetic oligonucleotide: CBLB-2615
gaagaauauuucagauguuu

SEQ ID NO: 32730 - RNA, 20 nt, Artificial Sequence
  Synthetic oligonucleotide: CBLB-2616
ccccgaaaaggucgaauuuu

SEQ ID NO: 32731 - RNA, 20 nt, Artificial Sequence
  Synthetic oligonucleotide: CBLB-2617
uuauuuuuaucuuuguuuuu

SEQ ID NO: 32732 - RNA, 17 nt, Artificial Sequence
  Synthetic oligonucleotide: CBLB-2618
ugcaagguggaaaaaaa

SEQ ID NO: 32733 - RNA, 17 nt, Artificial Sequence
  Synthetic oligonucleotide: CBLB-2619
gugcaagguggaaaaaa

SEQ ID NO: 32734 - RNA, 17 nt, Artificial Sequence
  Synthetic oligonucleotide: CBLB-2620
aacuguagacaccaaaa

SEQ ID NO: 32735 - RNA, 17 nt, Artificial Sequence
  Synthetic oligonucleotide: CBLB-2621
cuugcuagaucaacaaa

SEQ ID NO: 32736 - RNA, 17 nt, Artificial Sequence
  Synthetic oligonucleotide: CBLB-2622
agcaucggcaugccaaa

SEQ ID NO: 32737 - RNA, 17 nt, Artificial Sequence
  Synthetic oligonucleotide: CBLB-2623
ucaucucuuggaucaaa

SEQ ID NO: 32738 - RNA, 17 nt, Artificial Sequence
  Synthetic oligonucleotide: CBLB-2624
uuucacaacgacagaaa

SEQ ID NO: 32739 - RNA, 17 nt, Artificial Sequence
  Synthetic oligonucleotide: CBLB-2625
auuguaaguaugagaaa

SEQ ID NO: 32740 - RNA, 17 nt, Artificial Sequence
  Synthetic oligonucleotide: CBLB-2626
ugaauuauauugugaaa

SEQ ID NO: 32741 - RNA, 17 nt, Artificial Sequence
  Synthetic oligonucleotide: CBLB-2627
ugucguugugaaauaaa

SEQ ID NO: 32742 - RNA, 17 nt, Artificial Sequence
  Synthetic oligonucleotide: CBLB-2628
uuaagcauauauuuaaa

SEQ ID NO: 32743 - RNA, 17 nt, Artificial Sequence
  Synthetic oligonucleotide: CBLB-2629
acuugcuagaucaacaa

SEQ ID NO: 32744 - RNA, 17 nt, Artificial Sequence
  Synthetic oligonucleotide: CBLB-2630
uucgucuguaggcacaa

SEQ ID NO: 32745 - RNA, 17 nt, Artificial Sequence
  Synthetic oligonucleotide: CBLB-2631
cccaacggguucaccaa

SEQ ID NO: 32746 - RNA, 17 nt, Artificial Sequence
  Synthetic oligonucleotide: CBLB-2632
ucccuguggcagcccaa

SEQ ID NO: 32747 - RNA, 17 nt, Artificial Sequence
  Synthetic oligonucleotide: CBLB-2633
aaagcaaucuuucccaa

SEQ ID NO: 32748 - RNA, 17 nt, Artificial Sequence
  Synthetic oligonucleotide: CBLB-2634
cccagucacauagccaa

SEQ ID NO: 32749 - RNA, 17 nt, Artificial Sequence
  Synthetic oligonucleotide: CBLB-2635
uagcaucggcaugccaa

SEQ ID NO: 32750 - RNA, 17 nt, Artificial Sequence
  Synthetic oligonucleotide: CBLB-2636
uuucaggucuuuuccaa

SEQ ID NO: 32751 - RNA, 17 nt, Artificial Sequence
  Synthetic oligonucleotide: CBLB-2637
cucuggccuggaagcaa

SEQ ID NO: 32752 - RNA, 17 nt, Artificial Sequence
  Synthetic oligonucleotide: CBLB-2638
cuucuagcaggaggcaa

SEQ ID NO: 32753 - RNA, 17 nt, Artificial Sequence
  Synthetic oligonucleotide: CBLB-2639
cuuucuucucugggcaa

SEQ ID NO: 32754 - RNA, 17 nt, Artificial Sequence
  Synthetic oligonucleotide: CBLB-2640
uucaucucuuggaucaa

SEQ ID NO: 32755 - RNA, 17 nt, Artificial Sequence
  Synthetic oligonucleotide: CBLB-2641
gcgaguucaaaugucaa

SEQ ID NO: 32756 - RNA, 17 nt, Artificial Sequence
  Synthetic oligonucleotide: CBLB-2642
ucucuucaccucuucaa

SEQ ID NO: 32757 - RNA, 17 nt, Artificial Sequence
  Synthetic oligonucleotide: CBLB-2643
caccugcauuuaaagaa

SEQ ID NO: 32758 - RNA, 17 nt, Artificial Sequence
  Synthetic oligonucleotide: CBLB-2644
auuucacaacgacagaa

SEQ ID NO: 32759 - RNA, 17 nt, Artificial Sequence
  Synthetic oligonucleotide: CBLB-2645
cuggaucuaauucagaa

SEQ ID NO: 32760 - RNA, 17 nt, Artificial Sequence
  Synthetic oligonucleotide: CBLB-2646
guuggcaaacguccgaa

SEQ ID NO: 32761 - RNA, 17 nt, Artificial Sequence
  Synthetic oligonucleotide: CBLB-2647
ggucacuguaugcugaa

SEQ ID NO: 32762 - RNA, 17 nt, Artificial Sequence
  Synthetic oligonucleotide: CBLB-2648
aucagggcuugaaauaa

SEQ ID NO: 32763 - RNA, 17 nt, Artificial Sequence
  Synthetic oligonucleotide: CBLB-2649
caugugacugaagauaa

SEQ ID NO: 32764 - RNA, 17 nt, Artificial Sequence
  Synthetic oligonucleotide: CBLB-2650
uuuaggucuugugauaa

SEQ ID NO: 32765 - RNA, 17 nt, Artificial Sequence
  Synthetic oligonucleotide: CBLB-2651
uaaagguuucaaccuaa

SEQ ID NO: 32766 - RNA, 17 nt, Artificial Sequence
  Synthetic oligonucleotide: CBLB-2652
auuaucacaagaccuaa

SEQ ID NO: 32767 - RNA, 17 nt, Artificial Sequence
  Synthetic oligonucleotide: CBLB-2653
gaaagagaauuugcuaa

SEQ ID NO: 32768 - RNA, 17 nt, Artificial Sequence
  Synthetic oligonucleotide: CBLB-2654
accuuagcuccuucuaa

SEQ ID NO: 32769 - RNA, 17 nt, Artificial Sequence
  Synthetic oligonucleotide: CBLB-2655
ggccuggcaggugguaa

SEQ ID NO: 32770 - RNA, 17 nt, Artificial Sequence
  Synthetic oligonucleotide: CBLB-2656
ggaggaggaucucuuaa

SEQ ID NO: 32771 - RNA, 17 nt, Artificial Sequence
  Synthetic oligonucleotide: CBLB-2657
cuuaagcauauauuuaa

SEQ ID NO: 32772 - RNA, 17 nt, Artificial Sequence
  Synthetic oligonucleotide: CBLB-2658
guucaaaacuuuuuuaa

SEQ ID NO: 32773 - RNA, 17 nt, Artificial Sequence
  Synthetic oligonucleotide: CBLB-2659
agguaaaacuagaaaca

SEQ ID NO: 32774 - RNA, 17 nt, Artificial Sequence
  Synthetic oligonucleotide: CBLB-2660
gugaauucagggaaaca

SEQ ID NO: 32775 - RNA, 17 nt, Artificial Sequence
  Synthetic oligonucleotide: CBLB-2661
uauaaucauuagcaaca

SEQ ID NO: 32776 - RNA, 17 nt, Artificial Sequence
  Synthetic oligonucleotide: CBLB-2662
augcugaauggaacaca

SEQ ID NO: 32777 - RNA, 17 nt, Artificial Sequence
  Synthetic oligonucleotide: CBLB-2663
cacaucaaaugcccaca

SEQ ID NO: 32778 - RNA, 17 nt, Artificial Sequence
  Synthetic oligonucleotide: CBLB-2664
cccguugggcugccaca

SEQ ID NO: 32779 - RNA, 17 nt, Artificial Sequence
  Synthetic oligonucleotide: CBLB-2665
uuucgucuguaggcaca

SEQ ID NO: 32780 - RNA, 17 nt, Artificial Sequence
  Synthetic oligonucleotide: CBLB-2666
gacacauccagguuaca

SEQ ID NO: 32781 - RNA, 17 nt, Artificial Sequence
  Synthetic oligonucleotide: CBLB-2667
gaccaguacaccuacca

SEQ ID NO: 32782 - RNA, 17 nt, Artificial Sequence
  Synthetic oligonucleotide: CBLB-2668
acagaacuaucguacca

SEQ ID NO: 32783 - RNA, 17 nt, Artificial Sequence
  Synthetic oligonucleotide: CBLB-937
caccacagaaaacccca

SEQ ID NO: 32784 - RNA, 17 nt, Artificial Sequence
  Synthetic oligonucleotide: CBLB-2669
cgcaaaauagagcccca

SEQ ID NO: 32785 - RNA, 17 nt, Artificial Sequence
  Synthetic oligonucleotide: CBLB-2670
augccgccucaggccca

SEQ ID NO: 32786 - RNA, 17 nt, Artificial Sequence
  Synthetic oligonucleotide: CBLB-2671
cccaauggucaauucca

SEQ ID NO: 32787 - RNA, 17 nt, Artificial Sequence
  Synthetic oligonucleotide: CBLB-2672
cauauucuucacuucca

SEQ ID NO: 32788 - RNA, 17 nt, Artificial Sequence
  Synthetic oligonucleotide: CBLB-2673
ugucugaauacuuucca

SEQ ID NO: 32789 - RNA, 17 nt, Artificial Sequence
  Synthetic oligonucleotide: CBLB-2674
cgggacaauccaaagca

SEQ ID NO: 32790 - RNA, 17 nt, Artificial Sequence
  Synthetic oligonucleotide: CBLB-2675
caaugccucuugaagca

SEQ ID NO: 32791 - RNA, 17 nt, Artificial Sequence
  Synthetic oligonucleotide: CBLB-2676
ccugauugauggcagca

SEQ ID NO: 32792 - RNA, 17 nt, Artificial Sequence
  Synthetic oligonucleotide: CBLB-2677
auccaggcgaggaggca

SEQ ID NO: 32793 - RNA, 17 nt, Artificial Sequence
  Synthetic oligonucleotide: CBLB-2678
ccucuugccuuacggca

SEQ ID NO: 32794 - RNA, 17 nt, Artificial Sequence
  Synthetic oligonucleotide: CBLB-2679
gcuuucuucucugggca

SEQ ID NO: 32795 - RNA, 17 nt, Artificial Sequence
  Synthetic oligonucleotide: CBLB-2680
ggcaggugguaauggca

SEQ ID NO: 32796 - RNA, 17 nt, Artificial Sequence
  Synthetic oligonucleotide: CBLB-2681
aacaaauagaaaaugca

SEQ ID NO: 32797 - RNA, 17 nt, Artificial Sequence
  Synthetic oligonucleotide: CBLB-2682
uguuuucucaccaugca

SEQ ID NO: 32798 - RNA, 17 nt, Artificial Sequence
  Synthetic oligonucleotide: CBLB-2683
cucccccaccuccugca

SEQ ID NO: 32799 - RNA, 17 nt, Artificial Sequence
  Synthetic oligonucleotide: CBLB-2684
uacgauaguucugugca

SEQ ID NO: 32800 - RNA, 17 nt, Artificial Sequence
  Synthetic oligonucleotide: CBLB-2685
uuagucuucuccuugca

SEQ ID NO: 32801 - RNA, 17 nt, Artificial Sequence
  Synthetic oligonucleotide: CBLB-2686
cuucuaaaggcaaauca

SEQ ID NO: 32802 - RNA, 17 nt, Artificial Sequence
  Synthetic oligonucleotide: CBLB-2687
ccugcugccaucaauca

SEQ ID NO: 32803 - RNA, 17 nt, Artificial Sequence
  Synthetic oligonucleotide: CBLB-2688
caaccgauucaucauca

SEQ ID NO: 32804 - RNA, 17 nt, Artificial Sequence
  Synthetic oligonucleotide: CBLB-2689
aaaaauugcaaaacuca

SEQ ID NO: 32805 - RNA, 17 nt, Artificial Sequence
  Synthetic oligonucleotide: CBLB-2690
aauauaugcuuaaguca

SEQ ID NO: 32806 - RNA, 17 nt, Artificial Sequence
  Synthetic oligonucleotide: CBLB-2691
uaggagucggaugguca

SEQ ID NO: 32807 - RNA, 17 nt, Artificial Sequence
  Synthetic oligonucleotide: CBLB-2692
agaugguugugaauuca

SEQ ID NO: 32808 - RNA, 17 nt, Artificial Sequence
  Synthetic oligonucleotide: CBLB-2693
gauuucuucucugaaga

SEQ ID NO: 32809 - RNA, 17 nt, Artificial Sequence
  Synthetic oligonucleotide: CBLB-2694
uuaaaaaucuacacaga

SEQ ID NO: 32810 - RNA, 17 nt, Artificial Sequence
  Synthetic oligonucleotide: CBLB-2695
agaagaucauaaucaga

SEQ ID NO: 32811 - RNA, 17 nt, Artificial Sequence
  Synthetic oligonucleotide: CBLB-2696
gggggaggugggagaga

SEQ ID NO: 32812 - RNA, 17 nt, Artificial Sequence
  Synthetic oligonucleotide: CBLB-2697
gcaaaacucaugggaga

SEQ ID NO: 32813 - RNA, 17 nt, Artificial Sequence
  Synthetic oligonucleotide: CBLB-2698
acauuaugacaaugaga

SEQ ID NO: 32814 - RNA, 17 nt, Artificial Sequence
  Synthetic oligonucleotide: CBLB-2699
cuuugccuccugcuaga

SEQ ID NO: 32815 - RNA, 17 nt, Artificial Sequence
  Synthetic oligonucleotide: CBLB-2700
caugauuugccuuuaga

SEQ ID NO: 32816 - RNA, 17 nt, Artificial Sequence
  Synthetic oligonucleotide: CBLB-2701
ucccaaacacaucccga

SEQ ID NO: 32817 - RNA, 17 nt, Artificial Sequence
  Synthetic oligonucleotide: CBLB-2702
cuuuaugcuagggagga

SEQ ID NO: 32818 - RNA, 17 nt, Artificial Sequence
  Synthetic oligonucleotide: CBLB-2703
cuggaauuuggggagga

SEQ ID NO: 32819 - RNA, 17 nt, Artificial Sequence
  Synthetic oligonucleotide: CBLB-2704
guggggauacuggagga

SEQ ID NO: 32820 - RNA, 17 nt, Artificial Sequence
  Synthetic oligonucleotide: CBLB-2705
agauccuguccugagga

SEQ ID NO: 32821 - RNA, 17 nt, Artificial Sequence
  Synthetic oligonucleotide: CBLB-2706
ucuuccuucagguagga

SEQ ID NO: 32822 - RNA, 17 nt, Artificial Sequence
  Synthetic oligonucleotide: CBLB-2707
auagcaccaaacccgga

SEQ ID NO: 32823 - RNA, 17 nt, Artificial Sequence
  Synthetic oligonucleotide: CBLB-2708
uuuguuuaggagucgga

SEQ ID NO: 32824 - RNA, 17 nt, Artificial Sequence
  Synthetic oligonucleotide: CBLB-2709
auugauggcagcaggga

SEQ ID NO: 32825 - RNA, 17 nt, Artificial Sequence
  Synthetic oligonucleotide: CBLB-2710
ggauacuggaggaggga

SEQ ID NO: 32826 - RNA, 17 nt, Artificial Sequence
  Synthetic oligonucleotide: CBLB-2711
ugggagagauggaggga

SEQ ID NO: 32827 - RNA, 17 nt, Artificial Sequence
  Synthetic oligonucleotide: CBLB-2712
ugucgacuccuagggga

SEQ ID NO: 32828 - RNA, 17 nt, Artificial Sequence
  Synthetic oligonucleotide: CBLB-2713
ggcuaugugacugggga

SEQ ID NO: 32829 - RNA, 17 nt, Artificial Sequence
  Synthetic oligonucleotide: CBLB-2714
guucaaaugucaaugga

SEQ ID NO: 32830 - RNA, 17 nt, Artificial Sequence
  Synthetic oligonucleotide: CBLB-2715
gguuucaaccuaaugga

SEQ ID NO: 32831 - RNA, 17 nt, Artificial Sequence
  Synthetic oligonucleotide: CBLB-2716
gaggugggagagaugga

SEQ ID NO: 32832 - RNA, 17 nt, Artificial Sequence
  Synthetic oligonucleotide: CBLB-2717
auuggcgggucucugga

SEQ ID NO: 32833 - RNA, 17 nt, Artificial Sequence
  Synthetic oligonucleotide: CBLB-2718
aacucaccugaacauga

SEQ ID NO: 32834 - RNA, 17 nt, Artificial Sequence
  Synthetic oligonucleotide: CBLB-2719
gcacgcuuuccacauga

SEQ ID NO: 32835 - RNA, 17 nt, Artificial Sequence
  Synthetic oligonucleotide: CBLB-2720
ucugguggaccucauga

SEQ ID NO: 32836 - RNA, 17 nt, Artificial Sequence
  Synthetic oligonucleotide: CBLB-2721
uuugauccaagagauga

SEQ ID NO: 32837 - RNA, 17 nt, Artificial Sequence
  Synthetic oligonucleotide: CBLB-2722
gaaacagggugggauga

SEQ ID NO: 32838 - RNA, 17 nt, Artificial Sequence
  Synthetic oligonucleotide: CBLB-2723
uuuucccuccuaccuga

SEQ ID NO: 32839 - RNA, 17 nt, Artificial Sequence
  Synthetic oligonucleotide: CBLB-2724
aguuaucuuuauccuga

SEQ ID NO: 32840 - RNA, 17 nt, Artificial Sequence
  Synthetic oligonucleotide: CBLB-2725
uuucaagcccugauuga

SEQ ID NO: 32841 - RNA, 17 nt, Artificial Sequence
  Synthetic oligonucleotide: CBLB-2726
aaucagggcuugaaaua

SEQ ID NO: 32842 - RNA, 17 nt, Artificial Sequence
  Synthetic oligonucleotide: CBLB-2727
gcaugugacugaagaua

SEQ ID NO: 32843 - RNA, 17 nt, Artificial Sequence
  Synthetic oligonucleotide: CBLB-2728
ccuguguaacuuuuaua

SEQ ID NO: 32844 - RNA, 17 nt, Artificial Sequence
  Synthetic oligonucleotide: CBLB-2729
ugggaugucgacuccua

SEQ ID NO: 32845 - RNA, 17 nt, Artificial Sequence
  Synthetic oligonucleotide: CBLB-2730
gccuuuagaaggagcua

SEQ ID NO: 32846 - RNA, 17 nt, Artificial Sequence
  Synthetic oligonucleotide: CBLB-2731
aaacucacuuuaugcua

SEQ ID NO: 32847 - RNA, 17 nt, Artificial Sequence
  Synthetic oligonucleotide: CBLB-2732
auucugggcuaucucua

SEQ ID NO: 32848 - RNA, 17 nt, Artificial Sequence
  Synthetic oligonucleotide: CBLB-2733
ccuguucgguaagagua

SEQ ID NO: 32849 - RNA, 17 nt, Artificial Sequence
  Synthetic oligonucleotide: CBLB-2734
auaccugccaugccgua

SEQ ID NO: 32850 - RNA, 17 nt, Artificial Sequence
  Synthetic oligonucleotide: CBLB-2735
uaaaaguuacacaggua

SEQ ID NO: 32851 - RNA, 17 nt, Artificial Sequence
  Synthetic oligonucleotide: CBLB-2736
gggcuuguuaugaggua

SEQ ID NO: 32852 - RNA, 17 nt, Artificial Sequence
  Synthetic oligonucleotide: CBLB-2737
aaagggguccacgauua

SEQ ID NO: 32853 - RNA, 17 nt, Artificial Sequence
  Synthetic oligonucleotide: CBLB-2738
gugcaccucuugccuua

SEQ ID NO: 32854 - RNA, 17 nt, Artificial Sequence
  Synthetic oligonucleotide: CBLB-2739
uggaggaggaucucuua

SEQ ID NO: 32855 - RNA, 17 nt, Artificial Sequence
  Synthetic oligonucleotide: CBLB-2740
aaacauggguuuaguua

SEQ ID NO: 32856 - RNA, 17 nt, Artificial Sequence
  Synthetic oligonucleotide: CBLB-2741
ugcgcggucgugguuua

SEQ ID NO: 32857 - RNA, 17 nt, Artificial Sequence
  Synthetic oligonucleotide: CBLB-2742
ugugaauucagggaaac

SEQ ID NO: 32858 - RNA, 17 nt, Artificial Sequence
  Synthetic oligonucleotide: CBLB-2743
cccuguggcagcccaac

SEQ ID NO: 32859 - RNA, 17 nt, Artificial Sequence
  Synthetic oligonucleotide: CBLB-2744
augguucuucacucaac

SEQ ID NO: 32860 - RNA, 17 nt, Artificial Sequence
  Synthetic oligonucleotide: CBLB-2745
ccauacucuuaccgaac

SEQ ID NO: 32861 - RNA, 17 nt, Artificial Sequence
  Synthetic oligonucleotide: CBLB-2746
gggaggagggugguaac

SEQ ID NO: 32862 - RNA, 17 nt, Artificial Sequence
  Synthetic oligonucleotide: CBLB-2747
aucgagugcaacuuaac

SEQ ID NO: 32863 - RNA, 17 nt, Artificial Sequence
  Synthetic oligonucleotide: CBLB-2748
uauaauccugauuuaac

SEQ ID NO: 32864 - RNA, 17 nt, Artificial Sequence
  Synthetic oligonucleotide: CBLB-2749
ccauauaaaaguuacac

SEQ ID NO: 32865 - RNA, 17 nt, Artificial Sequence
  Synthetic oligonucleotide: CBLB-2750
acccguugggcugccac

SEQ ID NO: 32866 - RNA, 17 nt, Artificial Sequence
  Synthetic oligonucleotide: CBLB-2751
uguuuccgcauaagcac

SEQ ID NO: 32867 - RNA, 17 nt, Artificial Sequence
  Synthetic oligonucleotide: CBLB-2752
uccaggcgaggaggcac

SEQ ID NO: 32868 - RNA, 17 nt, Artificial Sequence
  Synthetic oligonucleotide: CBLB-2753
gcaggugguaauggcac

SEQ ID NO: 32869 - RNA, 17 nt, Artificial Sequence
  Synthetic oligonucleotide: CBLB-2754
aacuaacagaacaucac

SEQ ID NO: 32870 - RNA, 17 nt, Artificial Sequence
  Synthetic oligonucleotide: CBLB-2755
cuacacagaugguucac

SEQ ID NO: 32871 - RNA, 17 nt, Artificial Sequence
  Synthetic oligonucleotide: CBLB-2756
ccggccauccucaggac

SEQ ID NO: 32872 - RNA, 17 nt, Artificial Sequence
  Synthetic oligonucleotide: CBLB-2757
uguucuagugcacugac

SEQ ID NO: 32873 - RNA, 17 nt, Artificial Sequence
  Synthetic oligonucleotide: CBLB-2758
gauccuggugaugugac

SEQ ID NO: 32874 - RNA, 17 nt, Artificial Sequence
  Synthetic oligonucleotide: CBLB-2759
gccauuggcuaugugac

SEQ ID NO: 32875 - RNA, 17 nt, Artificial Sequence
  Synthetic oligonucleotide: CBLB-2760
uuuagacguggggauac

SEQ ID NO: 32876 - RNA, 17 nt, Artificial Sequence
  Synthetic oligonucleotide: CBLB-2761
ugaggauggccggcuac

SEQ ID NO: 32877 - RNA, 17 nt, Artificial Sequence
  Synthetic oligonucleotide: CBLB-2762
ucaucaucuuccucuac

SEQ ID NO: 32878 - RNA, 17 nt, Artificial Sequence
  Synthetic oligonucleotide: CBLB-2763
uccccugguagguguac

SEQ ID NO: 32879 - RNA, 17 nt, Artificial Sequence
  Synthetic oligonucleotide: CBLB-2764
gagggcucuccaaaacc

SEQ ID NO: 32880 - RNA, 17 nt, Artificial Sequence
  Synthetic oligonucleotide: CBLB-2765
aaauauagcaccaaacc

SEQ ID NO: 32881 - RNA, 17 nt, Artificial Sequence
  Synthetic oligonucleotide: CBLB-2766
agaaaugccauguaacc

SEQ ID NO: 32882 - RNA, 17 nt, Artificial Sequence
  Synthetic oligonucleotide: CBLB-2767
aaugaugcugcaacacc

SEQ ID NO: 32883 - RNA, 17 nt, Artificial Sequence
  Synthetic oligonucleotide: CBLB-2768
ucaccagucacaucacc

SEQ ID NO: 32884 - RNA, 17 nt, Artificial Sequence
  Synthetic oligonucleotide: CBLB-2769
guuuugacauuuucacc

SEQ ID NO: 32885 - RNA, 17 nt, Artificial Sequence
  Synthetic oligonucleotide: CBLB-2770
ggaccaguacaccuacc

SEQ ID NO: 32886 - RNA, 17 nt, Artificial Sequence
  Synthetic oligonucleotide: CBLB-2771
ccugcuagaagguuacc

SEQ ID NO: 32887 - RNA, 17 nt, Artificial Sequence
  Synthetic oligonucleotide: CBLB-2772
aauuugauauuuuuacc

SEQ ID NO: 32888 - RNA, 17 nt, Artificial Sequence
  Synthetic oligonucleotide: CBLB-2773
uuggauuuuuuuucccc

SEQ ID NO: 32889 - RNA, 17 nt, Artificial Sequence
  Synthetic oligonucleotide: CBLB-2774
aauaugauguuccuccc

SEQ ID NO: 32890 - RNA, 17 nt, Artificial Sequence
  Synthetic oligonucleotide: CBLB-2775
uacgaaaguuaucuccc

SEQ ID NO: 32891 - RNA, 17 nt, Artificial Sequence
  Synthetic oligonucleotide: CBLB-1323
aggaggaggagaaagcc

SEQ ID NO: 32892 - RNA, 17 nt, Artificial Sequence
  Synthetic oligonucleotide: CBLB-2776
acuuaccugaaacagcc

SEQ ID NO: 32893 - RNA, 17 nt, Artificial Sequence
  Synthetic oligonucleotide: CBLB-2777
ggccggcuacuggagcc

SEQ ID NO: 32894 - RNA, 17 nt, Artificial Sequence
  Synthetic oligonucleotide: CBLB-2778
acccgugccuccucgcc

SEQ ID NO: 32895 - RNA, 17 nt, Artificial Sequence
  Synthetic oligonucleotide: CBLB-2779
gucccgaguuggaggcc

SEQ ID NO: 32896 - RNA, 17 nt, Artificial Sequence
  Synthetic oligonucleotide: CBLB-2780
ccagauuagcucuggcc

SEQ ID NO: 32897 - RNA, 17 nt, Artificial Sequence
  Synthetic oligonucleotide: CBLB-2781
ugccauuaccaccugcc

SEQ ID NO: 32898 - RNA, 17 nt, Artificial Sequence
  Synthetic oligonucleotide: CBLB-2782
auaaugucgaaguugcc

SEQ ID NO: 32899 - RNA, 17 nt, Artificial Sequence
  Synthetic oligonucleotide: CBLB-2783
uuagcugugacacaucc

SEQ ID NO: 32900 - RNA, 17 nt, Artificial Sequence
  Synthetic oligonucleotide: CBLB-2784
cuuucugaauuagaucc

SEQ ID NO: 32901 - RNA, 17 nt, Artificial Sequence
  Synthetic oligonucleotide: CBLB-2785
gcaaggggagaggaucc

SEQ ID NO: 32902 - RNA, 17 nt, Artificial Sequence
  Synthetic oligonucleotide: CBLB-2786
gaacauucaaaaccucc

SEQ ID NO: 32903 - RNA, 17 nt, Artificial Sequence
  Synthetic oligonucleotide: CBLB-2787
caagagaugaaggcucc

SEQ ID NO: 32904 - RNA, 17 nt, Artificial Sequence
  Synthetic oligonucleotide: CBLB-2788
uucucggaggaugcucc

SEQ ID NO: 32905 - RNA, 17 nt, Artificial Sequence
  Synthetic oligonucleotide: CBLB-2789
ccuccuccccaaauucc

SEQ ID NO: 32906 - RNA, 17 nt, Artificial Sequence
  Synthetic oligonucleotide: CBLB-2790
ucccaauggucaauucc

SEQ ID NO: 32907 - RNA, 17 nt, Artificial Sequence
  Synthetic oligonucleotide: CBLB-2791
gaacucgcugugauucc

SEQ ID NO: 32908 - RNA, 17 nt, Artificial Sequence
  Synthetic oligonucleotide: CBLB-2792
aaaaagucuuaccuucc

SEQ ID NO: 32909 - RNA, 17 nt, Artificial Sequence
  Synthetic oligonucleotide: CBLB-2793
uuagagccauugcuucc

SEQ ID NO: 32910 - RNA, 17 nt, Artificial Sequence
  Synthetic oligonucleotide: CBLB-2794
auaauucauauuguucc

SEQ ID NO: 32911 - RNA, 17 nt, Artificial Sequence
  Synthetic oligonucleotide: CBLB-1324
gaggaggaggagaaagc

SEQ ID NO: 32912 - RNA, 17 nt, Artificial Sequence
  Synthetic oligonucleotide: CBLB-2795
cccugauugauggcagc

SEQ ID NO: 32913 - RNA, 17 nt, Artificial Sequence
  Synthetic oligonucleotide: CBLB-2796
ccugguaaccuucuagc

SEQ ID NO: 32914 - RNA, 17 nt, Artificial Sequence
  Synthetic oligonucleotide: CBLB-2797
cuccuggcuccaguagc

SEQ ID NO: 32915 - RNA, 17 nt, Artificial Sequence
  Synthetic oligonucleotide: CBLB-2798
cuaaaccacgaccgcgc

SEQ ID NO: 32916 - RNA, 17 nt, Artificial Sequence
  Synthetic oligonucleotide: CBLB-2799
uugccuuacggcauggc

SEQ ID NO: 32917 - RNA, 17 nt, Artificial Sequence
  Synthetic oligonucleotide: CBLB-2800
ccuguccugaggauggc

SEQ ID NO: 32918 - RNA, 17 nt, Artificial Sequence
  Synthetic oligonucleotide: CBLB-2801
cgaguuggaggccuggc

SEQ ID NO: 32919 - RNA, 17 nt, Artificial Sequence
  Synthetic oligonucleotide: CBLB-2802
gguuuagggggucuggc

SEQ ID NO: 32920 - RNA, 17 nt, Artificial Sequence
  Synthetic oligonucleotide: CBLB-2803
gaggaggcacggguggc

SEQ ID NO: 32921 - RNA, 17 nt, Artificial Sequence
  Synthetic oligonucleotide: CBLB-2804
cuucaagaggcauuggc

SEQ ID NO: 32922 - RNA, 17 nt, Artificial Sequence
  Synthetic oligonucleotide: CBLB-2805
gaccuuucuuuaaaugc

SEQ ID NO: 32923 - RNA, 17 nt, Artificial Sequence
  Synthetic oligonucleotide: CBLB-2806
uaucuucagucacaugc

SEQ ID NO: 32924 - RNA, 17 nt, Artificial Sequence
  Synthetic oligonucleotide: CBLB-2807
aagggaggagguggugc

SEQ ID NO: 32925 - RNA, 17 nt, Artificial Sequence
  Synthetic oligonucleotide: CBLB-2808
augagacuaugccuugc

SEQ ID NO: 32926 - RNA, 17 nt, Artificial Sequence
  Synthetic oligonucleotide: CBLB-2809
cauaauccaguuaaauc

SEQ ID NO: 32927 - RNA, 17 nt, Artificial Sequence
  Synthetic oligonucleotide: CBLB-2810
cccugcugccaucaauc

SEQ ID NO: 32928 - RNA, 17 nt, Artificial Sequence
  Synthetic oligonucleotide: CBLB-2811
ccaggccagagcuaauc

SEQ ID NO: 32929 - RNA, 17 nt, Artificial Sequence
  Synthetic oligonucleotide: CBLB-2812
uuauaacuccucccauc

SEQ ID NO: 32930 - RNA, 17 nt, Artificial Sequence
  Synthetic oligonucleotide: CBLB-2813
ggcuuagaugugggauc

SEQ ID NO: 32931 - RNA, 17 nt, Artificial Sequence
  Synthetic oligonucleotide: CBLB-2814
ugccaggccuccaacuc

SEQ ID NO: 32932 - RNA, 17 nt, Artificial Sequence
  Synthetic oligonucleotide: CBLB-2815
ugaagcauggugcccuc

SEQ ID NO: 32933 - RNA, 17 nt, Artificial Sequence
  Synthetic oligonucleotide: CBLB-2816
uuuuccaaugccgccuc

SEQ ID NO: 32934 - RNA, 17 nt, Artificial Sequence
  Synthetic oligonucleotide: CBLB-2817
aguagccggccauccuc

SEQ ID NO: 32935 - RNA, 17 nt, Artificial Sequence
  Synthetic oligonucleotide: CBLB-2818
guccaccagauuagcuc

SEQ ID NO: 32936 - RNA, 17 nt, Artificial Sequence
  Synthetic oligonucleotide: CBLB-2819
auucucggaggaugcuc

SEQ ID NO: 32937 - RNA, 17 nt, Artificial Sequence
  Synthetic oligonucleotide: CBLB-2820
aggcauuggcgggucuc

SEQ ID NO: 32938 - RNA, 17 nt, Artificial Sequence
  Synthetic oligonucleotide: CBLB-2821
gcuguggcuuucuucuc

SEQ ID NO: 32939 - RNA, 17 nt, Artificial Sequence
  Synthetic oligonucleotide: CBLB-2822
aaauauaugcuuaaguc

SEQ ID NO: 32940 - RNA, 17 nt, Artificial Sequence
  Synthetic oligonucleotide: CBLB-2823
ucgugguuuaggggguc

SEQ ID NO: 32941 - RNA, 17 nt, Artificial Sequence
  Synthetic oligonucleotide: CBLB-2824
gggaucuggaguggguc

SEQ ID NO: 32942 - RNA, 17 nt, Artificial Sequence
  Synthetic oligonucleotide: CBLB-2825
uuaggagucggaugguc

SEQ ID NO: 32943 - RNA, 17 nt, Artificial Sequence
  Synthetic oligonucleotide: CBLB-2826
cuacucagucuauuguc

SEQ ID NO: 32944 - RNA, 17 nt, Artificial Sequence
  Synthetic oligonucleotide: CBLB-2827
cagaugcugcugaauuc

SEQ ID NO: 32945 - RNA, 17 nt, Artificial Sequence
  Synthetic oligonucleotide: CBLB-2828
gagaugguugugaauuc

SEQ ID NO: 32946 - RNA, 17 nt, Artificial Sequence
  Synthetic oligonucleotide: CBLB-2829
caacuucgacauuauuc

SEQ ID NO: 32947 - RNA, 17 nt, Artificial Sequence
  Synthetic oligonucleotide: CBLB-2830
uaaaaagucuuaccuuc

SEQ ID NO: 32948 - RNA, 17 nt, Artificial Sequence
  Synthetic oligonucleotide: CBLB-2831
cuuuuucuucuuccuuc

SEQ ID NO: 32949 - RNA, 17 nt, Artificial Sequence
  Synthetic oligonucleotide: CBLB-2832
uuuggugucuacaguuc

SEQ ID NO: 32950 - RNA, 17 nt, Artificial Sequence
  Synthetic oligonucleotide: CBLB-2833
cagcuuccuucauguuc

SEQ ID NO: 32951 - RNA, 17 nt, Artificial Sequence
  Synthetic oligonucleotide: CBLB-2834
uuucuguggugaauuuc

SEQ ID NO: 32952 - RNA, 17 nt, Artificial Sequence
  Synthetic oligonucleotide: CBLB-2835
caauuugauuuacuuuc

SEQ ID NO: 32953 - RNA, 17 nt, Artificial Sequence
  Synthetic oligonucleotide: CBLB-2836
auugguggaggucuuuc

SEQ ID NO: 32954 - RNA, 17 nt, Artificial Sequence
  Synthetic oligonucleotide: CBLB-2837
uuuuaccaggcuguuuc

SEQ ID NO: 32955 - RNA, 17 nt, Artificial Sequence
  Synthetic oligonucleotide: CBLB-2838
uuugcagcuauauuuuc

SEQ ID NO: 32956 - RNA, 17 nt, Artificial Sequence
  Synthetic oligonucleotide: CBLB-2839
cuuacagagcugaaaag

SEQ ID NO: 32957 - RNA, 17 nt, Artificial Sequence
  Synthetic oligonucleotide: CBLB-2840
gcaucggcaugccaaag

SEQ ID NO: 32958 - RNA, 17 nt, Artificial Sequence
  Synthetic oligonucleotide: CBLB-2841
caucucuuggaucaaag

SEQ ID NO: 32959 - RNA, 17 nt, Artificial Sequence
  Synthetic oligonucleotide: CBLB-2842
uuuguugaucuagcaag

SEQ ID NO: 32960 - RNA, 17 nt, Artificial Sequence
  Synthetic oligonucleotide: CBLB-2843
ccaugccguaaggcaag

SEQ ID NO: 32961 - RNA, 17 nt, Artificial Sequence
  Synthetic oligonucleotide: CBLB-2844
uuucuucucugggcaag

SEQ ID NO: 32962 - RNA, 17 nt, Artificial Sequence
  Synthetic oligonucleotide: CBLB-2845
gggcaccaugcuucaag

SEQ ID NO: 32963 - RNA, 17 nt, Artificial Sequence
  Synthetic oligonucleotide: CBLB-2846
ggguuaugccuuugaag

SEQ ID NO: 32964 - RNA, 17 nt, Artificial Sequence
  Synthetic oligonucleotide: CBLB-2847
gcacucgauugggacag

SEQ ID NO: 32965 - RNA, 17 nt, Artificial Sequence
  Synthetic oligonucleotide: CBLB-2848
accaguacaccuaccag

SEQ ID NO: 32966 - RNA, 17 nt, Artificial Sequence
  Synthetic oligonucleotide: CBLB-2849
gagaagaucauaaucag

SEQ ID NO: 32967 - RNA, 17 nt, Artificial Sequence
  Synthetic oligonucleotide: CBLB-2850
uaauggcacgggaucag

SEQ ID NO: 32968 - RNA, 17 nt, Artificial Sequence
  Synthetic oligonucleotide: CBLB-2851
uggaaggcacaguagag

SEQ ID NO: 32969 - RNA, 17 nt, Artificial Sequence
  Synthetic oligonucleotide: CBLB-2852
ucucugggcaaggggag

SEQ ID NO: 32970 - RNA, 17 nt, Artificial Sequence
  Synthetic oligonucleotide: CBLB-2853
ugcaaaacucaugggag

SEQ ID NO: 32971 - RNA, 17 nt, Artificial Sequence
  Synthetic oligonucleotide: CBLB-2854
ggagguggugcugggag

SEQ ID NO: 32972 - RNA, 17 nt, Artificial Sequence
  Synthetic oligonucleotide: CBLB-2855
agaugugggaucuggag

SEQ ID NO: 32973 - RNA, 17 nt, Artificial Sequence
  Synthetic oligonucleotide: CBLB-2856
gggaugucgacuccuag

SEQ ID NO: 32974 - RNA, 17 nt, Artificial Sequence
  Synthetic oligonucleotide: CBLB-2857
ucaaaaacaucuccuag

SEQ ID NO: 32975 - RNA, 17 nt, Artificial Sequence
  Synthetic oligonucleotide: CBLB-2858
aacaagagacccaguag

SEQ ID NO: 32976 - RNA, 17 nt, Artificial Sequence
  Synthetic oligonucleotide: CBLB-2859
gcgcggucgugguuuag

SEQ ID NO: 32977 - RNA, 17 nt, Artificial Sequence
  Synthetic oligonucleotide: CBLB-2860
ugcuauagauuuagacg

SEQ ID NO: 32978 - RNA, 17 nt, Artificial Sequence
  Synthetic oligonucleotide: CBLB-2861
gucccaaacacaucccg

SEQ ID NO: 32979 - RNA, 17 nt, Artificial Sequence
  Synthetic oligonucleotide: CBLB-1322
ggaggaggagaaagccg

SEQ ID NO: 32980 - RNA, 17 nt, Artificial Sequence
  Synthetic oligonucleotide: CBLB-2862
ugaauuagauccaggcg

SEQ ID NO: 32981 - RNA, 17 nt, Artificial Sequence
  Synthetic oligonucleotide: CBLB-2863
ucuggugcaguccugcg

SEQ ID NO: 32982 - RNA, 17 nt, Artificial Sequence
  Synthetic oligonucleotide: CBLB-2864
aacugagcccauaaucg

SEQ ID NO: 32983 - RNA, 17 nt, Artificial Sequence
  Synthetic oligonucleotide: CBLB-2865
gcaguccugcgcggucg

SEQ ID NO: 32984 - RNA, 17 nt, Artificial Sequence
  Synthetic oligonucleotide: CBLB-2866
gauaguucugugcaagg

SEQ ID NO: 32985 - RNA, 17 nt, Artificial Sequence
  Synthetic oligonucleotide: CBLB-2867
uacucuuaccgaacagg

SEQ ID NO: 32986 - RNA, 17 nt, Artificial Sequence
  Synthetic oligonucleotide: CBLB-2868
cggcuacuggagccagg

SEQ ID NO: 32987 - RNA, 17 nt, Artificial Sequence
  Synthetic oligonucleotide: CBLB-2869
gguaaccuucuagcagg

SEQ ID NO: 32988 - RNA, 17 nt, Artificial Sequence
  Synthetic oligonucleotide: CBLB-2870
guuggaggccuggcagg

SEQ ID NO: 32989 - RNA, 17 nt, Artificial Sequence
  Synthetic oligonucleotide: CBLB-2871
agacuaugccuugcagg

SEQ ID NO: 32990 - RNA, 17 nt, Artificial Sequence
  Synthetic oligonucleotide: CBLB-2872
gguggaggucuuucagg

SEQ ID NO: 32991 - RNA, 17 nt, Artificial Sequence
  Synthetic oligonucleotide: CBLB-2873
auuagauccaggcgagg

SEQ ID NO: 32992 - RNA, 17 nt, Artificial Sequence
  Synthetic oligonucleotide: CBLB-2874
cuaugccuugcaggagg

SEQ ID NO: 32993 - RNA, 17 nt, Artificial Sequence
  Synthetic oligonucleotide: CBLB-2875
ucucuuaagggaggagg

SEQ ID NO: 32994 - RNA, 17 nt, Artificial Sequence
  Synthetic oligonucleotide: CBLB-2876
gugguaacuggaggagg

SEQ ID NO: 32995 - RNA, 17 nt, Artificial Sequence
  Synthetic oligonucleotide: CBLB-2877
ggaucucuuaagggagg

SEQ ID NO: 32996 - RNA, 17 nt, Artificial Sequence
  Synthetic oligonucleotide: CBLB-2878
acuuuaugcuagggagg

SEQ ID NO: 32997 - RNA, 17 nt, Artificial Sequence
  Synthetic oligonucleotide: CBLB-2879
gcaggaggugggggagg

SEQ ID NO: 32998 - RNA, 17 nt, Artificial Sequence
  Synthetic oligonucleotide: CBLB-2880
ccuggaauuuggggagg

SEQ ID NO: 32999 - RNA, 17 nt, Artificial Sequence
  Synthetic oligonucleotide: CBLB-2881
agggugguaacuggagg

SEQ ID NO: 33000 - RNA, 17 nt, Artificial Sequence
  Synthetic oligonucleotide: CBLB-2882
cguggggauacuggagg

SEQ ID NO: 33001 - RNA, 17 nt, Artificial Sequence
  Synthetic oligonucleotide: CBLB-2883
ucagguggcgguggagg

SEQ ID NO: 33002 - RNA, 17 nt, Artificial Sequence
  Synthetic oligonucleotide: CBLB-2884
accccaugggccugagg

SEQ ID NO: 33003 - RNA, 17 nt, Artificial Sequence
  Synthetic oligonucleotide: CBLB-2885
uucuuccuucagguagg

SEQ ID NO: 33004 - RNA, 17 nt, Artificial Sequence
  Synthetic oligonucleotide: CBLB-2886
cgcggucgugguuuagg

SEQ ID NO: 33005 - RNA, 17 nt, Artificial Sequence
  Synthetic oligonucleotide: CBLB-2887
ggucuuucagguggcgg

SEQ ID NO: 33006 - RNA, 17 nt, Artificial Sequence
  Synthetic oligonucleotide: CBLB-2888
ggaaggcaaauucucgg

SEQ ID NO: 33007 - RNA, 17 nt, Artificial Sequence
  Synthetic oligonucleotide: CBLB-2889
ggaggaucucuuaaggg

SEQ ID NO: 33008 - RNA, 17 nt, Artificial Sequence
  Synthetic oligonucleotide: CBLB-2890
aauucagggaaacaggg

SEQ ID NO: 33009 - RNA, 17 nt, Artificial Sequence
  Synthetic oligonucleotide: CBLB-2891
uaugcuagggaggaggg

SEQ ID NO: 33010 - RNA, 17 nt, Artificial Sequence
  Synthetic oligonucleotide: CBLB-2892
gugggagagauggaggg

SEQ ID NO: 33011 - RNA, 17 nt, Artificial Sequence
  Synthetic oligonucleotide: CBLB-2893
cucacuuuaugcuaggg

SEQ ID NO: 33012 - RNA, 17 nt, Artificial Sequence
  Synthetic oligonucleotide: CBLB-1271
aggcgaggaggcacggg

SEQ ID NO: 33013 - RNA, 17 nt, Artificial Sequence
  Synthetic oligonucleotide: CBLB-2894
augucgacuccuagggg

SEQ ID NO: 33014 - RNA, 17 nt, Artificial Sequence
  Synthetic oligonucleotide: CBLB-1321
ggaggagaaagccgggg

SEQ ID NO: 33015 - RNA, 17 nt, Artificial Sequence
  Synthetic oligonucleotide: CBLB-2895
cuugcaggagguggggg

SEQ ID NO: 33016 - RNA, 17 nt, Artificial Sequence
  Synthetic oligonucleotide: CBLB-2896
guuccuggaauuugggg

SEQ ID NO: 33017 - RNA, 17 nt, Artificial Sequence
  Synthetic oligonucleotide: CBLB-2897
aucuuuauccugauggg

SEQ ID NO: 33018 - RNA, 17 nt, Artificial Sequence
  Synthetic oligonucleotide: CBLB-2898
agguuucaaccuaaugg

SEQ ID NO: 33019 - RNA, 17 nt, Artificial Sequence
  Synthetic oligonucleotide: CBLB-2899
ggaggugggagagaugg

SEQ ID NO: 33020 - RNA, 17 nt, Artificial Sequence
  Synthetic oligonucleotide: CBLB-2900
aggagggugguaacugg

SEQ ID NO: 33021 - RNA, 17 nt, Artificial Sequence
  Synthetic oligonucleotide: CBLB-2901
agacguggggauacugg

SEQ ID NO: 33022 - RNA, 17 nt, Artificial Sequence
  Synthetic oligonucleotide: CBLB-2902
ggccagagcuaaucugg

SEQ ID NO: 33023 - RNA, 17 nt, Artificial Sequence
  Synthetic oligonucleotide: CBLB-2903
cucagucuauugucugg

SEQ ID NO: 33024 - RNA, 17 nt, Artificial Sequence
  Synthetic oligonucleotide: CBLB-2904
ggaggucuuucaggugg

SEQ ID NO: 33025 - RNA, 17 nt, Artificial Sequence
  Synthetic oligonucleotide: CBLB-2905
ugccuugcaggaggugg

SEQ ID NO: 33026 - RNA, 17 nt, Artificial Sequence
  Synthetic oligonucleotide: CBLB-2906
cuuucagguggcggugg

SEQ ID NO: 33027 - RNA, 17 nt, Artificial Sequence
  Synthetic oligonucleotide: CBLB-2907
ucuggugggauuggugg

SEQ ID NO: 33028 - RNA, 17 nt, Artificial Sequence
  Synthetic oligonucleotide: CBLB-2908
gcuucaagaggcauugg

SEQ ID NO: 33029 - RNA, 17 nt, Artificial Sequence
  Synthetic oligonucleotide: CBLB-2909
uugucuggugggauugg

SEQ ID NO: 33030 - RNA, 17 nt, Artificial Sequence
  Synthetic oligonucleotide: CBLB-2910
ggauugucccgaguugg

SEQ ID NO: 33031 - RNA, 17 nt, Artificial Sequence
  Synthetic oligonucleotide: CBLB-2911
gccgccucaggcccaug

SEQ ID NO: 33032 - RNA, 17 nt, Artificial Sequence
  Synthetic oligonucleotide: CBLB-2912
uagacacauccaucaug

SEQ ID NO: 33033 - RNA, 17 nt, Artificial Sequence
  Synthetic oligonucleotide: CBLB-2913
acuuuuauauggucaug

SEQ ID NO: 33034 - RNA, 17 nt, Artificial Sequence
  Synthetic oligonucleotide: CBLB-2914
cagacagugccuucaug

SEQ ID NO: 33035 - RNA, 17 nt, Artificial Sequence
  Synthetic oligonucleotide: CBLB-2915
gguggcaggcuuagaug

SEQ ID NO: 33036 - RNA, 17 nt, Artificial Sequence
  Synthetic oligonucleotide: CBLB-2916
cugacccagugcuuaug

SEQ ID NO: 33037 - RNA, 17 nt, Artificial Sequence
  Synthetic oligonucleotide: CBLB-2917
aauaagggcuuguuaug

SEQ ID NO: 33038 - RNA, 17 nt, Artificial Sequence
  Synthetic oligonucleotide: CBLB-2918
cauuggcuaugugacug

SEQ ID NO: 33039 - RNA, 17 nt, Artificial Sequence
  Synthetic oligonucleotide: CBLB-2919
auaguuagaucucccug

SEQ ID NO: 33040 - RNA, 17 nt, Artificial Sequence
  Synthetic oligonucleotide: CBLB-2920
aaaaccccaugggccug

SEQ ID NO: 33041 - RNA, 17 nt, Artificial Sequence
  Synthetic oligonucleotide: CBLB-2921
aaaaagauccuguccug

SEQ ID NO: 33042 - RNA, 17 nt, Artificial Sequence
  Synthetic oligonucleotide: CBLB-2922
aaucauuuuuauagcug

SEQ ID NO: 33043 - RNA, 17 nt, Artificial Sequence
  Synthetic oligonucleotide: CBLB-2923
uggagugggucaggcug

SEQ ID NO: 33044 - RNA, 17 nt, Artificial Sequence
  Synthetic oligonucleotide: CBLB-2924
gcccaugggguuuucug

SEQ ID NO: 33045 - RNA, 17 nt, Artificial Sequence
  Synthetic oligonucleotide: CBLB-2925
cuauagauuuagacgug

SEQ ID NO: 33046 - RNA, 17 nt, Artificial Sequence
  Synthetic oligonucleotide: CBLB-2926
cgacgaugaugaucgug

SEQ ID NO: 33047 - RNA, 17 nt, Artificial Sequence
  Synthetic oligonucleotide: CBLB-2927
augccuugcaggaggug

SEQ ID NO: 33048 - RNA, 17 nt, Artificial Sequence
  Synthetic oligonucleotide: CBLB-2928
gucaagauugagccuug

SEQ ID NO: 33049 - RNA, 17 nt, Artificial Sequence
  Synthetic oligonucleotide: CBLB-2929
uuuauuuuuuagccuug

SEQ ID NO: 33050 - RNA, 17 nt, Artificial Sequence
  Synthetic oligonucleotide: CBLB-2930
ugggacuaaucagcuug

SEQ ID NO: 33051 - RNA, 17 nt, Artificial Sequence
  Synthetic oligonucleotide: CBLB-2931
auuguuccuggaauuug

SEQ ID NO: 33052 - RNA, 17 nt, Artificial Sequence
  Synthetic oligonucleotide: CBLB-2932
cuuggggcucuauuuug

SEQ ID NO: 33053 - RNA, 17 nt, Artificial Sequence
  Synthetic oligonucleotide: CBLB-2933
gaauuauauugugaaau

SEQ ID NO: 33054 - RNA, 17 nt, Artificial Sequence
  Synthetic oligonucleotide: CBLB-2934
gcucuauuuugcggaau

SEQ ID NO: 33055 - RNA, 17 nt, Artificial Sequence
  Synthetic oligonucleotide: CBLB-2935
aguccuugaugaugaau

SEQ ID NO: 33056 - RNA, 17 nt, Artificial Sequence
  Synthetic oligonucleotide: CBLB-2936
gguaaaacuagaaacau

SEQ ID NO: 33057 - RNA, 17 nt, Artificial Sequence
  Synthetic oligonucleotide: CBLB-2937
acuuccaaggugaccau

SEQ ID NO: 33058 - RNA, 17 nt, Artificial Sequence
  Synthetic oligonucleotide: CBLB-2938
ucccuggaauugaccau

SEQ ID NO: 33059 - RNA, 17 nt, Artificial Sequence
  Synthetic oligonucleotide: CBLB-2939
accacagaaaaccccau

SEQ ID NO: 33060 - RNA, 17 nt, Artificial Sequence
  Synthetic oligonucleotide: CBLB-2940
ugccgccucaggcccau

SEQ ID NO: 33061 - RNA, 17 nt, Artificial Sequence
  Synthetic oligonucleotide: CBLB-2941
uugggacagugggccau

SEQ ID NO: 33062 - RNA, 17 nt, Artificial Sequence
  Synthetic oligonucleotide: CBLB-2942
ucguccaagucuagcau

SEQ ID NO: 33063 - RNA, 17 nt, Artificial Sequence
  Synthetic oligonucleotide: CBLB-2943
caugcuucaagaggcau

SEQ ID NO: 33064 - RNA, 17 nt, Artificial Sequence
  Synthetic oligonucleotide: CBLB-2944
ugggccugaggcggcau

SEQ ID NO: 33065 - RNA, 17 nt, Artificial Sequence
  Synthetic oligonucleotide: CBLB-2945
aaaauugcaaaacucau

SEQ ID NO: 33066 - RNA, 17 nt, Artificial Sequence
  Synthetic oligonucleotide: CBLB-2946
guuaaguugcacucgau

SEQ ID NO: 33067 - RNA, 17 nt, Artificial Sequence
  Synthetic oligonucleotide: CBLB-2947
gcuaugugacuggggau

SEQ ID NO: 33068 - RNA, 17 nt, Artificial Sequence
  Synthetic oligonucleotide: CBLB-2948
cuauugucuggugggau

SEQ ID NO: 33069 - RNA, 17 nt, Artificial Sequence
  Synthetic oligonucleotide: CBLB-2949
auagaaaaugcauggau

SEQ ID NO: 33070 - RNA, 17 nt, Artificial Sequence
  Synthetic oligonucleotide: CBLB-2950
guuaucuuuauccugau

SEQ ID NO: 33071 - RNA, 17 nt, Artificial Sequence
  Synthetic oligonucleotide: CBLB-2951
cuguucgguaagaguau

SEQ ID NO: 33072 - RNA, 17 nt, Artificial Sequence
  Synthetic oligonucleotide: CBLB-2952
aagggguccacgauuau

SEQ ID NO: 33073 - RNA, 17 nt, Artificial Sequence
  Synthetic oligonucleotide: CBLB-2953
cugccaggccuccaacu

SEQ ID NO: 33074 - RNA, 17 nt, Artificial Sequence
  Synthetic oligonucleotide: CBLB-2954
caggaggcaaaggaacu

SEQ ID NO: 33075 - RNA, 17 nt, Artificial Sequence
  Synthetic oligonucleotide: CBLB-2955
guuuccgcauaagcacu

SEQ ID NO: 33076 - RNA, 17 nt, Artificial Sequence
  Synthetic oligonucleotide: CBLB-2956
caugccgaugcuagacu

SEQ ID NO: 33077 - RNA, 17 nt, Artificial Sequence
  Synthetic oligonucleotide: CBLB-2957
ccauuggcuaugugacu

SEQ ID NO: 33078 - RNA, 17 nt, Artificial Sequence
  Synthetic oligonucleotide: CBLB-2958
caucaucuuccucuacu

SEQ ID NO: 33079 - RNA, 17 nt, Artificial Sequence
  Synthetic oligonucleotide: CBLB-2959
uuuuccaauggucaccu

SEQ ID NO: 33080 - RNA, 17 nt, Artificial Sequence
  Synthetic oligonucleotide: CBLB-2960
uuggagagcccuccccu

SEQ ID NO: 33081 - RNA, 17 nt, Artificial Sequence
  Synthetic oligonucleotide: CBLB-2961
uugaagcauggugcccu

SEQ ID NO: 33082 - RNA, 17 nt, Artificial Sequence
  Synthetic oligonucleotide: CBLB-2962
uuuuuauuuuuuagccu

SEQ ID NO: 33083 - RNA, 17 nt, Artificial Sequence
  Synthetic oligonucleotide: CBLB-2963
gugggaugucgacuccu

SEQ ID NO: 33084 - RNA, 17 nt, Artificial Sequence
  Synthetic oligonucleotide: CBLB-2964
aaaacucacuuuaugcu

SEQ ID NO: 33085 - RNA, 17 nt, Artificial Sequence
  Synthetic oligonucleotide: CBLB-2965
agggaggagguggugcu

SEQ ID NO: 33086 - RNA, 17 nt, Artificial Sequence
  Synthetic oligonucleotide: CBLB-2966
guuuuguguuauccucu

SEQ ID NO: 33087 - RNA, 17 nt, Artificial Sequence
  Synthetic oligonucleotide: CBLB-2967
cuggagccuucaucucu

SEQ ID NO: 33088 - RNA, 17 nt, Artificial Sequence
  Synthetic oligonucleotide: CBLB-2968
cuguggcuuucuucucu

SEQ ID NO: 33089 - RNA, 17 nt, Artificial Sequence
  Synthetic oligonucleotide: CBLB-2969
gagggaaggcaaauucu

SEQ ID NO: 33090 - RNA, 17 nt, Artificial Sequence
  Synthetic oligonucleotide: CBLB-2970
aacuucgacauuauucu

SEQ ID NO: 33091 - RNA, 17 nt, Artificial Sequence
  Synthetic oligonucleotide: CBLB-2971
guaugagaaauggaagu

SEQ ID NO: 33092 - RNA, 17 nt, Artificial Sequence
  Synthetic oligonucleotide: CBLB-2972
cacucgauugggacagu

SEQ ID NO: 33093 - RNA, 17 nt, Artificial Sequence
  Synthetic oligonucleotide: CBLB-2973
ggaaggcacaguagagu

SEQ ID NO: 33094 - RNA, 17 nt, Artificial Sequence
  Synthetic oligonucleotide: CBLB-2974
uuuggauugucccgagu

SEQ ID NO: 33095 - RNA, 17 nt, Artificial Sequence
  Synthetic oligonucleotide: CBLB-2975
ucuauuuguuuaggagu

SEQ ID NO: 33096 - RNA, 17 nt, Artificial Sequence
  Synthetic oligonucleotide: CBLB-2976
gaugugggaucuggagu

SEQ ID NO: 33097 - RNA, 17 nt, Artificial Sequence
  Synthetic oligonucleotide: CBLB-2977
uucauguucaggugagu

SEQ ID NO: 33098 - RNA, 17 nt, Artificial Sequence
  Synthetic oligonucleotide: CBLB-2978
gcuauagauuuagacgu

SEQ ID NO: 33099 - RNA, 17 nt, Artificial Sequence
  Synthetic oligonucleotide: CBLB-2979
accuuuggugaacccgu

SEQ ID NO: 33100 - RNA, 17 nt, Artificial Sequence
  Synthetic oligonucleotide: CBLB-2980
uucuucuuccuucaggu

SEQ ID NO: 33101 - RNA, 17 nt, Artificial Sequence
  Synthetic oligonucleotide: CBLB-2981
uaugccuugcaggaggu

SEQ ID NO: 33102 - RNA, 17 nt, Artificial Sequence
  Synthetic oligonucleotide: CBLB-2982
caggaggugggggaggu

SEQ ID NO: 33103 - RNA, 17 nt, Artificial Sequence
  Synthetic oligonucleotide: CBLB-2983
cuugaugaugaaucggu

SEQ ID NO: 33104 - RNA, 17 nt, Artificial Sequence
  Synthetic oligonucleotide: CBLB-2984
auucagggaaacagggu

SEQ ID NO: 33105 - RNA, 17 nt, Artificial Sequence
  Synthetic oligonucleotide: CBLB-2985
auuuuuuuuccccuggu

SEQ ID NO: 33106 - RNA, 17 nt, Artificial Sequence
  Synthetic oligonucleotide: CBLB-2986
ucagucuauugucuggu

SEQ ID NO: 33107 - RNA, 17 nt, Artificial Sequence
  Synthetic oligonucleotide: CBLB-2987
guggcaggcuuagaugu

SEQ ID NO: 33108 - RNA, 17 nt, Artificial Sequence
  Synthetic oligonucleotide: CBLB-2988
ugugagauuucgucugu

SEQ ID NO: 33109 - RNA, 17 nt, Artificial Sequence
  Synthetic oligonucleotide: CBLB-2989
auauggucaugaggugu

SEQ ID NO: 33110 - RNA, 17 nt, Artificial Sequence
  Synthetic oligonucleotide: CBLB-2990
ucaagauugagccuugu

SEQ ID NO: 33111 - RNA, 17 nt, Artificial Sequence
  Synthetic oligonucleotide: CBLB-2991
gggacuaaucagcuugu

SEQ ID NO: 33112 - RNA, 17 nt, Artificial Sequence
  Synthetic oligonucleotide: CBLB-2992
auauuguuccuggaauu

SEQ ID NO: 33113 - RNA, 17 nt, Artificial Sequence
  Synthetic oligonucleotide: CBLB-2993
gugaguuuuguugaauu

SEQ ID NO: 33114 - RNA, 17 nt, Artificial Sequence
  Synthetic oligonucleotide: CBLB-2994
cccuggaauugaccauu

SEQ ID NO: 33115 - RNA, 17 nt, Artificial Sequence
  Synthetic oligonucleotide: CBLB-2995
cuucucaucccuccauu

SEQ ID NO: 33116 - RNA, 17 nt, Artificial Sequence
  Synthetic oligonucleotide: CBLB-2996
uuaaguugcacucgauu

SEQ ID NO: 33117 - RNA, 17 nt, Artificial Sequence
  Synthetic oligonucleotide: CBLB-2997
uaaaauugaucuaccuu

SEQ ID NO: 33118 - RNA, 17 nt, Artificial Sequence
  Synthetic oligonucleotide: CBLB-2998
agcaucauugaccccuu

SEQ ID NO: 33119 - RNA, 17 nt, Artificial Sequence
  Synthetic oligonucleotide: CBLB-2999
uuuuauuuuuuagccuu

SEQ ID NO: 33120 - RNA, 17 nt, Artificial Sequence
  Synthetic oligonucleotide: CBLB-3000
agugaagaaccaugcuu

SEQ ID NO: 33121 - RNA, 17 nt, Artificial Sequence
  Synthetic oligonucleotide: CBLB-3001
ccuuuggugaacccguu

SEQ ID NO: 33122 - RNA, 17 nt, Artificial Sequence
  Synthetic oligonucleotide: CBLB-3002
gucuuaccuuccggguu

SEQ ID NO: 33123 - RNA, 17 nt, Artificial Sequence
  Synthetic oligonucleotide: CBLB-3003
auguaaaaccuccuguu

SEQ ID NO: 33124 - RNA, 17 nt, Artificial Sequence
  Synthetic oligonucleotide: CBLB-3004
ugcccucgggauguguu

SEQ ID NO: 33125 - RNA, 17 nt, Artificial Sequence
  Synthetic oligonucleotide: CBLB-3005
uauuguuccuggaauuu

SEQ ID NO: 33126 - RNA, 17 nt, Artificial Sequence
  Synthetic oligonucleotide: CBLB-3006
uuucuaguuuuaccuuu

SEQ ID NO: 33127 - RNA, 17 nt, Artificial Sequence
  Synthetic oligonucleotide: CBLB-3007
acucugaacuguccuuu

SEQ ID NO: 33128 - RNA, 17 nt, Artificial Sequence
  Synthetic oligonucleotide: CBLB-3008
gcugugauuccagguuu

SEQ ID NO: 33129 - RNA, 17 nt, Artificial Sequence
  Synthetic oligonucleotide: CBLB-3009
cugcgcggucgugguuu

SEQ ID NO: 33130 - RNA, 17 nt, Artificial Sequence
  Synthetic oligonucleotide: CBLB-3010
gcccucgggauguguuu

SEQ ID NO: 33131 - RNA, 17 nt, Artificial Sequence
  Synthetic oligonucleotide: CBLB-3011
gcauuuucuauuuguuu

SEQ ID NO: 33132 - RNA, 17 nt, Artificial Sequence
  Synthetic oligonucleotide: CBLB-3012
uucuggagaaaguuuuu

SEQ ID NO: 33133 - RNA, 20 nt, Artificial Sequence
  Synthetic oligonucleotide: CBLB-3013
cugugcaagguggaaaaaaa

SEQ ID NO: 33134 - RNA, 20 nt, Artificial Sequence
  Synthetic oligonucleotide: CBLB-3014
ucugugcaagguggaaaaaa

SEQ ID NO: 33135 - RNA, 20 nt, Artificial Sequence
  Synthetic oligonucleotide: CBLB-3015
cagaacuguagacaccaaaa

SEQ ID NO: 33136 - RNA, 20 nt, Artificial Sequence
  Synthetic oligonucleotide: CBLB-3016
ccacuugcuagaucaacaaa

SEQ ID NO: 33137 - RNA, 20 nt, Artificial Sequence
  Synthetic oligonucleotide: CBLB-3017
ucuagcaucggcaugccaaa

SEQ ID NO: 33138 - RNA, 20 nt, Artificial Sequence
  Synthetic oligonucleotide: CBLB-3018
ccuucaucucuuggaucaaa

SEQ ID NO: 33139 - RNA, 20 nt, Artificial Sequence
  Synthetic oligonucleotide: CBLB-3019
uuauuucacaacgacagaaa

SEQ ID NO: 33140 - RNA, 20 nt, Artificial Sequence
  Synthetic oligonucleotide: CBLB-3020
aggauuguaaguaugagaaa

SEQ ID NO: 33141 - RNA, 20 nt, Artificial Sequence
  Synthetic oligonucleotide: CBLB-3021
auaugaauuauauugugaaa

SEQ ID NO: 33142 - RNA, 20 nt, Artificial Sequence
  Synthetic oligonucleotide: CBLB-3022
uucugucguugugaaauaaa

SEQ ID NO: 33143 - RNA, 20 nt, Artificial Sequence
  Synthetic oligonucleotide: CBLB-3023
gacuuaagcauauauuuaaa

SEQ ID NO: 33144 - RNA, 20 nt, Artificial Sequence
  Synthetic oligonucleotide: CBLB-3024
gccacuugcuagaucaacaa

SEQ ID NO: 33145 - RNA, 20 nt, Artificial Sequence
  Synthetic oligonucleotide: CBLB-3025
gauuucgucuguaggcacaa

SEQ ID NO: 33146 - RNA, 20 nt, Artificial Sequence
  Synthetic oligonucleotide: CBLB-3026
cagcccaacggguucaccaa

SEQ ID NO: 33147 - RNA, 20 nt, Artificial Sequence
  Synthetic oligonucleotide: CBLB-3027
aucucccuguggcagcccaa

SEQ ID NO: 33148 - RNA, 20 nt, Artificial Sequence
  Synthetic oligonucleotide: CBLB-3028
aucaaagcaaucuuucccaa

SEQ ID NO: 33149 - RNA, 20 nt, Artificial Sequence
  Synthetic oligonucleotide: CBLB-3029
auccccagucacauagccaa

SEQ ID NO: 33150 - RNA, 20 nt, Artificial Sequence
  Synthetic oligonucleotide: CBLB-3030
gucuagcaucggcaugccaa

SEQ ID NO: 33151 - RNA, 20 nt, Artificial Sequence
  Synthetic oligonucleotide: CBLB-3031
uacuuucaggucuuuuccaa

SEQ ID NO: 33152 - RNA, 20 nt, Artificial Sequence
  Synthetic oligonucleotide: CBLB-3032
uagcucuggccuggaagcaa

SEQ ID NO: 33153 - RNA, 20 nt, Artificial Sequence
  Synthetic oligonucleotide: CBLB-3033
aaccuucuagcaggaggcaa

SEQ ID NO: 33154 - RNA, 20 nt, Artificial Sequence
  Synthetic oligonucleotide: CBLB-3034
uggcuuucuucucugggcaa

SEQ ID NO: 33155 - RNA, 20 nt, Artificial Sequence
  Synthetic oligonucleotide: CBLB-3035
gccuucaucucuuggaucaa

SEQ ID NO: 33156 - RNA, 20 nt, Artificial Sequence
  Synthetic oligonucleotide: CBLB-3036
acagcgaguucaaaugucaa

SEQ ID NO: 33157 - RNA, 20 nt, Artificial Sequence
  Synthetic oligonucleotide: CBLB-3037
ggcucucuucaccucuucaa

SEQ ID NO: 33158 - RNA, 20 nt, Artificial Sequence
  Synthetic oligonucleotide: CBLB-3038
cuucaccugcauuuaaagaa

SEQ ID NO: 33159 - RNA, 20 nt, Artificial Sequence
  Synthetic oligonucleotide: CBLB-3039
uuuauuucacaacgacagaa

SEQ ID NO: 33160 - RNA, 20 nt, Artificial Sequence
  Synthetic oligonucleotide: CBLB-3040
cgccuggaucuaauucagaa

SEQ ID NO: 33161 - RNA, 20 nt, Artificial Sequence
  Synthetic oligonucleotide: CBLB-3041
ucgguuggcaaacguccgaa

SEQ ID NO: 33162 - RNA, 20 nt, Artificial Sequence
  Synthetic oligonucleotide: CBLB-3042
aauggucacuguaugcugaa

SEQ ID NO: 33163 - RNA, 20 nt, Artificial Sequence
  Synthetic oligonucleotide: CBLB-3043
ucaaucagggcuugaaauaa

SEQ ID NO: 33164 - RNA, 20 nt, Artificial Sequence
  Synthetic oligonucleotide: CBLB-3044
cagcaugugacugaagauaa

SEQ ID NO: 33165 - RNA, 20 nt, Artificial Sequence
  Synthetic oligonucleotide: CBLB-3045
uccuuuaggucuugugauaa

SEQ ID NO: 33166 - RNA, 20 nt, Artificial Sequence
  Synthetic oligonucleotide: CBLB-3046
uuuuaaagguuucaaccuaa

SEQ ID NO: 33167 - RNA, 20 nt, Artificial Sequence
  Synthetic oligonucleotide: CBLB-3047
accauuaucacaagaccuaa

SEQ ID NO: 33168 - RNA, 20 nt, Artificial Sequence
  Synthetic oligonucleotide: CBLB-3048
ucugaaagagaauuugcuaa

SEQ ID NO: 33169 - RNA, 20 nt, Artificial Sequence
  Synthetic oligonucleotide: CBLB-3049
cuuaccuuagcuccuucuaa

SEQ ID NO: 33170 - RNA, 20 nt, Artificial Sequence
  Synthetic oligonucleotide: CBLB-3050
ggaggccuggcaggugguaa

SEQ ID NO: 33171 - RNA, 20 nt, Artificial Sequence
  Synthetic oligonucleotide: CBLB-3051
gguggaggaggaucucuuaa

SEQ ID NO: 33172 - RNA, 20 nt, Artificial Sequence
  Synthetic oligonucleotide: CBLB-3052
ugacuuaagcauauauuuaa

SEQ ID NO: 33173 - RNA, 20 nt, Artificial Sequence
  Synthetic oligonucleotide: CBLB-3053
guuguucaaaacuuuuuuaa

SEQ ID NO: 33174 - RNA, 20 nt, Artificial Sequence
  Synthetic oligonucleotide: CBLB-3054
gaaagguaaaacuagaaaca

SEQ ID NO: 33175 - RNA, 20 nt, Artificial Sequence
  Synthetic oligonucleotide: CBLB-3055
guugugaauucagggaaaca

SEQ ID NO: 33176 - RNA, 20 nt, Artificial Sequence
  Synthetic oligonucleotide: CBLB-3056
agguauaaucauuagcaaca

SEQ ID NO: 33177 - RNA, 20 nt, Artificial Sequence
  Synthetic oligonucleotide: CBLB-3057
uguaugcugaauggaacaca

SEQ ID NO: 33178 - RNA, 20 nt, Artificial Sequence
  Synthetic oligonucleotide: CBLB-3058
gugcacaucaaaugcccaca

SEQ ID NO: 33179 - RNA, 20 nt, Artificial Sequence
  Synthetic oligonucleotide: CBLB-3059
gaacccguugggcugccaca

SEQ ID NO: 33180 - RNA, 20 nt, Artificial Sequence
  Synthetic oligonucleotide: CBLB-3060
agauuucgucuguaggcaca

SEQ ID NO: 33181 - RNA, 20 nt, Artificial Sequence
  Synthetic oligonucleotide: CBLB-3061
ugugacacauccagguuaca

SEQ ID NO: 33182 - RNA, 20 nt, Artificial Sequence
  Synthetic oligonucleotide: CBLB-3062
acggaccaguacaccuacca

SEQ ID NO: 33183 - RNA, 20 nt, Artificial Sequence
  Synthetic oligonucleotide: CBLB-3063
ugcacagaacuaucguacca

SEQ ID NO: 33184 - RNA, 20 nt, Artificial Sequence
  Synthetic oligonucleotide: CBLB-3064
auucaccacagaaaacccca

SEQ ID NO: 33185 - RNA, 20 nt, Artificial Sequence
  Synthetic oligonucleotide: CBLB-3065
uuccgcaaaauagagcccca

SEQ ID NO: 33186 - RNA, 20 nt, Artificial Sequence
  Synthetic oligonucleotide: CBLB-3066
ccaaugccgccucaggccca

SEQ ID NO: 33187 - RNA, 20 nt, Artificial Sequence
  Synthetic oligonucleotide: CBLB-3067
uuucccaauggucaauucca

SEQ ID NO: 33188 - RNA, 20 nt, Artificial Sequence
  Synthetic oligonucleotide: CBLB-3068
caucauauucuucacuucca

SEQ ID NO: 33189 - RNA, 20 nt, Artificial Sequence
  Synthetic oligonucleotide: CBLB-3069
cacugucugaauacuuucca

SEQ ID NO: 33190 - RNA, 20 nt, Artificial Sequence
  Synthetic oligonucleotide: CBLB-3070
acucgggacaauccaaagca

SEQ ID NO: 33191 - RNA, 20 nt, Artificial Sequence
  Synthetic oligonucleotide: CBLB-3071
cgccaaugccucuugaagca

SEQ ID NO: 33192 - RNA, 20 nt, Artificial Sequence
  Synthetic oligonucleotide: CBLB-3072
agcccugauugauggcagca

SEQ ID NO: 33193 - RNA, 20 nt, Artificial Sequence
  Synthetic oligonucleotide: CBLB-3073
uagauccaggcgaggaggca

SEQ ID NO: 33194 - RNA, 20 nt, Artificial Sequence
  Synthetic oligonucleotide: CBLB-3074
gcaccucuugccuuacggca

SEQ ID NO: 33195 - RNA, 20 nt, Artificial Sequence
  Synthetic oligonucleotide: CBLB-3075
guggcuuucuucucugggca

SEQ ID NO: 33196 - RNA, 20 nt, Artificial Sequence
  Synthetic oligonucleotide: CBLB-3076
ccuggcaggugguaauggca

SEQ ID NO: 33197 - RNA, 20 nt, Artificial Sequence
  Synthetic oligonucleotide: CBLB-3077
cuaaacaaauagaaaaugca

SEQ ID NO: 33198 - RNA, 20 nt, Artificial Sequence
  Synthetic oligonucleotide: CBLB-3078
ucuuguuuucucaccaugca

SEQ ID NO: 33199 - RNA, 20 nt, Artificial Sequence
  Synthetic oligonucleotide: CBLB-3079
caccucccccaccuccugca

SEQ ID NO: 33200 - RNA, 20 nt, Artificial Sequence
  Synthetic oligonucleotide: CBLB-3080
ugguacgauaguucugugca

SEQ ID NO: 33201 - RNA, 20 nt, Artificial Sequence
  Synthetic oligonucleotide: CBLB-3081
ucuuuagucuucuccuugca

SEQ ID NO: 33202 - RNA, 20 nt, Artificial Sequence
  Synthetic oligonucleotide: CBLB-3082
cuccuucuaaaggcaaauca

SEQ ID NO: 33203 - RNA, 20 nt, Artificial Sequence
  Synthetic oligonucleotide: CBLB-3083
uucccugcugccaucaauca

SEQ ID NO: 33204 - RNA, 20 nt, Artificial Sequence
  Synthetic oligonucleotide: CBLB-3084
ugccaaccgauucaucauca

SEQ ID NO: 33205 - RNA, 20 nt, Artificial Sequence
  Synthetic oligonucleotide: CBLB-3085
ugcaaaaauugcaaaacuca

SEQ ID NO: 33206 - RNA, 20 nt, Artificial Sequence
  Synthetic oligonucleotide: CBLB-3086
uuaaauauaugcuuaaguca

SEQ ID NO: 33207 - RNA, 20 nt, Artificial Sequence
  Synthetic oligonucleotide: CBLB-3087
guuuaggagucggaugguca

SEQ ID NO: 33208 - RNA, 20 nt, Artificial Sequence
  Synthetic oligonucleotide: CBLB-3088
augagaugguugugaauuca

SEQ ID NO: 33209 - RNA, 20 nt, Artificial Sequence
  Synthetic oligonucleotide: CBLB-3089
uuugauuucuucucugaaga

SEQ ID NO: 33210 - RNA, 20 nt, Artificial Sequence
  Synthetic oligonucleotide: CBLB-3090
ucuuuaaaaaucuacacaga

SEQ ID NO: 33211 - RNA, 20 nt, Artificial Sequence
  Synthetic oligonucleotide: CBLB-3091
augagaagaucauaaucaga

SEQ ID NO: 33212 - RNA, 20 nt, Artificial Sequence
  Synthetic oligonucleotide: CBLB-3092
ggugggggaggugggagaga

SEQ ID NO: 33213 - RNA, 20 nt, Artificial Sequence
  Synthetic oligonucleotide: CBLB-3093
auugcaaaacucaugggaga

SEQ ID NO: 33214 - RNA, 20 nt, Artificial Sequence
  Synthetic oligonucleotide: CBLB-3094
uuuacauuaugacaaugaga

SEQ ID NO: 33215 - RNA, 20 nt, Artificial Sequence
  Synthetic oligonucleotide: CBLB-3095
uuccuuugccuccugcuaga

SEQ ID NO: 33216 - RNA, 20 nt, Artificial Sequence
  Synthetic oligonucleotide: CBLB-3096
cgccaugauuugccuuuaga

SEQ ID NO: 33217 - RNA, 20 nt, Artificial Sequence
  Synthetic oligonucleotide: CBLB-3097
uagucccaaacacaucccga

SEQ ID NO: 33218 - RNA, 20 nt, Artificial Sequence
  Synthetic oligonucleotide: CBLB-3098
ucacuuuaugcuagggagga

SEQ ID NO: 33219 - RNA, 20 nt, Artificial Sequence
  Synthetic oligonucleotide: CBLB-3099
uuccuggaauuuggggagga

SEQ ID NO: 33220 - RNA, 20 nt, Artificial Sequence
  Synthetic oligonucleotide: CBLB-3100
gacguggggauacuggagga

SEQ ID NO: 33221 - RNA, 20 nt, Artificial Sequence
  Synthetic oligonucleotide: CBLB-3101
aaaagauccuguccugagga

SEQ ID NO: 33222 - RNA, 20 nt, Artificial Sequence
  Synthetic oligonucleotide: CBLB-3102
ucuucuuccuucagguagga

SEQ ID NO: 33223 - RNA, 20 nt, Artificial Sequence
  Synthetic oligonucleotide: CBLB-3103
aauauagcaccaaacccgga

SEQ ID NO: 33224 - RNA, 20 nt, Artificial Sequence
  Synthetic oligonucleotide: CBLB-3104
cuauuuguuuaggagucgga

SEQ ID NO: 33225 - RNA, 20 nt, Artificial Sequence
  Synthetic oligonucleotide: CBLB-3105
cugauugauggcagcaggga

SEQ ID NO: 33226 - RNA, 20 nt, Artificial Sequence
  Synthetic oligonucleotide: CBLB-3106
uggggauacuggaggaggga

SEQ ID NO: 33227 - RNA, 20 nt, Artificial Sequence
  Synthetic oligonucleotide: CBLB-3107
aggugggagagauggaggga

SEQ ID NO: 33228 - RNA, 20 nt, Artificial Sequence
  Synthetic oligonucleotide: CBLB-3108
ggaugucgacuccuagggga

SEQ ID NO: 33229 - RNA, 20 nt, Artificial Sequence
  Synthetic oligonucleotide: CBLB-3109
auuggcuaugugacugggga

SEQ ID NO: 33230 - RNA, 20 nt, Artificial Sequence
  Synthetic oligonucleotide: CBLB-3110
cgaguucaaaugucaaugga

SEQ ID NO: 33231 - RNA, 20 nt, Artificial Sequence
  Synthetic oligonucleotide: CBLB-3111
aaagguuucaaccuaaugga

SEQ ID NO: 33232 - RNA, 20 nt, Artificial Sequence
  Synthetic oligonucleotide: CBLB-3112
ggggaggugggagagaugga

SEQ ID NO: 33233 - RNA, 20 nt, Artificial Sequence
  Synthetic oligonucleotide: CBLB-3113
ggcauuggcgggucucugga

SEQ ID NO: 33234 - RNA, 20 nt, Artificial Sequence
  Synthetic oligonucleotide: CBLB-3114
gccaacucaccugaacauga

SEQ ID NO: 33235 - RNA, 20 nt, Artificial Sequence
  Synthetic oligonucleotide: CBLB-3115
aaggcacgcuuuccacauga

SEQ ID NO: 33236 - RNA, 20 nt, Artificial Sequence
  Synthetic oligonucleotide: CBLB-3116
uaaucugguggaccucauga

SEQ ID NO: 33237 - RNA, 20 nt, Artificial Sequence
  Synthetic oligonucleotide: CBLB-3117
cccuuugauccaagagauga

SEQ ID NO: 33238 - RNA, 20 nt, Artificial Sequence
  Synthetic oligonucleotide: CBLB-3118
agggaaacagggugggauga

SEQ ID NO: 33239 - RNA, 20 nt, Artificial Sequence
  Synthetic oligonucleotide: CBLB-3119
ggcuuuucccuccuaccuga

SEQ ID NO: 33240 - RNA, 20 nt, Artificial Sequence
  Synthetic oligonucleotide: CBLB-3120
uucaguuaucuuuauccuga

SEQ ID NO: 33241 - RNA, 20 nt, Artificial Sequence
  Synthetic oligonucleotide: CBLB-3121
uuauuucaagcccugauuga

SEQ ID NO: 33242 - RNA, 20 nt, Artificial Sequence
  Synthetic oligonucleotide: CBLB-3122
aucaaucagggcuugaaaua

SEQ ID NO: 33243 - RNA, 20 nt, Artificial Sequence
  Synthetic oligonucleotide: CBLB-3123
ccagcaugugacugaagaua

SEQ ID NO: 33244 - RNA, 20 nt, Artificial Sequence
  Synthetic oligonucleotide: CBLB-3124
uuaccuguguaacuuuuaua

SEQ ID NO: 33245 - RNA, 20 nt, Artificial Sequence
  Synthetic oligonucleotide: CBLB-3125
uugugggaugucgacuccua

SEQ ID NO: 33246 - RNA, 20 nt, Artificial Sequence
  Synthetic oligonucleotide: CBLB-3126
uuugccuuuagaaggagcua

SEQ ID NO: 33247 - RNA, 20 nt, Artificial Sequence
  Synthetic oligonucleotide: CBLB-3127
acaaaacucacuuuaugcua

SEQ ID NO: 33248 - RNA, 20 nt, Artificial Sequence
  Synthetic oligonucleotide: CBLB-3128
auuauucugggcuaucucua

SEQ ID NO: 33249 - RNA, 20 nt, Artificial Sequence
  Synthetic oligonucleotide: CBLB-3129
ccuccuguucgguaagagua

SEQ ID NO: 33250 - RNA, 20 nt, Artificial Sequence
  Synthetic oligonucleotide: CBLB-3130
auuauaccugccaugccgua

SEQ ID NO: 33251 - RNA, 20 nt, Artificial Sequence
  Synthetic oligonucleotide: CBLB-3131
auauaaaaguuacacaggua

SEQ ID NO: 33252 - RNA, 20 nt, Artificial Sequence
  Synthetic oligonucleotide: CBLB-3132
uaagggcuuguuaugaggua

SEQ ID NO: 33253 - RNA, 20 nt, Artificial Sequence
  Synthetic oligonucleotide: CBLB-3133
aucaaagggguccacgauua

SEQ ID NO: 33254 - RNA, 20 nt, Artificial Sequence
  Synthetic oligonucleotide: CBLB-3134
gaugugcaccucuugccuua

SEQ ID NO: 33255 - RNA, 20 nt, Artificial Sequence
  Synthetic oligonucleotide: CBLB-3135
cgguggaggaggaucucuua

SEQ ID NO: 33256 - RNA, 20 nt, Artificial Sequence
  Synthetic oligonucleotide: CBLB-3136
uagaaacauggguuuaguua

SEQ ID NO: 33257 - RNA, 20 nt, Artificial Sequence
  Synthetic oligonucleotide: CBLB-3137
uccugcgcggucgugguuua

SEQ ID NO: 33258 - RNA, 20 nt, Artificial Sequence
  Synthetic oligonucleotide: CBLB-3138
gguugugaauucagggaaac

SEQ ID NO: 33259 - RNA, 20 nt, Artificial Sequence
  Synthetic oligonucleotide: CBLB-3139
ucucccuguggcagcccaac

SEQ ID NO: 33260 - RNA, 20 nt, Artificial Sequence
  Synthetic oligonucleotide: CBLB-3140
agcaugguucuucacucaac

SEQ ID NO: 33261 - RNA, 20 nt, Artificial Sequence
  Synthetic oligonucleotide: CBLB-3141
ugcccauacucuuaccgaac

SEQ ID NO: 33262 - RNA, 20 nt, Artificial Sequence
  Synthetic oligonucleotide: CBLB-3142
cuagggaggagggugguaac

SEQ ID NO: 33263 - RNA, 20 nt, Artificial Sequence
  Synthetic oligonucleotide: CBLB-3143
ccaaucgagugcaacuuaac

SEQ ID NO: 33264 - RNA, 20 nt, Artificial Sequence
  Synthetic oligonucleotide: CBLB-3144
aguuauaauccugauuuaac

SEQ ID NO: 33265 - RNA, 20 nt, Artificial Sequence
  Synthetic oligonucleotide: CBLB-3145
ugaccauauaaaaguuacac

SEQ ID NO: 33266 - RNA, 20 nt, Artificial Sequence
  Synthetic oligonucleotide: CBLB-3146
ugaacccguugggcugccac

SEQ ID NO: 33267 - RNA, 20 nt, Artificial Sequence
  Synthetic oligonucleotide: CBLB-3147
cuguguuuccgcauaagcac

SEQ ID NO: 33268 - RNA, 20 nt, Artificial Sequence
  Synthetic oligonucleotide: CBLB-3148
agauccaggcgaggaggcac

SEQ ID NO: 33269 - RNA, 20 nt, Artificial Sequence
  Synthetic oligonucleotide: CBLB-3149
cuggcaggugguaauggcac

SEQ ID NO: 33270 - RNA, 20 nt, Artificial Sequence
  Synthetic oligonucleotide: CBLB-3150
caaaacuaacagaacaucac

SEQ ID NO: 33271 - RNA, 20 nt, Artificial Sequence
  Synthetic oligonucleotide: CBLB-3151
aaucuacacagaugguucac

SEQ ID NO: 33272 - RNA, 20 nt, Artificial Sequence
  Synthetic oligonucleotide: CBLB-3152
uagccggccauccucaggac

SEQ ID NO: 33273 - RNA, 20 nt, Artificial Sequence
  Synthetic oligonucleotide: CBLB-3153
uucuguucuagugcacugac

SEQ ID NO: 33274 - RNA, 20 nt, Artificial Sequence
  Synthetic oligonucleotide: CBLB-3154
gaggauccuggugaugugac

SEQ ID NO: 33275 - RNA, 20 nt, Artificial Sequence
  Synthetic oligonucleotide: CBLB-3155
ugggccauuggcuaugugac

SEQ ID NO: 33276 - RNA, 20 nt, Artificial Sequence
  Synthetic oligonucleotide: CBLB-3156
agauuuagacguggggauac

SEQ ID NO: 33277 - RNA, 20 nt, Artificial Sequence
  Synthetic oligonucleotide: CBLB-3157
uccugaggauggccggcuac

SEQ ID NO: 33278 - RNA, 20 nt, Artificial Sequence
  Synthetic oligonucleotide: CBLB-3158
ucaucaucaucuuccucuac

SEQ ID NO: 33279 - RNA, 20 nt, Artificial Sequence
  Synthetic oligonucleotide: CBLB-3159
uuuuccccugguagguguac

SEQ ID NO: 33280 - RNA, 20 nt, Artificial Sequence
  Synthetic oligonucleotide: CBLB-3160
ggggagggcucuccaaaacc

SEQ ID NO: 33281 - RNA, 20 nt, Artificial Sequence
  Synthetic oligonucleotide: CBLB-3161
cagaaauauagcaccaaacc

SEQ ID NO: 33282 - RNA, 20 nt, Artificial Sequence
  Synthetic oligonucleotide: CBLB-3162
gugagaaaugccauguaacc

SEQ ID NO: 33283 - RNA, 20 nt, Artificial Sequence
  Synthetic oligonucleotide: CBLB-3163
gucaaugaugcugcaacacc

SEQ ID NO: 33284 - RNA, 20 nt, Artificial Sequence
  Synthetic oligonucleotide: CBLB-3164
aacucaccagucacaucacc

SEQ ID NO: 33285 - RNA, 20 nt, Artificial Sequence
  Synthetic oligonucleotide: CBLB-3165
uuaguuuugacauuuucacc

SEQ ID NO: 33286 - RNA, 20 nt, Artificial Sequence
  Synthetic oligonucleotide: CBLB-3166
aacggaccaguacaccuacc

SEQ ID NO: 33287 - RNA, 20 nt, Artificial Sequence
  Synthetic oligonucleotide: CBLB-3167
ccuccugcuagaagguuacc

SEQ ID NO: 33288 - RNA, 20 nt, Artificial Sequence
  Synthetic oligonucleotide: CBLB-3168
uugaauuugauauuuuuacc

SEQ ID NO: 33289 - RNA, 20 nt, Artificial Sequence
  Synthetic oligonucleotide: CBLB-3169
agauuggauuuuuuuucccc

SEQ ID NO: 33290 - RNA, 20 nt, Artificial Sequence
  Synthetic oligonucleotide: CBLB-3170
aagaauaugauguuccuccc

SEQ ID NO: 33291 - RNA, 20 nt, Artificial Sequence
  Synthetic oligonucleotide: CBLB-3171
ugauacgaaaguuaucuccc

SEQ ID NO: 33292 - RNA, 20 nt, Artificial Sequence
  Synthetic oligonucleotide: CBLB-3172
uggaggaggaggagaaagcc

SEQ ID NO: 33293 - RNA, 20 nt, Artificial Sequence
  Synthetic oligonucleotide: CBLB-3173
uaaacuuaccugaaacagcc

SEQ ID NO: 33294 - RNA, 20 nt, Artificial Sequence
  Synthetic oligonucleotide: CBLB-3174
gauggccggcuacuggagcc

SEQ ID NO: 33295 - RNA, 20 nt, Artificial Sequence
  Synthetic oligonucleotide: CBLB-3175
gccacccgugccuccucgcc

SEQ ID NO: 33296 - RNA, 20 nt, Artificial Sequence
  Synthetic oligonucleotide: CBLB-3176
auugucccgaguuggaggcc

SEQ ID NO: 33297 - RNA, 20 nt, Artificial Sequence
  Synthetic oligonucleotide: CBLB-3177
ccaccagauuagcucuggcc

SEQ ID NO: 33298 - RNA, 20 nt, Artificial Sequence
  Synthetic oligonucleotide: CBLB-3178
ccgugccauuaccaccugcc

SEQ ID NO: 33299 - RNA, 20 nt, Artificial Sequence
  Synthetic oligonucleotide: CBLB-3179
agaauaaugucgaaguugcc

SEQ ID NO: 33300 - RNA, 20 nt, Artificial Sequence
  Synthetic oligonucleotide: CBLB-3180
uucuuagcugugacacaucc

SEQ ID NO: 33301 - RNA, 20 nt, Artificial Sequence
  Synthetic oligonucleotide: CBLB-3181
ugccuuucugaauuagaucc

SEQ ID NO: 33302 - RNA, 20 nt, Artificial Sequence
  Synthetic oligonucleotide: CBLB-3182
ugggcaaggggagaggaucc

SEQ ID NO: 33303 - RNA, 20 nt, Artificial Sequence
  Synthetic oligonucleotide: CBLB-3183
auugaacauucaaaaccucc

SEQ ID NO: 33304 - RNA, 20 nt, Artificial Sequence
  Synthetic oligonucleotide: CBLB-3184
auccaagagaugaaggcucc

SEQ ID NO: 33305 - RNA, 20 nt, Artificial Sequence
  Synthetic oligonucleotide: CBLB-3185
aaauucucggaggaugcucc

SEQ ID NO: 33306 - RNA, 20 nt, Artificial Sequence
  Synthetic oligonucleotide: CBLB-3186
cucccuccuccccaaauucc

SEQ ID NO: 33307 - RNA, 20 nt, Artificial Sequence
  Synthetic oligonucleotide: CBLB-3187
cuuucccaauggucaauucc

SEQ ID NO: 33308 - RNA, 20 nt, Artificial Sequence
  Synthetic oligonucleotide: CBLB-3188
uuugaacucgcugugauucc

SEQ ID NO: 33309 - RNA, 20 nt, Artificial Sequence
  Synthetic oligonucleotide: CBLB-3189
gcuaaaaagucuuaccuucc

SEQ ID NO: 33310 - RNA, 20 nt, Artificial Sequence
  Synthetic oligonucleotide: CBLB-3190
auuuuagagccauugcuucc

SEQ ID NO: 33311 - RNA, 20 nt, Artificial Sequence
  Synthetic oligonucleotide: CBLB-3191
aauauaauucauauuguucc

SEQ ID NO: 33312 - RNA, 20 nt, Artificial Sequence
  Synthetic oligonucleotide: CBLB-3192
cuggaggaggaggagaaagc

SEQ ID NO: 33313 - RNA, 20 nt, Artificial Sequence
  Synthetic oligonucleotide: CBLB-3193
aagcccugauugauggcagc

SEQ ID NO: 33314 - RNA, 20 nt, Artificial Sequence
  Synthetic oligonucleotide: CBLB-3194
ucaccugguaaccuucuagc

SEQ ID NO: 33315 - RNA, 20 nt, Artificial Sequence
  Synthetic oligonucleotide: CBLB-3195
aaccuccuggcuccaguagc

SEQ ID NO: 33316 - RNA, 20 nt, Artificial Sequence
  Synthetic oligonucleotide: CBLB-3196
ccccuaaaccacgaccgcgc

SEQ ID NO: 33317 - RNA, 20 nt, Artificial Sequence
  Synthetic oligonucleotide: CBLB-3197
cucuugccuuacggcauggc

SEQ ID NO: 33318 - RNA, 20 nt, Artificial Sequence
  Synthetic oligonucleotide: CBLB-3198
gauccuguccugaggauggc

SEQ ID NO: 33319 - RNA, 20 nt, Artificial Sequence
  Synthetic oligonucleotide: CBLB-3199
ucccgaguuggaggccuggc

SEQ ID NO: 33320 - RNA, 20 nt, Artificial Sequence
  Synthetic oligonucleotide: CBLB-3200
cgugguuuagggggucuggc

SEQ ID NO: 33321 - RNA, 20 nt, Artificial Sequence
  Synthetic oligonucleotide: CBLB-3201
ggcgaggaggcacggguggc

SEQ ID NO: 33322 - RNA, 20 nt, Artificial Sequence
  Synthetic oligonucleotide: CBLB-3202
augcuucaagaggcauuggc

SEQ ID NO: 33323 - RNA, 20 nt, Artificial Sequence
  Synthetic oligonucleotide: CBLB-3203
aucgaccuuucuuuaaaugc

SEQ ID NO: 33324 - RNA, 20 nt, Artificial Sequence
  Synthetic oligonucleotide: CBLB-3204
ccuuaucuucagucacaugc

SEQ ID NO: 33325 - RNA, 20 nt, Artificial Sequence
  Synthetic oligonucleotide: CBLB-3205
cuuaagggaggagguggugc

SEQ ID NO: 33326 - RNA, 20 nt, Artificial Sequence
  Synthetic oligonucleotide: CBLB-3206
ucaaugagacuaugccuugc

SEQ ID NO: 33327 - RNA, 20 nt, Artificial Sequence
  Synthetic oligonucleotide: CBLB-3207
ucacauaauccaguuaaauc

SEQ ID NO: 33328 - RNA, 20 nt, Artificial Sequence
  Synthetic oligonucleotide: CBLB-3208
cuucccugcugccaucaauc

SEQ ID NO: 33329 - RNA, 20 nt, Artificial Sequence
  Synthetic oligonucleotide: CBLB-3209
cuuccaggccagagcuaauc

SEQ ID NO: 33330 - RNA, 20 nt, Artificial Sequence
  Synthetic oligonucleotide: CBLB-3210
ggauuauaacuccucccauc

SEQ ID NO: 33331 - RNA, 20 nt, Artificial Sequence
  Synthetic oligonucleotide: CBLB-3211
gcaggcuuagaugugggauc

SEQ ID NO: 33332 - RNA, 20 nt, Artificial Sequence
  Synthetic oligonucleotide: CBLB-3212
accugccaggccuccaacuc

SEQ ID NO: 33333 - RNA, 20 nt, Artificial Sequence
  Synthetic oligonucleotide: CBLB-3213
ucuugaagcauggugcccuc

SEQ ID NO: 33334 - RNA, 20 nt, Artificial Sequence
  Synthetic oligonucleotide: CBLB-3214
acauuuuccaaugccgccuc

SEQ ID NO: 33335 - RNA, 20 nt, Artificial Sequence
  Synthetic oligonucleotide: CBLB-3215
uccaguagccggccauccuc

SEQ ID NO: 33336 - RNA, 20 nt, Artificial Sequence
  Synthetic oligonucleotide: CBLB-3216
gagguccaccagauuagcuc

SEQ ID NO: 33337 - RNA, 20 nt, Artificial Sequence
  Synthetic oligonucleotide: CBLB-3217
caaauucucggaggaugcuc

SEQ ID NO: 33338 - RNA, 20 nt, Artificial Sequence
  Synthetic oligonucleotide: CBLB-3218
aagaggcauuggcgggucuc

SEQ ID NO: 33339 - RNA, 20 nt, Artificial Sequence
  Synthetic oligonucleotide: CBLB-3219
caggcuguggcuuucuucuc

SEQ ID NO: 33340 - RNA, 20 nt, Artificial Sequence
  Synthetic oligonucleotide: CBLB-3220
uuuaaauauaugcuuaaguc

SEQ ID NO: 33341 - RNA, 20 nt, Artificial Sequence
  Synthetic oligonucleotide: CBLB-3221
cggucgugguuuaggggguc

SEQ ID NO: 33342 - RNA, 20 nt, Artificial Sequence
  Synthetic oligonucleotide: CBLB-3222
ugugggaucuggaguggguc

SEQ ID NO: 33343 - RNA, 20 nt, Artificial Sequence
  Synthetic oligonucleotide: CBLB-3223
uguuuaggagucggaugguc

SEQ ID NO: 33344 - RNA, 20 nt, Artificial Sequence
  Synthetic oligonucleotide: CBLB-3224
ugucuacucagucuauuguc

SEQ ID NO: 33345 - RNA, 20 nt, Artificial Sequence
  Synthetic oligonucleotide: CBLB-3225
aagcagaugcugcugaauuc

SEQ ID NO: 33346 - RNA, 20 nt, Artificial Sequence
  Synthetic oligonucleotide: CBLB-3226
aaugagaugguugugaauuc

SEQ ID NO: 33347 - RNA, 20 nt, Artificial Sequence
  Synthetic oligonucleotide: CBLB-3227
gggcaacuucgacauuauuc

SEQ ID NO: 33348 - RNA, 20 nt, Artificial Sequence
  Synthetic oligonucleotide: CBLB-3228
ugcuaaaaagucuuaccuuc

SEQ ID NO: 33349 - RNA, 20 nt, Artificial Sequence
  Synthetic oligonucleotide: CBLB-3229
gaucuuuuucuucuuccuuc

SEQ ID NO: 33350 - RNA, 20 nt, Artificial Sequence
  Synthetic oligonucleotide: CBLB-3230
cauuuuggugucuacaguuc

SEQ ID NO: 33351 - RNA, 20 nt, Artificial Sequence
  Synthetic oligonucleotide: CBLB-3231
gaucagcuuccuucauguuc

SEQ ID NO: 33352 - RNA, 20 nt, Artificial Sequence
  Synthetic oligonucleotide: CBLB-3232
gguuuucuguggugaauuuc

SEQ ID NO: 33353 - RNA, 20 nt, Artificial Sequence
  Synthetic oligonucleotide: CBLB-3233
uaacaauuugauuuacuuuc

SEQ ID NO: 33354 - RNA, 20 nt, Artificial Sequence
  Synthetic oligonucleotide: CBLB-3234
gggauugguggaggucuuuc

SEQ ID NO: 33355 - RNA, 20 nt, Artificial Sequence
  Synthetic oligonucleotide: CBLB-3235
uauuuuuaccaggcuguuuc

SEQ ID NO: 33356 - RNA, 20 nt, Artificial Sequence
  Synthetic oligonucleotide: CBLB-3236
uguuuugcagcuauauuuuc

SEQ ID NO: 33357 - RNA, 20 nt, Artificial Sequence
  Synthetic oligonucleotide: CBLB-3237
aaucuuacagagcugaaaag

SEQ ID NO: 33358 - RNA, 20 nt, Artificial Sequence
  Synthetic oligonucleotide: CBLB-3238
cuagcaucggcaugccaaag

SEQ ID NO: 33359 - RNA, 20 nt, Artificial Sequence
  Synthetic oligonucleotide: CBLB-3239
cuucaucucuuggaucaaag

SEQ ID NO: 33360 - RNA, 20 nt, Artificial Sequence
  Synthetic oligonucleotide: CBLB-3240
cccuuuguugaucuagcaag

SEQ ID NO: 33361 - RNA, 20 nt, Artificial Sequence
  Synthetic oligonucleotide: CBLB-3241
cugccaugccguaaggcaag

SEQ ID NO: 33362 - RNA, 20 nt, Artificial Sequence
  Synthetic oligonucleotide: CBLB-3242
ggcuuucuucucugggcaag

SEQ ID NO: 33363 - RNA, 20 nt, Artificial Sequence
  Synthetic oligonucleotide: CBLB-3243
cgagggcaccaugcuucaag

SEQ ID NO: 33364 - RNA, 20 nt, Artificial Sequence
  Synthetic oligonucleotide: CBLB-3244
agaggguuaugccuuugaag

SEQ ID NO: 33365 - RNA, 20 nt, Artificial Sequence
  Synthetic oligonucleotide: CBLB-3245
guugcacucgauugggacag

SEQ ID NO: 33366 - RNA, 20 nt, Artificial Sequence
  Synthetic oligonucleotide: CBLB-3246
cggaccaguacaccuaccag

SEQ ID NO: 33367 - RNA, 20 nt, Artificial Sequence
  Synthetic oligonucleotide: CBLB-3247
gaugagaagaucauaaucag

SEQ ID NO: 33368 - RNA, 20 nt, Artificial Sequence
  Synthetic oligonucleotide: CBLB-3248
ugguaauggcacgggaucag

SEQ ID NO: 33369 - RNA, 20 nt, Artificial Sequence
  Synthetic oligonucleotide: CBLB-3249
caauggaaggcacaguagag

SEQ ID NO: 33370 - RNA, 20 nt, Artificial Sequence
  Synthetic oligonucleotide: CBLB-3250
ucuucucugggcaaggggag

SEQ ID NO: 33371 - RNA, 20 nt, Artificial Sequence
  Synthetic oligonucleotide: CBLB-3251
aauugcaaaacucaugggag

SEQ ID NO: 33372 - RNA, 20 nt, Artificial Sequence
  Synthetic oligonucleotide: CBLB-3252
ggaggagguggugcugggag

SEQ ID NO: 33373 - RNA, 20 nt, Artificial Sequence
  Synthetic oligonucleotide: CBLB-3253
cuuagaugugggaucuggag

SEQ ID NO: 33374 - RNA, 20 nt, Artificial Sequence
  Synthetic oligonucleotide: CBLB-3254
ugugggaugucgacuccuag

SEQ ID NO: 33375 - RNA, 20 nt, Artificial Sequence
  Synthetic oligonucleotide: CBLB-3255
gaaucaaaaacaucuccuag

SEQ ID NO: 33376 - RNA, 20 nt, Artificial Sequence
  Synthetic oligonucleotide: CBLB-3256
gaaaacaagagacccaguag

SEQ ID NO: 33377 - RNA, 20 nt, Artificial Sequence
  Synthetic oligonucleotide: CBLB-3257
ccugcgcggucgugguuuag

SEQ ID NO: 33378 - RNA, 20 nt, Artificial Sequence
  Synthetic oligonucleotide: CBLB-3258
ggcugcuauagauuuagacg

SEQ ID NO: 33379 - RNA, 20 nt, Artificial Sequence
  Synthetic oligonucleotide: CBLB-3259
uuagucccaaacacaucccg

SEQ ID NO: 33380 - RNA, 20 nt, Artificial Sequence
  Synthetic oligonucleotide: CBLB-1080
ggaggaggaggagaaagccg

SEQ ID NO: 33381 - RNA, 20 nt, Artificial Sequence
  Synthetic oligonucleotide: CBLB-3260
uucugaauuagauccaggcg

SEQ ID NO: 33382 - RNA, 20 nt, Artificial Sequence
  Synthetic oligonucleotide: CBLB-3261
auuucuggugcaguccugcg

SEQ ID NO: 33383 - RNA, 20 nt, Artificial Sequence
  Synthetic oligonucleotide: CBLB-3262
aggaacugagcccauaaucg

SEQ ID NO: 33384 - RNA, 20 nt, Artificial Sequence
  Synthetic oligonucleotide: CBLB-3263
ggugcaguccugcgcggucg

SEQ ID NO: 33385 - RNA, 20 nt, Artificial Sequence
  Synthetic oligonucleotide: CBLB-3264
uacgauaguucugugcaagg

SEQ ID NO: 33386 - RNA, 20 nt, Artificial Sequence
  Synthetic oligonucleotide: CBLB-3265
ccauacucuuaccgaacagg

SEQ ID NO: 33387 - RNA, 20 nt, Artificial Sequence
  Synthetic oligonucleotide: CBLB-3266
ggccggcuacuggagccagg

SEQ ID NO: 33388 - RNA, 20 nt, Artificial Sequence
  Synthetic oligonucleotide: CBLB-3267
ccugguaaccuucuagcagg

SEQ ID NO: 33389 - RNA, 20 nt, Artificial Sequence
  Synthetic oligonucleotide: CBLB-3268
cgaguuggaggccuggcagg

SEQ ID NO: 33390 - RNA, 20 nt, Artificial Sequence
  Synthetic oligonucleotide: CBLB-3269
augagacuaugccuugcagg

SEQ ID NO: 33391 - RNA, 20 nt, Artificial Sequence
  Synthetic oligonucleotide: CBLB-3270
auugguggaggucuuucagg

SEQ ID NO: 33392 - RNA, 20 nt, Artificial Sequence
  Synthetic oligonucleotide: CBLB-3271
ugaauuagauccaggcgagg

SEQ ID NO: 33393 - RNA, 20 nt, Artificial Sequence
  Synthetic oligonucleotide: CBLB-3272
agacuaugccuugcaggagg

SEQ ID NO: 33394 - RNA, 20 nt, Artificial Sequence
  Synthetic oligonucleotide: CBLB-3273
ggaucucuuaagggaggagg

SEQ ID NO: 33395 - RNA, 20 nt, Artificial Sequence
  Synthetic oligonucleotide: CBLB-3274
agggugguaacuggaggagg

SEQ ID NO: 33396 - RNA, 20 nt, Artificial Sequence
  Synthetic oligonucleotide: CBLB-3275
ggaggaucucuuaagggagg

SEQ ID NO: 33397 - RNA, 20 nt, Artificial Sequence
  Synthetic oligonucleotide: CBLB-3276
cucacuuuaugcuagggagg

SEQ ID NO: 33398 - RNA, 20 nt, Artificial Sequence
  Synthetic oligonucleotide: CBLB-3277
cuugcaggaggugggggagg

SEQ ID NO: 33399 - RNA, 20 nt, Artificial Sequence
  Synthetic oligonucleotide: CBLB-3278
guuccuggaauuuggggagg

SEQ ID NO: 33400 - RNA, 20 nt, Artificial Sequence
  Synthetic oligonucleotide: CBLB-3279
aggagggugguaacuggagg

SEQ ID NO: 33401 - RNA, 20 nt, Artificial Sequence
  Synthetic oligonucleotide: CBLB-3280
agacguggggauacuggagg

SEQ ID NO: 33402 - RNA, 20 nt, Artificial Sequence
  Synthetic oligonucleotide: CBLB-3281
cuuucagguggcgguggagg

SEQ ID NO: 33403 - RNA, 20 nt, Artificial Sequence
  Synthetic oligonucleotide: CBLB-3282
aaaaccccaugggccugagg

SEQ ID NO: 33404 - RNA, 20 nt, Artificial Sequence
  Synthetic oligonucleotide: CBLB-3283
uucuucuuccuucagguagg

SEQ ID NO: 33405 - RNA, 20 nt, Artificial Sequence
  Synthetic oligonucleotide: CBLB-3284
cugcgcggucgugguuuagg

SEQ ID NO: 33406 - RNA, 20 nt, Artificial Sequence
  Synthetic oligonucleotide: CBLB-3285
ggaggucuuucagguggcgg

SEQ ID NO: 33407 - RNA, 20 nt, Artificial Sequence
  Synthetic oligonucleotide: CBLB-3286
gagggaaggcaaauucucgg

SEQ ID NO: 33408 - RNA, 20 nt, Artificial Sequence
  Synthetic oligonucleotide: CBLB-3287
ggaggaggaucucuuaaggg

SEQ ID NO: 33409 - RNA, 20 nt, Artificial Sequence
  Synthetic oligonucleotide: CBLB-3288
gugaauucagggaaacaggg

SEQ ID NO: 33410 - RNA, 20 nt, Artificial Sequence
  Synthetic oligonucleotide: CBLB-3289
cuuuaugcuagggaggaggg

SEQ ID NO: 33411 - RNA, 20 nt, Artificial Sequence
  Synthetic oligonucleotide: CBLB-3290
gaggugggagagauggaggg

SEQ ID NO: 33412 - RNA, 20 nt, Artificial Sequence
  Synthetic oligonucleotide: CBLB-3291
aaacucacuuuaugcuaggg

SEQ ID NO: 33413 - RNA, 20 nt, Artificial Sequence
  Synthetic oligonucleotide: CBLB-3292
uccaggcgaggaggcacggg

SEQ ID NO: 33414 - RNA, 20 nt, Artificial Sequence
  Synthetic oligonucleotide: CBLB-3293
gggaugucgacuccuagggg

SEQ ID NO: 33415 - RNA, 20 nt, Artificial Sequence
  Synthetic oligonucleotide: CBLB-1079
ggaggaggagaaagccgggg

SEQ ID NO: 33416 - RNA, 20 nt, Artificial Sequence
  Synthetic oligonucleotide: CBLB-3294
ugccuugcaggagguggggg

SEQ ID NO: 33417 - RNA, 20 nt, Artificial Sequence
  Synthetic oligonucleotide: CBLB-3295
auuguuccuggaauuugggg

SEQ ID NO: 33418 - RNA, 20 nt, Artificial Sequence
  Synthetic oligonucleotide: CBLB-3296
guuaucuuuauccugauggg

SEQ ID NO: 33419 - RNA, 20 nt, Artificial Sequence
  Synthetic oligonucleotide: CBLB-3297
uaaagguuucaaccuaaugg

SEQ ID NO: 33420 - RNA, 20 nt, Artificial Sequence
  Synthetic oligonucleotide: CBLB-3298
gggggaggugggagagaugg

SEQ ID NO: 33421 - RNA, 20 nt, Artificial Sequence
  Synthetic oligonucleotide: CBLB-3299
gggaggagggugguaacugg

SEQ ID NO: 33422 - RNA, 20 nt, Artificial Sequence
  Synthetic oligonucleotide: CBLB-3300
uuuagacguggggauacugg

SEQ ID NO: 33423 - RNA, 20 nt, Artificial Sequence
  Synthetic oligonucleotide: CBLB-3301
ccaggccagagcuaaucugg

SEQ ID NO: 33424 - RNA, 20 nt, Artificial Sequence
  Synthetic oligonucleotide: CBLB-3302
cuacucagucuauugucugg

SEQ ID NO: 33425 - RNA, 20 nt, Artificial Sequence
  Synthetic oligonucleotide: CBLB-3303
gguggaggucuuucaggugg

SEQ ID NO: 33426 - RNA, 20 nt, Artificial Sequence
  Synthetic oligonucleotide: CBLB-3304
cuaugccuugcaggaggugg

SEQ ID NO: 33427 - RNA, 20 nt, Artificial Sequence
  Synthetic oligonucleotide: CBLB-3305
ggucuuucagguggcggugg

SEQ ID NO: 33428 - RNA, 20 nt, Artificial Sequence
  Synthetic oligonucleotide: CBLB-3306
uugucuggugggauuggugg

SEQ ID NO: 33429 - RNA, 20 nt, Artificial Sequence
  Synthetic oligonucleotide: CBLB-3307
caugcuucaagaggcauugg

SEQ ID NO: 33430 - RNA, 20 nt, Artificial Sequence
  Synthetic oligonucleotide: CBLB-3308
cuauugucuggugggauugg

SEQ ID NO: 33431 - RNA, 20 nt, Artificial Sequence
  Synthetic oligonucleotide: CBLB-3309
uuuggauugucccgaguugg

SEQ ID NO: 33432 - RNA, 20 nt, Artificial Sequence
  Synthetic oligonucleotide: CBLB-3310
aaugccgccucaggcccaug

SEQ ID NO: 33433 - RNA, 20 nt, Artificial Sequence
  Synthetic oligonucleotide: CBLB-3311
gaguagacacauccaucaug

SEQ ID NO: 33434 - RNA, 20 nt, Artificial Sequence
  Synthetic oligonucleotide: CBLB-3312
guaacuuuuauauggucaug

SEQ ID NO: 33435 - RNA, 20 nt, Artificial Sequence
  Synthetic oligonucleotide: CBLB-3313
auucagacagugccuucaug

SEQ ID NO: 33436 - RNA, 20 nt, Artificial Sequence
  Synthetic oligonucleotide: CBLB-3314
acggguggcaggcuuagaug

SEQ ID NO: 33437 - RNA, 20 nt, Artificial Sequence
  Synthetic oligonucleotide: CBLB-3315
gcucugacccagugcuuaug

SEQ ID NO: 33438 - RNA, 20 nt, Artificial Sequence
  Synthetic oligonucleotide: CBLB-3316
ugaaauaagggcuuguuaug

SEQ ID NO: 33439 - RNA, 20 nt, Artificial Sequence
  Synthetic oligonucleotide: CBLB-3317
ggccauuggcuaugugacug

SEQ ID NO: 33440 - RNA, 20 nt, Artificial Sequence
  Synthetic oligonucleotide: CBLB-3318
ggcauaguuagaucucccug

SEQ ID NO: 33441 - RNA, 20 nt, Artificial Sequence
  Synthetic oligonucleotide: CBLB-3319
cagaaaaccccaugggccug

SEQ ID NO: 33442 - RNA, 20 nt, Artificial Sequence
  Synthetic oligonucleotide: CBLB-3320
aagaaaaagauccuguccug

SEQ ID NO: 33443 - RNA, 20 nt, Artificial Sequence
  Synthetic oligonucleotide: CBLB-3321
aaaaaucauuuuuauagcug

SEQ ID NO: 33444 - RNA, 20 nt, Artificial Sequence
  Synthetic oligonucleotide: CBLB-3322
aucuggagugggucaggcug

SEQ ID NO: 33445 - RNA, 20 nt, Artificial Sequence
  Synthetic oligonucleotide: CBLB-3323
caggcccaugggguuuucug

SEQ ID NO: 33446 - RNA, 20 nt, Artificial Sequence
  Synthetic oligonucleotide: CBLB-3324
cugcuauagauuuagacgug

SEQ ID NO: 33447 - RNA, 20 nt, Artificial Sequence
  Synthetic oligonucleotide: CBLB-3325
ggacgacgaugaugaucgug

SEQ ID NO: 33448 - RNA, 20 nt, Artificial Sequence
  Synthetic oligonucleotide: CBLB-3326
acuaugccuugcaggaggug

SEQ ID NO: 33449 - RNA, 20 nt, Artificial Sequence
  Synthetic oligonucleotide: CBLB-3327
gaugucaagauugagccuug

SEQ ID NO: 33450 - RNA, 20 nt, Artificial Sequence
  Synthetic oligonucleotide: CBLB-3328
uuuuuuauuuuuuagccuug

SEQ ID NO: 33451 - RNA, 20 nt, Artificial Sequence
  Synthetic oligonucleotide: CBLB-3329
guuugggacuaaucagcuug

SEQ ID NO: 33452 - RNA, 20 nt, Artificial Sequence
  Synthetic oligonucleotide: CBLB-3330
cauauuguuccuggaauuug

SEQ ID NO: 33453 - RNA, 20 nt, Artificial Sequence
  Synthetic oligonucleotide: CBLB-3331
agccuuggggcucuauuuug

SEQ ID NO: 33454 - RNA, 20 nt, Artificial Sequence
  Synthetic oligonucleotide: CBLB-3332
uaugaauuauauugugaaau

SEQ ID NO: 33455 - RNA, 20 nt, Artificial Sequence
  Synthetic oligonucleotide: CBLB-3333
ggggcucuauuuugcggaau

SEQ ID NO: 33456 - RNA, 20 nt, Artificial Sequence
  Synthetic oligonucleotide: CBLB-3334
aggaguccuugaugaugaau

SEQ ID NO: 33457 - RNA, 20 nt, Artificial Sequence
  Synthetic oligonucleotide: CBLB-3335
aaagguaaaacuagaaacau

SEQ ID NO: 33458 - RNA, 20 nt, Artificial Sequence
  Synthetic oligonucleotide: CBLB-3336
uucacuuccaaggugaccau

SEQ ID NO: 33459 - RNA, 20 nt, Artificial Sequence
  Synthetic oligonucleotide: CBLB-3337
aucucccuggaauugaccau

SEQ ID NO: 33460 - RNA, 20 nt, Artificial Sequence
  Synthetic oligonucleotide: CBLB-3338
uucaccacagaaaaccccau

SEQ ID NO: 33461 - RNA, 20 nt, Artificial Sequence
  Synthetic oligonucleotide: CBLB-3339
caaugccgccucaggcccau

SEQ ID NO: 33462 - RNA, 20 nt, Artificial Sequence
  Synthetic oligonucleotide: CBLB-3340
cgauugggacagugggccau

SEQ ID NO: 33463 - RNA, 20 nt, Artificial Sequence
  Synthetic oligonucleotide: CBLB-3341
ucgucguccaagucuagcau

SEQ ID NO: 33464 - RNA, 20 nt, Artificial Sequence
  Synthetic oligonucleotide: CBLB-3342
caccaugcuucaagaggcau

SEQ ID NO: 33465 - RNA, 20 nt, Artificial Sequence
  Synthetic oligonucleotide: CBLB-3343
ccaugggccugaggcggcau

SEQ ID NO: 33466 - RNA, 20 nt, Artificial Sequence
  Synthetic oligonucleotide: CBLB-3344
gcaaaaauugcaaaacucau

SEQ ID NO: 33467 - RNA, 20 nt, Artificial Sequence
  Synthetic oligonucleotide: CBLB-3345
ccgguuaaguugcacucgau

SEQ ID NO: 33468 - RNA, 20 nt, Artificial Sequence
  Synthetic oligonucleotide: CBLB-3346
uuggcuaugugacuggggau

SEQ ID NO: 33469 - RNA, 20 nt, Artificial Sequence
  Synthetic oligonucleotide: CBLB-3347
agucuauugucuggugggau

SEQ ID NO: 33470 - RNA, 20 nt, Artificial Sequence
  Synthetic oligonucleotide: CBLB-3348
caaauagaaaaugcauggau

SEQ ID NO: 33471 - RNA, 20 nt, Artificial Sequence
  Synthetic oligonucleotide: CBLB-3349
ucaguuaucuuuauccugau

SEQ ID NO: 33472 - RNA, 20 nt, Artificial Sequence
  Synthetic oligonucleotide: CBLB-3350
cuccuguucgguaagaguau

SEQ ID NO: 33473 - RNA, 20 nt, Artificial Sequence
  Synthetic oligonucleotide: CBLB-3351
ucaaagggguccacgauuau

SEQ ID NO: 33474 - RNA, 20 nt, Artificial Sequence
  Synthetic oligonucleotide: CBLB-3352
caccugccaggccuccaacu

SEQ ID NO: 33475 - RNA, 20 nt, Artificial Sequence
  Synthetic oligonucleotide: CBLB-3353
uagcaggaggcaaaggaacu

SEQ ID NO: 33476 - RNA, 20 nt, Artificial Sequence
  Synthetic oligonucleotide: CBLB-3354
uguguuuccgcauaagcacu

SEQ ID NO: 33477 - RNA, 20 nt, Artificial Sequence
  Synthetic oligonucleotide: CBLB-3355
uggcaugccgaugcuagacu

SEQ ID NO: 33478 - RNA, 20 nt, Artificial Sequence
  Synthetic oligonucleotide: CBLB-3356
gggccauuggcuaugugacu

SEQ ID NO: 33479 - RNA, 20 nt, Artificial Sequence
  Synthetic oligonucleotide: CBLB-3357
caucaucaucuuccucuacu

SEQ ID NO: 33480 - RNA, 20 nt, Artificial Sequence
  Synthetic oligonucleotide: CBLB-3358
gucuuuuccaauggucaccu

SEQ ID NO: 33481 - RNA, 20 nt, Artificial Sequence
  Synthetic oligonucleotide: CBLB-3359
guuuuggagagcccuccccu

SEQ ID NO: 33482 - RNA, 20 nt, Artificial Sequence
  Synthetic oligonucleotide: CBLB-3360
cucuugaagcauggugcccu

SEQ ID NO: 33483 - RNA, 20 nt, Artificial Sequence
  Synthetic oligonucleotide: CBLB-3361
auuuuuuuauuuuuuagccu

SEQ ID NO: 33484 - RNA, 20 nt, Artificial Sequence
  Synthetic oligonucleotide: CBLB-3362
cuugugggaugucgacuccu

SEQ ID NO: 33485 - RNA, 20 nt, Artificial Sequence
  Synthetic oligonucleotide: CBLB-3363
aacaaaacucacuuuaugcu

SEQ ID NO: 33486 - RNA, 20 nt, Artificial Sequence
  Synthetic oligonucleotide: CBLB-3364
uuaagggaggagguggugcu

SEQ ID NO: 33487 - RNA, 20 nt, Artificial Sequence
  Synthetic oligonucleotide: CBLB-3365
aagguuuuguguuauccucu

SEQ ID NO: 33488 - RNA, 20 nt, Artificial Sequence
  Synthetic oligonucleotide: CBLB-3366
caccuggagccuucaucucu

SEQ ID NO: 33489 - RNA, 20 nt, Artificial Sequence
  Synthetic oligonucleotide: CBLB-3367
aggcuguggcuuucuucucu

SEQ ID NO: 33490 - RNA, 20 nt, Artificial Sequence
  Synthetic oligonucleotide: CBLB-3368
gaggagggaaggcaaauucu

SEQ ID NO: 33491 - RNA, 20 nt, Artificial Sequence
  Synthetic oligonucleotide: CBLB-3369
ggcaacuucgacauuauucu

SEQ ID NO: 33492 - RNA, 20 nt, Artificial Sequence
  Synthetic oligonucleotide: CBLB-3370
uaaguaugagaaauggaagu

SEQ ID NO: 33493 - RNA, 20 nt, Artificial Sequence
  Synthetic oligonucleotide: CBLB-3371
uugcacucgauugggacagu

SEQ ID NO: 33494 - RNA, 20 nt, Artificial Sequence
  Synthetic oligonucleotide: CBLB-3372
aauggaaggcacaguagagu

SEQ ID NO: 33495 - RNA, 20 nt, Artificial Sequence
  Synthetic oligonucleotide: CBLB-3373
ugcuuuggauugucccgagu

SEQ ID NO: 33496 - RNA, 20 nt, Artificial Sequence
  Synthetic oligonucleotide: CBLB-3374
uuuucuauuuguuuaggagu

SEQ ID NO: 33497 - RNA, 20 nt, Artificial Sequence
  Synthetic oligonucleotide: CBLB-3375
uuagaugugggaucuggagu

SEQ ID NO: 33498 - RNA, 20 nt, Artificial Sequence
  Synthetic oligonucleotide: CBLB-3376
uccuucauguucaggugagu

SEQ ID NO: 33499 - RNA, 20 nt, Artificial Sequence
  Synthetic oligonucleotide: CBLB-3377
gcugcuauagauuuagacgu

SEQ ID NO: 33500 - RNA, 20 nt, Artificial Sequence
  Synthetic oligonucleotide: CBLB-3378
ucuaccuuuggugaacccgu

SEQ ID NO: 33501 - RNA, 20 nt, Artificial Sequence
  Synthetic oligonucleotide: CBLB-3379
uuuuucuucuuccuucaggu

SEQ ID NO: 33502 - RNA, 20 nt, Artificial Sequence
  Synthetic oligonucleotide: CBLB-3380
gacuaugccuugcaggaggu

SEQ ID NO: 33503 - RNA, 20 nt, Artificial Sequence
  Synthetic oligonucleotide: CBLB-3381
uugcaggaggugggggaggu

SEQ ID NO: 33504 - RNA, 20 nt, Artificial Sequence
  Synthetic oligonucleotide: CBLB-3382
guccuugaugaugaaucggu

SEQ ID NO: 33505 - RNA, 20 nt, Artificial Sequence
  Synthetic oligonucleotide: CBLB-3383
ugaauucagggaaacagggu

SEQ ID NO: 33506 - RNA, 20 nt, Artificial Sequence
  Synthetic oligonucleotide: CBLB-3384
uggauuuuuuuuccccuggu

SEQ ID NO: 33507 - RNA, 20 nt, Artificial Sequence
  Synthetic oligonucleotide: CBLB-3385
uacucagucuauugucuggu

SEQ ID NO: 33508 - RNA, 20 nt, Artificial Sequence
  Synthetic oligonucleotide: CBLB-3386
cggguggcaggcuuagaugu

SEQ ID NO: 33509 - RNA, 20 nt, Artificial Sequence
  Synthetic oligonucleotide: CBLB-3387
uuuugugagauuucgucugu

SEQ ID NO: 33510 - RNA, 20 nt, Artificial Sequence
  Synthetic oligonucleotide: CBLB-3388
uuuauauggucaugaggugu

SEQ ID NO: 33511 - RNA, 20 nt, Artificial Sequence
  Synthetic oligonucleotide: CBLB-3389
augucaagauugagccuugu

SEQ ID NO: 33512 - RNA, 20 nt, Artificial Sequence
  Synthetic oligonucleotide: CBLB-3390
uuugggacuaaucagcuugu

SEQ ID NO: 33513 - RNA, 20 nt, Artificial Sequence
  Synthetic oligonucleotide: CBLB-3391
uucauauuguuccuggaauu

SEQ ID NO: 33514 - RNA, 20 nt, Artificial Sequence
  Synthetic oligonucleotide: CBLB-3392
aaagugaguuuuguugaauu

SEQ ID NO: 33515 - RNA, 20 nt, Artificial Sequence
  Synthetic oligonucleotide: CBLB-3393
ucucccuggaauugaccauu

SEQ ID NO: 33516 - RNA, 20 nt, Artificial Sequence
  Synthetic oligonucleotide: CBLB-3394
gaucuucucaucccuccauu

SEQ ID NO: 33517 - RNA, 20 nt, Artificial Sequence
  Synthetic oligonucleotide: CBLB-3395
cgguuaaguugcacucgauu

SEQ ID NO: 33518 - RNA, 20 nt, Artificial Sequence
  Synthetic oligonucleotide: CBLB-3396
uaauaaaauugaucuaccuu

SEQ ID NO: 33519 - RNA, 20 nt, Artificial Sequence
  Synthetic oligonucleotide: CBLB-3397
ugcagcaucauugaccccuu

SEQ ID NO: 33520 - RNA, 20 nt, Artificial Sequence
  Synthetic oligonucleotide: CBLB-3398
uuuuuuuauuuuuuagccuu

SEQ ID NO: 33521 - RNA, 20 nt, Artificial Sequence
  Synthetic oligonucleotide: CBLB-3399
uugagugaagaaccaugcuu

SEQ ID NO: 33522 - RNA, 20 nt, Artificial Sequence
  Synthetic oligonucleotide: CBLB-3400
cuaccuuuggugaacccguu

SEQ ID NO: 33523 - RNA, 20 nt, Artificial Sequence
  Synthetic oligonucleotide: CBLB-3401
aaagucuuaccuuccggguu

SEQ ID NO: 33524 - RNA, 20 nt, Artificial Sequence
  Synthetic oligonucleotide: CBLB-3402
auaauguaaaaccuccuguu

SEQ ID NO: 33525 - RNA, 20 nt, Artificial Sequence
  Synthetic oligonucleotide: CBLB-3403
uggugcccucgggauguguu

SEQ ID NO: 33526 - RNA, 20 nt, Artificial Sequence
  Synthetic oligonucleotide: CBLB-3404
ucauauuguuccuggaauuu

SEQ ID NO: 33527 - RNA, 20 nt, Artificial Sequence
  Synthetic oligonucleotide: CBLB-3405
auguuucuaguuuuaccuuu

SEQ ID NO: 33528 - RNA, 20 nt, Artificial Sequence
  Synthetic oligonucleotide: CBLB-3406
uuuacucugaacuguccuuu

SEQ ID NO: 33529 - RNA, 20 nt, Artificial Sequence
  Synthetic oligonucleotide: CBLB-3407
cucgcugugauuccagguuu

SEQ ID NO: 33530 - RNA, 20 nt, Artificial Sequence
  Synthetic oligonucleotide: CBLB-3408
guccugcgcggucgugguuu

SEQ ID NO: 33531 - RNA, 20 nt, Artificial Sequence
  Synthetic oligonucleotide: CBLB-3409
ggugcccucgggauguguuu

SEQ ID NO: 33532 - RNA, 20 nt, Artificial Sequence
  Synthetic oligonucleotide: CBLB-3410
caugcauuuucuauuuguuu

SEQ ID NO: 33533 - RNA, 20 nt, Artificial Sequence
  Synthetic oligonucleotide: CBLB-3411
gaauucuggagaaaguuuuu

SEQ ID NO: 33534 - RNA, 21 nt, Artificial Sequence
  Synthetic oligonucleotide: CBLB-3412
auuuuaaaguacucauucuca

SEQ ID NO: 33535 - RNA, 22 nt, Artificial Sequence
  Synthetic oligonucleotide: CBLB-3413
gauuuuaaaguacucauucuca

SEQ ID NO: 33536 - RNA, 23 nt, Artificial Sequence
  Synthetic oligonucleotide: CBLB-3414
agauuuuaaaguacucauucuca

SEQ ID NO: 33537 - RNA, 24 nt, Artificial Sequence
  Synthetic oligonucleotide: CBLB-3415
uagauuuuaaaguacucauucuca

SEQ ID NO: 33538 - RNA, 18 nt, Artificial Sequence
  Synthetic oligonucleotide: CBLB-3416
caggguuucugccauuca

SEQ ID NO: 33539 - RNA, 19 nt, Artificial Sequence
  Synthetic oligonucleotide: CBLB-3417
ccaggguuucugccauuca

SEQ ID NO: 33540 - RNA, 20 nt, Artificial Sequence
  Synthetic oligonucleotide: CBLB-3418
accaggguuucugccauuca

SEQ ID NO: 33541 - RNA, 21 nt, Artificial Sequence
  Synthetic oligonucleotide: CBLB-3419
caccaggguuucugccauuca

SEQ ID NO: 33542 - RNA, 22 nt, Artificial Sequence
  Synthetic oligonucleotide: CBLB-3420
ccaccaggguuucugccauuca

SEQ ID NO: 33543 - RNA, 23 nt, Artificial Sequence
  Synthetic oligonucleotide: CBLB-3421
accaccaggguuucugccauuca

SEQ ID NO: 33544 - RNA, 24 nt, Artificial Sequence
  Synthetic oligonucleotide: CBLB-3422
gaccaccaggguuucugccauuca

SEQ ID NO: 33545 - RNA, 18 nt, Artificial Sequence
  Synthetic oligonucleotide: CBLB-3423
ucugcggcagcuugcuua

SEQ ID NO: 33546 - RNA, 19 nt, Artificial Sequence
  Synthetic oligonucleotide: CBLB-3424
aucugcggcagcuugcuua

SEQ ID NO: 33547 - RNA, 20 nt, Artificial Sequence
  Synthetic oligonucleotide: CBLB-2530
gaucugcggcagcuugcuua

SEQ ID NO: 33548 - RNA, 21 nt, Artificial Sequence
  Synthetic oligonucleotide: CBLB-3425
cgaucugcggcagcuugcuua

SEQ ID NO: 33549 - RNA, 22 nt, Artificial Sequence
  Synthetic oligonucleotide: CBLB-3426
gcgaucugcggcagcuugcuua

SEQ ID NO: 33550 - RNA, 23 nt, Artificial Sequence
  Synthetic oligonucleotide: CBLB-3427
ugcgaucugcggcagcuugcuua

SEQ ID NO: 33551 - RNA, 24 nt, Artificial Sequence
  Synthetic oligonucleotide: CBLB-3428
cugcgaucugcggcagcuugcuua

SEQ ID NO: 33552 - RNA, 21 nt, Artificial Sequence
  Synthetic oligonucleotide: CBLB-3429
auucucuccuugccuucuuua

SEQ ID NO: 33553 - RNA, 22 nt, Artificial Sequence
  Synthetic oligonucleotide: CBLB-3430
cauucucuccuugccuucuuua

SEQ ID NO: 33554 - RNA, 23 nt, Artificial Sequence
  Synthetic oligonucleotide: CBLB-3431
acauucucuccuugccuucuuua

SEQ ID NO: 33555 - RNA, 24 nt, Artificial Sequence
  Synthetic oligonucleotide: CBLB-3432
uacauucucuccuugccuucuuua

SEQ ID NO: 33556 - RNA, 18 nt, Artificial Sequence
  Synthetic oligonucleotide: CBLB-3433
gauuuccuccucgaccac

SEQ ID NO: 33557 - RNA, 19 nt, Artificial Sequence
  Synthetic oligonucleotide: CBLB-3434
ggauuuccuccucgaccac

SEQ ID NO: 33558 - RNA, 20 nt, Artificial Sequence
  Synthetic oligonucleotide: CBLB-3435
gggauuuccuccucgaccac

SEQ ID NO: 33559 - RNA, 21 nt, Artificial Sequence
  Synthetic oligonucleotide: CBLB-3436
ggggauuuccuccucgaccac

SEQ ID NO: 33560 - RNA, 22 nt, Artificial Sequence
  Synthetic oligonucleotide: CBLB-3437
cggggauuuccuccucgaccac

SEQ ID NO: 33561 - RNA, 23 nt, Artificial Sequence
  Synthetic oligonucleotide: CBLB-3438
ucggggauuuccuccucgaccac

SEQ ID NO: 33562 - RNA, 24 nt, Artificial Sequence
  Synthetic oligonucleotide: CBLB-3439
uucggggauuuccuccucgaccac

SEQ ID NO: 33563 - RNA, 21 nt, Artificial Sequence
  Synthetic oligonucleotide: CBLB-3440
ccauucauugaguuugccauc

SEQ ID NO: 33564 - RNA, 22 nt, Artificial Sequence
  Synthetic oligonucleotide: CBLB-3441
gccauucauugaguuugccauc

SEQ ID NO: 33565 - RNA, 23 nt, Artificial Sequence
  Synthetic oligonucleotide: CBLB-3442
ugccauucauugaguuugccauc

SEQ ID NO: 33566 - RNA, 24 nt, Artificial Sequence
  Synthetic oligonucleotide: CBLB-3443
cugccauucauugaguuugccauc

SEQ ID NO: 33567 - RNA, 21 nt, Artificial Sequence
  Synthetic oligonucleotide: CBLB-3444
cuuaggggguccaacugcauc

SEQ ID NO: 33568 - RNA, 22 nt, Artificial Sequence
  Synthetic oligonucleotide: CBLB-3445
gcuuaggggguccaacugcauc

SEQ ID NO: 33569 - RNA, 23 nt, Artificial Sequence
  Synthetic oligonucleotide: CBLB-3446
ugcuuaggggguccaacugcauc

SEQ ID NO: 33570 - RNA, 24 nt, Artificial Sequence
  Synthetic oligonucleotide: CBLB-3447
uugcuuaggggguccaacugcauc

SEQ ID NO: 33571 - RNA, 21 nt, Artificial Sequence
  Synthetic oligonucleotide: CBLB-3448
uacccaaaauucgaccuuuuc

SEQ ID NO: 33572 - RNA, 22 nt, Artificial Sequence
  Synthetic oligonucleotide: CBLB-3449
auacccaaaauucgaccuuuuc

SEQ ID NO: 33573 - RNA, 23 nt, Artificial Sequence
  Synthetic oligonucleotide: CBLB-3450
aauacccaaaauucgaccuuuuc

SEQ ID NO: 33574 - RNA, 24 nt, Artificial Sequence
  Synthetic oligonucleotide: CBLB-3451
uaauacccaaaauucgaccuuuuc

SEQ ID NO: 33575 - RNA, 21 nt, Artificial Sequence
  Synthetic oligonucleotide: CBLB-3452
ggcuauuuuucaacugaaguu

SEQ ID NO: 33576 - RNA, 22 nt, Artificial Sequence
  Synthetic oligonucleotide: CBLB-3453
gggcuauuuuucaacugaaguu

SEQ ID NO: 33577 - RNA, 23 nt, Artificial Sequence
  Synthetic oligonucleotide: CBLB-3454
ugggcuauuuuucaacugaaguu

SEQ ID NO: 33578 - RNA, 24 nt, Artificial Sequence
  Synthetic oligonucleotide: CBLB-3455
gugggcuauuuuucaacugaaguu

SEQ ID NO: 33579 - RNA, 21 nt, Artificial Sequence
  Synthetic oligonucleotide: CBLB-3456
aacuugcccaacucagugaga

SEQ ID NO: 33580 - RNA, 22 nt, Artificial Sequence
  Synthetic oligonucleotide: CBLB-3457
aaacuugcccaacucagugaga

SEQ ID NO: 33581 - RNA, 23 nt, Artificial Sequence
  Synthetic oligonucleotide: CBLB-3458
gaaacuugcccaacucagugaga

SEQ ID NO: 33582 - RNA, 24 nt, Artificial Sequence
  Synthetic oligonucleotide: CBLB-3459
agaaacuugcccaacucagugaga

SEQ ID NO: 33583 - RNA, 21 nt, Artificial Sequence
  Synthetic oligonucleotide: CBLB-3460
acucuuuaaagaaggcaagga

SEQ ID NO: 33584 - RNA, 22 nt, Artificial Sequence
  Synthetic oligonucleotide: CBLB-3461
gacucuuuaaagaaggcaagga

SEQ ID NO: 33585 - RNA, 23 nt, Artificial Sequence
  Synthetic oligonucleotide: CBLB-3462
agacucuuuaaagaaggcaagga

SEQ ID NO: 33586 - RNA, 24 nt, Artificial Sequence
  Synthetic oligonucleotide: CBLB-3463
aagacucuuuaaagaaggcaagga

SEQ ID NO: 33587 - RNA, 18 nt, Artificial Sequence
  Synthetic oligonucleotide: CBLB-3464
cagcauuuacgacuuaua

SEQ ID NO: 33588 - RNA, 19 nt, Artificial Sequence
  Synthetic oligonucleotide: CBLB-3465
ucagcauuuacgacuuaua

SEQ ID NO: 33589 - RNA, 20 nt, Artificial Sequence
  Synthetic oligonucleotide: CBLB-3466
aucagcauuuacgacuuaua

SEQ ID NO: 33590 - RNA, 21 nt, Artificial Sequence
  Synthetic oligonucleotide: CBLB-3467
uaucagcauuuacgacuuaua

SEQ ID NO: 33591 - RNA, 22 nt, Artificial Sequence
  Synthetic oligonucleotide: CBLB-3468
auaucagcauuuacgacuuaua

SEQ ID NO: 33592 - RNA, 23 nt, Artificial Sequence
  Synthetic oligonucleotide: CBLB-3469
cauaucagcauuuacgacuuaua

SEQ ID NO: 33593 - RNA, 24 nt, Artificial Sequence
  Synthetic oligonucleotide: CBLB-3470
acauaucagcauuuacgacuuaua

SEQ ID NO: 33594 - RNA, 18 nt, Artificial Sequence
  Synthetic oligonucleotide: CBLB-3471
agucacaggacagguaag

SEQ ID NO: 33595 - RNA, 19 nt, Artificial Sequence
  Synthetic oligonucleotide: CBLB-3472
cagucacaggacagguaag

SEQ ID NO: 33596 - RNA, 20 nt, Artificial Sequence
  Synthetic oligonucleotide: CBLB-3473
acagucacaggacagguaag

SEQ ID NO: 33597 - RNA, 21 nt, Artificial Sequence
  Synthetic oligonucleotide: CBLB-3474
aacagucacaggacagguaag

SEQ ID NO: 33598 - RNA, 22 nt, Artificial Sequence
  Synthetic oligonucleotide: CBLB-3475
gaacagucacaggacagguaag

SEQ ID NO: 33599 - RNA, 23 nt, Artificial Sequence
  Synthetic oligonucleotide: CBLB-3476
agaacagucacaggacagguaag

SEQ ID NO: 33600 - RNA, 24 nt, Artificial Sequence
  Synthetic oligonucleotide: CBLB-3477
aagaacagucacaggacagguaag

SEQ ID NO: 33601 - RNA, 18 nt, Artificial Sequence
  Synthetic oligonucleotide: CBLB-3478
aggaaauccccgaaaagg

SEQ ID NO: 33602 - RNA, 19 nt, Artificial Sequence
  Synthetic oligonucleotide: CBLB-3479
gaggaaauccccgaaaagg

SEQ ID NO: 33603 - RNA, 20 nt, Artificial Sequence
  Synthetic oligonucleotide: CBLB-3480
ggaggaaauccccgaaaagg

SEQ ID NO: 33604 - RNA, 21 nt, Artificial Sequence
  Synthetic oligonucleotide: CBLB-3481
aggaggaaauccccgaaaagg

SEQ ID NO: 33605 - RNA, 22 nt, Artificial Sequence
  Synthetic oligonucleotide: CBLB-3482
gaggaggaaauccccgaaaagg

SEQ ID NO: 33606 - RNA, 23 nt, Artificial Sequence
  Synthetic oligonucleotide: CBLB-3483
cgaggaggaaauccccgaaaagg

SEQ ID NO: 33607 - RNA, 24 nt, Artificial Sequence
  Synthetic oligonucleotide: CBLB-3484
ucgaggaggaaauccccgaaaagg

SEQ ID NO: 33608 - RNA, 21 nt, Artificial Sequence
  Synthetic oligonucleotide: CBLB-3485
cagaaacuugcccaacucagu

SEQ ID NO: 33609 - RNA, 22 nt, Artificial Sequence
  Synthetic oligonucleotide: CBLB-3486
ccagaaacuugcccaacucagu

SEQ ID NO: 33610 - RNA, 23 nt, Artificial Sequence
  Synthetic oligonucleotide: CBLB-3487
accagaaacuugcccaacucagu

SEQ ID NO: 33611 - RNA, 24 nt, Artificial Sequence
  Synthetic oligonucleotide: CBLB-3488
aaccagaaacuugcccaacucagu

SEQ ID NO: 33612 - RNA, 18 nt, Artificial Sequence
  Synthetic oligonucleotide: CBLB-3489
ccccgaaaaggucgaauu

SEQ ID NO: 33613 - RNA, 19 nt, Artificial Sequence
  Synthetic oligonucleotide: CBLB-3490
uccccgaaaaggucgaauu

SEQ ID NO: 33614 - RNA, 20 nt, Artificial Sequence
  Synthetic oligonucleotide: CBLB-3491
auccccgaaaaggucgaauu

SEQ ID NO: 33615 - RNA, 21 nt, Artificial Sequence
  Synthetic oligonucleotide: CBLB-3492
aauccccgaaaaggucgaauu

SEQ ID NO: 33616 - RNA, 22 nt, Artificial Sequence
  Synthetic oligonucleotide: CBLB-3493
aaauccccgaaaaggucgaauu

SEQ ID NO: 33617 - RNA, 23 nt, Artificial Sequence
  Synthetic oligonucleotide: CBLB-3494
gaaauccccgaaaaggucgaauu

SEQ ID NO: 33618 - RNA, 24 nt, Artificial Sequence
  Synthetic oligonucleotide: CBLB-3495
ggaaauccccgaaaaggucgaauu

SEQ ID NO: 33619 - RNA, 21 nt, Artificial Sequence
  Synthetic oligonucleotide: CBLB-3496
uuggguauuauugaugcuauu

SEQ ID NO: 33620 - RNA, 22 nt, Artificial Sequence
  Synthetic oligonucleotide: CBLB-3497
uuuggguauuauugaugcuauu

SEQ ID NO: 33621 - RNA, 23 nt, Artificial Sequence
  Synthetic oligonucleotide: CBLB-3498
uuuuggguauuauugaugcuauu

SEQ ID NO: 33622 - RNA, 24 nt, Artificial Sequence
  Synthetic oligonucleotide: CBLB-3499
auuuuggguauuauugaugcuauu

SEQ ID NO: 33623 - RNA, 18 nt, Artificial Sequence
  Synthetic oligonucleotide: CBLB-3500
uuaaaguacucauucuca

SEQ ID NO: 33624 - RNA, 19 nt, Artificial Sequence
  Synthetic oligonucleotide: CBLB-3501
uuuaaaguacucauucuca

SEQ ID NO: 33625 - RNA, 20 nt, Artificial Sequence
  Synthetic oligonucleotide: CBLB-3502
uuuuaaaguacucauucuca

SEQ ID NO: 33626 - RNA, 18 nt, Artificial Sequence
  Synthetic oligonucleotide: CBLB-3503
cucuccuugccuucuuua

SEQ ID NO: 33627 - RNA, 19 nt, Artificial Sequence
  Synthetic oligonucleotide: CBLB-3504
ucucuccuugccuucuuua

SEQ ID NO: 33628 - RNA, 20 nt, Artificial Sequence
  Synthetic oligonucleotide: CBLB-3505
uucucuccuugccuucuuua

SEQ ID NO: 33629 - RNA, 18 nt, Artificial Sequence
  Synthetic oligonucleotide: CBLB-3506
uucauugaguuugccauc

SEQ ID NO: 33630 - RNA, 19 nt, Artificial Sequence
  Synthetic oligonucleotide: CBLB-3507
auucauugaguuugccauc

SEQ ID NO: 33631 - RNA, 20 nt, Artificial Sequence
  Synthetic oligonucleotide: CBLB-2595
cauucauugaguuugccauc

SEQ ID NO: 33632 - RNA, 18 nt, Artificial Sequence
  Synthetic oligonucleotide: CBLB-3508
aggggguccaacugcauc

SEQ ID NO: 33633 - RNA, 19 nt, Artificial Sequence
  Synthetic oligonucleotide: CBLB-3509
uaggggguccaacugcauc

SEQ ID NO: 33634 - RNA, 20 nt, Artificial Sequence
  Synthetic oligonucleotide: CBLB-3510
uuaggggguccaacugcauc

SEQ ID NO: 33635 - RNA, 18 nt, Artificial Sequence
  Synthetic oligonucleotide: CBLB-3511
ccaaaauucgaccuuuuc

SEQ ID NO: 33636 - RNA, 19 nt, Artificial Sequence
  Synthetic oligonucleotide: CBLB-3512
cccaaaauucgaccuuuuc

SEQ ID NO: 33637 - RNA, 20 nt, Artificial Sequence
  Synthetic oligonucleotide: CBLB-2597
acccaaaauucgaccuuuuc

SEQ ID NO: 33638 - RNA, 18 nt, Artificial Sequence
  Synthetic oligonucleotide: CBLB-3513
uauuuuucaacugaaguu

SEQ ID NO: 33639 - RNA, 19 nt, Artificial Sequence
  Synthetic oligonucleotide: CBLB-3514
cuauuuuucaacugaaguu

SEQ ID NO: 33640 - RNA, 20 nt, Artificial Sequence
  Synthetic oligonucleotide: CBLB-2610
gcuauuuuucaacugaaguu

SEQ ID NO: 33641 - RNA, 18 nt, Artificial Sequence
  Synthetic oligonucleotide: CBLB-3515
uuccagauggcaaacuca

SEQ ID NO: 33642 - RNA, 19 nt, Artificial Sequence
  Synthetic oligonucleotide: CBLB-3516
auuccagauggcaaacuca

SEQ ID NO: 33643 - RNA, 20 nt, Artificial Sequence
  Synthetic oligonucleotide: CBLB-3517
aauuccagauggcaaacuca

SEQ ID NO: 33644 - RNA, 21 nt, Artificial Sequence
  Synthetic oligonucleotide: CBLB-3518
aaauuccagauggcaaacuca

SEQ ID NO: 33645 - RNA, 22 nt, Artificial Sequence
  Synthetic oligonucleotide: CBLB-3519
aaaauuccagauggcaaacuca

SEQ ID NO: 33646 - RNA, 23 nt, Artificial Sequence
  Synthetic oligonucleotide: CBLB-3520
uaaaauuccagauggcaaacuca

SEQ ID NO: 33647 - RNA, 24 nt, Artificial Sequence
  Synthetic oligonucleotide: CBLB-3521
cuaaaauuccagauggcaaacuca

SEQ ID NO: 33648 - RNA, 18 nt, Artificial Sequence
  Synthetic oligonucleotide: CBLB-3522
uugcccaacucagugaga

SEQ ID NO: 33649 - RNA, 19 nt, Artificial Sequence
  Synthetic oligonucleotide: CBLB-3523
cuugcccaacucagugaga

SEQ ID NO: 33650 - RNA, 20 nt, Artificial Sequence
  Synthetic oligonucleotide: CBLB-3524
acuugcccaacucagugaga

SEQ ID NO: 33651 - RNA, 18 nt, Artificial Sequence
  Synthetic oligonucleotide: CBLB-3525
cuuuaaagaaggcaagga

SEQ ID NO: 33652 - RNA, 19 nt, Artificial Sequence
  Synthetic oligonucleotide: CBLB-3526
ucuuuaaagaaggcaagga

SEQ ID NO: 33653 - RNA, 20 nt, Artificial Sequence
  Synthetic oligonucleotide: CBLB-3527
cucuuuaaagaaggcaagga

SEQ ID NO: 33654 - RNA, 18 nt, Artificial Sequence
  Synthetic oligonucleotide: CBLB-3528
aaacuugcccaacucagu

SEQ ID NO: 33655 - RNA, 19 nt, Artificial Sequence
  Synthetic oligonucleotide: CBLB-3529
gaaacuugcccaacucagu

SEQ ID NO: 33656 - RNA, 20 nt, Artificial Sequence
  Synthetic oligonucleotide: CBLB-3530
agaaacuugcccaacucagu

SEQ ID NO: 33657 - RNA, 18 nt, Artificial Sequence
  Synthetic oligonucleotide: CBLB-3531
gguauuauugaugcuauu

SEQ ID NO: 33658 - RNA, 19 nt, Artificial Sequence
  Synthetic oligonucleotide: CBLB-3532
ggguauuauugaugcuauu

SEQ ID NO: 33659 - RNA, 20 nt, Artificial Sequence
  Synthetic oligonucleotide: CBLB-3533
uggguauuauugaugcuauu

SEQ ID NO: 33660 - RNA, 18 nt, Artificial Sequence
  Synthetic oligonucleotide: CBLB-3534
uggugggcuauuuuucaa

SEQ ID NO: 33661 - RNA, 19 nt, Artificial Sequence
  Synthetic oligonucleotide: CBLB-3535
auggugggcuauuuuucaa

SEQ ID NO: 33662 - RNA, 20 nt, Artificial Sequence
  Synthetic oligonucleotide: CBLB-3536
uauggugggcuauuuuucaa

SEQ ID NO: 33663 - RNA, 21 nt, Artificial Sequence
  Synthetic oligonucleotide: CBLB-3537
auauggugggcuauuuuucaa

SEQ ID NO: 33664 - RNA, 22 nt, Artificial Sequence
  Synthetic oligonucleotide: CBLB-3538
uauauggugggcuauuuuucaa

SEQ ID NO: 33665 - RNA, 23 nt, Artificial Sequence
  Synthetic oligonucleotide: CBLB-3539
auauauggugggcuauuuuucaa

SEQ ID NO: 33666 - RNA, 24 nt, Artificial Sequence
  Synthetic oligonucleotide: CBLB-3540
uauauauggugggcuauuuuucaa

SEQ ID NO: 33667 - RNA, 18 nt, Artificial Sequence
  Synthetic oligonucleotide: CBLB-3541
cgcacaggcaacgucaga

SEQ ID NO: 33668 - RNA, 19 nt, Artificial Sequence
  Synthetic oligonucleotide: CBLB-3542
ucgcacaggcaacgucaga

SEQ ID NO: 33669 - RNA, 20 nt, Artificial Sequence
  Synthetic oligonucleotide: CBLB-3543
uucgcacaggcaacgucaga

SEQ ID NO: 33670 - RNA, 18 nt, Artificial Sequence
  Synthetic oligonucleotide: CBLB-3544
gaacuuaccacuuugucc

SEQ ID NO: 33671 - RNA, 19 nt, Artificial Sequence
  Synthetic oligonucleotide: CBLB-3545
agaacuuaccacuuugucc

SEQ ID NO: 33672 - RNA, 20 nt, Artificial Sequence
  Synthetic oligonucleotide: CBLB-3546
cagaacuuaccacuuugucc

SEQ ID NO: 33673 - RNA, 21 nt, Artificial Sequence
  Synthetic oligonucleotide: CBLB-3547
acagaacuuaccacuuugucc

SEQ ID NO: 33674 - RNA, 22 nt, Artificial Sequence
  Synthetic oligonucleotide: CBLB-3548
gacagaacuuaccacuuugucc

SEQ ID NO: 33675 - RNA, 23 nt, Artificial Sequence
  Synthetic oligonucleotide: CBLB-3549
agacagaacuuaccacuuugucc

SEQ ID NO: 33676 - RNA, 24 nt, Artificial Sequence
  Synthetic oligonucleotide: CBLB-3550
cagacagaacuuaccacuuugucc

SEQ ID NO: 33677 - RNA, 18 nt, Artificial Sequence
  Synthetic oligonucleotide: CBLB-3551
guacucauucucacugag

SEQ ID NO: 33678 - RNA, 19 nt, Artificial Sequence
  Synthetic oligonucleotide: CBLB-3552
aguacucauucucacugag

SEQ ID NO: 33679 - RNA, 20 nt, Artificial Sequence
  Synthetic oligonucleotide: CBLB-3553
aaguacucauucucacugag

SEQ ID NO: 33680 - RNA, 21 nt, Artificial Sequence
  Synthetic oligonucleotide: CBLB-3554
aaaguacucauucucacugag

SEQ ID NO: 33681 - RNA, 22 nt, Artificial Sequence
  Synthetic oligonucleotide: CBLB-3555
uaaaguacucauucucacugag

SEQ ID NO: 33682 - RNA, 23 nt, Artificial Sequence
  Synthetic oligonucleotide: CBLB-3556
uuaaaguacucauucucacugag

SEQ ID NO: 33683 - RNA, 24 nt, Artificial Sequence
  Synthetic oligonucleotide: CBLB-3557
uuuaaaguacucauucucacugag

SEQ ID NO: 33684 - RNA, 18 nt, Artificial Sequence
  Synthetic oligonucleotide: CBLB-3558
aaauaucaaguauauaug

SEQ ID NO: 33685 - RNA, 19 nt, Artificial Sequence
  Synthetic oligonucleotide: CBLB-3559
aaaauaucaaguauauaug

SEQ ID NO: 33686 - RNA, 20 nt, Artificial Sequence
  Synthetic oligonucleotide: CBLB-3560
caaaauaucaaguauauaug

SEQ ID NO: 33687 - RNA, 21 nt, Artificial Sequence
  Synthetic oligonucleotide: CBLB-3561
gcaaaauaucaaguauauaug

SEQ ID NO: 33688 - RNA, 22 nt, Artificial Sequence
  Synthetic oligonucleotide: CBLB-3562
ggcaaaauaucaaguauauaug

SEQ ID NO: 33689 - RNA, 23 nt, Artificial Sequence
  Synthetic oligonucleotide: CBLB-3563
aggcaaaauaucaaguauauaug

SEQ ID NO: 33690 - RNA, 24 nt, Artificial Sequence
  Synthetic oligonucleotide: CBLB-3564
caggcaaaauaucaaguauauaug

SEQ ID NO: 33691 - RNA, 18 nt, Artificial Sequence
  Synthetic oligonucleotide: CBLB-3565
auucauugaguuugccau

SEQ ID NO: 33692 - RNA, 19 nt, Artificial Sequence
  Synthetic oligonucleotide: CBLB-3566
cauucauugaguuugccau

SEQ ID NO: 33693 - RNA, 20 nt, Artificial Sequence
  Synthetic oligonucleotide: CBLB-3567
ccauucauugaguuugccau

SEQ ID NO: 33694 - RNA, 21 nt, Artificial Sequence
  Synthetic oligonucleotide: CBLB-3568
gccauucauugaguuugccau

SEQ ID NO: 33695 - RNA, 22 nt, Artificial Sequence
  Synthetic oligonucleotide: CBLB-3569
ugccauucauugaguuugccau

SEQ ID NO: 33696 - RNA, 23 nt, Artificial Sequence
  Synthetic oligonucleotide: CBLB-3570
cugccauucauugaguuugccau

SEQ ID NO: 33697 - RNA, 24 nt, Artificial Sequence
  Synthetic oligonucleotide: CBLB-3571
ucugccauucauugaguuugccau

SEQ ID NO: 33698 - RNA, 18 nt, Artificial Sequence
  Synthetic oligonucleotide: CBLB-3572
gaucugcggcagcuugcu

SEQ ID NO: 33699 - RNA, 19 nt, Artificial Sequence
  Synthetic oligonucleotide: CBLB-3573
cgaucugcggcagcuugcu

SEQ ID NO: 33700 - RNA, 20 nt, Artificial Sequence
  Synthetic oligonucleotide: CBLB-3574
gcgaucugcggcagcuugcu

SEQ ID NO: 33701 - RNA, 21 nt, Artificial Sequence
  Synthetic oligonucleotide: CBLB-3575
ugcgaucugcggcagcuugcu

SEQ ID NO: 33702 - RNA, 22 nt, Artificial Sequence
  Synthetic oligonucleotide: CBLB-3576
cugcgaucugcggcagcuugcu

SEQ ID NO: 33703 - RNA, 23 nt, Artificial Sequence
  Synthetic oligonucleotide: CBLB-3577
ccugcgaucugcggcagcuugcu

SEQ ID NO: 33704 - RNA, 24 nt, Artificial Sequence
  Synthetic oligonucleotide: CBLB-3578
uccugcgaucugcggcagcuugcu

SEQ ID NO: 33705 - RNA, 18 nt, Artificial Sequence
  Synthetic oligonucleotide: CBLB-3579
cuauuuuucaacugaagu

SEQ ID NO: 33706 - RNA, 19 nt, Artificial Sequence
  Synthetic oligonucleotide: CBLB-3580
gcuauuuuucaacugaagu

SEQ ID NO: 33707 - RNA, 20 nt, Artificial Sequence
  Synthetic oligonucleotide: CBLB-3581
ggcuauuuuucaacugaagu

SEQ ID NO: 33708 - RNA, 21 nt, Artificial Sequence
  Synthetic oligonucleotide: CBLB-3582
gggcuauuuuucaacugaagu

SEQ ID NO: 33709 - RNA, 22 nt, Artificial Sequence
  Synthetic oligonucleotide: CBLB-3583
ugggcuauuuuucaacugaagu

SEQ ID NO: 33710 - RNA, 23 nt, Artificial Sequence
  Synthetic oligonucleotide: CBLB-3584
gugggcuauuuuucaacugaagu

SEQ ID NO: 33711 - RNA, 24 nt, Artificial Sequence
  Synthetic oligonucleotide: CBLB-3585
ggugggcuauuuuucaacugaagu

SEQ ID NO: 33712 - RNA, 18 nt, Artificial Sequence
  Synthetic oligonucleotide: CBLB-3586
aucugcggcagcuugcuu

SEQ ID NO: 33713 - RNA, 19 nt, Artificial Sequence
  Synthetic oligonucleotide: CBLB-3587
gaucugcggcagcuugcuu

SEQ ID NO: 33714 - RNA, 20 nt, Artificial Sequence
  Synthetic oligonucleotide: CBLB-2537
cgaucugcggcagcuugcuu

SEQ ID NO: 33715 - RNA, 21 nt, Artificial Sequence
  Synthetic oligonucleotide: CBLB-3588
gcgaucugcggcagcuugcuu

SEQ ID NO: 33716 - RNA, 22 nt, Artificial Sequence
  Synthetic oligonucleotide: CBLB-3589
ugcgaucugcggcagcuugcuu

SEQ ID NO: 33717 - RNA, 23 nt, Artificial Sequence
  Synthetic oligonucleotide: CBLB-3590
cugcgaucugcggcagcuugcuu

SEQ ID NO: 33718 - RNA, 24 nt, Artificial Sequence
  Synthetic oligonucleotide: CBLB-3591
ccugcgaucugcggcagcuugcuu

SEQ ID NO: 33719 - RNA, 18 nt, Artificial Sequence
  Synthetic oligonucleotide: CBLB-3592
acccaaaauucgaccuuu

SEQ ID NO: 33720 - RNA, 19 nt, Artificial Sequence
  Synthetic oligonucleotide: CBLB-3593
uacccaaaauucgaccuuu

SEQ ID NO: 33721 - RNA, 20 nt, Artificial Sequence
  Synthetic oligonucleotide: CBLB-3594
auacccaaaauucgaccuuu

SEQ ID NO: 33722 - RNA, 21 nt, Artificial Sequence
  Synthetic oligonucleotide: CBLB-3595
aauacccaaaauucgaccuuu

SEQ ID NO: 33723 - RNA, 22 nt, Artificial Sequence
  Synthetic oligonucleotide: CBLB-3596
uaauacccaaaauucgaccuuu

SEQ ID NO: 33724 - RNA, 23 nt, Artificial Sequence
  Synthetic oligonucleotide: CBLB-3597
auaauacccaaaauucgaccuuu

SEQ ID NO: 33725 - RNA, 24 nt, Artificial Sequence
  Synthetic oligonucleotide: CBLB-3598
aauaauacccaaaauucgaccuuu

SEQ ID NO: 33726 - RNA, 18 nt, Artificial Sequence
  Synthetic oligonucleotide: CBLB-3599
cccaaaauucgaccuuuu

SEQ ID NO: 33727 - RNA, 19 nt, Artificial Sequence
  Synthetic oligonucleotide: CBLB-3600
acccaaaauucgaccuuuu

SEQ ID NO: 33728 - RNA, 20 nt, Artificial Sequence
  Synthetic oligonucleotide: CBLB-2538
uacccaaaauucgaccuuuu

SEQ ID NO: 33729 - RNA, 21 nt, Artificial Sequence
  Synthetic oligonucleotide: CBLB-3601
auacccaaaauucgaccuuuu

SEQ ID NO: 33730 - RNA, 22 nt, Artificial Sequence
  Synthetic oligonucleotide: CBLB-3602
aauacccaaaauucgaccuuuu

SEQ ID NO: 33731 - RNA, 23 nt, Artificial Sequence
  Synthetic oligonucleotide: CBLB-3603
uaauacccaaaauucgaccuuuu

SEQ ID NO: 33732 - RNA, 24 nt, Artificial Sequence
  Synthetic oligonucleotide: CBLB-3604
auaauacccaaaauucgaccuuuu

SEQ ID NO: 33733 - RNA, 18 nt, Artificial Sequence
  Synthetic oligonucleotide: CBLB-3605
ccuuaugaaaaagucaaa

SEQ ID NO: 33734 - RNA, 19 nt, Artificial Sequence
  Synthetic oligonucleotide: CBLB-3606
gccuuaugaaaaagucaaa

SEQ ID NO: 33735 - RNA, 20 nt, Artificial Sequence
  Synthetic oligonucleotide: CBLB-3607
agccuuaugaaaaagucaaa

SEQ ID NO: 33736 - RNA, 21 nt, Artificial Sequence
  Synthetic oligonucleotide: CBLB-3608
uagccuuaugaaaaagucaaa

SEQ ID NO: 33737 - RNA, 22 nt, Artificial Sequence
  Synthetic oligonucleotide: CBLB-3609
auagccuuaugaaaaagucaaa

SEQ ID NO: 33738 - RNA, 23 nt, Artificial Sequence
  Synthetic oligonucleotide: CBLB-3610
gauagccuuaugaaaaagucaaa

SEQ ID NO: 33739 - RNA, 24 nt, Artificial Sequence
  Synthetic oligonucleotide: CBLB-3611
ugauagccuuaugaaaaagucaaa

SEQ ID NO: 33740 - RNA, 18 nt, Artificial Sequence
  Synthetic oligonucleotide: CBLB-3612
gacucuuuaaagaaggca

SEQ ID NO: 33741 - RNA, 19 nt, Artificial Sequence
  Synthetic oligonucleotide: CBLB-3613
agacucuuuaaagaaggca

SEQ ID NO: 33742 - RNA, 20 nt, Artificial Sequence
  Synthetic oligonucleotide: CBLB-2586
aagacucuuuaaagaaggca

SEQ ID NO: 33743 - RNA, 21 nt, Artificial Sequence
  Synthetic oligonucleotide: CBLB-3614
uaagacucuuuaaagaaggca

SEQ ID NO: 33744 - RNA, 22 nt, Artificial Sequence
  Synthetic oligonucleotide: CBLB-3615
auaagacucuuuaaagaaggca

SEQ ID NO: 33745 - RNA, 23 nt, Artificial Sequence
  Synthetic oligonucleotide: CBLB-3616
aauaagacucuuuaaagaaggca

SEQ ID NO: 33746 - RNA, 24 nt, Artificial Sequence
  Synthetic oligonucleotide: CBLB-3617
caauaagacucuuuaaagaaggca

SEQ ID NO: 33747 - RNA, 18 nt, Artificial Sequence
  Synthetic oligonucleotide: CBLB-3618
agaaacuugcccaacuca

SEQ ID NO: 33748 - RNA, 19 nt, Artificial Sequence
  Synthetic oligonucleotide: CBLB-3619
cagaaacuugcccaacuca

SEQ ID NO: 33749 - RNA, 20 nt, Artificial Sequence
  Synthetic oligonucleotide: CBLB-3620
ccagaaacuugcccaacuca

SEQ ID NO: 33750 - RNA, 21 nt, Artificial Sequence
  Synthetic oligonucleotide: CBLB-3621
accagaaacuugcccaacuca

SEQ ID NO: 33751 - RNA, 22 nt, Artificial Sequence
  Synthetic oligonucleotide: CBLB-3622
aaccagaaacuugcccaacuca

SEQ ID NO: 33752 - RNA, 23 nt, Artificial Sequence
  Synthetic oligonucleotide: CBLB-3623
caaccagaaacuugcccaacuca

SEQ ID NO: 33753 - RNA, 24 nt, Artificial Sequence
  Synthetic oligonucleotide: CBLB-3624
acaaccagaaacuugcccaacuca

SEQ ID NO: 33754 - RNA, 18 nt, Artificial Sequence
  Synthetic oligonucleotide: CBLB-3625
auguaugaagaacaguca

SEQ ID NO: 33755 - RNA, 19 nt, Artificial Sequence
  Synthetic oligonucleotide: CBLB-3626
aauguaugaagaacaguca

SEQ ID NO: 33756 - RNA, 20 nt, Artificial Sequence
  Synthetic oligonucleotide: CBLB-3627
gaauguaugaagaacaguca

SEQ ID NO: 33757 - RNA, 21 nt, Artificial Sequence
  Synthetic oligonucleotide: CBLB-3628
agaauguaugaagaacaguca

SEQ ID NO: 33758 - RNA, 22 nt, Artificial Sequence
  Synthetic oligonucleotide: CBLB-3629
gagaauguaugaagaacaguca

SEQ ID NO: 33759 - RNA, 23 nt, Artificial Sequence
  Synthetic oligonucleotide: CBLB-3630
agagaauguaugaagaacaguca

SEQ ID NO: 33760 - RNA, 24 nt, Artificial Sequence
  Synthetic oligonucleotide: CBLB-3631
gagagaauguaugaagaacaguca

SEQ ID NO: 33761 - RNA, 18 nt, Artificial Sequence
  Synthetic oligonucleotide: CBLB-3632
gggcaauaagacucuuua

SEQ ID NO: 33762 - RNA, 19 nt, Artificial Sequence
  Synthetic oligonucleotide: CBLB-3633
cgggcaauaagacucuuua

SEQ ID NO: 33763 - RNA, 20 nt, Artificial Sequence
  Synthetic oligonucleotide: CBLB-3634
acgggcaauaagacucuuua

SEQ ID NO: 33764 - RNA, 21 nt, Artificial Sequence
  Synthetic oligonucleotide: CBLB-3635
aacgggcaauaagacucuuua

SEQ ID NO: 33765 - RNA, 22 nt, Artificial Sequence
  Synthetic oligonucleotide: CBLB-3636
aaacgggcaauaagacucuuua

SEQ ID NO: 33766 - RNA, 23 nt, Artificial Sequence
  Synthetic oligonucleotide: CBLB-3637
aaaacgggcaauaagacucuuua

SEQ ID NO: 33767 - RNA, 24 nt, Artificial Sequence
  Synthetic oligonucleotide: CBLB-3638
caaaacgggcaauaagacucuuua

SEQ ID NO: 33768 - RNA, 18 nt, Artificial Sequence
  Synthetic oligonucleotide: CBLB-3639
aguaaauaugaugacaac

SEQ ID NO: 33769 - RNA, 19 nt, Artificial Sequence
  Synthetic oligonucleotide: CBLB-3640
gaguaaauaugaugacaac

SEQ ID NO: 33770 - RNA, 20 nt, Artificial Sequence
  Synthetic oligonucleotide: CBLB-3641
ugaguaaauaugaugacaac

SEQ ID NO: 33771 - RNA, 21 nt, Artificial Sequence
  Synthetic oligonucleotide: CBLB-3642
uugaguaaauaugaugacaac

SEQ ID NO: 33772 - RNA, 22 nt, Artificial Sequence
  Synthetic oligonucleotide: CBLB-3643
auugaguaaauaugaugacaac

SEQ ID NO: 33773 - RNA, 23 nt, Artificial Sequence
  Synthetic oligonucleotide: CBLB-3644
uauugaguaaauaugaugacaac

SEQ ID NO: 33774 - RNA, 24 nt, Artificial Sequence
  Synthetic oligonucleotide: CBLB-3645
auauugaguaaauaugaugacaac

SEQ ID NO: 33775 - RNA, 18 nt, Artificial Sequence
  Synthetic oligonucleotide: CBLB-3646
caggaccguggagaagac

SEQ ID NO: 33776 - RNA, 19 nt, Artificial Sequence
  Synthetic oligonucleotide: CBLB-3647
gcaggaccguggagaagac

SEQ ID NO: 33777 - RNA, 20 nt, Artificial Sequence
  Synthetic oligonucleotide: CBLB-3648
cgcaggaccguggagaagac

SEQ ID NO: 33778 - RNA, 21 nt, Artificial Sequence
  Synthetic oligonucleotide: CBLB-3649
ucgcaggaccguggagaagac

SEQ ID NO: 33779 - RNA, 22 nt, Artificial Sequence
  Synthetic oligonucleotide: CBLB-3650
aucgcaggaccguggagaagac

SEQ ID NO: 33780 - RNA, 23 nt, Artificial Sequence
  Synthetic oligonucleotide: CBLB-3651
gaucgcaggaccguggagaagac

SEQ ID NO: 33781 - RNA, 24 nt, Artificial Sequence
  Synthetic oligonucleotide: CBLB-3652
agaucgcaggaccguggagaagac

SEQ ID NO: 33782 - RNA, 18 nt, Artificial Sequence
  Synthetic oligonucleotide: CBLB-3653
gccgcagaucgcaggacc

SEQ ID NO: 33783 - RNA, 19 nt, Artificial Sequence
  Synthetic oligonucleotide: CBLB-3654
ugccgcagaucgcaggacc

SEQ ID NO: 33784 - RNA, 20 nt, Artificial Sequence
  Synthetic oligonucleotide: CBLB-3655
cugccgcagaucgcaggacc

SEQ ID NO: 33785 - RNA, 21 nt, Artificial Sequence
  Synthetic oligonucleotide: CBLB-3656
gcugccgcagaucgcaggacc

SEQ ID NO: 33786 - RNA, 22 nt, Artificial Sequence
  Synthetic oligonucleotide: CBLB-3657
agcugccgcagaucgcaggacc

SEQ ID NO: 33787 - RNA, 23 nt, Artificial Sequence
  Synthetic oligonucleotide: CBLB-3658
aagcugccgcagaucgcaggacc

SEQ ID NO: 33788 - RNA, 24 nt, Artificial Sequence
  Synthetic oligonucleotide: CBLB-3659
caagcugccgcagaucgcaggacc

SEQ ID NO: 33789 - RNA, 18 nt, Artificial Sequence
  Synthetic oligonucleotide: CBLB-3660
uggucgaggaggaaaucc

SEQ ID NO: 33790 - RNA, 19 nt, Artificial Sequence
  Synthetic oligonucleotide: CBLB-3661
guggucgaggaggaaaucc

SEQ ID NO: 33791 - RNA, 20 nt, Artificial Sequence
  Synthetic oligonucleotide: CBLB-3662
gguggucgaggaggaaaucc

SEQ ID NO: 33792 - RNA, 21 nt, Artificial Sequence
  Synthetic oligonucleotide: CBLB-3663
ugguggucgaggaggaaaucc

SEQ ID NO: 33793 - RNA, 22 nt, Artificial Sequence
  Synthetic oligonucleotide: CBLB-3664
cugguggucgaggaggaaaucc

SEQ ID NO: 33794 - RNA, 23 nt, Artificial Sequence
  Synthetic oligonucleotide: CBLB-3665
ccugguggucgaggaggaaaucc

SEQ ID NO: 33795 - RNA, 24 nt, Artificial Sequence
  Synthetic oligonucleotide: CBLB-3666
cccugguggucgaggaggaaaucc

SEQ ID NO: 33796 - RNA, 18 nt, Artificial Sequence
  Synthetic oligonucleotide: CBLB-3667
agacucuuuaaagaaggc

SEQ ID NO: 33797 - RNA, 19 nt, Artificial Sequence
  Synthetic oligonucleotide: CBLB-3668
aagacucuuuaaagaaggc

SEQ ID NO: 33798 - RNA, 20 nt, Artificial Sequence
  Synthetic oligonucleotide: CBLB-3669
uaagacucuuuaaagaaggc

SEQ ID NO: 33799 - RNA, 21 nt, Artificial Sequence
  Synthetic oligonucleotide: CBLB-3670
auaagacucuuuaaagaaggc

SEQ ID NO: 33800 - RNA, 22 nt, Artificial Sequence
  Synthetic oligonucleotide: CBLB-3671
aauaagacucuuuaaagaaggc

SEQ ID NO: 33801 - RNA, 23 nt, Artificial Sequence
  Synthetic oligonucleotide: CBLB-3672
caauaagacucuuuaaagaaggc

SEQ ID NO: 33802 - RNA, 24 nt, Artificial Sequence
  Synthetic oligonucleotide: CBLB-3673
gcaauaagacucuuuaaagaaggc

SEQ ID NO: 33803 - RNA, 18 nt, Artificial Sequence
  Synthetic oligonucleotide: CBLB-3674
gagaagacuuggaagcuc

SEQ ID NO: 33804 - RNA, 19 nt, Artificial Sequence
  Synthetic oligonucleotide: CBLB-3675
ggagaagacuuggaagcuc

SEQ ID NO: 33805 - RNA, 20 nt, Artificial Sequence
  Synthetic oligonucleotide: CBLB-3676
uggagaagacuuggaagcuc

SEQ ID NO: 33806 - RNA, 21 nt, Artificial Sequence
  Synthetic oligonucleotide: CBLB-3677
guggagaagacuuggaagcuc

SEQ ID NO: 33807 - RNA, 22 nt, Artificial Sequence
  Synthetic oligonucleotide: CBLB-3678
cguggagaagacuuggaagcuc

SEQ ID NO: 33808 - RNA, 23 nt, Artificial Sequence
  Synthetic oligonucleotide: CBLB-3679
ccguggagaagacuuggaagcuc

SEQ ID NO: 33809 - RNA, 24 nt, Artificial Sequence
  Synthetic oligonucleotide: CBLB-3680
accguggagaagacuuggaagcuc

SEQ ID NO: 33810 - RNA, 18 nt, Artificial Sequence
  Synthetic oligonucleotide: CBLB-3681
gcagaaacccuggugguc

SEQ ID NO: 33811 - RNA, 19 nt, Artificial Sequence
  Synthetic oligonucleotide: CBLB-3682
ggcagaaacccuggugguc

SEQ ID NO: 33812 - RNA, 20 nt, Artificial Sequence
  Synthetic oligonucleotide: CBLB-3683
uggcagaaacccuggugguc

SEQ ID NO: 33813 - RNA, 21 nt, Artificial Sequence
  Synthetic oligonucleotide: CBLB-3684
auggcagaaacccuggugguc

SEQ ID NO: 33814 - RNA, 22 nt, Artificial Sequence
  Synthetic oligonucleotide: CBLB-3685
aauggcagaaacccuggugguc

SEQ ID NO: 33815 - RNA, 23 nt, Artificial Sequence
  Synthetic oligonucleotide: CBLB-3686
gaauggcagaaacccuggugguc

SEQ ID NO: 33816 - RNA, 24 nt, Artificial Sequence
  Synthetic oligonucleotide: CBLB-3687
ugaauggcagaaacccuggugguc

SEQ ID NO: 33817 - RNA, 18 nt, Artificial Sequence
  Synthetic oligonucleotide: CBLB-3688
cucuuuaaagaaggcaag

SEQ ID NO: 33818 - RNA, 19 nt, Artificial Sequence
  Synthetic oligonucleotide: CBLB-3689
acucuuuaaagaaggcaag

SEQ ID NO: 33819 - RNA, 20 nt, Artificial Sequence
  Synthetic oligonucleotide: CBLB-3690
gacucuuuaaagaaggcaag

SEQ ID NO: 33820 - RNA, 21 nt, Artificial Sequence
  Synthetic oligonucleotide: CBLB-3691
agacucuuuaaagaaggcaag

SEQ ID NO: 33821 - RNA, 22 nt, Artificial Sequence
  Synthetic oligonucleotide: CBLB-3692
aagacucuuuaaagaaggcaag

SEQ ID NO: 33822 - RNA, 23 nt, Artificial Sequence
  Synthetic oligonucleotide: CBLB-3693
uaagacucuuuaaagaaggcaag

SEQ ID NO: 33823 - RNA, 24 nt, Artificial Sequence
  Synthetic oligonucleotide: CBLB-3694
auaagacucuuuaaagaaggcaag

SEQ ID NO: 33824 - RNA, 18 nt, Artificial Sequence
  Synthetic oligonucleotide: CBLB-3695
augcuauucaggaugcag

SEQ ID NO: 33825 - RNA, 19 nt, Artificial Sequence
  Synthetic oligonucleotide: CBLB-3696
gaugcuauucaggaugcag

SEQ ID NO: 33826 - RNA, 20 nt, Artificial Sequence
  Synthetic oligonucleotide: CBLB-3697
ugaugcuauucaggaugcag

SEQ ID NO: 33827 - RNA, 21 nt, Artificial Sequence
  Synthetic oligonucleotide: CBLB-3698
uugaugcuauucaggaugcag

SEQ ID NO: 33828 - RNA, 22 nt, Artificial Sequence
  Synthetic oligonucleotide: CBLB-3699
auugaugcuauucaggaugcag

SEQ ID NO: 33829 - RNA, 23 nt, Artificial Sequence
  Synthetic oligonucleotide: CBLB-3700
uauugaugcuauucaggaugcag

SEQ ID NO: 33830 - RNA, 24 nt, Artificial Sequence
  Synthetic oligonucleotide: CBLB-3701
uuauugaugcuauucaggaugcag

SEQ ID NO: 33831 - RNA, 18 nt, Artificial Sequence
  Synthetic oligonucleotide: CBLB-3702
caaaaucccaaacuucag

SEQ ID NO: 33832 - RNA, 19 nt, Artificial Sequence
  Synthetic oligonucleotide: CBLB-3703
ccaaaaucccaaacuucag

SEQ ID NO: 33833 - RNA, 20 nt, Artificial Sequence
  Synthetic oligonucleotide: CBLB-3704
gccaaaaucccaaacuucag

SEQ ID NO: 33834 - RNA, 21 nt, Artificial Sequence
  Synthetic oligonucleotide: CBLB-3705
ugccaaaaucccaaacuucag

SEQ ID NO: 33835 - RNA, 22 nt, Artificial Sequence
  Synthetic oligonucleotide: CBLB-3706
gugccaaaaucccaaacuucag

SEQ ID NO: 33836 - RNA, 23 nt, Artificial Sequence
  Synthetic oligonucleotide: CBLB-3707
ugugccaaaaucccaaacuucag

SEQ ID NO: 33837 - RNA, 24 nt, Artificial Sequence
  Synthetic oligonucleotide: CBLB-3708
cugugccaaaaucccaaacuucag

SEQ ID NO: 33838 - RNA, 18 nt, Artificial Sequence
  Synthetic oligonucleotide: CBLB-3709
gaaacccugguggucgag

SEQ ID NO: 33839 - RNA, 19 nt, Artificial Sequence
  Synthetic oligonucleotide: CBLB-3710
agaaacccugguggucgag

SEQ ID NO: 33840 - RNA, 20 nt, Artificial Sequence
  Synthetic oligonucleotide: CBLB-3711
cagaaacccugguggucgag

SEQ ID NO: 33841 - RNA, 21 nt, Artificial Sequence
  Synthetic oligonucleotide: CBLB-3712
gcagaaacccugguggucgag

SEQ ID NO: 33842 - RNA, 22 nt, Artificial Sequence
  Synthetic oligonucleotide: CBLB-3713
ggcagaaacccugguggucgag

SEQ ID NO: 33843 - RNA, 23 nt, Artificial Sequence
  Synthetic oligonucleotide: CBLB-3714
uggcagaaacccugguggucgag

SEQ ID NO: 33844 - RNA, 24 nt, Artificial Sequence
  Synthetic oligonucleotide: CBLB-3715
auggcagaaacccugguggucgag

SEQ ID NO: 33845 - RNA, 18 nt, Artificial Sequence
  Synthetic oligonucleotide: CBLB-3716
ccgcagaucgcaggaccg

SEQ ID NO: 33846 - RNA, 19 nt, Artificial Sequence
  Synthetic oligonucleotide: CBLB-3717
gccgcagaucgcaggaccg

SEQ ID NO: 33847 - RNA, 20 nt, Artificial Sequence
  Synthetic oligonucleotide: CBLB-2599
ugccgcagaucgcaggaccg

SEQ ID NO: 33848 - RNA, 21 nt, Artificial Sequence
  Synthetic oligonucleotide: CBLB-3718
cugccgcagaucgcaggaccg

SEQ ID NO: 33849 - RNA, 22 nt, Artificial Sequence
  Synthetic oligonucleotide: CBLB-3719
gcugccgcagaucgcaggaccg

SEQ ID NO: 33850 - RNA, 23 nt, Artificial Sequence
  Synthetic oligonucleotide: CBLB-3720
agcugccgcagaucgcaggaccg

SEQ ID NO: 33851 - RNA, 24 nt, Artificial Sequence
  Synthetic oligonucleotide: CBLB-3721
aagcugccgcagaucgcaggaccg

SEQ ID NO: 33852 - RNA, 18 nt, Artificial Sequence
  Synthetic oligonucleotide: CBLB-3722
gcaagcugccgcagaucg

SEQ ID NO: 33853 - RNA, 19 nt, Artificial Sequence
  Synthetic oligonucleotide: CBLB-3723
agcaagcugccgcagaucg

SEQ ID NO: 33854 - RNA, 20 nt, Artificial Sequence
  Synthetic oligonucleotide: CBLB-3724
aagcaagcugccgcagaucg

SEQ ID NO: 33855 - RNA, 21 nt, Artificial Sequence
  Synthetic oligonucleotide: CBLB-3725
uaagcaagcugccgcagaucg

SEQ ID NO: 33856 - RNA, 22 nt, Artificial Sequence
  Synthetic oligonucleotide: CBLB-3726
cuaagcaagcugccgcagaucg

SEQ ID NO: 33857 - RNA, 23 nt, Artificial Sequence
  Synthetic oligonucleotide: CBLB-3727
ccuaagcaagcugccgcagaucg

SEQ ID NO: 33858 - RNA, 24 nt, Artificial Sequence
  Synthetic oligonucleotide: CBLB-3728
cccuaagcaagcugccgcagaucg

SEQ ID NO: 33859 - RNA, 18 nt, Artificial Sequence
  Synthetic oligonucleotide: CBLB-3729
cagaaacccugguggucg

SEQ ID NO: 33860 - RNA, 19 nt, Artificial Sequence
  Synthetic oligonucleotide: CBLB-3730
gcagaaacccugguggucg

SEQ ID NO: 33861 - RNA, 20 nt, Artificial Sequence
  Synthetic oligonucleotide: CBLB-2536
ggcagaaacccugguggucg

SEQ ID NO: 33862 - RNA, 21 nt, Artificial Sequence
  Synthetic oligonucleotide: CBLB-3731
uggcagaaacccugguggucg

SEQ ID NO: 33863 - RNA, 22 nt, Artificial Sequence
  Synthetic oligonucleotide: CBLB-3732
auggcagaaacccugguggucg

SEQ ID NO: 33864 - RNA, 23 nt, Artificial Sequence
  Synthetic oligonucleotide: CBLB-3733
aauggcagaaacccugguggucg

SEQ ID NO: 33865 - RNA, 24 nt, Artificial Sequence
  Synthetic oligonucleotide: CBLB-3734
gaauggcagaaacccugguggucg

SEQ ID NO: 33866 - RNA, 18 nt, Artificial Sequence
  Synthetic oligonucleotide: CBLB-3735
aaacccugguggucgagg

SEQ ID NO: 33867 - RNA, 19 nt, Artificial Sequence
  Synthetic oligonucleotide: CBLB-3736
gaaacccugguggucgagg

SEQ ID NO: 33868 - RNA, 20 nt, Artificial Sequence
  Synthetic oligonucleotide: CBLB-2601
agaaacccugguggucgagg

SEQ ID NO: 33869 - RNA, 21 nt, Artificial Sequence
  Synthetic oligonucleotide: CBLB-3737
cagaaacccugguggucgagg

SEQ ID NO: 33870 - RNA, 22 nt, Artificial Sequence
  Synthetic oligonucleotide: CBLB-3738
gcagaaacccugguggucgagg

SEQ ID NO: 33871 - RNA, 23 nt, Artificial Sequence
  Synthetic oligonucleotide: CBLB-3739
ggcagaaacccugguggucgagg

SEQ ID NO: 33872 - RNA, 24 nt, Artificial Sequence
  Synthetic oligonucleotide: CBLB-3740
uggcagaaacccugguggucgagg

SEQ ID NO: 33873 - RNA, 18 nt, Artificial Sequence
  Synthetic oligonucleotide: CBLB-3741
ggcaaacucaaugaaugg

SEQ ID NO: 33874 - RNA, 19 nt, Artificial Sequence
  Synthetic oligonucleotide: CBLB-3742
uggcaaacucaaugaaugg

SEQ ID NO: 33875 - RNA, 20 nt, Artificial Sequence
  Synthetic oligonucleotide: CBLB-3743
auggcaaacucaaugaaugg

SEQ ID NO: 33876 - RNA, 21 nt, Artificial Sequence
  Synthetic oligonucleotide: CBLB-3744
gauggcaaacucaaugaaugg

SEQ ID NO: 33877 - RNA, 22 nt, Artificial Sequence
  Synthetic oligonucleotide: CBLB-3745
agauggcaaacucaaugaaugg

SEQ ID NO: 33878 - RNA, 23 nt, Artificial Sequence
  Synthetic oligonucleotide: CBLB-3746
cagauggcaaacucaaugaaugg

SEQ ID NO: 33879 - RNA, 24 nt, Artificial Sequence
  Synthetic oligonucleotide: CBLB-3747
ccagauggcaaacucaaugaaugg

SEQ ID NO: 33880 - RNA, 18 nt, Artificial Sequence
  Synthetic oligonucleotide: CBLB-3748
uggcagaaacccuggugg

SEQ ID NO: 33881 - RNA, 19 nt, Artificial Sequence
  Synthetic oligonucleotide: CBLB-3749
auggcagaaacccuggugg

SEQ ID NO: 33882 - RNA, 20 nt, Artificial Sequence
  Synthetic oligonucleotide: CBLB-3750
aauggcagaaacccuggugg

SEQ ID NO: 33883 - RNA, 21 nt, Artificial Sequence
  Synthetic oligonucleotide: CBLB-3751
gaauggcagaaacccuggugg

SEQ ID NO: 33884 - RNA, 22 nt, Artificial Sequence
  Synthetic oligonucleotide: CBLB-3752
ugaauggcagaaacccuggugg

SEQ ID NO: 33885 - RNA, 23 nt, Artificial Sequence
  Synthetic oligonucleotide: CBLB-3753
augaauggcagaaacccuggugg

SEQ ID NO: 33886 - RNA, 24 nt, Artificial Sequence
  Synthetic oligonucleotide: CBLB-3754
aaugaauggcagaaacccuggugg

SEQ ID NO: 33887 - RNA, 18 nt, Artificial Sequence
  Synthetic oligonucleotide: CBLB-3755
gcaaggagagaauguaug

SEQ ID NO: 33888 - RNA, 19 nt, Artificial Sequence
  Synthetic oligonucleotide: CBLB-3756
ggcaaggagagaauguaug

SEQ ID NO: 33889 - RNA, 20 nt, Artificial Sequence
  Synthetic oligonucleotide: CBLB-3757
aggcaaggagagaauguaug

SEQ ID NO: 33890 - RNA, 21 nt, Artificial Sequence
  Synthetic oligonucleotide: CBLB-3758
aaggcaaggagagaauguaug

SEQ ID NO: 33891 - RNA, 22 nt, Artificial Sequence
  Synthetic oligonucleotide: CBLB-3759
gaaggcaaggagagaauguaug

SEQ ID NO: 33892 - RNA, 23 nt, Artificial Sequence
  Synthetic oligonucleotide: CBLB-3760
agaaggcaaggagagaauguaug

SEQ ID NO: 33893 - RNA, 24 nt, Artificial Sequence
  Synthetic oligonucleotide: CBLB-3761
aagaaggcaaggagagaauguaug

SEQ ID NO: 33894 - RNA, 18 nt, Artificial Sequence
  Synthetic oligonucleotide: CBLB-3762
gcagaucgcaggaccgug

SEQ ID NO: 33895 - RNA, 19 nt, Artificial Sequence
  Synthetic oligonucleotide: CBLB-3763
cgcagaucgcaggaccgug

SEQ ID NO: 33896 - RNA, 20 nt, Artificial Sequence
  Synthetic oligonucleotide: CBLB-3764
ccgcagaucgcaggaccgug

SEQ ID NO: 33897 - RNA, 21 nt, Artificial Sequence
  Synthetic oligonucleotide: CBLB-3765
gccgcagaucgcaggaccgug

SEQ ID NO: 33898 - RNA, 22 nt, Artificial Sequence
  Synthetic oligonucleotide: CBLB-3766
ugccgcagaucgcaggaccgug

SEQ ID NO: 33899 - RNA, 23 nt, Artificial Sequence
  Synthetic oligonucleotide: CBLB-3767
cugccgcagaucgcaggaccgug

SEQ ID NO: 33900 - RNA, 24 nt, Artificial Sequence
  Synthetic oligonucleotide: CBLB-3768
gcugccgcagaucgcaggaccgug

SEQ ID NO: 33901 - RNA, 18 nt, Artificial Sequence
  Synthetic oligonucleotide: CBLB-3769
aggaccguggagaagacu

SEQ ID NO: 33902 - RNA, 19 nt, Artificial Sequence
  Synthetic oligonucleotide: CBLB-3770
caggaccguggagaagacu

SEQ ID NO: 33903 - RNA, 20 nt, Artificial Sequence
  Synthetic oligonucleotide: CBLB-2606
gcaggaccguggagaagacu

SEQ ID NO: 33904 - RNA, 21 nt, Artificial Sequence
  Synthetic oligonucleotide: CBLB-3771
cgcaggaccguggagaagacu

SEQ ID NO: 33905 - RNA, 22 nt, Artificial Sequence
  Synthetic oligonucleotide: CBLB-3772
ucgcaggaccguggagaagacu

SEQ ID NO: 33906 - RNA, 23 nt, Artificial Sequence
  Synthetic oligonucleotide: CBLB-3773
aucgcaggaccguggagaagacu

SEQ ID NO: 33907 - RNA, 24 nt, Artificial Sequence
  Synthetic oligonucleotide: CBLB-3774
gaucgcaggaccguggagaagacu

SEQ ID NO: 33908 - RNA, 18 nt, Artificial Sequence
  Synthetic oligonucleotide: CBLB-3775
aacagucacaggacaggu

SEQ ID NO: 33909 - RNA, 19 nt, Artificial Sequence
  Synthetic oligonucleotide: CBLB-3776
gaacagucacaggacaggu

SEQ ID NO: 33910 - RNA, 20 nt, Artificial Sequence
  Synthetic oligonucleotide: CBLB-3777
agaacagucacaggacaggu

SEQ ID NO: 33911 - RNA, 21 nt, Artificial Sequence
  Synthetic oligonucleotide: CBLB-3778
aagaacagucacaggacaggu

SEQ ID NO: 33912 - RNA, 22 nt, Artificial Sequence
  Synthetic oligonucleotide: CBLB-3779
gaagaacagucacaggacaggu

SEQ ID NO: 33913 - RNA, 23 nt, Artificial Sequence
  Synthetic oligonucleotide: CBLB-3780
ugaagaacagucacaggacaggu

SEQ ID NO: 33914 - RNA, 24 nt, Artificial Sequence
  Synthetic oligonucleotide: CBLB-3781
augaagaacagucacaggacaggu

SEQ ID NO: 33915 - RNA, 18 nt, Artificial Sequence
  Synthetic oligonucleotide: CBLB-3782
aaggcaaggagagaaugu

SEQ ID NO: 33916 - RNA, 19 nt, Artificial Sequence
  Synthetic oligonucleotide: CBLB-3783
gaaggcaaggagagaaugu

SEQ ID NO: 33917 - RNA, 20 nt, Artificial Sequence
  Synthetic oligonucleotide: CBLB-3784
agaaggcaaggagagaaugu

SEQ ID NO: 33918 - RNA, 21 nt, Artificial Sequence
  Synthetic oligonucleotide: CBLB-3785
aagaaggcaaggagagaaugu

SEQ ID NO: 33919 - RNA, 22 nt, Artificial Sequence
  Synthetic oligonucleotide: CBLB-3786
aaagaaggcaaggagagaaugu

SEQ ID NO: 33920 - RNA, 23 nt, Artificial Sequence
  Synthetic oligonucleotide: CBLB-3787
uaaagaaggcaaggagagaaugu

SEQ ID NO: 33921 - RNA, 24 nt, Artificial Sequence
  Synthetic oligonucleotide: CBLB-3788
uuaaagaaggcaaggagagaaugu

SEQ ID NO: 33922 - RNA, 18 nt, Artificial Sequence
  Synthetic oligonucleotide: CBLB-3789
cugucugacguugccugu

SEQ ID NO: 33923 - RNA, 19 nt, Artificial Sequence
  Synthetic oligonucleotide: CBLB-3790
ucugucugacguugccugu

SEQ ID NO: 33924 - RNA, 20 nt, Artificial Sequence
  Synthetic oligonucleotide: CBLB-3791
uucugucugacguugccugu

SEQ ID NO: 33925 - RNA, 21 nt, Artificial Sequence
  Synthetic oligonucleotide: CBLB-3792
guucugucugacguugccugu

SEQ ID NO: 33926 - RNA, 22 nt, Artificial Sequence
  Synthetic oligonucleotide: CBLB-3793
aguucugucugacguugccugu

SEQ ID NO: 33927 - RNA, 23 nt, Artificial Sequence
  Synthetic oligonucleotide: CBLB-3794
aaguucugucugacguugccugu

SEQ ID NO: 33928 - RNA, 24 nt, Artificial Sequence
  Synthetic oligonucleotide: CBLB-3795
uaaguucugucugacguugccugu

SEQ ID NO: 33929 - RNA, 18 nt, Artificial Sequence
  Synthetic oligonucleotide: CBLB-3796
aucuacauugauagccuu

SEQ ID NO: 33930 - RNA, 19 nt, Artificial Sequence
  Synthetic oligonucleotide: CBLB-3797
aaucuacauugauagccuu

SEQ ID NO: 33931 - RNA, 20 nt, Artificial Sequence
  Synthetic oligonucleotide: CBLB-3798
aaaucuacauugauagccuu

SEQ ID NO: 33932 - RNA, 21 nt, Artificial Sequence
  Synthetic oligonucleotide: CBLB-3799
aaaaucuacauugauagccuu

SEQ ID NO: 33933 - RNA, 22 nt, Artificial Sequence
  Synthetic oligonucleotide: CBLB-3800
uaaaaucuacauugauagccuu

SEQ ID NO: 33934 - RNA, 23 nt, Artificial Sequence
  Synthetic oligonucleotide: CBLB-3801
uuaaaaucuacauugauagccuu

SEQ ID NO: 33935 - RNA, 24 nt, Artificial Sequence
  Synthetic oligonucleotide: CBLB-3802
uuuaaaaucuacauugauagccuu

SEQ ID NO: 33936 - RNA, 18 nt, Artificial Sequence
  Synthetic oligonucleotide: CBLB-3803
guugugaauucagggaaa

SEQ ID NO: 33937 - RNA, 19 nt, Artificial Sequence
  Synthetic oligonucleotide: CBLB-3804
gguugugaauucagggaaa

SEQ ID NO: 33938 - RNA, 20 nt, Artificial Sequence
  Synthetic oligonucleotide: CBLB-3805
ugguugugaauucagggaaa

SEQ ID NO: 33939 - RNA, 21 nt, Artificial Sequence
  Synthetic oligonucleotide: CBLB-3806
augguugugaauucagggaaa

SEQ ID NO: 33940 - RNA, 22 nt, Artificial Sequence
  Synthetic oligonucleotide: CBLB-3807
gaugguugugaauucagggaaa

SEQ ID NO: 33941 - RNA, 23 nt, Artificial Sequence
  Synthetic oligonucleotide: CBLB-3808
agaugguugugaauucagggaaa

SEQ ID NO: 33942 - RNA, 24 nt, Artificial Sequence
  Synthetic oligonucleotide: CBLB-3809
gagaugguugugaauucagggaaa

SEQ ID NO: 33943 - RNA, 18 nt, Artificial Sequence
  Synthetic oligonucleotide: CBLB-3810
cucuuguuuucucugaaa

SEQ ID NO: 33944 - RNA, 19 nt, Artificial Sequence
  Synthetic oligonucleotide: CBLB-3811
ucucuuguuuucucugaaa

SEQ ID NO: 33945 - RNA, 20 nt, Artificial Sequence
  Synthetic oligonucleotide: CBLB-3812
gucucuuguuuucucugaaa

SEQ ID NO: 33946 - RNA, 21 nt, Artificial Sequence
  Synthetic oligonucleotide: CBLB-3813
ggucucuuguuuucucugaaa

SEQ ID NO: 33947 - RNA, 22 nt, Artificial Sequence
  Synthetic oligonucleotide: CBLB-3814
gggucucuuguuuucucugaaa

SEQ ID NO: 33948 - RNA, 23 nt, Artificial Sequence
  Synthetic oligonucleotide: CBLB-3815
ugggucucuuguuuucucugaaa

SEQ ID NO: 33949 - RNA, 24 nt, Artificial Sequence
  Synthetic oligonucleotide: CBLB-3816
cugggucucuuguuuucucugaaa

SEQ ID NO: 33950 - RNA, 18 nt, Artificial Sequence
  Synthetic oligonucleotide: CBLB-3817
cacuugcuagaucaacaa

SEQ ID NO: 33951 - RNA, 19 nt, Artificial Sequence
  Synthetic oligonucleotide: CBLB-3818
ccacuugcuagaucaacaa

SEQ ID NO: 33952 - RNA, 20 nt, Artificial Sequence
  Synthetic oligonucleotide: CBLB-3024
gccacuugcuagaucaacaa

SEQ ID NO: 33953 - RNA, 21 nt, Artificial Sequence
  Synthetic oligonucleotide: CBLB-3819
ggccacuugcuagaucaacaa

SEQ ID NO: 33954 - RNA, 22 nt, Artificial Sequence
  Synthetic oligonucleotide: CBLB-3820
uggccacuugcuagaucaacaa

SEQ ID NO: 33955 - RNA, 23 nt, Artificial Sequence
  Synthetic oligonucleotide: CBLB-3821
uuggccacuugcuagaucaacaa

SEQ ID NO: 33956 - RNA, 24 nt, Artificial Sequence
  Synthetic oligonucleotide: CBLB-3822
cuuggccacuugcuagaucaacaa

SEQ ID NO: 33957 - RNA, 18 nt, Artificial Sequence
  Synthetic oligonucleotide: CBLB-3823
aauggcccacugucccaa

SEQ ID NO: 33958 - RNA, 19 nt, Artificial Sequence
  Synthetic oligonucleotide: CBLB-3824
caauggcccacugucccaa

SEQ ID NO: 33959 - RNA, 20 nt, Artificial Sequence
  Synthetic oligonucleotide: CBLB-3825
ccaauggcccacugucccaa

SEQ ID NO: 33960 - RNA, 21 nt, Artificial Sequence
  Synthetic oligonucleotide: CBLB-3826
gccaauggcccacugucccaa

SEQ ID NO: 33961 - RNA, 22 nt, Artificial Sequence
  Synthetic oligonucleotide: CBLB-3827
agccaauggcccacugucccaa

SEQ ID NO: 33962 - RNA, 23 nt, Artificial Sequence
  Synthetic oligonucleotide: CBLB-3828
uagccaauggcccacugucccaa

SEQ ID NO: 33963 - RNA, 24 nt, Artificial Sequence
  Synthetic oligonucleotide: CBLB-3829
auagccaauggcccacugucccaa

SEQ ID NO: 33964 - RNA, 18 nt, Artificial Sequence
  Synthetic oligonucleotide: CBLB-3830
cuagcaucggcaugccaa

SEQ ID NO: 33965 - RNA, 19 nt, Artificial Sequence
  Synthetic oligonucleotide: CBLB-3831
ucuagcaucggcaugccaa

SEQ ID NO: 33966 - RNA, 20 nt, Artificial Sequence
  Synthetic oligonucleotide: CBLB-3030
gucuagcaucggcaugccaa

SEQ ID NO: 33967 - RNA, 21 nt, Artificial Sequence
  Synthetic oligonucleotide: CBLB-3832
agucuagcaucggcaugccaa

SEQ ID NO: 33968 - RNA, 22 nt, Artificial Sequence
  Synthetic oligonucleotide: CBLB-3833
aagucuagcaucggcaugccaa

SEQ ID NO: 33969 - RNA, 23 nt, Artificial Sequence
  Synthetic oligonucleotide: CBLB-3834
caagucuagcaucggcaugccaa

SEQ ID NO: 33970 - RNA, 24 nt, Artificial Sequence
  Synthetic oligonucleotide: CBLB-3835
ccaagucuagcaucggcaugccaa

SEQ ID NO: 33971 - RNA, 18 nt, Artificial Sequence
  Synthetic oligonucleotide: CBLB-3836
cuucaucucuuggaucaa

SEQ ID NO: 33972 - RNA, 19 nt, Artificial Sequence
  Synthetic oligonucleotide: CBLB-3837
ccuucaucucuuggaucaa

SEQ ID NO: 33973 - RNA, 20 nt, Artificial Sequence
  Synthetic oligonucleotide: CBLB-3035
gccuucaucucuuggaucaa

SEQ ID NO: 33974 - RNA, 21 nt, Artificial Sequence
  Synthetic oligonucleotide: CBLB-3838
agccuucaucucuuggaucaa

SEQ ID NO: 33975 - RNA, 22 nt, Artificial Sequence
  Synthetic oligonucleotide: CBLB-3839
gagccuucaucucuuggaucaa

SEQ ID NO: 33976 - RNA, 23 nt, Artificial Sequence
  Synthetic oligonucleotide: CBLB-3840
ggagccuucaucucuuggaucaa

SEQ ID NO: 33977 - RNA, 24 nt, Artificial Sequence
  Synthetic oligonucleotide: CBLB-3841
uggagccuucaucucuuggaucaa

SEQ ID NO: 33978 - RNA, 18 nt, Artificial Sequence
  Synthetic oligonucleotide: CBLB-3842
ccaucaggauaaagauaa

SEQ ID NO: 33979 - RNA, 19 nt, Artificial Sequence
  Synthetic oligonucleotide: CBLB-3843
cccaucaggauaaagauaa

SEQ ID NO: 33980 - RNA, 20 nt, Artificial Sequence
  Synthetic oligonucleotide: CBLB-3844
ucccaucaggauaaagauaa

SEQ ID NO: 33981 - RNA, 21 nt, Artificial Sequence
  Synthetic oligonucleotide: CBLB-3845
cucccaucaggauaaagauaa

SEQ ID NO: 33982 - RNA, 22 nt, Artificial Sequence
  Synthetic oligonucleotide: CBLB-3846
ccucccaucaggauaaagauaa

SEQ ID NO: 33983 - RNA, 23 nt, Artificial Sequence
  Synthetic oligonucleotide: CBLB-3847
uccucccaucaggauaaagauaa

SEQ ID NO: 33984 - RNA, 24 nt, Artificial Sequence
  Synthetic oligonucleotide: CBLB-3848
cuccucccaucaggauaaagauaa

SEQ ID NO: 33985 - RNA, 18 nt, Artificial Sequence
  Synthetic oligonucleotide: CBLB-3849
aaugccgccucaggccca

SEQ ID NO: 33986 - RNA, 19 nt, Artificial Sequence
  Synthetic oligonucleotide: CBLB-3850
caaugccgccucaggccca

SEQ ID NO: 33987 - RNA, 20 nt, Artificial Sequence
  Synthetic oligonucleotide: CBLB-3066
ccaaugccgccucaggccca

SEQ ID NO: 33988 - RNA, 21 nt, Artificial Sequence
  Synthetic oligonucleotide: CBLB-3851
uccaaugccgccucaggccca

SEQ ID NO: 33989 - RNA, 22 nt, Artificial Sequence
  Synthetic oligonucleotide: CBLB-3852
uuccaaugccgccucaggccca

SEQ ID NO: 33990 - RNA, 23 nt, Artificial Sequence
  Synthetic oligonucleotide: CBLB-3853
uuuccaaugccgccucaggccca

SEQ ID NO: 33991 - RNA, 24 nt, Artificial Sequence
  Synthetic oligonucleotide: CBLB-3854
uuuuccaaugccgccucaggccca

SEQ ID NO: 33992 - RNA, 18 nt, Artificial Sequence
  Synthetic oligonucleotide: CBLB-3855
uguguuuccgcauaagca

SEQ ID NO: 33993 - RNA, 19 nt, Artificial Sequence
  Synthetic oligonucleotide: CBLB-3856
cuguguuuccgcauaagca

SEQ ID NO: 33994 - RNA, 20 nt, Artificial Sequence
  Synthetic oligonucleotide: CBLB-3857
ucuguguuuccgcauaagca

SEQ ID NO: 33995 - RNA, 21 nt, Artificial Sequence
  Synthetic oligonucleotide: CBLB-3858
gucuguguuuccgcauaagca

SEQ ID NO: 33996 - RNA, 22 nt, Artificial Sequence
  Synthetic oligonucleotide: CBLB-3859
cgucuguguuuccgcauaagca

SEQ ID NO: 33997 - RNA, 23 nt, Artificial Sequence
  Synthetic oligonucleotide: CBLB-3860
gcgucuguguuuccgcauaagca

SEQ ID NO: 33998 - RNA, 24 nt, Artificial Sequence
  Synthetic oligonucleotide: CBLB-3861
ggcgucuguguuuccgcauaagca

SEQ ID NO: 33999 - RNA, 18 nt, Artificial Sequence
  Synthetic oligonucleotide: CBLB-3862
uggcaggugguaauggca

SEQ ID NO: 34000 - RNA, 19 nt, Artificial Sequence
  Synthetic oligonucleotide: CBLB-3863
cuggcaggugguaauggca

SEQ ID NO: 34001 - RNA, 20 nt, Artificial Sequence
  Synthetic oligonucleotide: CBLB-3076
ccuggcaggugguaauggca

SEQ ID NO: 34002 - RNA, 21 nt, Artificial Sequence
  Synthetic oligonucleotide: CBLB-3864
gccuggcaggugguaauggca

SEQ ID NO: 34003 - RNA, 22 nt, Artificial Sequence
  Synthetic oligonucleotide: CBLB-3865
ggccuggcaggugguaauggca

SEQ ID NO: 34004 - RNA, 23 nt, Artificial Sequence
  Synthetic oligonucleotide: CBLB-3866
aggccuggcaggugguaauggca

SEQ ID NO: 34005 - RNA, 24 nt, Artificial Sequence
  Synthetic oligonucleotide: CBLB-3867
gaggccuggcaggugguaauggca

SEQ ID NO: 34006 - RNA, 18 nt, Artificial Sequence
  Synthetic oligonucleotide: CBLB-3868
cuucucugggcaagggga

SEQ ID NO: 34007 - RNA, 19 nt, Artificial Sequence
  Synthetic oligonucleotide: CBLB-3869
ucuucucugggcaagggga

SEQ ID NO: 34008 - RNA, 20 nt, Artificial Sequence
  Synthetic oligonucleotide: CBLB-3870
uucuucucugggcaagggga

SEQ ID NO: 34009 - RNA, 21 nt, Artificial Sequence
  Synthetic oligonucleotide: CBLB-3871
uuucuucucugggcaagggga

SEQ ID NO: 34010 - RNA, 22 nt, Artificial Sequence
  Synthetic oligonucleotide: CBLB-3872
cuuucuucucugggcaagggga

SEQ ID NO: 34011 - RNA, 23 nt, Artificial Sequence
  Synthetic oligonucleotide: CBLB-3873
gcuuucuucucugggcaagggga

SEQ ID NO: 34012 - RNA, 24 nt, Artificial Sequence
  Synthetic oligonucleotide: CBLB-3874
ggcuuucuucucugggcaagggga

SEQ ID NO: 34013 - RNA, 18 nt, Artificial Sequence
  Synthetic oligonucleotide: CBLB-3875
uuagaugugggaucugga

SEQ ID NO: 34014 - RNA, 19 nt, Artificial Sequence
  Synthetic oligonucleotide: CBLB-3876
cuuagaugugggaucugga

SEQ ID NO: 34015 - RNA, 20 nt, Artificial Sequence
  Synthetic oligonucleotide: CBLB-3877
gcuuagaugugggaucugga

SEQ ID NO: 34016 - RNA, 21 nt, Artificial Sequence
  Synthetic oligonucleotide: CBLB-3878
ggcuuagaugugggaucugga

SEQ ID NO: 34017 - RNA, 22 nt, Artificial Sequence
  Synthetic oligonucleotide: CBLB-3879
aggcuuagaugugggaucugga

SEQ ID NO: 34018 - RNA, 23 nt, Artificial Sequence
  Synthetic oligonucleotide: CBLB-3880
caggcuuagaugugggaucugga

SEQ ID NO: 34019 - RNA, 24 nt, Artificial Sequence
  Synthetic oligonucleotide: CBLB-3881
gcaggcuuagaugugggaucugga

SEQ ID NO: 34020 - RNA, 18 nt, Artificial Sequence
  Synthetic oligonucleotide: CBLB-3882
ggaaacagggugggauga

SEQ ID NO: 34021 - RNA, 19 nt, Artificial Sequence
  Synthetic oligonucleotide: CBLB-3883
gggaaacagggugggauga

SEQ ID NO: 34022 - RNA, 20 nt, Artificial Sequence
  Synthetic oligonucleotide: CBLB-3118
agggaaacagggugggauga

SEQ ID NO: 34023 - RNA, 21 nt, Artificial Sequence
  Synthetic oligonucleotide: CBLB-3884
cagggaaacagggugggauga

SEQ ID NO: 34024 - RNA, 22 nt, Artificial Sequence
  Synthetic oligonucleotide: CBLB-3885
ucagggaaacagggugggauga

SEQ ID NO: 34025 - RNA, 23 nt, Artificial Sequence
  Synthetic oligonucleotide: CBLB-3886
uucagggaaacagggugggauga

SEQ ID NO: 34026 - RNA, 24 nt, Artificial Sequence
  Synthetic oligonucleotide: CBLB-3887
auucagggaaacagggugggauga

SEQ ID NO: 34027 - RNA, 18 nt, Artificial Sequence
  Synthetic oligonucleotide: CBLB-3888
aaucaaaaacaucuccua

SEQ ID NO: 34028 - RNA, 19 nt, Artificial Sequence
  Synthetic oligonucleotide: CBLB-3889
gaaucaaaaacaucuccua

SEQ ID NO: 34029 - RNA, 20 nt, Artificial Sequence
  Synthetic oligonucleotide: CBLB-3890
ugaaucaaaaacaucuccua

SEQ ID NO: 34030 - RNA, 21 nt, Artificial Sequence
  Synthetic oligonucleotide: CBLB-3891
cugaaucaaaaacaucuccua

SEQ ID NO: 34031 - RNA, 22 nt, Artificial Sequence
  Synthetic oligonucleotide: CBLB-3892
gcugaaucaaaaacaucuccua

SEQ ID NO: 34032 - RNA, 23 nt, Artificial Sequence
  Synthetic oligonucleotide: CBLB-3893
ggcugaaucaaaaacaucuccua

SEQ ID NO: 34033 - RNA, 24 nt, Artificial Sequence
  Synthetic oligonucleotide: CBLB-3894
aggcugaaucaaaaacaucuccua

SEQ ID NO: 34034 - RNA, 18 nt, Artificial Sequence
  Synthetic oligonucleotide: CBLB-3895
caucaucaucuuccucua

SEQ ID NO: 34035 - RNA, 19 nt, Artificial Sequence
  Synthetic oligonucleotide: CBLB-3896
ucaucaucaucuuccucua

SEQ ID NO: 34036 - RNA, 20 nt, Artificial Sequence
  Synthetic oligonucleotide: CBLB-3897
uucaucaucaucuuccucua

SEQ ID NO: 34037 - RNA, 21 nt, Artificial Sequence
  Synthetic oligonucleotide: CBLB-3898
auucaucaucaucuuccucua

SEQ ID NO: 34038 - RNA, 22 nt, Artificial Sequence
  Synthetic oligonucleotide: CBLB-3899
uauucaucaucaucuuccucua

SEQ ID NO: 34039 - RNA, 23 nt, Artificial Sequence
  Synthetic oligonucleotide: CBLB-3900
guauucaucaucaucuuccucua

SEQ ID NO: 34040 - RNA, 24 nt, Artificial Sequence
  Synthetic oligonucleotide: CBLB-3901
uguauucaucaucaucuuccucua

SEQ ID NO: 34041 - RNA, 18 nt, Artificial Sequence
  Synthetic oligonucleotide: CBLB-3902
cugcgcggucgugguuua

SEQ ID NO: 34042 - RNA, 19 nt, Artificial Sequence
  Synthetic oligonucleotide: CBLB-3903
ccugcgcggucgugguuua

SEQ ID NO: 34043 - RNA, 20 nt, Artificial Sequence
  Synthetic oligonucleotide: CBLB-3137
uccugcgcggucgugguuua

SEQ ID NO: 34044 - RNA, 21 nt, Artificial Sequence
  Synthetic oligonucleotide: CBLB-3904
guccugcgcggucgugguuua

SEQ ID NO: 34045 - RNA, 22 nt, Artificial Sequence
  Synthetic oligonucleotide: CBLB-3905
aguccugcgcggucgugguuua

SEQ ID NO: 34046 - RNA, 23 nt, Artificial Sequence
  Synthetic oligonucleotide: CBLB-3906
caguccugcgcggucgugguuua

SEQ ID NO: 34047 - RNA, 24 nt, Artificial Sequence
  Synthetic oligonucleotide: CBLB-3907
gcaguccugcgcggucgugguuua

SEQ ID NO: 34048 - RNA, 18 nt, Artificial Sequence
  Synthetic oligonucleotide: CBLB-3908
ugagaaaugccauguaac

SEQ ID NO: 34049 - RNA, 19 nt, Artificial Sequence
  Synthetic oligonucleotide: CBLB-3909
gugagaaaugccauguaac

SEQ ID NO: 34050 - RNA, 20 nt, Artificial Sequence
  Synthetic oligonucleotide: CBLB-3910
ugugagaaaugccauguaac

SEQ ID NO: 34051 - RNA, 21 nt, Artificial Sequence
  Synthetic oligonucleotide: CBLB-3911
augugagaaaugccauguaac

SEQ ID NO: 34052 - RNA, 22 nt, Artificial Sequence
  Synthetic oligonucleotide: CBLB-3912
uaugugagaaaugccauguaac

SEQ ID NO: 34053 - RNA, 23 nt, Artificial Sequence
  Synthetic oligonucleotide: CBLB-3913
auaugugagaaaugccauguaac

SEQ ID NO: 34054 - RNA, 24 nt, Artificial Sequence
  Synthetic oligonucleotide: CBLB-3914
cauaugugagaaaugccauguaac

SEQ ID NO: 34055 - RNA, 18 nt, Artificial Sequence
  Synthetic oligonucleotide: CBLB-3915
auacgaaaguuaucuccc

SEQ ID NO: 34056 - RNA, 19 nt, Artificial Sequence
  Synthetic oligonucleotide: CBLB-3916
gauacgaaaguuaucuccc

SEQ ID NO: 34057 - RNA, 20 nt, Artificial Sequence
  Synthetic oligonucleotide: CBLB-3171
ugauacgaaaguuaucuccc

SEQ ID NO: 34058 - RNA, 21 nt, Artificial Sequence
  Synthetic oligonucleotide: CBLB-3917
gugauacgaaaguuaucuccc

SEQ ID NO: 34059 - RNA, 22 nt, Artificial Sequence
  Synthetic oligonucleotide: CBLB-3918
ugugauacgaaaguuaucuccc

SEQ ID NO: 34060 - RNA, 23 nt, Artificial Sequence
  Synthetic oligonucleotide: CBLB-3919
uugugauacgaaaguuaucuccc

SEQ ID NO: 34061 - RNA, 24 nt, Artificial Sequence
  Synthetic oligonucleotide: CBLB-3920
uuugugauacgaaaguuaucuccc

SEQ ID NO: 34062 - RNA, 18 nt, Artificial Sequence
  Synthetic oligonucleotide: CBLB-3921
aaggcauaacccucuccc

SEQ ID NO: 34063 - RNA, 19 nt, Artificial Sequence
  Synthetic oligonucleotide: CBLB-3922
aaaggcauaacccucuccc

SEQ ID NO: 34064 - RNA, 20 nt, Artificial Sequence
  Synthetic oligonucleotide: CBLB-3923
caaaggcauaacccucuccc

SEQ ID NO: 34065 - RNA, 21 nt, Artificial Sequence
  Synthetic oligonucleotide: CBLB-3924
ucaaaggcauaacccucuccc

SEQ ID NO: 34066 - RNA, 22 nt, Artificial Sequence
  Synthetic oligonucleotide: CBLB-3925
uucaaaggcauaacccucuccc

SEQ ID NO: 34067 - RNA, 23 nt, Artificial Sequence
  Synthetic oligonucleotide: CBLB-3926
cuucaaaggcauaacccucuccc

SEQ ID NO: 34068 - RNA, 24 nt, Artificial Sequence
  Synthetic oligonucleotide: CBLB-3927
ucuucaaaggcauaacccucuccc

SEQ ID NO: 34069 - RNA, 18 nt, Artificial Sequence
  Synthetic oligonucleotide: CBLB-3928
uauaauucauauuguucc

SEQ ID NO: 34070 - RNA, 19 nt, Artificial Sequence
  Synthetic oligonucleotide: CBLB-3929
auauaauucauauuguucc

SEQ ID NO: 34071 - RNA, 20 nt, Artificial Sequence
  Synthetic oligonucleotide: CBLB-3191
aauauaauucauauuguucc

SEQ ID NO: 34072 - RNA, 21 nt, Artificial Sequence
  Synthetic oligonucleotide: CBLB-3930
caauauaauucauauuguucc

SEQ ID NO: 34073 - RNA, 22 nt, Artificial Sequence
  Synthetic oligonucleotide: CBLB-3931
acaauauaauucauauuguucc

SEQ ID NO: 34074 - RNA, 23 nt, Artificial Sequence
  Synthetic oligonucleotide: CBLB-3932
cacaauauaauucauauuguucc

SEQ ID NO: 34075 - RNA, 24 nt, Artificial Sequence
  Synthetic oligonucleotide: CBLB-3933
ucacaauauaauucauauuguucc

SEQ ID NO: 34076 - RNA, 18 nt, Artificial Sequence
  Synthetic oligonucleotide: CBLB-3934
agauccaggcgaggaggc

SEQ ID NO: 34077 - RNA, 19 nt, Artificial Sequence
  Synthetic oligonucleotide: CBLB-3935
uagauccaggcgaggaggc

SEQ ID NO: 34078 - RNA, 20 nt, Artificial Sequence
  Synthetic oligonucleotide: CBLB-3936
uuagauccaggcgaggaggc

SEQ ID NO: 34079 - RNA, 21 nt, Artificial Sequence
  Synthetic oligonucleotide: CBLB-3937
auuagauccaggcgaggaggc

SEQ ID NO: 34080 - RNA, 22 nt, Artificial Sequence
  Synthetic oligonucleotide: CBLB-3938
aauuagauccaggcgaggaggc

SEQ ID NO: 34081 - RNA, 23 nt, Artificial Sequence
  Synthetic oligonucleotide: CBLB-3939
gaauuagauccaggcgaggaggc

SEQ ID NO: 34082 - RNA, 24 nt, Artificial Sequence
  Synthetic oligonucleotide: CBLB-3940
ugaauuagauccaggcgaggaggc

SEQ ID NO: 34083 - RNA, 18 nt, Artificial Sequence
  Synthetic oligonucleotide: CBLB-3941
uaaacaaauagaaaaugc

SEQ ID NO: 34084 - RNA, 19 nt, Artificial Sequence
  Synthetic oligonucleotide: CBLB-3942
cuaaacaaauagaaaaugc

SEQ ID NO: 34085 - RNA, 20 nt, Artificial Sequence
  Synthetic oligonucleotide: CBLB-3943
ccuaaacaaauagaaaaugc

SEQ ID NO: 34086 - RNA, 21 nt, Artificial Sequence
  Synthetic oligonucleotide: CBLB-3944
uccuaaacaaauagaaaaugc

SEQ ID NO: 34087 - RNA, 22 nt, Artificial Sequence
  Synthetic oligonucleotide: CBLB-3945
cuccuaaacaaauagaaaaugc

SEQ ID NO: 34088 - RNA, 23 nt, Artificial Sequence
  Synthetic oligonucleotide: CBLB-3946
acuccuaaacaaauagaaaaugc

SEQ ID NO: 34089 - RNA, 24 nt, Artificial Sequence
  Synthetic oligonucleotide: CBLB-3947
gacuccuaaacaaauagaaaaugc

SEQ ID NO: 34090 - RNA, 18 nt, Artificial Sequence
  Synthetic oligonucleotide: CBLB-3948
aggcuuagaugugggauc

SEQ ID NO: 34091 - RNA, 19 nt, Artificial Sequence
  Synthetic oligonucleotide: CBLB-3949
caggcuuagaugugggauc

SEQ ID NO: 34092 - RNA, 20 nt, Artificial Sequence
  Synthetic oligonucleotide: CBLB-3211
gcaggcuuagaugugggauc

SEQ ID NO: 34093 - RNA, 21 nt, Artificial Sequence
  Synthetic oligonucleotide: CBLB-3950
ggcaggcuuagaugugggauc

SEQ ID NO: 34094 - RNA, 22 nt, Artificial Sequence
  Synthetic oligonucleotide: CBLB-3951
uggcaggcuuagaugugggauc

SEQ ID NO: 34095 - RNA, 23 nt, Artificial Sequence
  Synthetic oligonucleotide: CBLB-3952
guggcaggcuuagaugugggauc

SEQ ID NO: 34096 - RNA, 24 nt, Artificial Sequence
  Synthetic oligonucleotide: CBLB-3953
gguggcaggcuuagaugugggauc

SEQ ID NO: 34097 - RNA, 18 nt, Artificial Sequence
  Synthetic oligonucleotide: CBLB-3954
accuggagccuucaucuc

SEQ ID NO: 34098 - RNA, 19 nt, Artificial Sequence
  Synthetic oligonucleotide: CBLB-3955
caccuggagccuucaucuc

SEQ ID NO: 34099 - RNA, 20 nt, Artificial Sequence
  Synthetic oligonucleotide: CBLB-3956
acaccuggagccuucaucuc

SEQ ID NO: 34100 - RNA, 21 nt, Artificial Sequence
  Synthetic oligonucleotide: CBLB-3957
aacaccuggagccuucaucuc

SEQ ID NO: 34101 - RNA, 22 nt, Artificial Sequence
  Synthetic oligonucleotide: CBLB-3958
caacaccuggagccuucaucuc

SEQ ID NO: 34102 - RNA, 23 nt, Artificial Sequence
  Synthetic oligonucleotide: CBLB-3959
gcaacaccuggagccuucaucuc

SEQ ID NO: 34103 - RNA, 24 nt, Artificial Sequence
  Synthetic oligonucleotide: CBLB-3960
ugcaacaccuggagccuucaucuc

SEQ ID NO: 34104 - RNA, 18 nt, Artificial Sequence
  Synthetic oligonucleotide: CBLB-3961
ucuccaaaaaacuuucuc

SEQ ID NO: 34105 - RNA, 19 nt, Artificial Sequence
  Synthetic oligonucleotide: CBLB-3962
gucuccaaaaaacuuucuc

SEQ ID NO: 34106 - RNA, 20 nt, Artificial Sequence
  Synthetic oligonucleotide: CBLB-3963
ugucuccaaaaaacuuucuc

SEQ ID NO: 34107 - RNA, 21 nt, Artificial Sequence
  Synthetic oligonucleotide: CBLB-3964
uugucuccaaaaaacuuucuc

SEQ ID NO: 34108 - RNA, 22 nt, Artificial Sequence
  Synthetic oligonucleotide: CBLB-3965
cuugucuccaaaaaacuuucuc

SEQ ID NO: 34109 - RNA, 23 nt, Artificial Sequence
  Synthetic oligonucleotide: CBLB-3966
acuugucuccaaaaaacuuucuc

SEQ ID NO: 34110 - RNA, 24 nt, Artificial Sequence
  Synthetic oligonucleotide: CBLB-3967
uacuugucuccaaaaaacuuucuc

SEQ ID NO: 34111 - RNA, 18 nt, Artificial Sequence
  Synthetic oligonucleotide: CBLB-3968
uaaauauaugcuuaaguc

SEQ ID NO: 34112 - RNA, 19 nt, Artificial Sequence
  Synthetic oligonucleotide: CBLB-3969
uuaaauauaugcuuaaguc

SEQ ID NO: 34113 - RNA, 20 nt, Artificial Sequence
  Synthetic oligonucleotide: CBLB-3220
uuuaaauauaugcuuaaguc

SEQ ID NO: 34114 - RNA, 21 nt, Artificial Sequence
  Synthetic oligonucleotide: CBLB-3970
cuuuaaauauaugcuuaaguc

SEQ ID NO: 34115 - RNA, 22 nt, Artificial Sequence
  Synthetic oligonucleotide: CBLB-3971
ccuuuaaauauaugcuuaaguc

SEQ ID NO: 34116 - RNA, 23 nt, Artificial Sequence
  Synthetic oligonucleotide: CBLB-3972
cccuuuaaauauaugcuuaaguc

SEQ ID NO: 34117 - RNA, 24 nt, Artificial Sequence
  Synthetic oligonucleotide: CBLB-3973
acccuuuaaauauaugcuuaaguc

SEQ ID NO: 34118 - RNA, 18 nt, Artificial Sequence
  Synthetic oligonucleotide: CBLB-3974
accaugcuuuggauuguc

SEQ ID NO: 34119 - RNA, 19 nt, Artificial Sequence
  Synthetic oligonucleotide: CBLB-3975
aaccaugcuuuggauuguc

SEQ ID NO: 34120 - RNA, 20 nt, Artificial Sequence
  Synthetic oligonucleotide: CBLB-3976
gaaccaugcuuuggauuguc

SEQ ID NO: 34121 - RNA, 21 nt, Artificial Sequence
  Synthetic oligonucleotide: CBLB-3977
agaaccaugcuuuggauuguc

SEQ ID NO: 34122 - RNA, 22 nt, Artificial Sequence
  Synthetic oligonucleotide: CBLB-3978
aagaaccaugcuuuggauuguc

SEQ ID NO: 34123 - RNA, 23 nt, Artificial Sequence
  Synthetic oligonucleotide: CBLB-3979
gaagaaccaugcuuuggauuguc

SEQ ID NO: 34124 - RNA, 24 nt, Artificial Sequence
  Synthetic oligonucleotide: CBLB-3980
ugaagaaccaugcuuuggauuguc

SEQ ID NO: 34125 - RNA, 18 nt, Artificial Sequence
  Synthetic oligonucleotide: CBLB-3981
ucacuuuaugcuagggag

SEQ ID NO: 34126 - RNA, 19 nt, Artificial Sequence
  Synthetic oligonucleotide: CBLB-3982
cucacuuuaugcuagggag

SEQ ID NO: 34127 - RNA, 20 nt, Artificial Sequence
  Synthetic oligonucleotide: CBLB-3983
acucacuuuaugcuagggag

SEQ ID NO: 34128 - RNA, 21 nt, Artificial Sequence
  Synthetic oligonucleotide: CBLB-3984
aacucacuuuaugcuagggag

SEQ ID NO: 34129 - RNA, 22 nt, Artificial Sequence
  Synthetic oligonucleotide: CBLB-3985
aaacucacuuuaugcuagggag

SEQ ID NO: 34130 - RNA, 23 nt, Artificial Sequence
  Synthetic oligonucleotide: CBLB-3986
aaaacucacuuuaugcuagggag

SEQ ID NO: 34131 - RNA, 24 nt, Artificial Sequence
  Synthetic oligonucleotide: CBLB-3987
caaaacucacuuuaugcuagggag

SEQ ID NO: 34132 - RNA, 18 nt, Artificial Sequence
  Synthetic oligonucleotide: CBLB-3988
uuucagguggcgguggag

SEQ ID NO: 34133 - RNA, 19 nt, Artificial Sequence
  Synthetic oligonucleotide: CBLB-3989
cuuucagguggcgguggag

SEQ ID NO: 34134 - RNA, 20 nt, Artificial Sequence
  Synthetic oligonucleotide: CBLB-3990
ucuuucagguggcgguggag

SEQ ID NO: 34135 - RNA, 21 nt, Artificial Sequence
  Synthetic oligonucleotide: CBLB-3991
gucuuucagguggcgguggag

SEQ ID NO: 34136 - RNA, 22 nt, Artificial Sequence
  Synthetic oligonucleotide: CBLB-3992
ggucuuucagguggcgguggag

SEQ ID NO: 34137 - RNA, 23 nt, Artificial Sequence
  Synthetic oligonucleotide: CBLB-3993
aggucuuucagguggcgguggag

SEQ ID NO: 34138 - RNA, 24 nt, Artificial Sequence
  Synthetic oligonucleotide: CBLB-3994
gaggucuuucagguggcgguggag

SEQ ID NO: 34139 - RNA, 18 nt, Artificial Sequence
  Synthetic oligonucleotide: CBLB-3995
agggaaggcaaauucucg

SEQ ID NO: 34140 - RNA, 19 nt, Artificial Sequence
  Synthetic oligonucleotide: CBLB-3996
gagggaaggcaaauucucg

SEQ ID NO: 34141 - RNA, 20 nt, Artificial Sequence
  Synthetic oligonucleotide: CBLB-3997
ggagggaaggcaaauucucg

SEQ ID NO: 34142 - RNA, 21 nt, Artificial Sequence
  Synthetic oligonucleotide: CBLB-3998
aggagggaaggcaaauucucg

SEQ ID NO: 34143 - RNA, 22 nt, Artificial Sequence
  Synthetic oligonucleotide: CBLB-3999
gaggagggaaggcaaauucucg

SEQ ID NO: 34144 - RNA, 23 nt, Artificial Sequence
  Synthetic oligonucleotide: CBLB-4000
ggaggagggaaggcaaauucucg

SEQ ID NO: 34145 - RNA, 24 nt, Artificial Sequence
  Synthetic oligonucleotide: CBLB-4001
uggaggagggaaggcaaauucucg

SEQ ID NO: 34146 - RNA, 18 nt, Artificial Sequence
  Synthetic oligonucleotide: CBLB-4002
auggcacgggaucagagg

SEQ ID NO: 34147 - RNA, 19 nt, Artificial Sequence
  Synthetic oligonucleotide: CBLB-4003
aauggcacgggaucagagg

SEQ ID NO: 34148 - RNA, 20 nt, Artificial Sequence
  Synthetic oligonucleotide: CBLB-4004
uaauggcacgggaucagagg

SEQ ID NO: 34149 - RNA, 21 nt, Artificial Sequence
  Synthetic oligonucleotide: CBLB-4005
guaauggcacgggaucagagg

SEQ ID NO: 34150 - RNA, 22 nt, Artificial Sequence
  Synthetic oligonucleotide: CBLB-4006
gguaauggcacgggaucagagg

SEQ ID NO: 34151 - RNA, 23 nt, Artificial Sequence
  Synthetic oligonucleotide: CBLB-4007
ugguaauggcacgggaucagagg

SEQ ID NO: 34152 - RNA, 24 nt, Artificial Sequence
  Synthetic oligonucleotide: CBLB-4008
gugguaauggcacgggaucagagg

SEQ ID NO: 34153 - RNA, 18 nt, Artificial Sequence
  Synthetic oligonucleotide: CBLB-4009
gaauucagggaaacaggg

SEQ ID NO: 34154 - RNA, 19 nt, Artificial Sequence
  Synthetic oligonucleotide: CBLB-4010
ugaauucagggaaacaggg

SEQ ID NO: 34155 - RNA, 20 nt, Artificial Sequence
  Synthetic oligonucleotide: CBLB-3288
gugaauucagggaaacaggg

SEQ ID NO: 34156 - RNA, 21 nt, Artificial Sequence
  Synthetic oligonucleotide: CBLB-4011
ugugaauucagggaaacaggg

SEQ ID NO: 34157 - RNA, 22 nt, Artificial Sequence
  Synthetic oligonucleotide: CBLB-4012
uugugaauucagggaaacaggg

SEQ ID NO: 34158 - RNA, 23 nt, Artificial Sequence
  Synthetic oligonucleotide: CBLB-4013
guugugaauucagggaaacaggg

SEQ ID NO: 34159 - RNA, 24 nt, Artificial Sequence
  Synthetic oligonucleotide: CBLB-4014
gguugugaauucagggaaacaggg

SEQ ID NO: 34160 - RNA, 18 nt, Artificial Sequence
  Synthetic oligonucleotide: CBLB-4015
aagguuucaaccuaaugg

SEQ ID NO: 34161 - RNA, 19 nt, Artificial Sequence
  Synthetic oligonucleotide: CBLB-4016
aaagguuucaaccuaaugg

SEQ ID NO: 34162 - RNA, 20 nt, Artificial Sequence
  Synthetic oligonucleotide: CBLB-3297
uaaagguuucaaccuaaugg

SEQ ID NO: 34163 - RNA, 21 nt, Artificial Sequence
  Synthetic oligonucleotide: CBLB-4017
uuaaagguuucaaccuaaugg

SEQ ID NO: 34164 - RNA, 22 nt, Artificial Sequence
  Synthetic oligonucleotide: CBLB-4018
uuuaaagguuucaaccuaaugg

SEQ ID NO: 34165 - RNA, 23 nt, Artificial Sequence
  Synthetic oligonucleotide: CBLB-4019
uuuuaaagguuucaaccuaaugg

SEQ ID NO: 34166 - RNA, 24 nt, Artificial Sequence
  Synthetic oligonucleotide: CBLB-4020
uuuuuaaagguuucaaccuaaugg

SEQ ID NO: 34167 - RNA, 18 nt, Artificial Sequence
  Synthetic oligonucleotide: CBLB-4021
acucagucuauugucugg

SEQ ID NO: 34168 - RNA, 19 nt, Artificial Sequence
  Synthetic oligonucleotide: CBLB-4022
uacucagucuauugucugg

SEQ ID NO: 34169 - RNA, 20 nt, Artificial Sequence
  Synthetic oligonucleotide: CBLB-3302
cuacucagucuauugucugg

SEQ ID NO: 34170 - RNA, 21 nt, Artificial Sequence
  Synthetic oligonucleotide: CBLB-4023
ucuacucagucuauugucugg

SEQ ID NO: 34171 - RNA, 22 nt, Artificial Sequence
  Synthetic oligonucleotide: CBLB-4024
gucuacucagucuauugucugg

SEQ ID NO: 34172 - RNA, 23 nt, Artificial Sequence
  Synthetic oligonucleotide: CBLB-4025
ugucuacucagucuauugucugg

SEQ ID NO: 34173 - RNA, 24 nt, Artificial Sequence
  Synthetic oligonucleotide: CBLB-4026
gugucuacucagucuauugucugg

SEQ ID NO: 34174 - RNA, 18 nt, Artificial Sequence
  Synthetic oligonucleotide: CBLB-4027
aggcacgcuuuccacaug

SEQ ID NO: 34175 - RNA, 19 nt, Artificial Sequence
  Synthetic oligonucleotide: CBLB-4028
aaggcacgcuuuccacaug

SEQ ID NO: 34176 - RNA, 20 nt, Artificial Sequence
  Synthetic oligonucleotide: CBLB-4029
gaaggcacgcuuuccacaug

SEQ ID NO: 34177 - RNA, 21 nt, Artificial Sequence
  Synthetic oligonucleotide: CBLB-4030
ggaaggcacgcuuuccacaug

SEQ ID NO: 34178 - RNA, 22 nt, Artificial Sequence
  Synthetic oligonucleotide: CBLB-4031
uggaaggcacgcuuuccacaug

SEQ ID NO: 34179 - RNA, 23 nt, Artificial Sequence
  Synthetic oligonucleotide: CBLB-4032
cuggaaggcacgcuuuccacaug

SEQ ID NO: 34180 - RNA, 24 nt, Artificial Sequence
  Synthetic oligonucleotide: CBLB-4033
ucuggaaggcacgcuuuccacaug

SEQ ID NO: 34181 - RNA, 18 nt, Artificial Sequence
  Synthetic oligonucleotide: CBLB-4034
ggguggcaggcuuagaug

SEQ ID NO: 34182 - RNA, 19 nt, Artificial Sequence
  Synthetic oligonucleotide: CBLB-4035
cggguggcaggcuuagaug

SEQ ID NO: 34183 - RNA, 20 nt, Artificial Sequence
  Synthetic oligonucleotide: CBLB-3314
acggguggcaggcuuagaug

SEQ ID NO: 34184 - RNA, 21 nt, Artificial Sequence
  Synthetic oligonucleotide: CBLB-4036
cacggguggcaggcuuagaug

SEQ ID NO: 34185 - RNA, 22 nt, Artificial Sequence
  Synthetic oligonucleotide: CBLB-4037
gcacggguggcaggcuuagaug

SEQ ID NO: 34186 - RNA, 23 nt, Artificial Sequence
  Synthetic oligonucleotide: CBLB-4038
ggcacggguggcaggcuuagaug

SEQ ID NO: 34187 - RNA, 24 nt, Artificial Sequence
  Synthetic oligonucleotide: CBLB-4039
aggcacggguggcaggcuuagaug

SEQ ID NO: 34188 - RNA, 18 nt, Artificial Sequence
  Synthetic oligonucleotide: CBLB-4040
auccuggugaugugacug

SEQ ID NO: 34189 - RNA, 19 nt, Artificial Sequence
  Synthetic oligonucleotide: CBLB-4041
gauccuggugaugugacug

SEQ ID NO: 34190 - RNA, 20 nt, Artificial Sequence
  Synthetic oligonucleotide: CBLB-4042
ggauccuggugaugugacug

SEQ ID NO: 34191 - RNA, 21 nt, Artificial Sequence
  Synthetic oligonucleotide: CBLB-4043
aggauccuggugaugugacug

SEQ ID NO: 34192 - RNA, 22 nt, Artificial Sequence
  Synthetic oligonucleotide: CBLB-4044
gaggauccuggugaugugacug

SEQ ID NO: 34193 - RNA, 23 nt, Artificial Sequence
  Synthetic oligonucleotide: CBLB-4045
agaggauccuggugaugugacug

SEQ ID NO: 34194 - RNA, 24 nt, Artificial Sequence
  Synthetic oligonucleotide: CBLB-4046
gagaggauccuggugaugugacug

SEQ ID NO: 34195 - RNA, 18 nt, Artificial Sequence
  Synthetic oligonucleotide: CBLB-4047
uaaucagagggcguccug

SEQ ID NO: 34196 - RNA, 19 nt, Artificial Sequence
  Synthetic oligonucleotide: CBLB-4048
auaaucagagggcguccug

SEQ ID NO: 34197 - RNA, 20 nt, Artificial Sequence
  Synthetic oligonucleotide: CBLB-4049
cauaaucagagggcguccug

SEQ ID NO: 34198 - RNA, 21 nt, Artificial Sequence
  Synthetic oligonucleotide: CBLB-4050
ucauaaucagagggcguccug

SEQ ID NO: 34199 - RNA, 22 nt, Artificial Sequence
  Synthetic oligonucleotide: CBLB-4051
aucauaaucagagggcguccug

SEQ ID NO: 34200 - RNA, 23 nt, Artificial Sequence
  Synthetic oligonucleotide: CBLB-4052
gaucauaaucagagggcguccug

SEQ ID NO: 34201 - RNA, 24 nt, Artificial Sequence
  Synthetic oligonucleotide: CBLB-4053
agaucauaaucagagggcguccug

SEQ ID NO: 34202 - RNA, 18 nt, Artificial Sequence
  Synthetic oligonucleotide: CBLB-4054
cccaugggguuuucugug

SEQ ID NO: 34203 - RNA, 19 nt, Artificial Sequence
  Synthetic oligonucleotide: CBLB-4055
gcccaugggguuuucugug

SEQ ID NO: 34204 - RNA, 20 nt, Artificial Sequence
  Synthetic oligonucleotide: CBLB-4056
ggcccaugggguuuucugug

SEQ ID NO: 34205 - RNA, 21 nt, Artificial Sequence
  Synthetic oligonucleotide: CBLB-4057
aggcccaugggguuuucugug

SEQ ID NO: 34206 - RNA, 22 nt, Artificial Sequence
  Synthetic oligonucleotide: CBLB-4058
caggcccaugggguuuucugug

SEQ ID NO: 34207 - RNA, 23 nt, Artificial Sequence
  Synthetic oligonucleotide: CBLB-4059
ucaggcccaugggguuuucugug

SEQ ID NO: 34208 - RNA, 24 nt, Artificial Sequence
  Synthetic oligonucleotide: CBLB-4060
cucaggcccaugggguuuucugug

SEQ ID NO: 34209 - RNA, 18 nt, Artificial Sequence
  Synthetic oligonucleotide: CBLB-4061
augcuucaagaggcauug

SEQ ID NO: 34210 - RNA, 19 nt, Artificial Sequence
  Synthetic oligonucleotide: CBLB-4062
caugcuucaagaggcauug

SEQ ID NO: 34211 - RNA, 20 nt, Artificial Sequence
  Synthetic oligonucleotide: CBLB-4063
ccaugcuucaagaggcauug

SEQ ID NO: 34212 - RNA, 21 nt, Artificial Sequence
  Synthetic oligonucleotide: CBLB-4064
accaugcuucaagaggcauug

SEQ ID NO: 34213 - RNA, 22 nt, Artificial Sequence
  Synthetic oligonucleotide: CBLB-4065
caccaugcuucaagaggcauug

SEQ ID NO: 34214 - RNA, 23 nt, Artificial Sequence
  Synthetic oligonucleotide: CBLB-4066
gcaccaugcuucaagaggcauug

SEQ ID NO: 34215 - RNA, 24 nt, Artificial Sequence
  Synthetic oligonucleotide: CBLB-4067
ggcaccaugcuucaagaggcauug

SEQ ID NO: 34216 - RNA, 18 nt, Artificial Sequence
  Synthetic oligonucleotide: CBLB-4068
cacauaauccaguuaaau

SEQ ID NO: 34217 - RNA, 19 nt, Artificial Sequence
  Synthetic oligonucleotide: CBLB-4069
ucacauaauccaguuaaau

SEQ ID NO: 34218 - RNA, 20 nt, Artificial Sequence
  Synthetic oligonucleotide: CBLB-4070
uucacauaauccaguuaaau

SEQ ID NO: 34219 - RNA, 21 nt, Artificial Sequence
  Synthetic oligonucleotide: CBLB-4071
guucacauaauccaguuaaau

SEQ ID NO: 34220 - RNA, 22 nt, Artificial Sequence
  Synthetic oligonucleotide: CBLB-4072
gguucacauaauccaguuaaau

SEQ ID NO: 34221 - RNA, 23 nt, Artificial Sequence
  Synthetic oligonucleotide: CBLB-4073
agguucacauaauccaguuaaau

SEQ ID NO: 34222 - RNA, 24 nt, Artificial Sequence
  Synthetic oligonucleotide: CBLB-4074
uagguucacauaauccaguuaaau

SEQ ID NO: 34223 - RNA, 18 nt, Artificial Sequence
  Synthetic oligonucleotide: CBLB-4075
gauuauaacuccucccau

SEQ ID NO: 34224 - RNA, 19 nt, Artificial Sequence
  Synthetic oligonucleotide: CBLB-4076
ggauuauaacuccucccau

SEQ ID NO: 34225 - RNA, 20 nt, Artificial Sequence
  Synthetic oligonucleotide: CBLB-4077
aggauuauaacuccucccau

SEQ ID NO: 34226 - RNA, 21 nt, Artificial Sequence
  Synthetic oligonucleotide: CBLB-4078
caggauuauaacuccucccau

SEQ ID NO: 34227 - RNA, 22 nt, Artificial Sequence
  Synthetic oligonucleotide: CBLB-4079
ucaggauuauaacuccucccau

SEQ ID NO: 34228 - RNA, 23 nt, Artificial Sequence
  Synthetic oligonucleotide: CBLB-4080
aucaggauuauaacuccucccau

SEQ ID NO: 34229 - RNA, 24 nt, Artificial Sequence
  Synthetic oligonucleotide: CBLB-4081
aaucaggauuauaacuccucccau

SEQ ID NO: 34230 - RNA, 18 nt, Artificial Sequence
  Synthetic oligonucleotide: CBLB-4082
uuuggagagcccuccccu

SEQ ID NO: 34231 - RNA, 19 nt, Artificial Sequence
  Synthetic oligonucleotide: CBLB-4083
uuuuggagagcccuccccu

SEQ ID NO: 34232 - RNA, 20 nt, Artificial Sequence
  Synthetic oligonucleotide: CBLB-3359
guuuuggagagcccuccccu

SEQ ID NO: 34233 - RNA, 21 nt, Artificial Sequence
  Synthetic oligonucleotide: CBLB-4084
gguuuuggagagcccuccccu

SEQ ID NO: 34234 - RNA, 22 nt, Artificial Sequence
  Synthetic oligonucleotide: CBLB-4085
agguuuuggagagcccuccccu

SEQ ID NO: 34235 - RNA, 23 nt, Artificial Sequence
  Synthetic oligonucleotide: CBLB-4086
cagguuuuggagagcccuccccu

SEQ ID NO: 34236 - RNA, 24 nt, Artificial Sequence
  Synthetic oligonucleotide: CBLB-4087
ccagguuuuggagagcccuccccu

SEQ ID NO: 34237 - RNA, 18 nt, Artificial Sequence
  Synthetic oligonucleotide: CBLB-4088
agaaaaagauccuguccu

SEQ ID NO: 34238 - RNA, 19 nt, Artificial Sequence
  Synthetic oligonucleotide: CBLB-4089
aagaaaaagauccuguccu

SEQ ID NO: 34239 - RNA, 20 nt, Artificial Sequence
  Synthetic oligonucleotide: CBLB-4090
gaagaaaaagauccuguccu

SEQ ID NO: 34240 - RNA, 21 nt, Artificial Sequence
  Synthetic oligonucleotide: CBLB-4091
agaagaaaaagauccuguccu

SEQ ID NO: 34241 - RNA, 22 nt, Artificial Sequence
  Synthetic oligonucleotide: CBLB-4092
aagaagaaaaagauccuguccu

SEQ ID NO: 34242 - RNA, 23 nt, Artificial Sequence
  Synthetic oligonucleotide: CBLB-4093
gaagaagaaaaagauccuguccu

SEQ ID NO: 34243 - RNA, 24 nt, Artificial Sequence
  Synthetic oligonucleotide: CBLB-4094
ggaagaagaaaaagauccuguccu

SEQ ID NO: 34244 - RNA, 18 nt, Artificial Sequence
  Synthetic oligonucleotide: CBLB-4095
ugagugaagaaccaugcu

SEQ ID NO: 34245 - RNA, 19 nt, Artificial Sequence
  Synthetic oligonucleotide: CBLB-4096
uugagugaagaaccaugcu

SEQ ID NO: 34246 - RNA, 20 nt, Artificial Sequence
  Synthetic oligonucleotide: CBLB-4097
guugagugaagaaccaugcu

SEQ ID NO: 34247 - RNA, 21 nt, Artificial Sequence
  Synthetic oligonucleotide: CBLB-4098
uguugagugaagaaccaugcu

SEQ ID NO: 34248 - RNA, 22 nt, Artificial Sequence
  Synthetic oligonucleotide: CBLB-4099
cuguugagugaagaaccaugcu

SEQ ID NO: 34249 - RNA, 23 nt, Artificial Sequence
  Synthetic oligonucleotide: CBLB-4100
ccuguugagugaagaaccaugcu

SEQ ID NO: 34250 - RNA, 24 nt, Artificial Sequence
  Synthetic oligonucleotide: CBLB-4101
uccuguugagugaagaaccaugcu

SEQ ID NO: 34251 - RNA, 18 nt, Artificial Sequence
  Synthetic oligonucleotide: CBLB-4102
aagggaggagguggugcu

SEQ ID NO: 34252 - RNA, 19 nt, Artificial Sequence
  Synthetic oligonucleotide: CBLB-4103
uaagggaggagguggugcu

SEQ ID NO: 34253 - RNA, 20 nt, Artificial Sequence
  Synthetic oligonucleotide: CBLB-3364
uuaagggaggagguggugcu

SEQ ID NO: 34254 - RNA, 21 nt, Artificial Sequence
  Synthetic oligonucleotide: CBLB-4104
cuuaagggaggagguggugcu

SEQ ID NO: 34255 - RNA, 22 nt, Artificial Sequence
  Synthetic oligonucleotide: CBLB-4105
ucuuaagggaggagguggugcu

SEQ ID NO: 34256 - RNA, 23 nt, Artificial Sequence
  Synthetic oligonucleotide: CBLB-4106
cucuuaagggaggagguggugcu

SEQ ID NO: 34257 - RNA, 24 nt, Artificial Sequence
  Synthetic oligonucleotide: CBLB-4107
ucucuuaagggaggagguggugcu

SEQ ID NO: 34258 - RNA, 18 nt, Artificial Sequence
  Synthetic oligonucleotide: CBLB-4108
ugcuauagauuuagacgu

SEQ ID NO: 34259 - RNA, 19 nt, Artificial Sequence
  Synthetic oligonucleotide: CBLB-4109
cugcuauagauuuagacgu

SEQ ID NO: 34260 - RNA, 20 nt, Artificial Sequence
  Synthetic oligonucleotide: CBLB-3377
gcugcuauagauuuagacgu

SEQ ID NO: 34261 - RNA, 21 nt, Artificial Sequence
  Synthetic oligonucleotide: CBLB-4110
ggcugcuauagauuuagacgu

SEQ ID NO: 34262 - RNA, 22 nt, Artificial Sequence
  Synthetic oligonucleotide: CBLB-4111
uggcugcuauagauuuagacgu

SEQ ID NO: 34263 - RNA, 23 nt, Artificial Sequence
  Synthetic oligonucleotide: CBLB-4112
cuggcugcuauagauuuagacgu

SEQ ID NO: 34264 - RNA, 24 nt, Artificial Sequence
  Synthetic oligonucleotide: CBLB-4113
ucuggcugcuauagauuuagacgu

SEQ ID NO: 34265 - RNA, 18 nt, Artificial Sequence
  Synthetic oligonucleotide: CBLB-4114
accucaugaaggcacugu

SEQ ID NO: 34266 - RNA, 19 nt, Artificial Sequence
  Synthetic oligonucleotide: CBLB-4115
gaccucaugaaggcacugu

SEQ ID NO: 34267 - RNA, 20 nt, Artificial Sequence
  Synthetic oligonucleotide: CBLB-4116
ggaccucaugaaggcacugu

SEQ ID NO: 34268 - RNA, 21 nt, Artificial Sequence
  Synthetic oligonucleotide: CBLB-4117
uggaccucaugaaggcacugu

SEQ ID NO: 34269 - RNA, 22 nt, Artificial Sequence
  Synthetic oligonucleotide: CBLB-4118
guggaccucaugaaggcacugu

SEQ ID NO: 34270 - RNA, 23 nt, Artificial Sequence
  Synthetic oligonucleotide: CBLB-4119
gguggaccucaugaaggcacugu

SEQ ID NO: 34271 - RNA, 24 nt, Artificial Sequence
  Synthetic oligonucleotide: CBLB-4120
ugguggaccucaugaaggcacugu

SEQ ID NO: 34272 - RNA, 18 nt, Artificial Sequence
  Synthetic oligonucleotide: CBLB-4121
gcuaaaaagucuuaccuu

SEQ ID NO: 34273 - RNA, 19 nt, Artificial Sequence
  Synthetic oligonucleotide: CBLB-4122
ugcuaaaaagucuuaccuu

SEQ ID NO: 34274 - RNA, 20 nt, Artificial Sequence
  Synthetic oligonucleotide: CBLB-4123
cugcuaaaaagucuuaccuu

SEQ ID NO: 34275 - RNA, 21 nt, Artificial Sequence
  Synthetic oligonucleotide: CBLB-4124
acugcuaaaaagucuuaccuu

SEQ ID NO: 34276 - RNA, 22 nt, Artificial Sequence
  Synthetic oligonucleotide: CBLB-4125
uacugcuaaaaagucuuaccuu

SEQ ID NO: 34277 - RNA, 23 nt, Artificial Sequence
  Synthetic oligonucleotide: CBLB-4126
uuacugcuaaaaagucuuaccuu

SEQ ID NO: 34278 - RNA, 24 nt, Artificial Sequence
  Synthetic oligonucleotide: CBLB-4127
auuacugcuaaaaagucuuaccuu

SEQ ID NO: 34279 - RNA, 18 nt, Artificial Sequence
  Synthetic oligonucleotide: CBLB-4128
aagaccuaaaggacaguu

SEQ ID NO: 34280 - RNA, 19 nt, Artificial Sequence
  Synthetic oligonucleotide: CBLB-4129
caagaccuaaaggacaguu

SEQ ID NO: 34281 - RNA, 20 nt, Artificial Sequence
  Synthetic oligonucleotide: CBLB-4130
acaagaccuaaaggacaguu

SEQ ID NO: 34282 - RNA, 21 nt, Artificial Sequence
  Synthetic oligonucleotide: CBLB-4131
cacaagaccuaaaggacaguu

SEQ ID NO: 34283 - RNA, 22 nt, Artificial Sequence
  Synthetic oligonucleotide: CBLB-4132
ucacaagaccuaaaggacaguu

SEQ ID NO: 34284 - RNA, 23 nt, Artificial Sequence
  Synthetic oligonucleotide: CBLB-4133
aucacaagaccuaaaggacaguu

SEQ ID NO: 34285 - RNA, 24 nt, Artificial Sequence
  Synthetic oligonucleotide: CBLB-4134
uaucacaagaccuaaaggacaguu

SEQ ID NO: 34286 - RNA, 18 nt, Artificial Sequence
  Synthetic oligonucleotide: CBLB-4135
uacuggagccaggagguu

SEQ ID NO: 34287 - RNA, 19 nt, Artificial Sequence
  Synthetic oligonucleotide: CBLB-4136
cuacuggagccaggagguu

SEQ ID NO: 34288 - RNA, 20 nt, Artificial Sequence
  Synthetic oligonucleotide: CBLB-4137
gcuacuggagccaggagguu

SEQ ID NO: 34289 - RNA, 21 nt, Artificial Sequence
  Synthetic oligonucleotide: CBLB-4138
ggcuacuggagccaggagguu

SEQ ID NO: 34290 - RNA, 22 nt, Artificial Sequence
  Synthetic oligonucleotide: CBLB-4139
cggcuacuggagccaggagguu

SEQ ID NO: 34291 - RNA, 23 nt, Artificial Sequence
  Synthetic oligonucleotide: CBLB-4140
ccggcuacuggagccaggagguu

SEQ ID NO: 34292 - RNA, 24 nt, Artificial Sequence
  Synthetic oligonucleotide: CBLB-4141
gccggcuacuggagccaggagguu

SEQ ID NO: 34293 - RNA, 18 nt, Artificial Sequence
  Synthetic oligonucleotide: CBLB-4142
uaugacaaugagaugguu

SEQ ID NO: 34294 - RNA, 19 nt, Artificial Sequence
  Synthetic oligonucleotide: CBLB-4143
uuaugacaaugagaugguu

SEQ ID NO: 34295 - RNA, 20 nt, Artificial Sequence
  Synthetic oligonucleotide: CBLB-4144
auuaugacaaugagaugguu

SEQ ID NO: 34296 - RNA, 21 nt, Artificial Sequence
  Synthetic oligonucleotide: CBLB-4145
cauuaugacaaugagaugguu

SEQ ID NO: 34297 - RNA, 22 nt, Artificial Sequence
  Synthetic oligonucleotide: CBLB-4146
acauuaugacaaugagaugguu

SEQ ID NO: 34298 - RNA, 23 nt, Artificial Sequence
  Synthetic oligonucleotide: CBLB-4147
uacauuaugacaaugagaugguu

SEQ ID NO: 34299 - RNA, 24 nt, Artificial Sequence
  Synthetic oligonucleotide: CBLB-4148
uuacauuaugacaaugagaugguu

SEQ ID NO: 34300 - RNA, 18 nt, Artificial Sequence
  Synthetic oligonucleotide: CBLB-4149
agaucuaacuaugccuuu

SEQ ID NO: 34301 - RNA, 19 nt, Artificial Sequence
  Synthetic oligonucleotide: CBLB-4150
gagaucuaacuaugccuuu

SEQ ID NO: 34302 - RNA, 20 nt, Artificial Sequence
  Synthetic oligonucleotide: CBLB-4151
ggagaucuaacuaugccuuu

SEQ ID NO: 34303 - RNA, 21 nt, Artificial Sequence
  Synthetic oligonucleotide: CBLB-4152
gggagaucuaacuaugccuuu

SEQ ID NO: 34304 - RNA, 22 nt, Artificial Sequence
  Synthetic oligonucleotide: CBLB-4153
agggagaucuaacuaugccuuu

SEQ ID NO: 34305 - RNA, 23 nt, Artificial Sequence
  Synthetic oligonucleotide: CBLB-4154
cagggagaucuaacuaugccuuu

SEQ ID NO: 34306 - RNA, 24 nt, Artificial Sequence
  Synthetic oligonucleotide: CBLB-4155
acagggagaucuaacuaugccuuu

SEQ ID NO: 34307 - RNA, 18 nt, Artificial Sequence
  Synthetic oligonucleotide: CBLB-4156
ccuccucccuagcauaaa

SEQ ID NO: 34308 - RNA, 19 nt, Artificial Sequence
  Synthetic oligonucleotide: CBLB-4157
cccuccucccuagcauaaa

SEQ ID NO: 34309 - RNA, 20 nt, Artificial Sequence
  Synthetic oligonucleotide: CBLB-4158
acccuccucccuagcauaaa

SEQ ID NO: 34310 - RNA, 21 nt, Artificial Sequence
  Synthetic oligonucleotide: CBLB-4159
cacccuccucccuagcauaaa

SEQ ID NO: 34311 - RNA, 22 nt, Artificial Sequence
  Synthetic oligonucleotide: CBLB-4160
ccacccuccucccuagcauaaa

SEQ ID NO: 34312 - RNA, 23 nt, Artificial Sequence
  Synthetic oligonucleotide: CBLB-4161
accacccuccucccuagcauaaa

SEQ ID NO: 34313 - RNA, 24 nt, Artificial Sequence
  Synthetic oligonucleotide: CBLB-4162
uaccacccuccucccuagcauaaa

SEQ ID NO: 34314 - RNA, 18 nt, Artificial Sequence
  Synthetic oligonucleotide: CBLB-4163
guuauaauccugauuuaa

SEQ ID NO: 34315 - RNA, 19 nt, Artificial Sequence
  Synthetic oligonucleotide: CBLB-4164
aguuauaauccugauuuaa

SEQ ID NO: 34316 - RNA, 20 nt, Artificial Sequence
  Synthetic oligonucleotide: CBLB-4165
gaguuauaauccugauuuaa

SEQ ID NO: 34317 - RNA, 21 nt, Artificial Sequence
  Synthetic oligonucleotide: CBLB-4166
ggaguuauaauccugauuuaa

SEQ ID NO: 34318 - RNA, 22 nt, Artificial Sequence
  Synthetic oligonucleotide: CBLB-4167
aggaguuauaauccugauuuaa

SEQ ID NO: 34319 - RNA, 23 nt, Artificial Sequence
  Synthetic oligonucleotide: CBLB-4168
gaggaguuauaauccugauuuaa

SEQ ID NO: 34320 - RNA, 24 nt, Artificial Sequence
  Synthetic oligonucleotide: CBLB-4169
ggaggaguuauaauccugauuuaa

SEQ ID NO: 34321 - RNA, 18 nt, Artificial Sequence
  Synthetic oligonucleotide: CBLB-4170
ccaaaaccuggaaucaca

SEQ ID NO: 34322 - RNA, 19 nt, Artificial Sequence
  Synthetic oligonucleotide: CBLB-4171
uccaaaaccuggaaucaca

SEQ ID NO: 34323 - RNA, 20 nt, Artificial Sequence
  Synthetic oligonucleotide: CBLB-4172
cuccaaaaccuggaaucaca

SEQ ID NO: 34324 - RNA, 21 nt, Artificial Sequence
  Synthetic oligonucleotide: CBLB-4173
ucuccaaaaccuggaaucaca

SEQ ID NO: 34325 - RNA, 22 nt, Artificial Sequence
  Synthetic oligonucleotide: CBLB-4174
cucuccaaaaccuggaaucaca

SEQ ID NO: 34326 - RNA, 23 nt, Artificial Sequence
  Synthetic oligonucleotide: CBLB-4175
gcucuccaaaaccuggaaucaca

SEQ ID NO: 34327 - RNA, 24 nt, Artificial Sequence
  Synthetic oligonucleotide: CBLB-4176
ggcucuccaaaaccuggaaucaca

SEQ ID NO: 34328 - RNA, 18 nt, Artificial Sequence
  Synthetic oligonucleotide: CBLB-4177
ucucccuguggcagccca

SEQ ID NO: 34329 - RNA, 19 nt, Artificial Sequence
  Synthetic oligonucleotide: CBLB-4178
aucucccuguggcagccca

SEQ ID NO: 34330 - RNA, 20 nt, Artificial Sequence
  Synthetic oligonucleotide: CBLB-4179
gaucucccuguggcagccca

SEQ ID NO: 34331 - RNA, 21 nt, Artificial Sequence
  Synthetic oligonucleotide: CBLB-4180
agaucucccuguggcagccca

SEQ ID NO: 34332 - RNA, 22 nt, Artificial Sequence
  Synthetic oligonucleotide: CBLB-4181
uagaucucccuguggcagccca

SEQ ID NO: 34333 - RNA, 23 nt, Artificial Sequence
  Synthetic oligonucleotide: CBLB-4182
uuagaucucccuguggcagccca

SEQ ID NO: 34334 - RNA, 24 nt, Artificial Sequence
  Synthetic oligonucleotide: CBLB-4183
guuagaucucccuguggcagccca

SEQ ID NO: 34335 - RNA, 18 nt, Artificial Sequence
  Synthetic oligonucleotide: CBLB-4184
cucuguaagauuugugca

SEQ ID NO: 34336 - RNA, 19 nt, Artificial Sequence
  Synthetic oligonucleotide: CBLB-4185
gcucuguaagauuugugca

SEQ ID NO: 34337 - RNA, 20 nt, Artificial Sequence
  Synthetic oligonucleotide: CBLB-4186
agcucuguaagauuugugca

SEQ ID NO: 34338 - RNA, 21 nt, Artificial Sequence
  Synthetic oligonucleotide: CBLB-4187
cagcucuguaagauuugugca

SEQ ID NO: 34339 - RNA, 22 nt, Artificial Sequence
  Synthetic oligonucleotide: CBLB-4188
ucagcucuguaagauuugugca

SEQ ID NO: 34340 - RNA, 23 nt, Artificial Sequence
  Synthetic oligonucleotide: CBLB-4189
uucagcucuguaagauuugugca

SEQ ID NO: 34341 - RNA, 24 nt, Artificial Sequence
  Synthetic oligonucleotide: CBLB-4190
uuucagcucuguaagauuugugca

SEQ ID NO: 34342 - RNA, 18 nt, Artificial Sequence
  Synthetic oligonucleotide: CBLB-4191
aucccaccagacaauaga

SEQ ID NO: 34343 - RNA, 19 nt, Artificial Sequence
  Synthetic oligonucleotide: CBLB-4192
aaucccaccagacaauaga

SEQ ID NO: 34344 - RNA, 20 nt, Artificial Sequence
  Synthetic oligonucleotide: CBLB-4193
caaucccaccagacaauaga

SEQ ID NO: 34345 - RNA, 21 nt, Artificial Sequence
  Synthetic oligonucleotide: CBLB-4194
ccaaucccaccagacaauaga

SEQ ID NO: 34346 - RNA, 22 nt, Artificial Sequence
  Synthetic oligonucleotide: CBLB-4195
accaaucccaccagacaauaga

SEQ ID NO: 34347 - RNA, 23 nt, Artificial Sequence
  Synthetic oligonucleotide: CBLB-4196
caccaaucccaccagacaauaga

SEQ ID NO: 34348 - RNA, 24 nt, Artificial Sequence
  Synthetic oligonucleotide: CBLB-4197
ccaccaaucccaccagacaauaga

SEQ ID NO: 34349 - RNA, 18 nt, Artificial Sequence
  Synthetic oligonucleotide: CBLB-4198
agccggccauccucagga

SEQ ID NO: 34350 - RNA, 19 nt, Artificial Sequence
  Synthetic oligonucleotide: CBLB-4199
uagccggccauccucagga

SEQ ID NO: 34351 - RNA, 20 nt, Artificial Sequence
  Synthetic oligonucleotide: CBLB-4200
guagccggccauccucagga

SEQ ID NO: 34352 - RNA, 21 nt, Artificial Sequence
  Synthetic oligonucleotide: CBLB-4201
aguagccggccauccucagga

SEQ ID NO: 34353 - RNA, 22 nt, Artificial Sequence
  Synthetic oligonucleotide: CBLB-4202
caguagccggccauccucagga

SEQ ID NO: 34354 - RNA, 23 nt, Artificial Sequence
  Synthetic oligonucleotide: CBLB-4203
ccaguagccggccauccucagga

SEQ ID NO: 34355 - RNA, 24 nt, Artificial Sequence
  Synthetic oligonucleotide: CBLB-4204
uccaguagccggccauccucagga

SEQ ID NO: 34356 - RNA, 18 nt, Artificial Sequence
  Synthetic oligonucleotide: CBLB-4205
auugcaaaacucauggga

SEQ ID NO: 34357 - RNA, 19 nt, Artificial Sequence
  Synthetic oligonucleotide: CBLB-4206
aauugcaaaacucauggga

SEQ ID NO: 34358 - RNA, 20 nt, Artificial Sequence
  Synthetic oligonucleotide: CBLB-4207
aaauugcaaaacucauggga

SEQ ID NO: 34359 - RNA, 21 nt, Artificial Sequence
  Synthetic oligonucleotide: CBLB-4208
aaaauugcaaaacucauggga

SEQ ID NO: 34360 - RNA, 22 nt, Artificial Sequence
  Synthetic oligonucleotide: CBLB-4209
aaaaauugcaaaacucauggga

SEQ ID NO: 34361 - RNA, 23 nt, Artificial Sequence
  Synthetic oligonucleotide: CBLB-4210
caaaaauugcaaaacucauggga

SEQ ID NO: 34362 - RNA, 24 nt, Artificial Sequence
  Synthetic oligonucleotide: CBLB-4211
gcaaaaauugcaaaacucauggga

SEQ ID NO: 34363 - RNA, 18 nt, Artificial Sequence
  Synthetic oligonucleotide: CBLB-4212
auauuuaaaggguacgua

SEQ ID NO: 34364 - RNA, 19 nt, Artificial Sequence
  Synthetic oligonucleotide: CBLB-4213
uauauuuaaaggguacgua

SEQ ID NO: 34365 - RNA, 20 nt, Artificial Sequence
  Synthetic oligonucleotide: CBLB-4214
auauauuuaaaggguacgua

SEQ ID NO: 34366 - RNA, 21 nt, Artificial Sequence
  Synthetic oligonucleotide: CBLB-4215
cauauauuuaaaggguacgua

SEQ ID NO: 34367 - RNA, 22 nt, Artificial Sequence
  Synthetic oligonucleotide: CBLB-4216
gcauauauuuaaaggguacgua

SEQ ID NO: 34368 - RNA, 23 nt, Artificial Sequence
  Synthetic oligonucleotide: CBLB-4217
agcauauauuuaaaggguacgua

SEQ ID NO: 34369 - RNA, 24 nt, Artificial Sequence
  Synthetic oligonucleotide: CBLB-4218
aagcauauauuuaaaggguacgua

SEQ ID NO: 34370 - RNA, 18 nt, Artificial Sequence
  Synthetic oligonucleotide: CBLB-4219
gacuuaagcauauauuua

SEQ ID NO: 34371 - RNA, 19 nt, Artificial Sequence
  Synthetic oligonucleotide: CBLB-4220
ugacuuaagcauauauuua

SEQ ID NO: 34372 - RNA, 20 nt, Artificial Sequence
  Synthetic oligonucleotide: CBLB-4221
cugacuuaagcauauauuua

SEQ ID NO: 34373 - RNA, 21 nt, Artificial Sequence
  Synthetic oligonucleotide: CBLB-4222
ccugacuuaagcauauauuua

SEQ ID NO: 34374 - RNA, 22 nt, Artificial Sequence
  Synthetic oligonucleotide: CBLB-4223
cccugacuuaagcauauauuua

SEQ ID NO: 34375 - RNA, 23 nt, Artificial Sequence
  Synthetic oligonucleotide: CBLB-4224
ucccugacuuaagcauauauuua

SEQ ID NO: 34376 - RNA, 24 nt, Artificial Sequence
  Synthetic oligonucleotide: CBLB-4225
aucccugacuuaagcauauauuua

SEQ ID NO: 34377 - RNA, 18 nt, Artificial Sequence
  Synthetic oligonucleotide: CBLB-4226
aaagguaaaacuagaaac

SEQ ID NO: 34378 - RNA, 19 nt, Artificial Sequence
  Synthetic oligonucleotide: CBLB-4227
gaaagguaaaacuagaaac

SEQ ID NO: 34379 - RNA, 20 nt, Artificial Sequence
  Synthetic oligonucleotide: CBLB-4228
cgaaagguaaaacuagaaac

SEQ ID NO: 34380 - RNA, 21 nt, Artificial Sequence
  Synthetic oligonucleotide: CBLB-4229
ccgaaagguaaaacuagaaac

SEQ ID NO: 34381 - RNA, 22 nt, Artificial Sequence
  Synthetic oligonucleotide: CBLB-4230
uccgaaagguaaaacuagaaac

SEQ ID NO: 34382 - RNA, 23 nt, Artificial Sequence
  Synthetic oligonucleotide: CBLB-4231
guccgaaagguaaaacuagaaac

SEQ ID NO: 34383 - RNA, 24 nt, Artificial Sequence
  Synthetic oligonucleotide: CBLB-4232
cguccgaaagguaaaacuagaaac

SEQ ID NO: 34384 - RNA, 18 nt, Artificial Sequence
  Synthetic oligonucleotide: CBLB-4233
gguauaaucauuagcaac

SEQ ID NO: 34385 - RNA, 19 nt, Artificial Sequence
  Synthetic oligonucleotide: CBLB-4234
agguauaaucauuagcaac

SEQ ID NO: 34386 - RNA, 20 nt, Artificial Sequence
  Synthetic oligonucleotide: CBLB-4235
cagguauaaucauuagcaac

SEQ ID NO: 34387 - RNA, 21 nt, Artificial Sequence
  Synthetic oligonucleotide: CBLB-4236
gcagguauaaucauuagcaac

SEQ ID NO: 34388 - RNA, 22 nt, Artificial Sequence
  Synthetic oligonucleotide: CBLB-4237
ggcagguauaaucauuagcaac

SEQ ID NO: 34389 - RNA, 23 nt, Artificial Sequence
  Synthetic oligonucleotide: CBLB-4238
uggcagguauaaucauuagcaac

SEQ ID NO: 34390 - RNA, 24 nt, Artificial Sequence
  Synthetic oligonucleotide: CBLB-4239
auggcagguauaaucauuagcaac

SEQ ID NO: 34391 - RNA, 18 nt, Artificial Sequence
  Synthetic oligonucleotide: CBLB-4240
acucaccagucacaucac

SEQ ID NO: 34392 - RNA, 19 nt, Artificial Sequence
  Synthetic oligonucleotide: CBLB-4241
aacucaccagucacaucac

SEQ ID NO: 34393 - RNA, 20 nt, Artificial Sequence
  Synthetic oligonucleotide: CBLB-4242
gaacucaccagucacaucac

SEQ ID NO: 34394 - RNA, 21 nt, Artificial Sequence
  Synthetic oligonucleotide: CBLB-4243
agaacucaccagucacaucac

SEQ ID NO: 34395 - RNA, 22 nt, Artificial Sequence
  Synthetic oligonucleotide: CBLB-4244
cagaacucaccagucacaucac

SEQ ID NO: 34396 - RNA, 23 nt, Artificial Sequence
  Synthetic oligonucleotide: CBLB-4245
gcagaacucaccagucacaucac

SEQ ID NO: 34397 - RNA, 24 nt, Artificial Sequence
  Synthetic oligonucleotide: CBLB-4246
ggcagaacucaccagucacaucac

SEQ ID NO: 34398 - RNA, 18 nt, Artificial Sequence
  Synthetic oligonucleotide: CBLB-4247
ggagggcucuccaaaacc

SEQ ID NO: 34399 - RNA, 19 nt, Artificial Sequence
  Synthetic oligonucleotide: CBLB-4248
gggagggcucuccaaaacc

SEQ ID NO: 34400 - RNA, 20 nt, Artificial Sequence
  Synthetic oligonucleotide: CBLB-3160
ggggagggcucuccaaaacc

SEQ ID NO: 34401 - RNA, 21 nt, Artificial Sequence
  Synthetic oligonucleotide: CBLB-4249
aggggagggcucuccaaaacc

SEQ ID NO: 34402 - RNA, 22 nt, Artificial Sequence
  Synthetic oligonucleotide: CBLB-4250
uaggggagggcucuccaaaacc

SEQ ID NO: 34403 - RNA, 23 nt, Artificial Sequence
  Synthetic oligonucleotide: CBLB-4251
cuaggggagggcucuccaaaacc

SEQ ID NO: 34404 - RNA, 24 nt, Artificial Sequence
  Synthetic oligonucleotide: CBLB-4252
ccuaggggagggcucuccaaaacc

SEQ ID NO: 34405 - RNA, 18 nt, Artificial Sequence
  Synthetic oligonucleotide: CBLB-4253
agagccuuagagauagcc

SEQ ID NO: 34406 - RNA, 19 nt, Artificial Sequence
  Synthetic oligonucleotide: CBLB-4254
gagagccuuagagauagcc

SEQ ID NO: 34407 - RNA, 20 nt, Artificial Sequence
  Synthetic oligonucleotide: CBLB-4255
agagagccuuagagauagcc

SEQ ID NO: 34408 - RNA, 21 nt, Artificial Sequence
  Synthetic oligonucleotide: CBLB-4256
aagagagccuuagagauagcc

SEQ ID NO: 34409 - RNA, 22 nt, Artificial Sequence
  Synthetic oligonucleotide: CBLB-4257
gaagagagccuuagagauagcc

SEQ ID NO: 34410 - RNA, 23 nt, Artificial Sequence
  Synthetic oligonucleotide: CBLB-4258
ugaagagagccuuagagauagcc

SEQ ID NO: 34411 - RNA, 24 nt, Artificial Sequence
  Synthetic oligonucleotide: CBLB-4259
gugaagagagccuuagagauagcc

SEQ ID NO: 34412 - RNA, 18 nt, Artificial Sequence
  Synthetic oligonucleotide: CBLB-4260
uugcccggagcauccucc

SEQ ID NO: 34413 - RNA, 19 nt, Artificial Sequence
  Synthetic oligonucleotide: CBLB-4261
guugcccggagcauccucc

SEQ ID NO: 34414 - RNA, 20 nt, Artificial Sequence
  Synthetic oligonucleotide: CBLB-4262
aguugcccggagcauccucc

SEQ ID NO: 34415 - RNA, 21 nt, Artificial Sequence
  Synthetic oligonucleotide: CBLB-4263
aaguugcccggagcauccucc

SEQ ID NO: 34416 - RNA, 22 nt, Artificial Sequence
  Synthetic oligonucleotide: CBLB-4264
gaaguugcccggagcauccucc

SEQ ID NO: 34417 - RNA, 23 nt, Artificial Sequence
  Synthetic oligonucleotide: CBLB-4265
cgaaguugcccggagcauccucc

SEQ ID NO: 34418 - RNA, 24 nt, Artificial Sequence
  Synthetic oligonucleotide: CBLB-4266
ucgaaguugcccggagcauccucc

SEQ ID NO: 34419 - RNA, 18 nt, Artificial Sequence
  Synthetic oligonucleotide: CBLB-4267
ucaucccacccuguuucc

SEQ ID NO: 34420 - RNA, 19 nt, Artificial Sequence
  Synthetic oligonucleotide: CBLB-4268
uucaucccacccuguuucc

SEQ ID NO: 34421 - RNA, 20 nt, Artificial Sequence
  Synthetic oligonucleotide: CBLB-4269
cuucaucccacccuguuucc

SEQ ID NO: 34422 - RNA, 21 nt, Artificial Sequence
  Synthetic oligonucleotide: CBLB-4270
ccuucaucccacccuguuucc

SEQ ID NO: 34423 - RNA, 22 nt, Artificial Sequence
  Synthetic oligonucleotide: CBLB-4271
uccuucaucccacccuguuucc

SEQ ID NO: 34424 - RNA, 23 nt, Artificial Sequence
  Synthetic oligonucleotide: CBLB-4272
uuccuucaucccacccuguuucc

SEQ ID NO: 34425 - RNA, 24 nt, Artificial Sequence
  Synthetic oligonucleotide: CBLB-4273
auuccuucaucccacccuguuucc

SEQ ID NO: 34426 - RNA, 18 nt, Artificial Sequence
  Synthetic oligonucleotide: CBLB-4274
ccacccgugccuccucgc

SEQ ID NO: 34427 - RNA, 19 nt, Artificial Sequence
  Synthetic oligonucleotide: CBLB-4275
gccacccgugccuccucgc

SEQ ID NO: 34428 - RNA, 20 nt, Artificial Sequence
  Synthetic oligonucleotide: CBLB-4276
ugccacccgugccuccucgc

SEQ ID NO: 34429 - RNA, 21 nt, Artificial Sequence
  Synthetic oligonucleotide: CBLB-4277
cugccacccgugccuccucgc

SEQ ID NO: 34430 - RNA, 22 nt, Artificial Sequence
  Synthetic oligonucleotide: CBLB-4278
ccugccacccgugccuccucgc

SEQ ID NO: 34431 - RNA, 23 nt, Artificial Sequence
  Synthetic oligonucleotide: CBLB-4279
gccugccacccgugccuccucgc

SEQ ID NO: 34432 - RNA, 24 nt, Artificial Sequence
  Synthetic oligonucleotide: CBLB-4280
agccugccacccgugccuccucgc

SEQ ID NO: 34433 - RNA, 18 nt, Artificial Sequence
  Synthetic oligonucleotide: CBLB-4281
ugucaauggaaggcacag

SEQ ID NO: 34434 - RNA, 19 nt, Artificial Sequence
  Synthetic oligonucleotide: CBLB-4282
augucaauggaaggcacag

SEQ ID NO: 34435 - RNA, 20 nt, Artificial Sequence
  Synthetic oligonucleotide: CBLB-4283
aaugucaauggaaggcacag

SEQ ID NO: 34436 - RNA, 21 nt, Artificial Sequence
  Synthetic oligonucleotide: CBLB-4284
aaaugucaauggaaggcacag

SEQ ID NO: 34437 - RNA, 22 nt, Artificial Sequence
  Synthetic oligonucleotide: CBLB-4285
caaaugucaauggaaggcacag

SEQ ID NO: 34438 - RNA, 23 nt, Artificial Sequence
  Synthetic oligonucleotide: CBLB-4286
ucaaaugucaauggaaggcacag

SEQ ID NO: 34439 - RNA, 24 nt, Artificial Sequence
  Synthetic oligonucleotide: CBLB-4287
uucaaaugucaauggaaggcacag

SEQ ID NO: 34440 - RNA, 18 nt, Artificial Sequence
  Synthetic oligonucleotide: CBLB-4288
agcuuccuucauguucag

SEQ ID NO: 34441 - RNA, 19 nt, Artificial Sequence
  Synthetic oligonucleotide: CBLB-4289
cagcuuccuucauguucag

SEQ ID NO: 34442 - RNA, 20 nt, Artificial Sequence
  Synthetic oligonucleotide: CBLB-4290
ucagcuuccuucauguucag

SEQ ID NO: 34443 - RNA, 21 nt, Artificial Sequence
  Synthetic oligonucleotide: CBLB-4291
aucagcuuccuucauguucag

SEQ ID NO: 34444 - RNA, 22 nt, Artificial Sequence
  Synthetic oligonucleotide: CBLB-4292
gaucagcuuccuucauguucag

SEQ ID NO: 34445 - RNA, 23 nt, Artificial Sequence
  Synthetic oligonucleotide: CBLB-4293
ugaucagcuuccuucauguucag

SEQ ID NO: 34446 - RNA, 24 nt, Artificial Sequence
  Synthetic oligonucleotide: CBLB-4294
augaucagcuuccuucauguucag

SEQ ID NO: 34447 - RNA, 18 nt, Artificial Sequence
  Synthetic oligonucleotide: CBLB-4295
uuucuauuuguuuaggag

SEQ ID NO: 34448 - RNA, 19 nt, Artificial Sequence
  Synthetic oligonucleotide: CBLB-4296
uuuucuauuuguuuaggag

SEQ ID NO: 34449 - RNA, 20 nt, Artificial Sequence
  Synthetic oligonucleotide: CBLB-4297
auuuucuauuuguuuaggag

SEQ ID NO: 34450 - RNA, 21 nt, Artificial Sequence
  Synthetic oligonucleotide: CBLB-4298
cauuuucuauuuguuuaggag

SEQ ID NO: 34451 - RNA, 22 nt, Artificial Sequence
  Synthetic oligonucleotide: CBLB-4299
gcauuuucuauuuguuuaggag

SEQ ID NO: 34452 - RNA, 23 nt, Artificial Sequence
  Synthetic oligonucleotide: CBLB-4300
ugcauuuucuauuuguuuaggag

SEQ ID NO: 34453 - RNA, 24 nt, Artificial Sequence
  Synthetic oligonucleotide: CBLB-4301
augcauuuucuauuuguuuaggag

SEQ ID NO: 34454 - RNA, 18 nt, Artificial Sequence
  Synthetic oligonucleotide: CBLB-4302
ugauugauggcagcaggg

SEQ ID NO: 34455 - RNA, 19 nt, Artificial Sequence
  Synthetic oligonucleotide: CBLB-4303
cugauugauggcagcaggg

SEQ ID NO: 34456 - RNA, 20 nt, Artificial Sequence
  Synthetic oligonucleotide: CBLB-4304
ccugauugauggcagcaggg

SEQ ID NO: 34457 - RNA, 21 nt, Artificial Sequence
  Synthetic oligonucleotide: CBLB-4305
cccugauugauggcagcaggg

SEQ ID NO: 34458 - RNA, 22 nt, Artificial Sequence
  Synthetic oligonucleotide: CBLB-4306
gcccugauugauggcagcaggg

SEQ ID NO: 34459 - RNA, 23 nt, Artificial Sequence
  Synthetic oligonucleotide: CBLB-4307
agcccugauugauggcagcaggg

SEQ ID NO: 34460 - RNA, 24 nt, Artificial Sequence
  Synthetic oligonucleotide: CBLB-4308
aagcccugauugauggcagcaggg

SEQ ID NO: 34461 - RNA, 18 nt, Artificial Sequence
  Synthetic oligonucleotide: CBLB-4309
uaucuuuauccugauggg

SEQ ID NO: 34462 - RNA, 19 nt, Artificial Sequence
  Synthetic oligonucleotide: CBLB-4310
uuaucuuuauccugauggg

SEQ ID NO: 34463 - RNA, 20 nt, Artificial Sequence
  Synthetic oligonucleotide: CBLB-3296
guuaucuuuauccugauggg

SEQ ID NO: 34464 - RNA, 21 nt, Artificial Sequence
  Synthetic oligonucleotide: CBLB-4311
aguuaucuuuauccugauggg

SEQ ID NO: 34465 - RNA, 22 nt, Artificial Sequence
  Synthetic oligonucleotide: CBLB-4312
caguuaucuuuauccugauggg

SEQ ID NO: 34466 - RNA, 23 nt, Artificial Sequence
  Synthetic oligonucleotide: CBLB-4313
ucaguuaucuuuauccugauggg

SEQ ID NO: 34467 - RNA, 24 nt, Artificial Sequence
  Synthetic oligonucleotide: CBLB-4314
uucaguuaucuuuauccugauggg

SEQ ID NO: 34468 - RNA, 18 nt, Artificial Sequence
  Synthetic oligonucleotide: CBLB-4315
caguagaggaagaugaug

SEQ ID NO: 34469 - RNA, 19 nt, Artificial Sequence
  Synthetic oligonucleotide: CBLB-4316
ccaguagaggaagaugaug

SEQ ID NO: 34470 - RNA, 20 nt, Artificial Sequence
  Synthetic oligonucleotide: CBLB-4317
cccaguagaggaagaugaug

SEQ ID NO: 34471 - RNA, 21 nt, Artificial Sequence
  Synthetic oligonucleotide: CBLB-4318
acccaguagaggaagaugaug

SEQ ID NO: 34472 - RNA, 22 nt, Artificial Sequence
  Synthetic oligonucleotide: CBLB-4319
gacccaguagaggaagaugaug

SEQ ID NO: 34473 - RNA, 23 nt, Artificial Sequence
  Synthetic oligonucleotide: CBLB-4320
agacccaguagaggaagaugaug

SEQ ID NO: 34474 - RNA, 24 nt, Artificial Sequence
  Synthetic oligonucleotide: CBLB-4321
gagacccaguagaggaagaugaug

SEQ ID NO: 34475 - RNA, 18 nt, Artificial Sequence
  Synthetic oligonucleotide: CBLB-4322
cgugaggaguccuugaug

SEQ ID NO: 34476 - RNA, 19 nt, Artificial Sequence
  Synthetic oligonucleotide: CBLB-4323
ucgugaggaguccuugaug

SEQ ID NO: 34477 - RNA, 20 nt, Artificial Sequence
  Synthetic oligonucleotide: CBLB-4324
aucgugaggaguccuugaug

SEQ ID NO: 34478 - RNA, 21 nt, Artificial Sequence
  Synthetic oligonucleotide: CBLB-4325
gaucgugaggaguccuugaug

SEQ ID NO: 34479 - RNA, 22 nt, Artificial Sequence
  Synthetic oligonucleotide: CBLB-4326
ugaucgugaggaguccuugaug

SEQ ID NO: 34480 - RNA, 23 nt, Artificial Sequence
  Synthetic oligonucleotide: CBLB-4327
augaucgugaggaguccuugaug

SEQ ID NO: 34481 - RNA, 24 nt, Artificial Sequence
  Synthetic oligonucleotide: CBLB-4328
gaugaucgugaggaguccuugaug

SEQ ID NO: 34482 - RNA, 18 nt, Artificial Sequence
  Synthetic oligonucleotide: CBLB-4329
gauaauggucacuguaug

SEQ ID NO: 34483 - RNA, 19 nt, Artificial Sequence
  Synthetic oligonucleotide: CBLB-4330
ugauaauggucacuguaug

SEQ ID NO: 34484 - RNA, 20 nt, Artificial Sequence
  Synthetic oligonucleotide: CBLB-4331
gugauaauggucacuguaug

SEQ ID NO: 34485 - RNA, 21 nt, Artificial Sequence
  Synthetic oligonucleotide: CBLB-4332
ugugauaauggucacuguaug

SEQ ID NO: 34486 - RNA, 22 nt, Artificial Sequence
  Synthetic oligonucleotide: CBLB-4333
uugugauaauggucacuguaug

SEQ ID NO: 34487 - RNA, 23 nt, Artificial Sequence
  Synthetic oligonucleotide: CBLB-4334
cuugugauaauggucacuguaug

SEQ ID NO: 34488 - RNA, 24 nt, Artificial Sequence
  Synthetic oligonucleotide: CBLB-4335
ucuugugauaauggucacuguaug

SEQ ID NO: 34489 - RNA, 18 nt, Artificial Sequence
  Synthetic oligonucleotide: CBLB-4336
ucacaaaagcagaugcug

SEQ ID NO: 34490 - RNA, 19 nt, Artificial Sequence
  Synthetic oligonucleotide: CBLB-4337
aucacaaaagcagaugcug

SEQ ID NO: 34491 - RNA, 20 nt, Artificial Sequence
  Synthetic oligonucleotide: CBLB-4338
uaucacaaaagcagaugcug

SEQ ID NO: 34492 - RNA, 21 nt, Artificial Sequence
  Synthetic oligonucleotide: CBLB-4339
guaucacaaaagcagaugcug

SEQ ID NO: 34493 - RNA, 22 nt, Artificial Sequence
  Synthetic oligonucleotide: CBLB-4340
cguaucacaaaagcagaugcug

SEQ ID NO: 34494 - RNA, 23 nt, Artificial Sequence
  Synthetic oligonucleotide: CBLB-4341
ucguaucacaaaagcagaugcug

SEQ ID NO: 34495 - RNA, 24 nt, Artificial Sequence
  Synthetic oligonucleotide: CBLB-4342
uucguaucacaaaagcagaugcug

SEQ ID NO: 34496 - RNA, 18 nt, Artificial Sequence
  Synthetic oligonucleotide: CBLB-4343
auggucaccuuggaagug

SEQ ID NO: 34497 - RNA, 19 nt, Artificial Sequence
  Synthetic oligonucleotide: CBLB-4344
aauggucaccuuggaagug

SEQ ID NO: 34498 - RNA, 20 nt, Artificial Sequence
  Synthetic oligonucleotide: CBLB-4345
caauggucaccuuggaagug

SEQ ID NO: 34499 - RNA, 21 nt, Artificial Sequence
  Synthetic oligonucleotide: CBLB-4346
ccaauggucaccuuggaagug

SEQ ID NO: 34500 - RNA, 22 nt, Artificial Sequence
  Synthetic oligonucleotide: CBLB-4347
uccaauggucaccuuggaagug

SEQ ID NO: 34501 - RNA, 23 nt, Artificial Sequence
  Synthetic oligonucleotide: CBLB-4348
uuccaauggucaccuuggaagug

SEQ ID NO: 34502 - RNA, 24 nt, Artificial Sequence
  Synthetic oligonucleotide: CBLB-4349
uuuccaauggucaccuuggaagug

SEQ ID NO: 34503 - RNA, 18 nt, Artificial Sequence
  Synthetic oligonucleotide: CBLB-4350
acgacgaugaugaucgug

SEQ ID NO: 34504 - RNA, 19 nt, Artificial Sequence
  Synthetic oligonucleotide: CBLB-4351
gacgacgaugaugaucgug

SEQ ID NO: 34505 - RNA, 20 nt, Artificial Sequence
  Synthetic oligonucleotide: CBLB-3325
ggacgacgaugaugaucgug

SEQ ID NO: 34506 - RNA, 21 nt, Artificial Sequence
  Synthetic oligonucleotide: CBLB-4352
uggacgacgaugaugaucgug

SEQ ID NO: 34507 - RNA, 22 nt, Artificial Sequence
  Synthetic oligonucleotide: CBLB-4353
uuggacgacgaugaugaucgug

SEQ ID NO: 34508 - RNA, 23 nt, Artificial Sequence
  Synthetic oligonucleotide: CBLB-4354
cuuggacgacgaugaugaucgug

SEQ ID NO: 34509 - RNA, 24 nt, Artificial Sequence
  Synthetic oligonucleotide: CBLB-4355
acuuggacgacgaugaugaucgug

SEQ ID NO: 34510 - RNA, 18 nt, Artificial Sequence
  Synthetic oligonucleotide: CBLB-4356
uugggacuaaucagcuug

SEQ ID NO: 34511 - RNA, 19 nt, Artificial Sequence
  Synthetic oligonucleotide: CBLB-4357
uuugggacuaaucagcuug

SEQ ID NO: 34512 - RNA, 20 nt, Artificial Sequence
  Synthetic oligonucleotide: CBLB-3329
guuugggacuaaucagcuug

SEQ ID NO: 34513 - RNA, 21 nt, Artificial Sequence
  Synthetic oligonucleotide: CBLB-4358
uguuugggacuaaucagcuug

SEQ ID NO: 34514 - RNA, 22 nt, Artificial Sequence
  Synthetic oligonucleotide: CBLB-4359
guguuugggacuaaucagcuug

SEQ ID NO: 34515 - RNA, 23 nt, Artificial Sequence
  Synthetic oligonucleotide: CBLB-4360
uguguuugggacuaaucagcuug

SEQ ID NO: 34516 - RNA, 24 nt, Artificial Sequence
  Synthetic oligonucleotide: CBLB-4361
auguguuugggacuaaucagcuug

SEQ ID NO: 34517 - RNA, 18 nt, Artificial Sequence
  Synthetic oligonucleotide: CBLB-4362
ccuuggggcucuauuuug

SEQ ID NO: 34518 - RNA, 19 nt, Artificial Sequence
  Synthetic oligonucleotide: CBLB-4363
gccuuggggcucuauuuug

SEQ ID NO: 34519 - RNA, 20 nt, Artificial Sequence
  Synthetic oligonucleotide: CBLB-3331
agccuuggggcucuauuuug

SEQ ID NO: 34520 - RNA, 21 nt, Artificial Sequence
  Synthetic oligonucleotide: CBLB-4364
uagccuuggggcucuauuuug

SEQ ID NO: 34521 - RNA, 22 nt, Artificial Sequence
  Synthetic oligonucleotide: CBLB-4365
uuagccuuggggcucuauuuug

SEQ ID NO: 34522 - RNA, 23 nt, Artificial Sequence
  Synthetic oligonucleotide: CBLB-4366
uuuagccuuggggcucuauuuug

SEQ ID NO: 34523 - RNA, 24 nt, Artificial Sequence
  Synthetic oligonucleotide: CBLB-4367
uuuuagccuuggggcucuauuuug

SEQ ID NO: 34524 - RNA, 18 nt, Artificial Sequence
  Synthetic oligonucleotide: CBLB-4368
agcauaaagugaguuuug

SEQ ID NO: 34525 - RNA, 19 nt, Artificial Sequence
  Synthetic oligonucleotide: CBLB-4369
uagcauaaagugaguuuug

SEQ ID NO: 34526 - RNA, 20 nt, Artificial Sequence
  Synthetic oligonucleotide: CBLB-4370
cuagcauaaagugaguuuug

SEQ ID NO: 34527 - RNA, 21 nt, Artificial Sequence
  Synthetic oligonucleotide: CBLB-4371
ccuagcauaaagugaguuuug

SEQ ID NO: 34528 - RNA, 22 nt, Artificial Sequence
  Synthetic oligonucleotide: CBLB-4372
cccuagcauaaagugaguuuug

SEQ ID NO: 34529 - RNA, 23 nt, Artificial Sequence
  Synthetic oligonucleotide: CBLB-4373
ucccuagcauaaagugaguuuug

SEQ ID NO: 34530 - RNA, 24 nt, Artificial Sequence
  Synthetic oligonucleotide: CBLB-4374
cucccuagcauaaagugaguuuug

SEQ ID NO: 34531 - RNA, 18 nt, Artificial Sequence
  Synthetic oligonucleotide: CBLB-4375
ccaaauuccaggaacaau

SEQ ID NO: 34532 - RNA, 19 nt, Artificial Sequence
  Synthetic oligonucleotide: CBLB-4376
cccaaauuccaggaacaau

SEQ ID NO: 34533 - RNA, 20 nt, Artificial Sequence
  Synthetic oligonucleotide: CBLB-4377
ccccaaauuccaggaacaau

SEQ ID NO: 34534 - RNA, 21 nt, Artificial Sequence
  Synthetic oligonucleotide: CBLB-4378
uccccaaauuccaggaacaau

SEQ ID NO: 34535 - RNA, 22 nt, Artificial Sequence
  Synthetic oligonucleotide: CBLB-4379
cuccccaaauuccaggaacaau

SEQ ID NO: 34536 - RNA, 23 nt, Artificial Sequence
  Synthetic oligonucleotide: CBLB-4380
ccuccccaaauuccaggaacaau

SEQ ID NO: 34537 - RNA, 24 nt, Artificial Sequence
  Synthetic oligonucleotide: CBLB-4381
uccuccccaaauuccaggaacaau

SEQ ID NO: 34538 - RNA, 18 nt, Artificial Sequence
  Synthetic oligonucleotide: CBLB-4382
ggcucuauuuugcggaau

SEQ ID NO: 34539 - RNA, 19 nt, Artificial Sequence
  Synthetic oligonucleotide: CBLB-4383
gggcucuauuuugcggaau

SEQ ID NO: 34540 - RNA, 20 nt, Artificial Sequence
  Synthetic oligonucleotide: CBLB-3333
ggggcucuauuuugcggaau

SEQ ID NO: 34541 - RNA, 21 nt, Artificial Sequence
  Synthetic oligonucleotide: CBLB-4384
uggggcucuauuuugcggaau

SEQ ID NO: 34542 - RNA, 22 nt, Artificial Sequence
  Synthetic oligonucleotide: CBLB-4385
uuggggcucuauuuugcggaau

SEQ ID NO: 34543 - RNA, 23 nt, Artificial Sequence
  Synthetic oligonucleotide: CBLB-4386
cuuggggcucuauuuugcggaau

SEQ ID NO: 34544 - RNA, 24 nt, Artificial Sequence
  Synthetic oligonucleotide: CBLB-4387
ccuuggggcucuauuuugcggaau

SEQ ID NO: 34545 - RNA, 18 nt, Artificial Sequence
  Synthetic oligonucleotide: CBLB-4388
ggcuaugugacuggggau

SEQ ID NO: 34546 - RNA, 19 nt, Artificial Sequence
  Synthetic oligonucleotide: CBLB-4389
uggcuaugugacuggggau

SEQ ID NO: 34547 - RNA, 20 nt, Artificial Sequence
  Synthetic oligonucleotide: CBLB-3346
uuggcuaugugacuggggau

SEQ ID NO: 34548 - RNA, 21 nt, Artificial Sequence
  Synthetic oligonucleotide: CBLB-4390
auuggcuaugugacuggggau

SEQ ID NO: 34549 - RNA, 22 nt, Artificial Sequence
  Synthetic oligonucleotide: CBLB-4391
cauuggcuaugugacuggggau

SEQ ID NO: 34550 - RNA, 23 nt, Artificial Sequence
  Synthetic oligonucleotide: CBLB-4392
ccauuggcuaugugacuggggau

SEQ ID NO: 34551 - RNA, 24 nt, Artificial Sequence
  Synthetic oligonucleotide: CBLB-4393
gccauuggcuaugugacuggggau

SEQ ID NO: 34552 - RNA, 18 nt, Artificial Sequence
  Synthetic oligonucleotide: CBLB-4394
gccauuggcuaugugacu

SEQ ID NO: 34553 - RNA, 19 nt, Artificial Sequence
  Synthetic oligonucleotide: CBLB-4395
ggccauuggcuaugugacu

SEQ ID NO: 34554 - RNA, 20 nt, Artificial Sequence
  Synthetic oligonucleotide: CBLB-3356
gggccauuggcuaugugacu

SEQ ID NO: 34555 - RNA, 21 nt, Artificial Sequence
  Synthetic oligonucleotide: CBLB-4396
ugggccauuggcuaugugacu

SEQ ID NO: 34556 - RNA, 22 nt, Artificial Sequence
  Synthetic oligonucleotide: CBLB-4397
gugggccauuggcuaugugacu

SEQ ID NO: 34557 - RNA, 23 nt, Artificial Sequence
  Synthetic oligonucleotide: CBLB-4398
agugggccauuggcuaugugacu

SEQ ID NO: 34558 - RNA, 24 nt, Artificial Sequence
  Synthetic oligonucleotide: CBLB-4399
cagugggccauuggcuaugugacu

SEQ ID NO: 34559 - RNA, 18 nt, Artificial Sequence
  Synthetic oligonucleotide: CBLB-4400
cuugaagcauggugcccu

SEQ ID NO: 34560 - RNA, 19 nt, Artificial Sequence
  Synthetic oligonucleotide: CBLB-4401
ucuugaagcauggugcccu

SEQ ID NO: 34561 - RNA, 20 nt, Artificial Sequence
  Synthetic oligonucleotide: CBLB-3360
cucuugaagcauggugcccu

SEQ ID NO: 34562 - RNA, 21 nt, Artificial Sequence
  Synthetic oligonucleotide: CBLB-4402
ccucuugaagcauggugcccu

SEQ ID NO: 34563 - RNA, 22 nt, Artificial Sequence
  Synthetic oligonucleotide: CBLB-4403
gccucuugaagcauggugcccu

SEQ ID NO: 34564 - RNA, 23 nt, Artificial Sequence
  Synthetic oligonucleotide: CBLB-4404
ugccucuugaagcauggugcccu

SEQ ID NO: 34565 - RNA, 24 nt, Artificial Sequence
  Synthetic oligonucleotide: CBLB-4405
augccucuugaagcauggugcccu

SEQ ID NO: 34566 - RNA, 18 nt, Artificial Sequence
  Synthetic oligonucleotide: CBLB-4406
aguaugagaaauggaagu

SEQ ID NO: 34567 - RNA, 19 nt, Artificial Sequence
  Synthetic oligonucleotide: CBLB-4407
aaguaugagaaauggaagu

SEQ ID NO: 34568 - RNA, 20 nt, Artificial Sequence
  Synthetic oligonucleotide: CBLB-3370
uaaguaugagaaauggaagu

SEQ ID NO: 34569 - RNA, 21 nt, Artificial Sequence
  Synthetic oligonucleotide: CBLB-4408
guaaguaugagaaauggaagu

SEQ ID NO: 34570 - RNA, 22 nt, Artificial Sequence
  Synthetic oligonucleotide: CBLB-4409
uguaaguaugagaaauggaagu

SEQ ID NO: 34571 - RNA, 23 nt, Artificial Sequence
  Synthetic oligonucleotide: CBLB-4410
uuguaaguaugagaaauggaagu

SEQ ID NO: 34572 - RNA, 24 nt, Artificial Sequence
  Synthetic oligonucleotide: CBLB-4411
auuguaaguaugagaaauggaagu

SEQ ID NO: 34573 - RNA, 18 nt, Artificial Sequence
  Synthetic oligonucleotide: CBLB-4412
uauaaaaguuacacaggu

SEQ ID NO: 34574 - RNA, 19 nt, Artificial Sequence
  Synthetic oligonucleotide: CBLB-4413
auauaaaaguuacacaggu

SEQ ID NO: 34575 - RNA, 20 nt, Artificial Sequence
  Synthetic oligonucleotide: CBLB-4414
cauauaaaaguuacacaggu

SEQ ID NO: 34576 - RNA, 21 nt, Artificial Sequence
  Synthetic oligonucleotide: CBLB-4415
ccauauaaaaguuacacaggu

SEQ ID NO: 34577 - RNA, 22 nt, Artificial Sequence
  Synthetic oligonucleotide: CBLB-4416
accauauaaaaguuacacaggu

SEQ ID NO: 34578 - RNA, 23 nt, Artificial Sequence
  Synthetic oligonucleotide: CBLB-4417
gaccauauaaaaguuacacaggu

SEQ ID NO: 34579 - RNA, 24 nt, Artificial Sequence
  Synthetic oligonucleotide: CBLB-4418
ugaccauauaaaaguuacacaggu

SEQ ID NO: 34580 - RNA, 18 nt, Artificial Sequence
  Synthetic oligonucleotide: CBLB-4419
uaaaaccuccuguucggu

SEQ ID NO: 34581 - RNA, 19 nt, Artificial Sequence
  Synthetic oligonucleotide: CBLB-4420
guaaaaccuccuguucggu

SEQ ID NO: 34582 - RNA, 20 nt, Artificial Sequence
  Synthetic oligonucleotide: CBLB-4421
uguaaaaccuccuguucggu

SEQ ID NO: 34583 - RNA, 21 nt, Artificial Sequence
  Synthetic oligonucleotide: CBLB-4422
auguaaaaccuccuguucggu

SEQ ID NO: 34584 - RNA, 22 nt, Artificial Sequence
  Synthetic oligonucleotide: CBLB-4423
aauguaaaaccuccuguucggu

SEQ ID NO: 34585 - RNA, 23 nt, Artificial Sequence
  Synthetic oligonucleotide: CBLB-4424
uaauguaaaaccuccuguucggu

SEQ ID NO: 34586 - RNA, 24 nt, Artificial Sequence
  Synthetic oligonucleotide: CBLB-4425
auaauguaaaaccuccuguucggu

SEQ ID NO: 34587 - RNA, 18 nt, Artificial Sequence
  Synthetic oligonucleotide: CBLB-4426
augauuacauuucaguuu

SEQ ID NO: 34588 - RNA, 19 nt, Artificial Sequence
  Synthetic oligonucleotide: CBLB-4427
aaugauuacauuucaguuu

SEQ ID NO: 34589 - RNA, 20 nt, Artificial Sequence
  Synthetic oligonucleotide: CBLB-4428
caaugauuacauuucaguuu

SEQ ID NO: 34590 - RNA, 21 nt, Artificial Sequence
  Synthetic oligonucleotide: CBLB-4429
gcaaugauuacauuucaguuu

SEQ ID NO: 34591 - RNA, 22 nt, Artificial Sequence
  Synthetic oligonucleotide: CBLB-4430
ugcaaugauuacauuucaguuu

SEQ ID NO: 34592 - RNA, 23 nt, Artificial Sequence
  Synthetic oligonucleotide: CBLB-4431
uugcaaugauuacauuucaguuu

SEQ ID NO: 34593 - RNA, 24 nt, Artificial Sequence
  Synthetic oligonucleotide: CBLB-4432
cuugcaaugauuacauuucaguuu

SEQ ID NO: 34594 - RNA, 18 nt, Artificial Sequence
  Synthetic oligonucleotide: CBLB-4433
ugcauuuucuauuuguuu

SEQ ID NO: 34595 - RNA, 19 nt, Artificial Sequence
  Synthetic oligonucleotide: CBLB-4434
augcauuuucuauuuguuu

SEQ ID NO: 34596 - RNA, 20 nt, Artificial Sequence
  Synthetic oligonucleotide: CBLB-3410
caugcauuuucuauuuguuu

SEQ ID NO: 34597 - RNA, 21 nt, Artificial Sequence
  Synthetic oligonucleotide: CBLB-4435
ccaugcauuuucuauuuguuu

SEQ ID NO: 34598 - RNA, 22 nt, Artificial Sequence
  Synthetic oligonucleotide: CBLB-4436
uccaugcauuuucuauuuguuu

SEQ ID NO: 34599 - RNA, 23 nt, Artificial Sequence
  Synthetic oligonucleotide: CBLB-4437
auccaugcauuuucuauuuguuu

SEQ ID NO: 34600 - RNA, 24 nt, Artificial Sequence
  Synthetic oligonucleotide: CBLB-4438
aauccaugcauuuucuauuuguuu

SEQ ID NO: 34601 - RNA, 18 nt, Artificial Sequence
  Synthetic oligonucleotide: CBLB-4439
gugcaagguggaaaaaaa

SEQ ID NO: 34602 - RNA, 19 nt, Artificial Sequence
  Synthetic oligonucleotide: CBLB-4440
ugugcaagguggaaaaaaa

SEQ ID NO: 34603 - RNA, 20 nt, Artificial Sequence
  Synthetic oligonucleotide: CBLB-3013
cugugcaagguggaaaaaaa

SEQ ID NO: 34604 - RNA, 21 nt, Artificial Sequence
  Synthetic oligonucleotide: CBLB-4441
ucugugcaagguggaaaaaaa

SEQ ID NO: 34605 - RNA, 22 nt, Artificial Sequence
  Synthetic oligonucleotide: CBLB-4442
uucugugcaagguggaaaaaaa

SEQ ID NO: 34606 - RNA, 23 nt, Artificial Sequence
  Synthetic oligonucleotide: CBLB-4443
guucugugcaagguggaaaaaaa

SEQ ID NO: 34607 - RNA, 24 nt, Artificial Sequence
  Synthetic oligonucleotide: CBLB-4444
aguucugugcaagguggaaaaaaa

SEQ ID NO: 34608 - RNA, 18 nt, Artificial Sequence
  Synthetic oligonucleotide: CBLB-4445
uaggcacaagggaaaaaa

SEQ ID NO: 34609 - RNA, 19 nt, Artificial Sequence
  Synthetic oligonucleotide: CBLB-4446
guaggcacaagggaaaaaa

SEQ ID NO: 34610 - RNA, 20 nt, Artificial Sequence
  Synthetic oligonucleotide: CBLB-4447
uguaggcacaagggaaaaaa

SEQ ID NO: 34611 - RNA, 21 nt, Artificial Sequence
  Synthetic oligonucleotide: CBLB-4448
cuguaggcacaagggaaaaaa

SEQ ID NO: 34612 - RNA, 22 nt, Artificial Sequence
  Synthetic oligonucleotide: CBLB-4449
ucuguaggcacaagggaaaaaa

SEQ ID NO: 34613 - RNA, 23 nt, Artificial Sequence
  Synthetic oligonucleotide: CBLB-4450
gucuguaggcacaagggaaaaaa

SEQ ID NO: 34614 - RNA, 24 nt, Artificial Sequence
  Synthetic oligonucleotide: CBLB-4451
cgucuguaggcacaagggaaaaaa

SEQ ID NO: 34615 - RNA, 18 nt, Artificial Sequence
  Synthetic oligonucleotide: CBLB-4452
ugugcaagguggaaaaaa

SEQ ID NO: 34616 - RNA, 19 nt, Artificial Sequence
  Synthetic oligonucleotide: CBLB-4453
cugugcaagguggaaaaaa

SEQ ID NO: 34617 - RNA, 20 nt, Artificial Sequence
  Synthetic oligonucleotide: CBLB-3014
ucugugcaagguggaaaaaa

SEQ ID NO: 34618 - RNA, 21 nt, Artificial Sequence
  Synthetic oligonucleotide: CBLB-4454
uucugugcaagguggaaaaaa

SEQ ID NO: 34619 - RNA, 22 nt, Artificial Sequence
  Synthetic oligonucleotide: CBLB-4455
guucugugcaagguggaaaaaa

SEQ ID NO: 34620 - RNA, 23 nt, Artificial Sequence
  Synthetic oligonucleotide: CBLB-4456
aguucugugcaagguggaaaaaa

SEQ ID NO: 34621 - RNA, 24 nt, Artificial Sequence
  Synthetic oligonucleotide: CBLB-4457
uaguucugugcaagguggaaaaaa

SEQ ID NO: 34622 - RNA, 18 nt, Artificial Sequence
  Synthetic oligonucleotide: CBLB-4458
aaauaucaaauucaaaaa

SEQ ID NO: 34623 - RNA, 19 nt, Artificial Sequence
  Synthetic oligonucleotide: CBLB-4459
aaaauaucaaauucaaaaa

SEQ ID NO: 34624 - RNA, 20 nt, Artificial Sequence
  Synthetic oligonucleotide: CBLB-4460
aaaaauaucaaauucaaaaa

SEQ ID NO: 34625 - RNA, 21 nt, Artificial Sequence
  Synthetic oligonucleotide: CBLB-4461
uaaaaauaucaaauucaaaaa

SEQ ID NO: 34626 - RNA, 22 nt, Artificial Sequence
  Synthetic oligonucleotide: CBLB-4462
guaaaaauaucaaauucaaaaa

SEQ ID NO: 34627 - RNA, 23 nt, Artificial Sequence
  Synthetic oligonucleotide: CBLB-4463
gguaaaaauaucaaauucaaaaa

SEQ ID NO: 34628 - RNA, 24 nt, Artificial Sequence
  Synthetic oligonucleotide: CBLB-4464
ugguaaaaauaucaaauucaaaaa

SEQ ID NO: 34629 - RNA, 18 nt, Artificial Sequence
  Synthetic oligonucleotide: CBLB-4465
ugcacuagaacagaaaaa

SEQ ID NO: 34630 - RNA, 19 nt, Artificial Sequence
  Synthetic oligonucleotide: CBLB-4466
gugcacuagaacagaaaaa

SEQ ID NO: 34631 - RNA, 20 nt, Artificial Sequence
  Synthetic oligonucleotide: CBLB-4467
agugcacuagaacagaaaaa

SEQ ID NO: 34632 - RNA, 21 nt, Artificial Sequence
  Synthetic oligonucleotide: CBLB-4468
cagugcacuagaacagaaaaa

SEQ ID NO: 34633 - RNA, 22 nt, Artificial Sequence
  Synthetic oligonucleotide: CBLB-4469
ucagugcacuagaacagaaaaa

SEQ ID NO: 34634 - RNA, 23 nt, Artificial Sequence
  Synthetic oligonucleotide: CBLB-4470
gucagugcacuagaacagaaaaa

SEQ ID NO: 34635 - RNA, 24 nt, Artificial Sequence
  Synthetic oligonucleotide: CBLB-4471
ugucagugcacuagaacagaaaaa

SEQ ID NO: 34636 - RNA, 18 nt, Artificial Sequence
  Synthetic oligonucleotide: CBLB-4472
cugugcaagguggaaaaa

SEQ ID NO: 34637 - RNA, 19 nt, Artificial Sequence
  Synthetic oligonucleotide: CBLB-4473
ucugugcaagguggaaaaa

SEQ ID NO: 34638 - RNA, 20 nt, Artificial Sequence
  Synthetic oligonucleotide: CBLB-4474
uucugugcaagguggaaaaa

SEQ ID NO: 34639 - RNA, 21 nt, Artificial Sequence
  Synthetic oligonucleotide: CBLB-4475
guucugugcaagguggaaaaa

SEQ ID NO: 34640 - RNA, 22 nt, Artificial Sequence
  Synthetic oligonucleotide: CBLB-4476
aguucugugcaagguggaaaaa

SEQ ID NO: 34641 - RNA, 23 nt, Artificial Sequence
  Synthetic oligonucleotide: CBLB-4477
uaguucugugcaagguggaaaaa

SEQ ID NO: 34642 - RNA, 24 nt, Artificial Sequence
  Synthetic oligonucleotide: CBLB-4478
auaguucugugcaagguggaaaaa

SEQ ID NO: 34643 - RNA, 18 nt, Artificial Sequence
  Synthetic oligonucleotide: CBLB-4479
aauuccaauuccgcaaaa

SEQ ID NO: 34644 - RNA, 19 nt, Artificial Sequence
  Synthetic oligonucleotide: CBLB-4480
aaauuccaauuccgcaaaa

SEQ ID NO: 34645 - RNA, 20 nt, Artificial Sequence
  Synthetic oligonucleotide: CBLB-4481
gaaauuccaauuccgcaaaa

SEQ ID NO: 34646 - RNA, 21 nt, Artificial Sequence
  Synthetic oligonucleotide: CBLB-4482
agaaauuccaauuccgcaaaa

SEQ ID NO: 34647 - RNA, 22 nt, Artificial Sequence
  Synthetic oligonucleotide: CBLB-4483
aagaaauuccaauuccgcaaaa

SEQ ID NO: 34648 - RNA, 23 nt, Artificial Sequence
  Synthetic oligonucleotide: CBLB-4484
uaagaaauuccaauuccgcaaaa

SEQ ID NO: 34649 - RNA, 24 nt, Artificial Sequence
  Synthetic oligonucleotide: CBLB-4485
cuaagaaauuccaauuccgcaaaa

SEQ ID NO: 34650 - RNA, 18 nt, Artificial Sequence
  Synthetic oligonucleotide: CBLB-4486
aucuuacagagcugaaaa

SEQ ID NO: 34651 - RNA, 19 nt, Artificial Sequence
  Synthetic oligonucleotide: CBLB-4487
aaucuuacagagcugaaaa

SEQ ID NO: 34652 - RNA, 20 nt, Artificial Sequence
  Synthetic oligonucleotide: CBLB-4488
aaaucuuacagagcugaaaa

SEQ ID NO: 34653 - RNA, 21 nt, Artificial Sequence
  Synthetic oligonucleotide: CBLB-4489
caaaucuuacagagcugaaaa

SEQ ID NO: 34654 - RNA, 22 nt, Artificial Sequence
  Synthetic oligonucleotide: CBLB-4490
acaaaucuuacagagcugaaaa

SEQ ID NO: 34655 - RNA, 23 nt, Artificial Sequence
  Synthetic oligonucleotide: CBLB-4491
cacaaaucuuacagagcugaaaa

SEQ ID NO: 34656 - RNA, 24 nt, Artificial Sequence
  Synthetic oligonucleotide: CBLB-4492
gcacaaaucuuacagagcugaaaa

SEQ ID NO: 34657 - RNA, 18 nt, Artificial Sequence
  Synthetic oligonucleotide: CBLB-4493
auccgacuccuaaacaaa

SEQ ID NO: 34658 - RNA, 19 nt, Artificial Sequence
  Synthetic oligonucleotide: CBLB-4494
cauccgacuccuaaacaaa

SEQ ID NO: 34659 - RNA, 20 nt, Artificial Sequence
  Synthetic oligonucleotide: CBLB-4495
ccauccgacuccuaaacaaa

SEQ ID NO: 34660 - RNA, 21 nt, Artificial Sequence
  Synthetic oligonucleotide: CBLB-4496
accauccgacuccuaaacaaa

SEQ ID NO: 34661 - RNA, 22 nt, Artificial Sequence
  Synthetic oligonucleotide: CBLB-4497
gaccauccgacuccuaaacaaa

SEQ ID NO: 34662 - RNA, 23 nt, Artificial Sequence
  Synthetic oligonucleotide: CBLB-4498
ugaccauccgacuccuaaacaaa

SEQ ID NO: 34663 - RNA, 24 nt, Artificial Sequence
  Synthetic oligonucleotide: CBLB-4499
cugaccauccgacuccuaaacaaa

SEQ ID NO: 34664 - RNA, 18 nt, Artificial Sequence
  Synthetic oligonucleotide: CBLB-4500
aggagaagacuaaagaaa

SEQ ID NO: 34665 - RNA, 19 nt, Artificial Sequence
  Synthetic oligonucleotide: CBLB-4501
aaggagaagacuaaagaaa

SEQ ID NO: 34666 - RNA, 20 nt, Artificial Sequence
  Synthetic oligonucleotide: CBLB-4502
caaggagaagacuaaagaaa

SEQ ID NO: 34667 - RNA, 21 nt, Artificial Sequence
  Synthetic oligonucleotide: CBLB-4503
gcaaggagaagacuaaagaaa

SEQ ID NO: 34668 - RNA, 22 nt, Artificial Sequence
  Synthetic oligonucleotide: CBLB-4504
ugcaaggagaagacuaaagaaa

SEQ ID NO: 34669 - RNA, 23 nt, Artificial Sequence
  Synthetic oligonucleotide: CBLB-4505
augcaaggagaagacuaaagaaa

SEQ ID NO: 34670 - RNA, 24 nt, Artificial Sequence
  Synthetic oligonucleotide: CBLB-4506
caugcaaggagaagacuaaagaaa

SEQ ID NO: 34671 - RNA, 18 nt, Artificial Sequence
  Synthetic oligonucleotide: CBLB-4507
agugcacuagaacagaaa

SEQ ID NO: 34672 - RNA, 19 nt, Artificial Sequence
  Synthetic oligonucleotide: CBLB-4508
cagugcacuagaacagaaa

SEQ ID NO: 34673 - RNA, 20 nt, Artificial Sequence
  Synthetic oligonucleotide: CBLB-4509
ucagugcacuagaacagaaa

SEQ ID NO: 34674 - RNA, 21 nt, Artificial Sequence
  Synthetic oligonucleotide: CBLB-4510
gucagugcacuagaacagaaa

SEQ ID NO: 34675 - RNA, 22 nt, Artificial Sequence
  Synthetic oligonucleotide: CBLB-4511
ugucagugcacuagaacagaaa

SEQ ID NO: 34676 - RNA, 23 nt, Artificial Sequence
  Synthetic oligonucleotide: CBLB-4512
cugucagugcacuagaacagaaa

SEQ ID NO: 34677 - RNA, 24 nt, Artificial Sequence
  Synthetic oligonucleotide: CBLB-4513
ccugucagugcacuagaacagaaa

SEQ ID NO: 34678 - RNA, 18 nt, Artificial Sequence
  Synthetic oligonucleotide: CBLB-4514
aagauaacugaauuuaaa

SEQ ID NO: 34679 - RNA, 19 nt, Artificial Sequence
  Synthetic oligonucleotide: CBLB-4515
aaagauaacugaauuuaaa

SEQ ID NO: 34680 - RNA, 20 nt, Artificial Sequence
  Synthetic oligonucleotide: CBLB-4516
uaaagauaacugaauuuaaa

SEQ ID NO: 34681 - RNA, 21 nt, Artificial Sequence
  Synthetic oligonucleotide: CBLB-4517
auaaagauaacugaauuuaaa

SEQ ID NO: 34682 - RNA, 22 nt, Artificial Sequence
  Synthetic oligonucleotide: CBLB-4518
gauaaagauaacugaauuuaaa

SEQ ID NO: 34683 - RNA, 23 nt, Artificial Sequence
  Synthetic oligonucleotide: CBLB-4519
ggauaaagauaacugaauuuaaa

SEQ ID NO: 34684 - RNA, 24 nt, Artificial Sequence
  Synthetic oligonucleotide: CBLB-4520
aggauaaagauaacugaauuuaaa

SEQ ID NO: 34685 - RNA, 18 nt, Artificial Sequence
  Synthetic oligonucleotide: CBLB-4521
ucuguguagauuuuuaaa

SEQ ID NO: 34686 - RNA, 19 nt, Artificial Sequence
  Synthetic oligonucleotide: CBLB-4522
aucuguguagauuuuuaaa

SEQ ID NO: 34687 - RNA, 20 nt, Artificial Sequence
  Synthetic oligonucleotide: CBLB-4523
caucuguguagauuuuuaaa

SEQ ID NO: 34688 - RNA, 21 nt, Artificial Sequence
  Synthetic oligonucleotide: CBLB-4524
ccaucuguguagauuuuuaaa

SEQ ID NO: 34689 - RNA, 22 nt, Artificial Sequence
  Synthetic oligonucleotide: CBLB-4525
accaucuguguagauuuuuaaa

SEQ ID NO: 34690 - RNA, 23 nt, Artificial Sequence
  Synthetic oligonucleotide: CBLB-4526
aaccaucuguguagauuuuuaaa

SEQ ID NO: 34691 - RNA, 24 nt, Artificial Sequence
  Synthetic oligonucleotide: CBLB-4527
gaaccaucuguguagauuuuuaaa

SEQ ID NO: 34692 - RNA, 18 nt, Artificial Sequence
  Synthetic oligonucleotide: CBLB-4528
uuucgucuguaggcacaa

SEQ ID NO: 34693 - RNA, 19 nt, Artificial Sequence
  Synthetic oligonucleotide: CBLB-4529
auuucgucuguaggcacaa

SEQ ID NO: 34694 - RNA, 20 nt, Artificial Sequence
  Synthetic oligonucleotide: CBLB-3025
gauuucgucuguaggcacaa

SEQ ID NO: 34695 - RNA, 21 nt, Artificial Sequence
  Synthetic oligonucleotide: CBLB-4530
agauuucgucuguaggcacaa

SEQ ID NO: 34696 - RNA, 22 nt, Artificial Sequence
  Synthetic oligonucleotide: CBLB-4531
gagauuucgucuguaggcacaa

SEQ ID NO: 34697 - RNA, 23 nt, Artificial Sequence
  Synthetic oligonucleotide: CBLB-4532
ugagauuucgucuguaggcacaa

SEQ ID NO: 34698 - RNA, 24 nt, Artificial Sequence
  Synthetic oligonucleotide: CBLB-4533
gugagauuucgucuguaggcacaa

SEQ ID NO: 34699 - RNA, 18 nt, Artificial Sequence
  Synthetic oligonucleotide: CBLB-4534
ccuucuagcaggaggcaa

SEQ ID NO: 34700 - RNA, 19 nt, Artificial Sequence
  Synthetic oligonucleotide: CBLB-4535
accuucuagcaggaggcaa

SEQ ID NO: 34701 - RNA, 20 nt, Artificial Sequence
  Synthetic oligonucleotide: CBLB-3033
aaccuucuagcaggaggcaa

SEQ ID NO: 34702 - RNA, 21 nt, Artificial Sequence
  Synthetic oligonucleotide: CBLB-4536
uaaccuucuagcaggaggcaa

SEQ ID NO: 34703 - RNA, 22 nt, Artificial Sequence
  Synthetic oligonucleotide: CBLB-4537
guaaccuucuagcaggaggcaa

SEQ ID NO: 34704 - RNA, 23 nt, Artificial Sequence
  Synthetic oligonucleotide: CBLB-4538
gguaaccuucuagcaggaggcaa

SEQ ID NO: 34705 - RNA, 24 nt, Artificial Sequence
  Synthetic oligonucleotide: CBLB-4539
ugguaaccuucuagcaggaggcaa

SEQ ID NO: 34706 - RNA, 18 nt, Artificial Sequence
  Synthetic oligonucleotide: CBLB-4540
gcuuucuucucugggcaa

SEQ ID NO: 34707 - RNA, 19 nt, Artificial Sequence
  Synthetic oligonucleotide: CBLB-4541
ggcuuucuucucugggcaa

SEQ ID NO: 34708 - RNA, 20 nt, Artificial Sequence
  Synthetic oligonucleotide: CBLB-3034
uggcuuucuucucugggcaa

SEQ ID NO: 34709 - RNA, 21 nt, Artificial Sequence
  Synthetic oligonucleotide: CBLB-4542
guggcuuucuucucugggcaa

SEQ ID NO: 34710 - RNA, 22 nt, Artificial Sequence
  Synthetic oligonucleotide: CBLB-4543
uguggcuuucuucucugggcaa

SEQ ID NO: 34711 - RNA, 23 nt, Artificial Sequence
  Synthetic oligonucleotide: CBLB-4544
cuguggcuuucuucucugggcaa

SEQ ID NO: 34712 - RNA, 24 nt, Artificial Sequence
  Synthetic oligonucleotide: CBLB-4545
gcuguggcuuucuucucugggcaa

SEQ ID NO: 34713 - RNA, 18 nt, Artificial Sequence
  Synthetic oligonucleotide: CBLB-4546
aagacuaaagaaacagaa

SEQ ID NO: 34714 - RNA, 19 nt, Artificial Sequence
  Synthetic oligonucleotide: CBLB-4547
gaagacuaaagaaacagaa

SEQ ID NO: 34715 - RNA, 20 nt, Artificial Sequence
  Synthetic oligonucleotide: CBLB-4548
agaagacuaaagaaacagaa

SEQ ID NO: 34716 - RNA, 21 nt, Artificial Sequence
  Synthetic oligonucleotide: CBLB-4549
gagaagacuaaagaaacagaa

SEQ ID NO: 34717 - RNA, 22 nt, Artificial Sequence
  Synthetic oligonucleotide: CBLB-4550
ggagaagacuaaagaaacagaa

SEQ ID NO: 34718 - RNA, 23 nt, Artificial Sequence
  Synthetic oligonucleotide: CBLB-4551
aggagaagacuaaagaaacagaa

SEQ ID NO: 34719 - RNA, 24 nt, Artificial Sequence
  Synthetic oligonucleotide: CBLB-4552
aaggagaagacuaaagaaacagaa

SEQ ID NO: 34720 - RNA, 18 nt, Artificial Sequence
  Synthetic oligonucleotide: CBLB-4553
ccugucagugcacuagaa

SEQ ID NO: 34721 - RNA, 19 nt, Artificial Sequence
  Synthetic oligonucleotide: CBLB-4554
gccugucagugcacuagaa

SEQ ID NO: 34722 - RNA, 20 nt, Artificial Sequence
  Synthetic oligonucleotide: CBLB-4555
ugccugucagugcacuagaa

SEQ ID NO: 34723 - RNA, 21 nt, Artificial Sequence
  Synthetic oligonucleotide: CBLB-4556
cugccugucagugcacuagaa

SEQ ID NO: 34724 - RNA, 22 nt, Artificial Sequence
  Synthetic oligonucleotide: CBLB-4557
ucugccugucagugcacuagaa

SEQ ID NO: 34725 - RNA, 23 nt, Artificial Sequence
  Synthetic oligonucleotide: CBLB-4558
uucugccugucagugcacuagaa

SEQ ID NO: 34726 - RNA, 24 nt, Artificial Sequence
  Synthetic oligonucleotide: CBLB-4559
guucugccugucagugcacuagaa

SEQ ID NO: 34727 - RNA, 18 nt, Artificial Sequence
  Synthetic oligonucleotide: CBLB-4560
gcccauacucuuaccgaa

SEQ ID NO: 34728 - RNA, 19 nt, Artificial Sequence
  Synthetic oligonucleotide: CBLB-4561
ugcccauacucuuaccgaa

SEQ ID NO: 34729 - RNA, 20 nt, Artificial Sequence
  Synthetic oligonucleotide: CBLB-4562
cugcccauacucuuaccgaa

SEQ ID NO: 34730 - RNA, 21 nt, Artificial Sequence
  Synthetic oligonucleotide: CBLB-4563
ucugcccauacucuuaccgaa

SEQ ID NO: 34731 - RNA, 22 nt, Artificial Sequence
  Synthetic oligonucleotide: CBLB-4564
aucugcccauacucuuaccgaa

SEQ ID NO: 34732 - RNA, 23 nt, Artificial Sequence
  Synthetic oligonucleotide: CBLB-4565
aaucugcccauacucuuaccgaa

SEQ ID NO: 34733 - RNA, 24 nt, Artificial Sequence
  Synthetic oligonucleotide: CBLB-4566
aaaucugcccauacucuuaccgaa

SEQ ID NO: 34734 - RNA, 18 nt, Artificial Sequence
  Synthetic oligonucleotide: CBLB-4567
uuaaagguuucaaccuaa

SEQ ID NO: 34735 - RNA, 19 nt, Artificial Sequence
  Synthetic oligonucleotide: CBLB-4568
uuuaaagguuucaaccuaa

SEQ ID NO: 34736 - RNA, 20 nt, Artificial Sequence
  Synthetic oligonucleotide: CBLB-3046
uuuuaaagguuucaaccuaa

SEQ ID NO: 34737 - RNA, 21 nt, Artificial Sequence
  Synthetic oligonucleotide: CBLB-4569
uuuuuaaagguuucaaccuaa

SEQ ID NO: 34738 - RNA, 22 nt, Artificial Sequence
  Synthetic oligonucleotide: CBLB-4570
uuuuuuaaagguuucaaccuaa

SEQ ID NO: 34739 - RNA, 23 nt, Artificial Sequence
  Synthetic oligonucleotide: CBLB-4571
cuuuuuuaaagguuucaaccuaa

SEQ ID NO: 34740 - RNA, 24 nt, Artificial Sequence
  Synthetic oligonucleotide: CBLB-4572
acuuuuuuaaagguuucaaccuaa

SEQ ID NO: 34741 - RNA, 18 nt, Artificial Sequence
  Synthetic oligonucleotide: CBLB-4573
uagggaggagggugguaa

SEQ ID NO: 34742 - RNA, 19 nt, Artificial Sequence
  Synthetic oligonucleotide: CBLB-4574
cuagggaggagggugguaa

SEQ ID NO: 34743 - RNA, 20 nt, Artificial Sequence
  Synthetic oligonucleotide: CBLB-4575
gcuagggaggagggugguaa

SEQ ID NO: 34744 - RNA, 21 nt, Artificial Sequence
  Synthetic oligonucleotide: CBLB-4576
ugcuagggaggagggugguaa

SEQ ID NO: 34745 - RNA, 22 nt, Artificial Sequence
  Synthetic oligonucleotide: CBLB-4577
augcuagggaggagggugguaa

SEQ ID NO: 34746 - RNA, 23 nt, Artificial Sequence
  Synthetic oligonucleotide: CBLB-4578
uaugcuagggaggagggugguaa

SEQ ID NO: 34747 - RNA, 24 nt, Artificial Sequence
  Synthetic oligonucleotide: CBLB-4579
uuaugcuagggaggagggugguaa

SEQ ID NO: 34748 - RNA, 18 nt, Artificial Sequence
  Synthetic oligonucleotide: CBLB-4580
aaaaaauaaaaaaauuaa

SEQ ID NO: 34749 - RNA, 19 nt, Artificial Sequence
  Synthetic oligonucleotide: CBLB-4581
uaaaaaauaaaaaaauuaa

SEQ ID NO: 34750 - RNA, 20 nt, Artificial Sequence
  Synthetic oligonucleotide: CBLB-4582
cuaaaaaauaaaaaaauuaa

SEQ ID NO: 34751 - RNA, 21 nt, Artificial Sequence
  Synthetic oligonucleotide: CBLB-4583
gcuaaaaaauaaaaaaauuaa

SEQ ID NO: 34752 - RNA, 22 nt, Artificial Sequence
  Synthetic oligonucleotide: CBLB-4584
ggcuaaaaaauaaaaaaauuaa

SEQ ID NO: 34753 - RNA, 23 nt, Artificial Sequence
  Synthetic oligonucleotide: CBLB-4585
aggcuaaaaaauaaaaaaauuaa

SEQ ID NO: 34754 - RNA, 24 nt, Artificial Sequence
  Synthetic oligonucleotide: CBLB-4586
aaggcuaaaaaauaaaaaaauuaa

SEQ ID NO: 34755 - RNA, 18 nt, Artificial Sequence
  Synthetic oligonucleotide: CBLB-4587
caaucgagugcaacuuaa

SEQ ID NO: 34756 - RNA, 19 nt, Artificial Sequence
  Synthetic oligonucleotide: CBLB-4588
ccaaucgagugcaacuuaa

SEQ ID NO: 34757 - RNA, 20 nt, Artificial Sequence
  Synthetic oligonucleotide: CBLB-4589
cccaaucgagugcaacuuaa

SEQ ID NO: 34758 - RNA, 21 nt, Artificial Sequence
  Synthetic oligonucleotide: CBLB-4590
ucccaaucgagugcaacuuaa

SEQ ID NO: 34759 - RNA, 22 nt, Artificial Sequence
  Synthetic oligonucleotide: CBLB-4591
gucccaaucgagugcaacuuaa

SEQ ID NO: 34760 - RNA, 23 nt, Artificial Sequence
  Synthetic oligonucleotide: CBLB-4592
ugucccaaucgagugcaacuuaa

SEQ ID NO: 34761 - RNA, 24 nt, Artificial Sequence
  Synthetic oligonucleotide: CBLB-4593
cugucccaaucgagugcaacuuaa

SEQ ID NO: 34762 - RNA, 18 nt, Artificial Sequence
  Synthetic oligonucleotide: CBLB-4594
uggaggaggaucucuuaa

SEQ ID NO: 34763 - RNA, 19 nt, Artificial Sequence
  Synthetic oligonucleotide: CBLB-4595
guggaggaggaucucuuaa

SEQ ID NO: 34764 - RNA, 20 nt, Artificial Sequence
  Synthetic oligonucleotide: CBLB-3051
gguggaggaggaucucuuaa

SEQ ID NO: 34765 - RNA, 21 nt, Artificial Sequence
  Synthetic oligonucleotide: CBLB-4596
cgguggaggaggaucucuuaa

SEQ ID NO: 34766 - RNA, 22 nt, Artificial Sequence
  Synthetic oligonucleotide: CBLB-4597
gcgguggaggaggaucucuuaa

SEQ ID NO: 34767 - RNA, 23 nt, Artificial Sequence
  Synthetic oligonucleotide: CBLB-4598
ggcgguggaggaggaucucuuaa

SEQ ID NO: 34768 - RNA, 24 nt, Artificial Sequence
  Synthetic oligonucleotide: CBLB-4599
uggcgguggaggaggaucucuuaa

SEQ ID NO: 34769 - RNA, 18 nt, Artificial Sequence
  Synthetic oligonucleotide: CBLB-4600
ccacuugcuagaucaaca

SEQ ID NO: 34770 - RNA, 19 nt, Artificial Sequence
  Synthetic oligonucleotide: CBLB-4601
gccacuugcuagaucaaca

SEQ ID NO: 34771 - RNA, 20 nt, Artificial Sequence
  Synthetic oligonucleotide: CBLB-4602
ggccacuugcuagaucaaca

SEQ ID NO: 34772 - RNA, 21 nt, Artificial Sequence
  Synthetic oligonucleotide: CBLB-4603
uggccacuugcuagaucaaca

SEQ ID NO: 34773 - RNA, 22 nt, Artificial Sequence
  Synthetic oligonucleotide: CBLB-4604
uuggccacuugcuagaucaaca

SEQ ID NO: 34774 - RNA, 23 nt, Artificial Sequence
  Synthetic oligonucleotide: CBLB-4605
cuuggccacuugcuagaucaaca

SEQ ID NO: 34775 - RNA, 24 nt, Artificial Sequence
  Synthetic oligonucleotide: CBLB-4606
acuuggccacuugcuagaucaaca

SEQ ID NO: 34776 - RNA, 18 nt, Artificial Sequence
  Synthetic oligonucleotide: CBLB-4607
acccguugggcugccaca

SEQ ID NO: 34777 - RNA, 19 nt, Artificial Sequence
  Synthetic oligonucleotide: CBLB-4608
aacccguugggcugccaca

SEQ ID NO: 34778 - RNA, 20 nt, Artificial Sequence
  Synthetic oligonucleotide: CBLB-3059
gaacccguugggcugccaca

SEQ ID NO: 34779 - RNA, 21 nt, Artificial Sequence
  Synthetic oligonucleotide: CBLB-4609
ugaacccguugggcugccaca

SEQ ID NO: 34780 - RNA, 22 nt, Artificial Sequence
  Synthetic oligonucleotide: CBLB-4610
gugaacccguugggcugccaca

SEQ ID NO: 34781 - RNA, 23 nt, Artificial Sequence
  Synthetic oligonucleotide: CBLB-4611
ggugaacccguugggcugccaca

SEQ ID NO: 34782 - RNA, 24 nt, Artificial Sequence
  Synthetic oligonucleotide: CBLB-4612
uggugaacccguugggcugccaca

SEQ ID NO: 34783 - RNA, 18 nt, Artificial Sequence
  Synthetic oligonucleotide: CBLB-4613
auuucgucuguaggcaca

SEQ ID NO: 34784 - RNA, 19 nt, Artificial Sequence
  Synthetic oligonucleotide: CBLB-4614
gauuucgucuguaggcaca

SEQ ID NO: 34785 - RNA, 20 nt, Artificial Sequence
  Synthetic oligonucleotide: CBLB-3060
agauuucgucuguaggcaca

SEQ ID NO: 34786 - RNA, 21 nt, Artificial Sequence
  Synthetic oligonucleotide: CBLB-4615
gagauuucgucuguaggcaca

SEQ ID NO: 34787 - RNA, 22 nt, Artificial Sequence
  Synthetic oligonucleotide: CBLB-4616
ugagauuucgucuguaggcaca

SEQ ID NO: 34788 - RNA, 23 nt, Artificial Sequence
  Synthetic oligonucleotide: CBLB-4617
gugagauuucgucuguaggcaca

SEQ ID NO: 34789 - RNA, 24 nt, Artificial Sequence
  Synthetic oligonucleotide: CBLB-4618
ugugagauuucgucuguaggcaca

SEQ ID NO: 34790 - RNA, 18 nt, Artificial Sequence
  Synthetic oligonucleotide: CBLB-4619
agguuuuacauuaugaca

SEQ ID NO: 34791 - RNA, 19 nt, Artificial Sequence
  Synthetic oligonucleotide: CBLB-4620
gagguuuuacauuaugaca

SEQ ID NO: 34792 - RNA, 20 nt, Artificial Sequence
  Synthetic oligonucleotide: CBLB-4621
ggagguuuuacauuaugaca

SEQ ID NO: 34793 - RNA, 21 nt, Artificial Sequence
  Synthetic oligonucleotide: CBLB-4622
aggagguuuuacauuaugaca

SEQ ID NO: 34794 - RNA, 22 nt, Artificial Sequence
  Synthetic oligonucleotide: CBLB-4623
caggagguuuuacauuaugaca

SEQ ID NO: 34795 - RNA, 23 nt, Artificial Sequence
  Synthetic oligonucleotide: CBLB-4624
acaggagguuuuacauuaugaca

SEQ ID NO: 34796 - RNA, 24 nt, Artificial Sequence
  Synthetic oligonucleotide: CBLB-4625
aacaggagguuuuacauuaugaca

SEQ ID NO: 34797 - RNA, 18 nt, Artificial Sequence
  Synthetic oligonucleotide: CBLB-4626
ucacuuccaaggugacca

SEQ ID NO: 34798 - RNA, 19 nt, Artificial Sequence
  Synthetic oligonucleotide: CBLB-4627
uucacuuccaaggugacca

SEQ ID NO: 34799 - RNA, 20 nt, Artificial Sequence
  Synthetic oligonucleotide: CBLB-4628
cuucacuuccaaggugacca

SEQ ID NO: 34800 - RNA, 21 nt, Artificial Sequence
  Synthetic oligonucleotide: CBLB-4629
ucuucacuuccaaggugacca

SEQ ID NO: 34801 - RNA, 22 nt, Artificial Sequence
  Synthetic oligonucleotide: CBLB-4630
uucuucacuuccaaggugacca

SEQ ID NO: 34802 - RNA, 23 nt, Artificial Sequence
  Synthetic oligonucleotide: CBLB-4631
auucuucacuuccaaggugacca

SEQ ID NO: 34803 - RNA, 24 nt, Artificial Sequence
  Synthetic oligonucleotide: CBLB-4632
uauucuucacuuccaaggugacca

SEQ ID NO: 34804 - RNA, 18 nt, Artificial Sequence
  Synthetic oligonucleotide: CBLB-4633
ucucccuggaauugacca

SEQ ID NO: 34805 - RNA, 19 nt, Artificial Sequence
  Synthetic oligonucleotide: CBLB-4634
aucucccuggaauugacca

SEQ ID NO: 34806 - RNA, 20 nt, Artificial Sequence
  Synthetic oligonucleotide: CBLB-4635
uaucucccuggaauugacca

SEQ ID NO: 34807 - RNA, 21 nt, Artificial Sequence
  Synthetic oligonucleotide: CBLB-4636
uuaucucccuggaauugacca

SEQ ID NO: 34808 - RNA, 22 nt, Artificial Sequence
  Synthetic oligonucleotide: CBLB-4637
guuaucucccuggaauugacca

SEQ ID NO: 34809 - RNA, 23 nt, Artificial Sequence
  Synthetic oligonucleotide: CBLB-4638
aguuaucucccuggaauugacca

SEQ ID NO: 34810 - RNA, 24 nt, Artificial Sequence
  Synthetic oligonucleotide: CBLB-4639
aaguuaucucccuggaauugacca

SEQ ID NO: 34811 - RNA, 18 nt, Artificial Sequence
  Synthetic oligonucleotide: CBLB-4640
ggaccaguacaccuacca

SEQ ID NO: 34812 - RNA, 19 nt, Artificial Sequence
  Synthetic oligonucleotide: CBLB-4641
cggaccaguacaccuacca

SEQ ID NO: 34813 - RNA, 20 nt, Artificial Sequence
  Synthetic oligonucleotide: CBLB-3062
acggaccaguacaccuacca

SEQ ID NO: 34814 - RNA, 21 nt, Artificial Sequence
  Synthetic oligonucleotide: CBLB-4642
aacggaccaguacaccuacca

SEQ ID NO: 34815 - RNA, 22 nt, Artificial Sequence
  Synthetic oligonucleotide: CBLB-4643
uaacggaccaguacaccuacca

SEQ ID NO: 34816 - RNA, 23 nt, Artificial Sequence
  Synthetic oligonucleotide: CBLB-4644
cuaacggaccaguacaccuacca

SEQ ID NO: 34817 - RNA, 24 nt, Artificial Sequence
  Synthetic oligonucleotide: CBLB-4645
gcuaacggaccaguacaccuacca

SEQ ID NO: 34818 - RNA, 18 nt, Artificial Sequence
  Synthetic oligonucleotide: CBLB-4646
ucuagcaucggcaugcca

SEQ ID NO: 34819 - RNA, 19 nt, Artificial Sequence
  Synthetic oligonucleotide: CBLB-4647
gucuagcaucggcaugcca

SEQ ID NO: 34820 - RNA, 20 nt, Artificial Sequence
  Synthetic oligonucleotide: CBLB-4648
agucuagcaucggcaugcca

SEQ ID NO: 34821 - RNA, 21 nt, Artificial Sequence
  Synthetic oligonucleotide: CBLB-4649
aagucuagcaucggcaugcca

SEQ ID NO: 34822 - RNA, 22 nt, Artificial Sequence
  Synthetic oligonucleotide: CBLB-4650
caagucuagcaucggcaugcca

SEQ ID NO: 34823 - RNA, 23 nt, Artificial Sequence
  Synthetic oligonucleotide: CBLB-4651
ccaagucuagcaucggcaugcca

SEQ ID NO: 34824 - RNA, 24 nt, Artificial Sequence
  Synthetic oligonucleotide: CBLB-4652
uccaagucuagcaucggcaugcca

SEQ ID NO: 34825 - RNA, 18 nt, Artificial Sequence
  Synthetic oligonucleotide: CBLB-4653
gaacccguugggcugcca

SEQ ID NO: 34826 - RNA, 19 nt, Artificial Sequence
  Synthetic oligonucleotide: CBLB-4654
ugaacccguugggcugcca

SEQ ID NO: 34827 - RNA, 20 nt, Artificial Sequence
  Synthetic oligonucleotide: CBLB-4655
gugaacccguugggcugcca

SEQ ID NO: 34828 - RNA, 21 nt, Artificial Sequence
  Synthetic oligonucleotide: CBLB-4656
ggugaacccguugggcugcca

SEQ ID NO: 34829 - RNA, 22 nt, Artificial Sequence
  Synthetic oligonucleotide: CBLB-4657
uggugaacccguugggcugcca

SEQ ID NO: 34830 - RNA, 23 nt, Artificial Sequence
  Synthetic oligonucleotide: CBLB-4658
uuggugaacccguugggcugcca

SEQ ID NO: 34831 - RNA, 24 nt, Artificial Sequence
  Synthetic oligonucleotide: CBLB-4659
uuuggugaacccguugggcugcca

SEQ ID NO: 34832 - RNA, 18 nt, Artificial Sequence
  Synthetic oligonucleotide: CBLB-4660
accuucuagcaggaggca

SEQ ID NO: 34833 - RNA, 19 nt, Artificial Sequence
  Synthetic oligonucleotide: CBLB-4661
aaccuucuagcaggaggca

SEQ ID NO: 34834 - RNA, 20 nt, Artificial Sequence
  Synthetic oligonucleotide: CBLB-4662
uaaccuucuagcaggaggca

SEQ ID NO: 34835 - RNA, 21 nt, Artificial Sequence
  Synthetic oligonucleotide: CBLB-4663
guaaccuucuagcaggaggca

SEQ ID NO: 34836 - RNA, 22 nt, Artificial Sequence
  Synthetic oligonucleotide: CBLB-4664
gguaaccuucuagcaggaggca

SEQ ID NO: 34837 - RNA, 23 nt, Artificial Sequence
  Synthetic oligonucleotide: CBLB-4665
ugguaaccuucuagcaggaggca

SEQ ID NO: 34838 - RNA, 24 nt, Artificial Sequence
  Synthetic oligonucleotide: CBLB-4666
cugguaaccuucuagcaggaggca

SEQ ID NO: 34839 - RNA, 18 nt, Artificial Sequence
  Synthetic oligonucleotide: CBLB-4667
ggcuuucuucucugggca

SEQ ID NO: 34840 - RNA, 19 nt, Artificial Sequence
  Synthetic oligonucleotide: CBLB-4668
uggcuuucuucucugggca

SEQ ID NO: 34841 - RNA, 20 nt, Artificial Sequence
  Synthetic oligonucleotide: CBLB-3075
guggcuuucuucucugggca

SEQ ID NO: 34842 - RNA, 21 nt, Artificial Sequence
  Synthetic oligonucleotide: CBLB-4669
uguggcuuucuucucugggca

SEQ ID NO: 34843 - RNA, 22 nt, Artificial Sequence
  Synthetic oligonucleotide: CBLB-4670
cuguggcuuucuucucugggca

SEQ ID NO: 34844 - RNA, 23 nt, Artificial Sequence
  Synthetic oligonucleotide: CBLB-4671
gcuguggcuuucuucucugggca

SEQ ID NO: 34845 - RNA, 24 nt, Artificial Sequence
  Synthetic oligonucleotide: CBLB-4672
ggcuguggcuuucuucucugggca

SEQ ID NO: 34846 - RNA, 18 nt, Artificial Sequence
  Synthetic oligonucleotide: CBLB-4673
uuguuuucucaccaugca

SEQ ID NO: 34847 - RNA, 19 nt, Artificial Sequence
  Synthetic oligonucleotide: CBLB-4674
cuuguuuucucaccaugca

SEQ ID NO: 34848 - RNA, 20 nt, Artificial Sequence
  Synthetic oligonucleotide: CBLB-3078
ucuuguuuucucaccaugca

SEQ ID NO: 34849 - RNA, 21 nt, Artificial Sequence
  Synthetic oligonucleotide: CBLB-4675
aucuuguuuucucaccaugca

SEQ ID NO: 34850 - RNA, 22 nt, Artificial Sequence
  Synthetic oligonucleotide: CBLB-4676
uaucuuguuuucucaccaugca

SEQ ID NO: 34851 - RNA, 23 nt, Artificial Sequence
  Synthetic oligonucleotide: CBLB-4677
uuaucuuguuuucucaccaugca

SEQ ID NO: 34852 - RNA, 24 nt, Artificial Sequence
  Synthetic oligonucleotide: CBLB-4678
uuuaucuuguuuucucaccaugca

SEQ ID NO: 34853 - RNA, 18 nt, Artificial Sequence
  Synthetic oligonucleotide: CBLB-4679
augagaagaucauaauca

SEQ ID NO: 34854 - RNA, 19 nt, Artificial Sequence
  Synthetic oligonucleotide: CBLB-4680
gaugagaagaucauaauca

SEQ ID NO: 34855 - RNA, 20 nt, Artificial Sequence
  Synthetic oligonucleotide: CBLB-4681
ggaugagaagaucauaauca

SEQ ID NO: 34856 - RNA, 21 nt, Artificial Sequence
  Synthetic oligonucleotide: CBLB-4682
gggaugagaagaucauaauca

SEQ ID NO: 34857 - RNA, 22 nt, Artificial Sequence
  Synthetic oligonucleotide: CBLB-4683
agggaugagaagaucauaauca

SEQ ID NO: 34858 - RNA, 23 nt, Artificial Sequence
  Synthetic oligonucleotide: CBLB-4684
gagggaugagaagaucauaauca

SEQ ID NO: 34859 - RNA, 24 nt, Artificial Sequence
  Synthetic oligonucleotide: CBLB-4685
ggagggaugagaagaucauaauca

SEQ ID NO: 34860 - RNA, 18 nt, Artificial Sequence
  Synthetic oligonucleotide: CBLB-4686
ccuucaucucuuggauca

SEQ ID NO: 34861 - RNA, 19 nt, Artificial Sequence
  Synthetic oligonucleotide: CBLB-4687
gccuucaucucuuggauca

SEQ ID NO: 34862 - RNA, 20 nt, Artificial Sequence
  Synthetic oligonucleotide: CBLB-4688
agccuucaucucuuggauca

SEQ ID NO: 34863 - RNA, 21 nt, Artificial Sequence
  Synthetic oligonucleotide: CBLB-4689
gagccuucaucucuuggauca

SEQ ID NO: 34864 - RNA, 22 nt, Artificial Sequence
  Synthetic oligonucleotide: CBLB-4690
ggagccuucaucucuuggauca

SEQ ID NO: 34865 - RNA, 23 nt, Artificial Sequence
  Synthetic oligonucleotide: CBLB-4691
uggagccuucaucucuuggauca

SEQ ID NO: 34866 - RNA, 24 nt, Artificial Sequence
  Synthetic oligonucleotide: CBLB-4692
cuggagccuucaucucuuggauca

SEQ ID NO: 34867 - RNA, 18 nt, Artificial Sequence
  Synthetic oligonucleotide: CBLB-4693
gagaugguugugaauuca

SEQ ID NO: 34868 - RNA, 19 nt, Artificial Sequence
  Synthetic oligonucleotide: CBLB-4694
ugagaugguugugaauuca

SEQ ID NO: 34869 - RNA, 20 nt, Artificial Sequence
  Synthetic oligonucleotide: CBLB-3088
augagaugguugugaauuca

SEQ ID NO: 34870 - RNA, 21 nt, Artificial Sequence
  Synthetic oligonucleotide: CBLB-4695
aaugagaugguugugaauuca

SEQ ID NO: 34871 - RNA, 22 nt, Artificial Sequence
  Synthetic oligonucleotide: CBLB-4696
caaugagaugguugugaauuca

SEQ ID NO: 34872 - RNA, 23 nt, Artificial Sequence
  Synthetic oligonucleotide: CBLB-4697
acaaugagaugguugugaauuca

SEQ ID NO: 34873 - RNA, 24 nt, Artificial Sequence
  Synthetic oligonucleotide: CBLB-4698
gacaaugagaugguugugaauuca

SEQ ID NO: 34874 - RNA, 18 nt, Artificial Sequence
  Synthetic oligonucleotide: CBLB-4699
ggagguuuugaauguuca

SEQ ID NO: 34875 - RNA, 19 nt, Artificial Sequence
  Synthetic oligonucleotide: CBLB-4700
aggagguuuugaauguuca

SEQ ID NO: 34876 - RNA, 20 nt, Artificial Sequence
  Synthetic oligonucleotide: CBLB-4701
caggagguuuugaauguuca

SEQ ID NO: 34877 - RNA, 21 nt, Artificial Sequence
  Synthetic oligonucleotide: CBLB-4702
ccaggagguuuugaauguuca

SEQ ID NO: 34878 - RNA, 22 nt, Artificial Sequence
  Synthetic oligonucleotide: CBLB-4703
gccaggagguuuugaauguuca

SEQ ID NO: 34879 - RNA, 23 nt, Artificial Sequence
  Synthetic oligonucleotide: CBLB-4704
agccaggagguuuugaauguuca

SEQ ID NO: 34880 - RNA, 24 nt, Artificial Sequence
  Synthetic oligonucleotide: CBLB-4705
gagccaggagguuuugaauguuca

SEQ ID NO: 34881 - RNA, 18 nt, Artificial Sequence
  Synthetic oligonucleotide: CBLB-4706
uuauuucacaacgacaga

SEQ ID NO: 34882 - RNA, 19 nt, Artificial Sequence
  Synthetic oligonucleotide: CBLB-4707
uuuauuucacaacgacaga

SEQ ID NO: 34883 - RNA, 20 nt, Artificial Sequence
  Synthetic oligonucleotide: CBLB-4708
uuuuauuucacaacgacaga

SEQ ID NO: 34884 - RNA, 21 nt, Artificial Sequence
  Synthetic oligonucleotide: CBLB-4709
cuuuuauuucacaacgacaga

SEQ ID NO: 34885 - RNA, 22 nt, Artificial Sequence
  Synthetic oligonucleotide: CBLB-4710
ccuuuuauuucacaacgacaga

SEQ ID NO: 34886 - RNA, 23 nt, Artificial Sequence
  Synthetic oligonucleotide: CBLB-4711
uccuuuuauuucacaacgacaga

SEQ ID NO: 34887 - RNA, 24 nt, Artificial Sequence
  Synthetic oligonucleotide: CBLB-4712
uuccuuuuauuucacaacgacaga

SEQ ID NO: 34888 - RNA, 18 nt, Artificial Sequence
  Synthetic oligonucleotide: CBLB-4713
ugggggaggugggagaga

SEQ ID NO: 34889 - RNA, 19 nt, Artificial Sequence
  Synthetic oligonucleotide: CBLB-4714
gugggggaggugggagaga

SEQ ID NO: 34890 - RNA, 20 nt, Artificial Sequence
  Synthetic oligonucleotide: CBLB-3092
ggugggggaggugggagaga

SEQ ID NO: 34891 - RNA, 21 nt, Artificial Sequence
  Synthetic oligonucleotide: CBLB-4715
aggugggggaggugggagaga

SEQ ID NO: 34892 - RNA, 22 nt, Artificial Sequence
  Synthetic oligonucleotide: CBLB-4716
gaggugggggaggugggagaga

SEQ ID NO: 34893 - RNA, 23 nt, Artificial Sequence
  Synthetic oligonucleotide: CBLB-4717
ggaggugggggaggugggagaga

SEQ ID NO: 34894 - RNA, 24 nt, Artificial Sequence
  Synthetic oligonucleotide: CBLB-4718
aggaggugggggaggugggagaga

SEQ ID NO: 34895 - RNA, 18 nt, Artificial Sequence
  Synthetic oligonucleotide: CBLB-4719
ccuuuuauuucacaacga

SEQ ID NO: 34896 - RNA, 19 nt, Artificial Sequence
  Synthetic oligonucleotide: CBLB-4720
uccuuuuauuucacaacga

SEQ ID NO: 34897 - RNA, 20 nt, Artificial Sequence
  Synthetic oligonucleotide: CBLB-4721
uuccuuuuauuucacaacga

SEQ ID NO: 34898 - RNA, 21 nt, Artificial Sequence
  Synthetic oligonucleotide: CBLB-4722
guuccuuuuauuucacaacga

SEQ ID NO: 34899 - RNA, 22 nt, Artificial Sequence
  Synthetic oligonucleotide: CBLB-4723
aguuccuuuuauuucacaacga

SEQ ID NO: 34900 - RNA, 23 nt, Artificial Sequence
  Synthetic oligonucleotide: CBLB-4724
caguuccuuuuauuucacaacga

SEQ ID NO: 34901 - RNA, 24 nt, Artificial Sequence
  Synthetic oligonucleotide: CBLB-4725
ucaguuccuuuuauuucacaacga

SEQ ID NO: 34902 - RNA, 18 nt, Artificial Sequence
  Synthetic oligonucleotide: CBLB-4726
ccuggaauuuggggagga

SEQ ID NO: 34903 - RNA, 19 nt, Artificial Sequence
  Synthetic oligonucleotide: CBLB-4727
uccuggaauuuggggagga

SEQ ID NO: 34904 - RNA, 20 nt, Artificial Sequence
  Synthetic oligonucleotide: CBLB-3099
uuccuggaauuuggggagga

SEQ ID NO: 34905 - RNA, 21 nt, Artificial Sequence
  Synthetic oligonucleotide: CBLB-4728
guuccuggaauuuggggagga

SEQ ID NO: 34906 - RNA, 22 nt, Artificial Sequence
  Synthetic oligonucleotide: CBLB-4729
uguuccuggaauuuggggagga

SEQ ID NO: 34907 - RNA, 23 nt, Artificial Sequence
  Synthetic oligonucleotide: CBLB-4730
uuguuccuggaauuuggggagga

SEQ ID NO: 34908 - RNA, 24 nt, Artificial Sequence
  Synthetic oligonucleotide: CBLB-4731
auuguuccuggaauuuggggagga

SEQ ID NO: 34909 - RNA, 18 nt, Artificial Sequence
  Synthetic oligonucleotide: CBLB-4732
cguggggauacuggagga

SEQ ID NO: 34910 - RNA, 19 nt, Artificial Sequence
  Synthetic oligonucleotide: CBLB-4733
acguggggauacuggagga

SEQ ID NO: 34911 - RNA, 20 nt, Artificial Sequence
  Synthetic oligonucleotide: CBLB-3100
gacguggggauacuggagga

SEQ ID NO: 34912 - RNA, 21 nt, Artificial Sequence
  Synthetic oligonucleotide: CBLB-4734
agacguggggauacuggagga

SEQ ID NO: 34913 - RNA, 22 nt, Artificial Sequence
  Synthetic oligonucleotide: CBLB-4735
uagacguggggauacuggagga

SEQ ID NO: 34914 - RNA, 23 nt, Artificial Sequence
  Synthetic oligonucleotide: CBLB-4736
uuagacguggggauacuggagga

SEQ ID NO: 34915 - RNA, 24 nt, Artificial Sequence
  Synthetic oligonucleotide: CBLB-4737
uuuagacguggggauacuggagga

SEQ ID NO: 34916 - RNA, 18 nt, Artificial Sequence
  Synthetic oligonucleotide: CBLB-4738
ggaggugggagagaugga

SEQ ID NO: 34917 - RNA, 19 nt, Artificial Sequence
  Synthetic oligonucleotide: CBLB-4739
gggaggugggagagaugga

SEQ ID NO: 34918 - RNA, 20 nt, Artificial Sequence
  Synthetic oligonucleotide: CBLB-3112
ggggaggugggagagaugga

SEQ ID NO: 34919 - RNA, 21 nt, Artificial Sequence
  Synthetic oligonucleotide: CBLB-4740
gggggaggugggagagaugga

SEQ ID NO: 34920 - RNA, 22 nt, Artificial Sequence
  Synthetic oligonucleotide: CBLB-4741
ugggggaggugggagagaugga

SEQ ID NO: 34921 - RNA, 23 nt, Artificial Sequence
  Synthetic oligonucleotide: CBLB-4742
gugggggaggugggagagaugga

SEQ ID NO: 34922 - RNA, 24 nt, Artificial Sequence
  Synthetic oligonucleotide: CBLB-4743
ggugggggaggugggagagaugga

SEQ ID NO: 34923 - RNA, 18 nt, Artificial Sequence
  Synthetic oligonucleotide: CBLB-4744
caacucaccugaacauga

SEQ ID NO: 34924 - RNA, 19 nt, Artificial Sequence
  Synthetic oligonucleotide: CBLB-4745
ccaacucaccugaacauga

SEQ ID NO: 34925 - RNA, 20 nt, Artificial Sequence
  Synthetic oligonucleotide: CBLB-3114
gccaacucaccugaacauga

SEQ ID NO: 34926 - RNA, 21 nt, Artificial Sequence
  Synthetic oligonucleotide: CBLB-4746
agccaacucaccugaacauga

SEQ ID NO: 34927 - RNA, 22 nt, Artificial Sequence
  Synthetic oligonucleotide: CBLB-4747
uagccaacucaccugaacauga

SEQ ID NO: 34928 - RNA, 23 nt, Artificial Sequence
  Synthetic oligonucleotide: CBLB-4748
cuagccaacucaccugaacauga

SEQ ID NO: 34929 - RNA, 24 nt, Artificial Sequence
  Synthetic oligonucleotide: CBLB-4749
acuagccaacucaccugaacauga

SEQ ID NO: 34930 - RNA, 18 nt, Artificial Sequence
  Synthetic oligonucleotide: CBLB-4750
cuuuucccuccuaccuga

SEQ ID NO: 34931 - RNA, 19 nt, Artificial Sequence
  Synthetic oligonucleotide: CBLB-4751
gcuuuucccuccuaccuga

SEQ ID NO: 34932 - RNA, 20 nt, Artificial Sequence
  Synthetic oligonucleotide: CBLB-3119
ggcuuuucccuccuaccuga

SEQ ID NO: 34933 - RNA, 21 nt, Artificial Sequence
  Synthetic oligonucleotide: CBLB-4752
uggcuuuucccuccuaccuga

SEQ ID NO: 34934 - RNA, 22 nt, Artificial Sequence
  Synthetic oligonucleotide: CBLB-4753
uuggcuuuucccuccuaccuga

SEQ ID NO: 34935 - RNA, 23 nt, Artificial Sequence
  Synthetic oligonucleotide: CBLB-4754
uuuggcuuuucccuccuaccuga

SEQ ID NO: 34936 - RNA, 24 nt, Artificial Sequence
  Synthetic oligonucleotide: CBLB-4755
cuuuggcuuuucccuccuaccuga

SEQ ID NO: 34937 - RNA, 18 nt, Artificial Sequence
  Synthetic oligonucleotide: CBLB-4756
gucucuuguuuucucuga

SEQ ID NO: 34938 - RNA, 19 nt, Artificial Sequence
  Synthetic oligonucleotide: CBLB-4757
ggucucuuguuuucucuga

SEQ ID NO: 34939 - RNA, 20 nt, Artificial Sequence
  Synthetic oligonucleotide: CBLB-4758
gggucucuuguuuucucuga

SEQ ID NO: 34940 - RNA, 21 nt, Artificial Sequence
  Synthetic oligonucleotide: CBLB-4759
ugggucucuuguuuucucuga

SEQ ID NO: 34941 - RNA, 22 nt, Artificial Sequence
  Synthetic oligonucleotide: CBLB-4760
cugggucucuuguuuucucuga

SEQ ID NO: 34942 - RNA, 23 nt, Artificial Sequence
  Synthetic oligonucleotide: CBLB-4761
acugggucucuuguuuucucuga

SEQ ID NO: 34943 - RNA, 24 nt, Artificial Sequence
  Synthetic oligonucleotide: CBLB-4762
uacugggucucuuguuuucucuga

SEQ ID NO: 34944 - RNA, 18 nt, Artificial Sequence
  Synthetic oligonucleotide: CBLB-4763
auuucugccagcauguga

SEQ ID NO: 34945 - RNA, 19 nt, Artificial Sequence
  Synthetic oligonucleotide: CBLB-4764
gauuucugccagcauguga

SEQ ID NO: 34946 - RNA, 20 nt, Artificial Sequence
  Synthetic oligonucleotide: CBLB-4765
ugauuucugccagcauguga

SEQ ID NO: 34947 - RNA, 21 nt, Artificial Sequence
  Synthetic oligonucleotide: CBLB-4766
uugauuucugccagcauguga

SEQ ID NO: 34948 - RNA, 22 nt, Artificial Sequence
  Synthetic oligonucleotide: CBLB-4767
uuugauuucugccagcauguga

SEQ ID NO: 34949 - RNA, 23 nt, Artificial Sequence
  Synthetic oligonucleotide: CBLB-4768
cuuugauuucugccagcauguga

SEQ ID NO: 34950 - RNA, 24 nt, Artificial Sequence
  Synthetic oligonucleotide: CBLB-4769
gcuuugauuucugccagcauguga

SEQ ID NO: 34951 - RNA, 18 nt, Artificial Sequence
  Synthetic oligonucleotide: CBLB-4770
cagagggcguccuguuga

SEQ ID NO: 34952 - RNA, 19 nt, Artificial Sequence
  Synthetic oligonucleotide: CBLB-4771
ucagagggcguccuguuga

SEQ ID NO: 34953 - RNA, 20 nt, Artificial Sequence
  Synthetic oligonucleotide: CBLB-4772
aucagagggcguccuguuga

SEQ ID NO: 34954 - RNA, 21 nt, Artificial Sequence
  Synthetic oligonucleotide: CBLB-4773
aaucagagggcguccuguuga

SEQ ID NO: 34955 - RNA, 22 nt, Artificial Sequence
  Synthetic oligonucleotide: CBLB-4774
uaaucagagggcguccuguuga

SEQ ID NO: 34956 - RNA, 23 nt, Artificial Sequence
  Synthetic oligonucleotide: CBLB-4775
auaaucagagggcguccuguuga

SEQ ID NO: 34957 - RNA, 24 nt, Artificial Sequence
  Synthetic oligonucleotide: CBLB-4776
cauaaucagagggcguccuguuga

SEQ ID NO: 34958 - RNA, 18 nt, Artificial Sequence
  Synthetic oligonucleotide: CBLB-4777
agcaugugacugaagaua

SEQ ID NO: 34959 - RNA, 19 nt, Artificial Sequence
  Synthetic oligonucleotide: CBLB-4778
cagcaugugacugaagaua

SEQ ID NO: 34960 - RNA, 20 nt, Artificial Sequence
  Synthetic oligonucleotide: CBLB-3123
ccagcaugugacugaagaua

SEQ ID NO: 34961 - RNA, 21 nt, Artificial Sequence
  Synthetic oligonucleotide: CBLB-4779
gccagcaugugacugaagaua

SEQ ID NO: 34962 - RNA, 22 nt, Artificial Sequence
  Synthetic oligonucleotide: CBLB-4780
ugccagcaugugacugaagaua

SEQ ID NO: 34963 - RNA, 23 nt, Artificial Sequence
  Synthetic oligonucleotide: CBLB-4781
cugccagcaugugacugaagaua

SEQ ID NO: 34964 - RNA, 24 nt, Artificial Sequence
  Synthetic oligonucleotide: CBLB-4782
ucugccagcaugugacugaagaua

SEQ ID NO: 34965 - RNA, 18 nt, Artificial Sequence
  Synthetic oligonucleotide: CBLB-4783
gauuuagacguggggaua

SEQ ID NO: 34966 - RNA, 19 nt, Artificial Sequence
  Synthetic oligonucleotide: CBLB-4784
agauuuagacguggggaua

SEQ ID NO: 34967 - RNA, 20 nt, Artificial Sequence
  Synthetic oligonucleotide: CBLB-4785
uagauuuagacguggggaua

SEQ ID NO: 34968 - RNA, 21 nt, Artificial Sequence
  Synthetic oligonucleotide: CBLB-4786
auagauuuagacguggggaua

SEQ ID NO: 34969 - RNA, 22 nt, Artificial Sequence
  Synthetic oligonucleotide: CBLB-4787
uauagauuuagacguggggaua

SEQ ID NO: 34970 - RNA, 23 nt, Artificial Sequence
  Synthetic oligonucleotide: CBLB-4788
cuauagauuuagacguggggaua

SEQ ID NO: 34971 - RNA, 24 nt, Artificial Sequence
  Synthetic oligonucleotide: CBLB-4789
gcuauagauuuagacguggggaua

SEQ ID NO: 34972 - RNA, 18 nt, Artificial Sequence
  Synthetic oligonucleotide: CBLB-4790
caugcaaggagaagacua

SEQ ID NO: 34973 - RNA, 19 nt, Artificial Sequence
  Synthetic oligonucleotide: CBLB-4791
ccaugcaaggagaagacua

SEQ ID NO: 34974 - RNA, 20 nt, Artificial Sequence
  Synthetic oligonucleotide: CBLB-4792
accaugcaaggagaagacua

SEQ ID NO: 34975 - RNA, 21 nt, Artificial Sequence
  Synthetic oligonucleotide: CBLB-4793
caccaugcaaggagaagacua

SEQ ID NO: 34976 - RNA, 22 nt, Artificial Sequence
  Synthetic oligonucleotide: CBLB-4794
ucaccaugcaaggagaagacua

SEQ ID NO: 34977 - RNA, 23 nt, Artificial Sequence
  Synthetic oligonucleotide: CBLB-4795
cucaccaugcaaggagaagacua

SEQ ID NO: 34978 - RNA, 24 nt, Artificial Sequence
  Synthetic oligonucleotide: CBLB-4796
ucucaccaugcaaggagaagacua

SEQ ID NO: 34979 - RNA, 18 nt, Artificial Sequence
  Synthetic oligonucleotide: CBLB-4797
uuuaaagguuucaaccua

SEQ ID NO: 34980 - RNA, 19 nt, Artificial Sequence
  Synthetic oligonucleotide: CBLB-4798
uuuuaaagguuucaaccua

SEQ ID NO: 34981 - RNA, 20 nt, Artificial Sequence
  Synthetic oligonucleotide: CBLB-4799
uuuuuaaagguuucaaccua

SEQ ID NO: 34982 - RNA, 21 nt, Artificial Sequence
  Synthetic oligonucleotide: CBLB-4800
uuuuuuaaagguuucaaccua

SEQ ID NO: 34983 - RNA, 22 nt, Artificial Sequence
  Synthetic oligonucleotide: CBLB-4801
cuuuuuuaaagguuucaaccua

SEQ ID NO: 34984 - RNA, 23 nt, Artificial Sequence
  Synthetic oligonucleotide: CBLB-4802
acuuuuuuaaagguuucaaccua

SEQ ID NO: 34985 - RNA, 24 nt, Artificial Sequence
  Synthetic oligonucleotide: CBLB-4803
aacuuuuuuaaagguuucaaccua

SEQ ID NO: 34986 - RNA, 18 nt, Artificial Sequence
  Synthetic oligonucleotide: CBLB-4804
ccauuaucacaagaccua

SEQ ID NO: 34987 - RNA, 19 nt, Artificial Sequence
  Synthetic oligonucleotide: CBLB-4805
accauuaucacaagaccua

SEQ ID NO: 34988 - RNA, 20 nt, Artificial Sequence
  Synthetic oligonucleotide: CBLB-4806
gaccauuaucacaagaccua

SEQ ID NO: 34989 - RNA, 21 nt, Artificial Sequence
  Synthetic oligonucleotide: CBLB-4807
ugaccauuaucacaagaccua

SEQ ID NO: 34990 - RNA, 22 nt, Artificial Sequence
  Synthetic oligonucleotide: CBLB-4808
gugaccauuaucacaagaccua

SEQ ID NO: 34991 - RNA, 23 nt, Artificial Sequence
  Synthetic oligonucleotide: CBLB-4809
agugaccauuaucacaagaccua

SEQ ID NO: 34992 - RNA, 24 nt, Artificial Sequence
  Synthetic oligonucleotide: CBLB-4810
cagugaccauuaucacaagaccua

SEQ ID NO: 34993 - RNA, 18 nt, Artificial Sequence
  Synthetic oligonucleotide: CBLB-4811
ccugaggauggccggcua

SEQ ID NO: 34994 - RNA, 19 nt, Artificial Sequence
  Synthetic oligonucleotide: CBLB-4812
uccugaggauggccggcua

SEQ ID NO: 34995 - RNA, 20 nt, Artificial Sequence
  Synthetic oligonucleotide: CBLB-4813
guccugaggauggccggcua

SEQ ID NO: 34996 - RNA, 21 nt, Artificial Sequence
  Synthetic oligonucleotide: CBLB-4814
uguccugaggauggccggcua

SEQ ID NO: 34997 - RNA, 22 nt, Artificial Sequence
  Synthetic oligonucleotide: CBLB-4815
cuguccugaggauggccggcua

SEQ ID NO: 34998 - RNA, 23 nt, Artificial Sequence
  Synthetic oligonucleotide: CBLB-4816
ccuguccugaggauggccggcua

SEQ ID NO: 34999 - RNA, 24 nt, Artificial Sequence
  Synthetic oligonucleotide: CBLB-4817
uccuguccugaggauggccggcua

SEQ ID NO: 35000 - RNA, 18 nt, Artificial Sequence
  Synthetic oligonucleotide: CBLB-4818
aaaacucacuuuaugcua

SEQ ID NO: 35001 - RNA, 19 nt, Artificial Sequence
  Synthetic oligonucleotide: CBLB-4819
caaaacucacuuuaugcua

SEQ ID NO: 35002 - RNA, 20 nt, Artificial Sequence
  Synthetic oligonucleotide: CBLB-3127
acaaaacucacuuuaugcua

SEQ ID NO: 35003 - RNA, 21 nt, Artificial Sequence
  Synthetic oligonucleotide: CBLB-4820
aacaaaacucacuuuaugcua

SEQ ID NO: 35004 - RNA, 22 nt, Artificial Sequence
  Synthetic oligonucleotide: CBLB-4821
caacaaaacucacuuuaugcua

SEQ ID NO: 35005 - RNA, 23 nt, Artificial Sequence
  Synthetic oligonucleotide: CBLB-4822
ucaacaaaacucacuuuaugcua

SEQ ID NO: 35006 - RNA, 24 nt, Artificial Sequence
  Synthetic oligonucleotide: CBLB-4823
uucaacaaaacucacuuuaugcua

SEQ ID NO: 35007 - RNA, 18 nt, Artificial Sequence
  Synthetic oligonucleotide: CBLB-4824
cugaaagagaauuugcua

SEQ ID NO: 35008 - RNA, 19 nt, Artificial Sequence
  Synthetic oligonucleotide: CBLB-4825
ucugaaagagaauuugcua

SEQ ID NO: 35009 - RNA, 20 nt, Artificial Sequence
  Synthetic oligonucleotide: CBLB-4826
cucugaaagagaauuugcua

SEQ ID NO: 35010 - RNA, 21 nt, Artificial Sequence
  Synthetic oligonucleotide: CBLB-4827
ucucugaaagagaauuugcua

SEQ ID NO: 35011 - RNA, 22 nt, Artificial Sequence
  Synthetic oligonucleotide: CBLB-4828
uucucugaaagagaauuugcua

SEQ ID NO: 35012 - RNA, 23 nt, Artificial Sequence
  Synthetic oligonucleotide: CBLB-4829
uuucucugaaagagaauuugcua

SEQ ID NO: 35013 - RNA, 24 nt, Artificial Sequence
  Synthetic oligonucleotide: CBLB-4830
uuuucucugaaagagaauuugcua

SEQ ID NO: 35014 - RNA, 18 nt, Artificial Sequence
  Synthetic oligonucleotide: CBLB-4831
uucucugcacaaaucuua

SEQ ID NO: 35015 - RNA, 19 nt, Artificial Sequence
  Synthetic oligonucleotide: CBLB-4832
auucucugcacaaaucuua

SEQ ID NO: 35016 - RNA, 20 nt, Artificial Sequence
  Synthetic oligonucleotide: CBLB-4833
cauucucugcacaaaucuua

SEQ ID NO: 35017 - RNA, 21 nt, Artificial Sequence
  Synthetic oligonucleotide: CBLB-4834
ucauucucugcacaaaucuua

SEQ ID NO: 35018 - RNA, 22 nt, Artificial Sequence
  Synthetic oligonucleotide: CBLB-4835
gucauucucugcacaaaucuua

SEQ ID NO: 35019 - RNA, 23 nt, Artificial Sequence
  Synthetic oligonucleotide: CBLB-4836
ugucauucucugcacaaaucuua

SEQ ID NO: 35020 - RNA, 24 nt, Artificial Sequence
  Synthetic oligonucleotide: CBLB-4837
uugucauucucugcacaaaucuua

SEQ ID NO: 35021 - RNA, 18 nt, Artificial Sequence
  Synthetic oligonucleotide: CBLB-4838
aaucugcccauacucuua

SEQ ID NO: 35022 - RNA, 19 nt, Artificial Sequence
  Synthetic oligonucleotide: CBLB-4839
aaaucugcccauacucuua

SEQ ID NO: 35023 - RNA, 20 nt, Artificial Sequence
  Synthetic oligonucleotide: CBLB-4840
aaaaucugcccauacucuua

SEQ ID NO: 35024 - RNA, 21 nt, Artificial Sequence
  Synthetic oligonucleotide: CBLB-4841
aaaaaucugcccauacucuua

SEQ ID NO: 35025 - RNA, 22 nt, Artificial Sequence
  Synthetic oligonucleotide: CBLB-4842
caaaaaucugcccauacucuua

SEQ ID NO: 35026 - RNA, 23 nt, Artificial Sequence
  Synthetic oligonucleotide: CBLB-4843
gcaaaaaucugcccauacucuua

SEQ ID NO: 35027 - RNA, 24 nt, Artificial Sequence
  Synthetic oligonucleotide: CBLB-4844
ggcaaaaaucugcccauacucuua

SEQ ID NO: 35028 - RNA, 18 nt, Artificial Sequence
  Synthetic oligonucleotide: CBLB-4845
guggaggaggaucucuua

SEQ ID NO: 35029 - RNA, 19 nt, Artificial Sequence
  Synthetic oligonucleotide: CBLB-4846
gguggaggaggaucucuua

SEQ ID NO: 35030 - RNA, 20 nt, Artificial Sequence
  Synthetic oligonucleotide: CBLB-3135
cgguggaggaggaucucuua

SEQ ID NO: 35031 - RNA, 21 nt, Artificial Sequence
  Synthetic oligonucleotide: CBLB-4847
gcgguggaggaggaucucuua

SEQ ID NO: 35032 - RNA, 22 nt, Artificial Sequence
  Synthetic oligonucleotide: CBLB-4848
ggcgguggaggaggaucucuua

SEQ ID NO: 35033 - RNA, 23 nt, Artificial Sequence
  Synthetic oligonucleotide: CBLB-4849
uggcgguggaggaggaucucuua

SEQ ID NO: 35034 - RNA, 24 nt, Artificial Sequence
  Synthetic oligonucleotide: CBLB-4850
guggcgguggaggaggaucucuua

SEQ ID NO: 35035 - RNA, 18 nt, Artificial Sequence
  Synthetic oligonucleotide: CBLB-4851
caucuucaccugcauuua

SEQ ID NO: 35036 - RNA, 19 nt, Artificial Sequence
  Synthetic oligonucleotide: CBLB-4852
gcaucuucaccugcauuua

SEQ ID NO: 35037 - RNA, 20 nt, Artificial Sequence
  Synthetic oligonucleotide: CBLB-4853
agcaucuucaccugcauuua

SEQ ID NO: 35038 - RNA, 21 nt, Artificial Sequence
  Synthetic oligonucleotide: CBLB-4854
aagcaucuucaccugcauuua

SEQ ID NO: 35039 - RNA, 22 nt, Artificial Sequence
  Synthetic oligonucleotide: CBLB-4855
aaagcaucuucaccugcauuua

SEQ ID NO: 35040 - RNA, 23 nt, Artificial Sequence
  Synthetic oligonucleotide: CBLB-4856
aaaagcaucuucaccugcauuua

SEQ ID NO: 35041 - RNA, 24 nt, Artificial Sequence
  Synthetic oligonucleotide: CBLB-4857
caaaagcaucuucaccugcauuua

SEQ ID NO: 35042 - RNA, 18 nt, Artificial Sequence
  Synthetic oligonucleotide: CBLB-4858
caucuguguagauuuuua

SEQ ID NO: 35043 - RNA, 19 nt, Artificial Sequence
  Synthetic oligonucleotide: CBLB-4859
ccaucuguguagauuuuua

SEQ ID NO: 35044 - RNA, 20 nt, Artificial Sequence
  Synthetic oligonucleotide: CBLB-4860
accaucuguguagauuuuua

SEQ ID NO: 35045 - RNA, 21 nt, Artificial Sequence
  Synthetic oligonucleotide: CBLB-4861
aaccaucuguguagauuuuua

SEQ ID NO: 35046 - RNA, 22 nt, Artificial Sequence
  Synthetic oligonucleotide: CBLB-4862
gaaccaucuguguagauuuuua

SEQ ID NO: 35047 - RNA, 23 nt, Artificial Sequence
  Synthetic oligonucleotide: CBLB-4863
ugaaccaucuguguagauuuuua

SEQ ID NO: 35048 - RNA, 24 nt, Artificial Sequence
  Synthetic oligonucleotide: CBLB-4864
gugaaccaucuguguagauuuuua

SEQ ID NO: 35049 - RNA, 18 nt, Artificial Sequence
  Synthetic oligonucleotide: CBLB-4865
cccauacucuuaccgaac

SEQ ID NO: 35050 - RNA, 19 nt, Artificial Sequence
  Synthetic oligonucleotide: CBLB-4866
gcccauacucuuaccgaac

SEQ ID NO: 35051 - RNA, 20 nt, Artificial Sequence
  Synthetic oligonucleotide: CBLB-3141
ugcccauacucuuaccgaac

SEQ ID NO: 35052 - RNA, 21 nt, Artificial Sequence
  Synthetic oligonucleotide: CBLB-4867
cugcccauacucuuaccgaac

SEQ ID NO: 35053 - RNA, 22 nt, Artificial Sequence
  Synthetic oligonucleotide: CBLB-4868
ucugcccauacucuuaccgaac

SEQ ID NO: 35054 - RNA, 23 nt, Artificial Sequence
  Synthetic oligonucleotide: CBLB-4869
aucugcccauacucuuaccgaac

SEQ ID NO: 35055 - RNA, 24 nt, Artificial Sequence
  Synthetic oligonucleotide: CBLB-4870
aaucugcccauacucuuaccgaac

SEQ ID NO: 35056 - RNA, 18 nt, Artificial Sequence
  Synthetic oligonucleotide: CBLB-4871
uagccaacucaccugaac

SEQ ID NO: 35057 - RNA, 19 nt, Artificial Sequence
  Synthetic oligonucleotide: CBLB-4872
cuagccaacucaccugaac

SEQ ID NO: 35058 - RNA, 20 nt, Artificial Sequence
  Synthetic oligonucleotide: CBLB-4873
acuagccaacucaccugaac

SEQ ID NO: 35059 - RNA, 21 nt, Artificial Sequence
  Synthetic oligonucleotide: CBLB-4874
uacuagccaacucaccugaac

SEQ ID NO: 35060 - RNA, 22 nt, Artificial Sequence
  Synthetic oligonucleotide: CBLB-4875
uuacuagccaacucaccugaac

SEQ ID NO: 35061 - RNA, 23 nt, Artificial Sequence
  Synthetic oligonucleotide: CBLB-4876
guuacuagccaacucaccugaac

SEQ ID NO: 35062 - RNA, 24 nt, Artificial Sequence
  Synthetic oligonucleotide: CBLB-4877
uguuacuagccaacucaccugaac

SEQ ID NO: 35063 - RNA, 18 nt, Artificial Sequence
  Synthetic oligonucleotide: CBLB-4878
agggaggagggugguaac

SEQ ID NO: 35064 - RNA, 19 nt, Artificial Sequence
  Synthetic oligonucleotide: CBLB-4879
uagggaggagggugguaac

SEQ ID NO: 35065 - RNA, 20 nt, Artificial Sequence
  Synthetic oligonucleotide: CBLB-3142
cuagggaggagggugguaac

SEQ ID NO: 35066 - RNA, 21 nt, Artificial Sequence
  Synthetic oligonucleotide: CBLB-4880
gcuagggaggagggugguaac

SEQ ID NO: 35067 - RNA, 22 nt, Artificial Sequence
  Synthetic oligonucleotide: CBLB-4881
ugcuagggaggagggugguaac

SEQ ID NO: 35068 - RNA, 23 nt, Artificial Sequence
  Synthetic oligonucleotide: CBLB-4882
augcuagggaggagggugguaac

SEQ ID NO: 35069 - RNA, 24 nt, Artificial Sequence
  Synthetic oligonucleotide: CBLB-4883
uaugcuagggaggagggugguaac

SEQ ID NO: 35070 - RNA, 18 nt, Artificial Sequence
  Synthetic oligonucleotide: CBLB-4884
aaucgagugcaacuuaac

SEQ ID NO: 35071 - RNA, 19 nt, Artificial Sequence
  Synthetic oligonucleotide: CBLB-4885
caaucgagugcaacuuaac

SEQ ID NO: 35072 - RNA, 20 nt, Artificial Sequence
  Synthetic oligonucleotide: CBLB-3143
ccaaucgagugcaacuuaac

SEQ ID NO: 35073 - RNA, 21 nt, Artificial Sequence
  Synthetic oligonucleotide: CBLB-4886
cccaaucgagugcaacuuaac

SEQ ID NO: 35074 - RNA, 22 nt, Artificial Sequence
  Synthetic oligonucleotide: CBLB-4887
ucccaaucgagugcaacuuaac

SEQ ID NO: 35075 - RNA, 23 nt, Artificial Sequence
  Synthetic oligonucleotide: CBLB-4888
gucccaaucgagugcaacuuaac

SEQ ID NO: 35076 - RNA, 24 nt, Artificial Sequence
  Synthetic oligonucleotide: CBLB-4889
ugucccaaucgagugcaacuuaac

SEQ ID NO: 35077 - RNA, 18 nt, Artificial Sequence
  Synthetic oligonucleotide: CBLB-4890
ucaaugaugcugcaacac

SEQ ID NO: 35078 - RNA, 19 nt, Artificial Sequence
  Synthetic oligonucleotide: CBLB-4891
gucaaugaugcugcaacac

SEQ ID NO: 35079 - RNA, 20 nt, Artificial Sequence
  Synthetic oligonucleotide: CBLB-4892
ggucaaugaugcugcaacac

SEQ ID NO: 35080 - RNA, 21 nt, Artificial Sequence
  Synthetic oligonucleotide: CBLB-4893
gggucaaugaugcugcaacac

SEQ ID NO: 35081 - RNA, 22 nt, Artificial Sequence
  Synthetic oligonucleotide: CBLB-4894
ggggucaaugaugcugcaacac

SEQ ID NO: 35082 - RNA, 23 nt, Artificial Sequence
  Synthetic oligonucleotide: CBLB-4895
aggggucaaugaugcugcaacac

SEQ ID NO: 35083 - RNA, 24 nt, Artificial Sequence
  Synthetic oligonucleotide: CBLB-4896
aaggggucaaugaugcugcaacac

SEQ ID NO: 35084 - RNA, 18 nt, Artificial Sequence
  Synthetic oligonucleotide: CBLB-4897
aacccguugggcugccac

SEQ ID NO: 35085 - RNA, 19 nt, Artificial Sequence
  Synthetic oligonucleotide: CBLB-4898
gaacccguugggcugccac

SEQ ID NO: 35086 - RNA, 20 nt, Artificial Sequence
  Synthetic oligonucleotide: CBLB-3146
ugaacccguugggcugccac

SEQ ID NO: 35087 - RNA, 21 nt, Artificial Sequence
  Synthetic oligonucleotide: CBLB-4899
gugaacccguugggcugccac

SEQ ID NO: 35088 - RNA, 22 nt, Artificial Sequence
  Synthetic oligonucleotide: CBLB-4900
ggugaacccguugggcugccac

SEQ ID NO: 35089 - RNA, 23 nt, Artificial Sequence
  Synthetic oligonucleotide: CBLB-4901
uggugaacccguugggcugccac

SEQ ID NO: 35090 - RNA, 24 nt, Artificial Sequence
  Synthetic oligonucleotide: CBLB-4902
uuggugaacccguugggcugccac

SEQ ID NO: 35091 - RNA, 18 nt, Artificial Sequence
  Synthetic oligonucleotide: CBLB-4903
gauuucgucuguaggcac

SEQ ID NO: 35092 - RNA, 19 nt, Artificial Sequence
  Synthetic oligonucleotide: CBLB-4904
agauuucgucuguaggcac

SEQ ID NO: 35093 - RNA, 20 nt, Artificial Sequence
  Synthetic oligonucleotide: CBLB-4905
gagauuucgucuguaggcac

SEQ ID NO: 35094 - RNA, 21 nt, Artificial Sequence
  Synthetic oligonucleotide: CBLB-4906
ugagauuucgucuguaggcac

SEQ ID NO: 35095 - RNA, 22 nt, Artificial Sequence
  Synthetic oligonucleotide: CBLB-4907
gugagauuucgucuguaggcac

SEQ ID NO: 35096 - RNA, 23 nt, Artificial Sequence
  Synthetic oligonucleotide: CBLB-4908
ugugagauuucgucuguaggcac

SEQ ID NO: 35097 - RNA, 24 nt, Artificial Sequence
  Synthetic oligonucleotide: CBLB-4909
uugugagauuucgucuguaggcac

SEQ ID NO: 35098 - RNA, 18 nt, Artificial Sequence
  Synthetic oligonucleotide: CBLB-4910
uucugccugucagugcac

SEQ ID NO: 35099 - RNA, 19 nt, Artificial Sequence
  Synthetic oligonucleotide: CBLB-4911
guucugccugucagugcac

SEQ ID NO: 35100 - RNA, 20 nt, Artificial Sequence
  Synthetic oligonucleotide: CBLB-4912
aguucugccugucagugcac

SEQ ID NO: 35101 - RNA, 21 nt, Artificial Sequence
  Synthetic oligonucleotide: CBLB-4913
gaguucugccugucagugcac

SEQ ID NO: 35102 - RNA, 22 nt, Artificial Sequence
  Synthetic oligonucleotide: CBLB-4914
ugaguucugccugucagugcac

SEQ ID NO: 35103 - RNA, 23 nt, Artificial Sequence
  Synthetic oligonucleotide: CBLB-4915
gugaguucugccugucagugcac

SEQ ID NO: 35104 - RNA, 24 nt, Artificial Sequence
  Synthetic oligonucleotide: CBLB-4916
ggugaguucugccugucagugcac

SEQ ID NO: 35105 - RNA, 18 nt, Artificial Sequence
  Synthetic oligonucleotide: CBLB-4917
uguuacuagccaacucac

SEQ ID NO: 35106 - RNA, 19 nt, Artificial Sequence
  Synthetic oligonucleotide: CBLB-4918
cuguuacuagccaacucac

SEQ ID NO: 35107 - RNA, 20 nt, Artificial Sequence
  Synthetic oligonucleotide: CBLB-4919
acuguuacuagccaacucac

SEQ ID NO: 35108 - RNA, 21 nt, Artificial Sequence
  Synthetic oligonucleotide: CBLB-4920
uacuguuacuagccaacucac

SEQ ID NO: 35109 - RNA, 22 nt, Artificial Sequence
  Synthetic oligonucleotide: CBLB-4921
uuacuguuacuagccaacucac

SEQ ID NO: 35110 - RNA, 23 nt, Artificial Sequence
  Synthetic oligonucleotide: CBLB-4922
guuacuguuacuagccaacucac

SEQ ID NO: 35111 - RNA, 24 nt, Artificial Sequence
  Synthetic oligonucleotide: CBLB-4923
uguuacuguuacuagccaacucac

SEQ ID NO: 35112 - RNA, 18 nt, Artificial Sequence
  Synthetic oligonucleotide: CBLB-4924
gugaccauuggaaaagac

SEQ ID NO: 35113 - RNA, 19 nt, Artificial Sequence
  Synthetic oligonucleotide: CBLB-4925
ggugaccauuggaaaagac

SEQ ID NO: 35114 - RNA, 20 nt, Artificial Sequence
  Synthetic oligonucleotide: CBLB-4926
aggugaccauuggaaaagac

SEQ ID NO: 35115 - RNA, 21 nt, Artificial Sequence
  Synthetic oligonucleotide: CBLB-4927
aaggugaccauuggaaaagac

SEQ ID NO: 35116 - RNA, 22 nt, Artificial Sequence
  Synthetic oligonucleotide: CBLB-4928
caaggugaccauuggaaaagac

SEQ ID NO: 35117 - RNA, 23 nt, Artificial Sequence
  Synthetic oligonucleotide: CBLB-4929
ccaaggugaccauuggaaaagac

SEQ ID NO: 35118 - RNA, 24 nt, Artificial Sequence
  Synthetic oligonucleotide: CBLB-4930
uccaaggugaccauuggaaaagac

SEQ ID NO: 35119 - RNA, 18 nt, Artificial Sequence
  Synthetic oligonucleotide: CBLB-4931
gcugcuauagauuuagac

SEQ ID NO: 35120 - RNA, 19 nt, Artificial Sequence
  Synthetic oligonucleotide: CBLB-4932
ggcugcuauagauuuagac

SEQ ID NO: 35121 - RNA, 20 nt, Artificial Sequence
  Synthetic oligonucleotide: CBLB-4933
uggcugcuauagauuuagac

SEQ ID NO: 35122 - RNA, 21 nt, Artificial Sequence
  Synthetic oligonucleotide: CBLB-4934
cuggcugcuauagauuuagac

SEQ ID NO: 35123 - RNA, 22 nt, Artificial Sequence
  Synthetic oligonucleotide: CBLB-4935
ucuggcugcuauagauuuagac

SEQ ID NO: 35124 - RNA, 23 nt, Artificial Sequence
  Synthetic oligonucleotide: CBLB-4936
uucuggcugcuauagauuuagac

SEQ ID NO: 35125 - RNA, 24 nt, Artificial Sequence
  Synthetic oligonucleotide: CBLB-4937
guucuggcugcuauagauuuagac

SEQ ID NO: 35126 - RNA, 18 nt, Artificial Sequence
  Synthetic oligonucleotide: CBLB-4938
auuuagacguggggauac

SEQ ID NO: 35127 - RNA, 19 nt, Artificial Sequence
  Synthetic oligonucleotide: CBLB-4939
gauuuagacguggggauac

SEQ ID NO: 35128 - RNA, 20 nt, Artificial Sequence
  Synthetic oligonucleotide: CBLB-3156
agauuuagacguggggauac

SEQ ID NO: 35129 - RNA, 21 nt, Artificial Sequence
  Synthetic oligonucleotide: CBLB-4940
uagauuuagacguggggauac

SEQ ID NO: 35130 - RNA, 22 nt, Artificial Sequence
  Synthetic oligonucleotide: CBLB-4941
auagauuuagacguggggauac

SEQ ID NO: 35131 - RNA, 23 nt, Artificial Sequence
  Synthetic oligonucleotide: CBLB-4942
uauagauuuagacguggggauac

SEQ ID NO: 35132 - RNA, 24 nt, Artificial Sequence
  Synthetic oligonucleotide: CBLB-4943
cuauagauuuagacguggggauac

SEQ ID NO: 35133 - RNA, 18 nt, Artificial Sequence
  Synthetic oligonucleotide: CBLB-4944
acggaccaguacaccuac

SEQ ID NO: 35134 - RNA, 19 nt, Artificial Sequence
  Synthetic oligonucleotide: CBLB-4945
aacggaccaguacaccuac

SEQ ID NO: 35135 - RNA, 20 nt, Artificial Sequence
  Synthetic oligonucleotide: CBLB-4946
uaacggaccaguacaccuac

SEQ ID NO: 35136 - RNA, 21 nt, Artificial Sequence
  Synthetic oligonucleotide: CBLB-4947
cuaacggaccaguacaccuac

SEQ ID NO: 35137 - RNA, 22 nt, Artificial Sequence
  Synthetic oligonucleotide: CBLB-4948
gcuaacggaccaguacaccuac

SEQ ID NO: 35138 - RNA, 23 nt, Artificial Sequence
  Synthetic oligonucleotide: CBLB-4949
ugcuaacggaccaguacaccuac

SEQ ID NO: 35139 - RNA, 24 nt, Artificial Sequence
  Synthetic oligonucleotide: CBLB-4950
uugcuaacggaccaguacaccuac

SEQ ID NO: 35140 - RNA, 18 nt, Artificial Sequence
  Synthetic oligonucleotide: CBLB-4951
uuggcuuuucccuccuac

SEQ ID NO: 35141 - RNA, 19 nt, Artificial Sequence
  Synthetic oligonucleotide: CBLB-4952
uuuggcuuuucccuccuac

SEQ ID NO: 35142 - RNA, 20 nt, Artificial Sequence
  Synthetic oligonucleotide: CBLB-4953
cuuuggcuuuucccuccuac

SEQ ID NO: 35143 - RNA, 21 nt, Artificial Sequence
  Synthetic oligonucleotide: CBLB-4954
ucuuuggcuuuucccuccuac

SEQ ID NO: 35144 - RNA, 22 nt, Artificial Sequence
  Synthetic oligonucleotide: CBLB-4955
uucuuuggcuuuucccuccuac

SEQ ID NO: 35145 - RNA, 23 nt, Artificial Sequence
  Synthetic oligonucleotide: CBLB-4956
uuucuuuggcuuuucccuccuac

SEQ ID NO: 35146 - RNA, 24 nt, Artificial Sequence
  Synthetic oligonucleotide: CBLB-4957
uuuucuuuggcuuuucccuccuac

SEQ ID NO: 35147 - RNA, 18 nt, Artificial Sequence
  Synthetic oligonucleotide: CBLB-4958
cugaggauggccggcuac

SEQ ID NO: 35148 - RNA, 19 nt, Artificial Sequence
  Synthetic oligonucleotide: CBLB-4959
ccugaggauggccggcuac

SEQ ID NO: 35149 - RNA, 20 nt, Artificial Sequence
  Synthetic oligonucleotide: CBLB-3157
uccugaggauggccggcuac

SEQ ID NO: 35150 - RNA, 21 nt, Artificial Sequence
  Synthetic oligonucleotide: CBLB-4960
guccugaggauggccggcuac

SEQ ID NO: 35151 - RNA, 22 nt, Artificial Sequence
  Synthetic oligonucleotide: CBLB-4961
uguccugaggauggccggcuac

SEQ ID NO: 35152 - RNA, 23 nt, Artificial Sequence
  Synthetic oligonucleotide: CBLB-4962
cuguccugaggauggccggcuac

SEQ ID NO: 35153 - RNA, 24 nt, Artificial Sequence
  Synthetic oligonucleotide: CBLB-4963
ccuguccugaggauggccggcuac

SEQ ID NO: 35154 - RNA, 18 nt, Artificial Sequence
  Synthetic oligonucleotide: CBLB-4964
aagcaaguauaaacuuac

SEQ ID NO: 35155 - RNA, 19 nt, Artificial Sequence
  Synthetic oligonucleotide: CBLB-4965
uaagcaaguauaaacuuac

SEQ ID NO: 35156 - RNA, 20 nt, Artificial Sequence
  Synthetic oligonucleotide: CBLB-4966
cuaagcaaguauaaacuuac

SEQ ID NO: 35157 - RNA, 21 nt, Artificial Sequence
  Synthetic oligonucleotide: CBLB-4967
acuaagcaaguauaaacuuac

SEQ ID NO: 35158 - RNA, 22 nt, Artificial Sequence
  Synthetic oligonucleotide: CBLB-4968
gacuaagcaaguauaaacuuac

SEQ ID NO: 35159 - RNA, 23 nt, Artificial Sequence
  Synthetic oligonucleotide: CBLB-4969
agacuaagcaaguauaaacuuac

SEQ ID NO: 35160 - RNA, 24 nt, Artificial Sequence
  Synthetic oligonucleotide: CBLB-4970
uagacuaagcaaguauaaacuuac

SEQ ID NO: 35161 - RNA, 18 nt, Artificial Sequence
  Synthetic oligonucleotide: CBLB-4971
caaugaugcugcaacacc

SEQ ID NO: 35162 - RNA, 19 nt, Artificial Sequence
  Synthetic oligonucleotide: CBLB-4972
ucaaugaugcugcaacacc

SEQ ID NO: 35163 - RNA, 20 nt, Artificial Sequence
  Synthetic oligonucleotide: CBLB-3163
gucaaugaugcugcaacacc

SEQ ID NO: 35164 - RNA, 21 nt, Artificial Sequence
  Synthetic oligonucleotide: CBLB-4973
ggucaaugaugcugcaacacc

SEQ ID NO: 35165 - RNA, 22 nt, Artificial Sequence
  Synthetic oligonucleotide: CBLB-4974
gggucaaugaugcugcaacacc

SEQ ID NO: 35166 - RNA, 23 nt, Artificial Sequence
  Synthetic oligonucleotide: CBLB-4975
ggggucaaugaugcugcaacacc

SEQ ID NO: 35167 - RNA, 24 nt, Artificial Sequence
  Synthetic oligonucleotide: CBLB-4976
aggggucaaugaugcugcaacacc

SEQ ID NO: 35168 - RNA, 18 nt, Artificial Sequence
  Synthetic oligonucleotide: CBLB-4977
cggaccaguacaccuacc

SEQ ID NO: 35169 - RNA, 19 nt, Artificial Sequence
  Synthetic oligonucleotide: CBLB-4978
acggaccaguacaccuacc

SEQ ID NO: 35170 - RNA, 20 nt, Artificial Sequence
  Synthetic oligonucleotide: CBLB-3166
aacggaccaguacaccuacc

SEQ ID NO: 35171 - RNA, 21 nt, Artificial Sequence
  Synthetic oligonucleotide: CBLB-4979
uaacggaccaguacaccuacc

SEQ ID NO: 35172 - RNA, 22 nt, Artificial Sequence
  Synthetic oligonucleotide: CBLB-4980
cuaacggaccaguacaccuacc

SEQ ID NO: 35173 - RNA, 23 nt, Artificial Sequence
  Synthetic oligonucleotide: CBLB-4981
gcuaacggaccaguacaccuacc

SEQ ID NO: 35174 - RNA, 24 nt, Artificial Sequence
  Synthetic oligonucleotide: CBLB-4982
ugcuaacggaccaguacaccuacc

SEQ ID NO: 35175 - RNA, 18 nt, Artificial Sequence
  Synthetic oligonucleotide: CBLB-4983
uuuuggagagcccucccc

SEQ ID NO: 35176 - RNA, 19 nt, Artificial Sequence
  Synthetic oligonucleotide: CBLB-4984
guuuuggagagcccucccc

SEQ ID NO: 35177 - RNA, 20 nt, Artificial Sequence
  Synthetic oligonucleotide: CBLB-4985
gguuuuggagagcccucccc

SEQ ID NO: 35178 - RNA, 21 nt, Artificial Sequence
  Synthetic oligonucleotide: CBLB-4986
agguuuuggagagcccucccc

SEQ ID NO: 35179 - RNA, 22 nt, Artificial Sequence
  Synthetic oligonucleotide: CBLB-4987
cagguuuuggagagcccucccc

SEQ ID NO: 35180 - RNA, 23 nt, Artificial Sequence
  Synthetic oligonucleotide: CBLB-4988
ccagguuuuggagagcccucccc

SEQ ID NO: 35181 - RNA, 24 nt, Artificial Sequence
  Synthetic oligonucleotide: CBLB-4989
uccagguuuuggagagcccucccc

SEQ ID NO: 35182 - RNA, 18 nt, Artificial Sequence
  Synthetic oligonucleotide: CBLB-4990
caaugccgccucaggccc

SEQ ID NO: 35183 - RNA, 19 nt, Artificial Sequence
  Synthetic oligonucleotide: CBLB-4991
ccaaugccgccucaggccc

SEQ ID NO: 35184 - RNA, 20 nt, Artificial Sequence
  Synthetic oligonucleotide: CBLB-4992
uccaaugccgccucaggccc

SEQ ID NO: 35185 - RNA, 21 nt, Artificial Sequence
  Synthetic oligonucleotide: CBLB-4993
uuccaaugccgccucaggccc

SEQ ID NO: 35186 - RNA, 22 nt, Artificial Sequence
  Synthetic oligonucleotide: CBLB-4994
uuuccaaugccgccucaggccc

SEQ ID NO: 35187 - RNA, 23 nt, Artificial Sequence
  Synthetic oligonucleotide: CBLB-4995
uuuuccaaugccgccucaggccc

SEQ ID NO: 35188 - RNA, 24 nt, Artificial Sequence
  Synthetic oligonucleotide: CBLB-4996
auuuuccaaugccgccucaggccc

SEQ ID NO: 35189 - RNA, 18 nt, Artificial Sequence
  Synthetic oligonucleotide: CBLB-4997
uagucccaaacacauccc

SEQ ID NO: 35190 - RNA, 19 nt, Artificial Sequence
  Synthetic oligonucleotide: CBLB-4998
uuagucccaaacacauccc

SEQ ID NO: 35191 - RNA, 20 nt, Artificial Sequence
  Synthetic oligonucleotide: CBLB-4999
auuagucccaaacacauccc

SEQ ID NO: 35192 - RNA, 21 nt, Artificial Sequence
  Synthetic oligonucleotide: CBLB-5000
gauuagucccaaacacauccc

SEQ ID NO: 35193 - RNA, 22 nt, Artificial Sequence
  Synthetic oligonucleotide: CBLB-5001
ugauuagucccaaacacauccc

SEQ ID NO: 35194 - RNA, 23 nt, Artificial Sequence
  Synthetic oligonucleotide: CBLB-5002
cugauuagucccaaacacauccc

SEQ ID NO: 35195 - RNA, 24 nt, Artificial Sequence
  Synthetic oligonucleotide: CBLB-5003
gcugauuagucccaaacacauccc

SEQ ID NO: 35196 - RNA, 18 nt, Artificial Sequence
  Synthetic oligonucleotide: CBLB-5004
gaggaggaggagaaagcc

SEQ ID NO: 35197 - RNA, 19 nt, Artificial Sequence
  Synthetic oligonucleotide: CBLB-5005
ggaggaggaggagaaagcc

SEQ ID NO: 35198 - RNA, 20 nt, Artificial Sequence
  Synthetic oligonucleotide: CBLB-3172
uggaggaggaggagaaagcc

SEQ ID NO: 35199 - RNA, 21 nt, Artificial Sequence
  Synthetic oligonucleotide: CBLB-5006
cuggaggaggaggagaaagcc

SEQ ID NO: 35200 - RNA, 22 nt, Artificial Sequence
  Synthetic oligonucleotide: CBLB-5007
acuggaggaggaggagaaagcc

SEQ ID NO: 35201 - RNA, 23 nt, Artificial Sequence
  Synthetic oligonucleotide: CBLB-5008
aacuggaggaggaggagaaagcc

SEQ ID NO: 35202 - RNA, 24 nt, Artificial Sequence
  Synthetic oligonucleotide: CBLB-5009
uaacuggaggaggaggagaaagcc

SEQ ID NO: 35203 - RNA, 18 nt, Artificial Sequence
  Synthetic oligonucleotide: CBLB-5010
uggccggcuacuggagcc

SEQ ID NO: 35204 - RNA, 19 nt, Artificial Sequence
  Synthetic oligonucleotide: CBLB-5011
auggccggcuacuggagcc

SEQ ID NO: 35205 - RNA, 20 nt, Artificial Sequence
  Synthetic oligonucleotide: CBLB-3174
gauggccggcuacuggagcc

SEQ ID NO: 35206 - RNA, 21 nt, Artificial Sequence
  Synthetic oligonucleotide: CBLB-5012
ggauggccggcuacuggagcc

SEQ ID NO: 35207 - RNA, 22 nt, Artificial Sequence
  Synthetic oligonucleotide: CBLB-5013
aggauggccggcuacuggagcc

SEQ ID NO: 35208 - RNA, 23 nt, Artificial Sequence
  Synthetic oligonucleotide: CBLB-5014
gaggauggccggcuacuggagcc

SEQ ID NO: 35209 - RNA, 24 nt, Artificial Sequence
  Synthetic oligonucleotide: CBLB-5015
ugaggauggccggcuacuggagcc

SEQ ID NO: 35210 - RNA, 18 nt, Artificial Sequence
  Synthetic oligonucleotide: CBLB-5016
ugaaucaaaaacaucucc

SEQ ID NO: 35211 - RNA, 19 nt, Artificial Sequence
  Synthetic oligonucleotide: CBLB-5017
cugaaucaaaaacaucucc

SEQ ID NO: 35212 - RNA, 20 nt, Artificial Sequence
  Synthetic oligonucleotide: CBLB-5018
gcugaaucaaaaacaucucc

SEQ ID NO: 35213 - RNA, 21 nt, Artificial Sequence
  Synthetic oligonucleotide: CBLB-5019
ggcugaaucaaaaacaucucc

SEQ ID NO: 35214 - RNA, 22 nt, Artificial Sequence
  Synthetic oligonucleotide: CBLB-5020
aggcugaaucaaaaacaucucc

SEQ ID NO: 35215 - RNA, 23 nt, Artificial Sequence
  Synthetic oligonucleotide: CBLB-5021
gaggcugaaucaaaaacaucucc

SEQ ID NO: 35216 - RNA, 24 nt, Artificial Sequence
  Synthetic oligonucleotide: CBLB-5022
agaggcugaaucaaaaacaucucc

SEQ ID NO: 35217 - RNA, 18 nt, Artificial Sequence
  Synthetic oligonucleotide: CBLB-5023
gauacgaaaguuaucucc

SEQ ID NO: 35218 - RNA, 19 nt, Artificial Sequence
  Synthetic oligonucleotide: CBLB-5024
ugauacgaaaguuaucucc

SEQ ID NO: 35219 - RNA, 20 nt, Artificial Sequence
  Synthetic oligonucleotide: CBLB-5025
gugauacgaaaguuaucucc

SEQ ID NO: 35220 - RNA, 21 nt, Artificial Sequence
  Synthetic oligonucleotide: CBLB-5026
ugugauacgaaaguuaucucc

SEQ ID NO: 35221 - RNA, 22 nt, Artificial Sequence
  Synthetic oligonucleotide: CBLB-5027
uugugauacgaaaguuaucucc

SEQ ID NO: 35222 - RNA, 23 nt, Artificial Sequence
  Synthetic oligonucleotide: CBLB-5028
uuugugauacgaaaguuaucucc

SEQ ID NO: 35223 - RNA, 24 nt, Artificial Sequence
  Synthetic oligonucleotide: CBLB-5029
uuuugugauacgaaaguuaucucc

SEQ ID NO: 35224 - RNA, 18 nt, Artificial Sequence
  Synthetic oligonucleotide: CBLB-5030
ggaggaggaggagaaagc

SEQ ID NO: 35225 - RNA, 19 nt, Artificial Sequence
  Synthetic oligonucleotide: CBLB-5031
uggaggaggaggagaaagc

SEQ ID NO: 35226 - RNA, 20 nt, Artificial Sequence
  Synthetic oligonucleotide: CBLB-3192
cuggaggaggaggagaaagc

SEQ ID NO: 35227 - RNA, 21 nt, Artificial Sequence
  Synthetic oligonucleotide: CBLB-5032
acuggaggaggaggagaaagc

SEQ ID NO: 35228 - RNA, 22 nt, Artificial Sequence
  Synthetic oligonucleotide: CBLB-5033
aacuggaggaggaggagaaagc

SEQ ID NO: 35229 - RNA, 23 nt, Artificial Sequence
  Synthetic oligonucleotide: CBLB-5034
uaacuggaggaggaggagaaagc

SEQ ID NO: 35230 - RNA, 24 nt, Artificial Sequence
  Synthetic oligonucleotide: CBLB-5035
guaacuggaggaggaggagaaagc

SEQ ID NO: 35231 - RNA, 18 nt, Artificial Sequence
  Synthetic oligonucleotide: CBLB-5036
auggccggcuacuggagc

SEQ ID NO: 35232 - RNA, 19 nt, Artificial Sequence
  Synthetic oligonucleotide: CBLB-5037
gauggccggcuacuggagc

SEQ ID NO: 35233 - RNA, 20 nt, Artificial Sequence
  Synthetic oligonucleotide: CBLB-5038
ggauggccggcuacuggagc

SEQ ID NO: 35234 - RNA, 21 nt, Artificial Sequence
  Synthetic oligonucleotide: CBLB-5039
aggauggccggcuacuggagc

SEQ ID NO: 35235 - RNA, 22 nt, Artificial Sequence
  Synthetic oligonucleotide: CBLB-5040
gaggauggccggcuacuggagc

SEQ ID NO: 35236 - RNA, 23 nt, Artificial Sequence
  Synthetic oligonucleotide: CBLB-5041
ugaggauggccggcuacuggagc

SEQ ID NO: 35237 - RNA, 24 nt, Artificial Sequence
  Synthetic oligonucleotide: CBLB-5042
cugaggauggccggcuacuggagc

SEQ ID NO: 35238 - RNA, 18 nt, Artificial Sequence
  Synthetic oligonucleotide: CBLB-5043
accugguaaccuucuagc

SEQ ID NO: 35239 - RNA, 19 nt, Artificial Sequence
  Synthetic oligonucleotide: CBLB-5044
caccugguaaccuucuagc

SEQ ID NO: 35240 - RNA, 20 nt, Artificial Sequence
  Synthetic oligonucleotide: CBLB-3194
ucaccugguaaccuucuagc

SEQ ID NO: 35241 - RNA, 21 nt, Artificial Sequence
  Synthetic oligonucleotide: CBLB-5045
uucaccugguaaccuucuagc

SEQ ID NO: 35242 - RNA, 22 nt, Artificial Sequence
  Synthetic oligonucleotide: CBLB-5046
uuucaccugguaaccuucuagc

SEQ ID NO: 35243 - RNA, 23 nt, Artificial Sequence
  Synthetic oligonucleotide: CBLB-5047
uuuucaccugguaaccuucuagc

SEQ ID NO: 35244 - RNA, 24 nt, Artificial Sequence
  Synthetic oligonucleotide: CBLB-5048
auuuucaccugguaaccuucuagc

SEQ ID NO: 35245 - RNA, 18 nt, Artificial Sequence
  Synthetic oligonucleotide: CBLB-5049
ccugccaugccguaaggc

SEQ ID NO: 35246 - RNA, 19 nt, Artificial Sequence
  Synthetic oligonucleotide: CBLB-5050
accugccaugccguaaggc

SEQ ID NO: 35247 - RNA, 20 nt, Artificial Sequence
  Synthetic oligonucleotide: CBLB-5051
uaccugccaugccguaaggc

SEQ ID NO: 35248 - RNA, 21 nt, Artificial Sequence
  Synthetic oligonucleotide: CBLB-5052
auaccugccaugccguaaggc

SEQ ID NO: 35249 - RNA, 22 nt, Artificial Sequence
  Synthetic oligonucleotide: CBLB-5053
uauaccugccaugccguaaggc

SEQ ID NO: 35250 - RNA, 23 nt, Artificial Sequence
  Synthetic oligonucleotide: CBLB-5054
uuauaccugccaugccguaaggc

SEQ ID NO: 35251 - RNA, 24 nt, Artificial Sequence
  Synthetic oligonucleotide: CBLB-5055
auuauaccugccaugccguaaggc

SEQ ID NO: 35252 - RNA, 18 nt, Artificial Sequence
  Synthetic oligonucleotide: CBLB-5056
ucugaauuagauccaggc

SEQ ID NO: 35253 - RNA, 19 nt, Artificial Sequence
  Synthetic oligonucleotide: CBLB-5057
uucugaauuagauccaggc

SEQ ID NO: 35254 - RNA, 20 nt, Artificial Sequence
  Synthetic oligonucleotide: CBLB-5058
uuucugaauuagauccaggc

SEQ ID NO: 35255 - RNA, 21 nt, Artificial Sequence
  Synthetic oligonucleotide: CBLB-5059
cuuucugaauuagauccaggc

SEQ ID NO: 35256 - RNA, 22 nt, Artificial Sequence
  Synthetic oligonucleotide: CBLB-5060
ccuuucugaauuagauccaggc

SEQ ID NO: 35257 - RNA, 23 nt, Artificial Sequence
  Synthetic oligonucleotide: CBLB-5061
gccuuucugaauuagauccaggc

SEQ ID NO: 35258 - RNA, 24 nt, Artificial Sequence
  Synthetic oligonucleotide: CBLB-5062
ugccuuucugaauuagauccaggc

SEQ ID NO: 35259 - RNA, 18 nt, Artificial Sequence
  Synthetic oligonucleotide: CBLB-5063
gagccauugcuuccaggc

SEQ ID NO: 35260 - RNA, 19 nt, Artificial Sequence
  Synthetic oligonucleotide: CBLB-5064
agagccauugcuuccaggc

SEQ ID NO: 35261 - RNA, 20 nt, Artificial Sequence
  Synthetic oligonucleotide: CBLB-5065
uagagccauugcuuccaggc

SEQ ID NO: 35262 - RNA, 21 nt, Artificial Sequence
  Synthetic oligonucleotide: CBLB-5066
uuagagccauugcuuccaggc

SEQ ID NO: 35263 - RNA, 22 nt, Artificial Sequence
  Synthetic oligonucleotide: CBLB-5067
uuuagagccauugcuuccaggc

SEQ ID NO: 35264 - RNA, 23 nt, Artificial Sequence
  Synthetic oligonucleotide: CBLB-5068
uuuuagagccauugcuuccaggc

SEQ ID NO: 35265 - RNA, 24 nt, Artificial Sequence
  Synthetic oligonucleotide: CBLB-5069
auuuuagagccauugcuuccaggc

SEQ ID NO: 35266 - RNA, 18 nt, Artificial Sequence
  Synthetic oligonucleotide: CBLB-5070
gcugccaucaaucagggc

SEQ ID NO: 35267 - RNA, 19 nt, Artificial Sequence
  Synthetic oligonucleotide: CBLB-5071
ugcugccaucaaucagggc

SEQ ID NO: 35268 - RNA, 20 nt, Artificial Sequence
  Synthetic oligonucleotide: CBLB-5072
cugcugccaucaaucagggc

SEQ ID NO: 35269 - RNA, 21 nt, Artificial Sequence
  Synthetic oligonucleotide: CBLB-5073
ccugcugccaucaaucagggc

SEQ ID NO: 35270 - RNA, 22 nt, Artificial Sequence
  Synthetic oligonucleotide: CBLB-5074
cccugcugccaucaaucagggc

SEQ ID NO: 35271 - RNA, 23 nt, Artificial Sequence
  Synthetic oligonucleotide: CBLB-5075
ucccugcugccaucaaucagggc

SEQ ID NO: 35272 - RNA, 24 nt, Artificial Sequence
  Synthetic oligonucleotide: CBLB-5076
uucccugcugccaucaaucagggc

SEQ ID NO: 35273 - RNA, 18 nt, Artificial Sequence
  Synthetic oligonucleotide: CBLB-5077
uggcuuucuucucugggc

SEQ ID NO: 35274 - RNA, 19 nt, Artificial Sequence
  Synthetic oligonucleotide: CBLB-5078
guggcuuucuucucugggc

SEQ ID NO: 35275 - RNA, 20 nt, Artificial Sequence
  Synthetic oligonucleotide: CBLB-5079
uguggcuuucuucucugggc

SEQ ID NO: 35276 - RNA, 21 nt, Artificial Sequence
  Synthetic oligonucleotide: CBLB-5080
cuguggcuuucuucucugggc

SEQ ID NO: 35277 - RNA, 22 nt, Artificial Sequence
  Synthetic oligonucleotide: CBLB-5081
gcuguggcuuucuucucugggc

SEQ ID NO: 35278 - RNA, 23 nt, Artificial Sequence
  Synthetic oligonucleotide: CBLB-5082
ggcuguggcuuucuucucugggc

SEQ ID NO: 35279 - RNA, 24 nt, Artificial Sequence
  Synthetic oligonucleotide: CBLB-5083
aggcuguggcuuucuucucugggc

SEQ ID NO: 35280 - RNA, 18 nt, Artificial Sequence
  Synthetic oligonucleotide: CBLB-5084
cuggcaggugguaauggc

SEQ ID NO: 35281 - RNA, 19 nt, Artificial Sequence
  Synthetic oligonucleotide: CBLB-5085
ccuggcaggugguaauggc

SEQ ID NO: 35282 - RNA, 20 nt, Artificial Sequence
  Synthetic oligonucleotide: CBLB-5086
gccuggcaggugguaauggc

SEQ ID NO: 35283 - RNA, 21 nt, Artificial Sequence
  Synthetic oligonucleotide: CBLB-5087
ggccuggcaggugguaauggc

SEQ ID NO: 35284 - RNA, 22 nt, Artificial Sequence
  Synthetic oligonucleotide: CBLB-5088
aggccuggcaggugguaauggc

SEQ ID NO: 35285 - RNA, 23 nt, Artificial Sequence
  Synthetic oligonucleotide: CBLB-5089
gaggccuggcaggugguaauggc

SEQ ID NO: 35286 - RNA, 24 nt, Artificial Sequence
  Synthetic oligonucleotide: CBLB-5090
ggaggccuggcaggugguaauggc

SEQ ID NO: 35287 - RNA, 18 nt, Artificial Sequence
  Synthetic oligonucleotide: CBLB-5091
cuuguuuucucaccaugc

SEQ ID NO: 35288 - RNA, 19 nt, Artificial Sequence
  Synthetic oligonucleotide: CBLB-5092
ucuuguuuucucaccaugc

SEQ ID NO: 35289 - RNA, 20 nt, Artificial Sequence
  Synthetic oligonucleotide: CBLB-5093
aucuuguuuucucaccaugc

SEQ ID NO: 35290 - RNA, 21 nt, Artificial Sequence
  Synthetic oligonucleotide: CBLB-5094
uaucuuguuuucucaccaugc

SEQ ID NO: 35291 - RNA, 22 nt, Artificial Sequence
  Synthetic oligonucleotide: CBLB-5095
uuaucuuguuuucucaccaugc

SEQ ID NO: 35292 - RNA, 23 nt, Artificial Sequence
  Synthetic oligonucleotide: CBLB-5096
uuuaucuuguuuucucaccaugc

SEQ ID NO: 35293 - RNA, 24 nt, Artificial Sequence
  Synthetic oligonucleotide: CBLB-5097
guuuaucuuguuuucucaccaugc

SEQ ID NO: 35294 - RNA, 18 nt, Artificial Sequence
  Synthetic oligonucleotide: CBLB-5098
acaaaacucacuuuaugc

SEQ ID NO: 35295 - RNA, 19 nt, Artificial Sequence
  Synthetic oligonucleotide: CBLB-5099
aacaaaacucacuuuaugc

SEQ ID NO: 35296 - RNA, 20 nt, Artificial Sequence
  Synthetic oligonucleotide: CBLB-5100
caacaaaacucacuuuaugc

SEQ ID NO: 35297 - RNA, 21 nt, Artificial Sequence
  Synthetic oligonucleotide: CBLB-5101
ucaacaaaacucacuuuaugc

SEQ ID NO: 35298 - RNA, 22 nt, Artificial Sequence
  Synthetic oligonucleotide: CBLB-5102
uucaacaaaacucacuuuaugc

SEQ ID NO: 35299 - RNA, 23 nt, Artificial Sequence
  Synthetic oligonucleotide: CBLB-5103
auucaacaaaacucacuuuaugc

SEQ ID NO: 35300 - RNA, 24 nt, Artificial Sequence
  Synthetic oligonucleotide: CBLB-5104
aauucaacaaaacucacuuuaugc

SEQ ID NO: 35301 - RNA, 18 nt, Artificial Sequence
  Synthetic oligonucleotide: CBLB-5105
uaagggaggagguggugc

SEQ ID NO: 35302 - RNA, 19 nt, Artificial Sequence
  Synthetic oligonucleotide: CBLB-5106
uuaagggaggagguggugc

SEQ ID NO: 35303 - RNA, 20 nt, Artificial Sequence
  Synthetic oligonucleotide: CBLB-3205
cuuaagggaggagguggugc

SEQ ID NO: 35304 - RNA, 21 nt, Artificial Sequence
  Synthetic oligonucleotide: CBLB-5107
ucuuaagggaggagguggugc

SEQ ID NO: 35305 - RNA, 22 nt, Artificial Sequence
  Synthetic oligonucleotide: CBLB-5108
cucuuaagggaggagguggugc

SEQ ID NO: 35306 - RNA, 23 nt, Artificial Sequence
  Synthetic oligonucleotide: CBLB-5109
ucucuuaagggaggagguggugc

SEQ ID NO: 35307 - RNA, 24 nt, Artificial Sequence
  Synthetic oligonucleotide: CBLB-5110
aucucuuaagggaggagguggugc

SEQ ID NO: 35308 - RNA, 18 nt, Artificial Sequence
  Synthetic oligonucleotide: CBLB-5111
aaugagacuaugccuugc

SEQ ID NO: 35309 - RNA, 19 nt, Artificial Sequence
  Synthetic oligonucleotide: CBLB-5112
caaugagacuaugccuugc

SEQ ID NO: 35310 - RNA, 20 nt, Artificial Sequence
  Synthetic oligonucleotide: CBLB-3206
ucaaugagacuaugccuugc

SEQ ID NO: 35311 - RNA, 21 nt, Artificial Sequence
  Synthetic oligonucleotide: CBLB-5113
uucaaugagacuaugccuugc

SEQ ID NO: 35312 - RNA, 22 nt, Artificial Sequence
  Synthetic oligonucleotide: CBLB-5114
guucaaugagacuaugccuugc

SEQ ID NO: 35313 - RNA, 23 nt, Artificial Sequence
  Synthetic oligonucleotide: CBLB-5115
uguucaaugagacuaugccuugc

SEQ ID NO: 35314 - RNA, 24 nt, Artificial Sequence
  Synthetic oligonucleotide: CBLB-5116
auguucaaugagacuaugccuugc

SEQ ID NO: 35315 - RNA, 18 nt, Artificial Sequence
  Synthetic oligonucleotide: CBLB-5117
auuagucccaaacacauc

SEQ ID NO: 35316 - RNA, 19 nt, Artificial Sequence
  Synthetic oligonucleotide: CBLB-5118
gauuagucccaaacacauc

SEQ ID NO: 35317 - RNA, 20 nt, Artificial Sequence
  Synthetic oligonucleotide: CBLB-5119
ugauuagucccaaacacauc

SEQ ID NO: 35318 - RNA, 21 nt, Artificial Sequence
  Synthetic oligonucleotide: CBLB-5120
cugauuagucccaaacacauc

SEQ ID NO: 35319 - RNA, 22 nt, Artificial Sequence
  Synthetic oligonucleotide: CBLB-5121
gcugauuagucccaaacacauc

SEQ ID NO: 35320 - RNA, 23 nt, Artificial Sequence
  Synthetic oligonucleotide: CBLB-5122
agcugauuagucccaaacacauc

SEQ ID NO: 35321 - RNA, 24 nt, Artificial Sequence
  Synthetic oligonucleotide: CBLB-5123
aagcugauuagucccaaacacauc

SEQ ID NO: 35322 - RNA, 18 nt, Artificial Sequence
  Synthetic oligonucleotide: CBLB-5124
gccaaccgauucaucauc

SEQ ID NO: 35323 - RNA, 19 nt, Artificial Sequence
  Synthetic oligonucleotide: CBLB-5125
ugccaaccgauucaucauc

SEQ ID NO: 35324 - RNA, 20 nt, Artificial Sequence
  Synthetic oligonucleotide: CBLB-5126
uugccaaccgauucaucauc

SEQ ID NO: 35325 - RNA, 21 nt, Artificial Sequence
  Synthetic oligonucleotide: CBLB-5127
uuugccaaccgauucaucauc

SEQ ID NO: 35326 - RNA, 22 nt, Artificial Sequence
  Synthetic oligonucleotide: CBLB-5128
guuugccaaccgauucaucauc

SEQ ID NO: 35327 - RNA, 23 nt, Artificial Sequence
  Synthetic oligonucleotide: CBLB-5129
cguuugccaaccgauucaucauc

SEQ ID NO: 35328 - RNA, 24 nt, Artificial Sequence
  Synthetic oligonucleotide: CBLB-5130
acguuugccaaccgauucaucauc

SEQ ID NO: 35329 - RNA, 18 nt, Artificial Sequence
  Synthetic oligonucleotide: CBLB-5131
gcuaaucugguggaccuc

SEQ ID NO: 35330 - RNA, 19 nt, Artificial Sequence
  Synthetic oligonucleotide: CBLB-5132
agcuaaucugguggaccuc

SEQ ID NO: 35331 - RNA, 20 nt, Artificial Sequence
  Synthetic oligonucleotide: CBLB-5133
gagcuaaucugguggaccuc

SEQ ID NO: 35332 - RNA, 21 nt, Artificial Sequence
  Synthetic oligonucleotide: CBLB-5134
agagcuaaucugguggaccuc

SEQ ID NO: 35333 - RNA, 22 nt, Artificial Sequence
  Synthetic oligonucleotide: CBLB-5135
cagagcuaaucugguggaccuc

SEQ ID NO: 35334 - RNA, 23 nt, Artificial Sequence
  Synthetic oligonucleotide: CBLB-5136
ccagagcuaaucugguggaccuc

SEQ ID NO: 35335 - RNA, 24 nt, Artificial Sequence
  Synthetic oligonucleotide: CBLB-5137
gccagagcuaaucugguggaccuc

SEQ ID NO: 35336 - RNA, 18 nt, Artificial Sequence
  Synthetic oligonucleotide: CBLB-5138
gaggcauuggcgggucuc

SEQ ID NO: 35337 - RNA, 19 nt, Artificial Sequence
  Synthetic oligonucleotide: CBLB-5139
agaggcauuggcgggucuc

SEQ ID NO: 35338 - RNA, 20 nt, Artificial Sequence
  Synthetic oligonucleotide: CBLB-3218
aagaggcauuggcgggucuc

SEQ ID NO: 35339 - RNA, 21 nt, Artificial Sequence
  Synthetic oligonucleotide: CBLB-5140
caagaggcauuggcgggucuc

SEQ ID NO: 35340 - RNA, 22 nt, Artificial Sequence
  Synthetic oligonucleotide: CBLB-5141
ucaagaggcauuggcgggucuc

SEQ ID NO: 35341 - RNA, 23 nt, Artificial Sequence
  Synthetic oligonucleotide: CBLB-5142
uucaagaggcauuggcgggucuc

SEQ ID NO: 35342 - RNA, 24 nt, Artificial Sequence
  Synthetic oligonucleotide: CBLB-5143
cuucaagaggcauuggcgggucuc

SEQ ID NO: 35343 - RNA, 18 nt, Artificial Sequence
  Synthetic oligonucleotide: CBLB-5144
uguaacuuuuauaugguc

SEQ ID NO: 35344 - RNA, 19 nt, Artificial Sequence
  Synthetic oligonucleotide: CBLB-5145
guguaacuuuuauaugguc

SEQ ID NO: 35345 - RNA, 20 nt, Artificial Sequence
  Synthetic oligonucleotide: CBLB-5146
uguguaacuuuuauaugguc

SEQ ID NO: 35346 - RNA, 21 nt, Artificial Sequence
  Synthetic oligonucleotide: CBLB-5147
cuguguaacuuuuauaugguc

SEQ ID NO: 35347 - RNA, 22 nt, Artificial Sequence
  Synthetic oligonucleotide: CBLB-5148
ccuguguaacuuuuauaugguc

SEQ ID NO: 35348 - RNA, 23 nt, Artificial Sequence
  Synthetic oligonucleotide: CBLB-5149
accuguguaacuuuuauaugguc

SEQ ID NO: 35349 - RNA, 24 nt, Artificial Sequence
  Synthetic oligonucleotide: CBLB-5150
uaccuguguaacuuuuauaugguc

SEQ ID NO: 35350 - RNA, 18 nt, Artificial Sequence
  Synthetic oligonucleotide: CBLB-5151
gaagaaaaagauccuguc

SEQ ID NO: 35351 - RNA, 19 nt, Artificial Sequence
  Synthetic oligonucleotide: CBLB-5152
agaagaaaaagauccuguc

SEQ ID NO: 35352 - RNA, 20 nt, Artificial Sequence
  Synthetic oligonucleotide: CBLB-5153
aagaagaaaaagauccuguc

SEQ ID NO: 35353 - RNA, 21 nt, Artificial Sequence
  Synthetic oligonucleotide: CBLB-5154
gaagaagaaaaagauccuguc

SEQ ID NO: 35354 - RNA, 22 nt, Artificial Sequence
  Synthetic oligonucleotide: CBLB-5155
ggaagaagaaaaagauccuguc

SEQ ID NO: 35355 - RNA, 23 nt, Artificial Sequence
  Synthetic oligonucleotide: CBLB-5156
aggaagaagaaaaagauccuguc

SEQ ID NO: 35356 - RNA, 24 nt, Artificial Sequence
  Synthetic oligonucleotide: CBLB-5157
aaggaagaagaaaaagauccuguc

SEQ ID NO: 35357 - RNA, 18 nt, Artificial Sequence
  Synthetic oligonucleotide: CBLB-5158
aggagggaaggcaaauuc

SEQ ID NO: 35358 - RNA, 19 nt, Artificial Sequence
  Synthetic oligonucleotide: CBLB-5159
gaggagggaaggcaaauuc

SEQ ID NO: 35359 - RNA, 20 nt, Artificial Sequence
  Synthetic oligonucleotide: CBLB-5160
ggaggagggaaggcaaauuc

SEQ ID NO: 35360 - RNA, 21 nt, Artificial Sequence
  Synthetic oligonucleotide: CBLB-5161
uggaggagggaaggcaaauuc

SEQ ID NO: 35361 - RNA, 22 nt, Artificial Sequence
  Synthetic oligonucleotide: CBLB-5162
cuggaggagggaaggcaaauuc

SEQ ID NO: 35362 - RNA, 23 nt, Artificial Sequence
  Synthetic oligonucleotide: CBLB-5163
acuggaggagggaaggcaaauuc

SEQ ID NO: 35363 - RNA, 24 nt, Artificial Sequence
  Synthetic oligonucleotide: CBLB-5164
uacuggaggagggaaggcaaauuc

SEQ ID NO: 35364 - RNA, 18 nt, Artificial Sequence
  Synthetic oligonucleotide: CBLB-5165
ugagaugguugugaauuc

SEQ ID NO: 35365 - RNA, 19 nt, Artificial Sequence
  Synthetic oligonucleotide: CBLB-5166
augagaugguugugaauuc

SEQ ID NO: 35366 - RNA, 20 nt, Artificial Sequence
  Synthetic oligonucleotide: CBLB-3226
aaugagaugguugugaauuc

SEQ ID NO: 35367 - RNA, 21 nt, Artificial Sequence
  Synthetic oligonucleotide: CBLB-5167
caaugagaugguugugaauuc

SEQ ID NO: 35368 - RNA, 22 nt, Artificial Sequence
  Synthetic oligonucleotide: CBLB-5168
acaaugagaugguugugaauuc

SEQ ID NO: 35369 - RNA, 23 nt, Artificial Sequence
  Synthetic oligonucleotide: CBLB-5169
gacaaugagaugguugugaauuc

SEQ ID NO: 35370 - RNA, 24 nt, Artificial Sequence
  Synthetic oligonucleotide: CBLB-5170
ugacaaugagaugguugugaauuc

SEQ ID NO: 35371 - RNA, 18 nt, Artificial Sequence
  Synthetic oligonucleotide: CBLB-5171
ccgagggcaccaugcuuc

SEQ ID NO: 35372 - RNA, 19 nt, Artificial Sequence
  Synthetic oligonucleotide: CBLB-5172
cccgagggcaccaugcuuc

SEQ ID NO: 35373 - RNA, 20 nt, Artificial Sequence
  Synthetic oligonucleotide: CBLB-5173
ucccgagggcaccaugcuuc

SEQ ID NO: 35374 - RNA, 21 nt, Artificial Sequence
  Synthetic oligonucleotide: CBLB-5174
aucccgagggcaccaugcuuc

SEQ ID NO: 35375 - RNA, 22 nt, Artificial Sequence
  Synthetic oligonucleotide: CBLB-5175
caucccgagggcaccaugcuuc

SEQ ID NO: 35376 - RNA, 23 nt, Artificial Sequence
  Synthetic oligonucleotide: CBLB-5176
acaucccgagggcaccaugcuuc

SEQ ID NO: 35377 - RNA, 24 nt, Artificial Sequence
  Synthetic oligonucleotide: CBLB-5177
cacaucccgagggcaccaugcuuc

SEQ ID NO: 35378 - RNA, 18 nt, Artificial Sequence
  Synthetic oligonucleotide: CBLB-5178
auauaauucauauuguuc

SEQ ID NO: 35379 - RNA, 19 nt, Artificial Sequence
  Synthetic oligonucleotide: CBLB-5179
aauauaauucauauuguuc

SEQ ID NO: 35380 - RNA, 20 nt, Artificial Sequence
  Synthetic oligonucleotide: CBLB-5180
caauauaauucauauuguuc

SEQ ID NO: 35381 - RNA, 21 nt, Artificial Sequence
  Synthetic oligonucleotide: CBLB-5181
acaauauaauucauauuguuc

SEQ ID NO: 35382 - RNA, 22 nt, Artificial Sequence
  Synthetic oligonucleotide: CBLB-5182
cacaauauaauucauauuguuc

SEQ ID NO: 35383 - RNA, 23 nt, Artificial Sequence
  Synthetic oligonucleotide: CBLB-5183
ucacaauauaauucauauuguuc

SEQ ID NO: 35384 - RNA, 24 nt, Artificial Sequence
  Synthetic oligonucleotide: CBLB-5184
uucacaauauaauucauauuguuc

SEQ ID NO: 35385 - RNA, 18 nt, Artificial Sequence
  Synthetic oligonucleotide: CBLB-5185
ucuuacagagcugaaaag

SEQ ID NO: 35386 - RNA, 19 nt, Artificial Sequence
  Synthetic oligonucleotide: CBLB-5186
aucuuacagagcugaaaag

SEQ ID NO: 35387 - RNA, 20 nt, Artificial Sequence
  Synthetic oligonucleotide: CBLB-3237
aaucuuacagagcugaaaag

SEQ ID NO: 35388 - RNA, 21 nt, Artificial Sequence
  Synthetic oligonucleotide: CBLB-5187
aaaucuuacagagcugaaaag

SEQ ID NO: 35389 - RNA, 22 nt, Artificial Sequence
  Synthetic oligonucleotide: CBLB-5188
caaaucuuacagagcugaaaag

SEQ ID NO: 35390 - RNA, 23 nt, Artificial Sequence
  Synthetic oligonucleotide: CBLB-5189
acaaaucuuacagagcugaaaag

SEQ ID NO: 35391 - RNA, 24 nt, Artificial Sequence
  Synthetic oligonucleotide: CBLB-5190
cacaaaucuuacagagcugaaaag

SEQ ID NO: 35392 - RNA, 18 nt, Artificial Sequence
  Synthetic oligonucleotide: CBLB-5191
uggaggaggaggagaaag

SEQ ID NO: 35393 - RNA, 19 nt, Artificial Sequence
  Synthetic oligonucleotide: CBLB-5192
cuggaggaggaggagaaag

SEQ ID NO: 35394 - RNA, 20 nt, Artificial Sequence
  Synthetic oligonucleotide: CBLB-5193
acuggaggaggaggagaaag

SEQ ID NO: 35395 - RNA, 21 nt, Artificial Sequence
  Synthetic oligonucleotide: CBLB-5194
aacuggaggaggaggagaaag

SEQ ID NO: 35396 - RNA, 22 nt, Artificial Sequence
  Synthetic oligonucleotide: CBLB-5195
uaacuggaggaggaggagaaag

SEQ ID NO: 35397 - RNA, 23 nt, Artificial Sequence
  Synthetic oligonucleotide: CBLB-5196
guaacuggaggaggaggagaaag

SEQ ID NO: 35398 - RNA, 24 nt, Artificial Sequence
  Synthetic oligonucleotide: CBLB-5197
gguaacuggaggaggaggagaaag

SEQ ID NO: 35399 - RNA, 18 nt, Artificial Sequence
  Synthetic oligonucleotide: CBLB-5198
cuuucuucucugggcaag

SEQ ID NO: 35400 - RNA, 19 nt, Artificial Sequence
  Synthetic oligonucleotide: CBLB-5199
gcuuucuucucugggcaag

SEQ ID NO: 35401 - RNA, 20 nt, Artificial Sequence
  Synthetic oligonucleotide: CBLB-3242
ggcuuucuucucugggcaag

SEQ ID NO: 35402 - RNA, 21 nt, Artificial Sequence
  Synthetic oligonucleotide: CBLB-5200
uggcuuucuucucugggcaag

SEQ ID NO: 35403 - RNA, 22 nt, Artificial Sequence
  Synthetic oligonucleotide: CBLB-5201
guggcuuucuucucugggcaag

SEQ ID NO: 35404 - RNA, 23 nt, Artificial Sequence
  Synthetic oligonucleotide: CBLB-5202
uguggcuuucuucucugggcaag

SEQ ID NO: 35405 - RNA, 24 nt, Artificial Sequence
  Synthetic oligonucleotide: CBLB-5203
cuguggcuuucuucucugggcaag

SEQ ID NO: 35406 - RNA, 18 nt, Artificial Sequence
  Synthetic oligonucleotide: CBLB-5204
guuuucucaccaugcaag

SEQ ID NO: 35407 - RNA, 19 nt, Artificial Sequence
  Synthetic oligonucleotide: CBLB-5205
uguuuucucaccaugcaag

SEQ ID NO: 35408 - RNA, 20 nt, Artificial Sequence
  Synthetic oligonucleotide: CBLB-5206
uuguuuucucaccaugcaag

SEQ ID NO: 35409 - RNA, 21 nt, Artificial Sequence
  Synthetic oligonucleotide: CBLB-5207
cuuguuuucucaccaugcaag

SEQ ID NO: 35410 - RNA, 22 nt, Artificial Sequence
  Synthetic oligonucleotide: CBLB-5208
ucuuguuuucucaccaugcaag

SEQ ID NO: 35411 - RNA, 23 nt, Artificial Sequence
  Synthetic oligonucleotide: CBLB-5209
aucuuguuuucucaccaugcaag

SEQ ID NO: 35412 - RNA, 24 nt, Artificial Sequence
  Synthetic oligonucleotide: CBLB-5210
uaucuuguuuucucaccaugcaag

SEQ ID NO: 35413 - RNA, 18 nt, Artificial Sequence
  Synthetic oligonucleotide: CBLB-5211
acgauaguucugugcaag

SEQ ID NO: 35414 - RNA, 19 nt, Artificial Sequence
  Synthetic oligonucleotide: CBLB-5212
uacgauaguucugugcaag

SEQ ID NO: 35415 - RNA, 20 nt, Artificial Sequence
  Synthetic oligonucleotide: CBLB-5213
guacgauaguucugugcaag

SEQ ID NO: 35416 - RNA, 21 nt, Artificial Sequence
  Synthetic oligonucleotide: CBLB-5214
gguacgauaguucugugcaag

SEQ ID NO: 35417 - RNA, 22 nt, Artificial Sequence
  Synthetic oligonucleotide: CBLB-5215
ugguacgauaguucugugcaag

SEQ ID NO: 35418 - RNA, 23 nt, Artificial Sequence
  Synthetic oligonucleotide: CBLB-5216
augguacgauaguucugugcaag

SEQ ID NO: 35419 - RNA, 24 nt, Artificial Sequence
  Synthetic oligonucleotide: CBLB-5217
caugguacgauaguucugugcaag

SEQ ID NO: 35420 - RNA, 18 nt, Artificial Sequence
  Synthetic oligonucleotide: CBLB-5218
ccuccuaccugaaggaag

SEQ ID NO: 35421 - RNA, 19 nt, Artificial Sequence
  Synthetic oligonucleotide: CBLB-5219
cccuccuaccugaaggaag

SEQ ID NO: 35422 - RNA, 20 nt, Artificial Sequence
  Synthetic oligonucleotide: CBLB-5220
ucccuccuaccugaaggaag

SEQ ID NO: 35423 - RNA, 21 nt, Artificial Sequence
  Synthetic oligonucleotide: CBLB-5221
uucccuccuaccugaaggaag

SEQ ID NO: 35424 - RNA, 22 nt, Artificial Sequence
  Synthetic oligonucleotide: CBLB-5222
uuucccuccuaccugaaggaag

SEQ ID NO: 35425 - RNA, 23 nt, Artificial Sequence
  Synthetic oligonucleotide: CBLB-5223
uuuucccuccuaccugaaggaag

SEQ ID NO: 35426 - RNA, 24 nt, Artificial Sequence
  Synthetic oligonucleotide: CBLB-5224
cuuuucccuccuaccugaaggaag

SEQ ID NO: 35427 - RNA, 18 nt, Artificial Sequence
  Synthetic oligonucleotide: CBLB-5225
uugauuucuucucugaag

SEQ ID NO: 35428 - RNA, 19 nt, Artificial Sequence
  Synthetic oligonucleotide: CBLB-5226
uuugauuucuucucugaag

SEQ ID NO: 35429 - RNA, 20 nt, Artificial Sequence
  Synthetic oligonucleotide: CBLB-5227
guuugauuucuucucugaag

SEQ ID NO: 35430 - RNA, 21 nt, Artificial Sequence
  Synthetic oligonucleotide: CBLB-5228
uguuugauuucuucucugaag

SEQ ID NO: 35431 - RNA, 22 nt, Artificial Sequence
  Synthetic oligonucleotide: CBLB-5229
auguuugauuucuucucugaag

SEQ ID NO: 35432 - RNA, 23 nt, Artificial Sequence
  Synthetic oligonucleotide: CBLB-5230
gauguuugauuucuucucugaag

SEQ ID NO: 35433 - RNA, 24 nt, Artificial Sequence
  Synthetic oligonucleotide: CBLB-5231
ggauguuugauuucuucucugaag

SEQ ID NO: 35434 - RNA, 18 nt, Artificial Sequence
  Synthetic oligonucleotide: CBLB-5232
agaagacuaaagaaacag

SEQ ID NO: 35435 - RNA, 19 nt, Artificial Sequence
  Synthetic oligonucleotide: CBLB-5233
gagaagacuaaagaaacag

SEQ ID NO: 35436 - RNA, 20 nt, Artificial Sequence
  Synthetic oligonucleotide: CBLB-5234
ggagaagacuaaagaaacag

SEQ ID NO: 35437 - RNA, 21 nt, Artificial Sequence
  Synthetic oligonucleotide: CBLB-5235
aggagaagacuaaagaaacag

SEQ ID NO: 35438 - RNA, 22 nt, Artificial Sequence
  Synthetic oligonucleotide: CBLB-5236
aaggagaagacuaaagaaacag

SEQ ID NO: 35439 - RNA, 23 nt, Artificial Sequence
  Synthetic oligonucleotide: CBLB-5237
caaggagaagacuaaagaaacag

SEQ ID NO: 35440 - RNA, 24 nt, Artificial Sequence
  Synthetic oligonucleotide: CBLB-5238
gcaaggagaagacuaaagaaacag

SEQ ID NO: 35441 - RNA, 18 nt, Artificial Sequence
  Synthetic oligonucleotide: CBLB-5239
gaccaguacaccuaccag

SEQ ID NO: 35442 - RNA, 19 nt, Artificial Sequence
  Synthetic oligonucleotide: CBLB-5240
ggaccaguacaccuaccag

SEQ ID NO: 35443 - RNA, 20 nt, Artificial Sequence
  Synthetic oligonucleotide: CBLB-3246
cggaccaguacaccuaccag

SEQ ID NO: 35444 - RNA, 21 nt, Artificial Sequence
  Synthetic oligonucleotide: CBLB-5241
acggaccaguacaccuaccag

SEQ ID NO: 35445 - RNA, 22 nt, Artificial Sequence
  Synthetic oligonucleotide: CBLB-5242
aacggaccaguacaccuaccag

SEQ ID NO: 35446 - RNA, 23 nt, Artificial Sequence
  Synthetic oligonucleotide: CBLB-5243
uaacggaccaguacaccuaccag

SEQ ID NO: 35447 - RNA, 24 nt, Artificial Sequence
  Synthetic oligonucleotide: CBLB-5244
cuaacggaccaguacaccuaccag

SEQ ID NO: 35448 - RNA, 18 nt, Artificial Sequence
  Synthetic oligonucleotide: CBLB-5245
uuucugaauuagauccag

SEQ ID NO: 35449 - RNA, 19 nt, Artificial Sequence
  Synthetic oligonucleotide: CBLB-5246
cuuucugaauuagauccag

SEQ ID NO: 35450 - RNA, 20 nt, Artificial Sequence
  Synthetic oligonucleotide: CBLB-5247
ccuuucugaauuagauccag

SEQ ID NO: 35451 - RNA, 21 nt, Artificial Sequence
  Synthetic oligonucleotide: CBLB-5248
gccuuucugaauuagauccag

SEQ ID NO: 35452 - RNA, 22 nt, Artificial Sequence
  Synthetic oligonucleotide: CBLB-5249
ugccuuucugaauuagauccag

SEQ ID NO: 35453 - RNA, 23 nt, Artificial Sequence
  Synthetic oligonucleotide: CBLB-5250
augccuuucugaauuagauccag

SEQ ID NO: 35454 - RNA, 24 nt, Artificial Sequence
  Synthetic oligonucleotide: CBLB-5251
uaugccuuucugaauuagauccag

SEQ ID NO: 35455 - RNA, 18 nt, Artificial Sequence
  Synthetic oligonucleotide: CBLB-5252
ugcacaaaucuuacagag

SEQ ID NO: 35456 - RNA, 19 nt, Artificial Sequence
  Synthetic oligonucleotide: CBLB-5253
cugcacaaaucuuacagag

SEQ ID NO: 35457 - RNA, 20 nt, Artificial Sequence
  Synthetic oligonucleotide: CBLB-5254
ucugcacaaaucuuacagag

SEQ ID NO: 35458 - RNA, 21 nt, Artificial Sequence
  Synthetic oligonucleotide: CBLB-5255
cucugcacaaaucuuacagag

SEQ ID NO: 35459 - RNA, 22 nt, Artificial Sequence
  Synthetic oligonucleotide: CBLB-5256
ucucugcacaaaucuuacagag

SEQ ID NO: 35460 - RNA, 23 nt, Artificial Sequence
  Synthetic oligonucleotide: CBLB-5257
uucucugcacaaaucuuacagag

SEQ ID NO: 35461 - RNA, 24 nt, Artificial Sequence
  Synthetic oligonucleotide: CBLB-5258
auucucugcacaaaucuuacagag

SEQ ID NO: 35462 - RNA, 18 nt, Artificial Sequence
  Synthetic oligonucleotide: CBLB-5259
gugggggaggugggagag

SEQ ID NO: 35463 - RNA, 19 nt, Artificial Sequence
  Synthetic oligonucleotide: CBLB-5260
ggugggggaggugggagag

SEQ ID NO: 35464 - RNA, 20 nt, Artificial Sequence
  Synthetic oligonucleotide: CBLB-5261
aggugggggaggugggagag

SEQ ID NO: 35465 - RNA, 21 nt, Artificial Sequence
  Synthetic oligonucleotide: CBLB-5262
gaggugggggaggugggagag

SEQ ID NO: 35466 - RNA, 22 nt, Artificial Sequence
  Synthetic oligonucleotide: CBLB-5263
ggaggugggggaggugggagag

SEQ ID NO: 35467 - RNA, 23 nt, Artificial Sequence
  Synthetic oligonucleotide: CBLB-5264
aggaggugggggaggugggagag

SEQ ID NO: 35468 - RNA, 24 nt, Artificial Sequence
  Synthetic oligonucleotide: CBLB-5265
caggaggugggggaggugggagag

SEQ ID NO: 35469 - RNA, 18 nt, Artificial Sequence
  Synthetic oligonucleotide: CBLB-5266
gcuuuggauugucccgag

SEQ ID NO: 35470 - RNA, 19 nt, Artificial Sequence
  Synthetic oligonucleotide: CBLB-5267
ugcuuuggauugucccgag

SEQ ID NO: 35471 - RNA, 20 nt, Artificial Sequence
  Synthetic oligonucleotide: CBLB-5268
augcuuuggauugucccgag

SEQ ID NO: 35472 - RNA, 21 nt, Artificial Sequence
  Synthetic oligonucleotide: CBLB-5269
caugcuuuggauugucccgag

SEQ ID NO: 35473 - RNA, 22 nt, Artificial Sequence
  Synthetic oligonucleotide: CBLB-5270
ccaugcuuuggauugucccgag

SEQ ID NO: 35474 - RNA, 23 nt, Artificial Sequence
  Synthetic oligonucleotide: CBLB-5271
accaugcuuuggauugucccgag

SEQ ID NO: 35475 - RNA, 24 nt, Artificial Sequence
  Synthetic oligonucleotide: CBLB-5272
aaccaugcuuuggauugucccgag

SEQ ID NO: 35476 - RNA, 18 nt, Artificial Sequence
  Synthetic oligonucleotide: CBLB-5273
gacuaugccuugcaggag

SEQ ID NO: 35477 - RNA, 19 nt, Artificial Sequence
  Synthetic oligonucleotide: CBLB-5274
agacuaugccuugcaggag

SEQ ID NO: 35478 - RNA, 20 nt, Artificial Sequence
  Synthetic oligonucleotide: CBLB-5275
gagacuaugccuugcaggag

SEQ ID NO: 35479 - RNA, 21 nt, Artificial Sequence
  Synthetic oligonucleotide: CBLB-5276
ugagacuaugccuugcaggag

SEQ ID NO: 35480 - RNA, 22 nt, Artificial Sequence
  Synthetic oligonucleotide: CBLB-5277
augagacuaugccuugcaggag

SEQ ID NO: 35481 - RNA, 23 nt, Artificial Sequence
  Synthetic oligonucleotide: CBLB-5278
aaugagacuaugccuugcaggag

SEQ ID NO: 35482 - RNA, 24 nt, Artificial Sequence
  Synthetic oligonucleotide: CBLB-5279
caaugagacuaugccuugcaggag

SEQ ID NO: 35483 - RNA, 18 nt, Artificial Sequence
  Synthetic oligonucleotide: CBLB-5280
ugguaacuggaggaggag

SEQ ID NO: 35484 - RNA, 19 nt, Artificial Sequence
  Synthetic oligonucleotide: CBLB-5281
gugguaacuggaggaggag

SEQ ID NO: 35485 - RNA, 20 nt, Artificial Sequence
  Synthetic oligonucleotide: CBLB-5282
ggugguaacuggaggaggag

SEQ ID NO: 35486 - RNA, 21 nt, Artificial Sequence
  Synthetic oligonucleotide: CBLB-5283
gggugguaacuggaggaggag

SEQ ID NO: 35487 - RNA, 22 nt, Artificial Sequence
  Synthetic oligonucleotide: CBLB-5284
agggugguaacuggaggaggag

SEQ ID NO: 35488 - RNA, 23 nt, Artificial Sequence
  Synthetic oligonucleotide: CBLB-5285
gagggugguaacuggaggaggag

SEQ ID NO: 35489 - RNA, 24 nt, Artificial Sequence
  Synthetic oligonucleotide: CBLB-5286
ggagggugguaacuggaggaggag

SEQ ID NO: 35490 - RNA, 18 nt, Artificial Sequence
  Synthetic oligonucleotide: CBLB-5287
gggugguaacuggaggag

SEQ ID NO: 35491 - RNA, 19 nt, Artificial Sequence
  Synthetic oligonucleotide: CBLB-5288
agggugguaacuggaggag

SEQ ID NO: 35492 - RNA, 20 nt, Artificial Sequence
  Synthetic oligonucleotide: CBLB-5289
gagggugguaacuggaggag

SEQ ID NO: 35493 - RNA, 21 nt, Artificial Sequence
  Synthetic oligonucleotide: CBLB-5290
ggagggugguaacuggaggag

SEQ ID NO: 35494 - RNA, 22 nt, Artificial Sequence
  Synthetic oligonucleotide: CBLB-5291
aggagggugguaacuggaggag

SEQ ID NO: 35495 - RNA, 23 nt, Artificial Sequence
  Synthetic oligonucleotide: CBLB-5292
gaggagggugguaacuggaggag

SEQ ID NO: 35496 - RNA, 24 nt, Artificial Sequence
  Synthetic oligonucleotide: CBLB-5293
ggaggagggugguaacuggaggag

SEQ ID NO: 35497 - RNA, 18 nt, Artificial Sequence
  Synthetic oligonucleotide: CBLB-5294
uugcaggaggugggggag

SEQ ID NO: 35498 - RNA, 19 nt, Artificial Sequence
  Synthetic oligonucleotide: CBLB-5295
cuugcaggaggugggggag

SEQ ID NO: 35499 - RNA, 20 nt, Artificial Sequence
  Synthetic oligonucleotide: CBLB-5296
ccuugcaggaggugggggag

SEQ ID NO: 35500 - RNA, 21 nt, Artificial Sequence
  Synthetic oligonucleotide: CBLB-5297
gccuugcaggaggugggggag

SEQ ID NO: 35501 - RNA, 22 nt, Artificial Sequence
  Synthetic oligonucleotide: CBLB-5298
ugccuugcaggaggugggggag

SEQ ID NO: 35502 - RNA, 23 nt, Artificial Sequence
  Synthetic oligonucleotide: CBLB-5299
augccuugcaggaggugggggag

SEQ ID NO: 35503 - RNA, 24 nt, Artificial Sequence
  Synthetic oligonucleotide: CBLB-5300
uaugccuugcaggaggugggggag

SEQ ID NO: 35504 - RNA, 18 nt, Artificial Sequence
  Synthetic oligonucleotide: CBLB-5301
uuccuggaauuuggggag

SEQ ID NO: 35505 - RNA, 19 nt, Artificial Sequence
  Synthetic oligonucleotide: CBLB-5302
guuccuggaauuuggggag

SEQ ID NO: 35506 - RNA, 20 nt, Artificial Sequence
  Synthetic oligonucleotide: CBLB-5303
uguuccuggaauuuggggag

SEQ ID NO: 35507 - RNA, 21 nt, Artificial Sequence
  Synthetic oligonucleotide: CBLB-5304
uuguuccuggaauuuggggag

SEQ ID NO: 35508 - RNA, 22 nt, Artificial Sequence
  Synthetic oligonucleotide: CBLB-5305
auuguuccuggaauuuggggag

SEQ ID NO: 35509 - RNA, 23 nt, Artificial Sequence
  Synthetic oligonucleotide: CBLB-5306
uauuguuccuggaauuuggggag

SEQ ID NO: 35510 - RNA, 24 nt, Artificial Sequence
  Synthetic oligonucleotide: CBLB-5307
auauuguuccuggaauuuggggag

SEQ ID NO: 35511 - RNA, 18 nt, Artificial Sequence
  Synthetic oligonucleotide: CBLB-5308
ggagggugguaacuggag

SEQ ID NO: 35512 - RNA, 19 nt, Artificial Sequence
  Synthetic oligonucleotide: CBLB-5309
aggagggugguaacuggag

SEQ ID NO: 35513 - RNA, 20 nt, Artificial Sequence
  Synthetic oligonucleotide: CBLB-5310
gaggagggugguaacuggag

SEQ ID NO: 35514 - RNA, 21 nt, Artificial Sequence
  Synthetic oligonucleotide: CBLB-5311
ggaggagggugguaacuggag

SEQ ID NO: 35515 - RNA, 22 nt, Artificial Sequence
  Synthetic oligonucleotide: CBLB-5312
gggaggagggugguaacuggag

SEQ ID NO: 35516 - RNA, 23 nt, Artificial Sequence
  Synthetic oligonucleotide: CBLB-5313
agggaggagggugguaacuggag

SEQ ID NO: 35517 - RNA, 24 nt, Artificial Sequence
  Synthetic oligonucleotide: CBLB-5314
uagggaggagggugguaacuggag

SEQ ID NO: 35518 - RNA, 18 nt, Artificial Sequence
  Synthetic oligonucleotide: CBLB-5315
gacguggggauacuggag

SEQ ID NO: 35519 - RNA, 19 nt, Artificial Sequence
  Synthetic oligonucleotide: CBLB-5316
agacguggggauacuggag

SEQ ID NO: 35520 - RNA, 20 nt, Artificial Sequence
  Synthetic oligonucleotide: CBLB-5317
uagacguggggauacuggag

SEQ ID NO: 35521 - RNA, 21 nt, Artificial Sequence
  Synthetic oligonucleotide: CBLB-5318
uuagacguggggauacuggag

SEQ ID NO: 35522 - RNA, 22 nt, Artificial Sequence
  Synthetic oligonucleotide: CBLB-5319
uuuagacguggggauacuggag

SEQ ID NO: 35523 - RNA, 23 nt, Artificial Sequence
  Synthetic oligonucleotide: CBLB-5320
auuuagacguggggauacuggag

SEQ ID NO: 35524 - RNA, 24 nt, Artificial Sequence
  Synthetic oligonucleotide: CBLB-5321
gauuuagacguggggauacuggag

SEQ ID NO: 35525 - RNA, 18 nt, Artificial Sequence
  Synthetic oligonucleotide: CBLB-5322
caccugguaaccuucuag

SEQ ID NO: 35526 - RNA, 19 nt, Artificial Sequence
  Synthetic oligonucleotide: CBLB-5323
ucaccugguaaccuucuag

SEQ ID NO: 35527 - RNA, 20 nt, Artificial Sequence
  Synthetic oligonucleotide: CBLB-5324
uucaccugguaaccuucuag

SEQ ID NO: 35528 - RNA, 21 nt, Artificial Sequence
  Synthetic oligonucleotide: CBLB-5325
uuucaccugguaaccuucuag

SEQ ID NO: 35529 - RNA, 22 nt, Artificial Sequence
  Synthetic oligonucleotide: CBLB-5326
uuuucaccugguaaccuucuag

SEQ ID NO: 35530 - RNA, 23 nt, Artificial Sequence
  Synthetic oligonucleotide: CBLB-5327
auuuucaccugguaaccuucuag

SEQ ID NO: 35531 - RNA, 24 nt, Artificial Sequence
  Synthetic oligonucleotide: CBLB-5328
cauuuucaccugguaaccuucuag

SEQ ID NO: 35532 - RNA, 18 nt, Artificial Sequence
  Synthetic oligonucleotide: CBLB-5329
cugcuauagauuuagacg

SEQ ID NO: 35533 - RNA, 19 nt, Artificial Sequence
  Synthetic oligonucleotide: CBLB-5330
gcugcuauagauuuagacg

SEQ ID NO: 35534 - RNA, 20 nt, Artificial Sequence
  Synthetic oligonucleotide: CBLB-3258
ggcugcuauagauuuagacg

SEQ ID NO: 35535 - RNA, 21 nt, Artificial Sequence
  Synthetic oligonucleotide: CBLB-5331
uggcugcuauagauuuagacg

SEQ ID NO: 35536 - RNA, 22 nt, Artificial Sequence
  Synthetic oligonucleotide: CBLB-5332
cuggcugcuauagauuuagacg

SEQ ID NO: 35537 - RNA, 23 nt, Artificial Sequence
  Synthetic oligonucleotide: CBLB-5333
ucuggcugcuauagauuuagacg

SEQ ID NO: 35538 - RNA, 24 nt, Artificial Sequence
  Synthetic oligonucleotide: CBLB-5334
uucuggcugcuauagauuuagacg

SEQ ID NO: 35539 - RNA, 18 nt, Artificial Sequence
  Synthetic oligonucleotide: CBLB-5335
cuaccuuuggugaacccg

SEQ ID NO: 35540 - RNA, 19 nt, Artificial Sequence
  Synthetic oligonucleotide: CBLB-5336
ucuaccuuuggugaacccg

SEQ ID NO: 35541 - RNA, 20 nt, Artificial Sequence
  Synthetic oligonucleotide: CBLB-5337
aucuaccuuuggugaacccg

SEQ ID NO: 35542 - RNA, 21 nt, Artificial Sequence
  Synthetic oligonucleotide: CBLB-5338
gaucuaccuuuggugaacccg

SEQ ID NO: 35543 - RNA, 22 nt, Artificial Sequence
  Synthetic oligonucleotide: CBLB-5339
ugaucuaccuuuggugaacccg

SEQ ID NO: 35544 - RNA, 23 nt, Artificial Sequence
  Synthetic oligonucleotide: CBLB-5340
uugaucuaccuuuggugaacccg

SEQ ID NO: 35545 - RNA, 24 nt, Artificial Sequence
  Synthetic oligonucleotide: CBLB-5341
auugaucuaccuuuggugaacccg

SEQ ID NO: 35546 - RNA, 18 nt, Artificial Sequence
  Synthetic oligonucleotide: CBLB-5342
aggaggaggagaaagccg

SEQ ID NO: 35547 - RNA, 19 nt, Artificial Sequence
  Synthetic oligonucleotide: CBLB-5343
gaggaggaggagaaagccg

SEQ ID NO: 35548 - RNA, 20 nt, Artificial Sequence
  Synthetic oligonucleotide: CBLB-1080
ggaggaggaggagaaagccg

SEQ ID NO: 35549 - RNA, 21 nt, Artificial Sequence
  Synthetic oligonucleotide: CBLB-5344
uggaggaggaggagaaagccg

SEQ ID NO: 35550 - RNA, 22 nt, Artificial Sequence
  Synthetic oligonucleotide: CBLB-5345
cuggaggaggaggagaaagccg

SEQ ID NO: 35551 - RNA, 23 nt, Artificial Sequence
  Synthetic oligonucleotide: CBLB-5346
acuggaggaggaggagaaagccg

SEQ ID NO: 35552 - RNA, 24 nt, Artificial Sequence
  Synthetic oligonucleotide: CBLB-5347
aacuggaggaggaggagaaagccg

SEQ ID NO: 35553 - RNA, 18 nt, Artificial Sequence
  Synthetic oligonucleotide: CBLB-5348
cugaauuagauccaggcg

SEQ ID NO: 35554 - RNA, 19 nt, Artificial Sequence
  Synthetic oligonucleotide: CBLB-5349
ucugaauuagauccaggcg

SEQ ID NO: 35555 - RNA, 20 nt, Artificial Sequence
  Synthetic oligonucleotide: CBLB-3260
uucugaauuagauccaggcg

SEQ ID NO: 35556 - RNA, 21 nt, Artificial Sequence
  Synthetic oligonucleotide: CBLB-5350
uuucugaauuagauccaggcg

SEQ ID NO: 35557 - RNA, 22 nt, Artificial Sequence
  Synthetic oligonucleotide: CBLB-5351
cuuucugaauuagauccaggcg

SEQ ID NO: 35558 - RNA, 23 nt, Artificial Sequence
  Synthetic oligonucleotide: CBLB-5352
ccuuucugaauuagauccaggcg

SEQ ID NO: 35559 - RNA, 24 nt, Artificial Sequence
  Synthetic oligonucleotide: CBLB-5353
gccuuucugaauuagauccaggcg

SEQ ID NO: 35560 - RNA, 18 nt, Artificial Sequence
  Synthetic oligonucleotide: CBLB-5354
gaggucuuucagguggcg

SEQ ID NO: 35561 - RNA, 19 nt, Artificial Sequence
  Synthetic oligonucleotide: CBLB-5355
ggaggucuuucagguggcg

SEQ ID NO: 35562 - RNA, 20 nt, Artificial Sequence
  Synthetic oligonucleotide: CBLB-5356
uggaggucuuucagguggcg

SEQ ID NO: 35563 - RNA, 21 nt, Artificial Sequence
  Synthetic oligonucleotide: CBLB-5357
guggaggucuuucagguggcg

SEQ ID NO: 35564 - RNA, 22 nt, Artificial Sequence
  Synthetic oligonucleotide: CBLB-5358
gguggaggucuuucagguggcg

SEQ ID NO: 35565 - RNA, 23 nt, Artificial Sequence
  Synthetic oligonucleotide: CBLB-5359
ugguggaggucuuucagguggcg

SEQ ID NO: 35566 - RNA, 24 nt, Artificial Sequence
  Synthetic oligonucleotide: CBLB-5360
uugguggaggucuuucagguggcg

SEQ ID NO: 35567 - RNA, 18 nt, Artificial Sequence
  Synthetic oligonucleotide: CBLB-5361
cgauaguucugugcaagg

SEQ ID NO: 35568 - RNA, 19 nt, Artificial Sequence
  Synthetic oligonucleotide: CBLB-5362
acgauaguucugugcaagg

SEQ ID NO: 35569 - RNA, 20 nt, Artificial Sequence
  Synthetic oligonucleotide: CBLB-3264
uacgauaguucugugcaagg

SEQ ID NO: 35570 - RNA, 21 nt, Artificial Sequence
  Synthetic oligonucleotide: CBLB-5363
guacgauaguucugugcaagg

SEQ ID NO: 35571 - RNA, 22 nt, Artificial Sequence
  Synthetic oligonucleotide: CBLB-5364
gguacgauaguucugugcaagg

SEQ ID NO: 35572 - RNA, 23 nt, Artificial Sequence
  Synthetic oligonucleotide: CBLB-5365
ugguacgauaguucugugcaagg

SEQ ID NO: 35573 - RNA, 24 nt, Artificial Sequence
  Synthetic oligonucleotide: CBLB-5366
augguacgauaguucugugcaagg

SEQ ID NO: 35574 - RNA, 18 nt, Artificial Sequence
  Synthetic oligonucleotide: CBLB-5367
uucccuccuaccugaagg

SEQ ID NO: 35575 - RNA, 19 nt, Artificial Sequence
  Synthetic oligonucleotide: CBLB-5368
uuucccuccuaccugaagg

SEQ ID NO: 35576 - RNA, 20 nt, Artificial Sequence
  Synthetic oligonucleotide: CBLB-5369
uuuucccuccuaccugaagg

SEQ ID NO: 35577 - RNA, 21 nt, Artificial Sequence
  Synthetic oligonucleotide: CBLB-5370
cuuuucccuccuaccugaagg

SEQ ID NO: 35578 - RNA, 22 nt, Artificial Sequence
  Synthetic oligonucleotide: CBLB-5371
gcuuuucccuccuaccugaagg

SEQ ID NO: 35579 - RNA, 23 nt, Artificial Sequence
  Synthetic oligonucleotide: CBLB-5372
ggcuuuucccuccuaccugaagg

SEQ ID NO: 35580 - RNA, 24 nt, Artificial Sequence
  Synthetic oligonucleotide: CBLB-5373
uggcuuuucccuccuaccugaagg

SEQ ID NO: 35581 - RNA, 18 nt, Artificial Sequence
  Synthetic oligonucleotide: CBLB-5374
gaggaggaucucuuaagg

SEQ ID NO: 35582 - RNA, 19 nt, Artificial Sequence
  Synthetic oligonucleotide: CBLB-5375
ggaggaggaucucuuaagg

SEQ ID NO: 35583 - RNA, 20 nt, Artificial Sequence
  Synthetic oligonucleotide: CBLB-5376
uggaggaggaucucuuaagg

SEQ ID NO: 35584 - RNA, 21 nt, Artificial Sequence
  Synthetic oligonucleotide: CBLB-5377
guggaggaggaucucuuaagg

SEQ ID NO: 35585 - RNA, 22 nt, Artificial Sequence
  Synthetic oligonucleotide: CBLB-5378
gguggaggaggaucucuuaagg

SEQ ID NO: 35586 - RNA, 23 nt, Artificial Sequence
  Synthetic oligonucleotide: CBLB-5379
cgguggaggaggaucucuuaagg

SEQ ID NO: 35587 - RNA, 24 nt, Artificial Sequence
  Synthetic oligonucleotide: CBLB-5380
gcgguggaggaggaucucuuaagg

SEQ ID NO: 35588 - RNA, 18 nt, Artificial Sequence
  Synthetic oligonucleotide: CBLB-5381
ugaauucagggaaacagg

SEQ ID NO: 35589 - RNA, 19 nt, Artificial Sequence
  Synthetic oligonucleotide: CBLB-5382
gugaauucagggaaacagg

SEQ ID NO: 35590 - RNA, 20 nt, Artificial Sequence
  Synthetic oligonucleotide: CBLB-5383
ugugaauucagggaaacagg

SEQ ID NO: 35591 - RNA, 21 nt, Artificial Sequence
  Synthetic oligonucleotide: CBLB-5384
uugugaauucagggaaacagg

SEQ ID NO: 35592 - RNA, 22 nt, Artificial Sequence
  Synthetic oligonucleotide: CBLB-5385
guugugaauucagggaaacagg

SEQ ID NO: 35593 - RNA, 23 nt, Artificial Sequence
  Synthetic oligonucleotide: CBLB-5386
gguugugaauucagggaaacagg

SEQ ID NO: 35594 - RNA, 24 nt, Artificial Sequence
  Synthetic oligonucleotide: CBLB-5387
ugguugugaauucagggaaacagg

SEQ ID NO: 35595 - RNA, 18 nt, Artificial Sequence
  Synthetic oligonucleotide: CBLB-5388
acuaugccuugcaggagg

SEQ ID NO: 35596 - RNA, 19 nt, Artificial Sequence
  Synthetic oligonucleotide: CBLB-5389
gacuaugccuugcaggagg

SEQ ID NO: 35597 - RNA, 20 nt, Artificial Sequence
  Synthetic oligonucleotide: CBLB-3272
agacuaugccuugcaggagg

SEQ ID NO: 35598 - RNA, 21 nt, Artificial Sequence
  Synthetic oligonucleotide: CBLB-5390
gagacuaugccuugcaggagg

SEQ ID NO: 35599 - RNA, 22 nt, Artificial Sequence
  Synthetic oligonucleotide: CBLB-5391
ugagacuaugccuugcaggagg

SEQ ID NO: 35600 - RNA, 23 nt, Artificial Sequence
  Synthetic oligonucleotide: CBLB-5392
augagacuaugccuugcaggagg

SEQ ID NO: 35601 - RNA, 24 nt, Artificial Sequence
  Synthetic oligonucleotide: CBLB-5393
aaugagacuaugccuugcaggagg

SEQ ID NO: 35602 - RNA, 18 nt, Artificial Sequence
  Synthetic oligonucleotide: CBLB-5394
uggaauuuggggaggagg

SEQ ID NO: 35603 - RNA, 19 nt, Artificial Sequence
  Synthetic oligonucleotide: CBLB-5395
cuggaauuuggggaggagg

SEQ ID NO: 35604 - RNA, 20 nt, Artificial Sequence
  Synthetic oligonucleotide: CBLB-5396
ccuggaauuuggggaggagg

SEQ ID NO: 35605 - RNA, 21 nt, Artificial Sequence
  Synthetic oligonucleotide: CBLB-5397
uccuggaauuuggggaggagg

SEQ ID NO: 35606 - RNA, 22 nt, Artificial Sequence
  Synthetic oligonucleotide: CBLB-5398
uuccuggaauuuggggaggagg

SEQ ID NO: 35607 - RNA, 23 nt, Artificial Sequence
  Synthetic oligonucleotide: CBLB-5399
guuccuggaauuuggggaggagg

SEQ ID NO: 35608 - RNA, 24 nt, Artificial Sequence
  Synthetic oligonucleotide: CBLB-5400
uguuccuggaauuuggggaggagg

SEQ ID NO: 35609 - RNA, 18 nt, Artificial Sequence
  Synthetic oligonucleotide: CBLB-5401
ggugguaacuggaggagg

SEQ ID NO: 35610 - RNA, 19 nt, Artificial Sequence
  Synthetic oligonucleotide: CBLB-5402
gggugguaacuggaggagg

SEQ ID NO: 35611 - RNA, 20 nt, Artificial Sequence
  Synthetic oligonucleotide: CBLB-3274
agggugguaacuggaggagg

SEQ ID NO: 35612 - RNA, 21 nt, Artificial Sequence
  Synthetic oligonucleotide: CBLB-5403
gagggugguaacuggaggagg

SEQ ID NO: 35613 - RNA, 22 nt, Artificial Sequence
  Synthetic oligonucleotide: CBLB-5404
ggagggugguaacuggaggagg

SEQ ID NO: 35614 - RNA, 23 nt, Artificial Sequence
  Synthetic oligonucleotide: CBLB-5405
aggagggugguaacuggaggagg

SEQ ID NO: 35615 - RNA, 24 nt, Artificial Sequence
  Synthetic oligonucleotide: CBLB-5406
gaggagggugguaacuggaggagg

SEQ ID NO: 35616 - RNA, 18 nt, Artificial Sequence
  Synthetic oligonucleotide: CBLB-5407
ugcaggaggugggggagg

SEQ ID NO: 35617 - RNA, 19 nt, Artificial Sequence
  Synthetic oligonucleotide: CBLB-5408
uugcaggaggugggggagg

SEQ ID NO: 35618 - RNA, 20 nt, Artificial Sequence
  Synthetic oligonucleotide: CBLB-3277
cuugcaggaggugggggagg

SEQ ID NO: 35619 - RNA, 21 nt, Artificial Sequence
  Synthetic oligonucleotide: CBLB-5409
ccuugcaggaggugggggagg

SEQ ID NO: 35620 - RNA, 22 nt, Artificial Sequence
  Synthetic oligonucleotide: CBLB-5410
gccuugcaggaggugggggagg

SEQ ID NO: 35621 - RNA, 23 nt, Artificial Sequence
  Synthetic oligonucleotide: CBLB-5411
ugccuugcaggaggugggggagg

SEQ ID NO: 35622 - RNA, 24 nt, Artificial Sequence
  Synthetic oligonucleotide: CBLB-5412
augccuugcaggaggugggggagg

SEQ ID NO: 35623 - RNA, 18 nt, Artificial Sequence
  Synthetic oligonucleotide: CBLB-5413
uccuggaauuuggggagg

SEQ ID NO: 35624 - RNA, 19 nt, Artificial Sequence
  Synthetic oligonucleotide: CBLB-5414
uuccuggaauuuggggagg

SEQ ID NO: 35625 - RNA, 20 nt, Artificial Sequence
  Synthetic oligonucleotide: CBLB-3278
guuccuggaauuuggggagg

SEQ ID NO: 35626 - RNA, 21 nt, Artificial Sequence
  Synthetic oligonucleotide: CBLB-5415
uguuccuggaauuuggggagg

SEQ ID NO: 35627 - RNA, 22 nt, Artificial Sequence
  Synthetic oligonucleotide: CBLB-5416
uuguuccuggaauuuggggagg

SEQ ID NO: 35628 - RNA, 23 nt, Artificial Sequence
  Synthetic oligonucleotide: CBLB-5417
auuguuccuggaauuuggggagg

SEQ ID NO: 35629 - RNA, 24 nt, Artificial Sequence
  Synthetic oligonucleotide: CBLB-5418
uauuguuccuggaauuuggggagg

SEQ ID NO: 35630 - RNA, 18 nt, Artificial Sequence
  Synthetic oligonucleotide: CBLB-5419
aggugggagagauggagg

SEQ ID NO: 35631 - RNA, 19 nt, Artificial Sequence
  Synthetic oligonucleotide: CBLB-5420
gaggugggagagauggagg

SEQ ID NO: 35632 - RNA, 20 nt, Artificial Sequence
  Synthetic oligonucleotide: CBLB-5421
ggaggugggagagauggagg

SEQ ID NO: 35633 - RNA, 21 nt, Artificial Sequence
  Synthetic oligonucleotide: CBLB-5422
gggaggugggagagauggagg

SEQ ID NO: 35634 - RNA, 22 nt, Artificial Sequence
  Synthetic oligonucleotide: CBLB-5423
ggggaggugggagagauggagg

SEQ ID NO: 35635 - RNA, 23 nt, Artificial Sequence
  Synthetic oligonucleotide: CBLB-5424
gggggaggugggagagauggagg

SEQ ID NO: 35636 - RNA, 24 nt, Artificial Sequence
  Synthetic oligonucleotide: CBLB-5425
ugggggaggugggagagauggagg

SEQ ID NO: 35637 - RNA, 18 nt, Artificial Sequence
  Synthetic oligonucleotide: CBLB-5426
gagggugguaacuggagg

SEQ ID NO: 35638 - RNA, 19 nt, Artificial Sequence
  Synthetic oligonucleotide: CBLB-5427
ggagggugguaacuggagg

SEQ ID NO: 35639 - RNA, 20 nt, Artificial Sequence
  Synthetic oligonucleotide: CBLB-3279
aggagggugguaacuggagg

SEQ ID NO: 35640 - RNA, 21 nt, Artificial Sequence
  Synthetic oligonucleotide: CBLB-5428
gaggagggugguaacuggagg

SEQ ID NO: 35641 - RNA, 22 nt, Artificial Sequence
  Synthetic oligonucleotide: CBLB-5429
ggaggagggugguaacuggagg

SEQ ID NO: 35642 - RNA, 23 nt, Artificial Sequence
  Synthetic oligonucleotide: CBLB-5430
gggaggagggugguaacuggagg

SEQ ID NO: 35643 - RNA, 24 nt, Artificial Sequence
  Synthetic oligonucleotide: CBLB-5431
agggaggagggugguaacuggagg

SEQ ID NO: 35644 - RNA, 18 nt, Artificial Sequence
  Synthetic oligonucleotide: CBLB-5432
acguggggauacuggagg

SEQ ID NO: 35645 - RNA, 19 nt, Artificial Sequence
  Synthetic oligonucleotide: CBLB-5433
gacguggggauacuggagg

SEQ ID NO: 35646 - RNA, 20 nt, Artificial Sequence
  Synthetic oligonucleotide: CBLB-3280
agacguggggauacuggagg

SEQ ID NO: 35647 - RNA, 21 nt, Artificial Sequence
  Synthetic oligonucleotide: CBLB-5434
uagacguggggauacuggagg

SEQ ID NO: 35648 - RNA, 22 nt, Artificial Sequence
  Synthetic oligonucleotide: CBLB-5435
uuagacguggggauacuggagg

SEQ ID NO: 35649 - RNA, 23 nt, Artificial Sequence
  Synthetic oligonucleotide: CBLB-5436
uuuagacguggggauacuggagg

SEQ ID NO: 35650 - RNA, 24 nt, Artificial Sequence
  Synthetic oligonucleotide: CBLB-5437
auuuagacguggggauacuggagg

SEQ ID NO: 35651 - RNA, 18 nt, Artificial Sequence
  Synthetic oligonucleotide: CBLB-5438
aacucacuuuaugcuagg

SEQ ID NO: 35652 - RNA, 19 nt, Artificial Sequence
  Synthetic oligonucleotide: CBLB-5439
aaacucacuuuaugcuagg

SEQ ID NO: 35653 - RNA, 20 nt, Artificial Sequence
  Synthetic oligonucleotide: CBLB-5440
aaaacucacuuuaugcuagg

SEQ ID NO: 35654 - RNA, 21 nt, Artificial Sequence
  Synthetic oligonucleotide: CBLB-5441
caaaacucacuuuaugcuagg

SEQ ID NO: 35655 - RNA, 22 nt, Artificial Sequence
  Synthetic oligonucleotide: CBLB-5442
acaaaacucacuuuaugcuagg

SEQ ID NO: 35656 - RNA, 23 nt, Artificial Sequence
  Synthetic oligonucleotide: CBLB-5443
aacaaaacucacuuuaugcuagg

SEQ ID NO: 35657 - RNA, 24 nt, Artificial Sequence
  Synthetic oligonucleotide: CBLB-5444
caacaaaacucacuuuaugcuagg

SEQ ID NO: 35658 - RNA, 18 nt, Artificial Sequence
  Synthetic oligonucleotide: CBLB-5445
aggucuuucagguggcgg

SEQ ID NO: 35659 - RNA, 19 nt, Artificial Sequence
  Synthetic oligonucleotide: CBLB-5446
gaggucuuucagguggcgg

SEQ ID NO: 35660 - RNA, 20 nt, Artificial Sequence
  Synthetic oligonucleotide: CBLB-3285
ggaggucuuucagguggcgg

SEQ ID NO: 35661 - RNA, 21 nt, Artificial Sequence
  Synthetic oligonucleotide: CBLB-5447
uggaggucuuucagguggcgg

SEQ ID NO: 35662 - RNA, 22 nt, Artificial Sequence
  Synthetic oligonucleotide: CBLB-5448
guggaggucuuucagguggcgg

SEQ ID NO: 35663 - RNA, 23 nt, Artificial Sequence
  Synthetic oligonucleotide: CBLB-5449
gguggaggucuuucagguggcgg

SEQ ID NO: 35664 - RNA, 24 nt, Artificial Sequence
  Synthetic oligonucleotide: CBLB-5450
ugguggaggucuuucagguggcgg

SEQ ID NO: 35665 - RNA, 18 nt, Artificial Sequence
  Synthetic oligonucleotide: CBLB-5451
uucuucucugggcaaggg

SEQ ID NO: 35666 - RNA, 19 nt, Artificial Sequence
  Synthetic oligonucleotide: CBLB-5452
uuucuucucugggcaaggg

SEQ ID NO: 35667 - RNA, 20 nt, Artificial Sequence
  Synthetic oligonucleotide: CBLB-5453
cuuucuucucugggcaaggg

SEQ ID NO: 35668 - RNA, 21 nt, Artificial Sequence
  Synthetic oligonucleotide: CBLB-5454
gcuuucuucucugggcaaggg

SEQ ID NO: 35669 - RNA, 22 nt, Artificial Sequence
  Synthetic oligonucleotide: CBLB-5455
ggcuuucuucucugggcaaggg

SEQ ID NO: 35670 - RNA, 23 nt, Artificial Sequence
  Synthetic oligonucleotide: CBLB-5456
uggcuuucuucucugggcaaggg

SEQ ID NO: 35671 - RNA, 24 nt, Artificial Sequence
  Synthetic oligonucleotide: CBLB-5457
guggcuuucuucucugggcaaggg

SEQ ID NO: 35672 - RNA, 18 nt, Artificial Sequence
  Synthetic oligonucleotide: CBLB-5458
aggaggaucucuuaaggg

SEQ ID NO: 35673 - RNA, 19 nt, Artificial Sequence
  Synthetic oligonucleotide: CBLB-5459
gaggaggaucucuuaaggg

SEQ ID NO: 35674 - RNA, 20 nt, Artificial Sequence
  Synthetic oligonucleotide: CBLB-3287
ggaggaggaucucuuaaggg

SEQ ID NO: 35675 - RNA, 21 nt, Artificial Sequence
  Synthetic oligonucleotide: CBLB-5460
uggaggaggaucucuuaaggg

SEQ ID NO: 35676 - RNA, 22 nt, Artificial Sequence
  Synthetic oligonucleotide: CBLB-5461
guggaggaggaucucuuaaggg

SEQ ID NO: 35677 - RNA, 23 nt, Artificial Sequence
  Synthetic oligonucleotide: CBLB-5462
gguggaggaggaucucuuaaggg

SEQ ID NO: 35678 - RNA, 24 nt, Artificial Sequence
  Synthetic oligonucleotide: CBLB-5463
cgguggaggaggaucucuuaaggg

SEQ ID NO: 35679 - RNA, 18 nt, Artificial Sequence
  Synthetic oligonucleotide: CBLB-5464
uuucaaccuaauggaggg

SEQ ID NO: 35680 - RNA, 19 nt, Artificial Sequence
  Synthetic oligonucleotide: CBLB-5465
guuucaaccuaauggaggg

SEQ ID NO: 35681 - RNA, 20 nt, Artificial Sequence
  Synthetic oligonucleotide: CBLB-5466
gguuucaaccuaauggaggg

SEQ ID NO: 35682 - RNA, 21 nt, Artificial Sequence
  Synthetic oligonucleotide: CBLB-5467
agguuucaaccuaauggaggg

SEQ ID NO: 35683 - RNA, 22 nt, Artificial Sequence
  Synthetic oligonucleotide: CBLB-5468
aagguuucaaccuaauggaggg

SEQ ID NO: 35684 - RNA, 23 nt, Artificial Sequence
  Synthetic oligonucleotide: CBLB-5469
aaagguuucaaccuaauggaggg

SEQ ID NO: 35685 - RNA, 24 nt, Artificial Sequence
  Synthetic oligonucleotide: CBLB-5470
uaaagguuucaaccuaauggaggg

SEQ ID NO: 35686 - RNA, 18 nt, Artificial Sequence
  Synthetic oligonucleotide: CBLB-5471
acucacuuuaugcuaggg

SEQ ID NO: 35687 - RNA, 19 nt, Artificial Sequence
  Synthetic oligonucleotide: CBLB-5472
aacucacuuuaugcuaggg

SEQ ID NO: 35688 - RNA, 20 nt, Artificial Sequence
  Synthetic oligonucleotide: CBLB-3291
aaacucacuuuaugcuaggg

SEQ ID NO: 35689 - RNA, 21 nt, Artificial Sequence
  Synthetic oligonucleotide: CBLB-5473
aaaacucacuuuaugcuaggg

SEQ ID NO: 35690 - RNA, 22 nt, Artificial Sequence
  Synthetic oligonucleotide: CBLB-5474
caaaacucacuuuaugcuaggg

SEQ ID NO: 35691 - RNA, 23 nt, Artificial Sequence
  Synthetic oligonucleotide: CBLB-5475
acaaaacucacuuuaugcuaggg

SEQ ID NO: 35692 - RNA, 24 nt, Artificial Sequence
  Synthetic oligonucleotide: CBLB-5476
aacaaaacucacuuuaugcuaggg

SEQ ID NO: 35693 - RNA, 18 nt, Artificial Sequence
  Synthetic oligonucleotide: CBLB-5477
gaggaggagaaagccggg

SEQ ID NO: 35694 - RNA, 19 nt, Artificial Sequence
  Synthetic oligonucleotide: CBLB-5478
ggaggaggagaaagccggg

SEQ ID NO: 35695 - RNA, 20 nt, Artificial Sequence
  Synthetic oligonucleotide: CBLB-5479
aggaggaggagaaagccggg

SEQ ID NO: 35696 - RNA, 21 nt, Artificial Sequence
  Synthetic oligonucleotide: CBLB-5480
gaggaggaggagaaagccggg

SEQ ID NO: 35697 - RNA, 22 nt, Artificial Sequence
  Synthetic oligonucleotide: CBLB-5481
ggaggaggaggagaaagccggg

SEQ ID NO: 35698 - RNA, 23 nt, Artificial Sequence
  Synthetic oligonucleotide: CBLB-5482
uggaggaggaggagaaagccggg

SEQ ID NO: 35699 - RNA, 24 nt, Artificial Sequence
  Synthetic oligonucleotide: CBLB-5483
cuggaggaggaggagaaagccggg

SEQ ID NO: 35700 - RNA, 18 nt, Artificial Sequence
  Synthetic oligonucleotide: CBLB-5484
aggaggagaaagccgggg

SEQ ID NO: 35701 - RNA, 19 nt, Artificial Sequence
  Synthetic oligonucleotide: CBLB-5485
gaggaggagaaagccgggg

SEQ ID NO: 35702 - RNA, 20 nt, Artificial Sequence
  Synthetic oligonucleotide: CBLB-1079
ggaggaggagaaagccgggg

SEQ ID NO: 35703 - RNA, 21 nt, Artificial Sequence
  Synthetic oligonucleotide: CBLB-5486
aggaggaggagaaagccgggg

SEQ ID NO: 35704 - RNA, 22 nt, Artificial Sequence
  Synthetic oligonucleotide: CBLB-5487
gaggaggaggagaaagccgggg

SEQ ID NO: 35705 - RNA, 23 nt, Artificial Sequence
  Synthetic oligonucleotide: CBLB-5488
ggaggaggaggagaaagccgggg

SEQ ID NO: 35706 - RNA, 24 nt, Artificial Sequence
  Synthetic oligonucleotide: CBLB-5489
uggaggaggaggagaaagccgggg

SEQ ID NO: 35707 - RNA, 18 nt, Artificial Sequence
  Synthetic oligonucleotide: CBLB-5490
uguuccuggaauuugggg

SEQ ID NO: 35708 - RNA, 19 nt, Artificial Sequence
  Synthetic oligonucleotide: CBLB-5491
uuguuccuggaauuugggg

SEQ ID NO: 35709 - RNA, 20 nt, Artificial Sequence
  Synthetic oligonucleotide: CBLB-3295
auuguuccuggaauuugggg

SEQ ID NO: 35710 - RNA, 21 nt, Artificial Sequence
  Synthetic oligonucleotide: CBLB-5492
uauuguuccuggaauuugggg

SEQ ID NO: 35711 - RNA, 22 nt, Artificial Sequence
  Synthetic oligonucleotide: CBLB-5493
auauuguuccuggaauuugggg

SEQ ID NO: 35712 - RNA, 23 nt, Artificial Sequence
  Synthetic oligonucleotide: CBLB-5494
cauauuguuccuggaauuugggg

SEQ ID NO: 35713 - RNA, 24 nt, Artificial Sequence
  Synthetic oligonucleotide: CBLB-5495
ucauauuguuccuggaauuugggg

SEQ ID NO: 35714 - RNA, 18 nt, Artificial Sequence
  Synthetic oligonucleotide: CBLB-5496
ucagggaaacaggguggg

SEQ ID NO: 35715 - RNA, 19 nt, Artificial Sequence
  Synthetic oligonucleotide: CBLB-5497
uucagggaaacaggguggg

SEQ ID NO: 35716 - RNA, 20 nt, Artificial Sequence
  Synthetic oligonucleotide: CBLB-5498
auucagggaaacaggguggg

SEQ ID NO: 35717 - RNA, 21 nt, Artificial Sequence
  Synthetic oligonucleotide: CBLB-5499
aauucagggaaacaggguggg

SEQ ID NO: 35718 - RNA, 22 nt, Artificial Sequence
  Synthetic oligonucleotide: CBLB-5500
gaauucagggaaacaggguggg

SEQ ID NO: 35719 - RNA, 23 nt, Artificial Sequence
  Synthetic oligonucleotide: CBLB-5501
ugaauucagggaaacaggguggg

SEQ ID NO: 35720 - RNA, 24 nt, Artificial Sequence
  Synthetic oligonucleotide: CBLB-5502
gugaauucagggaaacaggguggg

SEQ ID NO: 35721 - RNA, 18 nt, Artificial Sequence
  Synthetic oligonucleotide: CBLB-5503
uuguuccuggaauuuggg

SEQ ID NO: 35722 - RNA, 19 nt, Artificial Sequence
  Synthetic oligonucleotide: CBLB-5504
auuguuccuggaauuuggg

SEQ ID NO: 35723 - RNA, 20 nt, Artificial Sequence
  Synthetic oligonucleotide: CBLB-5505
uauuguuccuggaauuuggg

SEQ ID NO: 35724 - RNA, 21 nt, Artificial Sequence
  Synthetic oligonucleotide: CBLB-5506
auauuguuccuggaauuuggg

SEQ ID NO: 35725 - RNA, 22 nt, Artificial Sequence
  Synthetic oligonucleotide: CBLB-5507
cauauuguuccuggaauuuggg

SEQ ID NO: 35726 - RNA, 23 nt, Artificial Sequence
  Synthetic oligonucleotide: CBLB-5508
ucauauuguuccuggaauuuggg

SEQ ID NO: 35727 - RNA, 24 nt, Artificial Sequence
  Synthetic oligonucleotide: CBLB-5509
uucauauuguuccuggaauuuggg

SEQ ID NO: 35728 - RNA, 18 nt, Artificial Sequence
  Synthetic oligonucleotide: CBLB-5510
gggaggugggagagaugg

SEQ ID NO: 35729 - RNA, 19 nt, Artificial Sequence
  Synthetic oligonucleotide: CBLB-5511
ggggaggugggagagaugg

SEQ ID NO: 35730 - RNA, 20 nt, Artificial Sequence
  Synthetic oligonucleotide: CBLB-3298
gggggaggugggagagaugg

SEQ ID NO: 35731 - RNA, 21 nt, Artificial Sequence
  Synthetic oligonucleotide: CBLB-5512
ugggggaggugggagagaugg

SEQ ID NO: 35732 - RNA, 22 nt, Artificial Sequence
  Synthetic oligonucleotide: CBLB-5513
gugggggaggugggagagaugg

SEQ ID NO: 35733 - RNA, 23 nt, Artificial Sequence
  Synthetic oligonucleotide: CBLB-5514
ggugggggaggugggagagaugg

SEQ ID NO: 35734 - RNA, 24 nt, Artificial Sequence
  Synthetic oligonucleotide: CBLB-5515
aggugggggaggugggagagaugg

SEQ ID NO: 35735 - RNA, 18 nt, Artificial Sequence
  Synthetic oligonucleotide: CBLB-5516
gaggagggugguaacugg

SEQ ID NO: 35736 - RNA, 19 nt, Artificial Sequence
  Synthetic oligonucleotide: CBLB-5517
ggaggagggugguaacugg

SEQ ID NO: 35737 - RNA, 20 nt, Artificial Sequence
  Synthetic oligonucleotide: CBLB-3299
gggaggagggugguaacugg

SEQ ID NO: 35738 - RNA, 21 nt, Artificial Sequence
  Synthetic oligonucleotide: CBLB-5518
agggaggagggugguaacugg

SEQ ID NO: 35739 - RNA, 22 nt, Artificial Sequence
  Synthetic oligonucleotide: CBLB-5519
uagggaggagggugguaacugg

SEQ ID NO: 35740 - RNA, 23 nt, Artificial Sequence
  Synthetic oligonucleotide: CBLB-5520
cuagggaggagggugguaacugg

SEQ ID NO: 35741 - RNA, 24 nt, Artificial Sequence
  Synthetic oligonucleotide: CBLB-5521
gcuagggaggagggugguaacugg

SEQ ID NO: 35742 - RNA, 18 nt, Artificial Sequence
  Synthetic oligonucleotide: CBLB-5522
uagacguggggauacugg

SEQ ID NO: 35743 - RNA, 19 nt, Artificial Sequence
  Synthetic oligonucleotide: CBLB-5523
uuagacguggggauacugg

SEQ ID NO: 35744 - RNA, 20 nt, Artificial Sequence
  Synthetic oligonucleotide: CBLB-3300
uuuagacguggggauacugg

SEQ ID NO: 35745 - RNA, 21 nt, Artificial Sequence
  Synthetic oligonucleotide: CBLB-5524
auuuagacguggggauacugg

SEQ ID NO: 35746 - RNA, 22 nt, Artificial Sequence
  Synthetic oligonucleotide: CBLB-5525
gauuuagacguggggauacugg

SEQ ID NO: 35747 - RNA, 23 nt, Artificial Sequence
  Synthetic oligonucleotide: CBLB-5526
agauuuagacguggggauacugg

SEQ ID NO: 35748 - RNA, 24 nt, Artificial Sequence
  Synthetic oligonucleotide: CBLB-5527
uagauuuagacguggggauacugg

SEQ ID NO: 35749 - RNA, 18 nt, Artificial Sequence
  Synthetic oligonucleotide: CBLB-5528
augccuugcaggaggugg

SEQ ID NO: 35750 - RNA, 19 nt, Artificial Sequence
  Synthetic oligonucleotide: CBLB-5529
uaugccuugcaggaggugg

SEQ ID NO: 35751 - RNA, 20 nt, Artificial Sequence
  Synthetic oligonucleotide: CBLB-3304
cuaugccuugcaggaggugg

SEQ ID NO: 35752 - RNA, 21 nt, Artificial Sequence
  Synthetic oligonucleotide: CBLB-5530
acuaugccuugcaggaggugg

SEQ ID NO: 35753 - RNA, 22 nt, Artificial Sequence
  Synthetic oligonucleotide: CBLB-5531
gacuaugccuugcaggaggugg

SEQ ID NO: 35754 - RNA, 23 nt, Artificial Sequence
  Synthetic oligonucleotide: CBLB-5532
agacuaugccuugcaggaggugg

SEQ ID NO: 35755 - RNA, 24 nt, Artificial Sequence
  Synthetic oligonucleotide: CBLB-5533
gagacuaugccuugcaggaggugg

SEQ ID NO: 35756 - RNA, 18 nt, Artificial Sequence
  Synthetic oligonucleotide: CBLB-5534
aggaggugggggaggugg

SEQ ID NO: 35757 - RNA, 19 nt, Artificial Sequence
  Synthetic oligonucleotide: CBLB-5535
caggaggugggggaggugg

SEQ ID NO: 35758 - RNA, 20 nt, Artificial Sequence
  Synthetic oligonucleotide: CBLB-5536
gcaggaggugggggaggugg

SEQ ID NO: 35759 - RNA, 21 nt, Artificial Sequence
  Synthetic oligonucleotide: CBLB-5537
ugcaggaggugggggaggugg

SEQ ID NO: 35760 - RNA, 22 nt, Artificial Sequence
  Synthetic oligonucleotide: CBLB-5538
uugcaggaggugggggaggugg

SEQ ID NO: 35761 - RNA, 23 nt, Artificial Sequence
  Synthetic oligonucleotide: CBLB-5539
cuugcaggaggugggggaggugg

SEQ ID NO: 35762 - RNA, 24 nt, Artificial Sequence
  Synthetic oligonucleotide: CBLB-5540
ccuugcaggaggugggggaggugg

SEQ ID NO: 35763 - RNA, 18 nt, Artificial Sequence
  Synthetic oligonucleotide: CBLB-5541
ucuuucagguggcggugg

SEQ ID NO: 35764 - RNA, 19 nt, Artificial Sequence
  Synthetic oligonucleotide: CBLB-5542
gucuuucagguggcggugg

SEQ ID NO: 35765 - RNA, 20 nt, Artificial Sequence
  Synthetic oligonucleotide: CBLB-3305
ggucuuucagguggcggugg

SEQ ID NO: 35766 - RNA, 21 nt, Artificial Sequence
  Synthetic oligonucleotide: CBLB-5543
aggucuuucagguggcggugg

SEQ ID NO: 35767 - RNA, 22 nt, Artificial Sequence
  Synthetic oligonucleotide: CBLB-5544
gaggucuuucagguggcggugg

SEQ ID NO: 35768 - RNA, 23 nt, Artificial Sequence
  Synthetic oligonucleotide: CBLB-5545
ggaggucuuucagguggcggugg

SEQ ID NO: 35769 - RNA, 24 nt, Artificial Sequence
  Synthetic oligonucleotide: CBLB-5546
uggaggucuuucagguggcggugg

SEQ ID NO: 35770 - RNA, 18 nt, Artificial Sequence
  Synthetic oligonucleotide: CBLB-5547
auugucuggugggauugg

SEQ ID NO: 35771 - RNA, 19 nt, Artificial Sequence
  Synthetic oligonucleotide: CBLB-5548
uauugucuggugggauugg

SEQ ID NO: 35772 - RNA, 20 nt, Artificial Sequence
  Synthetic oligonucleotide: CBLB-3308
cuauugucuggugggauugg

SEQ ID NO: 35773 - RNA, 21 nt, Artificial Sequence
  Synthetic oligonucleotide: CBLB-5549
ucuauugucuggugggauugg

SEQ ID NO: 35774 - RNA, 22 nt, Artificial Sequence
  Synthetic oligonucleotide: CBLB-5550
gucuauugucuggugggauugg

SEQ ID NO: 35775 - RNA, 23 nt, Artificial Sequence
  Synthetic oligonucleotide: CBLB-5551
agucuauugucuggugggauugg

SEQ ID NO: 35776 - RNA, 24 nt, Artificial Sequence
  Synthetic oligonucleotide: CBLB-5552
cagucuauugucuggugggauugg

SEQ ID NO: 35777 - RNA, 18 nt, Artificial Sequence
  Synthetic oligonucleotide: CBLB-5553
aaagguuucaaccuaaug

SEQ ID NO: 35778 - RNA, 19 nt, Artificial Sequence
  Synthetic oligonucleotide: CBLB-5554
uaaagguuucaaccuaaug

SEQ ID NO: 35779 - RNA, 20 nt, Artificial Sequence
  Synthetic oligonucleotide: CBLB-5555
uuaaagguuucaaccuaaug

SEQ ID NO: 35780 - RNA, 21 nt, Artificial Sequence
  Synthetic oligonucleotide: CBLB-5556
uuuaaagguuucaaccuaaug

SEQ ID NO: 35781 - RNA, 22 nt, Artificial Sequence
  Synthetic oligonucleotide: CBLB-5557
uuuuaaagguuucaaccuaaug

SEQ ID NO: 35782 - RNA, 23 nt, Artificial Sequence
  Synthetic oligonucleotide: CBLB-5558
uuuuuaaagguuucaaccuaaug

SEQ ID NO: 35783 - RNA, 24 nt, Artificial Sequence
  Synthetic oligonucleotide: CBLB-5559
uuuuuuaaagguuucaaccuaaug

SEQ ID NO: 35784 - RNA, 18 nt, Artificial Sequence
  Synthetic oligonucleotide: CBLB-5560
ccaacucaccugaacaug

SEQ ID NO: 35785 - RNA, 19 nt, Artificial Sequence
  Synthetic oligonucleotide: CBLB-5561
gccaacucaccugaacaug

SEQ ID NO: 35786 - RNA, 20 nt, Artificial Sequence
  Synthetic oligonucleotide: CBLB-5562
agccaacucaccugaacaug

SEQ ID NO: 35787 - RNA, 21 nt, Artificial Sequence
  Synthetic oligonucleotide: CBLB-5563
uagccaacucaccugaacaug

SEQ ID NO: 35788 - RNA, 22 nt, Artificial Sequence
  Synthetic oligonucleotide: CBLB-5564
cuagccaacucaccugaacaug

SEQ ID NO: 35789 - RNA, 23 nt, Artificial Sequence
  Synthetic oligonucleotide: CBLB-5565
acuagccaacucaccugaacaug

SEQ ID NO: 35790 - RNA, 24 nt, Artificial Sequence
  Synthetic oligonucleotide: CBLB-5566
uacuagccaacucaccugaacaug

SEQ ID NO: 35791 - RNA, 18 nt, Artificial Sequence
  Synthetic oligonucleotide: CBLB-5567
ggggaggugggagagaug

SEQ ID NO: 35792 - RNA, 19 nt, Artificial Sequence
  Synthetic oligonucleotide: CBLB-5568
gggggaggugggagagaug

SEQ ID NO: 35793 - RNA, 20 nt, Artificial Sequence
  Synthetic oligonucleotide: CBLB-5569
ugggggaggugggagagaug

SEQ ID NO: 35794 - RNA, 21 nt, Artificial Sequence
  Synthetic oligonucleotide: CBLB-5570
gugggggaggugggagagaug

SEQ ID NO: 35795 - RNA, 22 nt, Artificial Sequence
  Synthetic oligonucleotide: CBLB-5571
ggugggggaggugggagagaug

SEQ ID NO: 35796 - RNA, 23 nt, Artificial Sequence
  Synthetic oligonucleotide: CBLB-5572
aggugggggaggugggagagaug

SEQ ID NO: 35797 - RNA, 24 nt, Artificial Sequence
  Synthetic oligonucleotide: CBLB-5573
gaggugggggaggugggagagaug

SEQ ID NO: 35798 - RNA, 18 nt, Artificial Sequence
  Synthetic oligonucleotide: CBLB-5574
gggaaacagggugggaug

SEQ ID NO: 35799 - RNA, 19 nt, Artificial Sequence
  Synthetic oligonucleotide: CBLB-5575
agggaaacagggugggaug

SEQ ID NO: 35800 - RNA, 20 nt, Artificial Sequence
  Synthetic oligonucleotide: CBLB-5576
cagggaaacagggugggaug

SEQ ID NO: 35801 - RNA, 21 nt, Artificial Sequence
  Synthetic oligonucleotide: CBLB-5577
ucagggaaacagggugggaug

SEQ ID NO: 35802 - RNA, 22 nt, Artificial Sequence
  Synthetic oligonucleotide: CBLB-5578
uucagggaaacagggugggaug

SEQ ID NO: 35803 - RNA, 23 nt, Artificial Sequence
  Synthetic oligonucleotide: CBLB-5579
auucagggaaacagggugggaug

SEQ ID NO: 35804 - RNA, 24 nt, Artificial Sequence
  Synthetic oligonucleotide: CBLB-5580
aauucagggaaacagggugggaug

SEQ ID NO: 35805 - RNA, 18 nt, Artificial Sequence
  Synthetic oligonucleotide: CBLB-5581
ggaggagggugguaacug

SEQ ID NO: 35806 - RNA, 19 nt, Artificial Sequence
  Synthetic oligonucleotide: CBLB-5582
gggaggagggugguaacug

SEQ ID NO: 35807 - RNA, 20 nt, Artificial Sequence
  Synthetic oligonucleotide: CBLB-5583
agggaggagggugguaacug

SEQ ID NO: 35808 - RNA, 21 nt, Artificial Sequence
  Synthetic oligonucleotide: CBLB-5584
uagggaggagggugguaacug

SEQ ID NO: 35809 - RNA, 22 nt, Artificial Sequence
  Synthetic oligonucleotide: CBLB-5585
cuagggaggagggugguaacug

SEQ ID NO: 35810 - RNA, 23 nt, Artificial Sequence
  Synthetic oligonucleotide: CBLB-5586
gcuagggaggagggugguaacug

SEQ ID NO: 35811 - RNA, 24 nt, Artificial Sequence
  Synthetic oligonucleotide: CBLB-5587
ugcuagggaggagggugguaacug

SEQ ID NO: 35812 - RNA, 18 nt, Artificial Sequence
  Synthetic oligonucleotide: CBLB-5588
uuagacguggggauacug

SEQ ID NO: 35813 - RNA, 19 nt, Artificial Sequence
  Synthetic oligonucleotide: CBLB-5589
uuuagacguggggauacug

SEQ ID NO: 35814 - RNA, 20 nt, Artificial Sequence
  Synthetic oligonucleotide: CBLB-5590
auuuagacguggggauacug

SEQ ID NO: 35815 - RNA, 21 nt, Artificial Sequence
  Synthetic oligonucleotide: CBLB-5591
gauuuagacguggggauacug

SEQ ID NO: 35816 - RNA, 22 nt, Artificial Sequence
  Synthetic oligonucleotide: CBLB-5592
agauuuagacguggggauacug

SEQ ID NO: 35817 - RNA, 23 nt, Artificial Sequence
  Synthetic oligonucleotide: CBLB-5593
uagauuuagacguggggauacug

SEQ ID NO: 35818 - RNA, 24 nt, Artificial Sequence
  Synthetic oligonucleotide: CBLB-5594
auagauuuagacguggggauacug

SEQ ID NO: 35819 - RNA, 18 nt, Artificial Sequence
  Synthetic oligonucleotide: CBLB-5595
gcuuuucccuccuaccug

SEQ ID NO: 35820 - RNA, 19 nt, Artificial Sequence
  Synthetic oligonucleotide: CBLB-5596
ggcuuuucccuccuaccug

SEQ ID NO: 35821 - RNA, 20 nt, Artificial Sequence
  Synthetic oligonucleotide: CBLB-5597
uggcuuuucccuccuaccug

SEQ ID NO: 35822 - RNA, 21 nt, Artificial Sequence
  Synthetic oligonucleotide: CBLB-5598
uuggcuuuucccuccuaccug

SEQ ID NO: 35823 - RNA, 22 nt, Artificial Sequence
  Synthetic oligonucleotide: CBLB-5599
uuuggcuuuucccuccuaccug

SEQ ID NO: 35824 - RNA, 23 nt, Artificial Sequence
  Synthetic oligonucleotide: CBLB-5600
cuuuggcuuuucccuccuaccug

SEQ ID NO: 35825 - RNA, 24 nt, Artificial Sequence
  Synthetic oligonucleotide: CBLB-5601
ucuuuggcuuuucccuccuaccug

SEQ ID NO: 35826 - RNA, 18 nt, Artificial Sequence
  Synthetic oligonucleotide: CBLB-5602
caggccagagcuaaucug

SEQ ID NO: 35827 - RNA, 19 nt, Artificial Sequence
  Synthetic oligonucleotide: CBLB-5603
ccaggccagagcuaaucug

SEQ ID NO: 35828 - RNA, 20 nt, Artificial Sequence
  Synthetic oligonucleotide: CBLB-5604
uccaggccagagcuaaucug

SEQ ID NO: 35829 - RNA, 21 nt, Artificial Sequence
  Synthetic oligonucleotide: CBLB-5605
uuccaggccagagcuaaucug

SEQ ID NO: 35830 - RNA, 22 nt, Artificial Sequence
  Synthetic oligonucleotide: CBLB-5606
cuuccaggccagagcuaaucug

SEQ ID NO: 35831 - RNA, 23 nt, Artificial Sequence
  Synthetic oligonucleotide: CBLB-5607
gcuuccaggccagagcuaaucug

SEQ ID NO: 35832 - RNA, 24 nt, Artificial Sequence
  Synthetic oligonucleotide: CBLB-5608
ugcuuccaggccagagcuaaucug

SEQ ID NO: 35833 - RNA, 18 nt, Artificial Sequence
  Synthetic oligonucleotide: CBLB-5609
uacucagucuauugucug

SEQ ID NO: 35834 - RNA, 19 nt, Artificial Sequence
  Synthetic oligonucleotide: CBLB-5610
cuacucagucuauugucug

SEQ ID NO: 35835 - RNA, 20 nt, Artificial Sequence
  Synthetic oligonucleotide: CBLB-5611
ucuacucagucuauugucug

SEQ ID NO: 35836 - RNA, 21 nt, Artificial Sequence
  Synthetic oligonucleotide: CBLB-5612
gucuacucagucuauugucug

SEQ ID NO: 35837 - RNA, 22 nt, Artificial Sequence
  Synthetic oligonucleotide: CBLB-5613
ugucuacucagucuauugucug

SEQ ID NO: 35838 - RNA, 23 nt, Artificial Sequence
  Synthetic oligonucleotide: CBLB-5614
gugucuacucagucuauugucug

SEQ ID NO: 35839 - RNA, 24 nt, Artificial Sequence
  Synthetic oligonucleotide: CBLB-5615
ugugucuacucagucuauugucug

SEQ ID NO: 35840 - RNA, 18 nt, Artificial Sequence
  Synthetic oligonucleotide: CBLB-5616
agggcguccuguugagug

SEQ ID NO: 35841 - RNA, 19 nt, Artificial Sequence
  Synthetic oligonucleotide: CBLB-5617
gagggcguccuguugagug

SEQ ID NO: 35842 - RNA, 20 nt, Artificial Sequence
  Synthetic oligonucleotide: CBLB-5618
agagggcguccuguugagug

SEQ ID NO: 35843 - RNA, 21 nt, Artificial Sequence
  Synthetic oligonucleotide: CBLB-5619
cagagggcguccuguugagug

SEQ ID NO: 35844 - RNA, 22 nt, Artificial Sequence
  Synthetic oligonucleotide: CBLB-5620
ucagagggcguccuguugagug

SEQ ID NO: 35845 - RNA, 23 nt, Artificial Sequence
  Synthetic oligonucleotide: CBLB-5621
aucagagggcguccuguugagug

SEQ ID NO: 35846 - RNA, 24 nt, Artificial Sequence
  Synthetic oligonucleotide: CBLB-5622
aaucagagggcguccuguugagug

SEQ ID NO: 35847 - RNA, 18 nt, Artificial Sequence
  Synthetic oligonucleotide: CBLB-5623
uaugccuugcaggaggug

SEQ ID NO: 35848 - RNA, 19 nt, Artificial Sequence
  Synthetic oligonucleotide: CBLB-5624
cuaugccuugcaggaggug

SEQ ID NO: 35849 - RNA, 20 nt, Artificial Sequence
  Synthetic oligonucleotide: CBLB-3326
acuaugccuugcaggaggug

SEQ ID NO: 35850 - RNA, 21 nt, Artificial Sequence
  Synthetic oligonucleotide: CBLB-5625
gacuaugccuugcaggaggug

SEQ ID NO: 35851 - RNA, 22 nt, Artificial Sequence
  Synthetic oligonucleotide: CBLB-5626
agacuaugccuugcaggaggug

SEQ ID NO: 35852 - RNA, 23 nt, Artificial Sequence
  Synthetic oligonucleotide: CBLB-5627
gagacuaugccuugcaggaggug

SEQ ID NO: 35853 - RNA, 24 nt, Artificial Sequence
  Synthetic oligonucleotide: CBLB-5628
ugagacuaugccuugcaggaggug

SEQ ID NO: 35854 - RNA, 18 nt, Artificial Sequence
  Synthetic oligonucleotide: CBLB-5629
gucuuucagguggcggug

SEQ ID NO: 35855 - RNA, 19 nt, Artificial Sequence
  Synthetic oligonucleotide: CBLB-5630
ggucuuucagguggcggug

SEQ ID NO: 35856 - RNA, 20 nt, Artificial Sequence
  Synthetic oligonucleotide: CBLB-5631
aggucuuucagguggcggug

SEQ ID NO: 35857 - RNA, 21 nt, Artificial Sequence
  Synthetic oligonucleotide: CBLB-5632
gaggucuuucagguggcggug

SEQ ID NO: 35858 - RNA, 22 nt, Artificial Sequence
  Synthetic oligonucleotide: CBLB-5633
ggaggucuuucagguggcggug

SEQ ID NO: 35859 - RNA, 23 nt, Artificial Sequence
  Synthetic oligonucleotide: CBLB-5634
uggaggucuuucagguggcggug

SEQ ID NO: 35860 - RNA, 24 nt, Artificial Sequence
  Synthetic oligonucleotide: CBLB-5635
guggaggucuuucagguggcggug

SEQ ID NO: 35861 - RNA, 18 nt, Artificial Sequence
  Synthetic oligonucleotide: CBLB-5636
uuaagggaggagguggug

SEQ ID NO: 35862 - RNA, 19 nt, Artificial Sequence
  Synthetic oligonucleotide: CBLB-5637
cuuaagggaggagguggug

SEQ ID NO: 35863 - RNA, 20 nt, Artificial Sequence
  Synthetic oligonucleotide: CBLB-5638
ucuuaagggaggagguggug

SEQ ID NO: 35864 - RNA, 21 nt, Artificial Sequence
  Synthetic oligonucleotide: CBLB-5639
cucuuaagggaggagguggug

SEQ ID NO: 35865 - RNA, 22 nt, Artificial Sequence
  Synthetic oligonucleotide: CBLB-5640
ucucuuaagggaggagguggug

SEQ ID NO: 35866 - RNA, 23 nt, Artificial Sequence
  Synthetic oligonucleotide: CBLB-5641
aucucuuaagggaggagguggug

SEQ ID NO: 35867 - RNA, 24 nt, Artificial Sequence
  Synthetic oligonucleotide: CBLB-5642
gaucucuuaagggaggagguggug

SEQ ID NO: 35868 - RNA, 18 nt, Artificial Sequence
  Synthetic oligonucleotide: CBLB-5643
uauugucuggugggauug

SEQ ID NO: 35869 - RNA, 19 nt, Artificial Sequence
  Synthetic oligonucleotide: CBLB-5644
cuauugucuggugggauug

SEQ ID NO: 35870 - RNA, 20 nt, Artificial Sequence
  Synthetic oligonucleotide: CBLB-5645
ucuauugucuggugggauug

SEQ ID NO: 35871 - RNA, 21 nt, Artificial Sequence
  Synthetic oligonucleotide: CBLB-5646
gucuauugucuggugggauug

SEQ ID NO: 35872 - RNA, 22 nt, Artificial Sequence
  Synthetic oligonucleotide: CBLB-5647
agucuauugucuggugggauug

SEQ ID NO: 35873 - RNA, 23 nt, Artificial Sequence
  Synthetic oligonucleotide: CBLB-5648
cagucuauugucuggugggauug

SEQ ID NO: 35874 - RNA, 24 nt, Artificial Sequence
  Synthetic oligonucleotide: CBLB-5649
ucagucuauugucuggugggauug

SEQ ID NO: 35875 - RNA, 18 nt, Artificial Sequence
  Synthetic oligonucleotide: CBLB-5650
caaugagacuaugccuug

SEQ ID NO: 35876 - RNA, 19 nt, Artificial Sequence
  Synthetic oligonucleotide: CBLB-5651
ucaaugagacuaugccuug

SEQ ID NO: 35877 - RNA, 20 nt, Artificial Sequence
  Synthetic oligonucleotide: CBLB-5652
uucaaugagacuaugccuug

SEQ ID NO: 35878 - RNA, 21 nt, Artificial Sequence
  Synthetic oligonucleotide: CBLB-5653
guucaaugagacuaugccuug

SEQ ID NO: 35879 - RNA, 22 nt, Artificial Sequence
  Synthetic oligonucleotide: CBLB-5654
uguucaaugagacuaugccuug

SEQ ID NO: 35880 - RNA, 23 nt, Artificial Sequence
  Synthetic oligonucleotide: CBLB-5655
auguucaaugagacuaugccuug

SEQ ID NO: 35881 - RNA, 24 nt, Artificial Sequence
  Synthetic oligonucleotide: CBLB-5656
aauguucaaugagacuaugccuug

SEQ ID NO: 35882 - RNA, 18 nt, Artificial Sequence
  Synthetic oligonucleotide: CBLB-5657
uauuguuccuggaauuug

SEQ ID NO: 35883 - RNA, 19 nt, Artificial Sequence
  Synthetic oligonucleotide: CBLB-5658
auauuguuccuggaauuug

SEQ ID NO: 35884 - RNA, 20 nt, Artificial Sequence
  Synthetic oligonucleotide: CBLB-3330
cauauuguuccuggaauuug

SEQ ID NO: 35885 - RNA, 21 nt, Artificial Sequence
  Synthetic oligonucleotide: CBLB-5659
ucauauuguuccuggaauuug

SEQ ID NO: 35886 - RNA, 22 nt, Artificial Sequence
  Synthetic oligonucleotide: CBLB-5660
uucauauuguuccuggaauuug

SEQ ID NO: 35887 - RNA, 23 nt, Artificial Sequence
  Synthetic oligonucleotide: CBLB-5661
auucauauuguuccuggaauuug

SEQ ID NO: 35888 - RNA, 24 nt, Artificial Sequence
  Synthetic oligonucleotide: CBLB-5662
aauucauauuguuccuggaauuug

SEQ ID NO: 35889 - RNA, 18 nt, Artificial Sequence
  Synthetic oligonucleotide: CBLB-5663
aaaauugaucuaccuuug

SEQ ID NO: 35890 - RNA, 19 nt, Artificial Sequence
  Synthetic oligonucleotide: CBLB-5664
uaaaauugaucuaccuuug

SEQ ID NO: 35891 - RNA, 20 nt, Artificial Sequence
  Synthetic oligonucleotide: CBLB-5665
auaaaauugaucuaccuuug

SEQ ID NO: 35892 - RNA, 21 nt, Artificial Sequence
  Synthetic oligonucleotide: CBLB-5666
aauaaaauugaucuaccuuug

SEQ ID NO: 35893 - RNA, 22 nt, Artificial Sequence
  Synthetic oligonucleotide: CBLB-5667
uaauaaaauugaucuaccuuug

SEQ ID NO: 35894 - RNA, 23 nt, Artificial Sequence
  Synthetic oligonucleotide: CBLB-5668
cuaauaaaauugaucuaccuuug

SEQ ID NO: 35895 - RNA, 24 nt, Artificial Sequence
  Synthetic oligonucleotide: CBLB-5669
ucuaauaaaauugaucuaccuuug

SEQ ID NO: 35896 - RNA, 18 nt, Artificial Sequence
  Synthetic oligonucleotide: CBLB-5670
cugugauuccagguuuug

SEQ ID NO: 35897 - RNA, 19 nt, Artificial Sequence
  Synthetic oligonucleotide: CBLB-5671
gcugugauuccagguuuug

SEQ ID NO: 35898 - RNA, 20 nt, Artificial Sequence
  Synthetic oligonucleotide: CBLB-5672
cgcugugauuccagguuuug

SEQ ID NO: 35899 - RNA, 21 nt, Artificial Sequence
  Synthetic oligonucleotide: CBLB-5673
ucgcugugauuccagguuuug

SEQ ID NO: 35900 - RNA, 22 nt, Artificial Sequence
  Synthetic oligonucleotide: CBLB-5674
cucgcugugauuccagguuuug

SEQ ID NO: 35901 - RNA, 23 nt, Artificial Sequence
  Synthetic oligonucleotide: CBLB-5675
acucgcugugauuccagguuuug

SEQ ID NO: 35902 - RNA, 24 nt, Artificial Sequence
  Synthetic oligonucleotide: CBLB-5676
aacucgcugugauuccagguuuug

SEQ ID NO: 35903 - RNA, 18 nt, Artificial Sequence
  Synthetic oligonucleotide: CBLB-5677
ucaaucagggcuugaaau

SEQ ID NO: 35904 - RNA, 19 nt, Artificial Sequence
  Synthetic oligonucleotide: CBLB-5678
aucaaucagggcuugaaau

SEQ ID NO: 35905 - RNA, 20 nt, Artificial Sequence
  Synthetic oligonucleotide: CBLB-5679
caucaaucagggcuugaaau

SEQ ID NO: 35906 - RNA, 21 nt, Artificial Sequence
  Synthetic oligonucleotide: CBLB-5680
ccaucaaucagggcuugaaau

SEQ ID NO: 35907 - RNA, 22 nt, Artificial Sequence
  Synthetic oligonucleotide: CBLB-5681
gccaucaaucagggcuugaaau

SEQ ID NO: 35908 - RNA, 23 nt, Artificial Sequence
  Synthetic oligonucleotide: CBLB-5682
ugccaucaaucagggcuugaaau

SEQ ID NO: 35909 - RNA, 24 nt, Artificial Sequence
  Synthetic oligonucleotide: CBLB-5683
cugccaucaaucagggcuugaaau

SEQ ID NO: 35910 - RNA, 18 nt, Artificial Sequence
  Synthetic oligonucleotide: CBLB-5684
uucccugcugccaucaau

SEQ ID NO: 35911 - RNA, 19 nt, Artificial Sequence
  Synthetic oligonucleotide: CBLB-5685
cuucccugcugccaucaau

SEQ ID NO: 35912 - RNA, 20 nt, Artificial Sequence
  Synthetic oligonucleotide: CBLB-5686
ccuucccugcugccaucaau

SEQ ID NO: 35913 - RNA, 21 nt, Artificial Sequence
  Synthetic oligonucleotide: CBLB-5687
uccuucccugcugccaucaau

SEQ ID NO: 35914 - RNA, 22 nt, Artificial Sequence
  Synthetic oligonucleotide: CBLB-5688
auccuucccugcugccaucaau

SEQ ID NO: 35915 - RNA, 23 nt, Artificial Sequence
  Synthetic oligonucleotide: CBLB-5689
aauccuucccugcugccaucaau

SEQ ID NO: 35916 - RNA, 24 nt, Artificial Sequence
  Synthetic oligonucleotide: CBLB-5690
caauccuucccugcugccaucaau

SEQ ID NO: 35917 - RNA, 18 nt, Artificial Sequence
  Synthetic oligonucleotide: CBLB-5691
ucauauuguuccuggaau

SEQ ID NO: 35918 - RNA, 19 nt, Artificial Sequence
  Synthetic oligonucleotide: CBLB-5692
uucauauuguuccuggaau

SEQ ID NO: 35919 - RNA, 20 nt, Artificial Sequence
  Synthetic oligonucleotide: CBLB-5693
auucauauuguuccuggaau

SEQ ID NO: 35920 - RNA, 21 nt, Artificial Sequence
  Synthetic oligonucleotide: CBLB-5694
aauucauauuguuccuggaau

SEQ ID NO: 35921 - RNA, 22 nt, Artificial Sequence
  Synthetic oligonucleotide: CBLB-5695
uaauucauauuguuccuggaau

SEQ ID NO: 35922 - RNA, 23 nt, Artificial Sequence
  Synthetic oligonucleotide: CBLB-5696
auaauucauauuguuccuggaau

SEQ ID NO: 35923 - RNA, 24 nt, Artificial Sequence
  Synthetic oligonucleotide: CBLB-5697
uauaauucauauuguuccuggaau

SEQ ID NO: 35924 - RNA, 18 nt, Artificial Sequence
  Synthetic oligonucleotide: CBLB-5698
ggaugagaagaucauaau

SEQ ID NO: 35925 - RNA, 19 nt, Artificial Sequence
  Synthetic oligonucleotide: CBLB-5699
gggaugagaagaucauaau

SEQ ID NO: 35926 - RNA, 20 nt, Artificial Sequence
  Synthetic oligonucleotide: CBLB-5700
agggaugagaagaucauaau

SEQ ID NO: 35927 - RNA, 21 nt, Artificial Sequence
  Synthetic oligonucleotide: CBLB-5701
gagggaugagaagaucauaau

SEQ ID NO: 35928 - RNA, 22 nt, Artificial Sequence
  Synthetic oligonucleotide: CBLB-5702
ggagggaugagaagaucauaau

SEQ ID NO: 35929 - RNA, 23 nt, Artificial Sequence
  Synthetic oligonucleotide: CBLB-5703
uggagggaugagaagaucauaau

SEQ ID NO: 35930 - RNA, 24 nt, Artificial Sequence
  Synthetic oligonucleotide: CBLB-5704
auggagggaugagaagaucauaau

SEQ ID NO: 35931 - RNA, 18 nt, Artificial Sequence
  Synthetic oligonucleotide: CBLB-5705
aauauagcugcaaaacau

SEQ ID NO: 35932 - RNA, 19 nt, Artificial Sequence
  Synthetic oligonucleotide: CBLB-5706
aaauauagcugcaaaacau

SEQ ID NO: 35933 - RNA, 20 nt, Artificial Sequence
  Synthetic oligonucleotide: CBLB-5707
aaaauauagcugcaaaacau

SEQ ID NO: 35934 - RNA, 21 nt, Artificial Sequence
  Synthetic oligonucleotide: CBLB-5708
gaaaauauagcugcaaaacau

SEQ ID NO: 35935 - RNA, 22 nt, Artificial Sequence
  Synthetic oligonucleotide: CBLB-5709
ggaaaauauagcugcaaaacau

SEQ ID NO: 35936 - RNA, 23 nt, Artificial Sequence
  Synthetic oligonucleotide: CBLB-5710
cggaaaauauagcugcaaaacau

SEQ ID NO: 35937 - RNA, 24 nt, Artificial Sequence
  Synthetic oligonucleotide: CBLB-5711
ccggaaaauauagcugcaaaacau

SEQ ID NO: 35938 - RNA, 18 nt, Artificial Sequence
  Synthetic oligonucleotide: CBLB-5712
ugugccuuccauugacau

SEQ ID NO: 35939 - RNA, 19 nt, Artificial Sequence
  Synthetic oligonucleotide: CBLB-5713
cugugccuuccauugacau

SEQ ID NO: 35940 - RNA, 20 nt, Artificial Sequence
  Synthetic oligonucleotide: CBLB-5714
acugugccuuccauugacau

SEQ ID NO: 35941 - RNA, 21 nt, Artificial Sequence
  Synthetic oligonucleotide: CBLB-5715
uacugugccuuccauugacau

SEQ ID NO: 35942 - RNA, 22 nt, Artificial Sequence
  Synthetic oligonucleotide: CBLB-5716
cuacugugccuuccauugacau

SEQ ID NO: 35943 - RNA, 23 nt, Artificial Sequence
  Synthetic oligonucleotide: CBLB-5717
ucuacugugccuuccauugacau

SEQ ID NO: 35944 - RNA, 24 nt, Artificial Sequence
  Synthetic oligonucleotide: CBLB-5718
cucuacugugccuuccauugacau

SEQ ID NO: 35945 - RNA, 18 nt, Artificial Sequence
  Synthetic oligonucleotide: CBLB-5719
cacuuccaaggugaccau

SEQ ID NO: 35946 - RNA, 19 nt, Artificial Sequence
  Synthetic oligonucleotide: CBLB-5720
ucacuuccaaggugaccau

SEQ ID NO: 35947 - RNA, 20 nt, Artificial Sequence
  Synthetic oligonucleotide: CBLB-3336
uucacuuccaaggugaccau

SEQ ID NO: 35948 - RNA, 21 nt, Artificial Sequence
  Synthetic oligonucleotide: CBLB-5721
cuucacuuccaaggugaccau

SEQ ID NO: 35949 - RNA, 22 nt, Artificial Sequence
  Synthetic oligonucleotide: CBLB-5722
ucuucacuuccaaggugaccau

SEQ ID NO: 35950 - RNA, 23 nt, Artificial Sequence
  Synthetic oligonucleotide: CBLB-5723
uucuucacuuccaaggugaccau

SEQ ID NO: 35951 - RNA, 24 nt, Artificial Sequence
  Synthetic oligonucleotide: CBLB-5724
auucuucacuuccaaggugaccau

SEQ ID NO: 35952 - RNA, 18 nt, Artificial Sequence
  Synthetic oligonucleotide: CBLB-5725
cucccuggaauugaccau

SEQ ID NO: 35953 - RNA, 19 nt, Artificial Sequence
  Synthetic oligonucleotide: CBLB-5726
ucucccuggaauugaccau

SEQ ID NO: 35954 - RNA, 20 nt, Artificial Sequence
  Synthetic oligonucleotide: CBLB-3337
aucucccuggaauugaccau

SEQ ID NO: 35955 - RNA, 21 nt, Artificial Sequence
  Synthetic oligonucleotide: CBLB-5727
uaucucccuggaauugaccau

SEQ ID NO: 35956 - RNA, 22 nt, Artificial Sequence
  Synthetic oligonucleotide: CBLB-5728
uuaucucccuggaauugaccau

SEQ ID NO: 35957 - RNA, 23 nt, Artificial Sequence
  Synthetic oligonucleotide: CBLB-5729
guuaucucccuggaauugaccau

SEQ ID NO: 35958 - RNA, 24 nt, Artificial Sequence
  Synthetic oligonucleotide: CBLB-5730
aguuaucucccuggaauugaccau

SEQ ID NO: 35959 - RNA, 18 nt, Artificial Sequence
  Synthetic oligonucleotide: CBLB-5731
cagcaugugacugaagau

SEQ ID NO: 35960 - RNA, 19 nt, Artificial Sequence
  Synthetic oligonucleotide: CBLB-5732
ccagcaugugacugaagau

SEQ ID NO: 35961 - RNA, 20 nt, Artificial Sequence
  Synthetic oligonucleotide: CBLB-5733
gccagcaugugacugaagau

SEQ ID NO: 35962 - RNA, 21 nt, Artificial Sequence
  Synthetic oligonucleotide: CBLB-5734
ugccagcaugugacugaagau

SEQ ID NO: 35963 - RNA, 22 nt, Artificial Sequence
  Synthetic oligonucleotide: CBLB-5735
cugccagcaugugacugaagau

SEQ ID NO: 35964 - RNA, 23 nt, Artificial Sequence
  Synthetic oligonucleotide: CBLB-5736
ucugccagcaugugacugaagau

SEQ ID NO: 35965 - RNA, 24 nt, Artificial Sequence
  Synthetic oligonucleotide: CBLB-5737
uucugccagcaugugacugaagau

SEQ ID NO: 35966 - RNA, 18 nt, Artificial Sequence
  Synthetic oligonucleotide: CBLB-5738
cggguggcaggcuuagau

SEQ ID NO: 35967 - RNA, 19 nt, Artificial Sequence
  Synthetic oligonucleotide: CBLB-5739
acggguggcaggcuuagau

SEQ ID NO: 35968 - RNA, 20 nt, Artificial Sequence
  Synthetic oligonucleotide: CBLB-5740
cacggguggcaggcuuagau

SEQ ID NO: 35969 - RNA, 21 nt, Artificial Sequence
  Synthetic oligonucleotide: CBLB-5741
gcacggguggcaggcuuagau

SEQ ID NO: 35970 - RNA, 22 nt, Artificial Sequence
  Synthetic oligonucleotide: CBLB-5742
ggcacggguggcaggcuuagau

SEQ ID NO: 35971 - RNA, 23 nt, Artificial Sequence
  Synthetic oligonucleotide: CBLB-5743
aggcacggguggcaggcuuagau

SEQ ID NO: 35972 - RNA, 24 nt, Artificial Sequence
  Synthetic oligonucleotide: CBLB-5744
gaggcacggguggcaggcuuagau

SEQ ID NO: 35973 - RNA, 18 nt, Artificial Sequence
  Synthetic oligonucleotide: CBLB-5745
ucaaccuaauggagggau

SEQ ID NO: 35974 - RNA, 19 nt, Artificial Sequence
  Synthetic oligonucleotide: CBLB-5746
uucaaccuaauggagggau

SEQ ID NO: 35975 - RNA, 20 nt, Artificial Sequence
  Synthetic oligonucleotide: CBLB-5747
uuucaaccuaauggagggau

SEQ ID NO: 35976 - RNA, 21 nt, Artificial Sequence
  Synthetic oligonucleotide: CBLB-5748
guuucaaccuaauggagggau

SEQ ID NO: 35977 - RNA, 22 nt, Artificial Sequence
  Synthetic oligonucleotide: CBLB-5749
gguuucaaccuaauggagggau

SEQ ID NO: 35978 - RNA, 23 nt, Artificial Sequence
  Synthetic oligonucleotide: CBLB-5750
agguuucaaccuaauggagggau

SEQ ID NO: 35979 - RNA, 24 nt, Artificial Sequence
  Synthetic oligonucleotide: CBLB-5751
aagguuucaaccuaauggagggau

SEQ ID NO: 35980 - RNA, 18 nt, Artificial Sequence
  Synthetic oligonucleotide: CBLB-5752
gugguaauggcacgggau

SEQ ID NO: 35981 - RNA, 19 nt, Artificial Sequence
  Synthetic oligonucleotide: CBLB-5753
ggugguaauggcacgggau

SEQ ID NO: 35982 - RNA, 20 nt, Artificial Sequence
  Synthetic oligonucleotide: CBLB-5754
aggugguaauggcacgggau

SEQ ID NO: 35983 - RNA, 21 nt, Artificial Sequence
  Synthetic oligonucleotide: CBLB-5755
caggugguaauggcacgggau

SEQ ID NO: 35984 - RNA, 22 nt, Artificial Sequence
  Synthetic oligonucleotide: CBLB-5756
gcaggugguaauggcacgggau

SEQ ID NO: 35985 - RNA, 23 nt, Artificial Sequence
  Synthetic oligonucleotide: CBLB-5757
ggcaggugguaauggcacgggau

SEQ ID NO: 35986 - RNA, 24 nt, Artificial Sequence
  Synthetic oligonucleotide: CBLB-5758
uggcaggugguaauggcacgggau

SEQ ID NO: 35987 - RNA, 18 nt, Artificial Sequence
  Synthetic oligonucleotide: CBLB-5759
caggcuuagaugugggau

SEQ ID NO: 35988 - RNA, 19 nt, Artificial Sequence
  Synthetic oligonucleotide: CBLB-5760
gcaggcuuagaugugggau

SEQ ID NO: 35989 - RNA, 20 nt, Artificial Sequence
  Synthetic oligonucleotide: CBLB-5761
ggcaggcuuagaugugggau

SEQ ID NO: 35990 - RNA, 21 nt, Artificial Sequence
  Synthetic oligonucleotide: CBLB-5762
uggcaggcuuagaugugggau

SEQ ID NO: 35991 - RNA, 22 nt, Artificial Sequence
  Synthetic oligonucleotide: CBLB-5763
guggcaggcuuagaugugggau

SEQ ID NO: 35992 - RNA, 23 nt, Artificial Sequence
  Synthetic oligonucleotide: CBLB-5764
gguggcaggcuuagaugugggau

SEQ ID NO: 35993 - RNA, 24 nt, Artificial Sequence
  Synthetic oligonucleotide: CBLB-5765
ggguggcaggcuuagaugugggau

SEQ ID NO: 35994 - RNA, 18 nt, Artificial Sequence
  Synthetic oligonucleotide: CBLB-5766
agcaucugcuuuugugau

SEQ ID NO: 35995 - RNA, 19 nt, Artificial Sequence
  Synthetic oligonucleotide: CBLB-5767
cagcaucugcuuuugugau

SEQ ID NO: 35996 - RNA, 20 nt, Artificial Sequence
  Synthetic oligonucleotide: CBLB-5768
gcagcaucugcuuuugugau

SEQ ID NO: 35997 - RNA, 21 nt, Artificial Sequence
  Synthetic oligonucleotide: CBLB-5769
agcagcaucugcuuuugugau

SEQ ID NO: 35998 - RNA, 22 nt, Artificial Sequence
  Synthetic oligonucleotide: CBLB-5770
cagcagcaucugcuuuugugau

SEQ ID NO: 35999 - RNA, 23 nt, Artificial Sequence
  Synthetic oligonucleotide: CBLB-5771
ucagcagcaucugcuuuugugau

SEQ ID NO: 36000 - RNA, 24 nt, Artificial Sequence
  Synthetic oligonucleotide: CBLB-5772
uucagcagcaucugcuuuugugau

SEQ ID NO: 36001 - RNA, 18 nt, Artificial Sequence
  Synthetic oligonucleotide: CBLB-5773
gcuuuaacuucaucauau

SEQ ID NO: 36002 - RNA, 19 nt, Artificial Sequence
  Synthetic oligonucleotide: CBLB-5774
ugcuuuaacuucaucauau

SEQ ID NO: 36003 - RNA, 20 nt, Artificial Sequence
  Synthetic oligonucleotide: CBLB-5775
gugcuuuaacuucaucauau

SEQ ID NO: 36004 - RNA, 21 nt, Artificial Sequence
  Synthetic oligonucleotide: CBLB-5776
cgugcuuuaacuucaucauau

SEQ ID NO: 36005 - RNA, 22 nt, Artificial Sequence
  Synthetic oligonucleotide: CBLB-5777
ucgugcuuuaacuucaucauau

SEQ ID NO: 36006 - RNA, 23 nt, Artificial Sequence
  Synthetic oligonucleotide: CBLB-5778
gucgugcuuuaacuucaucauau

SEQ ID NO: 36007 - RNA, 24 nt, Artificial Sequence
  Synthetic oligonucleotide: CBLB-5779
agucgugcuuuaacuucaucauau

SEQ ID NO: 36008 - RNA, 18 nt, Artificial Sequence
  Synthetic oligonucleotide: CBLB-5780
ggggucuggcuggugccu

SEQ ID NO: 36009 - RNA, 19 nt, Artificial Sequence
  Synthetic oligonucleotide: CBLB-5781
gggggucuggcuggugccu

SEQ ID NO: 36010 - RNA, 20 nt, Artificial Sequence
  Synthetic oligonucleotide: CBLB-5782
agggggucuggcuggugccu

SEQ ID NO: 36011 - RNA, 21 nt, Artificial Sequence
  Synthetic oligonucleotide: CBLB-5783
uagggggucuggcuggugccu

SEQ ID NO: 36012 - RNA, 22 nt, Artificial Sequence
  Synthetic oligonucleotide: CBLB-5784
uuagggggucuggcuggugccu

SEQ ID NO: 36013 - RNA, 23 nt, Artificial Sequence
  Synthetic oligonucleotide: CBLB-5785
uuuagggggucuggcuggugccu

SEQ ID NO: 36014 - RNA, 24 nt, Artificial Sequence
  Synthetic oligonucleotide: CBLB-5786
guuuagggggucuggcuggugccu

SEQ ID NO: 36015 - RNA, 18 nt, Artificial Sequence
  Synthetic oligonucleotide: CBLB-5787
ccuggaugugucacagcu

SEQ ID NO: 36016 - RNA, 19 nt, Artificial Sequence
  Synthetic oligonucleotide: CBLB-5788
accuggaugugucacagcu

SEQ ID NO: 36017 - RNA, 20 nt, Artificial Sequence
  Synthetic oligonucleotide: CBLB-5789
aaccuggaugugucacagcu

SEQ ID NO: 36018 - RNA, 21 nt, Artificial Sequence
  Synthetic oligonucleotide: CBLB-5790
uaaccuggaugugucacagcu

SEQ ID NO: 36019 - RNA, 22 nt, Artificial Sequence
  Synthetic oligonucleotide: CBLB-5791
guaaccuggaugugucacagcu

SEQ ID NO: 36020 - RNA, 23 nt, Artificial Sequence
  Synthetic oligonucleotide: CBLB-5792
uguaaccuggaugugucacagcu

SEQ ID NO: 36021 - RNA, 24 nt, Artificial Sequence
  Synthetic oligonucleotide: CBLB-5793
auguaaccuggaugugucacagcu

SEQ ID NO: 36022 - RNA, 18 nt, Artificial Sequence
  Synthetic oligonucleotide: CBLB-5794
aaauucucggaggaugcu

SEQ ID NO: 36023 - RNA, 19 nt, Artificial Sequence
  Synthetic oligonucleotide: CBLB-5795
caaauucucggaggaugcu

SEQ ID NO: 36024 - RNA, 20 nt, Artificial Sequence
  Synthetic oligonucleotide: CBLB-5796
gcaaauucucggaggaugcu

SEQ ID NO: 36025 - RNA, 21 nt, Artificial Sequence
  Synthetic oligonucleotide: CBLB-5797
ggcaaauucucggaggaugcu

SEQ ID NO: 36026 - RNA, 22 nt, Artificial Sequence
  Synthetic oligonucleotide: CBLB-5798
aggcaaauucucggaggaugcu

SEQ ID NO: 36027 - RNA, 23 nt, Artificial Sequence
  Synthetic oligonucleotide: CBLB-5799
aaggcaaauucucggaggaugcu

SEQ ID NO: 36028 - RNA, 24 nt, Artificial Sequence
  Synthetic oligonucleotide: CBLB-5800
gaaggcaaauucucggaggaugcu

SEQ ID NO: 36029 - RNA, 18 nt, Artificial Sequence
  Synthetic oligonucleotide: CBLB-5801
caaaacucacuuuaugcu

SEQ ID NO: 36030 - RNA, 19 nt, Artificial Sequence
  Synthetic oligonucleotide: CBLB-5802
acaaaacucacuuuaugcu

SEQ ID NO: 36031 - RNA, 20 nt, Artificial Sequence
  Synthetic oligonucleotide: CBLB-3363
aacaaaacucacuuuaugcu

SEQ ID NO: 36032 - RNA, 21 nt, Artificial Sequence
  Synthetic oligonucleotide: CBLB-5803
caacaaaacucacuuuaugcu

SEQ ID NO: 36033 - RNA, 22 nt, Artificial Sequence
  Synthetic oligonucleotide: CBLB-5804
ucaacaaaacucacuuuaugcu

SEQ ID NO: 36034 - RNA, 23 nt, Artificial Sequence
  Synthetic oligonucleotide: CBLB-5805
uucaacaaaacucacuuuaugcu

SEQ ID NO: 36035 - RNA, 24 nt, Artificial Sequence
  Synthetic oligonucleotide: CBLB-5806
auucaacaaaacucacuuuaugcu

SEQ ID NO: 36036 - RNA, 18 nt, Artificial Sequence
  Synthetic oligonucleotide: CBLB-5807
agaggcauuggcgggucu

SEQ ID NO: 36037 - RNA, 19 nt, Artificial Sequence
  Synthetic oligonucleotide: CBLB-5808
aagaggcauuggcgggucu

SEQ ID NO: 36038 - RNA, 20 nt, Artificial Sequence
  Synthetic oligonucleotide: CBLB-5809
caagaggcauuggcgggucu

SEQ ID NO: 36039 - RNA, 21 nt, Artificial Sequence
  Synthetic oligonucleotide: CBLB-5810
ucaagaggcauuggcgggucu

SEQ ID NO: 36040 - RNA, 22 nt, Artificial Sequence
  Synthetic oligonucleotide: CBLB-5811
uucaagaggcauuggcgggucu

SEQ ID NO: 36041 - RNA, 23 nt, Artificial Sequence
  Synthetic oligonucleotide: CBLB-5812
cuucaagaggcauuggcgggucu

SEQ ID NO: 36042 - RNA, 24 nt, Artificial Sequence
  Synthetic oligonucleotide: CBLB-5813
gcuucaagaggcauuggcgggucu

SEQ ID NO: 36043 - RNA, 18 nt, Artificial Sequence
  Synthetic oligonucleotide: CBLB-5814
ggagggaaggcaaauucu

SEQ ID NO: 36044 - RNA, 19 nt, Artificial Sequence
  Synthetic oligonucleotide: CBLB-5815
aggagggaaggcaaauucu

SEQ ID NO: 36045 - RNA, 20 nt, Artificial Sequence
  Synthetic oligonucleotide: CBLB-3368
gaggagggaaggcaaauucu

SEQ ID NO: 36046 - RNA, 21 nt, Artificial Sequence
  Synthetic oligonucleotide: CBLB-5816
ggaggagggaaggcaaauucu

SEQ ID NO: 36047 - RNA, 22 nt, Artificial Sequence
  Synthetic oligonucleotide: CBLB-5817
uggaggagggaaggcaaauucu

SEQ ID NO: 36048 - RNA, 23 nt, Artificial Sequence
  Synthetic oligonucleotide: CBLB-5818
cuggaggagggaaggcaaauucu

SEQ ID NO: 36049 - RNA, 24 nt, Artificial Sequence
  Synthetic oligonucleotide: CBLB-5819
acuggaggagggaaggcaaauucu

SEQ ID NO: 36050 - RNA, 18 nt, Artificial Sequence
  Synthetic oligonucleotide: CBLB-5820
ggauguuugauuucuucu

SEQ ID NO: 36051 - RNA, 19 nt, Artificial Sequence
  Synthetic oligonucleotide: CBLB-5821
gggauguuugauuucuucu

SEQ ID NO: 36052 - RNA, 20 nt, Artificial Sequence
  Synthetic oligonucleotide: CBLB-5822
agggauguuugauuucuucu

SEQ ID NO: 36053 - RNA, 21 nt, Artificial Sequence
  Synthetic oligonucleotide: CBLB-5823
cagggauguuugauuucuucu

SEQ ID NO: 36054 - RNA, 22 nt, Artificial Sequence
  Synthetic oligonucleotide: CBLB-5824
ucagggauguuugauuucuucu

SEQ ID NO: 36055 - RNA, 23 nt, Artificial Sequence
  Synthetic oligonucleotide: CBLB-5825
gucagggauguuugauuucuucu

SEQ ID NO: 36056 - RNA, 24 nt, Artificial Sequence
  Synthetic oligonucleotide: CBLB-5826
agucagggauguuugauuucuucu

SEQ ID NO: 36057 - RNA, 18 nt, Artificial Sequence
  Synthetic oligonucleotide: CBLB-5827
aggcuguggcuuucuucu

SEQ ID NO: 36058 - RNA, 19 nt, Artificial Sequence
  Synthetic oligonucleotide: CBLB-5828
caggcuguggcuuucuucu

SEQ ID NO: 36059 - RNA, 20 nt, Artificial Sequence
  Synthetic oligonucleotide: CBLB-5829
ucaggcuguggcuuucuucu

SEQ ID NO: 36060 - RNA, 21 nt, Artificial Sequence
  Synthetic oligonucleotide: CBLB-5830
gucaggcuguggcuuucuucu

SEQ ID NO: 36061 - RNA, 22 nt, Artificial Sequence
  Synthetic oligonucleotide: CBLB-5831
ggucaggcuguggcuuucuucu

SEQ ID NO: 36062 - RNA, 23 nt, Artificial Sequence
  Synthetic oligonucleotide: CBLB-5832
gggucaggcuguggcuuucuucu

SEQ ID NO: 36063 - RNA, 24 nt, Artificial Sequence
  Synthetic oligonucleotide: CBLB-5833
ugggucaggcuguggcuuucuucu

SEQ ID NO: 36064 - RNA, 18 nt, Artificial Sequence
  Synthetic oligonucleotide: CBLB-5834
cugggucucuuguuuucu

SEQ ID NO: 36065 - RNA, 19 nt, Artificial Sequence
  Synthetic oligonucleotide: CBLB-5835
acugggucucuuguuuucu

SEQ ID NO: 36066 - RNA, 20 nt, Artificial Sequence
  Synthetic oligonucleotide: CBLB-5836
uacugggucucuuguuuucu

SEQ ID NO: 36067 - RNA, 21 nt, Artificial Sequence
  Synthetic oligonucleotide: CBLB-5837
cuacugggucucuuguuuucu

SEQ ID NO: 36068 - RNA, 22 nt, Artificial Sequence
  Synthetic oligonucleotide: CBLB-5838
ucuacugggucucuuguuuucu

SEQ ID NO: 36069 - RNA, 23 nt, Artificial Sequence
  Synthetic oligonucleotide: CBLB-5839
cucuacugggucucuuguuuucu

SEQ ID NO: 36070 - RNA, 24 nt, Artificial Sequence
  Synthetic oligonucleotide: CBLB-5840
ccucuacugggucucuuguuuucu

SEQ ID NO: 36071 - RNA, 18 nt, Artificial Sequence
  Synthetic oligonucleotide: CBLB-5841
uuaaauauaugcuuaagu

SEQ ID NO: 36072 - RNA, 19 nt, Artificial Sequence
  Synthetic oligonucleotide: CBLB-5842
uuuaaauauaugcuuaagu

SEQ ID NO: 36073 - RNA, 20 nt, Artificial Sequence
  Synthetic oligonucleotide: CBLB-5843
cuuuaaauauaugcuuaagu

SEQ ID NO: 36074 - RNA, 21 nt, Artificial Sequence
  Synthetic oligonucleotide: CBLB-5844
ccuuuaaauauaugcuuaagu

SEQ ID NO: 36075 - RNA, 22 nt, Artificial Sequence
  Synthetic oligonucleotide: CBLB-5845
cccuuuaaauauaugcuuaagu

SEQ ID NO: 36076 - RNA, 23 nt, Artificial Sequence
  Synthetic oligonucleotide: CBLB-5846
acccuuuaaauauaugcuuaagu

SEQ ID NO: 36077 - RNA, 24 nt, Artificial Sequence
  Synthetic oligonucleotide: CBLB-5847
uacccuuuaaauauaugcuuaagu

SEQ ID NO: 36078 - RNA, 18 nt, Artificial Sequence
  Synthetic oligonucleotide: CBLB-5848
cuuuggauugucccgagu

SEQ ID NO: 36079 - RNA, 19 nt, Artificial Sequence
  Synthetic oligonucleotide: CBLB-5849
gcuuuggauugucccgagu

SEQ ID NO: 36080 - RNA, 20 nt, Artificial Sequence
  Synthetic oligonucleotide: CBLB-3373
ugcuuuggauugucccgagu

SEQ ID NO: 36081 - RNA, 21 nt, Artificial Sequence
  Synthetic oligonucleotide: CBLB-5850
augcuuuggauugucccgagu

SEQ ID NO: 36082 - RNA, 22 nt, Artificial Sequence
  Synthetic oligonucleotide: CBLB-5851
caugcuuuggauugucccgagu

SEQ ID NO: 36083 - RNA, 23 nt, Artificial Sequence
  Synthetic oligonucleotide: CBLB-5852
ccaugcuuuggauugucccgagu

SEQ ID NO: 36084 - RNA, 24 nt, Artificial Sequence
  Synthetic oligonucleotide: CBLB-5853
accaugcuuuggauugucccgagu

SEQ ID NO: 36085 - RNA, 18 nt, Artificial Sequence
  Synthetic oligonucleotide: CBLB-5854
cuaugccuugcaggaggu

SEQ ID NO: 36086 - RNA, 19 nt, Artificial Sequence
  Synthetic oligonucleotide: CBLB-5855
acuaugccuugcaggaggu

SEQ ID NO: 36087 - RNA, 20 nt, Artificial Sequence
  Synthetic oligonucleotide: CBLB-3380
gacuaugccuugcaggaggu

SEQ ID NO: 36088 - RNA, 21 nt, Artificial Sequence
  Synthetic oligonucleotide: CBLB-5856
agacuaugccuugcaggaggu

SEQ ID NO: 36089 - RNA, 22 nt, Artificial Sequence
  Synthetic oligonucleotide: CBLB-5857
gagacuaugccuugcaggaggu

SEQ ID NO: 36090 - RNA, 23 nt, Artificial Sequence
  Synthetic oligonucleotide: CBLB-5858
ugagacuaugccuugcaggaggu

SEQ ID NO: 36091 - RNA, 24 nt, Artificial Sequence
  Synthetic oligonucleotide: CBLB-5859
augagacuaugccuugcaggaggu

SEQ ID NO: 36092 - RNA, 18 nt, Artificial Sequence
  Synthetic oligonucleotide: CBLB-5860
gcaggaggugggggaggu

SEQ ID NO: 36093 - RNA, 19 nt, Artificial Sequence
  Synthetic oligonucleotide: CBLB-5861
ugcaggaggugggggaggu

SEQ ID NO: 36094 - RNA, 20 nt, Artificial Sequence
  Synthetic oligonucleotide: CBLB-3381
uugcaggaggugggggaggu

SEQ ID NO: 36095 - RNA, 21 nt, Artificial Sequence
  Synthetic oligonucleotide: CBLB-5862
cuugcaggaggugggggaggu

SEQ ID NO: 36096 - RNA, 22 nt, Artificial Sequence
  Synthetic oligonucleotide: CBLB-5863
ccuugcaggaggugggggaggu

SEQ ID NO: 36097 - RNA, 23 nt, Artificial Sequence
  Synthetic oligonucleotide: CBLB-5864
gccuugcaggaggugggggaggu

SEQ ID NO: 36098 - RNA, 24 nt, Artificial Sequence
  Synthetic oligonucleotide: CBLB-5865
ugccuugcaggaggugggggaggu

SEQ ID NO: 36099 - RNA, 18 nt, Artificial Sequence
  Synthetic oligonucleotide: CBLB-5866
uccgcauaagcacugggu

SEQ ID NO: 36100 - RNA, 19 nt, Artificial Sequence
  Synthetic oligonucleotide: CBLB-5867
uuccgcauaagcacugggu

SEQ ID NO: 36101 - RNA, 20 nt, Artificial Sequence
  Synthetic oligonucleotide: CBLB-5868
uuuccgcauaagcacugggu

SEQ ID NO: 36102 - RNA, 21 nt, Artificial Sequence
  Synthetic oligonucleotide: CBLB-5869
guuuccgcauaagcacugggu

SEQ ID NO: 36103 - RNA, 22 nt, Artificial Sequence
  Synthetic oligonucleotide: CBLB-5870
uguuuccgcauaagcacugggu

SEQ ID NO: 36104 - RNA, 23 nt, Artificial Sequence
  Synthetic oligonucleotide: CBLB-5871
guguuuccgcauaagcacugggu

SEQ ID NO: 36105 - RNA, 24 nt, Artificial Sequence
  Synthetic oligonucleotide: CBLB-5872
uguguuuccgcauaagcacugggu

SEQ ID NO: 36106 - RNA, 18 nt, Artificial Sequence
  Synthetic oligonucleotide: CBLB-5873
uuuaacuucaucauaugu

SEQ ID NO: 36107 - RNA, 19 nt, Artificial Sequence
  Synthetic oligonucleotide: CBLB-5874
cuuuaacuucaucauaugu

SEQ ID NO: 36108 - RNA, 20 nt, Artificial Sequence
  Synthetic oligonucleotide: CBLB-5875
gcuuuaacuucaucauaugu

SEQ ID NO: 36109 - RNA, 21 nt, Artificial Sequence
  Synthetic oligonucleotide: CBLB-5876
ugcuuuaacuucaucauaugu

SEQ ID NO: 36110 - RNA, 22 nt, Artificial Sequence
  Synthetic oligonucleotide: CBLB-5877
gugcuuuaacuucaucauaugu

SEQ ID NO: 36111 - RNA, 23 nt, Artificial Sequence
  Synthetic oligonucleotide: CBLB-5878
cgugcuuuaacuucaucauaugu

SEQ ID NO: 36112 - RNA, 24 nt, Artificial Sequence
  Synthetic oligonucleotide: CBLB-5879
ucgugcuuuaacuucaucauaugu

SEQ ID NO: 36113 - RNA, 18 nt, Artificial Sequence
  Synthetic oligonucleotide: CBLB-5880
cauauuguuccuggaauu

SEQ ID NO: 36114 - RNA, 19 nt, Artificial Sequence
  Synthetic oligonucleotide: CBLB-5881
ucauauuguuccuggaauu

SEQ ID NO: 36115 - RNA, 20 nt, Artificial Sequence
  Synthetic oligonucleotide: CBLB-3391
uucauauuguuccuggaauu

SEQ ID NO: 36116 - RNA, 21 nt, Artificial Sequence
  Synthetic oligonucleotide: CBLB-5882
auucauauuguuccuggaauu

SEQ ID NO: 36117 - RNA, 22 nt, Artificial Sequence
  Synthetic oligonucleotide: CBLB-5883
aauucauauuguuccuggaauu

SEQ ID NO: 36118 - RNA, 23 nt, Artificial Sequence
  Synthetic oligonucleotide: CBLB-5884
uaauucauauuguuccuggaauu

SEQ ID NO: 36119 - RNA, 24 nt, Artificial Sequence
  Synthetic oligonucleotide: CBLB-5885
auaauucauauuguuccuggaauu

SEQ ID NO: 36120 - RNA, 18 nt, Artificial Sequence
  Synthetic oligonucleotide: CBLB-5886
augagaugguugugaauu

SEQ ID NO: 36121 - RNA, 19 nt, Artificial Sequence
  Synthetic oligonucleotide: CBLB-5887
aaugagaugguugugaauu

SEQ ID NO: 36122 - RNA, 20 nt, Artificial Sequence
  Synthetic oligonucleotide: CBLB-5888
caaugagaugguugugaauu

SEQ ID NO: 36123 - RNA, 21 nt, Artificial Sequence
  Synthetic oligonucleotide: CBLB-5889
acaaugagaugguugugaauu

SEQ ID NO: 36124 - RNA, 22 nt, Artificial Sequence
  Synthetic oligonucleotide: CBLB-5890
gacaaugagaugguugugaauu

SEQ ID NO: 36125 - RNA, 23 nt, Artificial Sequence
  Synthetic oligonucleotide: CBLB-5891
ugacaaugagaugguugugaauu

SEQ ID NO: 36126 - RNA, 24 nt, Artificial Sequence
  Synthetic oligonucleotide: CBLB-5892
augacaaugagaugguugugaauu

SEQ ID NO: 36127 - RNA, 18 nt, Artificial Sequence
  Synthetic oligonucleotide: CBLB-5893
ucccuggaauugaccauu

SEQ ID NO: 36128 - RNA, 19 nt, Artificial Sequence
  Synthetic oligonucleotide: CBLB-5894
cucccuggaauugaccauu

SEQ ID NO: 36129 - RNA, 20 nt, Artificial Sequence
  Synthetic oligonucleotide: CBLB-3393
ucucccuggaauugaccauu

SEQ ID NO: 36130 - RNA, 21 nt, Artificial Sequence
  Synthetic oligonucleotide: CBLB-5895
aucucccuggaauugaccauu

SEQ ID NO: 36131 - RNA, 22 nt, Artificial Sequence
  Synthetic oligonucleotide: CBLB-5896
uaucucccuggaauugaccauu

SEQ ID NO: 36132 - RNA, 23 nt, Artificial Sequence
  Synthetic oligonucleotide: CBLB-5897
uuaucucccuggaauugaccauu

SEQ ID NO: 36133 - RNA, 24 nt, Artificial Sequence
  Synthetic oligonucleotide: CBLB-5898
guuaucucccuggaauugaccauu

SEQ ID NO: 36134 - RNA, 18 nt, Artificial Sequence
  Synthetic oligonucleotide: CBLB-5899
ucaaagggguccacgauu

SEQ ID NO: 36135 - RNA, 19 nt, Artificial Sequence
  Synthetic oligonucleotide: CBLB-5900
aucaaagggguccacgauu

SEQ ID NO: 36136 - RNA, 20 nt, Artificial Sequence
  Synthetic oligonucleotide: CBLB-5901
gaucaaagggguccacgauu

SEQ ID NO: 36137 - RNA, 21 nt, Artificial Sequence
  Synthetic oligonucleotide: CBLB-5902
ggaucaaagggguccacgauu

SEQ ID NO: 36138 - RNA, 22 nt, Artificial Sequence
  Synthetic oligonucleotide: CBLB-5903
uggaucaaagggguccacgauu

SEQ ID NO: 36139 - RNA, 23 nt, Artificial Sequence
  Synthetic oligonucleotide: CBLB-5904
uuggaucaaagggguccacgauu

SEQ ID NO: 36140 - RNA, 24 nt, Artificial Sequence
  Synthetic oligonucleotide: CBLB-5905
cuuggaucaaagggguccacgauu

SEQ ID NO: 36141 - RNA, 18 nt, Artificial Sequence
  Synthetic oligonucleotide: CBLB-5906
ggcaacuucgacauuauu

SEQ ID NO: 36142 - RNA, 19 nt, Artificial Sequence
  Synthetic oligonucleotide: CBLB-5907
gggcaacuucgacauuauu

SEQ ID NO: 36143 - RNA, 20 nt, Artificial Sequence
  Synthetic oligonucleotide: CBLB-5908
cgggcaacuucgacauuauu

SEQ ID NO: 36144 - RNA, 21 nt, Artificial Sequence
  Synthetic oligonucleotide: CBLB-5909
ccgggcaacuucgacauuauu

SEQ ID NO: 36145 - RNA, 22 nt, Artificial Sequence
  Synthetic oligonucleotide: CBLB-5910
uccgggcaacuucgacauuauu

SEQ ID NO: 36146 - RNA, 23 nt, Artificial Sequence
  Synthetic oligonucleotide: CBLB-5911
cuccgggcaacuucgacauuauu

SEQ ID NO: 36147 - RNA, 24 nt, Artificial Sequence
  Synthetic oligonucleotide: CBLB-5912
gcuccgggcaacuucgacauuauu

SEQ ID NO: 36148 - RNA, 18 nt, Artificial Sequence
  Synthetic oligonucleotide: CBLB-5913
uguuucuaguuuuaccuu

SEQ ID NO: 36149 - RNA, 19 nt, Artificial Sequence
  Synthetic oligonucleotide: CBLB-5914
auguuucuaguuuuaccuu

SEQ ID NO: 36150 - RNA, 20 nt, Artificial Sequence
  Synthetic oligonucleotide: CBLB-5915
cauguuucuaguuuuaccuu

SEQ ID NO: 36151 - RNA, 21 nt, Artificial Sequence
  Synthetic oligonucleotide: CBLB-5916
ccauguuucuaguuuuaccuu

SEQ ID NO: 36152 - RNA, 22 nt, Artificial Sequence
  Synthetic oligonucleotide: CBLB-5917
cccauguuucuaguuuuaccuu

SEQ ID NO: 36153 - RNA, 23 nt, Artificial Sequence
  Synthetic oligonucleotide: CBLB-5918
acccauguuucuaguuuuaccuu

SEQ ID NO: 36154 - RNA, 24 nt, Artificial Sequence
  Synthetic oligonucleotide: CBLB-5919
aacccauguuucuaguuuuaccuu

SEQ ID NO: 36155 - RNA, 18 nt, Artificial Sequence
  Synthetic oligonucleotide: CBLB-5920
gguggaggaggaucucuu

SEQ ID NO: 36156 - RNA, 19 nt, Artificial Sequence
  Synthetic oligonucleotide: CBLB-5921
cgguggaggaggaucucuu

SEQ ID NO: 36157 - RNA, 20 nt, Artificial Sequence
  Synthetic oligonucleotide: CBLB-5922
gcgguggaggaggaucucuu

SEQ ID NO: 36158 - RNA, 21 nt, Artificial Sequence
  Synthetic oligonucleotide: CBLB-5923
ggcgguggaggaggaucucuu

SEQ ID NO: 36159 - RNA, 22 nt, Artificial Sequence
  Synthetic oligonucleotide: CBLB-5924
uggcgguggaggaggaucucuu

SEQ ID NO: 36160 - RNA, 23 nt, Artificial Sequence
  Synthetic oligonucleotide: CBLB-5925
guggcgguggaggaggaucucuu

SEQ ID NO: 36161 - RNA, 24 nt, Artificial Sequence
  Synthetic oligonucleotide: CBLB-5926
gguggcgguggaggaggaucucuu

SEQ ID NO: 36162 - RNA, 18 nt, Artificial Sequence
  Synthetic oligonucleotide: CBLB-5927
ucgcugugauuccagguu

SEQ ID NO: 36163 - RNA, 19 nt, Artificial Sequence
  Synthetic oligonucleotide: CBLB-5928
cucgcugugauuccagguu

SEQ ID NO: 36164 - RNA, 20 nt, Artificial Sequence
  Synthetic oligonucleotide: CBLB-5929
acucgcugugauuccagguu

SEQ ID NO: 36165 - RNA, 21 nt, Artificial Sequence
  Synthetic oligonucleotide: CBLB-5930
aacucgcugugauuccagguu

SEQ ID NO: 36166 - RNA, 22 nt, Artificial Sequence
  Synthetic oligonucleotide: CBLB-5931
gaacucgcugugauuccagguu

SEQ ID NO: 36167 - RNA, 23 nt, Artificial Sequence
  Synthetic oligonucleotide: CBLB-5932
ugaacucgcugugauuccagguu

SEQ ID NO: 36168 - RNA, 24 nt, Artificial Sequence
  Synthetic oligonucleotide: CBLB-5933
uugaacucgcugugauuccagguu

SEQ ID NO: 36169 - RNA, 18 nt, Artificial Sequence
  Synthetic oligonucleotide: CBLB-5934
uccugcgcggucgugguu

SEQ ID NO: 36170 - RNA, 19 nt, Artificial Sequence
  Synthetic oligonucleotide: CBLB-5935
guccugcgcggucgugguu

SEQ ID NO: 36171 - RNA, 20 nt, Artificial Sequence
  Synthetic oligonucleotide: CBLB-5936
aguccugcgcggucgugguu

SEQ ID NO: 36172 - RNA, 21 nt, Artificial Sequence
  Synthetic oligonucleotide: CBLB-5937
caguccugcgcggucgugguu

SEQ ID NO: 36173 - RNA, 22 nt, Artificial Sequence
  Synthetic oligonucleotide: CBLB-5938
gcaguccugcgcggucgugguu

SEQ ID NO: 36174 - RNA, 23 nt, Artificial Sequence
  Synthetic oligonucleotide: CBLB-5939
ugcaguccugcgcggucgugguu

SEQ ID NO: 36175 - RNA, 24 nt, Artificial Sequence
  Synthetic oligonucleotide: CBLB-5940
gugcaguccugcgcggucgugguu

SEQ ID NO: 36176 - RNA, 18 nt, Artificial Sequence
  Synthetic oligonucleotide: CBLB-5941
uugaaauaagggcuuguu

SEQ ID NO: 36177 - RNA, 19 nt, Artificial Sequence
  Synthetic oligonucleotide: CBLB-5942
cuugaaauaagggcuuguu

SEQ ID NO: 36178 - RNA, 20 nt, Artificial Sequence
  Synthetic oligonucleotide: CBLB-5943
gcuugaaauaagggcuuguu

SEQ ID NO: 36179 - RNA, 21 nt, Artificial Sequence
  Synthetic oligonucleotide: CBLB-5944
ggcuugaaauaagggcuuguu

SEQ ID NO: 36180 - RNA, 22 nt, Artificial Sequence
  Synthetic oligonucleotide: CBLB-5945
gggcuugaaauaagggcuuguu

SEQ ID NO: 36181 - RNA, 23 nt, Artificial Sequence
  Synthetic oligonucleotide: CBLB-5946
agggcuugaaauaagggcuuguu

SEQ ID NO: 36182 - RNA, 24 nt, Artificial Sequence
  Synthetic oligonucleotide: CBLB-5947
cagggcuugaaauaagggcuuguu

SEQ ID NO: 36183 - RNA, 18 nt, Artificial Sequence
  Synthetic oligonucleotide: CBLB-5948
auauuguuccuggaauuu

SEQ ID NO: 36184 - RNA, 19 nt, Artificial Sequence
  Synthetic oligonucleotide: CBLB-5949
cauauuguuccuggaauuu

SEQ ID NO: 36185 - RNA, 20 nt, Artificial Sequence
  Synthetic oligonucleotide: CBLB-3404
ucauauuguuccuggaauuu

SEQ ID NO: 36186 - RNA, 21 nt, Artificial Sequence
  Synthetic oligonucleotide: CBLB-5950
uucauauuguuccuggaauuu

SEQ ID NO: 36187 - RNA, 22 nt, Artificial Sequence
  Synthetic oligonucleotide: CBLB-5951
auucauauuguuccuggaauuu

SEQ ID NO: 36188 - RNA, 23 nt, Artificial Sequence
  Synthetic oligonucleotide: CBLB-5952
aauucauauuguuccuggaauuu

SEQ ID NO: 36189 - RNA, 24 nt, Artificial Sequence
  Synthetic oligonucleotide: CBLB-5953
uaauucauauuguuccuggaauuu

SEQ ID NO: 36190 - RNA, 18 nt, Artificial Sequence
  Synthetic oligonucleotide: CBLB-5954
uaaaucaauuguugauuu

SEQ ID NO: 36191 - RNA, 19 nt, Artificial Sequence
  Synthetic oligonucleotide: CBLB-5955
uuaaaucaauuguugauuu

SEQ ID NO: 36192 - RNA, 20 nt, Artificial Sequence
  Synthetic oligonucleotide: CBLB-5956
guuaaaucaauuguugauuu

SEQ ID NO: 36193 - RNA, 21 nt, Artificial Sequence
  Synthetic oligonucleotide: CBLB-5957
aguuaaaucaauuguugauuu

SEQ ID NO: 36194 - RNA, 22 nt, Artificial Sequence
  Synthetic oligonucleotide: CBLB-5958
aaguuaaaucaauuguugauuu

SEQ ID NO: 36195 - RNA, 23 nt, Artificial Sequence
  Synthetic oligonucleotide: CBLB-5959
caaguuaaaucaauuguugauuu

SEQ ID NO: 36196 - RNA, 24 nt, Artificial Sequence
  Synthetic oligonucleotide: CBLB-5960
gcaaguuaaaucaauuguugauuu

SEQ ID NO: 36197 - RNA, 18 nt, Artificial Sequence
  Synthetic oligonucleotide: CBLB-5961
cgcugugauuccagguuu

SEQ ID NO: 36198 - RNA, 19 nt, Artificial Sequence
  Synthetic oligonucleotide: CBLB-5962
ucgcugugauuccagguuu

SEQ ID NO: 36199 - RNA, 20 nt, Artificial Sequence
  Synthetic oligonucleotide: CBLB-3407
cucgcugugauuccagguuu

SEQ ID NO: 36200 - RNA, 21 nt, Artificial Sequence
  Synthetic oligonucleotide: CBLB-5963
acucgcugugauuccagguuu

SEQ ID NO: 36201 - RNA, 22 nt, Artificial Sequence
  Synthetic oligonucleotide: CBLB-5964
aacucgcugugauuccagguuu

SEQ ID NO: 36202 - RNA, 23 nt, Artificial Sequence
  Synthetic oligonucleotide: CBLB-5965
gaacucgcugugauuccagguuu

SEQ ID NO: 36203 - RNA, 24 nt, Artificial Sequence
  Synthetic oligonucleotide: CBLB-5966
ugaacucgcugugauuccagguuu

SEQ ID NO: 36204 - RNA, 18 nt, Artificial Sequence
  Synthetic oligonucleotide: CBLB-5967
ccugcgcggucgugguuu

SEQ ID NO: 36205 - RNA, 19 nt, Artificial Sequence
  Synthetic oligonucleotide: CBLB-5968
uccugcgcggucgugguuu

SEQ ID NO: 36206 - RNA, 20 nt, Artificial Sequence
  Synthetic oligonucleotide: CBLB-3408
guccugcgcggucgugguuu

SEQ ID NO: 36207 - RNA, 21 nt, Artificial Sequence
  Synthetic oligonucleotide: CBLB-5969
aguccugcgcggucgugguuu

SEQ ID NO: 36208 - RNA, 22 nt, Artificial Sequence
  Synthetic oligonucleotide: CBLB-5970
caguccugcgcggucgugguuu

SEQ ID NO: 36209 - RNA, 23 nt, Artificial Sequence
  Synthetic oligonucleotide: CBLB-5971
gcaguccugcgcggucgugguuu

SEQ ID NO: 36210 - RNA, 24 nt, Artificial Sequence
  Synthetic oligonucleotide: CBLB-5972
ugcaguccugcgcggucgugguuu

SEQ ID NO: 36211 - RNA, 18 nt, Artificial Sequence
  Synthetic oligonucleotide: CBLB-5973
aagauaagggacaguuuu

SEQ ID NO: 36212 - RNA, 19 nt, Artificial Sequence
  Synthetic oligonucleotide: CBLB-5974
gaagauaagggacaguuuu

SEQ ID NO: 36213 - RNA, 20 nt, Artificial Sequence
  Synthetic oligonucleotide: CBLB-5975
ugaagauaagggacaguuuu

SEQ ID NO: 36214 - RNA, 21 nt, Artificial Sequence
  Synthetic oligonucleotide: CBLB-5976
cugaagauaagggacaguuuu

SEQ ID NO: 36215 - RNA, 22 nt, Artificial Sequence
  Synthetic oligonucleotide: CBLB-5977
acugaagauaagggacaguuuu

SEQ ID NO: 36216 - RNA, 23 nt, Artificial Sequence
  Synthetic oligonucleotide: CBLB-5978
gacugaagauaagggacaguuuu

SEQ ID NO: 36217 - RNA, 24 nt, Artificial Sequence
  Synthetic oligonucleotide: CBLB-5979
ugacugaagauaagggacaguuuu

SEQ ID NO: 36218 - RNA, 18 nt, Artificial Sequence
  Synthetic oligonucleotide: CBLB-5980
gaacuguagacaccaaaa

SEQ ID NO: 36219 - RNA, 19 nt, Artificial Sequence
  Synthetic oligonucleotide: CBLB-5981
agaacuguagacaccaaaa

SEQ ID NO: 36220 - RNA, 20 nt, Artificial Sequence
  Synthetic oligonucleotide: CBLB-3015
cagaacuguagacaccaaaa

SEQ ID NO: 36221 - RNA, 21 nt, Artificial Sequence
  Synthetic oligonucleotide: CBLB-5982
ccagaacuguagacaccaaaa

SEQ ID NO: 36222 - RNA, 22 nt, Artificial Sequence
  Synthetic oligonucleotide: CBLB-5983
gccagaacuguagacaccaaaa

SEQ ID NO: 36223 - RNA, 23 nt, Artificial Sequence
  Synthetic oligonucleotide: CBLB-5984
agccagaacuguagacaccaaaa

SEQ ID NO: 36224 - RNA, 24 nt, Artificial Sequence
  Synthetic oligonucleotide: CBLB-5985
cagccagaacuguagacaccaaaa

SEQ ID NO: 36225 - RNA, 18 nt, Artificial Sequence
  Synthetic oligonucleotide: CBLB-5986
agaacuguagacaccaaa

SEQ ID NO: 36226 - RNA, 19 nt, Artificial Sequence
  Synthetic oligonucleotide: CBLB-5987
cagaacuguagacaccaaa

SEQ ID NO: 36227 - RNA, 20 nt, Artificial Sequence
  Synthetic oligonucleotide: CBLB-5988
ccagaacuguagacaccaaa

SEQ ID NO: 36228 - RNA, 21 nt, Artificial Sequence
  Synthetic oligonucleotide: CBLB-5989
gccagaacuguagacaccaaa

SEQ ID NO: 36229 - RNA, 22 nt, Artificial Sequence
  Synthetic oligonucleotide: CBLB-5990
agccagaacuguagacaccaaa

SEQ ID NO: 36230 - RNA, 23 nt, Artificial Sequence
  Synthetic oligonucleotide: CBLB-5991
cagccagaacuguagacaccaaa

SEQ ID NO: 36231 - RNA, 24 nt, Artificial Sequence
  Synthetic oligonucleotide: CBLB-5992
gcagccagaacuguagacaccaaa

SEQ ID NO: 36232 - RNA, 18 nt, Artificial Sequence
  Synthetic oligonucleotide: CBLB-5993
gauuguaaguaugagaaa

SEQ ID NO: 36233 - RNA, 19 nt, Artificial Sequence
  Synthetic oligonucleotide: CBLB-5994
ggauuguaaguaugagaaa

SEQ ID NO: 36234 - RNA, 20 nt, Artificial Sequence
  Synthetic oligonucleotide: CBLB-3020
aggauuguaaguaugagaaa

SEQ ID NO: 36235 - RNA, 21 nt, Artificial Sequence
  Synthetic oligonucleotide: CBLB-5995
aaggauuguaaguaugagaaa

SEQ ID NO: 36236 - RNA, 22 nt, Artificial Sequence
  Synthetic oligonucleotide: CBLB-5996
gaaggauuguaaguaugagaaa

SEQ ID NO: 36237 - RNA, 23 nt, Artificial Sequence
  Synthetic oligonucleotide: CBLB-5997
ggaaggauuguaaguaugagaaa

SEQ ID NO: 36238 - RNA, 24 nt, Artificial Sequence
  Synthetic oligonucleotide: CBLB-5998
gggaaggauuguaaguaugagaaa

SEQ ID NO: 36239 - RNA, 18 nt, Artificial Sequence
  Synthetic oligonucleotide: CBLB-5999
cugucguugugaaauaaa

SEQ ID NO: 36240 - RNA, 19 nt, Artificial Sequence
  Synthetic oligonucleotide: CBLB-6000
ucugucguugugaaauaaa

SEQ ID NO: 36241 - RNA, 20 nt, Artificial Sequence
  Synthetic oligonucleotide: CBLB-3022
uucugucguugugaaauaaa

SEQ ID NO: 36242 - RNA, 21 nt, Artificial Sequence
  Synthetic oligonucleotide: CBLB-6001
uuucugucguugugaaauaaa

SEQ ID NO: 36243 - RNA, 22 nt, Artificial Sequence
  Synthetic oligonucleotide: CBLB-6002
cuuucugucguugugaaauaaa

SEQ ID NO: 36244 - RNA, 23 nt, Artificial Sequence
  Synthetic oligonucleotide: CBLB-6003
ccuuucugucguugugaaauaaa

SEQ ID NO: 36245 - RNA, 24 nt, Artificial Sequence
  Synthetic oligonucleotide: CBLB-6004
cccuuucugucguugugaaauaaa

SEQ ID NO: 36246 - RNA, 18 nt, Artificial Sequence
  Synthetic oligonucleotide: CBLB-6005
gcaugguucuucacucaa

SEQ ID NO: 36247 - RNA, 19 nt, Artificial Sequence
  Synthetic oligonucleotide: CBLB-6006
agcaugguucuucacucaa

SEQ ID NO: 36248 - RNA, 20 nt, Artificial Sequence
  Synthetic oligonucleotide: CBLB-6007
aagcaugguucuucacucaa

SEQ ID NO: 36249 - RNA, 21 nt, Artificial Sequence
  Synthetic oligonucleotide: CBLB-6008
aaagcaugguucuucacucaa

SEQ ID NO: 36250 - RNA, 22 nt, Artificial Sequence
  Synthetic oligonucleotide: CBLB-6009
caaagcaugguucuucacucaa

SEQ ID NO: 36251 - RNA, 23 nt, Artificial Sequence
  Synthetic oligonucleotide: CBLB-6010
ccaaagcaugguucuucacucaa

SEQ ID NO: 36252 - RNA, 24 nt, Artificial Sequence
  Synthetic oligonucleotide: CBLB-6011
uccaaagcaugguucuucacucaa

SEQ ID NO: 36253 - RNA, 18 nt, Artificial Sequence
  Synthetic oligonucleotide: CBLB-6012
agcgaguucaaaugucaa

SEQ ID NO: 36254 - RNA, 19 nt, Artificial Sequence
  Synthetic oligonucleotide: CBLB-6013
cagcgaguucaaaugucaa

SEQ ID NO: 36255 - RNA, 20 nt, Artificial Sequence
  Synthetic oligonucleotide: CBLB-3036
acagcgaguucaaaugucaa

SEQ ID NO: 36256 - RNA, 21 nt, Artificial Sequence
  Synthetic oligonucleotide: CBLB-6014
cacagcgaguucaaaugucaa

SEQ ID NO: 36257 - RNA, 22 nt, Artificial Sequence
  Synthetic oligonucleotide: CBLB-6015
ucacagcgaguucaaaugucaa

SEQ ID NO: 36258 - RNA, 23 nt, Artificial Sequence
  Synthetic oligonucleotide: CBLB-6016
aucacagcgaguucaaaugucaa

SEQ ID NO: 36259 - RNA, 24 nt, Artificial Sequence
  Synthetic oligonucleotide: CBLB-6017
aaucacagcgaguucaaaugucaa

SEQ ID NO: 36260 - RNA, 18 nt, Artificial Sequence
  Synthetic oligonucleotide: CBLB-6018
ggauuguaaguaugagaa

SEQ ID NO: 36261 - RNA, 19 nt, Artificial Sequence
  Synthetic oligonucleotide: CBLB-6019
aggauuguaaguaugagaa

SEQ ID NO: 36262 - RNA, 20 nt, Artificial Sequence
  Synthetic oligonucleotide: CBLB-6020
aaggauuguaaguaugagaa

SEQ ID NO: 36263 - RNA, 21 nt, Artificial Sequence
  Synthetic oligonucleotide: CBLB-6021
gaaggauuguaaguaugagaa

SEQ ID NO: 36264 - RNA, 22 nt, Artificial Sequence
  Synthetic oligonucleotide: CBLB-6022
ggaaggauuguaaguaugagaa

SEQ ID NO: 36265 - RNA, 23 nt, Artificial Sequence
  Synthetic oligonucleotide: CBLB-6023
gggaaggauuguaaguaugagaa

SEQ ID NO: 36266 - RNA, 24 nt, Artificial Sequence
  Synthetic oligonucleotide: CBLB-6024
agggaaggauuguaaguaugagaa

SEQ ID NO: 36267 - RNA, 18 nt, Artificial Sequence
  Synthetic oligonucleotide: CBLB-6025
guugugaaauaaaaggaa

SEQ ID NO: 36268 - RNA, 19 nt, Artificial Sequence
  Synthetic oligonucleotide: CBLB-6026
cguugugaaauaaaaggaa

SEQ ID NO: 36269 - RNA, 20 nt, Artificial Sequence
  Synthetic oligonucleotide: CBLB-6027
ucguugugaaauaaaaggaa

SEQ ID NO: 36270 - RNA, 21 nt, Artificial Sequence
  Synthetic oligonucleotide: CBLB-6028
gucguugugaaauaaaaggaa

SEQ ID NO: 36271 - RNA, 22 nt, Artificial Sequence
  Synthetic oligonucleotide: CBLB-6029
ugucguugugaaauaaaaggaa

SEQ ID NO: 36272 - RNA, 23 nt, Artificial Sequence
  Synthetic oligonucleotide: CBLB-6030
cugucguugugaaauaaaaggaa

SEQ ID NO: 36273 - RNA, 24 nt, Artificial Sequence
  Synthetic oligonucleotide: CBLB-6031
ucugucguugugaaauaaaaggaa

SEQ ID NO: 36274 - RNA, 18 nt, Artificial Sequence
  Synthetic oligonucleotide: CBLB-6032
gggcucuauuuugcggaa

SEQ ID NO: 36275 - RNA, 19 nt, Artificial Sequence
  Synthetic oligonucleotide: CBLB-6033
ggggcucuauuuugcggaa

SEQ ID NO: 36276 - RNA, 20 nt, Artificial Sequence
  Synthetic oligonucleotide: CBLB-6034
uggggcucuauuuugcggaa

SEQ ID NO: 36277 - RNA, 21 nt, Artificial Sequence
  Synthetic oligonucleotide: CBLB-6035
uuggggcucuauuuugcggaa

SEQ ID NO: 36278 - RNA, 22 nt, Artificial Sequence
  Synthetic oligonucleotide: CBLB-6036
cuuggggcucuauuuugcggaa

SEQ ID NO: 36279 - RNA, 23 nt, Artificial Sequence
  Synthetic oligonucleotide: CBLB-6037
ccuuggggcucuauuuugcggaa

SEQ ID NO: 36280 - RNA, 24 nt, Artificial Sequence
  Synthetic oligonucleotide: CBLB-6038
gccuuggggcucuauuuugcggaa

SEQ ID NO: 36281 - RNA, 18 nt, Artificial Sequence
  Synthetic oligonucleotide: CBLB-6039
ccaauggucaccuuggaa

SEQ ID NO: 36282 - RNA, 19 nt, Artificial Sequence
  Synthetic oligonucleotide: CBLB-6040
uccaauggucaccuuggaa

SEQ ID NO: 36283 - RNA, 20 nt, Artificial Sequence
  Synthetic oligonucleotide: CBLB-6041
uuccaauggucaccuuggaa

SEQ ID NO: 36284 - RNA, 21 nt, Artificial Sequence
  Synthetic oligonucleotide: CBLB-6042
uuuccaauggucaccuuggaa

SEQ ID NO: 36285 - RNA, 22 nt, Artificial Sequence
  Synthetic oligonucleotide: CBLB-6043
uuuuccaauggucaccuuggaa

SEQ ID NO: 36286 - RNA, 23 nt, Artificial Sequence
  Synthetic oligonucleotide: CBLB-6044
cuuuuccaauggucaccuuggaa

SEQ ID NO: 36287 - RNA, 24 nt, Artificial Sequence
  Synthetic oligonucleotide: CBLB-6045
ucuuuuccaauggucaccuuggaa

SEQ ID NO: 36288 - RNA, 18 nt, Artificial Sequence
  Synthetic oligonucleotide: CBLB-6046
uggucacuguaugcugaa

SEQ ID NO: 36289 - RNA, 19 nt, Artificial Sequence
  Synthetic oligonucleotide: CBLB-6047
auggucacuguaugcugaa

SEQ ID NO: 36290 - RNA, 20 nt, Artificial Sequence
  Synthetic oligonucleotide: CBLB-3042
aauggucacuguaugcugaa

SEQ ID NO: 36291 - RNA, 21 nt, Artificial Sequence
  Synthetic oligonucleotide: CBLB-6048
uaauggucacuguaugcugaa

SEQ ID NO: 36292 - RNA, 22 nt, Artificial Sequence
  Synthetic oligonucleotide: CBLB-6049
auaauggucacuguaugcugaa

SEQ ID NO: 36293 - RNA, 23 nt, Artificial Sequence
  Synthetic oligonucleotide: CBLB-6050
gauaauggucacuguaugcugaa

SEQ ID NO: 36294 - RNA, 24 nt, Artificial Sequence
  Synthetic oligonucleotide: CBLB-6051
ugauaauggucacuguaugcugaa

SEQ ID NO: 36295 - RNA, 18 nt, Artificial Sequence
  Synthetic oligonucleotide: CBLB-6052
ugccuuugaagaggugaa

SEQ ID NO: 36296 - RNA, 19 nt, Artificial Sequence
  Synthetic oligonucleotide: CBLB-6053
augccuuugaagaggugaa

SEQ ID NO: 36297 - RNA, 20 nt, Artificial Sequence
  Synthetic oligonucleotide: CBLB-6054
uaugccuuugaagaggugaa

SEQ ID NO: 36298 - RNA, 21 nt, Artificial Sequence
  Synthetic oligonucleotide: CBLB-6055
uuaugccuuugaagaggugaa

SEQ ID NO: 36299 - RNA, 22 nt, Artificial Sequence
  Synthetic oligonucleotide: CBLB-6056
guuaugccuuugaagaggugaa

SEQ ID NO: 36300 - RNA, 23 nt, Artificial Sequence
  Synthetic oligonucleotide: CBLB-6057
gguuaugccuuugaagaggugaa

SEQ ID NO: 36301 - RNA, 24 nt, Artificial Sequence
  Synthetic oligonucleotide: CBLB-6058
ggguuaugccuuugaagaggugaa

SEQ ID NO: 36302 - RNA, 18 nt, Artificial Sequence
  Synthetic oligonucleotide: CBLB-6059
uaugaauuauauugugaa

SEQ ID NO: 36303 - RNA, 19 nt, Artificial Sequence
  Synthetic oligonucleotide: CBLB-6060
auaugaauuauauugugaa

SEQ ID NO: 36304 - RNA, 20 nt, Artificial Sequence
  Synthetic oligonucleotide: CBLB-6061
aauaugaauuauauugugaa

SEQ ID NO: 36305 - RNA, 21 nt, Artificial Sequence
  Synthetic oligonucleotide: CBLB-6062
caauaugaauuauauugugaa

SEQ ID NO: 36306 - RNA, 22 nt, Artificial Sequence
  Synthetic oligonucleotide: CBLB-6063
acaauaugaauuauauugugaa

SEQ ID NO: 36307 - RNA, 23 nt, Artificial Sequence
  Synthetic oligonucleotide: CBLB-6064
aacaauaugaauuauauugugaa

SEQ ID NO: 36308 - RNA, 24 nt, Artificial Sequence
  Synthetic oligonucleotide: CBLB-6065
gaacaauaugaauuauauugugaa

SEQ ID NO: 36309 - RNA, 18 nt, Artificial Sequence
  Synthetic oligonucleotide: CBLB-6066
ucugucguugugaaauaa

SEQ ID NO: 36310 - RNA, 19 nt, Artificial Sequence
  Synthetic oligonucleotide: CBLB-6067
uucugucguugugaaauaa

SEQ ID NO: 36311 - RNA, 20 nt, Artificial Sequence
  Synthetic oligonucleotide: CBLB-6068
uuucugucguugugaaauaa

SEQ ID NO: 36312 - RNA, 21 nt, Artificial Sequence
  Synthetic oligonucleotide: CBLB-6069
cuuucugucguugugaaauaa

SEQ ID NO: 36313 - RNA, 22 nt, Artificial Sequence
  Synthetic oligonucleotide: CBLB-6070
ccuuucugucguugugaaauaa

SEQ ID NO: 36314 - RNA, 23 nt, Artificial Sequence
  Synthetic oligonucleotide: CBLB-6071
cccuuucugucguugugaaauaa

SEQ ID NO: 36315 - RNA, 24 nt, Artificial Sequence
  Synthetic oligonucleotide: CBLB-6072
gcccuuucugucguugugaaauaa

SEQ ID NO: 36316 - RNA, 18 nt, Artificial Sequence
  Synthetic oligonucleotide: CBLB-6073
ugaaaaugucaaaacuaa

SEQ ID NO: 36317 - RNA, 19 nt, Artificial Sequence
  Synthetic oligonucleotide: CBLB-6074
gugaaaaugucaaaacuaa

SEQ ID NO: 36318 - RNA, 20 nt, Artificial Sequence
  Synthetic oligonucleotide: CBLB-6075
ggugaaaaugucaaaacuaa

SEQ ID NO: 36319 - RNA, 21 nt, Artificial Sequence
  Synthetic oligonucleotide: CBLB-6076
aggugaaaaugucaaaacuaa

SEQ ID NO: 36320 - RNA, 22 nt, Artificial Sequence
  Synthetic oligonucleotide: CBLB-6077
caggugaaaaugucaaaacuaa

SEQ ID NO: 36321 - RNA, 23 nt, Artificial Sequence
  Synthetic oligonucleotide: CBLB-6078
ccaggugaaaaugucaaaacuaa

SEQ ID NO: 36322 - RNA, 24 nt, Artificial Sequence
  Synthetic oligonucleotide: CBLB-6079
accaggugaaaaugucaaaacuaa

SEQ ID NO: 36323 - RNA, 18 nt, Artificial Sequence
  Synthetic oligonucleotide: CBLB-6080
uugcacucgauugggaca

SEQ ID NO: 36324 - RNA, 19 nt, Artificial Sequence
  Synthetic oligonucleotide: CBLB-6081
guugcacucgauugggaca

SEQ ID NO: 36325 - RNA, 20 nt, Artificial Sequence
  Synthetic oligonucleotide: CBLB-6082
aguugcacucgauugggaca

SEQ ID NO: 36326 - RNA, 21 nt, Artificial Sequence
  Synthetic oligonucleotide: CBLB-6083
aaguugcacucgauugggaca

SEQ ID NO: 36327 - RNA, 22 nt, Artificial Sequence
  Synthetic oligonucleotide: CBLB-6084
uaaguugcacucgauugggaca

SEQ ID NO: 36328 - RNA, 23 nt, Artificial Sequence
  Synthetic oligonucleotide: CBLB-6085
uuaaguugcacucgauugggaca

SEQ ID NO: 36329 - RNA, 24 nt, Artificial Sequence
  Synthetic oligonucleotide: CBLB-6086
guuaaguugcacucgauugggaca

SEQ ID NO: 36330 - RNA, 18 nt, Artificial Sequence
  Synthetic oligonucleotide: CBLB-6087
ugcaccagaaauucacca

SEQ ID NO: 36331 - RNA, 19 nt, Artificial Sequence
  Synthetic oligonucleotide: CBLB-6088
cugcaccagaaauucacca

SEQ ID NO: 36332 - RNA, 20 nt, Artificial Sequence
  Synthetic oligonucleotide: CBLB-6089
acugcaccagaaauucacca

SEQ ID NO: 36333 - RNA, 21 nt, Artificial Sequence
  Synthetic oligonucleotide: CBLB-6090
gacugcaccagaaauucacca

SEQ ID NO: 36334 - RNA, 22 nt, Artificial Sequence
  Synthetic oligonucleotide: CBLB-6091
ggacugcaccagaaauucacca

SEQ ID NO: 36335 - RNA, 23 nt, Artificial Sequence
  Synthetic oligonucleotide: CBLB-6092
aggacugcaccagaaauucacca

SEQ ID NO: 36336 - RNA, 24 nt, Artificial Sequence
  Synthetic oligonucleotide: CBLB-6093
caggacugcaccagaaauucacca

SEQ ID NO: 36337 - RNA, 18 nt, Artificial Sequence
  Synthetic oligonucleotide: CBLB-6094
cacagaacuaucguacca

SEQ ID NO: 36338 - RNA, 19 nt, Artificial Sequence
  Synthetic oligonucleotide: CBLB-6095
gcacagaacuaucguacca

SEQ ID NO: 36339 - RNA, 20 nt, Artificial Sequence
  Synthetic oligonucleotide: CBLB-3063
ugcacagaacuaucguacca

SEQ ID NO: 36340 - RNA, 21 nt, Artificial Sequence
  Synthetic oligonucleotide: CBLB-6096
uugcacagaacuaucguacca

SEQ ID NO: 36341 - RNA, 22 nt, Artificial Sequence
  Synthetic oligonucleotide: CBLB-6097
cuugcacagaacuaucguacca

SEQ ID NO: 36342 - RNA, 23 nt, Artificial Sequence
  Synthetic oligonucleotide: CBLB-6098
ccuugcacagaacuaucguacca

SEQ ID NO: 36343 - RNA, 24 nt, Artificial Sequence
  Synthetic oligonucleotide: CBLB-6099
accuugcacagaacuaucguacca

SEQ ID NO: 36344 - RNA, 18 nt, Artificial Sequence
  Synthetic oligonucleotide: CBLB-6100
auccucuccccuugccca

SEQ ID NO: 36345 - RNA, 19 nt, Artificial Sequence
  Synthetic oligonucleotide: CBLB-6101
gauccucuccccuugccca

SEQ ID NO: 36346 - RNA, 20 nt, Artificial Sequence
  Synthetic oligonucleotide: CBLB-6102
ggauccucuccccuugccca

SEQ ID NO: 36347 - RNA, 21 nt, Artificial Sequence
  Synthetic oligonucleotide: CBLB-6103
aggauccucuccccuugccca

SEQ ID NO: 36348 - RNA, 22 nt, Artificial Sequence
  Synthetic oligonucleotide: CBLB-6104
caggauccucuccccuugccca

SEQ ID NO: 36349 - RNA, 23 nt, Artificial Sequence
  Synthetic oligonucleotide: CBLB-6105
ccaggauccucuccccuugccca

SEQ ID NO: 36350 - RNA, 24 nt, Artificial Sequence
  Synthetic oligonucleotide: CBLB-6106
accaggauccucuccccuugccca

SEQ ID NO: 36351 - RNA, 18 nt, Artificial Sequence
  Synthetic oligonucleotide: CBLB-6107
gguaggagggaaaagcca

SEQ ID NO: 36352 - RNA, 19 nt, Artificial Sequence
  Synthetic oligonucleotide: CBLB-6108
agguaggagggaaaagcca

SEQ ID NO: 36353 - RNA, 20 nt, Artificial Sequence
  Synthetic oligonucleotide: CBLB-6109
cagguaggagggaaaagcca

SEQ ID NO: 36354 - RNA, 21 nt, Artificial Sequence
  Synthetic oligonucleotide: CBLB-6110
ucagguaggagggaaaagcca

SEQ ID NO: 36355 - RNA, 22 nt, Artificial Sequence
  Synthetic oligonucleotide: CBLB-6111
uucagguaggagggaaaagcca

SEQ ID NO: 36356 - RNA, 23 nt, Artificial Sequence
  Synthetic oligonucleotide: CBLB-6112
cuucagguaggagggaaaagcca

SEQ ID NO: 36357 - RNA, 24 nt, Artificial Sequence
  Synthetic oligonucleotide: CBLB-6113
ccuucagguaggagggaaaagcca

SEQ ID NO: 36358 - RNA, 18 nt, Artificial Sequence
  Synthetic oligonucleotide: CBLB-6114
ucccaauggucaauucca

SEQ ID NO: 36359 - RNA, 19 nt, Artificial Sequence
  Synthetic oligonucleotide: CBLB-6115
uucccaauggucaauucca

SEQ ID NO: 36360 - RNA, 20 nt, Artificial Sequence
  Synthetic oligonucleotide: CBLB-3067
uuucccaauggucaauucca

SEQ ID NO: 36361 - RNA, 21 nt, Artificial Sequence
  Synthetic oligonucleotide: CBLB-6116
cuuucccaauggucaauucca

SEQ ID NO: 36362 - RNA, 22 nt, Artificial Sequence
  Synthetic oligonucleotide: CBLB-6117
ucuuucccaauggucaauucca

SEQ ID NO: 36363 - RNA, 23 nt, Artificial Sequence
  Synthetic oligonucleotide: CBLB-6118
aucuuucccaauggucaauucca

SEQ ID NO: 36364 - RNA, 24 nt, Artificial Sequence
  Synthetic oligonucleotide: CBLB-6119
aaucuuucccaauggucaauucca

SEQ ID NO: 36365 - RNA, 18 nt, Artificial Sequence
  Synthetic oligonucleotide: CBLB-6120
cccugauugauggcagca

SEQ ID NO: 36366 - RNA, 19 nt, Artificial Sequence
  Synthetic oligonucleotide: CBLB-6121
gcccugauugauggcagca

SEQ ID NO: 36367 - RNA, 20 nt, Artificial Sequence
  Synthetic oligonucleotide: CBLB-3072
agcccugauugauggcagca

SEQ ID NO: 36368 - RNA, 21 nt, Artificial Sequence
  Synthetic oligonucleotide: CBLB-6122
aagcccugauugauggcagca

SEQ ID NO: 36369 - RNA, 22 nt, Artificial Sequence
  Synthetic oligonucleotide: CBLB-6123
caagcccugauugauggcagca

SEQ ID NO: 36370 - RNA, 23 nt, Artificial Sequence
  Synthetic oligonucleotide: CBLB-6124
ucaagcccugauugauggcagca

SEQ ID NO: 36371 - RNA, 24 nt, Artificial Sequence
  Synthetic oligonucleotide: CBLB-6125
uucaagcccugauugauggcagca

SEQ ID NO: 36372 - RNA, 18 nt, Artificial Sequence
  Synthetic oligonucleotide: CBLB-6126
caugggccugaggcggca

SEQ ID NO: 36373 - RNA, 19 nt, Artificial Sequence
  Synthetic oligonucleotide: CBLB-6127
ccaugggccugaggcggca

SEQ ID NO: 36374 - RNA, 20 nt, Artificial Sequence
  Synthetic oligonucleotide: CBLB-6128
cccaugggccugaggcggca

SEQ ID NO: 36375 - RNA, 21 nt, Artificial Sequence
  Synthetic oligonucleotide: CBLB-6129
ccccaugggccugaggcggca

SEQ ID NO: 36376 - RNA, 22 nt, Artificial Sequence
  Synthetic oligonucleotide: CBLB-6130
accccaugggccugaggcggca

SEQ ID NO: 36377 - RNA, 23 nt, Artificial Sequence
  Synthetic oligonucleotide: CBLB-6131
aaccccaugggccugaggcggca

SEQ ID NO: 36378 - RNA, 24 nt, Artificial Sequence
  Synthetic oligonucleotide: CBLB-6132
aaaccccaugggccugaggcggca

SEQ ID NO: 36379 - RNA, 18 nt, Artificial Sequence
  Synthetic oligonucleotide: CBLB-6133
cuuuuuuuccaccuugca

SEQ ID NO: 36380 - RNA, 19 nt, Artificial Sequence
  Synthetic oligonucleotide: CBLB-6134
ccuuuuuuuccaccuugca

SEQ ID NO: 36381 - RNA, 20 nt, Artificial Sequence
  Synthetic oligonucleotide: CBLB-6135
cccuuuuuuuccaccuugca

SEQ ID NO: 36382 - RNA, 21 nt, Artificial Sequence
  Synthetic oligonucleotide: CBLB-6136
ucccuuuuuuuccaccuugca

SEQ ID NO: 36383 - RNA, 22 nt, Artificial Sequence
  Synthetic oligonucleotide: CBLB-6137
uucccuuuuuuuccaccuugca

SEQ ID NO: 36384 - RNA, 23 nt, Artificial Sequence
  Synthetic oligonucleotide: CBLB-6138
uuucccuuuuuuuccaccuugca

SEQ ID NO: 36385 - RNA, 24 nt, Artificial Sequence
  Synthetic oligonucleotide: CBLB-6139
auuucccuuuuuuuccaccuugca

SEQ ID NO: 36386 - RNA, 18 nt, Artificial Sequence
  Synthetic oligonucleotide: CBLB-6140
aaaacuaacagaacauca

SEQ ID NO: 36387 - RNA, 19 nt, Artificial Sequence
  Synthetic oligonucleotide: CBLB-6141
caaaacuaacagaacauca

SEQ ID NO: 36388 - RNA, 20 nt, Artificial Sequence
  Synthetic oligonucleotide: CBLB-6142
ucaaaacuaacagaacauca

SEQ ID NO: 36389 - RNA, 21 nt, Artificial Sequence
  Synthetic oligonucleotide: CBLB-6143
gucaaaacuaacagaacauca

SEQ ID NO: 36390 - RNA, 22 nt, Artificial Sequence
  Synthetic oligonucleotide: CBLB-6144
ugucaaaacuaacagaacauca

SEQ ID NO: 36391 - RNA, 23 nt, Artificial Sequence
  Synthetic oligonucleotide: CBLB-6145
augucaaaacuaacagaacauca

SEQ ID NO: 36392 - RNA, 24 nt, Artificial Sequence
  Synthetic oligonucleotide: CBLB-6146
aaugucaaaacuaacagaacauca

SEQ ID NO: 36393 - RNA, 18 nt, Artificial Sequence
  Synthetic oligonucleotide: CBLB-6147
caaaaauugcaaaacuca

SEQ ID NO: 36394 - RNA, 19 nt, Artificial Sequence
  Synthetic oligonucleotide: CBLB-6148
gcaaaaauugcaaaacuca

SEQ ID NO: 36395 - RNA, 20 nt, Artificial Sequence
  Synthetic oligonucleotide: CBLB-3085
ugcaaaaauugcaaaacuca

SEQ ID NO: 36396 - RNA, 21 nt, Artificial Sequence
  Synthetic oligonucleotide: CBLB-6149
augcaaaaauugcaaaacuca

SEQ ID NO: 36397 - RNA, 22 nt, Artificial Sequence
  Synthetic oligonucleotide: CBLB-6150
gaugcaaaaauugcaaaacuca

SEQ ID NO: 36398 - RNA, 23 nt, Artificial Sequence
  Synthetic oligonucleotide: CBLB-6151
cgaugcaaaaauugcaaaacuca

SEQ ID NO: 36399 - RNA, 24 nt, Artificial Sequence
  Synthetic oligonucleotide: CBLB-6152
ucgaugcaaaaauugcaaaacuca

SEQ ID NO: 36400 - RNA, 18 nt, Artificial Sequence
  Synthetic oligonucleotide: CBLB-6153
cugcaaggcauagucuca

SEQ ID NO: 36401 - RNA, 19 nt, Artificial Sequence
  Synthetic oligonucleotide: CBLB-6154
ccugcaaggcauagucuca

SEQ ID NO: 36402 - RNA, 20 nt, Artificial Sequence
  Synthetic oligonucleotide: CBLB-6155
uccugcaaggcauagucuca

SEQ ID NO: 36403 - RNA, 21 nt, Artificial Sequence
  Synthetic oligonucleotide: CBLB-6156
cuccugcaaggcauagucuca

SEQ ID NO: 36404 - RNA, 22 nt, Artificial Sequence
  Synthetic oligonucleotide: CBLB-6157
ccuccugcaaggcauagucuca

SEQ ID NO: 36405 - RNA, 23 nt, Artificial Sequence
  Synthetic oligonucleotide: CBLB-6158
accuccugcaaggcauagucuca

SEQ ID NO: 36406 - RNA, 24 nt, Artificial Sequence
  Synthetic oligonucleotide: CBLB-6159
caccuccugcaaggcauagucuca

SEQ ID NO: 36407 - RNA, 18 nt, Artificial Sequence
  Synthetic oligonucleotide: CBLB-6160
cagcgaguucaaauguca

SEQ ID NO: 36408 - RNA, 19 nt, Artificial Sequence
  Synthetic oligonucleotide: CBLB-6161
acagcgaguucaaauguca

SEQ ID NO: 36409 - RNA, 20 nt, Artificial Sequence
  Synthetic oligonucleotide: CBLB-6162
cacagcgaguucaaauguca

SEQ ID NO: 36410 - RNA, 21 nt, Artificial Sequence
  Synthetic oligonucleotide: CBLB-6163
ucacagcgaguucaaauguca

SEQ ID NO: 36411 - RNA, 22 nt, Artificial Sequence
  Synthetic oligonucleotide: CBLB-6164
aucacagcgaguucaaauguca

SEQ ID NO: 36412 - RNA, 23 nt, Artificial Sequence
  Synthetic oligonucleotide: CBLB-6165
aaucacagcgaguucaaauguca

SEQ ID NO: 36413 - RNA, 24 nt, Artificial Sequence
  Synthetic oligonucleotide: CBLB-6166
gaaucacagcgaguucaaauguca

SEQ ID NO: 36414 - RNA, 18 nt, Artificial Sequence
  Synthetic oligonucleotide: CBLB-6167
acacaugguccaucuuca

SEQ ID NO: 36415 - RNA, 19 nt, Artificial Sequence
  Synthetic oligonucleotide: CBLB-6168
aacacaugguccaucuuca

SEQ ID NO: 36416 - RNA, 20 nt, Artificial Sequence
  Synthetic oligonucleotide: CBLB-6169
gaacacaugguccaucuuca

SEQ ID NO: 36417 - RNA, 21 nt, Artificial Sequence
  Synthetic oligonucleotide: CBLB-6170
ggaacacaugguccaucuuca

SEQ ID NO: 36418 - RNA, 22 nt, Artificial Sequence
  Synthetic oligonucleotide: CBLB-6171
uggaacacaugguccaucuuca

SEQ ID NO: 36419 - RNA, 23 nt, Artificial Sequence
  Synthetic oligonucleotide: CBLB-6172
auggaacacaugguccaucuuca

SEQ ID NO: 36420 - RNA, 24 nt, Artificial Sequence
  Synthetic oligonucleotide: CBLB-6173
aauggaacacaugguccaucuuca

SEQ ID NO: 36421 - RNA, 18 nt, Artificial Sequence
  Synthetic oligonucleotide: CBLB-6174
uuagcaaauucucuuuca

SEQ ID NO: 36422 - RNA, 19 nt, Artificial Sequence
  Synthetic oligonucleotide: CBLB-6175
guuagcaaauucucuuuca

SEQ ID NO: 36423 - RNA, 20 nt, Artificial Sequence
  Synthetic oligonucleotide: CBLB-6176
cguuagcaaauucucuuuca

SEQ ID NO: 36424 - RNA, 21 nt, Artificial Sequence
  Synthetic oligonucleotide: CBLB-6177
ccguuagcaaauucucuuuca

SEQ ID NO: 36425 - RNA, 22 nt, Artificial Sequence
  Synthetic oligonucleotide: CBLB-6178
uccguuagcaaauucucuuuca

SEQ ID NO: 36426 - RNA, 23 nt, Artificial Sequence
  Synthetic oligonucleotide: CBLB-6179
guccguuagcaaauucucuuuca

SEQ ID NO: 36427 - RNA, 24 nt, Artificial Sequence
  Synthetic oligonucleotide: CBLB-6180
gguccguuagcaaauucucuuuca

SEQ ID NO: 36428 - RNA, 18 nt, Artificial Sequence
  Synthetic oligonucleotide: CBLB-6181
augacaaagaugucaaga

SEQ ID NO: 36429 - RNA, 19 nt, Artificial Sequence
  Synthetic oligonucleotide: CBLB-6182
aaugacaaagaugucaaga

SEQ ID NO: 36430 - RNA, 20 nt, Artificial Sequence
  Synthetic oligonucleotide: CBLB-6183
gaaugacaaagaugucaaga

SEQ ID NO: 36431 - RNA, 21 nt, Artificial Sequence
  Synthetic oligonucleotide: CBLB-6184
agaaugacaaagaugucaaga

SEQ ID NO: 36432 - RNA, 22 nt, Artificial Sequence
  Synthetic oligonucleotide: CBLB-6185
gagaaugacaaagaugucaaga

SEQ ID NO: 36433 - RNA, 23 nt, Artificial Sequence
  Synthetic oligonucleotide: CBLB-6186
agagaaugacaaagaugucaaga

SEQ ID NO: 36434 - RNA, 24 nt, Artificial Sequence
  Synthetic oligonucleotide: CBLB-6187
cagagaaugacaaagaugucaaga

SEQ ID NO: 36435 - RNA, 18 nt, Artificial Sequence
  Synthetic oligonucleotide: CBLB-6188
aauggaaggcacaguaga

SEQ ID NO: 36436 - RNA, 19 nt, Artificial Sequence
  Synthetic oligonucleotide: CBLB-6189
caauggaaggcacaguaga

SEQ ID NO: 36437 - RNA, 20 nt, Artificial Sequence
  Synthetic oligonucleotide: CBLB-6190
ucaauggaaggcacaguaga

SEQ ID NO: 36438 - RNA, 21 nt, Artificial Sequence
  Synthetic oligonucleotide: CBLB-6191
gucaauggaaggcacaguaga

SEQ ID NO: 36439 - RNA, 22 nt, Artificial Sequence
  Synthetic oligonucleotide: CBLB-6192
ugucaauggaaggcacaguaga

SEQ ID NO: 36440 - RNA, 23 nt, Artificial Sequence
  Synthetic oligonucleotide: CBLB-6193
augucaauggaaggcacaguaga

SEQ ID NO: 36441 - RNA, 24 nt, Artificial Sequence
  Synthetic oligonucleotide: CBLB-6194
aaugucaauggaaggcacaguaga

SEQ ID NO: 36442 - RNA, 18 nt, Artificial Sequence
  Synthetic oligonucleotide: CBLB-6195
ccaugauuugccuuuaga

SEQ ID NO: 36443 - RNA, 19 nt, Artificial Sequence
  Synthetic oligonucleotide: CBLB-6196
gccaugauuugccuuuaga

SEQ ID NO: 36444 - RNA, 20 nt, Artificial Sequence
  Synthetic oligonucleotide: CBLB-3096
cgccaugauuugccuuuaga

SEQ ID NO: 36445 - RNA, 21 nt, Artificial Sequence
  Synthetic oligonucleotide: CBLB-6197
acgccaugauuugccuuuaga

SEQ ID NO: 36446 - RNA, 22 nt, Artificial Sequence
  Synthetic oligonucleotide: CBLB-6198
gacgccaugauuugccuuuaga

SEQ ID NO: 36447 - RNA, 23 nt, Artificial Sequence
  Synthetic oligonucleotide: CBLB-6199
agacgccaugauuugccuuuaga

SEQ ID NO: 36448 - RNA, 24 nt, Artificial Sequence
  Synthetic oligonucleotide: CBLB-6200
cagacgccaugauuugccuuuaga

SEQ ID NO: 36449 - RNA, 18 nt, Artificial Sequence
  Synthetic oligonucleotide: CBLB-6201
cgguuaaguugcacucga

SEQ ID NO: 36450 - RNA, 19 nt, Artificial Sequence
  Synthetic oligonucleotide: CBLB-6202
ccgguuaaguugcacucga

SEQ ID NO: 36451 - RNA, 20 nt, Artificial Sequence
  Synthetic oligonucleotide: CBLB-6203
uccgguuaaguugcacucga

SEQ ID NO: 36452 - RNA, 21 nt, Artificial Sequence
  Synthetic oligonucleotide: CBLB-6204
uuccgguuaaguugcacucga

SEQ ID NO: 36453 - RNA, 22 nt, Artificial Sequence
  Synthetic oligonucleotide: CBLB-6205
uuuccgguuaaguugcacucga

SEQ ID NO: 36454 - RNA, 23 nt, Artificial Sequence
  Synthetic oligonucleotide: CBLB-6206
uuuuccgguuaaguugcacucga

SEQ ID NO: 36455 - RNA, 24 nt, Artificial Sequence
  Synthetic oligonucleotide: CBLB-6207
auuuuccgguuaaguugcacucga

SEQ ID NO: 36456 - RNA, 18 nt, Artificial Sequence
  Synthetic oligonucleotide: CBLB-6208
uucuuccuucagguagga

SEQ ID NO: 36457 - RNA, 19 nt, Artificial Sequence
  Synthetic oligonucleotide: CBLB-6209
cuucuuccuucagguagga

SEQ ID NO: 36458 - RNA, 20 nt, Artificial Sequence
  Synthetic oligonucleotide: CBLB-3102
ucuucuuccuucagguagga

SEQ ID NO: 36459 - RNA, 21 nt, Artificial Sequence
  Synthetic oligonucleotide: CBLB-6210
uucuucuuccuucagguagga

SEQ ID NO: 36460 - RNA, 22 nt, Artificial Sequence
  Synthetic oligonucleotide: CBLB-6211
uuucuucuuccuucagguagga

SEQ ID NO: 36461 - RNA, 23 nt, Artificial Sequence
  Synthetic oligonucleotide: CBLB-6212
uuuucuucuuccuucagguagga

SEQ ID NO: 36462 - RNA, 24 nt, Artificial Sequence
  Synthetic oligonucleotide: CBLB-6213
uuuuucuucuuccuucagguagga

SEQ ID NO: 36463 - RNA, 18 nt, Artificial Sequence
  Synthetic oligonucleotide: CBLB-6214
uggcuaugugacugggga

SEQ ID NO: 36464 - RNA, 19 nt, Artificial Sequence
  Synthetic oligonucleotide: CBLB-6215
uuggcuaugugacugggga

SEQ ID NO: 36465 - RNA, 20 nt, Artificial Sequence
  Synthetic oligonucleotide: CBLB-3109
auuggcuaugugacugggga

SEQ ID NO: 36466 - RNA, 21 nt, Artificial Sequence
  Synthetic oligonucleotide: CBLB-6216
cauuggcuaugugacugggga

SEQ ID NO: 36467 - RNA, 22 nt, Artificial Sequence
  Synthetic oligonucleotide: CBLB-6217
ccauuggcuaugugacugggga

SEQ ID NO: 36468 - RNA, 23 nt, Artificial Sequence
  Synthetic oligonucleotide: CBLB-6218
gccauuggcuaugugacugggga

SEQ ID NO: 36469 - RNA, 24 nt, Artificial Sequence
  Synthetic oligonucleotide: CBLB-6219
ggccauuggcuaugugacugggga

SEQ ID NO: 36470 - RNA, 18 nt, Artificial Sequence
  Synthetic oligonucleotide: CBLB-6220
caguuaucuuuauccuga

SEQ ID NO: 36471 - RNA, 19 nt, Artificial Sequence
  Synthetic oligonucleotide: CBLB-6221
ucaguuaucuuuauccuga

SEQ ID NO: 36472 - RNA, 20 nt, Artificial Sequence
  Synthetic oligonucleotide: CBLB-3120
uucaguuaucuuuauccuga

SEQ ID NO: 36473 - RNA, 21 nt, Artificial Sequence
  Synthetic oligonucleotide: CBLB-6222
auucaguuaucuuuauccuga

SEQ ID NO: 36474 - RNA, 22 nt, Artificial Sequence
  Synthetic oligonucleotide: CBLB-6223
aauucaguuaucuuuauccuga

SEQ ID NO: 36475 - RNA, 23 nt, Artificial Sequence
  Synthetic oligonucleotide: CBLB-6224
aaauucaguuaucuuuauccuga

SEQ ID NO: 36476 - RNA, 24 nt, Artificial Sequence
  Synthetic oligonucleotide: CBLB-6225
uaaauucaguuaucuuuauccuga

SEQ ID NO: 36477 - RNA, 18 nt, Artificial Sequence
  Synthetic oligonucleotide: CBLB-6226
auggucacuguaugcuga

SEQ ID NO: 36478 - RNA, 19 nt, Artificial Sequence
  Synthetic oligonucleotide: CBLB-6227
aauggucacuguaugcuga

SEQ ID NO: 36479 - RNA, 20 nt, Artificial Sequence
  Synthetic oligonucleotide: CBLB-6228
uaauggucacuguaugcuga

SEQ ID NO: 36480 - RNA, 21 nt, Artificial Sequence
  Synthetic oligonucleotide: CBLB-6229
auaauggucacuguaugcuga

SEQ ID NO: 36481 - RNA, 22 nt, Artificial Sequence
  Synthetic oligonucleotide: CBLB-6230
gauaauggucacuguaugcuga

SEQ ID NO: 36482 - RNA, 23 nt, Artificial Sequence
  Synthetic oligonucleotide: CBLB-6231
ugauaauggucacuguaugcuga

SEQ ID NO: 36483 - RNA, 24 nt, Artificial Sequence
  Synthetic oligonucleotide: CBLB-6232
gugauaauggucacuguaugcuga

SEQ ID NO: 36484 - RNA, 18 nt, Artificial Sequence
  Synthetic oligonucleotide: CBLB-6233
gggccauuggcuauguga

SEQ ID NO: 36485 - RNA, 19 nt, Artificial Sequence
  Synthetic oligonucleotide: CBLB-6234
ugggccauuggcuauguga

SEQ ID NO: 36486 - RNA, 20 nt, Artificial Sequence
  Synthetic oligonucleotide: CBLB-6235
gugggccauuggcuauguga

SEQ ID NO: 36487 - RNA, 21 nt, Artificial Sequence
  Synthetic oligonucleotide: CBLB-6236
agugggccauuggcuauguga

SEQ ID NO: 36488 - RNA, 22 nt, Artificial Sequence
  Synthetic oligonucleotide: CBLB-6237
cagugggccauuggcuauguga

SEQ ID NO: 36489 - RNA, 23 nt, Artificial Sequence
  Synthetic oligonucleotide: CBLB-6238
acagugggccauuggcuauguga

SEQ ID NO: 36490 - RNA, 24 nt, Artificial Sequence
  Synthetic oligonucleotide: CBLB-6239
gacagugggccauuggcuauguga

SEQ ID NO: 36491 - RNA, 18 nt, Artificial Sequence
  Synthetic oligonucleotide: CBLB-6240
gaaguuaaagcacgacua

SEQ ID NO: 36492 - RNA, 19 nt, Artificial Sequence
  Synthetic oligonucleotide: CBLB-6241
ugaaguuaaagcacgacua

SEQ ID NO: 36493 - RNA, 20 nt, Artificial Sequence
  Synthetic oligonucleotide: CBLB-6242
augaaguuaaagcacgacua

SEQ ID NO: 36494 - RNA, 21 nt, Artificial Sequence
  Synthetic oligonucleotide: CBLB-6243
gaugaaguuaaagcacgacua

SEQ ID NO: 36495 - RNA, 22 nt, Artificial Sequence
  Synthetic oligonucleotide: CBLB-6244
ugaugaaguuaaagcacgacua

SEQ ID NO: 36496 - RNA, 23 nt, Artificial Sequence
  Synthetic oligonucleotide: CBLB-6245
augaugaaguuaaagcacgacua

SEQ ID NO: 36497 - RNA, 24 nt, Artificial Sequence
  Synthetic oligonucleotide: CBLB-6246
uaugaugaaguuaaagcacgacua

SEQ ID NO: 36498 - RNA, 18 nt, Artificial Sequence
  Synthetic oligonucleotide: CBLB-6247
gugggaugucgacuccua

SEQ ID NO: 36499 - RNA, 19 nt, Artificial Sequence
  Synthetic oligonucleotide: CBLB-6248
ugugggaugucgacuccua

SEQ ID NO: 36500 - RNA, 20 nt, Artificial Sequence
  Synthetic oligonucleotide: CBLB-3125
uugugggaugucgacuccua

SEQ ID NO: 36501 - RNA, 21 nt, Artificial Sequence
  Synthetic oligonucleotide: CBLB-6249
cuugugggaugucgacuccua

SEQ ID NO: 36502 - RNA, 22 nt, Artificial Sequence
  Synthetic oligonucleotide: CBLB-6250
gcuugugggaugucgacuccua

SEQ ID NO: 36503 - RNA, 23 nt, Artificial Sequence
  Synthetic oligonucleotide: CBLB-6251
agcuugugggaugucgacuccua

SEQ ID NO: 36504 - RNA, 24 nt, Artificial Sequence
  Synthetic oligonucleotide: CBLB-6252
cagcuugugggaugucgacuccua

SEQ ID NO: 36505 - RNA, 18 nt, Artificial Sequence
  Synthetic oligonucleotide: CBLB-6253
aaaacaagagacccagua

SEQ ID NO: 36506 - RNA, 19 nt, Artificial Sequence
  Synthetic oligonucleotide: CBLB-6254
gaaaacaagagacccagua

SEQ ID NO: 36507 - RNA, 20 nt, Artificial Sequence
  Synthetic oligonucleotide: CBLB-6255
agaaaacaagagacccagua

SEQ ID NO: 36508 - RNA, 21 nt, Artificial Sequence
  Synthetic oligonucleotide: CBLB-6256
gagaaaacaagagacccagua

SEQ ID NO: 36509 - RNA, 22 nt, Artificial Sequence
  Synthetic oligonucleotide: CBLB-6257
agagaaaacaagagacccagua

SEQ ID NO: 36510 - RNA, 23 nt, Artificial Sequence
  Synthetic oligonucleotide: CBLB-6258
cagagaaaacaagagacccagua

SEQ ID NO: 36511 - RNA, 24 nt, Artificial Sequence
  Synthetic oligonucleotide: CBLB-6259
ucagagaaaacaagagacccagua

SEQ ID NO: 36512 - RNA, 18 nt, Artificial Sequence
  Synthetic oligonucleotide: CBLB-6260
gggagggcucuccaaaac

SEQ ID NO: 36513 - RNA, 19 nt, Artificial Sequence
  Synthetic oligonucleotide: CBLB-6261
ggggagggcucuccaaaac

SEQ ID NO: 36514 - RNA, 20 nt, Artificial Sequence
  Synthetic oligonucleotide: CBLB-6262
aggggagggcucuccaaaac

SEQ ID NO: 36515 - RNA, 21 nt, Artificial Sequence
  Synthetic oligonucleotide: CBLB-6263
uaggggagggcucuccaaaac

SEQ ID NO: 36516 - RNA, 22 nt, Artificial Sequence
  Synthetic oligonucleotide: CBLB-6264
cuaggggagggcucuccaaaac

SEQ ID NO: 36517 - RNA, 23 nt, Artificial Sequence
  Synthetic oligonucleotide: CBLB-6265
ccuaggggagggcucuccaaaac

SEQ ID NO: 36518 - RNA, 24 nt, Artificial Sequence
  Synthetic oligonucleotide: CBLB-6266
uccuaggggagggcucuccaaaac

SEQ ID NO: 36519 - RNA, 18 nt, Artificial Sequence
  Synthetic oligonucleotide: CBLB-6267
uucucuuucagagaaaac

SEQ ID NO: 36520 - RNA, 19 nt, Artificial Sequence
  Synthetic oligonucleotide: CBLB-6268
auucucuuucagagaaaac

SEQ ID NO: 36521 - RNA, 20 nt, Artificial Sequence
  Synthetic oligonucleotide: CBLB-6269
aauucucuuucagagaaaac

SEQ ID NO: 36522 - RNA, 21 nt, Artificial Sequence
  Synthetic oligonucleotide: CBLB-6270
aaauucucuuucagagaaaac

SEQ ID NO: 36523 - RNA, 22 nt, Artificial Sequence
  Synthetic oligonucleotide: CBLB-6271
caaauucucuuucagagaaaac

SEQ ID NO: 36524 - RNA, 23 nt, Artificial Sequence
  Synthetic oligonucleotide: CBLB-6272
gcaaauucucuuucagagaaaac

SEQ ID NO: 36525 - RNA, 24 nt, Artificial Sequence
  Synthetic oligonucleotide: CBLB-6273
agcaaauucucuuucagagaaaac

SEQ ID NO: 36526 - RNA, 18 nt, Artificial Sequence
  Synthetic oligonucleotide: CBLB-6274
acguccgaaagguaaaac

SEQ ID NO: 36527 - RNA, 19 nt, Artificial Sequence
  Synthetic oligonucleotide: CBLB-6275
aacguccgaaagguaaaac

SEQ ID NO: 36528 - RNA, 20 nt, Artificial Sequence
  Synthetic oligonucleotide: CBLB-6276
aaacguccgaaagguaaaac

SEQ ID NO: 36529 - RNA, 21 nt, Artificial Sequence
  Synthetic oligonucleotide: CBLB-6277
caaacguccgaaagguaaaac

SEQ ID NO: 36530 - RNA, 22 nt, Artificial Sequence
  Synthetic oligonucleotide: CBLB-6278
gcaaacguccgaaagguaaaac

SEQ ID NO: 36531 - RNA, 23 nt, Artificial Sequence
  Synthetic oligonucleotide: CBLB-6279
ggcaaacguccgaaagguaaaac

SEQ ID NO: 36532 - RNA, 24 nt, Artificial Sequence
  Synthetic oligonucleotide: CBLB-6280
uggcaaacguccgaaagguaaaac

SEQ ID NO: 36533 - RNA, 18 nt, Artificial Sequence
  Synthetic oligonucleotide: CBLB-6281
agaaauauagcaccaaac

SEQ ID NO: 36534 - RNA, 19 nt, Artificial Sequence
  Synthetic oligonucleotide: CBLB-6282
cagaaauauagcaccaaac

SEQ ID NO: 36535 - RNA, 20 nt, Artificial Sequence
  Synthetic oligonucleotide: CBLB-6283
acagaaauauagcaccaaac

SEQ ID NO: 36536 - RNA, 21 nt, Artificial Sequence
  Synthetic oligonucleotide: CBLB-6284
uacagaaauauagcaccaaac

SEQ ID NO: 36537 - RNA, 22 nt, Artificial Sequence
  Synthetic oligonucleotide: CBLB-6285
cuacagaaauauagcaccaaac

SEQ ID NO: 36538 - RNA, 23 nt, Artificial Sequence
  Synthetic oligonucleotide: CBLB-6286
acuacagaaauauagcaccaaac

SEQ ID NO: 36539 - RNA, 24 nt, Artificial Sequence
  Synthetic oligonucleotide: CBLB-6287
gacuacagaaauauagcaccaaac

SEQ ID NO: 36540 - RNA, 18 nt, Artificial Sequence
  Synthetic oligonucleotide: CBLB-6288
accugccaggccuccaac

SEQ ID NO: 36541 - RNA, 19 nt, Artificial Sequence
  Synthetic oligonucleotide: CBLB-6289
caccugccaggccuccaac

SEQ ID NO: 36542 - RNA, 20 nt, Artificial Sequence
  Synthetic oligonucleotide: CBLB-6290
ccaccugccaggccuccaac

SEQ ID NO: 36543 - RNA, 21 nt, Artificial Sequence
  Synthetic oligonucleotide: CBLB-6291
accaccugccaggccuccaac

SEQ ID NO: 36544 - RNA, 22 nt, Artificial Sequence
  Synthetic oligonucleotide: CBLB-6292
uaccaccugccaggccuccaac

SEQ ID NO: 36545 - RNA, 23 nt, Artificial Sequence
  Synthetic oligonucleotide: CBLB-6293
uuaccaccugccaggccuccaac

SEQ ID NO: 36546 - RNA, 24 nt, Artificial Sequence
  Synthetic oligonucleotide: CBLB-6294
auuaccaccugccaggccuccaac

SEQ ID NO: 36547 - RNA, 18 nt, Artificial Sequence
  Synthetic oligonucleotide: CBLB-6295
auccuccuccaccgccac

SEQ ID NO: 36548 - RNA, 19 nt, Artificial Sequence
  Synthetic oligonucleotide: CBLB-6296
gauccuccuccaccgccac

SEQ ID NO: 36549 - RNA, 20 nt, Artificial Sequence
  Synthetic oligonucleotide: CBLB-6297
agauccuccuccaccgccac

SEQ ID NO: 36550 - RNA, 21 nt, Artificial Sequence
  Synthetic oligonucleotide: CBLB-6298
gagauccuccuccaccgccac

SEQ ID NO: 36551 - RNA, 22 nt, Artificial Sequence
  Synthetic oligonucleotide: CBLB-6299
agagauccuccuccaccgccac

SEQ ID NO: 36552 - RNA, 23 nt, Artificial Sequence
  Synthetic oligonucleotide: CBLB-6300
aagagauccuccuccaccgccac

SEQ ID NO: 36553 - RNA, 24 nt, Artificial Sequence
  Synthetic oligonucleotide: CBLB-6301
uaagagauccuccuccaccgccac

SEQ ID NO: 36554 - RNA, 18 nt, Artificial Sequence
  Synthetic oligonucleotide: CBLB-6302
gaccgcgcaggacugcac

SEQ ID NO: 36555 - RNA, 19 nt, Artificial Sequence
  Synthetic oligonucleotide: CBLB-6303
cgaccgcgcaggacugcac

SEQ ID NO: 36556 - RNA, 20 nt, Artificial Sequence
  Synthetic oligonucleotide: CBLB-6304
acgaccgcgcaggacugcac

SEQ ID NO: 36557 - RNA, 21 nt, Artificial Sequence
  Synthetic oligonucleotide: CBLB-6305
cacgaccgcgcaggacugcac

SEQ ID NO: 36558 - RNA, 22 nt, Artificial Sequence
  Synthetic oligonucleotide: CBLB-6306
ccacgaccgcgcaggacugcac

SEQ ID NO: 36559 - RNA, 23 nt, Artificial Sequence
  Synthetic oligonucleotide: CBLB-6307
accacgaccgcgcaggacugcac

SEQ ID NO: 36560 - RNA, 24 nt, Artificial Sequence
  Synthetic oligonucleotide: CBLB-6308
aaccacgaccgcgcaggacugcac

SEQ ID NO: 36561 - RNA, 18 nt, Artificial Sequence
  Synthetic oligonucleotide: CBLB-6309
ggcaugccgaugcuagac

SEQ ID NO: 36562 - RNA, 19 nt, Artificial Sequence
  Synthetic oligonucleotide: CBLB-6310
uggcaugccgaugcuagac

SEQ ID NO: 36563 - RNA, 20 nt, Artificial Sequence
  Synthetic oligonucleotide: CBLB-6311
uuggcaugccgaugcuagac

SEQ ID NO: 36564 - RNA, 21 nt, Artificial Sequence
  Synthetic oligonucleotide: CBLB-6312
uuuggcaugccgaugcuagac

SEQ ID NO: 36565 - RNA, 22 nt, Artificial Sequence
  Synthetic oligonucleotide: CBLB-6313
cuuuggcaugccgaugcuagac

SEQ ID NO: 36566 - RNA, 23 nt, Artificial Sequence
  Synthetic oligonucleotide: CBLB-6314
ccuuuggcaugccgaugcuagac

SEQ ID NO: 36567 - RNA, 24 nt, Artificial Sequence
  Synthetic oligonucleotide: CBLB-6315
cccuuuggcaugccgaugcuagac

SEQ ID NO: 36568 - RNA, 18 nt, Artificial Sequence
  Synthetic oligonucleotide: CBLB-6316
ggccauuggcuaugugac

SEQ ID NO: 36569 - RNA, 19 nt, Artificial Sequence
  Synthetic oligonucleotide: CBLB-6317
gggccauuggcuaugugac

SEQ ID NO: 36570 - RNA, 20 nt, Artificial Sequence
  Synthetic oligonucleotide: CBLB-3155
ugggccauuggcuaugugac

SEQ ID NO: 36571 - RNA, 21 nt, Artificial Sequence
  Synthetic oligonucleotide: CBLB-6318
gugggccauuggcuaugugac

SEQ ID NO: 36572 - RNA, 22 nt, Artificial Sequence
  Synthetic oligonucleotide: CBLB-6319
agugggccauuggcuaugugac

SEQ ID NO: 36573 - RNA, 23 nt, Artificial Sequence
  Synthetic oligonucleotide: CBLB-6320
cagugggccauuggcuaugugac

SEQ ID NO: 36574 - RNA, 24 nt, Artificial Sequence
  Synthetic oligonucleotide: CBLB-6321
acagugggccauuggcuaugugac

SEQ ID NO: 36575 - RNA, 18 nt, Artificial Sequence
  Synthetic oligonucleotide: CBLB-6322
gaaauauagcaccaaacc

SEQ ID NO: 36576 - RNA, 19 nt, Artificial Sequence
  Synthetic oligonucleotide: CBLB-6323
agaaauauagcaccaaacc

SEQ ID NO: 36577 - RNA, 20 nt, Artificial Sequence
  Synthetic oligonucleotide: CBLB-3161
cagaaauauagcaccaaacc

SEQ ID NO: 36578 - RNA, 21 nt, Artificial Sequence
  Synthetic oligonucleotide: CBLB-6324
acagaaauauagcaccaaacc

SEQ ID NO: 36579 - RNA, 22 nt, Artificial Sequence
  Synthetic oligonucleotide: CBLB-6325
uacagaaauauagcaccaaacc

SEQ ID NO: 36580 - RNA, 23 nt, Artificial Sequence
  Synthetic oligonucleotide: CBLB-6326
cuacagaaauauagcaccaaacc

SEQ ID NO: 36581 - RNA, 24 nt, Artificial Sequence
  Synthetic oligonucleotide: CBLB-6327
acuacagaaauauagcaccaaacc

SEQ ID NO: 36582 - RNA, 18 nt, Artificial Sequence
  Synthetic oligonucleotide: CBLB-6328
ucuuuuccaauggucacc

SEQ ID NO: 36583 - RNA, 19 nt, Artificial Sequence
  Synthetic oligonucleotide: CBLB-6329
gucuuuuccaauggucacc

SEQ ID NO: 36584 - RNA, 20 nt, Artificial Sequence
  Synthetic oligonucleotide: CBLB-6330
ggucuuuuccaauggucacc

SEQ ID NO: 36585 - RNA, 21 nt, Artificial Sequence
  Synthetic oligonucleotide: CBLB-6331
aggucuuuuccaauggucacc

SEQ ID NO: 36586 - RNA, 22 nt, Artificial Sequence
  Synthetic oligonucleotide: CBLB-6332
caggucuuuuccaauggucacc

SEQ ID NO: 36587 - RNA, 23 nt, Artificial Sequence
  Synthetic oligonucleotide: CBLB-6333
ucaggucuuuuccaauggucacc

SEQ ID NO: 36588 - RNA, 24 nt, Artificial Sequence
  Synthetic oligonucleotide: CBLB-6334
uucaggucuuuuccaauggucacc

SEQ ID NO: 36589 - RNA, 18 nt, Artificial Sequence
  Synthetic oligonucleotide: CBLB-6335
gcacagaacuaucguacc

SEQ ID NO: 36590 - RNA, 19 nt, Artificial Sequence
  Synthetic oligonucleotide: CBLB-6336
ugcacagaacuaucguacc

SEQ ID NO: 36591 - RNA, 20 nt, Artificial Sequence
  Synthetic oligonucleotide: CBLB-6337
uugcacagaacuaucguacc

SEQ ID NO: 36592 - RNA, 21 nt, Artificial Sequence
  Synthetic oligonucleotide: CBLB-6338
cuugcacagaacuaucguacc

SEQ ID NO: 36593 - RNA, 22 nt, Artificial Sequence
  Synthetic oligonucleotide: CBLB-6339
ccuugcacagaacuaucguacc

SEQ ID NO: 36594 - RNA, 23 nt, Artificial Sequence
  Synthetic oligonucleotide: CBLB-6340
accuugcacagaacuaucguacc

SEQ ID NO: 36595 - RNA, 24 nt, Artificial Sequence
  Synthetic oligonucleotide: CBLB-6341
caccuugcacagaacuaucguacc

SEQ ID NO: 36596 - RNA, 18 nt, Artificial Sequence
  Synthetic oligonucleotide: CBLB-6342
uucaccacagaaaacccc

SEQ ID NO: 36597 - RNA, 19 nt, Artificial Sequence
  Synthetic oligonucleotide: CBLB-6343
auucaccacagaaaacccc

SEQ ID NO: 36598 - RNA, 20 nt, Artificial Sequence
  Synthetic oligonucleotide: CBLB-6344
aauucaccacagaaaacccc

SEQ ID NO: 36599 - RNA, 21 nt, Artificial Sequence
  Synthetic oligonucleotide: CBLB-6345
aaauucaccacagaaaacccc

SEQ ID NO: 36600 - RNA, 22 nt, Artificial Sequence
  Synthetic oligonucleotide: CBLB-6346
gaaauucaccacagaaaacccc

SEQ ID NO: 36601 - RNA, 23 nt, Artificial Sequence
  Synthetic oligonucleotide: CBLB-6347
agaaauucaccacagaaaacccc

SEQ ID NO: 36602 - RNA, 24 nt, Artificial Sequence
  Synthetic oligonucleotide: CBLB-6348
cagaaauucaccacagaaaacccc

SEQ ID NO: 36603 - RNA, 18 nt, Artificial Sequence
  Synthetic oligonucleotide: CBLB-6349
ucuugaagcauggugccc

SEQ ID NO: 36604 - RNA, 19 nt, Artificial Sequence
  Synthetic oligonucleotide: CBLB-6350
cucuugaagcauggugccc

SEQ ID NO: 36605 - RNA, 20 nt, Artificial Sequence
  Synthetic oligonucleotide: CBLB-6351
ccucuugaagcauggugccc

SEQ ID NO: 36606 - RNA, 21 nt, Artificial Sequence
  Synthetic oligonucleotide: CBLB-6352
gccucuugaagcauggugccc

SEQ ID NO: 36607 - RNA, 22 nt, Artificial Sequence
  Synthetic oligonucleotide: CBLB-6353
ugccucuugaagcauggugccc

SEQ ID NO: 36608 - RNA, 23 nt, Artificial Sequence
  Synthetic oligonucleotide: CBLB-6354
augccucuugaagcauggugccc

SEQ ID NO: 36609 - RNA, 24 nt, Artificial Sequence
  Synthetic oligonucleotide: CBLB-6355
aaugccucuugaagcauggugccc

SEQ ID NO: 36610 - RNA, 18 nt, Artificial Sequence
  Synthetic oligonucleotide: CBLB-6356
uuuuuuuauuuuuuagcc

SEQ ID NO: 36611 - RNA, 19 nt, Artificial Sequence
  Synthetic oligonucleotide: CBLB-6357
auuuuuuuauuuuuuagcc

SEQ ID NO: 36612 - RNA, 20 nt, Artificial Sequence
  Synthetic oligonucleotide: CBLB-6358
aauuuuuuuauuuuuuagcc

SEQ ID NO: 36613 - RNA, 21 nt, Artificial Sequence
  Synthetic oligonucleotide: CBLB-6359
uaauuuuuuuauuuuuuagcc

SEQ ID NO: 36614 - RNA, 22 nt, Artificial Sequence
  Synthetic oligonucleotide: CBLB-6360
uuaauuuuuuuauuuuuuagcc

SEQ ID NO: 36615 - RNA, 23 nt, Artificial Sequence
  Synthetic oligonucleotide: CBLB-6361
uuuaauuuuuuuauuuuuuagcc

SEQ ID NO: 36616 - RNA, 24 nt, Artificial Sequence
  Synthetic oligonucleotide: CBLB-6362
uuuuaauuuuuuuauuuuuuagcc

SEQ ID NO: 36617 - RNA, 18 nt, Artificial Sequence
  Synthetic oligonucleotide: CBLB-6363
accagauuagcucuggcc

SEQ ID NO: 36618 - RNA, 19 nt, Artificial Sequence
  Synthetic oligonucleotide: CBLB-6364
caccagauuagcucuggcc

SEQ ID NO: 36619 - RNA, 20 nt, Artificial Sequence
  Synthetic oligonucleotide: CBLB-3177
ccaccagauuagcucuggcc

SEQ ID NO: 36620 - RNA, 21 nt, Artificial Sequence
  Synthetic oligonucleotide: CBLB-6365
uccaccagauuagcucuggcc

SEQ ID NO: 36621 - RNA, 22 nt, Artificial Sequence
  Synthetic oligonucleotide: CBLB-6366
guccaccagauuagcucuggcc

SEQ ID NO: 36622 - RNA, 23 nt, Artificial Sequence
  Synthetic oligonucleotide: CBLB-6367
gguccaccagauuagcucuggcc

SEQ ID NO: 36623 - RNA, 24 nt, Artificial Sequence
  Synthetic oligonucleotide: CBLB-6368
agguccaccagauuagcucuggcc

SEQ ID NO: 36624 - RNA, 18 nt, Artificial Sequence
  Synthetic oligonucleotide: CBLB-6369
ggauccucuccccuugcc

SEQ ID NO: 36625 - RNA, 19 nt, Artificial Sequence
  Synthetic oligonucleotide: CBLB-6370
aggauccucuccccuugcc

SEQ ID NO: 36626 - RNA, 20 nt, Artificial Sequence
  Synthetic oligonucleotide: CBLB-6371
caggauccucuccccuugcc

SEQ ID NO: 36627 - RNA, 21 nt, Artificial Sequence
  Synthetic oligonucleotide: CBLB-6372
ccaggauccucuccccuugcc

SEQ ID NO: 36628 - RNA, 22 nt, Artificial Sequence
  Synthetic oligonucleotide: CBLB-6373
accaggauccucuccccuugcc

SEQ ID NO: 36629 - RNA, 23 nt, Artificial Sequence
  Synthetic oligonucleotide: CBLB-6374
caccaggauccucuccccuugcc

SEQ ID NO: 36630 - RNA, 24 nt, Artificial Sequence
  Synthetic oligonucleotide: CBLB-6375
ucaccaggauccucuccccuugcc

SEQ ID NO: 36631 - RNA, 18 nt, Artificial Sequence
  Synthetic oligonucleotide: CBLB-6376
aauaaugucgaaguugcc

SEQ ID NO: 36632 - RNA, 19 nt, Artificial Sequence
  Synthetic oligonucleotide: CBLB-6377
gaauaaugucgaaguugcc

SEQ ID NO: 36633 - RNA, 20 nt, Artificial Sequence
  Synthetic oligonucleotide: CBLB-3179
agaauaaugucgaaguugcc

SEQ ID NO: 36634 - RNA, 21 nt, Artificial Sequence
  Synthetic oligonucleotide: CBLB-6378
cagaauaaugucgaaguugcc

SEQ ID NO: 36635 - RNA, 22 nt, Artificial Sequence
  Synthetic oligonucleotide: CBLB-6379
ccagaauaaugucgaaguugcc

SEQ ID NO: 36636 - RNA, 23 nt, Artificial Sequence
  Synthetic oligonucleotide: CBLB-6380
cccagaauaaugucgaaguugcc

SEQ ID NO: 36637 - RNA, 24 nt, Artificial Sequence
  Synthetic oligonucleotide: CBLB-6381
gcccagaauaaugucgaaguugcc

SEQ ID NO: 36638 - RNA, 18 nt, Artificial Sequence
  Synthetic oligonucleotide: CBLB-6382
cguggaccccuuugaucc

SEQ ID NO: 36639 - RNA, 19 nt, Artificial Sequence
  Synthetic oligonucleotide: CBLB-6383
ucguggaccccuuugaucc

SEQ ID NO: 36640 - RNA, 20 nt, Artificial Sequence
  Synthetic oligonucleotide: CBLB-6384
aucguggaccccuuugaucc

SEQ ID NO: 36641 - RNA, 21 nt, Artificial Sequence
  Synthetic oligonucleotide: CBLB-6385
aaucguggaccccuuugaucc

SEQ ID NO: 36642 - RNA, 22 nt, Artificial Sequence
  Synthetic oligonucleotide: CBLB-6386
uaaucguggaccccuuugaucc

SEQ ID NO: 36643 - RNA, 23 nt, Artificial Sequence
  Synthetic oligonucleotide: CBLB-6387
auaaucguggaccccuuugaucc

SEQ ID NO: 36644 - RNA, 24 nt, Artificial Sequence
  Synthetic oligonucleotide: CBLB-6388
cauaaucguggaccccuuugaucc

SEQ ID NO: 36645 - RNA, 18 nt, Artificial Sequence
  Synthetic oligonucleotide: CBLB-6389
uugugggaugucgacucc

SEQ ID NO: 36646 - RNA, 19 nt, Artificial Sequence
  Synthetic oligonucleotide: CBLB-6390
cuugugggaugucgacucc

SEQ ID NO: 36647 - RNA, 20 nt, Artificial Sequence
  Synthetic oligonucleotide: CBLB-6391
gcuugugggaugucgacucc

SEQ ID NO: 36648 - RNA, 21 nt, Artificial Sequence
  Synthetic oligonucleotide: CBLB-6392
agcuugugggaugucgacucc

SEQ ID NO: 36649 - RNA, 22 nt, Artificial Sequence
  Synthetic oligonucleotide: CBLB-6393
cagcuugugggaugucgacucc

SEQ ID NO: 36650 - RNA, 23 nt, Artificial Sequence
  Synthetic oligonucleotide: CBLB-6394
ucagcuugugggaugucgacucc

SEQ ID NO: 36651 - RNA, 24 nt, Artificial Sequence
  Synthetic oligonucleotide: CBLB-6395
aucagcuugugggaugucgacucc

SEQ ID NO: 36652 - RNA, 18 nt, Artificial Sequence
  Synthetic oligonucleotide: CBLB-6396
cccuccuccccaaauucc

SEQ ID NO: 36653 - RNA, 19 nt, Artificial Sequence
  Synthetic oligonucleotide: CBLB-6397
ucccuccuccccaaauucc

SEQ ID NO: 36654 - RNA, 20 nt, Artificial Sequence
  Synthetic oligonucleotide: CBLB-3186
cucccuccuccccaaauucc

SEQ ID NO: 36655 - RNA, 21 nt, Artificial Sequence
  Synthetic oligonucleotide: CBLB-6398
ucucccuccuccccaaauucc

SEQ ID NO: 36656 - RNA, 22 nt, Artificial Sequence
  Synthetic oligonucleotide: CBLB-6399
uucucccuccuccccaaauucc

SEQ ID NO: 36657 - RNA, 23 nt, Artificial Sequence
  Synthetic oligonucleotide: CBLB-6400
uuucucccuccuccccaaauucc

SEQ ID NO: 36658 - RNA, 24 nt, Artificial Sequence
  Synthetic oligonucleotide: CBLB-6401
cuuucucccuccuccccaaauucc

SEQ ID NO: 36659 - RNA, 18 nt, Artificial Sequence
  Synthetic oligonucleotide: CBLB-6402
uucccaauggucaauucc

SEQ ID NO: 36660 - RNA, 19 nt, Artificial Sequence
  Synthetic oligonucleotide: CBLB-6403
uuucccaauggucaauucc

SEQ ID NO: 36661 - RNA, 20 nt, Artificial Sequence
  Synthetic oligonucleotide: CBLB-3187
cuuucccaauggucaauucc

SEQ ID NO: 36662 - RNA, 21 nt, Artificial Sequence
  Synthetic oligonucleotide: CBLB-6404
ucuuucccaauggucaauucc

SEQ ID NO: 36663 - RNA, 22 nt, Artificial Sequence
  Synthetic oligonucleotide: CBLB-6405
aucuuucccaauggucaauucc

SEQ ID NO: 36664 - RNA, 23 nt, Artificial Sequence
  Synthetic oligonucleotide: CBLB-6406
aaucuuucccaauggucaauucc

SEQ ID NO: 36665 - RNA, 24 nt, Artificial Sequence
  Synthetic oligonucleotide: CBLB-6407
caaucuuucccaauggucaauucc

SEQ ID NO: 36666 - RNA, 18 nt, Artificial Sequence
  Synthetic oligonucleotide: CBLB-6408
aauacgcaaagcagaagc

SEQ ID NO: 36667 - RNA, 19 nt, Artificial Sequence
  Synthetic oligonucleotide: CBLB-6409
aaauacgcaaagcagaagc

SEQ ID NO: 36668 - RNA, 20 nt, Artificial Sequence
  Synthetic oligonucleotide: CBLB-6410
gaaauacgcaaagcagaagc

SEQ ID NO: 36669 - RNA, 21 nt, Artificial Sequence
  Synthetic oligonucleotide: CBLB-6411
agaaauacgcaaagcagaagc

SEQ ID NO: 36670 - RNA, 22 nt, Artificial Sequence
  Synthetic oligonucleotide: CBLB-6412
aagaaauacgcaaagcagaagc

SEQ ID NO: 36671 - RNA, 23 nt, Artificial Sequence
  Synthetic oligonucleotide: CBLB-6413
uaagaaauacgcaaagcagaagc

SEQ ID NO: 36672 - RNA, 24 nt, Artificial Sequence
  Synthetic oligonucleotide: CBLB-6414
guaagaaauacgcaaagcagaagc

SEQ ID NO: 36673 - RNA, 18 nt, Artificial Sequence
  Synthetic oligonucleotide: CBLB-6415
gucuaaaucuauagcagc

SEQ ID NO: 36674 - RNA, 19 nt, Artificial Sequence
  Synthetic oligonucleotide: CBLB-6416
cgucuaaaucuauagcagc

SEQ ID NO: 36675 - RNA, 20 nt, Artificial Sequence
  Synthetic oligonucleotide: CBLB-6417
acgucuaaaucuauagcagc

SEQ ID NO: 36676 - RNA, 21 nt, Artificial Sequence
  Synthetic oligonucleotide: CBLB-6418
cacgucuaaaucuauagcagc

SEQ ID NO: 36677 - RNA, 22 nt, Artificial Sequence
  Synthetic oligonucleotide: CBLB-6419
ccacgucuaaaucuauagcagc

SEQ ID NO: 36678 - RNA, 23 nt, Artificial Sequence
  Synthetic oligonucleotide: CBLB-6420
cccacgucuaaaucuauagcagc

SEQ ID NO: 36679 - RNA, 24 nt, Artificial Sequence
  Synthetic oligonucleotide: CBLB-6421
ccccacgucuaaaucuauagcagc

SEQ ID NO: 36680 - RNA, 18 nt, Artificial Sequence
  Synthetic oligonucleotide: CBLB-6422
gcccugauugauggcagc

SEQ ID NO: 36681 - RNA, 19 nt, Artificial Sequence
  Synthetic oligonucleotide: CBLB-6423
agcccugauugauggcagc

SEQ ID NO: 36682 - RNA, 20 nt, Artificial Sequence
  Synthetic oligonucleotide: CBLB-3193
aagcccugauugauggcagc

SEQ ID NO: 36683 - RNA, 21 nt, Artificial Sequence
  Synthetic oligonucleotide: CBLB-6424
caagcccugauugauggcagc

SEQ ID NO: 36684 - RNA, 22 nt, Artificial Sequence
  Synthetic oligonucleotide: CBLB-6425
ucaagcccugauugauggcagc

SEQ ID NO: 36685 - RNA, 23 nt, Artificial Sequence
  Synthetic oligonucleotide: CBLB-6426
uucaagcccugauugauggcagc

SEQ ID NO: 36686 - RNA, 24 nt, Artificial Sequence
  Synthetic oligonucleotide: CBLB-6427
uuucaagcccugauugauggcagc

SEQ ID NO: 36687 - RNA, 18 nt, Artificial Sequence
  Synthetic oligonucleotide: CBLB-6428
acagaaaaccccaugggc

SEQ ID NO: 36688 - RNA, 19 nt, Artificial Sequence
  Synthetic oligonucleotide: CBLB-6429
cacagaaaaccccaugggc

SEQ ID NO: 36689 - RNA, 20 nt, Artificial Sequence
  Synthetic oligonucleotide: CBLB-6430
ccacagaaaaccccaugggc

SEQ ID NO: 36690 - RNA, 21 nt, Artificial Sequence
  Synthetic oligonucleotide: CBLB-6431
accacagaaaaccccaugggc

SEQ ID NO: 36691 - RNA, 22 nt, Artificial Sequence
  Synthetic oligonucleotide: CBLB-6432
caccacagaaaaccccaugggc

SEQ ID NO: 36692 - RNA, 23 nt, Artificial Sequence
  Synthetic oligonucleotide: CBLB-6433
ucaccacagaaaaccccaugggc

SEQ ID NO: 36693 - RNA, 24 nt, Artificial Sequence
  Synthetic oligonucleotide: CBLB-6434
uucaccacagaaaaccccaugggc

SEQ ID NO: 36694 - RNA, 18 nt, Artificial Sequence
  Synthetic oligonucleotide: CBLB-6435
caccagauuagcucuggc

SEQ ID NO: 36695 - RNA, 19 nt, Artificial Sequence
  Synthetic oligonucleotide: CBLB-6436
ccaccagauuagcucuggc

SEQ ID NO: 36696 - RNA, 20 nt, Artificial Sequence
  Synthetic oligonucleotide: CBLB-6437
uccaccagauuagcucuggc

SEQ ID NO: 36697 - RNA, 21 nt, Artificial Sequence
  Synthetic oligonucleotide: CBLB-6438
guccaccagauuagcucuggc

SEQ ID NO: 36698 - RNA, 22 nt, Artificial Sequence
  Synthetic oligonucleotide: CBLB-6439
gguccaccagauuagcucuggc

SEQ ID NO: 36699 - RNA, 23 nt, Artificial Sequence
  Synthetic oligonucleotide: CBLB-6440
agguccaccagauuagcucuggc

SEQ ID NO: 36700 - RNA, 24 nt, Artificial Sequence
  Synthetic oligonucleotide: CBLB-6441
gagguccaccagauuagcucuggc

SEQ ID NO: 36701 - RNA, 18 nt, Artificial Sequence
  Synthetic oligonucleotide: CBLB-6442
aguuccuuugccuccugc

SEQ ID NO: 36702 - RNA, 19 nt, Artificial Sequence
  Synthetic oligonucleotide: CBLB-6443
aaguuccuuugccuccugc

SEQ ID NO: 36703 - RNA, 20 nt, Artificial Sequence
  Synthetic oligonucleotide: CBLB-6444
caaguuccuuugccuccugc

SEQ ID NO: 36704 - RNA, 21 nt, Artificial Sequence
  Synthetic oligonucleotide: CBLB-6445
ccaaguuccuuugccuccugc

SEQ ID NO: 36705 - RNA, 22 nt, Artificial Sequence
  Synthetic oligonucleotide: CBLB-6446
gccaaguuccuuugccuccugc

SEQ ID NO: 36706 - RNA, 23 nt, Artificial Sequence
  Synthetic oligonucleotide: CBLB-6447
ggccaaguuccuuugccuccugc

SEQ ID NO: 36707 - RNA, 24 nt, Artificial Sequence
  Synthetic oligonucleotide: CBLB-6448
uggccaaguuccuuugccuccugc

SEQ ID NO: 36708 - RNA, 18 nt, Artificial Sequence
  Synthetic oligonucleotide: CBLB-6449
acagguaaggauaauugc

SEQ ID NO: 36709 - RNA, 19 nt, Artificial Sequence
  Synthetic oligonucleotide: CBLB-6450
cacagguaaggauaauugc

SEQ ID NO: 36710 - RNA, 20 nt, Artificial Sequence
  Synthetic oligonucleotide: CBLB-6451
acacagguaaggauaauugc

SEQ ID NO: 36711 - RNA, 21 nt, Artificial Sequence
  Synthetic oligonucleotide: CBLB-6452
uacacagguaaggauaauugc

SEQ ID NO: 36712 - RNA, 22 nt, Artificial Sequence
  Synthetic oligonucleotide: CBLB-6453
uuacacagguaaggauaauugc

SEQ ID NO: 36713 - RNA, 23 nt, Artificial Sequence
  Synthetic oligonucleotide: CBLB-6454
guuacacagguaaggauaauugc

SEQ ID NO: 36714 - RNA, 24 nt, Artificial Sequence
  Synthetic oligonucleotide: CBLB-6455
aguuacacagguaaggauaauugc

SEQ ID NO: 36715 - RNA, 18 nt, Artificial Sequence
  Synthetic oligonucleotide: CBLB-6456
gaauaaugucgaaguugc

SEQ ID NO: 36716 - RNA, 19 nt, Artificial Sequence
  Synthetic oligonucleotide: CBLB-6457
agaauaaugucgaaguugc

SEQ ID NO: 36717 - RNA, 20 nt, Artificial Sequence
  Synthetic oligonucleotide: CBLB-6458
cagaauaaugucgaaguugc

SEQ ID NO: 36718 - RNA, 21 nt, Artificial Sequence
  Synthetic oligonucleotide: CBLB-6459
ccagaauaaugucgaaguugc

SEQ ID NO: 36719 - RNA, 22 nt, Artificial Sequence
  Synthetic oligonucleotide: CBLB-6460
cccagaauaaugucgaaguugc

SEQ ID NO: 36720 - RNA, 23 nt, Artificial Sequence
  Synthetic oligonucleotide: CBLB-6461
gcccagaauaaugucgaaguugc

SEQ ID NO: 36721 - RNA, 24 nt, Artificial Sequence
  Synthetic oligonucleotide: CBLB-6462
agcccagaauaaugucgaaguugc

SEQ ID NO: 36722 - RNA, 18 nt, Artificial Sequence
  Synthetic oligonucleotide: CBLB-6463
ggaacugagcccauaauc

SEQ ID NO: 36723 - RNA, 19 nt, Artificial Sequence
  Synthetic oligonucleotide: CBLB-6464
aggaacugagcccauaauc

SEQ ID NO: 36724 - RNA, 20 nt, Artificial Sequence
  Synthetic oligonucleotide: CBLB-6465
aaggaacugagcccauaauc

SEQ ID NO: 36725 - RNA, 21 nt, Artificial Sequence
  Synthetic oligonucleotide: CBLB-6466
aaaggaacugagcccauaauc

SEQ ID NO: 36726 - RNA, 22 nt, Artificial Sequence
  Synthetic oligonucleotide: CBLB-6467
aaaaggaacugagcccauaauc

SEQ ID NO: 36727 - RNA, 23 nt, Artificial Sequence
  Synthetic oligonucleotide: CBLB-6468
uaaaaggaacugagcccauaauc

SEQ ID NO: 36728 - RNA, 24 nt, Artificial Sequence
  Synthetic oligonucleotide: CBLB-6469
auaaaaggaacugagcccauaauc

SEQ ID NO: 36729 - RNA, 18 nt, Artificial Sequence
  Synthetic oligonucleotide: CBLB-6470
uggacgacgaugaugauc

SEQ ID NO: 36730 - RNA, 19 nt, Artificial Sequence
  Synthetic oligonucleotide: CBLB-6471
uuggacgacgaugaugauc

SEQ ID NO: 36731 - RNA, 20 nt, Artificial Sequence
  Synthetic oligonucleotide: CBLB-6472
cuuggacgacgaugaugauc

SEQ ID NO: 36732 - RNA, 21 nt, Artificial Sequence
  Synthetic oligonucleotide: CBLB-6473
acuuggacgacgaugaugauc

SEQ ID NO: 36733 - RNA, 22 nt, Artificial Sequence
  Synthetic oligonucleotide: CBLB-6474
gacuuggacgacgaugaugauc

SEQ ID NO: 36734 - RNA, 23 nt, Artificial Sequence
  Synthetic oligonucleotide: CBLB-6475
agacuuggacgacgaugaugauc

SEQ ID NO: 36735 - RNA, 24 nt, Artificial Sequence
  Synthetic oligonucleotide: CBLB-6476
uagacuuggacgacgaugaugauc

SEQ ID NO: 36736 - RNA, 18 nt, Artificial Sequence
  Synthetic oligonucleotide: CBLB-6477
gcaaaaauugcaaaacuc

SEQ ID NO: 36737 - RNA, 19 nt, Artificial Sequence
  Synthetic oligonucleotide: CBLB-6478
ugcaaaaauugcaaaacuc

SEQ ID NO: 36738 - RNA, 20 nt, Artificial Sequence
  Synthetic oligonucleotide: CBLB-6479
augcaaaaauugcaaaacuc

SEQ ID NO: 36739 - RNA, 21 nt, Artificial Sequence
  Synthetic oligonucleotide: CBLB-6480
gaugcaaaaauugcaaaacuc

SEQ ID NO: 36740 - RNA, 22 nt, Artificial Sequence
  Synthetic oligonucleotide: CBLB-6481
cgaugcaaaaauugcaaaacuc

SEQ ID NO: 36741 - RNA, 23 nt, Artificial Sequence
  Synthetic oligonucleotide: CBLB-6482
ucgaugcaaaaauugcaaaacuc

SEQ ID NO: 36742 - RNA, 24 nt, Artificial Sequence
  Synthetic oligonucleotide: CBLB-6483
gucgaugcaaaaauugcaaaacuc

SEQ ID NO: 36743 - RNA, 18 nt, Artificial Sequence
  Synthetic oligonucleotide: CBLB-6484
gagacccgccaaugccuc

SEQ ID NO: 36744 - RNA, 19 nt, Artificial Sequence
  Synthetic oligonucleotide: CBLB-6485
agagacccgccaaugccuc

SEQ ID NO: 36745 - RNA, 20 nt, Artificial Sequence
  Synthetic oligonucleotide: CBLB-6486
cagagacccgccaaugccuc

SEQ ID NO: 36746 - RNA, 21 nt, Artificial Sequence
  Synthetic oligonucleotide: CBLB-6487
ccagagacccgccaaugccuc

SEQ ID NO: 36747 - RNA, 22 nt, Artificial Sequence
  Synthetic oligonucleotide: CBLB-6488
uccagagacccgccaaugccuc

SEQ ID NO: 36748 - RNA, 23 nt, Artificial Sequence
  Synthetic oligonucleotide: CBLB-6489
uuccagagacccgccaaugccuc

SEQ ID NO: 36749 - RNA, 24 nt, Artificial Sequence
  Synthetic oligonucleotide: CBLB-6490
cuuccagagacccgccaaugccuc

SEQ ID NO: 36750 - RNA, 18 nt, Artificial Sequence
  Synthetic oligonucleotide: CBLB-6491
agguuuuguguuauccuc

SEQ ID NO: 36751 - RNA, 19 nt, Artificial Sequence
  Synthetic oligonucleotide: CBLB-6492
aagguuuuguguuauccuc

SEQ ID NO: 36752 - RNA, 20 nt, Artificial Sequence
  Synthetic oligonucleotide: CBLB-6493
uaagguuuuguguuauccuc

SEQ ID NO: 36753 - RNA, 21 nt, Artificial Sequence
  Synthetic oligonucleotide: CBLB-6494
uuaagguuuuguguuauccuc

SEQ ID NO: 36754 - RNA, 22 nt, Artificial Sequence
  Synthetic oligonucleotide: CBLB-6495
auuaagguuuuguguuauccuc

SEQ ID NO: 36755 - RNA, 23 nt, Artificial Sequence
  Synthetic oligonucleotide: CBLB-6496
cauuaagguuuuguguuauccuc

SEQ ID NO: 36756 - RNA, 24 nt, Artificial Sequence
  Synthetic oligonucleotide: CBLB-6497
acauuaagguuuuguguuauccuc

SEQ ID NO: 36757 - RNA, 18 nt, Artificial Sequence
  Synthetic oligonucleotide: CBLB-6498
ucccuccuccccaaauuc

SEQ ID NO: 36758 - RNA, 19 nt, Artificial Sequence
  Synthetic oligonucleotide: CBLB-6499
cucccuccuccccaaauuc

SEQ ID NO: 36759 - RNA, 20 nt, Artificial Sequence
  Synthetic oligonucleotide: CBLB-6500
ucucccuccuccccaaauuc

SEQ ID NO: 36760 - RNA, 21 nt, Artificial Sequence
  Synthetic oligonucleotide: CBLB-6501
uucucccuccuccccaaauuc

SEQ ID NO: 36761 - RNA, 22 nt, Artificial Sequence
  Synthetic oligonucleotide: CBLB-6502
uuucucccuccuccccaaauuc

SEQ ID NO: 36762 - RNA, 23 nt, Artificial Sequence
  Synthetic oligonucleotide: CBLB-6503
cuuucucccuccuccccaaauuc

SEQ ID NO: 36763 - RNA, 24 nt, Artificial Sequence
  Synthetic oligonucleotide: CBLB-6504
acuuucucccuccuccccaaauuc

SEQ ID NO: 36764 - RNA, 18 nt, Artificial Sequence
  Synthetic oligonucleotide: CBLB-6505
uuucccaauggucaauuc

SEQ ID NO: 36765 - RNA, 19 nt, Artificial Sequence
  Synthetic oligonucleotide: CBLB-6506
cuuucccaauggucaauuc

SEQ ID NO: 36766 - RNA, 20 nt, Artificial Sequence
  Synthetic oligonucleotide: CBLB-6507
ucuuucccaauggucaauuc

SEQ ID NO: 36767 - RNA, 21 nt, Artificial Sequence
  Synthetic oligonucleotide: CBLB-6508
aucuuucccaauggucaauuc

SEQ ID NO: 36768 - RNA, 22 nt, Artificial Sequence
  Synthetic oligonucleotide: CBLB-6509
aaucuuucccaauggucaauuc

SEQ ID NO: 36769 - RNA, 23 nt, Artificial Sequence
  Synthetic oligonucleotide: CBLB-6510
caaucuuucccaauggucaauuc

SEQ ID NO: 36770 - RNA, 24 nt, Artificial Sequence
  Synthetic oligonucleotide: CBLB-6511
gcaaucuuucccaauggucaauuc

SEQ ID NO: 36771 - RNA, 18 nt, Artificial Sequence
  Synthetic oligonucleotide: CBLB-6512
gcagaugcugcugaauuc

SEQ ID NO: 36772 - RNA, 19 nt, Artificial Sequence
  Synthetic oligonucleotide: CBLB-6513
agcagaugcugcugaauuc

SEQ ID NO: 36773 - RNA, 20 nt, Artificial Sequence
  Synthetic oligonucleotide: CBLB-3225
aagcagaugcugcugaauuc

SEQ ID NO: 36774 - RNA, 21 nt, Artificial Sequence
  Synthetic oligonucleotide: CBLB-6514
aaagcagaugcugcugaauuc

SEQ ID NO: 36775 - RNA, 22 nt, Artificial Sequence
  Synthetic oligonucleotide: CBLB-6515
aaaagcagaugcugcugaauuc

SEQ ID NO: 36776 - RNA, 23 nt, Artificial Sequence
  Synthetic oligonucleotide: CBLB-6516
caaaagcagaugcugcugaauuc

SEQ ID NO: 36777 - RNA, 24 nt, Artificial Sequence
  Synthetic oligonucleotide: CBLB-6517
acaaaagcagaugcugcugaauuc

SEQ ID NO: 36778 - RNA, 18 nt, Artificial Sequence
  Synthetic oligonucleotide: CBLB-6518
uauucagacagugccuuc

SEQ ID NO: 36779 - RNA, 19 nt, Artificial Sequence
  Synthetic oligonucleotide: CBLB-6519
guauucagacagugccuuc

SEQ ID NO: 36780 - RNA, 20 nt, Artificial Sequence
  Synthetic oligonucleotide: CBLB-6520
aguauucagacagugccuuc

SEQ ID NO: 36781 - RNA, 21 nt, Artificial Sequence
  Synthetic oligonucleotide: CBLB-6521
aaguauucagacagugccuuc

SEQ ID NO: 36782 - RNA, 22 nt, Artificial Sequence
  Synthetic oligonucleotide: CBLB-6522
aaaguauucagacagugccuuc

SEQ ID NO: 36783 - RNA, 23 nt, Artificial Sequence
  Synthetic oligonucleotide: CBLB-6523
gaaaguauucagacagugccuuc

SEQ ID NO: 36784 - RNA, 24 nt, Artificial Sequence
  Synthetic oligonucleotide: CBLB-6524
ggaaaguauucagacagugccuuc

SEQ ID NO: 36785 - RNA, 18 nt, Artificial Sequence
  Synthetic oligonucleotide: CBLB-6525
uguggaaagcgugccuuc

SEQ ID NO: 36786 - RNA, 19 nt, Artificial Sequence
  Synthetic oligonucleotide: CBLB-6526
auguggaaagcgugccuuc

SEQ ID NO: 36787 - RNA, 20 nt, Artificial Sequence
  Synthetic oligonucleotide: CBLB-6527
cauguggaaagcgugccuuc

SEQ ID NO: 36788 - RNA, 21 nt, Artificial Sequence
  Synthetic oligonucleotide: CBLB-6528
ucauguggaaagcgugccuuc

SEQ ID NO: 36789 - RNA, 22 nt, Artificial Sequence
  Synthetic oligonucleotide: CBLB-6529
aucauguggaaagcgugccuuc

SEQ ID NO: 36790 - RNA, 23 nt, Artificial Sequence
  Synthetic oligonucleotide: CBLB-6530
caucauguggaaagcgugccuuc

SEQ ID NO: 36791 - RNA, 24 nt, Artificial Sequence
  Synthetic oligonucleotide: CBLB-6531
ccaucauguggaaagcgugccuuc

SEQ ID NO: 36792 - RNA, 18 nt, Artificial Sequence
  Synthetic oligonucleotide: CBLB-6532
gguaagaaauacgcaaag

SEQ ID NO: 36793 - RNA, 19 nt, Artificial Sequence
  Synthetic oligonucleotide: CBLB-6533
agguaagaaauacgcaaag

SEQ ID NO: 36794 - RNA, 20 nt, Artificial Sequence
  Synthetic oligonucleotide: CBLB-6534
aagguaagaaauacgcaaag

SEQ ID NO: 36795 - RNA, 21 nt, Artificial Sequence
  Synthetic oligonucleotide: CBLB-6535
uaagguaagaaauacgcaaag

SEQ ID NO: 36796 - RNA, 22 nt, Artificial Sequence
  Synthetic oligonucleotide: CBLB-6536
cuaagguaagaaauacgcaaag

SEQ ID NO: 36797 - RNA, 23 nt, Artificial Sequence
  Synthetic oligonucleotide: CBLB-6537
gcuaagguaagaaauacgcaaag

SEQ ID NO: 36798 - RNA, 24 nt, Artificial Sequence
  Synthetic oligonucleotide: CBLB-6538
agcuaagguaagaaauacgcaaag

SEQ ID NO: 36799 - RNA, 18 nt, Artificial Sequence
  Synthetic oligonucleotide: CBLB-6539
aaguaugagaaauggaag

SEQ ID NO: 36800 - RNA, 19 nt, Artificial Sequence
  Synthetic oligonucleotide: CBLB-6540
uaaguaugagaaauggaag

SEQ ID NO: 36801 - RNA, 20 nt, Artificial Sequence
  Synthetic oligonucleotide: CBLB-6541
guaaguaugagaaauggaag

SEQ ID NO: 36802 - RNA, 21 nt, Artificial Sequence
  Synthetic oligonucleotide: CBLB-6542
uguaaguaugagaaauggaag

SEQ ID NO: 36803 - RNA, 22 nt, Artificial Sequence
  Synthetic oligonucleotide: CBLB-6543
uuguaaguaugagaaauggaag

SEQ ID NO: 36804 - RNA, 23 nt, Artificial Sequence
  Synthetic oligonucleotide: CBLB-6544
auuguaaguaugagaaauggaag

SEQ ID NO: 36805 - RNA, 24 nt, Artificial Sequence
  Synthetic oligonucleotide: CBLB-6545
gauuguaaguaugagaaauggaag

SEQ ID NO: 36806 - RNA, 18 nt, Artificial Sequence
  Synthetic oligonucleotide: CBLB-6546
uuucccuugugccuacag

SEQ ID NO: 36807 - RNA, 19 nt, Artificial Sequence
  Synthetic oligonucleotide: CBLB-6547
uuuucccuugugccuacag

SEQ ID NO: 36808 - RNA, 20 nt, Artificial Sequence
  Synthetic oligonucleotide: CBLB-6548
uuuuucccuugugccuacag

SEQ ID NO: 36809 - RNA, 21 nt, Artificial Sequence
  Synthetic oligonucleotide: CBLB-6549
uuuuuucccuugugccuacag

SEQ ID NO: 36810 - RNA, 22 nt, Artificial Sequence
  Synthetic oligonucleotide: CBLB-6550
uuuuuuucccuugugccuacag

SEQ ID NO: 36811 - RNA, 23 nt, Artificial Sequence
  Synthetic oligonucleotide: CBLB-6551
auuuuuuucccuugugccuacag

SEQ ID NO: 36812 - RNA, 24 nt, Artificial Sequence
  Synthetic oligonucleotide: CBLB-6552
cauuuuuuucccuugugccuacag

SEQ ID NO: 36813 - RNA, 18 nt, Artificial Sequence
  Synthetic oligonucleotide: CBLB-6553
cugcuagaagguuaccag

SEQ ID NO: 36814 - RNA, 19 nt, Artificial Sequence
  Synthetic oligonucleotide: CBLB-6554
ccugcuagaagguuaccag

SEQ ID NO: 36815 - RNA, 20 nt, Artificial Sequence
  Synthetic oligonucleotide: CBLB-6555
uccugcuagaagguuaccag

SEQ ID NO: 36816 - RNA, 21 nt, Artificial Sequence
  Synthetic oligonucleotide: CBLB-6556
cuccugcuagaagguuaccag

SEQ ID NO: 36817 - RNA, 22 nt, Artificial Sequence
  Synthetic oligonucleotide: CBLB-6557
ccuccugcuagaagguuaccag

SEQ ID NO: 36818 - RNA, 23 nt, Artificial Sequence
  Synthetic oligonucleotide: CBLB-6558
gccuccugcuagaagguuaccag

SEQ ID NO: 36819 - RNA, 24 nt, Artificial Sequence
  Synthetic oligonucleotide: CBLB-6559
ugccuccugcuagaagguuaccag

SEQ ID NO: 36820 - RNA, 18 nt, Artificial Sequence
  Synthetic oligonucleotide: CBLB-6560
agaaaacaagagacccag

SEQ ID NO: 36821 - RNA, 19 nt, Artificial Sequence
  Synthetic oligonucleotide: CBLB-6561
gagaaaacaagagacccag

SEQ ID NO: 36822 - RNA, 20 nt, Artificial Sequence
  Synthetic oligonucleotide: CBLB-6562
agagaaaacaagagacccag

SEQ ID NO: 36823 - RNA, 21 nt, Artificial Sequence
  Synthetic oligonucleotide: CBLB-6563
cagagaaaacaagagacccag

SEQ ID NO: 36824 - RNA, 22 nt, Artificial Sequence
  Synthetic oligonucleotide: CBLB-6564
ucagagaaaacaagagacccag

SEQ ID NO: 36825 - RNA, 23 nt, Artificial Sequence
  Synthetic oligonucleotide: CBLB-6565
uucagagaaaacaagagacccag

SEQ ID NO: 36826 - RNA, 24 nt, Artificial Sequence
  Synthetic oligonucleotide: CBLB-6566
uuucagagaaaacaagagacccag

SEQ ID NO: 36827 - RNA, 18 nt, Artificial Sequence
  Synthetic oligonucleotide: CBLB-6567
agcccugauugauggcag

SEQ ID NO: 36828 - RNA, 19 nt, Artificial Sequence
  Synthetic oligonucleotide: CBLB-6568
aagcccugauugauggcag

SEQ ID NO: 36829 - RNA, 20 nt, Artificial Sequence
  Synthetic oligonucleotide: CBLB-6569
caagcccugauugauggcag

SEQ ID NO: 36830 - RNA, 21 nt, Artificial Sequence
  Synthetic oligonucleotide: CBLB-6570
ucaagcccugauugauggcag

SEQ ID NO: 36831 - RNA, 22 nt, Artificial Sequence
  Synthetic oligonucleotide: CBLB-6571
uucaagcccugauugauggcag

SEQ ID NO: 36832 - RNA, 23 nt, Artificial Sequence
  Synthetic oligonucleotide: CBLB-6572
uuucaagcccugauugauggcag

SEQ ID NO: 36833 - RNA, 24 nt, Artificial Sequence
  Synthetic oligonucleotide: CBLB-6573
auuucaagcccugauugauggcag

SEQ ID NO: 36834 - RNA, 18 nt, Artificial Sequence
  Synthetic oligonucleotide: CBLB-6574
accuuucuuuaaaugcag

SEQ ID NO: 36835 - RNA, 19 nt, Artificial Sequence
  Synthetic oligonucleotide: CBLB-6575
gaccuuucuuuaaaugcag

SEQ ID NO: 36836 - RNA, 20 nt, Artificial Sequence
  Synthetic oligonucleotide: CBLB-6576
cgaccuuucuuuaaaugcag

SEQ ID NO: 36837 - RNA, 21 nt, Artificial Sequence
  Synthetic oligonucleotide: CBLB-6577
ucgaccuuucuuuaaaugcag

SEQ ID NO: 36838 - RNA, 22 nt, Artificial Sequence
  Synthetic oligonucleotide: CBLB-6578
aucgaccuuucuuuaaaugcag

SEQ ID NO: 36839 - RNA, 23 nt, Artificial Sequence
  Synthetic oligonucleotide: CBLB-6579
uaucgaccuuucuuuaaaugcag

SEQ ID NO: 36840 - RNA, 24 nt, Artificial Sequence
  Synthetic oligonucleotide: CBLB-6580
auaucgaccuuucuuuaaaugcag

SEQ ID NO: 36841 - RNA, 18 nt, Artificial Sequence
  Synthetic oligonucleotide: CBLB-6581
accccuuugauccaagag

SEQ ID NO: 36842 - RNA, 19 nt, Artificial Sequence
  Synthetic oligonucleotide: CBLB-6582
gaccccuuugauccaagag

SEQ ID NO: 36843 - RNA, 20 nt, Artificial Sequence
  Synthetic oligonucleotide: CBLB-6583
ggaccccuuugauccaagag

SEQ ID NO: 36844 - RNA, 21 nt, Artificial Sequence
  Synthetic oligonucleotide: CBLB-6584
uggaccccuuugauccaagag

SEQ ID NO: 36845 - RNA, 22 nt, Artificial Sequence
  Synthetic oligonucleotide: CBLB-6585
guggaccccuuugauccaagag

SEQ ID NO: 36846 - RNA, 23 nt, Artificial Sequence
  Synthetic oligonucleotide: CBLB-6586
cguggaccccuuugauccaagag

SEQ ID NO: 36847 - RNA, 24 nt, Artificial Sequence
  Synthetic oligonucleotide: CBLB-6587
ucguggaccccuuugauccaagag

SEQ ID NO: 36848 - RNA, 18 nt, Artificial Sequence
  Synthetic oligonucleotide: CBLB-6588
gguuaugccuuugaagag

SEQ ID NO: 36849 - RNA, 19 nt, Artificial Sequence
  Synthetic oligonucleotide: CBLB-6589
ggguuaugccuuugaagag

SEQ ID NO: 36850 - RNA, 20 nt, Artificial Sequence
  Synthetic oligonucleotide: CBLB-6590
aggguuaugccuuugaagag

SEQ ID NO: 36851 - RNA, 21 nt, Artificial Sequence
  Synthetic oligonucleotide: CBLB-6591
gaggguuaugccuuugaagag

SEQ ID NO: 36852 - RNA, 22 nt, Artificial Sequence
  Synthetic oligonucleotide: CBLB-6592
agaggguuaugccuuugaagag

SEQ ID NO: 36853 - RNA, 23 nt, Artificial Sequence
  Synthetic oligonucleotide: CBLB-6593
gagaggguuaugccuuugaagag

SEQ ID NO: 36854 - RNA, 24 nt, Artificial Sequence
  Synthetic oligonucleotide: CBLB-6594
ggagaggguuaugccuuugaagag

SEQ ID NO: 36855 - RNA, 18 nt, Artificial Sequence
  Synthetic oligonucleotide: CBLB-6595
cucuccccuugcccagag

SEQ ID NO: 36856 - RNA, 19 nt, Artificial Sequence
  Synthetic oligonucleotide: CBLB-6596
ccucuccccuugcccagag

SEQ ID NO: 36857 - RNA, 20 nt, Artificial Sequence
  Synthetic oligonucleotide: CBLB-6597
uccucuccccuugcccagag

SEQ ID NO: 36858 - RNA, 21 nt, Artificial Sequence
  Synthetic oligonucleotide: CBLB-6598
auccucuccccuugcccagag

SEQ ID NO: 36859 - RNA, 22 nt, Artificial Sequence
  Synthetic oligonucleotide: CBLB-6599
gauccucuccccuugcccagag

SEQ ID NO: 36860 - RNA, 23 nt, Artificial Sequence
  Synthetic oligonucleotide: CBLB-6600
ggauccucuccccuugcccagag

SEQ ID NO: 36861 - RNA, 24 nt, Artificial Sequence
  Synthetic oligonucleotide: CBLB-6601
aggauccucuccccuugcccagag

SEQ ID NO: 36862 - RNA, 18 nt, Artificial Sequence
  Synthetic oligonucleotide: CBLB-6602
caugguccaucuucagag

SEQ ID NO: 36863 - RNA, 19 nt, Artificial Sequence
  Synthetic oligonucleotide: CBLB-6603
acaugguccaucuucagag

SEQ ID NO: 36864 - RNA, 20 nt, Artificial Sequence
  Synthetic oligonucleotide: CBLB-6604
cacaugguccaucuucagag

SEQ ID NO: 36865 - RNA, 21 nt, Artificial Sequence
  Synthetic oligonucleotide: CBLB-6605
acacaugguccaucuucagag

SEQ ID NO: 36866 - RNA, 22 nt, Artificial Sequence
  Synthetic oligonucleotide: CBLB-6606
aacacaugguccaucuucagag

SEQ ID NO: 36867 - RNA, 23 nt, Artificial Sequence
  Synthetic oligonucleotide: CBLB-6607
gaacacaugguccaucuucagag

SEQ ID NO: 36868 - RNA, 24 nt, Artificial Sequence
  Synthetic oligonucleotide: CBLB-6608
ggaacacaugguccaucuucagag

SEQ ID NO: 36869 - RNA, 18 nt, Artificial Sequence
  Synthetic oligonucleotide: CBLB-6609
ugggaugucgacuccuag

SEQ ID NO: 36870 - RNA, 19 nt, Artificial Sequence
  Synthetic oligonucleotide: CBLB-6610
gugggaugucgacuccuag

SEQ ID NO: 36871 - RNA, 20 nt, Artificial Sequence
  Synthetic oligonucleotide: CBLB-3254
ugugggaugucgacuccuag

SEQ ID NO: 36872 - RNA, 21 nt, Artificial Sequence
  Synthetic oligonucleotide: CBLB-6611
uugugggaugucgacuccuag

SEQ ID NO: 36873 - RNA, 22 nt, Artificial Sequence
  Synthetic oligonucleotide: CBLB-6612
cuugugggaugucgacuccuag

SEQ ID NO: 36874 - RNA, 23 nt, Artificial Sequence
  Synthetic oligonucleotide: CBLB-6613
gcuugugggaugucgacuccuag

SEQ ID NO: 36875 - RNA, 24 nt, Artificial Sequence
  Synthetic oligonucleotide: CBLB-6614
agcuugugggaugucgacuccuag

SEQ ID NO: 36876 - RNA, 18 nt, Artificial Sequence
  Synthetic oligonucleotide: CBLB-6615
aaacaagagacccaguag

SEQ ID NO: 36877 - RNA, 19 nt, Artificial Sequence
  Synthetic oligonucleotide: CBLB-6616
aaaacaagagacccaguag

SEQ ID NO: 36878 - RNA, 20 nt, Artificial Sequence
  Synthetic oligonucleotide: CBLB-3256
gaaaacaagagacccaguag

SEQ ID NO: 36879 - RNA, 21 nt, Artificial Sequence
  Synthetic oligonucleotide: CBLB-6617
agaaaacaagagacccaguag

SEQ ID NO: 36880 - RNA, 22 nt, Artificial Sequence
  Synthetic oligonucleotide: CBLB-6618
gagaaaacaagagacccaguag

SEQ ID NO: 36881 - RNA, 23 nt, Artificial Sequence
  Synthetic oligonucleotide: CBLB-6619
agagaaaacaagagacccaguag

SEQ ID NO: 36882 - RNA, 24 nt, Artificial Sequence
  Synthetic oligonucleotide: CBLB-6620
cagagaaaacaagagacccaguag

SEQ ID NO: 36883 - RNA, 18 nt, Artificial Sequence
  Synthetic oligonucleotide: CBLB-6621
ucuucuuccuucagguag

SEQ ID NO: 36884 - RNA, 19 nt, Artificial Sequence
  Synthetic oligonucleotide: CBLB-6622
uucuucuuccuucagguag

SEQ ID NO: 36885 - RNA, 20 nt, Artificial Sequence
  Synthetic oligonucleotide: CBLB-6623
uuucuucuuccuucagguag

SEQ ID NO: 36886 - RNA, 21 nt, Artificial Sequence
  Synthetic oligonucleotide: CBLB-6624
uuuucuucuuccuucagguag

SEQ ID NO: 36887 - RNA, 22 nt, Artificial Sequence
  Synthetic oligonucleotide: CBLB-6625
uuuuucuucuuccuucagguag

SEQ ID NO: 36888 - RNA, 23 nt, Artificial Sequence
  Synthetic oligonucleotide: CBLB-6626
cuuuuucuucuuccuucagguag

SEQ ID NO: 36889 - RNA, 24 nt, Artificial Sequence
  Synthetic oligonucleotide: CBLB-6627
ucuuuuucuucuuccuucagguag

SEQ ID NO: 36890 - RNA, 18 nt, Artificial Sequence
  Synthetic oligonucleotide: CBLB-6628
gccaugauuugccuuuag

SEQ ID NO: 36891 - RNA, 19 nt, Artificial Sequence
  Synthetic oligonucleotide: CBLB-6629
cgccaugauuugccuuuag

SEQ ID NO: 36892 - RNA, 20 nt, Artificial Sequence
  Synthetic oligonucleotide: CBLB-6630
acgccaugauuugccuuuag

SEQ ID NO: 36893 - RNA, 21 nt, Artificial Sequence
  Synthetic oligonucleotide: CBLB-6631
gacgccaugauuugccuuuag

SEQ ID NO: 36894 - RNA, 22 nt, Artificial Sequence
  Synthetic oligonucleotide: CBLB-6632
agacgccaugauuugccuuuag

SEQ ID NO: 36895 - RNA, 23 nt, Artificial Sequence
  Synthetic oligonucleotide: CBLB-6633
cagacgccaugauuugccuuuag

SEQ ID NO: 36896 - RNA, 24 nt, Artificial Sequence
  Synthetic oligonucleotide: CBLB-6634
acagacgccaugauuugccuuuag

SEQ ID NO: 36897 - RNA, 18 nt, Artificial Sequence
  Synthetic oligonucleotide: CBLB-6635
cccuaaaccacgaccgcg

SEQ ID NO: 36898 - RNA, 19 nt, Artificial Sequence
  Synthetic oligonucleotide: CBLB-6636
ccccuaaaccacgaccgcg

SEQ ID NO: 36899 - RNA, 20 nt, Artificial Sequence
  Synthetic oligonucleotide: CBLB-6637
cccccuaaaccacgaccgcg

SEQ ID NO: 36900 - RNA, 21 nt, Artificial Sequence
  Synthetic oligonucleotide: CBLB-6638
acccccuaaaccacgaccgcg

SEQ ID NO: 36901 - RNA, 22 nt, Artificial Sequence
  Synthetic oligonucleotide: CBLB-6639
gacccccuaaaccacgaccgcg

SEQ ID NO: 36902 - RNA, 23 nt, Artificial Sequence
  Synthetic oligonucleotide: CBLB-6640
agacccccuaaaccacgaccgcg

SEQ ID NO: 36903 - RNA, 24 nt, Artificial Sequence
  Synthetic oligonucleotide: CBLB-6641
cagacccccuaaaccacgaccgcg

SEQ ID NO: 36904 - RNA, 18 nt, Artificial Sequence
  Synthetic oligonucleotide: CBLB-6642
uucuagugcacugacagg

SEQ ID NO: 36905 - RNA, 19 nt, Artificial Sequence
  Synthetic oligonucleotide: CBLB-6643
guucuagugcacugacagg

SEQ ID NO: 36906 - RNA, 20 nt, Artificial Sequence
  Synthetic oligonucleotide: CBLB-6644
uguucuagugcacugacagg

SEQ ID NO: 36907 - RNA, 21 nt, Artificial Sequence
  Synthetic oligonucleotide: CBLB-6645
cuguucuagugcacugacagg

SEQ ID NO: 36908 - RNA, 22 nt, Artificial Sequence
  Synthetic oligonucleotide: CBLB-6646
ucuguucuagugcacugacagg

SEQ ID NO: 36909 - RNA, 23 nt, Artificial Sequence
  Synthetic oligonucleotide: CBLB-6647
uucuguucuagugcacugacagg

SEQ ID NO: 36910 - RNA, 24 nt, Artificial Sequence
  Synthetic oligonucleotide: CBLB-6648
uuucuguucuagugcacugacagg

SEQ ID NO: 36911 - RNA, 18 nt, Artificial Sequence
  Synthetic oligonucleotide: CBLB-6649
uuuucuucuuccuucagg

SEQ ID NO: 36912 - RNA, 19 nt, Artificial Sequence
  Synthetic oligonucleotide: CBLB-6650
uuuuucuucuuccuucagg

SEQ ID NO: 36913 - RNA, 20 nt, Artificial Sequence
  Synthetic oligonucleotide: CBLB-6651
cuuuuucuucuuccuucagg

SEQ ID NO: 36914 - RNA, 21 nt, Artificial Sequence
  Synthetic oligonucleotide: CBLB-6652
ucuuuuucuucuuccuucagg

SEQ ID NO: 36915 - RNA, 22 nt, Artificial Sequence
  Synthetic oligonucleotide: CBLB-6653
aucuuuuucuucuuccuucagg

SEQ ID NO: 36916 - RNA, 23 nt, Artificial Sequence
  Synthetic oligonucleotide: CBLB-6654
gaucuuuuucuucuuccuucagg

SEQ ID NO: 36917 - RNA, 24 nt, Artificial Sequence
  Synthetic oligonucleotide: CBLB-6655
ggaucuuuuucuucuuccuucagg

SEQ ID NO: 36918 - RNA, 18 nt, Artificial Sequence
  Synthetic oligonucleotide: CBLB-6656
cuucuuccuucagguagg

SEQ ID NO: 36919 - RNA, 19 nt, Artificial Sequence
  Synthetic oligonucleotide: CBLB-6657
ucuucuuccuucagguagg

SEQ ID NO: 36920 - RNA, 20 nt, Artificial Sequence
  Synthetic oligonucleotide: CBLB-3283
uucuucuuccuucagguagg

SEQ ID NO: 36921 - RNA, 21 nt, Artificial Sequence
  Synthetic oligonucleotide: CBLB-6658
uuucuucuuccuucagguagg

SEQ ID NO: 36922 - RNA, 22 nt, Artificial Sequence
  Synthetic oligonucleotide: CBLB-6659
uuuucuucuuccuucagguagg

SEQ ID NO: 36923 - RNA, 23 nt, Artificial Sequence
  Synthetic oligonucleotide: CBLB-6660
uuuuucuucuuccuucagguagg

SEQ ID NO: 36924 - RNA, 24 nt, Artificial Sequence
  Synthetic oligonucleotide: CBLB-6661
cuuuuucuucuuccuucagguagg

SEQ ID NO: 36925 - RNA, 18 nt, Artificial Sequence
  Synthetic oligonucleotide: CBLB-6662
ucucaucccuccauuagg

SEQ ID NO: 36926 - RNA, 19 nt, Artificial Sequence
  Synthetic oligonucleotide: CBLB-6663
uucucaucccuccauuagg

SEQ ID NO: 36927 - RNA, 20 nt, Artificial Sequence
  Synthetic oligonucleotide: CBLB-6664
cuucucaucccuccauuagg

SEQ ID NO: 36928 - RNA, 21 nt, Artificial Sequence
  Synthetic oligonucleotide: CBLB-6665
ucuucucaucccuccauuagg

SEQ ID NO: 36929 - RNA, 22 nt, Artificial Sequence
  Synthetic oligonucleotide: CBLB-6666
aucuucucaucccuccauuagg

SEQ ID NO: 36930 - RNA, 23 nt, Artificial Sequence
  Synthetic oligonucleotide: CBLB-6667
gaucuucucaucccuccauuagg

SEQ ID NO: 36931 - RNA, 24 nt, Artificial Sequence
  Synthetic oligonucleotide: CBLB-6668
ugaucuucucaucccuccauuagg

SEQ ID NO: 36932 - RNA, 18 nt, Artificial Sequence
  Synthetic oligonucleotide: CBLB-6669
ggaugucgacuccuaggg

SEQ ID NO: 36933 - RNA, 19 nt, Artificial Sequence
  Synthetic oligonucleotide: CBLB-6670
gggaugucgacuccuaggg

SEQ ID NO: 36934 - RNA, 20 nt, Artificial Sequence
  Synthetic oligonucleotide: CBLB-6671
ugggaugucgacuccuaggg

SEQ ID NO: 36935 - RNA, 21 nt, Artificial Sequence
  Synthetic oligonucleotide: CBLB-6672
gugggaugucgacuccuaggg

SEQ ID NO: 36936 - RNA, 22 nt, Artificial Sequence
  Synthetic oligonucleotide: CBLB-6673
ugugggaugucgacuccuaggg

SEQ ID NO: 36937 - RNA, 23 nt, Artificial Sequence
  Synthetic oligonucleotide: CBLB-6674
uugugggaugucgacuccuaggg

SEQ ID NO: 36938 - RNA, 24 nt, Artificial Sequence
  Synthetic oligonucleotide: CBLB-6675
cuugugggaugucgacuccuaggg

SEQ ID NO: 36939 - RNA, 18 nt, Artificial Sequence
  Synthetic oligonucleotide: CBLB-6676
uuggcuaugugacugggg

SEQ ID NO: 36940 - RNA, 19 nt, Artificial Sequence
  Synthetic oligonucleotide: CBLB-6677
auuggcuaugugacugggg

SEQ ID NO: 36941 - RNA, 20 nt, Artificial Sequence
  Synthetic oligonucleotide: CBLB-6678
cauuggcuaugugacugggg

SEQ ID NO: 36942 - RNA, 21 nt, Artificial Sequence
  Synthetic oligonucleotide: CBLB-6679
ccauuggcuaugugacugggg

SEQ ID NO: 36943 - RNA, 22 nt, Artificial Sequence
  Synthetic oligonucleotide: CBLB-6680
gccauuggcuaugugacugggg

SEQ ID NO: 36944 - RNA, 23 nt, Artificial Sequence
  Synthetic oligonucleotide: CBLB-6681
ggccauuggcuaugugacugggg

SEQ ID NO: 36945 - RNA, 24 nt, Artificial Sequence
  Synthetic oligonucleotide: CBLB-6682
gggccauuggcuaugugacugggg

SEQ ID NO: 36946 - RNA, 18 nt, Artificial Sequence
  Synthetic oligonucleotide: CBLB-6683
aaauugcaaaacucaugg

SEQ ID NO: 36947 - RNA, 19 nt, Artificial Sequence
  Synthetic oligonucleotide: CBLB-6684
aaaauugcaaaacucaugg

SEQ ID NO: 36948 - RNA, 20 nt, Artificial Sequence
  Synthetic oligonucleotide: CBLB-6685
aaaaauugcaaaacucaugg

SEQ ID NO: 36949 - RNA, 21 nt, Artificial Sequence
  Synthetic oligonucleotide: CBLB-6686
caaaaauugcaaaacucaugg

SEQ ID NO: 36950 - RNA, 22 nt, Artificial Sequence
  Synthetic oligonucleotide: CBLB-6687
gcaaaaauugcaaaacucaugg

SEQ ID NO: 36951 - RNA, 23 nt, Artificial Sequence
  Synthetic oligonucleotide: CBLB-6688
ugcaaaaauugcaaaacucaugg

SEQ ID NO: 36952 - RNA, 24 nt, Artificial Sequence
  Synthetic oligonucleotide: CBLB-6689
augcaaaaauugcaaaacucaugg

SEQ ID NO: 36953 - RNA, 18 nt, Artificial Sequence
  Synthetic oligonucleotide: CBLB-6690
uuaucuuuauccugaugg

SEQ ID NO: 36954 - RNA, 19 nt, Artificial Sequence
  Synthetic oligonucleotide: CBLB-6691
guuaucuuuauccugaugg

SEQ ID NO: 36955 - RNA, 20 nt, Artificial Sequence
  Synthetic oligonucleotide: CBLB-6692
aguuaucuuuauccugaugg

SEQ ID NO: 36956 - RNA, 21 nt, Artificial Sequence
  Synthetic oligonucleotide: CBLB-6693
caguuaucuuuauccugaugg

SEQ ID NO: 36957 - RNA, 22 nt, Artificial Sequence
  Synthetic oligonucleotide: CBLB-6694
ucaguuaucuuuauccugaugg

SEQ ID NO: 36958 - RNA, 23 nt, Artificial Sequence
  Synthetic oligonucleotide: CBLB-6695
uucaguuaucuuuauccugaugg

SEQ ID NO: 36959 - RNA, 24 nt, Artificial Sequence
  Synthetic oligonucleotide: CBLB-6696
auucaguuaucuuuauccugaugg

SEQ ID NO: 36960 - RNA, 18 nt, Artificial Sequence
  Synthetic oligonucleotide: CBLB-6697
ucuucagucacaugcugg

SEQ ID NO: 36961 - RNA, 19 nt, Artificial Sequence
  Synthetic oligonucleotide: CBLB-6698
aucuucagucacaugcugg

SEQ ID NO: 36962 - RNA, 20 nt, Artificial Sequence
  Synthetic oligonucleotide: CBLB-6699
uaucuucagucacaugcugg

SEQ ID NO: 36963 - RNA, 21 nt, Artificial Sequence
  Synthetic oligonucleotide: CBLB-6700
uuaucuucagucacaugcugg

SEQ ID NO: 36964 - RNA, 22 nt, Artificial Sequence
  Synthetic oligonucleotide: CBLB-6701
cuuaucuucagucacaugcugg

SEQ ID NO: 36965 - RNA, 23 nt, Artificial Sequence
  Synthetic oligonucleotide: CBLB-6702
ccuuaucuucagucacaugcugg

SEQ ID NO: 36966 - RNA, 24 nt, Artificial Sequence
  Synthetic oligonucleotide: CBLB-6703
cccuuaucuucagucacaugcugg

SEQ ID NO: 36967 - RNA, 18 nt, Artificial Sequence
  Synthetic oligonucleotide: CBLB-6704
agauagcccagaauaaug

SEQ ID NO: 36968 - RNA, 19 nt, Artificial Sequence
  Synthetic oligonucleotide: CBLB-6705
gagauagcccagaauaaug

SEQ ID NO: 36969 - RNA, 20 nt, Artificial Sequence
  Synthetic oligonucleotide: CBLB-6706
agagauagcccagaauaaug

SEQ ID NO: 36970 - RNA, 21 nt, Artificial Sequence
  Synthetic oligonucleotide: CBLB-6707
uagagauagcccagaauaaug

SEQ ID NO: 36971 - RNA, 22 nt, Artificial Sequence
  Synthetic oligonucleotide: CBLB-6708
uuagagauagcccagaauaaug

SEQ ID NO: 36972 - RNA, 23 nt, Artificial Sequence
  Synthetic oligonucleotide: CBLB-6709
cuuagagauagcccagaauaaug

SEQ ID NO: 36973 - RNA, 24 nt, Artificial Sequence
  Synthetic oligonucleotide: CBLB-6710
ccuuagagauagcccagaauaaug

SEQ ID NO: 36974 - RNA, 18 nt, Artificial Sequence
  Synthetic oligonucleotide: CBLB-6711
uagucuucuccuugcaug

SEQ ID NO: 36975 - RNA, 19 nt, Artificial Sequence
  Synthetic oligonucleotide: CBLB-6712
uuagucuucuccuugcaug

SEQ ID NO: 36976 - RNA, 20 nt, Artificial Sequence
  Synthetic oligonucleotide: CBLB-6713
uuuagucuucuccuugcaug

SEQ ID NO: 36977 - RNA, 21 nt, Artificial Sequence
  Synthetic oligonucleotide: CBLB-6714
cuuuagucuucuccuugcaug

SEQ ID NO: 36978 - RNA, 22 nt, Artificial Sequence
  Synthetic oligonucleotide: CBLB-6715
ucuuuagucuucuccuugcaug

SEQ ID NO: 36979 - RNA, 23 nt, Artificial Sequence
  Synthetic oligonucleotide: CBLB-6716
uucuuuagucuucuccuugcaug

SEQ ID NO: 36980 - RNA, 24 nt, Artificial Sequence
  Synthetic oligonucleotide: CBLB-6717
uuucuuuagucuucuccuugcaug

SEQ ID NO: 36981 - RNA, 18 nt, Artificial Sequence
  Synthetic oligonucleotide: CBLB-6718
guagacacauccaucaug

SEQ ID NO: 36982 - RNA, 19 nt, Artificial Sequence
  Synthetic oligonucleotide: CBLB-6719
aguagacacauccaucaug

SEQ ID NO: 36983 - RNA, 20 nt, Artificial Sequence
  Synthetic oligonucleotide: CBLB-3311
gaguagacacauccaucaug

SEQ ID NO: 36984 - RNA, 21 nt, Artificial Sequence
  Synthetic oligonucleotide: CBLB-6720
ugaguagacacauccaucaug

SEQ ID NO: 36985 - RNA, 22 nt, Artificial Sequence
  Synthetic oligonucleotide: CBLB-6721
cugaguagacacauccaucaug

SEQ ID NO: 36986 - RNA, 23 nt, Artificial Sequence
  Synthetic oligonucleotide: CBLB-6722
acugaguagacacauccaucaug

SEQ ID NO: 36987 - RNA, 24 nt, Artificial Sequence
  Synthetic oligonucleotide: CBLB-6723
gacugaguagacacauccaucaug

SEQ ID NO: 36988 - RNA, 18 nt, Artificial Sequence
  Synthetic oligonucleotide: CBLB-6724
uggcauuucucacauaug

SEQ ID NO: 36989 - RNA, 19 nt, Artificial Sequence
  Synthetic oligonucleotide: CBLB-6725
auggcauuucucacauaug

SEQ ID NO: 36990 - RNA, 20 nt, Artificial Sequence
  Synthetic oligonucleotide: CBLB-6726
cauggcauuucucacauaug

SEQ ID NO: 36991 - RNA, 21 nt, Artificial Sequence
  Synthetic oligonucleotide: CBLB-6727
acauggcauuucucacauaug

SEQ ID NO: 36992 - RNA, 22 nt, Artificial Sequence
  Synthetic oligonucleotide: CBLB-6728
uacauggcauuucucacauaug

SEQ ID NO: 36993 - RNA, 23 nt, Artificial Sequence
  Synthetic oligonucleotide: CBLB-6729
uuacauggcauuucucacauaug

SEQ ID NO: 36994 - RNA, 24 nt, Artificial Sequence
  Synthetic oligonucleotide: CBLB-6730
guuacauggcauuucucacauaug

SEQ ID NO: 36995 - RNA, 18 nt, Artificial Sequence
  Synthetic oligonucleotide: CBLB-6731
ucugacccagugcuuaug

SEQ ID NO: 36996 - RNA, 19 nt, Artificial Sequence
  Synthetic oligonucleotide: CBLB-6732
cucugacccagugcuuaug

SEQ ID NO: 36997 - RNA, 20 nt, Artificial Sequence
  Synthetic oligonucleotide: CBLB-3315
gcucugacccagugcuuaug

SEQ ID NO: 36998 - RNA, 21 nt, Artificial Sequence
  Synthetic oligonucleotide: CBLB-6733
ggcucugacccagugcuuaug

SEQ ID NO: 36999 - RNA, 22 nt, Artificial Sequence
  Synthetic oligonucleotide: CBLB-6734
gggcucugacccagugcuuaug

SEQ ID NO: 37000 - RNA, 23 nt, Artificial Sequence
  Synthetic oligonucleotide: CBLB-6735
ugggcucugacccagugcuuaug

SEQ ID NO: 37001 - RNA, 24 nt, Artificial Sequence
  Synthetic oligonucleotide: CBLB-6736
gugggcucugacccagugcuuaug

SEQ ID NO: 37002 - RNA, 18 nt, Artificial Sequence
  Synthetic oligonucleotide: CBLB-6737
ucaguuaucuuuauccug

SEQ ID NO: 37003 - RNA, 19 nt, Artificial Sequence
  Synthetic oligonucleotide: CBLB-6738
uucaguuaucuuuauccug

SEQ ID NO: 37004 - RNA, 20 nt, Artificial Sequence
  Synthetic oligonucleotide: CBLB-6739
auucaguuaucuuuauccug

SEQ ID NO: 37005 - RNA, 21 nt, Artificial Sequence
  Synthetic oligonucleotide: CBLB-6740
aauucaguuaucuuuauccug

SEQ ID NO: 37006 - RNA, 22 nt, Artificial Sequence
  Synthetic oligonucleotide: CBLB-6741
aaauucaguuaucuuuauccug

SEQ ID NO: 37007 - RNA, 23 nt, Artificial Sequence
  Synthetic oligonucleotide: CBLB-6742
uaaauucaguuaucuuuauccug

SEQ ID NO: 37008 - RNA, 24 nt, Artificial Sequence
  Synthetic oligonucleotide: CBLB-6743
uuaaauucaguuaucuuuauccug

SEQ ID NO: 37009 - RNA, 18 nt, Artificial Sequence
  Synthetic oligonucleotide: CBLB-6744
agaugcugcugaauucug

SEQ ID NO: 37010 - RNA, 19 nt, Artificial Sequence
  Synthetic oligonucleotide: CBLB-6745
cagaugcugcugaauucug

SEQ ID NO: 37011 - RNA, 20 nt, Artificial Sequence
  Synthetic oligonucleotide: CBLB-6746
gcagaugcugcugaauucug

SEQ ID NO: 37012 - RNA, 21 nt, Artificial Sequence
  Synthetic oligonucleotide: CBLB-6747
agcagaugcugcugaauucug

SEQ ID NO: 37013 - RNA, 22 nt, Artificial Sequence
  Synthetic oligonucleotide: CBLB-6748
aagcagaugcugcugaauucug

SEQ ID NO: 37014 - RNA, 23 nt, Artificial Sequence
  Synthetic oligonucleotide: CBLB-6749
aaagcagaugcugcugaauucug

SEQ ID NO: 37015 - RNA, 24 nt, Artificial Sequence
  Synthetic oligonucleotide: CBLB-6750
aaaagcagaugcugcugaauucug

SEQ ID NO: 37016 - RNA, 18 nt, Artificial Sequence
  Synthetic oligonucleotide: CBLB-6751
uaugccuuugaagaggug

SEQ ID NO: 37017 - RNA, 19 nt, Artificial Sequence
  Synthetic oligonucleotide: CBLB-6752
uuaugccuuugaagaggug

SEQ ID NO: 37018 - RNA, 20 nt, Artificial Sequence
  Synthetic oligonucleotide: CBLB-6753
guuaugccuuugaagaggug

SEQ ID NO: 37019 - RNA, 21 nt, Artificial Sequence
  Synthetic oligonucleotide: CBLB-6754
gguuaugccuuugaagaggug

SEQ ID NO: 37020 - RNA, 22 nt, Artificial Sequence
  Synthetic oligonucleotide: CBLB-6755
ggguuaugccuuugaagaggug

SEQ ID NO: 37021 - RNA, 23 nt, Artificial Sequence
  Synthetic oligonucleotide: CBLB-6756
aggguuaugccuuugaagaggug

SEQ ID NO: 37022 - RNA, 24 nt, Artificial Sequence
  Synthetic oligonucleotide: CBLB-6757
gaggguuaugccuuugaagaggug

SEQ ID NO: 37023 - RNA, 18 nt, Artificial Sequence
  Synthetic oligonucleotide: CBLB-6758
agcucuguaagauuugug

SEQ ID NO: 37024 - RNA, 19 nt, Artificial Sequence
  Synthetic oligonucleotide: CBLB-6759
cagcucuguaagauuugug

SEQ ID NO: 37025 - RNA, 20 nt, Artificial Sequence
  Synthetic oligonucleotide: CBLB-6760
ucagcucuguaagauuugug

SEQ ID NO: 37026 - RNA, 21 nt, Artificial Sequence
  Synthetic oligonucleotide: CBLB-6761
uucagcucuguaagauuugug

SEQ ID NO: 37027 - RNA, 22 nt, Artificial Sequence
  Synthetic oligonucleotide: CBLB-6762
uuucagcucuguaagauuugug

SEQ ID NO: 37028 - RNA, 23 nt, Artificial Sequence
  Synthetic oligonucleotide: CBLB-6763
uuuucagcucuguaagauuugug

SEQ ID NO: 37029 - RNA, 24 nt, Artificial Sequence
  Synthetic oligonucleotide: CBLB-6764
cuuuucagcucuguaagauuugug

SEQ ID NO: 37030 - RNA, 18 nt, Artificial Sequence
  Synthetic oligonucleotide: CBLB-6765
gagaggguuaugccuuug

SEQ ID NO: 37031 - RNA, 19 nt, Artificial Sequence
  Synthetic oligonucleotide: CBLB-6766
ggagaggguuaugccuuug

SEQ ID NO: 37032 - RNA, 20 nt, Artificial Sequence
  Synthetic oligonucleotide: CBLB-6767
gggagaggguuaugccuuug

SEQ ID NO: 37033 - RNA, 21 nt, Artificial Sequence
  Synthetic oligonucleotide: CBLB-6768
ugggagaggguuaugccuuug

SEQ ID NO: 37034 - RNA, 22 nt, Artificial Sequence
  Synthetic oligonucleotide: CBLB-6769
augggagaggguuaugccuuug

SEQ ID NO: 37035 - RNA, 23 nt, Artificial Sequence
  Synthetic oligonucleotide: CBLB-6770
caugggagaggguuaugccuuug

SEQ ID NO: 37036 - RNA, 24 nt, Artificial Sequence
  Synthetic oligonucleotide: CBLB-6771
ucaugggagaggguuaugccuuug

SEQ ID NO: 37037 - RNA, 18 nt, Artificial Sequence
  Synthetic oligonucleotide: CBLB-6772
aagugaguuuuguugaau

SEQ ID NO: 37038 - RNA, 19 nt, Artificial Sequence
  Synthetic oligonucleotide: CBLB-6773
aaagugaguuuuguugaau

SEQ ID NO: 37039 - RNA, 20 nt, Artificial Sequence
  Synthetic oligonucleotide: CBLB-6774
uaaagugaguuuuguugaau

SEQ ID NO: 37040 - RNA, 21 nt, Artificial Sequence
  Synthetic oligonucleotide: CBLB-6775
auaaagugaguuuuguugaau

SEQ ID NO: 37041 - RNA, 22 nt, Artificial Sequence
  Synthetic oligonucleotide: CBLB-6776
cauaaagugaguuuuguugaau

SEQ ID NO: 37042 - RNA, 23 nt, Artificial Sequence
  Synthetic oligonucleotide: CBLB-6777
gcauaaagugaguuuuguugaau

SEQ ID NO: 37043 - RNA, 24 nt, Artificial Sequence
  Synthetic oligonucleotide: CBLB-6778
agcauaaagugaguuuuguugaau

SEQ ID NO: 37044 - RNA, 18 nt, Artificial Sequence
  Synthetic oligonucleotide: CBLB-6779
augggccugaggcggcau

SEQ ID NO: 37045 - RNA, 19 nt, Artificial Sequence
  Synthetic oligonucleotide: CBLB-6780
caugggccugaggcggcau

SEQ ID NO: 37046 - RNA, 20 nt, Artificial Sequence
  Synthetic oligonucleotide: CBLB-3343
ccaugggccugaggcggcau

SEQ ID NO: 37047 - RNA, 21 nt, Artificial Sequence
  Synthetic oligonucleotide: CBLB-6781
cccaugggccugaggcggcau

SEQ ID NO: 37048 - RNA, 22 nt, Artificial Sequence
  Synthetic oligonucleotide: CBLB-6782
ccccaugggccugaggcggcau

SEQ ID NO: 37049 - RNA, 23 nt, Artificial Sequence
  Synthetic oligonucleotide: CBLB-6783
accccaugggccugaggcggcau

SEQ ID NO: 37050 - RNA, 24 nt, Artificial Sequence
  Synthetic oligonucleotide: CBLB-6784
aaccccaugggccugaggcggcau

SEQ ID NO: 37051 - RNA, 18 nt, Artificial Sequence
  Synthetic oligonucleotide: CBLB-6785
aguagacacauccaucau

SEQ ID NO: 37052 - RNA, 19 nt, Artificial Sequence
  Synthetic oligonucleotide: CBLB-6786
gaguagacacauccaucau

SEQ ID NO: 37053 - RNA, 20 nt, Artificial Sequence
  Synthetic oligonucleotide: CBLB-6787
ugaguagacacauccaucau

SEQ ID NO: 37054 - RNA, 21 nt, Artificial Sequence
  Synthetic oligonucleotide: CBLB-6788
cugaguagacacauccaucau

SEQ ID NO: 37055 - RNA, 22 nt, Artificial Sequence
  Synthetic oligonucleotide: CBLB-6789
acugaguagacacauccaucau

SEQ ID NO: 37056 - RNA, 23 nt, Artificial Sequence
  Synthetic oligonucleotide: CBLB-6790
gacugaguagacacauccaucau

SEQ ID NO: 37057 - RNA, 24 nt, Artificial Sequence
  Synthetic oligonucleotide: CBLB-6791
agacugaguagacacauccaucau

SEQ ID NO: 37058 - RNA, 18 nt, Artificial Sequence
  Synthetic oligonucleotide: CBLB-6792
aaaaauugcaaaacucau

SEQ ID NO: 37059 - RNA, 19 nt, Artificial Sequence
  Synthetic oligonucleotide: CBLB-6793
caaaaauugcaaaacucau

SEQ ID NO: 37060 - RNA, 20 nt, Artificial Sequence
  Synthetic oligonucleotide: CBLB-3344
gcaaaaauugcaaaacucau

SEQ ID NO: 37061 - RNA, 21 nt, Artificial Sequence
  Synthetic oligonucleotide: CBLB-6794
ugcaaaaauugcaaaacucau

SEQ ID NO: 37062 - RNA, 22 nt, Artificial Sequence
  Synthetic oligonucleotide: CBLB-6795
augcaaaaauugcaaaacucau

SEQ ID NO: 37063 - RNA, 23 nt, Artificial Sequence
  Synthetic oligonucleotide: CBLB-6796
gaugcaaaaauugcaaaacucau

SEQ ID NO: 37064 - RNA, 24 nt, Artificial Sequence
  Synthetic oligonucleotide: CBLB-6797
cgaugcaaaaauugcaaaacucau

SEQ ID NO: 37065 - RNA, 18 nt, Artificial Sequence
  Synthetic oligonucleotide: CBLB-6798
gguuaaguugcacucgau

SEQ ID NO: 37066 - RNA, 19 nt, Artificial Sequence
  Synthetic oligonucleotide: CBLB-6799
cgguuaaguugcacucgau

SEQ ID NO: 37067 - RNA, 20 nt, Artificial Sequence
  Synthetic oligonucleotide: CBLB-3345
ccgguuaaguugcacucgau

SEQ ID NO: 37068 - RNA, 21 nt, Artificial Sequence
  Synthetic oligonucleotide: CBLB-6800
uccgguuaaguugcacucgau

SEQ ID NO: 37069 - RNA, 22 nt, Artificial Sequence
  Synthetic oligonucleotide: CBLB-6801
uuccgguuaaguugcacucgau

SEQ ID NO: 37070 - RNA, 23 nt, Artificial Sequence
  Synthetic oligonucleotide: CBLB-6802
uuuccgguuaaguugcacucgau

SEQ ID NO: 37071 - RNA, 24 nt, Artificial Sequence
  Synthetic oligonucleotide: CBLB-6803
uuuuccgguuaaguugcacucgau

SEQ ID NO: 37072 - RNA, 18 nt, Artificial Sequence
  Synthetic oligonucleotide: CBLB-6804
aguuaucuuuauccugau

SEQ ID NO: 37073 - RNA, 19 nt, Artificial Sequence
  Synthetic oligonucleotide: CBLB-6805
caguuaucuuuauccugau

SEQ ID NO: 37074 - RNA, 20 nt, Artificial Sequence
  Synthetic oligonucleotide: CBLB-3349
ucaguuaucuuuauccugau

SEQ ID NO: 37075 - RNA, 21 nt, Artificial Sequence
  Synthetic oligonucleotide: CBLB-6806
uucaguuaucuuuauccugau

SEQ ID NO: 37076 - RNA, 22 nt, Artificial Sequence
  Synthetic oligonucleotide: CBLB-6807
auucaguuaucuuuauccugau

SEQ ID NO: 37077 - RNA, 23 nt, Artificial Sequence
  Synthetic oligonucleotide: CBLB-6808
aauucaguuaucuuuauccugau

SEQ ID NO: 37078 - RNA, 24 nt, Artificial Sequence
  Synthetic oligonucleotide: CBLB-6809
aaauucaguuaucuuuauccugau

SEQ ID NO: 37079 - RNA, 18 nt, Artificial Sequence
  Synthetic oligonucleotide: CBLB-6810
gggaaggauuguaaguau

SEQ ID NO: 37080 - RNA, 19 nt, Artificial Sequence
  Synthetic oligonucleotide: CBLB-6811
agggaaggauuguaaguau

SEQ ID NO: 37081 - RNA, 20 nt, Artificial Sequence
  Synthetic oligonucleotide: CBLB-6812
cagggaaggauuguaaguau

SEQ ID NO: 37082 - RNA, 21 nt, Artificial Sequence
  Synthetic oligonucleotide: CBLB-6813
gcagggaaggauuguaaguau

SEQ ID NO: 37083 - RNA, 22 nt, Artificial Sequence
  Synthetic oligonucleotide: CBLB-6814
agcagggaaggauuguaaguau

SEQ ID NO: 37084 - RNA, 23 nt, Artificial Sequence
  Synthetic oligonucleotide: CBLB-6815
cagcagggaaggauuguaaguau

SEQ ID NO: 37085 - RNA, 24 nt, Artificial Sequence
  Synthetic oligonucleotide: CBLB-6816
gcagcagggaaggauuguaaguau

SEQ ID NO: 37086 - RNA, 18 nt, Artificial Sequence
  Synthetic oligonucleotide: CBLB-6817
cugauuuaacuggauuau

SEQ ID NO: 37087 - RNA, 19 nt, Artificial Sequence
  Synthetic oligonucleotide: CBLB-6818
ccugauuuaacuggauuau

SEQ ID NO: 37088 - RNA, 20 nt, Artificial Sequence
  Synthetic oligonucleotide: CBLB-6819
uccugauuuaacuggauuau

SEQ ID NO: 37089 - RNA, 21 nt, Artificial Sequence
  Synthetic oligonucleotide: CBLB-6820
auccugauuuaacuggauuau

SEQ ID NO: 37090 - RNA, 22 nt, Artificial Sequence
  Synthetic oligonucleotide: CBLB-6821
aauccugauuuaacuggauuau

SEQ ID NO: 37091 - RNA, 23 nt, Artificial Sequence
  Synthetic oligonucleotide: CBLB-6822
uaauccugauuuaacuggauuau

SEQ ID NO: 37092 - RNA, 24 nt, Artificial Sequence
  Synthetic oligonucleotide: CBLB-6823
auaauccugauuuaacuggauuau

SEQ ID NO: 37093 - RNA, 18 nt, Artificial Sequence
  Synthetic oligonucleotide: CBLB-6824
cucugacccagugcuuau

SEQ ID NO: 37094 - RNA, 19 nt, Artificial Sequence
  Synthetic oligonucleotide: CBLB-6825
gcucugacccagugcuuau

SEQ ID NO: 37095 - RNA, 20 nt, Artificial Sequence
  Synthetic oligonucleotide: CBLB-6826
ggcucugacccagugcuuau

SEQ ID NO: 37096 - RNA, 21 nt, Artificial Sequence
  Synthetic oligonucleotide: CBLB-6827
gggcucugacccagugcuuau

SEQ ID NO: 37097 - RNA, 22 nt, Artificial Sequence
  Synthetic oligonucleotide: CBLB-6828
ugggcucugacccagugcuuau

SEQ ID NO: 37098 - RNA, 23 nt, Artificial Sequence
  Synthetic oligonucleotide: CBLB-6829
gugggcucugacccagugcuuau

SEQ ID NO: 37099 - RNA, 24 nt, Artificial Sequence
  Synthetic oligonucleotide: CBLB-6830
agugggcucugacccagugcuuau

SEQ ID NO: 37100 - RNA, 18 nt, Artificial Sequence
  Synthetic oligonucleotide: CBLB-6831
aagguagaucaauuuuau

SEQ ID NO: 37101 - RNA, 19 nt, Artificial Sequence
  Synthetic oligonucleotide: CBLB-6832
aaagguagaucaauuuuau

SEQ ID NO: 37102 - RNA, 20 nt, Artificial Sequence
  Synthetic oligonucleotide: CBLB-6833
caaagguagaucaauuuuau

SEQ ID NO: 37103 - RNA, 21 nt, Artificial Sequence
  Synthetic oligonucleotide: CBLB-6834
ccaaagguagaucaauuuuau

SEQ ID NO: 37104 - RNA, 22 nt, Artificial Sequence
  Synthetic oligonucleotide: CBLB-6835
accaaagguagaucaauuuuau

SEQ ID NO: 37105 - RNA, 23 nt, Artificial Sequence
  Synthetic oligonucleotide: CBLB-6836
caccaaagguagaucaauuuuau

SEQ ID NO: 37106 - RNA, 24 nt, Artificial Sequence
  Synthetic oligonucleotide: CBLB-6837
ucaccaaagguagaucaauuuuau

SEQ ID NO: 37107 - RNA, 18 nt, Artificial Sequence
  Synthetic oligonucleotide: CBLB-6838
ccugccaggccuccaacu

SEQ ID NO: 37108 - RNA, 19 nt, Artificial Sequence
  Synthetic oligonucleotide: CBLB-6839
accugccaggccuccaacu

SEQ ID NO: 37109 - RNA, 20 nt, Artificial Sequence
  Synthetic oligonucleotide: CBLB-3352
caccugccaggccuccaacu

SEQ ID NO: 37110 - RNA, 21 nt, Artificial Sequence
  Synthetic oligonucleotide: CBLB-6840
ccaccugccaggccuccaacu

SEQ ID NO: 37111 - RNA, 22 nt, Artificial Sequence
  Synthetic oligonucleotide: CBLB-6841
accaccugccaggccuccaacu

SEQ ID NO: 37112 - RNA, 23 nt, Artificial Sequence
  Synthetic oligonucleotide: CBLB-6842
uaccaccugccaggccuccaacu

SEQ ID NO: 37113 - RNA, 24 nt, Artificial Sequence
  Synthetic oligonucleotide: CBLB-6843
uuaccaccugccaggccuccaacu

SEQ ID NO: 37114 - RNA, 18 nt, Artificial Sequence
  Synthetic oligonucleotide: CBLB-6844
cuuuuccaauggucaccu

SEQ ID NO: 37115 - RNA, 19 nt, Artificial Sequence
  Synthetic oligonucleotide: CBLB-6845
ucuuuuccaauggucaccu

SEQ ID NO: 37116 - RNA, 20 nt, Artificial Sequence
  Synthetic oligonucleotide: CBLB-3358
gucuuuuccaauggucaccu

SEQ ID NO: 37117 - RNA, 21 nt, Artificial Sequence
  Synthetic oligonucleotide: CBLB-6846
ggucuuuuccaauggucaccu

SEQ ID NO: 37118 - RNA, 22 nt, Artificial Sequence
  Synthetic oligonucleotide: CBLB-6847
aggucuuuuccaauggucaccu

SEQ ID NO: 37119 - RNA, 23 nt, Artificial Sequence
  Synthetic oligonucleotide: CBLB-6848
caggucuuuuccaauggucaccu

SEQ ID NO: 37120 - RNA, 24 nt, Artificial Sequence
  Synthetic oligonucleotide: CBLB-6849
ucaggucuuuuccaauggucaccu

SEQ ID NO: 37121 - RNA, 18 nt, Artificial Sequence
  Synthetic oligonucleotide: CBLB-6850
aagaggugaagagagccu

SEQ ID NO: 37122 - RNA, 19 nt, Artificial Sequence
  Synthetic oligonucleotide: CBLB-6851
gaagaggugaagagagccu

SEQ ID NO: 37123 - RNA, 20 nt, Artificial Sequence
  Synthetic oligonucleotide: CBLB-6852
ugaagaggugaagagagccu

SEQ ID NO: 37124 - RNA, 21 nt, Artificial Sequence
  Synthetic oligonucleotide: CBLB-6853
uugaagaggugaagagagccu

SEQ ID NO: 37125 - RNA, 22 nt, Artificial Sequence
  Synthetic oligonucleotide: CBLB-6854
uuugaagaggugaagagagccu

SEQ ID NO: 37126 - RNA, 23 nt, Artificial Sequence
  Synthetic oligonucleotide: CBLB-6855
cuuugaagaggugaagagagccu

SEQ ID NO: 37127 - RNA, 24 nt, Artificial Sequence
  Synthetic oligonucleotide: CBLB-6856
ccuuugaagaggugaagagagccu

SEQ ID NO: 37128 - RNA, 18 nt, Artificial Sequence
  Synthetic oligonucleotide: CBLB-6857
uuuuuuauuuuuuagccu

SEQ ID NO: 37129 - RNA, 19 nt, Artificial Sequence
  Synthetic oligonucleotide: CBLB-6858
uuuuuuuauuuuuuagccu

SEQ ID NO: 37130 - RNA, 20 nt, Artificial Sequence
  Synthetic oligonucleotide: CBLB-3361
auuuuuuuauuuuuuagccu

SEQ ID NO: 37131 - RNA, 21 nt, Artificial Sequence
  Synthetic oligonucleotide: CBLB-6859
aauuuuuuuauuuuuuagccu

SEQ ID NO: 37132 - RNA, 22 nt, Artificial Sequence
  Synthetic oligonucleotide: CBLB-6860
uaauuuuuuuauuuuuuagccu

SEQ ID NO: 37133 - RNA, 23 nt, Artificial Sequence
  Synthetic oligonucleotide: CBLB-6861
uuaauuuuuuuauuuuuuagccu

SEQ ID NO: 37134 - RNA, 24 nt, Artificial Sequence
  Synthetic oligonucleotide: CBLB-6862
uuuaauuuuuuuauuuuuuagccu

SEQ ID NO: 37135 - RNA, 18 nt, Artificial Sequence
  Synthetic oligonucleotide: CBLB-6863
ugggagaggguuaugccu

SEQ ID NO: 37136 - RNA, 19 nt, Artificial Sequence
  Synthetic oligonucleotide: CBLB-6864
augggagaggguuaugccu

SEQ ID NO: 37137 - RNA, 20 nt, Artificial Sequence
  Synthetic oligonucleotide: CBLB-6865
caugggagaggguuaugccu

SEQ ID NO: 37138 - RNA, 21 nt, Artificial Sequence
  Synthetic oligonucleotide: CBLB-6866
ucaugggagaggguuaugccu

SEQ ID NO: 37139 - RNA, 22 nt, Artificial Sequence
  Synthetic oligonucleotide: CBLB-6867
cucaugggagaggguuaugccu

SEQ ID NO: 37140 - RNA, 23 nt, Artificial Sequence
  Synthetic oligonucleotide: CBLB-6868
acucaugggagaggguuaugccu

SEQ ID NO: 37141 - RNA, 24 nt, Artificial Sequence
  Synthetic oligonucleotide: CBLB-6869
aacucaugggagaggguuaugccu

SEQ ID NO: 37142 - RNA, 18 nt, Artificial Sequence
  Synthetic oligonucleotide: CBLB-6870
ccaguagccggccauccu

SEQ ID NO: 37143 - RNA, 19 nt, Artificial Sequence
  Synthetic oligonucleotide: CBLB-6871
uccaguagccggccauccu

SEQ ID NO: 37144 - RNA, 20 nt, Artificial Sequence
  Synthetic oligonucleotide: CBLB-6872
cuccaguagccggccauccu

SEQ ID NO: 37145 - RNA, 21 nt, Artificial Sequence
  Synthetic oligonucleotide: CBLB-6873
gcuccaguagccggccauccu

SEQ ID NO: 37146 - RNA, 22 nt, Artificial Sequence
  Synthetic oligonucleotide: CBLB-6874
ggcuccaguagccggccauccu

SEQ ID NO: 37147 - RNA, 23 nt, Artificial Sequence
  Synthetic oligonucleotide: CBLB-6875
uggcuccaguagccggccauccu

SEQ ID NO: 37148 - RNA, 24 nt, Artificial Sequence
  Synthetic oligonucleotide: CBLB-6876
cuggcuccaguagccggccauccu

SEQ ID NO: 37149 - RNA, 18 nt, Artificial Sequence
  Synthetic oligonucleotide: CBLB-6877
aguugcccggagcauccu

SEQ ID NO: 37150 - RNA, 19 nt, Artificial Sequence
  Synthetic oligonucleotide: CBLB-6878
aaguugcccggagcauccu

SEQ ID NO: 37151 - RNA, 20 nt, Artificial Sequence
  Synthetic oligonucleotide: CBLB-6879
gaaguugcccggagcauccu

SEQ ID NO: 37152 - RNA, 21 nt, Artificial Sequence
  Synthetic oligonucleotide: CBLB-6880
cgaaguugcccggagcauccu

SEQ ID NO: 37153 - RNA, 22 nt, Artificial Sequence
  Synthetic oligonucleotide: CBLB-6881
ucgaaguugcccggagcauccu

SEQ ID NO: 37154 - RNA, 23 nt, Artificial Sequence
  Synthetic oligonucleotide: CBLB-6882
gucgaaguugcccggagcauccu

SEQ ID NO: 37155 - RNA, 24 nt, Artificial Sequence
  Synthetic oligonucleotide: CBLB-6883
ugucgaaguugcccggagcauccu

SEQ ID NO: 37156 - RNA, 18 nt, Artificial Sequence
  Synthetic oligonucleotide: CBLB-6884
ugugggaugucgacuccu

SEQ ID NO: 37157 - RNA, 19 nt, Artificial Sequence
  Synthetic oligonucleotide: CBLB-6885
uugugggaugucgacuccu

SEQ ID NO: 37158 - RNA, 20 nt, Artificial Sequence
  Synthetic oligonucleotide: CBLB-3362
cuugugggaugucgacuccu

SEQ ID NO: 37159 - RNA, 21 nt, Artificial Sequence
  Synthetic oligonucleotide: CBLB-6886
gcuugugggaugucgacuccu

SEQ ID NO: 37160 - RNA, 22 nt, Artificial Sequence
  Synthetic oligonucleotide: CBLB-6887
agcuugugggaugucgacuccu

SEQ ID NO: 37161 - RNA, 23 nt, Artificial Sequence
  Synthetic oligonucleotide: CBLB-6888
cagcuugugggaugucgacuccu

SEQ ID NO: 37162 - RNA, 24 nt, Artificial Sequence
  Synthetic oligonucleotide: CBLB-6889
ucagcuugugggaugucgacuccu

SEQ ID NO: 37163 - RNA, 18 nt, Artificial Sequence
  Synthetic oligonucleotide: CBLB-6890
aaaaucauuuuuauagcu

SEQ ID NO: 37164 - RNA, 19 nt, Artificial Sequence
  Synthetic oligonucleotide: CBLB-6891
aaaaaucauuuuuauagcu

SEQ ID NO: 37165 - RNA, 20 nt, Artificial Sequence
  Synthetic oligonucleotide: CBLB-6892
uaaaaaucauuuuuauagcu

SEQ ID NO: 37166 - RNA, 21 nt, Artificial Sequence
  Synthetic oligonucleotide: CBLB-6893
guaaaaaucauuuuuauagcu

SEQ ID NO: 37167 - RNA, 22 nt, Artificial Sequence
  Synthetic oligonucleotide: CBLB-6894
aguaaaaaucauuuuuauagcu

SEQ ID NO: 37168 - RNA, 23 nt, Artificial Sequence
  Synthetic oligonucleotide: CBLB-6895
aaguaaaaaucauuuuuauagcu

SEQ ID NO: 37169 - RNA, 24 nt, Artificial Sequence
  Synthetic oligonucleotide: CBLB-6896
uaaguaaaaaucauuuuuauagcu

SEQ ID NO: 37170 - RNA, 18 nt, Artificial Sequence
  Synthetic oligonucleotide: CBLB-6897
gguuuuguguuauccucu

SEQ ID NO: 37171 - RNA, 19 nt, Artificial Sequence
  Synthetic oligonucleotide: CBLB-6898
agguuuuguguuauccucu

SEQ ID NO: 37172 - RNA, 20 nt, Artificial Sequence
  Synthetic oligonucleotide: CBLB-3365
aagguuuuguguuauccucu

SEQ ID NO: 37173 - RNA, 21 nt, Artificial Sequence
  Synthetic oligonucleotide: CBLB-6899
uaagguuuuguguuauccucu

SEQ ID NO: 37174 - RNA, 22 nt, Artificial Sequence
  Synthetic oligonucleotide: CBLB-6900
uuaagguuuuguguuauccucu

SEQ ID NO: 37175 - RNA, 23 nt, Artificial Sequence
  Synthetic oligonucleotide: CBLB-6901
auuaagguuuuguguuauccucu

SEQ ID NO: 37176 - RNA, 24 nt, Artificial Sequence
  Synthetic oligonucleotide: CBLB-6902
cauuaagguuuuguguuauccucu

SEQ ID NO: 37177 - RNA, 18 nt, Artificial Sequence
  Synthetic oligonucleotide: CBLB-6903
cagggaaggauuguaagu

SEQ ID NO: 37178 - RNA, 19 nt, Artificial Sequence
  Synthetic oligonucleotide: CBLB-6904
gcagggaaggauuguaagu

SEQ ID NO: 37179 - RNA, 20 nt, Artificial Sequence
  Synthetic oligonucleotide: CBLB-6905
agcagggaaggauuguaagu

SEQ ID NO: 37180 - RNA, 21 nt, Artificial Sequence
  Synthetic oligonucleotide: CBLB-6906
cagcagggaaggauuguaagu

SEQ ID NO: 37181 - RNA, 22 nt, Artificial Sequence
  Synthetic oligonucleotide: CBLB-6907
gcagcagggaaggauuguaagu

SEQ ID NO: 37182 - RNA, 23 nt, Artificial Sequence
  Synthetic oligonucleotide: CBLB-6908
ggcagcagggaaggauuguaagu

SEQ ID NO: 37183 - RNA, 24 nt, Artificial Sequence
  Synthetic oligonucleotide: CBLB-6909
uggcagcagggaaggauuguaagu

SEQ ID NO: 37184 - RNA, 18 nt, Artificial Sequence
  Synthetic oligonucleotide: CBLB-6910
cuccuguucgguaagagu

SEQ ID NO: 37185 - RNA, 19 nt, Artificial Sequence
  Synthetic oligonucleotide: CBLB-6911
ccuccuguucgguaagagu

SEQ ID NO: 37186 - RNA, 20 nt, Artificial Sequence
  Synthetic oligonucleotide: CBLB-6912
accuccuguucgguaagagu

SEQ ID NO: 37187 - RNA, 21 nt, Artificial Sequence
  Synthetic oligonucleotide: CBLB-6913
aaccuccuguucgguaagagu

SEQ ID NO: 37188 - RNA, 22 nt, Artificial Sequence
  Synthetic oligonucleotide: CBLB-6914
aaaccuccuguucgguaagagu

SEQ ID NO: 37189 - RNA, 23 nt, Artificial Sequence
  Synthetic oligonucleotide: CBLB-6915
aaaaccuccuguucgguaagagu

SEQ ID NO: 37190 - RNA, 24 nt, Artificial Sequence
  Synthetic oligonucleotide: CBLB-6916
uaaaaccuccuguucgguaagagu

SEQ ID NO: 37191 - RNA, 18 nt, Artificial Sequence
  Synthetic oligonucleotide: CBLB-6917
gaaucgguuggcaaacgu

SEQ ID NO: 37192 - RNA, 19 nt, Artificial Sequence
  Synthetic oligonucleotide: CBLB-6918
ugaaucgguuggcaaacgu

SEQ ID NO: 37193 - RNA, 20 nt, Artificial Sequence
  Synthetic oligonucleotide: CBLB-6919
augaaucgguuggcaaacgu

SEQ ID NO: 37194 - RNA, 21 nt, Artificial Sequence
  Synthetic oligonucleotide: CBLB-6920
gaugaaucgguuggcaaacgu

SEQ ID NO: 37195 - RNA, 22 nt, Artificial Sequence
  Synthetic oligonucleotide: CBLB-6921
ugaugaaucgguuggcaaacgu

SEQ ID NO: 37196 - RNA, 23 nt, Artificial Sequence
  Synthetic oligonucleotide: CBLB-6922
augaugaaucgguuggcaaacgu

SEQ ID NO: 37197 - RNA, 24 nt, Artificial Sequence
  Synthetic oligonucleotide: CBLB-6923
gaugaugaaucgguuggcaaacgu

SEQ ID NO: 37198 - RNA, 18 nt, Artificial Sequence
  Synthetic oligonucleotide: CBLB-6924
gacgacgaugaugaucgu

SEQ ID NO: 37199 - RNA, 19 nt, Artificial Sequence
  Synthetic oligonucleotide: CBLB-6925
ggacgacgaugaugaucgu

SEQ ID NO: 37200 - RNA, 20 nt, Artificial Sequence
  Synthetic oligonucleotide: CBLB-6926
uggacgacgaugaugaucgu

SEQ ID NO: 37201 - RNA, 21 nt, Artificial Sequence
  Synthetic oligonucleotide: CBLB-6927
uuggacgacgaugaugaucgu

SEQ ID NO: 37202 - RNA, 22 nt, Artificial Sequence
  Synthetic oligonucleotide: CBLB-6928
cuuggacgacgaugaugaucgu

SEQ ID NO: 37203 - RNA, 23 nt, Artificial Sequence
  Synthetic oligonucleotide: CBLB-6929
acuuggacgacgaugaugaucgu

SEQ ID NO: 37204 - RNA, 24 nt, Artificial Sequence
  Synthetic oligonucleotide: CBLB-6930
gacuuggacgacgaugaugaucgu

SEQ ID NO: 37205 - RNA, 18 nt, Artificial Sequence
  Synthetic oligonucleotide: CBLB-6931
uuuagaaggagcuaaggu

SEQ ID NO: 37206 - RNA, 19 nt, Artificial Sequence
  Synthetic oligonucleotide: CBLB-6932
cuuuagaaggagcuaaggu

SEQ ID NO: 37207 - RNA, 20 nt, Artificial Sequence
  Synthetic oligonucleotide: CBLB-6933
ccuuuagaaggagcuaaggu

SEQ ID NO: 37208 - RNA, 21 nt, Artificial Sequence
  Synthetic oligonucleotide: CBLB-6934
gccuuuagaaggagcuaaggu

SEQ ID NO: 37209 - RNA, 22 nt, Artificial Sequence
  Synthetic oligonucleotide: CBLB-6935
ugccuuuagaaggagcuaaggu

SEQ ID NO: 37210 - RNA, 23 nt, Artificial Sequence
  Synthetic oligonucleotide: CBLB-6936
uugccuuuagaaggagcuaaggu

SEQ ID NO: 37211 - RNA, 24 nt, Artificial Sequence
  Synthetic oligonucleotide: CBLB-6937
uuugccuuuagaaggagcuaaggu

SEQ ID NO: 37212 - RNA, 18 nt, Artificial Sequence
  Synthetic oligonucleotide: CBLB-6938
uuucuucuuccuucaggu

SEQ ID NO: 37213 - RNA, 19 nt, Artificial Sequence
  Synthetic oligonucleotide: CBLB-6939
uuuucuucuuccuucaggu

SEQ ID NO: 37214 - RNA, 20 nt, Artificial Sequence
  Synthetic oligonucleotide: CBLB-3379
uuuuucuucuuccuucaggu

SEQ ID NO: 37215 - RNA, 21 nt, Artificial Sequence
  Synthetic oligonucleotide: CBLB-6940
cuuuuucuucuuccuucaggu

SEQ ID NO: 37216 - RNA, 22 nt, Artificial Sequence
  Synthetic oligonucleotide: CBLB-6941
ucuuuuucuucuuccuucaggu

SEQ ID NO: 37217 - RNA, 23 nt, Artificial Sequence
  Synthetic oligonucleotide: CBLB-6942
aucuuuuucuucuuccuucaggu

SEQ ID NO: 37218 - RNA, 24 nt, Artificial Sequence
  Synthetic oligonucleotide: CBLB-6943
gaucuuuuucuucuuccuucaggu

SEQ ID NO: 37219 - RNA, 18 nt, Artificial Sequence
  Synthetic oligonucleotide: CBLB-6944
gucuucuccuugcauggu

SEQ ID NO: 37220 - RNA, 19 nt, Artificial Sequence
  Synthetic oligonucleotide: CBLB-6945
agucuucuccuugcauggu

SEQ ID NO: 37221 - RNA, 20 nt, Artificial Sequence
  Synthetic oligonucleotide: CBLB-6946
uagucuucuccuugcauggu

SEQ ID NO: 37222 - RNA, 21 nt, Artificial Sequence
  Synthetic oligonucleotide: CBLB-6947
uuagucuucuccuugcauggu

SEQ ID NO: 37223 - RNA, 22 nt, Artificial Sequence
  Synthetic oligonucleotide: CBLB-6948
uuuagucuucuccuugcauggu

SEQ ID NO: 37224 - RNA, 23 nt, Artificial Sequence
  Synthetic oligonucleotide: CBLB-6949
cuuuagucuucuccuugcauggu

SEQ ID NO: 37225 - RNA, 24 nt, Artificial Sequence
  Synthetic oligonucleotide: CBLB-6950
ucuuuagucuucuccuugcauggu

SEQ ID NO: 37226 - RNA, 18 nt, Artificial Sequence
  Synthetic oligonucleotide: CBLB-6951
guuuaggagucggauggu

SEQ ID NO: 37227 - RNA, 19 nt, Artificial Sequence
  Synthetic oligonucleotide: CBLB-6952
uguuuaggagucggauggu

SEQ ID NO: 37228 - RNA, 20 nt, Artificial Sequence
  Synthetic oligonucleotide: CBLB-6953
uuguuuaggagucggauggu

SEQ ID NO: 37229 - RNA, 21 nt, Artificial Sequence
  Synthetic oligonucleotide: CBLB-6954
uuuguuuaggagucggauggu

SEQ ID NO: 37230 - RNA, 22 nt, Artificial Sequence
  Synthetic oligonucleotide: CBLB-6955
auuuguuuaggagucggauggu

SEQ ID NO: 37231 - RNA, 23 nt, Artificial Sequence
  Synthetic oligonucleotide: CBLB-6956
uauuuguuuaggagucggauggu

SEQ ID NO: 37232 - RNA, 24 nt, Artificial Sequence
  Synthetic oligonucleotide: CBLB-6957
cuauuuguuuaggagucggauggu

SEQ ID NO: 37233 - RNA, 18 nt, Artificial Sequence
  Synthetic oligonucleotide: CBLB-6958
ggugcccucgggaugugu

SEQ ID NO: 37234 - RNA, 19 nt, Artificial Sequence
  Synthetic oligonucleotide: CBLB-6959
uggugcccucgggaugugu

SEQ ID NO: 37235 - RNA, 20 nt, Artificial Sequence
  Synthetic oligonucleotide: CBLB-6960
auggugcccucgggaugugu

SEQ ID NO: 37236 - RNA, 21 nt, Artificial Sequence
  Synthetic oligonucleotide: CBLB-6961
cauggugcccucgggaugugu

SEQ ID NO: 37237 - RNA, 22 nt, Artificial Sequence
  Synthetic oligonucleotide: CBLB-6962
gcauggugcccucgggaugugu

SEQ ID NO: 37238 - RNA, 23 nt, Artificial Sequence
  Synthetic oligonucleotide: CBLB-6963
agcauggugcccucgggaugugu

SEQ ID NO: 37239 - RNA, 24 nt, Artificial Sequence
  Synthetic oligonucleotide: CBLB-6964
aagcauggugcccucgggaugugu

SEQ ID NO: 37240 - RNA, 18 nt, Artificial Sequence
  Synthetic oligonucleotide: CBLB-6965
agcagaugcugcugaauu

SEQ ID NO: 37241 - RNA, 19 nt, Artificial Sequence
  Synthetic oligonucleotide: CBLB-6966
aagcagaugcugcugaauu

SEQ ID NO: 37242 - RNA, 20 nt, Artificial Sequence
  Synthetic oligonucleotide: CBLB-6967
aaagcagaugcugcugaauu

SEQ ID NO: 37243 - RNA, 21 nt, Artificial Sequence
  Synthetic oligonucleotide: CBLB-6968
aaaagcagaugcugcugaauu

SEQ ID NO: 37244 - RNA, 22 nt, Artificial Sequence
  Synthetic oligonucleotide: CBLB-6969
caaaagcagaugcugcugaauu

SEQ ID NO: 37245 - RNA, 23 nt, Artificial Sequence
  Synthetic oligonucleotide: CBLB-6970
acaaaagcagaugcugcugaauu

SEQ ID NO: 37246 - RNA, 24 nt, Artificial Sequence
  Synthetic oligonucleotide: CBLB-6971
cacaaaagcagaugcugcugaauu

SEQ ID NO: 37247 - RNA, 18 nt, Artificial Sequence
  Synthetic oligonucleotide: CBLB-6972
agugaguuuuguugaauu

SEQ ID NO: 37248 - RNA, 19 nt, Artificial Sequence
  Synthetic oligonucleotide: CBLB-6973
aagugaguuuuguugaauu

SEQ ID NO: 37249 - RNA, 20 nt, Artificial Sequence
  Synthetic oligonucleotide: CBLB-3392
aaagugaguuuuguugaauu

SEQ ID NO: 37250 - RNA, 21 nt, Artificial Sequence
  Synthetic oligonucleotide: CBLB-6974
uaaagugaguuuuguugaauu

SEQ ID NO: 37251 - RNA, 22 nt, Artificial Sequence
  Synthetic oligonucleotide: CBLB-6975
auaaagugaguuuuguugaauu

SEQ ID NO: 37252 - RNA, 23 nt, Artificial Sequence
  Synthetic oligonucleotide: CBLB-6976
cauaaagugaguuuuguugaauu

SEQ ID NO: 37253 - RNA, 24 nt, Artificial Sequence
  Synthetic oligonucleotide: CBLB-6977
gcauaaagugaguuuuguugaauu

SEQ ID NO: 37254 - RNA, 18 nt, Artificial Sequence
  Synthetic oligonucleotide: CBLB-6978
ccucgccuggaucuaauu

SEQ ID NO: 37255 - RNA, 19 nt, Artificial Sequence
  Synthetic oligonucleotide: CBLB-6979
uccucgccuggaucuaauu

SEQ ID NO: 37256 - RNA, 20 nt, Artificial Sequence
  Synthetic oligonucleotide: CBLB-6980
cuccucgccuggaucuaauu

SEQ ID NO: 37257 - RNA, 21 nt, Artificial Sequence
  Synthetic oligonucleotide: CBLB-6981
ccuccucgccuggaucuaauu

SEQ ID NO: 37258 - RNA, 22 nt, Artificial Sequence
  Synthetic oligonucleotide: CBLB-6982
gccuccucgccuggaucuaauu

SEQ ID NO: 37259 - RNA, 23 nt, Artificial Sequence
  Synthetic oligonucleotide: CBLB-6983
ugccuccucgccuggaucuaauu

SEQ ID NO: 37260 - RNA, 24 nt, Artificial Sequence
  Synthetic oligonucleotide: CBLB-6984
gugccuccucgccuggaucuaauu

SEQ ID NO: 37261 - RNA, 18 nt, Artificial Sequence
  Synthetic oligonucleotide: CBLB-6985
aacaauaugaauuauauu

SEQ ID NO: 37262 - RNA, 19 nt, Artificial Sequence
  Synthetic oligonucleotide: CBLB-6986
gaacaauaugaauuauauu

SEQ ID NO: 37263 - RNA, 20 nt, Artificial Sequence
  Synthetic oligonucleotide: CBLB-6987
ggaacaauaugaauuauauu

SEQ ID NO: 37264 - RNA, 21 nt, Artificial Sequence
  Synthetic oligonucleotide: CBLB-6988
aggaacaauaugaauuauauu

SEQ ID NO: 37265 - RNA, 22 nt, Artificial Sequence
  Synthetic oligonucleotide: CBLB-6989
caggaacaauaugaauuauauu

SEQ ID NO: 37266 - RNA, 23 nt, Artificial Sequence
  Synthetic oligonucleotide: CBLB-6990
ccaggaacaauaugaauuauauu

SEQ ID NO: 37267 - RNA, 24 nt, Artificial Sequence
  Synthetic oligonucleotide: CBLB-6991
uccaggaacaauaugaauuauauu

SEQ ID NO: 37268 - RNA, 18 nt, Artificial Sequence
  Synthetic oligonucleotide: CBLB-6992
agcaccaccuccucccuu

SEQ ID NO: 37269 - RNA, 19 nt, Artificial Sequence
  Synthetic oligonucleotide: CBLB-6993
cagcaccaccuccucccuu

SEQ ID NO: 37270 - RNA, 20 nt, Artificial Sequence
  Synthetic oligonucleotide: CBLB-6994
ccagcaccaccuccucccuu

SEQ ID NO: 37271 - RNA, 21 nt, Artificial Sequence
  Synthetic oligonucleotide: CBLB-6995
cccagcaccaccuccucccuu

SEQ ID NO: 37272 - RNA, 22 nt, Artificial Sequence
  Synthetic oligonucleotide: CBLB-6996
ucccagcaccaccuccucccuu

SEQ ID NO: 37273 - RNA, 23 nt, Artificial Sequence
  Synthetic oligonucleotide: CBLB-6997
cucccagcaccaccuccucccuu

SEQ ID NO: 37274 - RNA, 24 nt, Artificial Sequence
  Synthetic oligonucleotide: CBLB-6998
acucccagcaccaccuccucccuu

SEQ ID NO: 37275 - RNA, 18 nt, Artificial Sequence
  Synthetic oligonucleotide: CBLB-6999
augucaagauugagccuu

SEQ ID NO: 37276 - RNA, 19 nt, Artificial Sequence
  Synthetic oligonucleotide: CBLB-7000
gaugucaagauugagccuu

SEQ ID NO: 37277 - RNA, 20 nt, Artificial Sequence
  Synthetic oligonucleotide: CBLB-7001
agaugucaagauugagccuu

SEQ ID NO: 37278 - RNA, 21 nt, Artificial Sequence
  Synthetic oligonucleotide: CBLB-7002
aagaugucaagauugagccuu

SEQ ID NO: 37279 - RNA, 22 nt, Artificial Sequence
  Synthetic oligonucleotide: CBLB-7003
aaagaugucaagauugagccuu

SEQ ID NO: 37280 - RNA, 23 nt, Artificial Sequence
  Synthetic oligonucleotide: CBLB-7004
caaagaugucaagauugagccuu

SEQ ID NO: 37281 - RNA, 24 nt, Artificial Sequence
  Synthetic oligonucleotide: CBLB-7005
acaaagaugucaagauugagccuu

SEQ ID NO: 37282 - RNA, 18 nt, Artificial Sequence
  Synthetic oligonucleotide: CBLB-7006
gacgccaugauuugccuu

SEQ ID NO: 37283 - RNA, 19 nt, Artificial Sequence
  Synthetic oligonucleotide: CBLB-7007
agacgccaugauuugccuu

SEQ ID NO: 37284 - RNA, 20 nt, Artificial Sequence
  Synthetic oligonucleotide: CBLB-7008
cagacgccaugauuugccuu

SEQ ID NO: 37285 - RNA, 21 nt, Artificial Sequence
  Synthetic oligonucleotide: CBLB-7009
acagacgccaugauuugccuu

SEQ ID NO: 37286 - RNA, 22 nt, Artificial Sequence
  Synthetic oligonucleotide: CBLB-7010
cacagacgccaugauuugccuu

SEQ ID NO: 37287 - RNA, 23 nt, Artificial Sequence
  Synthetic oligonucleotide: CBLB-7011
acacagacgccaugauuugccuu

SEQ ID NO: 37288 - RNA, 24 nt, Artificial Sequence
  Synthetic oligonucleotide: CBLB-7012
aacacagacgccaugauuugccuu

SEQ ID NO: 37289 - RNA, 18 nt, Artificial Sequence
  Synthetic oligonucleotide: CBLB-7013
uuugggacuaaucagcuu

SEQ ID NO: 37290 - RNA, 19 nt, Artificial Sequence
  Synthetic oligonucleotide: CBLB-7014
guuugggacuaaucagcuu

SEQ ID NO: 37291 - RNA, 20 nt, Artificial Sequence
  Synthetic oligonucleotide: CBLB-7015
uguuugggacuaaucagcuu

SEQ ID NO: 37292 - RNA, 21 nt, Artificial Sequence
  Synthetic oligonucleotide: CBLB-7016
guguuugggacuaaucagcuu

SEQ ID NO: 37293 - RNA, 22 nt, Artificial Sequence
  Synthetic oligonucleotide: CBLB-7017
uguguuugggacuaaucagcuu

SEQ ID NO: 37294 - RNA, 23 nt, Artificial Sequence
  Synthetic oligonucleotide: CBLB-7018
auguguuugggacuaaucagcuu

SEQ ID NO: 37295 - RNA, 24 nt, Artificial Sequence
  Synthetic oligonucleotide: CBLB-7019
gauguguuugggacuaaucagcuu

SEQ ID NO: 37296 - RNA, 18 nt, Artificial Sequence
  Synthetic oligonucleotide: CBLB-7020
gaacacaugguccaucuu

SEQ ID NO: 37297 - RNA, 19 nt, Artificial Sequence
  Synthetic oligonucleotide: CBLB-7021
ggaacacaugguccaucuu

SEQ ID NO: 37298 - RNA, 20 nt, Artificial Sequence
  Synthetic oligonucleotide: CBLB-7022
uggaacacaugguccaucuu

SEQ ID NO: 37299 - RNA, 21 nt, Artificial Sequence
  Synthetic oligonucleotide: CBLB-7023
auggaacacaugguccaucuu

SEQ ID NO: 37300 - RNA, 22 nt, Artificial Sequence
  Synthetic oligonucleotide: CBLB-7024
aauggaacacaugguccaucuu

SEQ ID NO: 37301 - RNA, 23 nt, Artificial Sequence
  Synthetic oligonucleotide: CBLB-7025
gaauggaacacaugguccaucuu

SEQ ID NO: 37302 - RNA, 24 nt, Artificial Sequence
  Synthetic oligonucleotide: CBLB-7026
ugaauggaacacaugguccaucuu

SEQ ID NO: 37303 - RNA, 18 nt, Artificial Sequence
  Synthetic oligonucleotide: CBLB-7027
gaaaccuuuaaaaaaguu

SEQ ID NO: 37304 - RNA, 19 nt, Artificial Sequence
  Synthetic oligonucleotide: CBLB-7028
ugaaaccuuuaaaaaaguu

SEQ ID NO: 37305 - RNA, 20 nt, Artificial Sequence
  Synthetic oligonucleotide: CBLB-7029
uugaaaccuuuaaaaaaguu

SEQ ID NO: 37306 - RNA, 21 nt, Artificial Sequence
  Synthetic oligonucleotide: CBLB-7030
guugaaaccuuuaaaaaaguu

SEQ ID NO: 37307 - RNA, 22 nt, Artificial Sequence
  Synthetic oligonucleotide: CBLB-7031
gguugaaaccuuuaaaaaaguu

SEQ ID NO: 37308 - RNA, 23 nt, Artificial Sequence
  Synthetic oligonucleotide: CBLB-7032
agguugaaaccuuuaaaaaaguu

SEQ ID NO: 37309 - RNA, 24 nt, Artificial Sequence
  Synthetic oligonucleotide: CBLB-7033
uagguugaaaccuuuaaaaaaguu

SEQ ID NO: 37310 - RNA, 18 nt, Artificial Sequence
  Synthetic oligonucleotide: CBLB-7034
gcugcccuuucugucguu

SEQ ID NO: 37311 - RNA, 19 nt, Artificial Sequence
  Synthetic oligonucleotide: CBLB-7035
ggcugcccuuucugucguu

SEQ ID NO: 37312 - RNA, 20 nt, Artificial Sequence
  Synthetic oligonucleotide: CBLB-7036
gggcugcccuuucugucguu

SEQ ID NO: 37313 - RNA, 21 nt, Artificial Sequence
  Synthetic oligonucleotide: CBLB-7037
agggcugcccuuucugucguu

SEQ ID NO: 37314 - RNA, 22 nt, Artificial Sequence
  Synthetic oligonucleotide: CBLB-7038
cagggcugcccuuucugucguu

SEQ ID NO: 37315 - RNA, 23 nt, Artificial Sequence
  Synthetic oligonucleotide: CBLB-7039
ucagggcugcccuuucugucguu

SEQ ID NO: 37316 - RNA, 24 nt, Artificial Sequence
  Synthetic oligonucleotide: CBLB-7040
gucagggcugcccuuucugucguu

SEQ ID NO: 37317 - RNA, 18 nt, Artificial Sequence
  Synthetic oligonucleotide: CBLB-7041
gugcccucgggauguguu

SEQ ID NO: 37318 - RNA, 19 nt, Artificial Sequence
  Synthetic oligonucleotide: CBLB-7042
ggugcccucgggauguguu

SEQ ID NO: 37319 - RNA, 20 nt, Artificial Sequence
  Synthetic oligonucleotide: CBLB-3403
uggugcccucgggauguguu

SEQ ID NO: 37320 - RNA, 21 nt, Artificial Sequence
  Synthetic oligonucleotide: CBLB-7043
auggugcccucgggauguguu

SEQ ID NO: 37321 - RNA, 22 nt, Artificial Sequence
  Synthetic oligonucleotide: CBLB-7044
cauggugcccucgggauguguu

SEQ ID NO: 37322 - RNA, 23 nt, Artificial Sequence
  Synthetic oligonucleotide: CBLB-7045
gcauggugcccucgggauguguu

SEQ ID NO: 37323 - RNA, 24 nt, Artificial Sequence
  Synthetic oligonucleotide: CBLB-7046
agcauggugcccucgggauguguu

SEQ ID NO: 37324 - RNA, 18 nt, Artificial Sequence
  Synthetic oligonucleotide: CBLB-7047
augcauuuucuauuuguu

SEQ ID NO: 37325 - RNA, 19 nt, Artificial Sequence
  Synthetic oligonucleotide: CBLB-7048
caugcauuuucuauuuguu

SEQ ID NO: 37326 - RNA, 20 nt, Artificial Sequence
  Synthetic oligonucleotide: CBLB-7049
ccaugcauuuucuauuuguu

SEQ ID NO: 37327 - RNA, 21 nt, Artificial Sequence
  Synthetic oligonucleotide: CBLB-7050
uccaugcauuuucuauuuguu

SEQ ID NO: 37328 - RNA, 22 nt, Artificial Sequence
  Synthetic oligonucleotide: CBLB-7051
auccaugcauuuucuauuuguu

SEQ ID NO: 37329 - RNA, 23 nt, Artificial Sequence
  Synthetic oligonucleotide: CBLB-7052
aauccaugcauuuucuauuuguu

SEQ ID NO: 37330 - RNA, 24 nt, Artificial Sequence
  Synthetic oligonucleotide: CBLB-7053
caauccaugcauuuucuauuuguu

SEQ ID NO: 37331 - RNA, 18 nt, Artificial Sequence
  Synthetic oligonucleotide: CBLB-7054
cguuagcaaauucucuuu

SEQ ID NO: 37332 - RNA, 19 nt, Artificial Sequence
  Synthetic oligonucleotide: CBLB-7055
ccguuagcaaauucucuuu

SEQ ID NO: 37333 - RNA, 20 nt, Artificial Sequence
  Synthetic oligonucleotide: CBLB-7056
uccguuagcaaauucucuuu

SEQ ID NO: 37334 - RNA, 21 nt, Artificial Sequence
  Synthetic oligonucleotide: CBLB-7057
guccguuagcaaauucucuuu

SEQ ID NO: 37335 - RNA, 22 nt, Artificial Sequence
  Synthetic oligonucleotide: CBLB-7058
gguccguuagcaaauucucuuu

SEQ ID NO: 37336 - RNA, 23 nt, Artificial Sequence
  Synthetic oligonucleotide: CBLB-7059
ugguccguuagcaaauucucuuu

SEQ ID NO: 37337 - RNA, 24 nt, Artificial Sequence
  Synthetic oligonucleotide: CBLB-7060
cugguccguuagcaaauucucuuu

SEQ ID NO: 37338 - RNA, 18 nt, Artificial Sequence
  Synthetic oligonucleotide: CBLB-7061
gccuuggggcucuauuuu

SEQ ID NO: 37339 - RNA, 19 nt, Artificial Sequence
  Synthetic oligonucleotide: CBLB-7062
agccuuggggcucuauuuu

SEQ ID NO: 37340 - RNA, 20 nt, Artificial Sequence
  Synthetic oligonucleotide: CBLB-7063
uagccuuggggcucuauuuu

SEQ ID NO: 37341 - RNA, 21 nt, Artificial Sequence
  Synthetic oligonucleotide: CBLB-7064
uuagccuuggggcucuauuuu

SEQ ID NO: 37342 - RNA, 22 nt, Artificial Sequence
  Synthetic oligonucleotide: CBLB-7065
uuuagccuuggggcucuauuuu

SEQ ID NO: 37343 - RNA, 23 nt, Artificial Sequence
  Synthetic oligonucleotide: CBLB-7066
uuuuagccuuggggcucuauuuu

SEQ ID NO: 37344 - RNA, 24 nt, Artificial Sequence
  Synthetic oligonucleotide: CBLB-7067
uuuuuagccuuggggcucuauuuu

SEQ ID NO: 37345 - RNA, 18 nt, Artificial Sequence
  Synthetic oligonucleotide: CBLB-7068
aauucuggagaaaguuuu

SEQ ID NO: 37346 - RNA, 19 nt, Artificial Sequence
  Synthetic oligonucleotide: CBLB-7069
gaauucuggagaaaguuuu

SEQ ID NO: 37347 - RNA, 20 nt, Artificial Sequence
  Synthetic oligonucleotide: CBLB-7070
ugaauucuggagaaaguuuu

SEQ ID NO: 37348 - RNA, 21 nt, Artificial Sequence
  Synthetic oligonucleotide: CBLB-7071
cugaauucuggagaaaguuuu

SEQ ID NO: 37349 - RNA, 22 nt, Artificial Sequence
  Synthetic oligonucleotide: CBLB-7072
gcugaauucuggagaaaguuuu

SEQ ID NO: 37350 - RNA, 23 nt, Artificial Sequence
  Synthetic oligonucleotide: CBLB-7073
ugcugaauucuggagaaaguuuu

SEQ ID NO: 37351 - RNA, 24 nt, Artificial Sequence
  Synthetic oligonucleotide: CBLB-7074
cugcugaauucuggagaaaguuuu

SEQ ID NO: 37352 - RNA, 18 nt, Artificial Sequence
  Synthetic oligonucleotide: CBLB-7075
auucuggagaaaguuuuu

SEQ ID NO: 37353 - RNA, 19 nt, Artificial Sequence
  Synthetic oligonucleotide: CBLB-7076
aauucuggagaaaguuuuu

SEQ ID NO: 37354 - RNA, 20 nt, Artificial Sequence
  Synthetic oligonucleotide: CBLB-3411
gaauucuggagaaaguuuuu

SEQ ID NO: 37355 - RNA, 21 nt, Artificial Sequence
  Synthetic oligonucleotide: CBLB-7077
ugaauucuggagaaaguuuuu

SEQ ID NO: 37356 - RNA, 22 nt, Artificial Sequence
  Synthetic oligonucleotide: CBLB-7078
cugaauucuggagaaaguuuuu

SEQ ID NO: 37357 - RNA, 23 nt, Artificial Sequence
  Synthetic oligonucleotide: CBLB-7079
gcugaauucuggagaaaguuuuu

SEQ ID NO: 37358 - RNA, 24 nt, Artificial Sequence
  Synthetic oligonucleotide: CBLB-7080
ugcugaauucuggagaaaguuuuu

SEQ ID NO: 37359 - RNA, 17 nt, Artificial Sequence
  Synthetic oligonucleotide: CBLB-7081
uccugcgaucugcggca

SEQ ID NO: 37360 - RNA, 17 nt, Artificial Sequence
  Synthetic oligonucleotide: CBLB-7082
aacuuaccacuuugucc

SEQ ID NO: 37361 - RNA, 17 nt, Artificial Sequence
  Synthetic oligonucleotide: CBLB-7083
acgguccugcgaucugc

SEQ ID NO: 37362 - RNA, 17 nt, Artificial Sequence
  Synthetic oligonucleotide: CBLB-2578
ccaaaauucgaccuuuu

SEQ ID NO: 37363 - RNA, 20 nt, Artificial Sequence
  Synthetic oligonucleotide: CBLB-7084
ggaauuuuaguucuuuaaaa

SEQ ID NO: 37364 - RNA, 20 nt, Artificial Sequence
  Synthetic oligonucleotide: CBLB-7085
cuuuuucauaaggcuaucaa

SEQ ID NO: 37365 - RNA, 20 nt, Artificial Sequence
  Synthetic oligonucleotide: CBLB-7086
cgguccugcgaucugcggca

SEQ ID NO: 37366 - RNA, 20 nt, Artificial Sequence
  Synthetic oligonucleotide: CBLB-3546
cagaacuuaccacuuugucc

SEQ ID NO: 37367 - RNA, 20 nt, Artificial Sequence
  Synthetic oligonucleotide: CBLB-7087
uccacgguccugcgaucugc

SEQ ID NO: 37368 - RNA, 20 nt, Artificial Sequence
  Synthetic oligonucleotide: CBLB-3581
ggcuauuuuucaacugaagu

SEQ ID NO: 37369 - RNA, 20 nt, Artificial Sequence
  Synthetic oligonucleotide: CBLB-2538
uacccaaaauucgaccuuuu

SEQ ID NO: 37370 - RNA, 17 nt, Artificial Sequence
  Synthetic oligonucleotide: CBLB-7088
auuuuaguucuuuaaaa

SEQ ID NO: 37371 - RNA, 17 nt, Artificial Sequence
  Synthetic oligonucleotide: CBLB-7089
uuucauaaggcuaucaa

SEQ ID NO: 37372 - RNA, 17 nt, Artificial Sequence
  Synthetic oligonucleotide: CBLB-7090
uauuuuucaacugaagu

SEQ ID NO: 37373 - RNA, 17 nt, Artificial Sequence
  Synthetic oligonucleotide: CBLB-7091
aauugaccauugggaaa

SEQ ID NO: 37374 - RNA, 17 nt, Artificial Sequence
  Synthetic oligonucleotide: CBLB-7092
cacauaauccaguuaaa

SEQ ID NO: 37375 - RNA, 17 nt, Artificial Sequence
  Synthetic oligonucleotide: CBLB-7093
uccuguugagugaagaa

SEQ ID NO: 37376 - RNA, 17 nt, Artificial Sequence
  Synthetic oligonucleotide: CBLB-7094
gaugggaggaguuauaa

SEQ ID NO: 37377 - RNA, 17 nt, Artificial Sequence
  Synthetic oligonucleotide: CBLB-7095
aaaaauaaaaaaauuaa

SEQ ID NO: 37378 - RNA, 17 nt, Artificial Sequence
  Synthetic oligonucleotide: CBLB-7096
ggagucgacaucccaca

SEQ ID NO: 37379 - RNA, 17 nt, Artificial Sequence
  Synthetic oligonucleotide: CBLB-7097
aacacaucccgagggca

SEQ ID NO: 37380 - RNA, 17 nt, Artificial Sequence
  Synthetic oligonucleotide: CBLB-7098
ucuuuaaaugcagguga

SEQ ID NO: 37381 - RNA, 17 nt, Artificial Sequence
  Synthetic oligonucleotide: CBLB-7099
ggauguguuugggacua

SEQ ID NO: 37382 - RNA, 17 nt, Artificial Sequence
  Synthetic oligonucleotide: CBLB-7100
guuauaauccugauuua

SEQ ID NO: 37383 - RNA, 17 nt, Artificial Sequence
  Synthetic oligonucleotide: CBLB-7101
auggcucuaaaaucaac

SEQ ID NO: 37384 - RNA, 17 nt, Artificial Sequence
  Synthetic oligonucleotide: CBLB-7102
uagagugggcucugacc

SEQ ID NO: 37385 - RNA, 17 nt, Artificial Sequence
  Synthetic oligonucleotide: CBLB-7103
ucacucaacaggacgcc

SEQ ID NO: 37386 - RNA, 17 nt, Artificial Sequence
  Synthetic oligonucleotide: CBLB-7104
ccuuucggacguuugcc

SEQ ID NO: 37387 - RNA, 17 nt, Artificial Sequence
  Synthetic oligonucleotide: CBLB-7105
gugccuucaugaggucc

SEQ ID NO: 37388 - RNA, 17 nt, Artificial Sequence
  Synthetic oligonucleotide: CBLB-7106
cuccagaauucagcagc

SEQ ID NO: 37389 - RNA, 17 nt, Artificial Sequence
  Synthetic oligonucleotide: CBLB-7107
auuguugauuuuagagc

SEQ ID NO: 37390 - RNA, 17 nt, Artificial Sequence
  Synthetic oligonucleotide: CBLB-7108
ucuggagugggucaggc

SEQ ID NO: 37391 - RNA, 17 nt, Artificial Sequence
  Synthetic oligonucleotide: CBLB-7109
ugagugaagaaccaugc

SEQ ID NO: 37392 - RNA, 17 nt, Artificial Sequence
  Synthetic oligonucleotide: CBLB-7110
ucuacaguucuggcugc

SEQ ID NO: 37393 - RNA, 17 nt, Artificial Sequence
  Synthetic oligonucleotide: CBLB-7111
uuuuccgguuaaguugc

SEQ ID NO: 37394 - RNA, 17 nt, Artificial Sequence
  Synthetic oligonucleotide: CBLB-7112
aaagacauccauguugc

SEQ ID NO: 37395 - RNA, 17 nt, Artificial Sequence
  Synthetic oligonucleotide: CBLB-7113
agaauaugauguuccuc

SEQ ID NO: 37396 - RNA, 17 nt, Artificial Sequence
  Synthetic oligonucleotide: CBLB-7114
caagcccuuauuucaag

SEQ ID NO: 37397 - RNA, 17 nt, Artificial Sequence
  Synthetic oligonucleotide: CBLB-7115
uggcgggucucuggaag

SEQ ID NO: 37398 - RNA, 17 nt, Artificial Sequence
  Synthetic oligonucleotide: CBLB-7116
gugcuauauuucuguag

SEQ ID NO: 37399 - RNA, 17 nt, Artificial Sequence
  Synthetic oligonucleotide: CBLB-7117
augcggaaacacagacg

SEQ ID NO: 37400 - RNA, 17 nt, Artificial Sequence
  Synthetic oligonucleotide: CBLB-7118
auugacauuugaacucg

SEQ ID NO: 37401 - RNA, 17 nt, Artificial Sequence
  Synthetic oligonucleotide: CBLB-7119
ugauugauggcagcagg

SEQ ID NO: 37402 - RNA, 17 nt, Artificial Sequence
  Synthetic oligonucleotide: CBLB-7120
cuggaauugaccauugg

SEQ ID NO: 37403 - RNA, 17 nt, Artificial Sequence
  Synthetic oligonucleotide: CBLB-7121
uaaacaaauagaaaaug

SEQ ID NO: 37404 - RNA, 17 nt, Artificial Sequence
  Synthetic oligonucleotide: CBLB-7122
agagaaugacaaagaug

SEQ ID NO: 37405 - RNA, 17 nt, Artificial Sequence
  Synthetic oligonucleotide: CBLB-7123
aacaucacaggacuaug

SEQ ID NO: 37406 - RNA, 17 nt, Artificial Sequence
  Synthetic oligonucleotide: CBLB-7124
uguucgguaagaguaug

SEQ ID NO: 37407 - RNA, 17 nt, Artificial Sequence
  Synthetic oligonucleotide: CBLB-7125
ugccugugaaccaucug

SEQ ID NO: 37408 - RNA, 17 nt, Artificial Sequence
  Synthetic oligonucleotide: CBLB-7126
acucagucuauugucug

SEQ ID NO: 37409 - RNA, 17 nt, Artificial Sequence
  Synthetic oligonucleotide: CBLB-7127
gcgaggaggcacgggug

SEQ ID NO: 37410 - RNA, 17 nt, Artificial Sequence
  Synthetic oligonucleotide: CBLB-7128
accauugggaaagauug

SEQ ID NO: 37411 - RNA, 17 nt, Artificial Sequence
  Synthetic oligonucleotide: CBLB-7129
acaauugauuuaacuug

SEQ ID NO: 37412 - RNA, 17 nt, Artificial Sequence
  Synthetic oligonucleotide: CBLB-7130
caaucagggcuugaaau

SEQ ID NO: 37413 - RNA, 17 nt, Artificial Sequence
  Synthetic oligonucleotide: CBLB-7131
auacguacccuuuaaau

SEQ ID NO: 37414 - RNA, 17 nt, Artificial Sequence
  Synthetic oligonucleotide: CBLB-7132
uugcaaguuaaaucaau

SEQ ID NO: 37415 - RNA, 17 nt, Artificial Sequence
  Synthetic oligonucleotide: CBLB-7133
ucccugcugccaucaau

SEQ ID NO: 37416 - RNA, 17 nt, Artificial Sequence
  Synthetic oligonucleotide: CBLB-7134
ggaagaugaugaugaau

SEQ ID NO: 37417 - RNA, 17 nt, Artificial Sequence
  Synthetic oligonucleotide: CBLB-7135
augcuuaagucagggau

SEQ ID NO: 37418 - RNA, 17 nt, Artificial Sequence
  Synthetic oligonucleotide: CBLB-7136
guuucagguaaguuuau

SEQ ID NO: 37419 - RNA, 17 nt, Artificial Sequence
  Synthetic oligonucleotide: CBLB-7137
cuccacuuuucagcucu

SEQ ID NO: 37420 - RNA, 17 nt, Artificial Sequence
  Synthetic oligonucleotide: CBLB-7138
ucuuggaucaaaggggu

SEQ ID NO: 37421 - RNA, 17 nt, Artificial Sequence
  Synthetic oligonucleotide: CBLB-7139
uauccucuaggagaugu

SEQ ID NO: 37422 - RNA, 17 nt, Artificial Sequence
  Synthetic oligonucleotide: CBLB-7140
agauaagggacaguuuu

SEQ ID NO: 37423 - RNA, 20 nt, Artificial Sequence
  Synthetic oligonucleotide: CBLB-7141
uggaauugaccauugggaaa

SEQ ID NO: 37424 - RNA, 20 nt, Artificial Sequence
  Synthetic oligonucleotide: CBLB-7142
guucacauaauccaguuaaa

SEQ ID NO: 37425 - RNA, 20 nt, Artificial Sequence
  Synthetic oligonucleotide: CBLB-7143
gcguccuguugagugaagaa

SEQ ID NO: 37426 - RNA, 20 nt, Artificial Sequence
  Synthetic oligonucleotide: CBLB-7144
ccugaugggaggaguuauaa

SEQ ID NO: 37427 - RNA, 20 nt, Artificial Sequence
  Synthetic oligonucleotide: CBLB-4582
cuaaaaaauaaaaaaauuaa

SEQ ID NO: 37428 - RNA, 20 nt, Artificial Sequence
  Synthetic oligonucleotide: CBLB-7145
cuaggagucgacaucccaca

SEQ ID NO: 37429 - RNA, 20 nt, Artificial Sequence
  Synthetic oligonucleotide: CBLB-7146
ccaaacacaucccgagggca

SEQ ID NO: 37430 - RNA, 20 nt, Artificial Sequence
  Synthetic oligonucleotide: CBLB-7147
cuuucuuuaaaugcagguga

SEQ ID NO: 37431 - RNA, 20 nt, Artificial Sequence
  Synthetic oligonucleotide: CBLB-7148
ucgggauguguuugggacua

SEQ ID NO: 37432 - RNA, 20 nt, Artificial Sequence
  Synthetic oligonucleotide: CBLB-7149
ggaguuauaauccugauuua

SEQ ID NO: 37433 - RNA, 20 nt, Artificial Sequence
  Synthetic oligonucleotide: CBLB-7150
gcaauggcucuaaaaucaac

SEQ ID NO: 37434 - RNA, 20 nt, Artificial Sequence
  Synthetic oligonucleotide: CBLB-7151
caguagagugggcucugacc

SEQ ID NO: 37435 - RNA, 20 nt, Artificial Sequence
  Synthetic oligonucleotide: CBLB-7152
ucuucacucaacaggacgcc

SEQ ID NO: 37436 - RNA, 20 nt, Artificial Sequence
  Synthetic oligonucleotide: CBLB-7153
uuaccuuucggacguuugcc

SEQ ID NO: 37437 - RNA, 20 nt, Artificial Sequence
  Synthetic oligonucleotide: CBLB-7154
acagugccuucaugaggucc

SEQ ID NO: 37438 - RNA, 20 nt, Artificial Sequence
  Synthetic oligonucleotide: CBLB-7155
uuucuccagaauucagcagc

SEQ ID NO: 37439 - RNA, 20 nt, Artificial Sequence
  Synthetic oligonucleotide: CBLB-7156
ucaauuguugauuuuagagc

SEQ ID NO: 37440 - RNA, 20 nt, Artificial Sequence
  Synthetic oligonucleotide: CBLB-7157
ggaucuggagugggucaggc

SEQ ID NO: 37441 - RNA, 20 nt, Artificial Sequence
  Synthetic oligonucleotide: CBLB-7158
uguugagugaagaaccaugc

SEQ ID NO: 37442 - RNA, 20 nt, Artificial Sequence
  Synthetic oligonucleotide: CBLB-7159
gugucuacaguucuggcugc

SEQ ID NO: 37443 - RNA, 20 nt, Artificial Sequence
  Synthetic oligonucleotide: CBLB-7160
auauuuuccgguuaaguugc

SEQ ID NO: 37444 - RNA, 20 nt, Artificial Sequence
  Synthetic oligonucleotide: CBLB-7161
ugaagaauaugauguuccuc

SEQ ID NO: 37445 - RNA, 20 nt, Artificial Sequence
  Synthetic oligonucleotide: CBLB-7162
uaacaagcccuuauuucaag

SEQ ID NO: 37446 - RNA, 20 nt, Artificial Sequence
  Synthetic oligonucleotide: CBLB-7163
cauuggcgggucucuggaag

SEQ ID NO: 37447 - RNA, 20 nt, Artificial Sequence
  Synthetic oligonucleotide: CBLB-7164
uuggugcuauauuucuguag

SEQ ID NO: 37448 - RNA, 20 nt, Artificial Sequence
  Synthetic oligonucleotide: CBLB-7165
cuuaugcggaaacacagacg

SEQ ID NO: 37449 - RNA, 20 nt, Artificial Sequence
  Synthetic oligonucleotide: CBLB-7166
uccauugacauuugaacucg

SEQ ID NO: 37450 - RNA, 20 nt, Artificial Sequence
  Synthetic oligonucleotide: CBLB-7167
cccugauugauggcagcagg

SEQ ID NO: 37451 - RNA, 20 nt, Artificial Sequence
  Synthetic oligonucleotide: CBLB-7168
ucccuggaauugaccauugg

SEQ ID NO: 37452 - RNA, 20 nt, Artificial Sequence
  Synthetic oligonucleotide: CBLB-7169
uccuaaacaaauagaaaaug

SEQ ID NO: 37453 - RNA, 20 nt, Artificial Sequence
  Synthetic oligonucleotide: CBLB-7170
ugcagagaaugacaaagaug

SEQ ID NO: 37454 - RNA, 20 nt, Artificial Sequence
  Synthetic oligonucleotide: CBLB-7171
cagaacaucacaggacuaug

SEQ ID NO: 37455 - RNA, 20 nt, Artificial Sequence
  Synthetic oligonucleotide: CBLB-7172
uccuguucgguaagaguaug

SEQ ID NO: 37456 - RNA, 20 nt, Artificial Sequence
  Synthetic oligonucleotide: CBLB-7173
uggugccugugaaccaucug

SEQ ID NO: 37457 - RNA, 20 nt, Artificial Sequence
  Synthetic oligonucleotide: CBLB-5611
ucuacucagucuauugucug

SEQ ID NO: 37458 - RNA, 20 nt, Artificial Sequence
  Synthetic oligonucleotide: CBLB-7174
caggcgaggaggcacgggug

SEQ ID NO: 37459 - RNA, 20 nt, Artificial Sequence
  Synthetic oligonucleotide: CBLB-7175
uugaccauugggaaagauug

SEQ ID NO: 37460 - RNA, 20 nt, Artificial Sequence
  Synthetic oligonucleotide: CBLB-7176
ucaacaauugauuuaacuug

SEQ ID NO: 37461 - RNA, 20 nt, Artificial Sequence
  Synthetic oligonucleotide: CBLB-5679
caucaaucagggcuugaaau

SEQ ID NO: 37462 - RNA, 20 nt, Artificial Sequence
  Synthetic oligonucleotide: CBLB-7177
ucuauacguacccuuuaaau

SEQ ID NO: 37463 - RNA, 20 nt, Artificial Sequence
  Synthetic oligonucleotide: CBLB-7178
ucauugcaaguuaaaucaau

SEQ ID NO: 37464 - RNA, 20 nt, Artificial Sequence
  Synthetic oligonucleotide: CBLB-5686
ccuucccugcugccaucaau

SEQ ID NO: 37465 - RNA, 20 nt, Artificial Sequence
  Synthetic oligonucleotide: CBLB-7179
agaggaagaugaugaugaau

SEQ ID NO: 37466 - RNA, 20 nt, Artificial Sequence
  Synthetic oligonucleotide: CBLB-7180
uauaugcuuaagucagggau

SEQ ID NO: 37467 - RNA, 20 nt, Artificial Sequence
  Synthetic oligonucleotide: CBLB-7181
gcuguuucagguaaguuuau

SEQ ID NO: 37468 - RNA, 20 nt, Artificial Sequence
  Synthetic oligonucleotide: CBLB-7182
gggcuccacuuuucagcucu

SEQ ID NO: 37469 - RNA, 20 nt, Artificial Sequence
  Synthetic oligonucleotide: CBLB-7183
aucucuuggaucaaaggggu

SEQ ID NO: 37470 - RNA, 20 nt, Artificial Sequence
  Synthetic oligonucleotide: CBLB-7184
uguuauccucuaggagaugu

SEQ ID NO: 37471 - RNA, 20 nt, Artificial Sequence
  Synthetic oligonucleotide: CBLB-5975
ugaagauaagggacaguuuu

SEQ ID NO: 37472 - RNA, 17 nt, Artificial Sequence
  Synthetic oligonucleotide: CBLB-7185
cucgcagcacgucagaa

SEQ ID NO: 37473 - RNA, 17 nt, Artificial Sequence
  Synthetic oligonucleotide: CBLB-7186
auuggcucagcggcgcc

SEQ ID NO: 37474 - RNA, 17 nt, Artificial Sequence
  Synthetic oligonucleotide: CBLB-7187
cguucccgggagagucc

SEQ ID NO: 37475 - RNA, 17 nt, Artificial Sequence
  Synthetic oligonucleotide: CBLB-7188
gcgcacugcccgacagc

SEQ ID NO: 37476 - RNA, 17 nt, Artificial Sequence
  Synthetic oligonucleotide: CBLB-7189
ucugacgugcugcgagc

SEQ ID NO: 37477 - RNA, 17 nt, Artificial Sequence
  Synthetic oligonucleotide: CBLB-7190
caaauaguugacaacgc

SEQ ID NO: 37478 - RNA, 17 nt, Artificial Sequence
  Synthetic oligonucleotide: CBLB-7191
cugggcggguccaacgc

SEQ ID NO: 37479 - RNA, 17 nt, Artificial Sequence
  Synthetic oligonucleotide: CBLB-7192
guguugcuucuccgcuc

SEQ ID NO: 37480 - RNA, 17 nt, Artificial Sequence
  Synthetic oligonucleotide: CBLB-7193
ucucccgggaacgaaag

SEQ ID NO: 37481 - RNA, 17 nt, Artificial Sequence
  Synthetic oligonucleotide: CBLB-7194
cgcgcacugcccgacag

SEQ ID NO: 37482 - RNA, 17 nt, Artificial Sequence
  Synthetic oligonucleotide: CBLB-7195
gcgcggcauuggcucag

SEQ ID NO: 37483 - RNA, 17 nt, Artificial Sequence
  Synthetic oligonucleotide: CBLB-7196
uucugacgugcugcgag

SEQ ID NO: 37484 - RNA, 17 nt, Artificial Sequence
  Synthetic oligonucleotide: CBLB-7197
cgcugucgggcagugcg

SEQ ID NO: 37485 - RNA, 17 nt, Artificial Sequence
  Synthetic oligonucleotide: CBLB-7198
ggcagugcgcgguugcg

SEQ ID NO: 37486 - RNA, 17 nt, Artificial Sequence
  Synthetic oligonucleotide: CBLB-7199
gggcgccucccguccau

SEQ ID NO: 37487 - RNA, 17 nt, Artificial Sequence
  Synthetic oligonucleotide: CBLB-7200
gcgcgguugcgcggcau

SEQ ID NO: 37488 - RNA, 17 nt, Artificial Sequence
  Synthetic oligonucleotide: CBLB-7201
cgagcgggccuuccucu

SEQ ID NO: 37489 - RNA, 17 nt, Artificial Sequence
  Synthetic oligonucleotide: CBLB-7202
aacgucauagaccuguu

SEQ ID NO: 37490 - RNA, 20 nt, Artificial Sequence
  Synthetic oligonucleotide: CBLB-7203
cccgggaacgaaaguggaaa

SEQ ID NO: 37491 - RNA, 20 nt, Artificial Sequence
  Synthetic oligonucleotide: CBLB-7204
acguccuccacaguacacaa

SEQ ID NO: 37492 - RNA, 20 nt, Artificial Sequence
  Synthetic oligonucleotide: CBLB-7205
ccgcucgcagcacgucagaa

SEQ ID NO: 37493 - RNA, 20 nt, Artificial Sequence
  Synthetic oligonucleotide: CBLB-7206
acgaaggagcuaaccaauaa

SEQ ID NO: 37494 - RNA, 20 nt, Artificial Sequence
  Synthetic oligonucleotide: CBLB-7207
cgaagggaugcaaggcacga

SEQ ID NO: 37495 - RNA, 20 nt, Artificial Sequence
  Synthetic oligonucleotide: CBLB-7208
cacgaaggagcuaaccaaua

SEQ ID NO: 37496 - RNA, 20 nt, Artificial Sequence
  Synthetic oligonucleotide: CBLB-7209
ccgggaacgaaaguggaaac

SEQ ID NO: 37497 - RNA, 20 nt, Artificial Sequence
  Synthetic oligonucleotide: CBLB-7210
gugggcgugagcgucgggac

SEQ ID NO: 37498 - RNA, 20 nt, Artificial Sequence
  Synthetic oligonucleotide: CBLB-7211
ugggcgugagcgucgggacc

SEQ ID NO: 37499 - RNA, 20 nt, Artificial Sequence
  Synthetic oligonucleotide: CBLB-7212
ccguuuccacuuucguuccc

SEQ ID NO: 37500 - RNA, 20 nt, Artificial Sequence
  Synthetic oligonucleotide: CBLB-7213
augaggggccuggacucucc

SEQ ID NO: 37501 - RNA, 20 nt, Artificial Sequence
  Synthetic oligonucleotide: CBLB-7214
uuucguucccgggagagucc

SEQ ID NO: 37502 - RNA, 20 nt, Artificial Sequence
  Synthetic oligonucleotide: CBLB-7215
acuaggaagguaagcgaagc

SEQ ID NO: 37503 - RNA, 20 nt, Artificial Sequence
  Synthetic oligonucleotide: CBLB-7216
accgcgcacugcccgacagc

SEQ ID NO: 37504 - RNA, 20 nt, Artificial Sequence
  Synthetic oligonucleotide: CBLB-7217
cuuucugacgugcugcgagc

SEQ ID NO: 37505 - RNA, 20 nt, Artificial Sequence
  Synthetic oligonucleotide: CBLB-7218
aagcaaauaguugacaacgc

SEQ ID NO: 37506 - RNA, 20 nt, Artificial Sequence
  Synthetic oligonucleotide: CBLB-7219
gcucugggcggguccaacgc

SEQ ID NO: 37507 - RNA, 20 nt, Artificial Sequence
  Synthetic oligonucleotide: CBLB-7220
gggauugcagaccaaacauc

SEQ ID NO: 37508 - RNA, 20 nt, Artificial Sequence
  Synthetic oligonucleotide: CBLB-7221
cucuuaaaaaggccgacauc

SEQ ID NO: 37509 - RNA, 20 nt, Artificial Sequence
  Synthetic oligonucleotide: CBLB-7222
uaucagcaauucccauuauc

SEQ ID NO: 37510 - RNA, 20 nt, Artificial Sequence
  Synthetic oligonucleotide: CBLB-7223
gacucucccgggaacgaaag

SEQ ID NO: 37511 - RNA, 20 nt, Artificial Sequence
  Synthetic oligonucleotide: CBLB-7224
aaccgcgcacugcccgacag

SEQ ID NO: 37512 - RNA, 20 nt, Artificial Sequence
  Synthetic oligonucleotide: CBLB-7225
ccuuucugacgugcugcgag

SEQ ID NO: 37513 - RNA, 20 nt, Artificial Sequence
  Synthetic oligonucleotide: CBLB-7226
auuguguacuguggaggacg

SEQ ID NO: 37514 - RNA, 20 nt, Artificial Sequence
  Synthetic oligonucleotide: CBLB-7227
acccgcugucgggcagugcg

SEQ ID NO: 37515 - RNA, 20 nt, Artificial Sequence
  Synthetic oligonucleotide: CBLB-7228
ucgggcagugcgcgguugcg

SEQ ID NO: 37516 - RNA, 20 nt, Artificial Sequence
  Synthetic oligonucleotide: CBLB-7229
gacggggcggcagcgcgagg

SEQ ID NO: 37517 - RNA, 20 nt, Artificial Sequence
  Synthetic oligonucleotide: CBLB-7230
aggagcuaaccaauaagggg

SEQ ID NO: 37518 - RNA, 20 nt, Artificial Sequence
  Synthetic oligonucleotide: CBLB-7231
uguugcuucuccgcucuggg

SEQ ID NO: 37519 - RNA, 20 nt, Artificial Sequence
  Synthetic oligonucleotide: CBLB-7232
ggggccauuguguacugugg

SEQ ID NO: 37520 - RNA, 20 nt, Artificial Sequence
  Synthetic oligonucleotide: CBLB-7233
auuggacucggagagaaaug

SEQ ID NO: 37521 - RNA, 20 nt, Artificial Sequence
  Synthetic oligonucleotide: CBLB-7234
ucuggggccauuguguacug

SEQ ID NO: 37522 - RNA, 20 nt, Artificial Sequence
  Synthetic oligonucleotide: CBLB-7235
ugcgagcgggccuuccucug

SEQ ID NO: 37523 - RNA, 20 nt, Artificial Sequence
  Synthetic oligonucleotide: CBLB-7236
gcagcacgucagaaaggaau

SEQ ID NO: 37524 - RNA, 20 nt, Artificial Sequence
  Synthetic oligonucleotide: CBLB-7237
gacgggcgccucccguccau

SEQ ID NO: 37525 - RNA, 20 nt, Artificial Sequence
  Synthetic oligonucleotide: CBLB-7238
agugcgcgguugcgcggcau

SEQ ID NO: 37526 - RNA, 20 nt, Artificial Sequence
  Synthetic oligonucleotide: CBLB-7239
uagaaggguuuggcagcccu

SEQ ID NO: 37527 - RNA, 20 nt, Artificial Sequence
  Synthetic oligonucleotide: CBLB-7240
accgggagccaaagccaucu

SEQ ID NO: 37528 - RNA, 20 nt, Artificial Sequence
  Synthetic oligonucleotide: CBLB-7241
cugcgagcgggccuuccucu

SEQ ID NO: 37529 - RNA, 20 nt, Artificial Sequence
  Synthetic oligonucleotide: CBLB-7242
accaauaagggguggcaggu

SEQ ID NO: 37530 - RNA, 20 nt, Artificial Sequence
  Synthetic oligonucleotide: CBLB-7243
agcaacgucauagaccuguu

SEQ ID NO: 37531 - RNA, 17 nt, Artificial Sequence
  Synthetic oligonucleotide: CBLB-7244
acuugcacuaaguaaaa

SEQ ID NO: 37532 - RNA, 17 nt, Artificial Sequence
  Synthetic oligonucleotide: CBLB-7245
ucuuugugcucuuaaaa

SEQ ID NO: 37533 - RNA, 17 nt, Artificial Sequence
  Synthetic oligonucleotide: CBLB-7246
ggaaacgggaaaggaaa

SEQ ID NO: 37534 - RNA, 17 nt, Artificial Sequence
  Synthetic oligonucleotide: CBLB-7247
gggaacgaaaguggaaa

SEQ ID NO: 37535 - RNA, 17 nt, Artificial Sequence
  Synthetic oligonucleotide: CBLB-7248
guaagguuguuuuuaaa

SEQ ID NO: 37536 - RNA, 17 nt, Artificial Sequence
  Synthetic oligonucleotide: CBLB-7249
uccuccacaguacacaa

SEQ ID NO: 37537 - RNA, 17 nt, Artificial Sequence
  Synthetic oligonucleotide: CBLB-7250
acagcgggugcagccaa

SEQ ID NO: 37538 - RNA, 17 nt, Artificial Sequence
  Synthetic oligonucleotide: CBLB-7251
uuuaagagcacaaagaa

SEQ ID NO: 37539 - RNA, 17 nt, Artificial Sequence
  Synthetic oligonucleotide: CBLB-7252
acaaugcugguagagaa

SEQ ID NO: 37540 - RNA, 17 nt, Artificial Sequence
  Synthetic oligonucleotide: CBLB-7253
ugcuguccuggguagaa

SEQ ID NO: 37541 - RNA, 17 nt, Artificial Sequence
  Synthetic oligonucleotide: CBLB-7254
gaaaggaaauggacgaa

SEQ ID NO: 37542 - RNA, 17 nt, Artificial Sequence
  Synthetic oligonucleotide: CBLB-7255
gaaaguggaaacgggaa

SEQ ID NO: 37543 - RNA, 17 nt, Artificial Sequence
  Synthetic oligonucleotide: CBLB-7256
cagaguaguggcuggaa

SEQ ID NO: 37544 - RNA, 17 nt, Artificial Sequence
  Synthetic oligonucleotide: CBLB-7257
agccaucuggggcugaa

SEQ ID NO: 37545 - RNA, 17 nt, Artificial Sequence
  Synthetic oligonucleotide: CBLB-7258
aaggagcuaaccaauaa

SEQ ID NO: 37546 - RNA, 17 nt, Artificial Sequence
  Synthetic oligonucleotide: CBLB-7259
auaaaaguaccagauaa

SEQ ID NO: 37547 - RNA, 17 nt, Artificial Sequence
  Synthetic oligonucleotide: CBLB-7260
gauagaaaucuauguaa

SEQ ID NO: 37548 - RNA, 17 nt, Artificial Sequence
  Synthetic oligonucleotide: CBLB-7261
auggacgaagggaugca

SEQ ID NO: 37549 - RNA, 17 nt, Artificial Sequence
  Synthetic oligonucleotide: CBLB-7262
cuaaguaaaaaggugca

SEQ ID NO: 37550 - RNA, 17 nt, Artificial Sequence
  Synthetic oligonucleotide: CBLB-7263
uuuuaagagcacaaaga

SEQ ID NO: 37551 - RNA, 17 nt, Artificial Sequence
  Synthetic oligonucleotide: CBLB-7264
cgccuuucagccccaga

SEQ ID NO: 37552 - RNA, 17 nt, Artificial Sequence
  Synthetic oligonucleotide: CBLB-7265
cugcuguccuggguaga

SEQ ID NO: 37553 - RNA, 17 nt, Artificial Sequence
  Synthetic oligonucleotide: CBLB-7266
uugcuguuaguuuuaga

SEQ ID NO: 37554 - RNA, 17 nt, Artificial Sequence
  Synthetic oligonucleotide: CBLB-7267
agggaugcaaggcacga

SEQ ID NO: 37555 - RNA, 17 nt, Artificial Sequence
  Synthetic oligonucleotide: CBLB-7268
ggaaaggaaauggacga

SEQ ID NO: 37556 - RNA, 17 nt, Artificial Sequence
  Synthetic oligonucleotide: CBLB-7269
acaauggccccagagga

SEQ ID NO: 37557 - RNA, 17 nt, Artificial Sequence
  Synthetic oligonucleotide: CBLB-7270
cggcagcgcgaggagga

SEQ ID NO: 37558 - RNA, 17 nt, Artificial Sequence
  Synthetic oligonucleotide: CBLB-7271
gaaacaaaagacuagga

SEQ ID NO: 37559 - RNA, 17 nt, Artificial Sequence
  Synthetic oligonucleotide: CBLB-7272
cgggugcagccaaugga

SEQ ID NO: 37560 - RNA, 17 nt, Artificial Sequence
  Synthetic oligonucleotide: CBLB-7273
acagaguaguggcugga

SEQ ID NO: 37561 - RNA, 17 nt, Artificial Sequence
  Synthetic oligonucleotide: CBLB-7274
acuguggaggacgugga

SEQ ID NO: 37562 - RNA, 17 nt, Artificial Sequence
  Synthetic oligonucleotide: CBLB-7275
gacucggagagaaauga

SEQ ID NO: 37563 - RNA, 17 nt, Artificial Sequence
  Synthetic oligonucleotide: CBLB-7276
gaaggagcuaaccaaua

SEQ ID NO: 37564 - RNA, 17 nt, Artificial Sequence
  Synthetic oligonucleotide: CBLB-7277
aggguuuggcagcccua

SEQ ID NO: 37565 - RNA, 17 nt, Artificial Sequence
  Synthetic oligonucleotide: CBLB-7278
agaaauucaucucccua

SEQ ID NO: 37566 - RNA, 17 nt, Artificial Sequence
  Synthetic oligonucleotide: CBLB-7279
gaauggcagcuacagua

SEQ ID NO: 37567 - RNA, 17 nt, Artificial Sequence
  Synthetic oligonucleotide: CBLB-7280
caggacagcagccaaac

SEQ ID NO: 37568 - RNA, 17 nt, Artificial Sequence
  Synthetic oligonucleotide: CBLB-7281
ggaacgaaaguggaaac

SEQ ID NO: 37569 - RNA, 17 nt, Artificial Sequence
  Synthetic oligonucleotide: CBLB-7282
ggcagcgcgaggaggac

SEQ ID NO: 37570 - RNA, 17 nt, Artificial Sequence
  Synthetic oligonucleotide: CBLB-7283
ggcgugagcgucgggac

SEQ ID NO: 37571 - RNA, 17 nt, Artificial Sequence
  Synthetic oligonucleotide: CBLB-7284
gggugcagccaauggac

SEQ ID NO: 37572 - RNA, 17 nt, Artificial Sequence
  Synthetic oligonucleotide: CBLB-7285
cuguggaggacguggac

SEQ ID NO: 37573 - RNA, 17 nt, Artificial Sequence
  Synthetic oligonucleotide: CBLB-7286
gcgugagcgucgggacc

SEQ ID NO: 37574 - RNA, 17 nt, Artificial Sequence
  Synthetic oligonucleotide: CBLB-7287
gccaaacccuucuaccc

SEQ ID NO: 37575 - RNA, 17 nt, Artificial Sequence
  Synthetic oligonucleotide: CBLB-7288
ggggccuggacucuccc

SEQ ID NO: 37576 - RNA, 17 nt, Artificial Sequence
  Synthetic oligonucleotide: CBLB-7289
uuuccacuuucguuccc

SEQ ID NO: 37577 - RNA, 17 nt, Artificial Sequence
  Synthetic oligonucleotide: CBLB-7290
gagagaaaugaggggcc

SEQ ID NO: 37578 - RNA, 17 nt, Artificial Sequence
  Synthetic oligonucleotide: CBLB-7291
ggggcgggggcggggcc

SEQ ID NO: 37579 - RNA, 17 nt, Artificial Sequence
  Synthetic oligonucleotide: CBLB-7292
cagauggcuuuggcucc

SEQ ID NO: 37580 - RNA, 17 nt, Artificial Sequence
  Synthetic oligonucleotide: CBLB-7293
aggggccuggacucucc

SEQ ID NO: 37581 - RNA, 17 nt, Artificial Sequence
  Synthetic oligonucleotide: CBLB-7294
cuguuuggcugcugucc

SEQ ID NO: 37582 - RNA, 17 nt, Artificial Sequence
  Synthetic oligonucleotide: CBLB-7295
guuuccacuuucguucc

SEQ ID NO: 37583 - RNA, 17 nt, Artificial Sequence
  Synthetic oligonucleotide: CBLB-7296
aggaagguaagcgaagc

SEQ ID NO: 37584 - RNA, 17 nt, Artificial Sequence
  Synthetic oligonucleotide: CBLB-7297
aucuggggcugaaaggc

SEQ ID NO: 37585 - RNA, 17 nt, Artificial Sequence
  Synthetic oligonucleotide: CBLB-7298
ucucacagagaguaggc

SEQ ID NO: 37586 - RNA, 17 nt, Artificial Sequence
  Synthetic oligonucleotide: CBLB-7299
cggggcgggggcggggc

SEQ ID NO: 37587 - RNA, 17 nt, Artificial Sequence
  Synthetic oligonucleotide: CBLB-7300
gcuucuccgcucugggc

SEQ ID NO: 37588 - RNA, 17 nt, Artificial Sequence
  Synthetic oligonucleotide: CBLB-7301
agcaacagaguaguggc

SEQ ID NO: 37589 - RNA, 17 nt, Artificial Sequence
  Synthetic oligonucleotide: CBLB-7302
aaccaauaagggguggc

SEQ ID NO: 37590 - RNA, 17 nt, Artificial Sequence
  Synthetic oligonucleotide: CBLB-7303
gaaagagguaacaaugc

SEQ ID NO: 37591 - RNA, 17 nt, Artificial Sequence
  Synthetic oligonucleotide: CBLB-7304
auugcagaccaaacauc

SEQ ID NO: 37592 - RNA, 17 nt, Artificial Sequence
  Synthetic oligonucleotide: CBLB-7305
uuaaaaaggccgacauc

SEQ ID NO: 37593 - RNA, 17 nt, Artificial Sequence
  Synthetic oligonucleotide: CBLB-7306
cgggagccaaagccauc

SEQ ID NO: 37594 - RNA, 17 nt, Artificial Sequence
  Synthetic oligonucleotide: CBLB-7307
cagcaauucccauuauc

SEQ ID NO: 37595 - RNA, 17 nt, Artificial Sequence
  Synthetic oligonucleotide: CBLB-7308
gcgagcgggccuuccuc

SEQ ID NO: 37596 - RNA, 17 nt, Artificial Sequence
  Synthetic oligonucleotide: CBLB-7309
aggugggcgugagcguc

SEQ ID NO: 37597 - RNA, 17 nt, Artificial Sequence
  Synthetic oligonucleotide: CBLB-7310
uggcugcacccgcuguc

SEQ ID NO: 37598 - RNA, 17 nt, Artificial Sequence
  Synthetic oligonucleotide: CBLB-7311
aagggagccacagaaag

SEQ ID NO: 37599 - RNA, 17 nt, Artificial Sequence
  Synthetic oligonucleotide: CBLB-7312
aggagcuaaccaauaag

SEQ ID NO: 37600 - RNA, 17 nt, Artificial Sequence
  Synthetic oligonucleotide: CBLB-7313
guacacaauggccccag

SEQ ID NO: 37601 - RNA, 17 nt, Artificial Sequence
  Synthetic oligonucleotide: CBLB-7314
gcauuuuagaagcucag

SEQ ID NO: 37602 - RNA, 17 nt, Artificial Sequence
  Synthetic oligonucleotide: CBLB-7315
guuggacccgcccagag

SEQ ID NO: 37603 - RNA, 17 nt, Artificial Sequence
  Synthetic oligonucleotide: CBLB-7316
acucggagagaaaugag

SEQ ID NO: 37604 - RNA, 17 nt, Artificial Sequence
  Synthetic oligonucleotide: CBLB-7317
ucauagcaacagaguag

SEQ ID NO: 37605 - RNA, 17 nt, Artificial Sequence
  Synthetic oligonucleotide: CBLB-7318
uuugcuguuaguuuuag

SEQ ID NO: 37606 - RNA, 17 nt, Artificial Sequence
  Synthetic oligonucleotide: CBLB-7319
guguacuguggaggacg

SEQ ID NO: 37607 - RNA, 17 nt, Artificial Sequence
  Synthetic oligonucleotide: CBLB-7320
uguggaggacguggacg

SEQ ID NO: 37608 - RNA, 17 nt, Artificial Sequence
  Synthetic oligonucleotide: CBLB-7321
gacggggcggcagcgcg

SEQ ID NO: 37609 - RNA, 17 nt, Artificial Sequence
  Synthetic oligonucleotide: CBLB-7322
ggggcggggcgggggcg

SEQ ID NO: 37610 - RNA, 17 nt, Artificial Sequence
  Synthetic oligonucleotide: CBLB-7323
caucuggggcugaaagg

SEQ ID NO: 37611 - RNA, 17 nt, Artificial Sequence
  Synthetic oligonucleotide: CBLB-7324
caauaagggguggcagg

SEQ ID NO: 37612 - RNA, 17 nt, Artificial Sequence
  Synthetic oligonucleotide: CBLB-7325
ggggcggcagcgcgagg

SEQ ID NO: 37613 - RNA, 17 nt, Artificial Sequence
  Synthetic oligonucleotide: CBLB-7326
ugccuaaaugacugagg

SEQ ID NO: 37614 - RNA, 17 nt, Artificial Sequence
  Synthetic oligonucleotide: CBLB-7327
ugcagccaauggacggg

SEQ ID NO: 37615 - RNA, 17 nt, Artificial Sequence
  Synthetic oligonucleotide: CBLB-7328
agcuaaccaauaagggg

SEQ ID NO: 37616 - RNA, 17 nt, Artificial Sequence
  Synthetic oligonucleotide: CBLB-7329
ggaggacguggacgggg

SEQ ID NO: 37617 - RNA, 17 nt, Artificial Sequence
  Synthetic oligonucleotide: CBLB-7330
ugcuucuccgcucuggg

SEQ ID NO: 37618 - RNA, 17 nt, Artificial Sequence
  Synthetic oligonucleotide: CBLB-7331
gccauuguguacugugg

SEQ ID NO: 37619 - RNA, 17 nt, Artificial Sequence
  Synthetic oligonucleotide: CBLB-7332
ggacucggagagaaaug

SEQ ID NO: 37620 - RNA, 17 nt, Artificial Sequence
  Synthetic oligonucleotide: CBLB-7333
uucugccuaaaugacug

SEQ ID NO: 37621 - RNA, 17 nt, Artificial Sequence
  Synthetic oligonucleotide: CBLB-7334
ggggccauuguguacug

SEQ ID NO: 37622 - RNA, 17 nt, Artificial Sequence
  Synthetic oligonucleotide: CBLB-7335
ucacagagaguaggcug

SEQ ID NO: 37623 - RNA, 17 nt, Artificial Sequence
  Synthetic oligonucleotide: CBLB-7336
ggagccaaagccaucug

SEQ ID NO: 37624 - RNA, 17 nt, Artificial Sequence
  Synthetic oligonucleotide: CBLB-7337
gagcgggccuuccucug

SEQ ID NO: 37625 - RNA, 17 nt, Artificial Sequence
  Synthetic oligonucleotide: CBLB-7338
auuguuaccucuuucug

SEQ ID NO: 37626 - RNA, 17 nt, Artificial Sequence
  Synthetic oligonucleotide: CBLB-7339
gcacgucagaaaggaau

SEQ ID NO: 37627 - RNA, 17 nt, Artificial Sequence
  Synthetic oligonucleotide: CBLB-7340
uaaaaguaccagauaau

SEQ ID NO: 37628 - RNA, 17 nt, Artificial Sequence
  Synthetic oligonucleotide: CBLB-7341
caccugccaccccuuau

SEQ ID NO: 37629 - RNA, 17 nt, Artificial Sequence
  Synthetic oligonucleotide: CBLB-7342
acagcaaaagagaaacu

SEQ ID NO: 37630 - RNA, 17 nt, Artificial Sequence
  Synthetic oligonucleotide: CBLB-7343
agagaaacucggaaacu

SEQ ID NO: 37631 - RNA, 17 nt, Artificial Sequence
  Synthetic oligonucleotide: CBLB-7344
cuaugaaacaaaagacu

SEQ ID NO: 37632 - RNA, 17 nt, Artificial Sequence
  Synthetic oligonucleotide: CBLB-7345
cagaaaggaauuggacu

SEQ ID NO: 37633 - RNA, 17 nt, Artificial Sequence
  Synthetic oligonucleotide: CBLB-7346
aaggguuuggcagcccu

SEQ ID NO: 37634 - RNA, 17 nt, Artificial Sequence
  Synthetic oligonucleotide: CBLB-7347
gagaaauucaucucccu

SEQ ID NO: 37635 - RNA, 17 nt, Artificial Sequence
  Synthetic oligonucleotide: CBLB-7348
uguuuggcugcuguccu

SEQ ID NO: 37636 - RNA, 17 nt, Artificial Sequence
  Synthetic oligonucleotide: CBLB-7349
cucacagagaguaggcu

SEQ ID NO: 37637 - RNA, 17 nt, Artificial Sequence
  Synthetic oligonucleotide: CBLB-7350
gggagccaaagccaucu

SEQ ID NO: 37638 - RNA, 17 nt, Artificial Sequence
  Synthetic oligonucleotide: CBLB-7351
uguugcuucuccgcucu

SEQ ID NO: 37639 - RNA, 17 nt, Artificial Sequence
  Synthetic oligonucleotide: CBLB-7352
acuugggaaguuucagu

SEQ ID NO: 37640 - RNA, 17 nt, Artificial Sequence
  Synthetic oligonucleotide: CBLB-7353
uaaaucucacagagagu

SEQ ID NO: 37641 - RNA, 17 nt, Artificial Sequence
  Synthetic oligonucleotide: CBLB-7354
augaauuucuccagcgu

SEQ ID NO: 37642 - RNA, 17 nt, Artificial Sequence
  Synthetic oligonucleotide: CBLB-7355
caggugggcgugagcgu

SEQ ID NO: 37643 - RNA, 17 nt, Artificial Sequence
  Synthetic oligonucleotide: CBLB-7356
aauaagggguggcaggu

SEQ ID NO: 37644 - RNA, 17 nt, Artificial Sequence
  Synthetic oligonucleotide: CBLB-7357
aaagacuagccagaugu

SEQ ID NO: 37645 - RNA, 17 nt, Artificial Sequence
  Synthetic oligonucleotide: CBLB-7358
uuggcugcacccgcugu

SEQ ID NO: 37646 - RNA, 17 nt, Artificial Sequence
  Synthetic oligonucleotide: CBLB-7359
augacguugcuucuugu

SEQ ID NO: 37647 - RNA, 17 nt, Artificial Sequence
  Synthetic oligonucleotide: CBLB-7360
cagcuacuguguuuugu

SEQ ID NO: 37648 - RNA, 17 nt, Artificial Sequence
  Synthetic oligonucleotide: CBLB-7361
gagaaacucggaaacuu

SEQ ID NO: 37649 - RNA, 17 nt, Artificial Sequence
  Synthetic oligonucleotide: CBLB-7362
ucagccccagauggcuu

SEQ ID NO: 37650 - RNA, 17 nt, Artificial Sequence
  Synthetic oligonucleotide: CBLB-7363
ugguacuuuuauugcuu

SEQ ID NO: 37651 - RNA, 17 nt, Artificial Sequence
  Synthetic oligonucleotide: CBLB-7364
uccuggguagaaggguu

SEQ ID NO: 37652 - RNA, 17 nt, Artificial Sequence
  Synthetic oligonucleotide: CBLB-7365
uucaucagccugauguu

SEQ ID NO: 37653 - RNA, 17 nt, Artificial Sequence
  Synthetic oligonucleotide: CBLB-7366
gauuagcagagacuguu

SEQ ID NO: 37654 - RNA, 17 nt, Artificial Sequence
  Synthetic oligonucleotide: CBLB-7367
cuccuccucagucauuu

SEQ ID NO: 37655 - RNA, 20 nt, Artificial Sequence
  Synthetic oligonucleotide: CBLB-7368
gaaacuugcacuaaguaaaa

SEQ ID NO: 37656 - RNA, 20 nt, Artificial Sequence
  Synthetic oligonucleotide: CBLB-7369
ccuucuuugugcucuuaaaa

SEQ ID NO: 37657 - RNA, 20 nt, Artificial Sequence
  Synthetic oligonucleotide: CBLB-7370
aguggaaacgggaaaggaaa

SEQ ID NO: 37658 - RNA, 20 nt, Artificial Sequence
  Synthetic oligonucleotide: CBLB-7371
acaguaagguuguuuuuaaa

SEQ ID NO: 37659 - RNA, 20 nt, Artificial Sequence
  Synthetic oligonucleotide: CBLB-7372
ccgacagcgggugcagccaa

SEQ ID NO: 37660 - RNA, 20 nt, Artificial Sequence
  Synthetic oligonucleotide: CBLB-7373
cuuuuuaagagcacaaagaa

SEQ ID NO: 37661 - RNA, 20 nt, Artificial Sequence
  Synthetic oligonucleotide: CBLB-7374
guaacaaugcugguagagaa

SEQ ID NO: 37662 - RNA, 20 nt, Artificial Sequence
  Synthetic oligonucleotide: CBLB-7375
ggcugcuguccuggguagaa

SEQ ID NO: 37663 - RNA, 20 nt, Artificial Sequence
  Synthetic oligonucleotide: CBLB-7376
cgggaaaggaaauggacgaa

SEQ ID NO: 37664 - RNA, 20 nt, Artificial Sequence
  Synthetic oligonucleotide: CBLB-7377
aacgaaaguggaaacgggaa

SEQ ID NO: 37665 - RNA, 20 nt, Artificial Sequence
  Synthetic oligonucleotide: CBLB-7378
caacagaguaguggcuggaa

SEQ ID NO: 37666 - RNA, 20 nt, Artificial Sequence
  Synthetic oligonucleotide: CBLB-7379
caaagccaucuggggcugaa

SEQ ID NO: 37667 - RNA, 20 nt, Artificial Sequence
  Synthetic oligonucleotide: CBLB-7380
gcaauaaaaguaccagauaa

SEQ ID NO: 37668 - RNA, 20 nt, Artificial Sequence
  Synthetic oligonucleotide: CBLB-7381
auggauagaaaucuauguaa

SEQ ID NO: 37669 - RNA, 20 nt, Artificial Sequence
  Synthetic oligonucleotide: CBLB-7382
gaaauggacgaagggaugca

SEQ ID NO: 37670 - RNA, 20 nt, Artificial Sequence
  Synthetic oligonucleotide: CBLB-7383
gcacuaaguaaaaaggugca

SEQ ID NO: 37671 - RNA, 20 nt, Artificial Sequence
  Synthetic oligonucleotide: CBLB-7384
ccuuuuuaagagcacaaaga

SEQ ID NO: 37672 - RNA, 20 nt, Artificial Sequence
  Synthetic oligonucleotide: CBLB-7385
ucccgccuuucagccccaga

SEQ ID NO: 37673 - RNA, 20 nt, Artificial Sequence
  Synthetic oligonucleotide: CBLB-7386
uggcugcuguccuggguaga

SEQ ID NO: 37674 - RNA, 20 nt, Artificial Sequence
  Synthetic oligonucleotide: CBLB-7387
cuuuugcuguuaguuuuaga

SEQ ID NO: 37675 - RNA, 20 nt, Artificial Sequence
  Synthetic oligonucleotide: CBLB-7388
acgggaaaggaaauggacga

SEQ ID NO: 37676 - RNA, 20 nt, Artificial Sequence
  Synthetic oligonucleotide: CBLB-7389
uacacaauggccccagagga

SEQ ID NO: 37677 - RNA, 20 nt, Artificial Sequence
  Synthetic oligonucleotide: CBLB-7390
gggcggcagcgcgaggagga

SEQ ID NO: 37678 - RNA, 20 nt, Artificial Sequence
  Synthetic oligonucleotide: CBLB-7391
uaugaaacaaaagacuagga

SEQ ID NO: 37679 - RNA, 20 nt, Artificial Sequence
  Synthetic oligonucleotide: CBLB-7392
cagcgggugcagccaaugga

SEQ ID NO: 37680 - RNA, 20 nt, Artificial Sequence
  Synthetic oligonucleotide: CBLB-7393
gcaacagaguaguggcugga

SEQ ID NO: 37681 - RNA, 20 nt, Artificial Sequence
  Synthetic oligonucleotide: CBLB-7394
uguacuguggaggacgugga

SEQ ID NO: 37682 - RNA, 20 nt, Artificial Sequence
  Synthetic oligonucleotide: CBLB-7395
uuggacucggagagaaauga

SEQ ID NO: 37683 - RNA, 20 nt, Artificial Sequence
  Synthetic oligonucleotide: CBLB-7396
agaaggguuuggcagcccua

SEQ ID NO: 37684 - RNA, 20 nt, Artificial Sequence
  Synthetic oligonucleotide: CBLB-7397
uggagaaauucaucucccua

SEQ ID NO: 37685 - RNA, 20 nt, Artificial Sequence
  Synthetic oligonucleotide: CBLB-7398
agagaauggcagcuacagua

SEQ ID NO: 37686 - RNA, 20 nt, Artificial Sequence
  Synthetic oligonucleotide: CBLB-7399
acccaggacagcagccaaac

SEQ ID NO: 37687 - RNA, 20 nt, Artificial Sequence
  Synthetic oligonucleotide: CBLB-7400
ggcggcagcgcgaggaggac

SEQ ID NO: 37688 - RNA, 20 nt, Artificial Sequence
  Synthetic oligonucleotide: CBLB-7401
agcgggugcagccaauggac

SEQ ID NO: 37689 - RNA, 20 nt, Artificial Sequence
  Synthetic oligonucleotide: CBLB-7402
guacuguggaggacguggac

SEQ ID NO: 37690 - RNA, 20 nt, Artificial Sequence
  Synthetic oligonucleotide: CBLB-7403
gcugccaaacccuucuaccc

SEQ ID NO: 37691 - RNA, 20 nt, Artificial Sequence
  Synthetic oligonucleotide: CBLB-7404
ugaggggccuggacucuccc

SEQ ID NO: 37692 - RNA, 20 nt, Artificial Sequence
  Synthetic oligonucleotide: CBLB-7405
ggcauuggcucagcggcgcc

SEQ ID NO: 37693 - RNA, 20 nt, Artificial Sequence
  Synthetic oligonucleotide: CBLB-7406
ucggagagaaaugaggggcc

SEQ ID NO: 37694 - RNA, 20 nt, Artificial Sequence
  Synthetic oligonucleotide: CBLB-7407
ggcggggcgggggcggggcc

SEQ ID NO: 37695 - RNA, 20 nt, Artificial Sequence
  Synthetic oligonucleotide: CBLB-7408
ccccagauggcuuuggcucc

SEQ ID NO: 37696 - RNA, 20 nt, Artificial Sequence
  Synthetic oligonucleotide: CBLB-7409
gaccuguuuggcugcugucc

SEQ ID NO: 37697 - RNA, 20 nt, Artificial Sequence
  Synthetic oligonucleotide: CBLB-7410
cccguuuccacuuucguucc

SEQ ID NO: 37698 - RNA, 20 nt, Artificial Sequence
  Synthetic oligonucleotide: CBLB-7411
gccaucuggggcugaaaggc

SEQ ID NO: 37699 - RNA, 20 nt, Artificial Sequence
  Synthetic oligonucleotide: CBLB-7412
aaaucucacagagaguaggc

SEQ ID NO: 37700 - RNA, 20 nt, Artificial Sequence
  Synthetic oligonucleotide: CBLB-7413
gggcggggcgggggcggggc

SEQ ID NO: 37701 - RNA, 20 nt, Artificial Sequence
  Synthetic oligonucleotide: CBLB-7414
guugcuucuccgcucugggc

SEQ ID NO: 37702 - RNA, 20 nt, Artificial Sequence
  Synthetic oligonucleotide: CBLB-7415
cauagcaacagaguaguggc

SEQ ID NO: 37703 - RNA, 20 nt, Artificial Sequence
  Synthetic oligonucleotide: CBLB-7416
gcuaaccaauaagggguggc

SEQ ID NO: 37704 - RNA, 20 nt, Artificial Sequence
  Synthetic oligonucleotide: CBLB-7417
acagaaagagguaacaaugc

SEQ ID NO: 37705 - RNA, 20 nt, Artificial Sequence
  Synthetic oligonucleotide: CBLB-7418
gaccgggagccaaagccauc

SEQ ID NO: 37706 - RNA, 20 nt, Artificial Sequence
  Synthetic oligonucleotide: CBLB-7419
gcugcgagcgggccuuccuc

SEQ ID NO: 37707 - RNA, 20 nt, Artificial Sequence
  Synthetic oligonucleotide: CBLB-7420
aggguguugcuucuccgcuc

SEQ ID NO: 37708 - RNA, 20 nt, Artificial Sequence
  Synthetic oligonucleotide: CBLB-7421
ggcaggugggcgugagcguc

SEQ ID NO: 37709 - RNA, 20 nt, Artificial Sequence
  Synthetic oligonucleotide: CBLB-7422
cauuggcugcacccgcuguc

SEQ ID NO: 37710 - RNA, 20 nt, Artificial Sequence
  Synthetic oligonucleotide: CBLB-7423
aagaagggagccacagaaag

SEQ ID NO: 37711 - RNA, 20 nt, Artificial Sequence
  Synthetic oligonucleotide: CBLB-7424
cgaaggagcuaaccaauaag

SEQ ID NO: 37712 - RNA, 20 nt, Artificial Sequence
  Synthetic oligonucleotide: CBLB-7425
acaguacacaauggccccag

SEQ ID NO: 37713 - RNA, 20 nt, Artificial Sequence
  Synthetic oligonucleotide: CBLB-7426
ucugcauuuuagaagcucag

SEQ ID NO: 37714 - RNA, 20 nt, Artificial Sequence
  Synthetic oligonucleotide: CBLB-7427
guugcgcggcauuggcucag

SEQ ID NO: 37715 - RNA, 20 nt, Artificial Sequence
  Synthetic oligonucleotide: CBLB-7428
agcguuggacccgcccagag

SEQ ID NO: 37716 - RNA, 20 nt, Artificial Sequence
  Synthetic oligonucleotide: CBLB-7429
uggacucggagagaaaugag

SEQ ID NO: 37717 - RNA, 20 nt, Artificial Sequence
  Synthetic oligonucleotide: CBLB-7430
guuucauagcaacagaguag

SEQ ID NO: 37718 - RNA, 20 nt, Artificial Sequence
  Synthetic oligonucleotide: CBLB-7431
ucuuuugcuguuaguuuuag

SEQ ID NO: 37719 - RNA, 20 nt, Artificial Sequence
  Synthetic oligonucleotide: CBLB-7432
uacuguggaggacguggacg

SEQ ID NO: 37720 - RNA, 20 nt, Artificial Sequence
  Synthetic oligonucleotide: CBLB-7433
guggacggggcggcagcgcg

SEQ ID NO: 37721 - RNA, 20 nt, Artificial Sequence
  Synthetic oligonucleotide: CBLB-7434
agccaucuggggcugaaagg

SEQ ID NO: 37722 - RNA, 20 nt, Artificial Sequence
  Synthetic oligonucleotide: CBLB-7435
aaccaauaagggguggcagg

SEQ ID NO: 37723 - RNA, 20 nt, Artificial Sequence
  Synthetic oligonucleotide: CBLB-7436
uucugccuaaaugacugagg

SEQ ID NO: 37724 - RNA, 20 nt, Artificial Sequence
  Synthetic oligonucleotide: CBLB-7437
gggugcagccaauggacggg

SEQ ID NO: 37725 - RNA, 20 nt, Artificial Sequence
  Synthetic oligonucleotide: CBLB-7438
uguggaggacguggacgggg

SEQ ID NO: 37726 - RNA, 20 nt, Artificial Sequence
  Synthetic oligonucleotide: CBLB-7439
aguuucugccuaaaugacug

SEQ ID NO: 37727 - RNA, 20 nt, Artificial Sequence
  Synthetic oligonucleotide: CBLB-7440
aucucacagagaguaggcug

SEQ ID NO: 37728 - RNA, 20 nt, Artificial Sequence
  Synthetic oligonucleotide: CBLB-7441
ccgggagccaaagccaucug

SEQ ID NO: 37729 - RNA, 20 nt, Artificial Sequence
  Synthetic oligonucleotide: CBLB-7442
agcauuguuaccucuuucug

SEQ ID NO: 37730 - RNA, 20 nt, Artificial Sequence
  Synthetic oligonucleotide: CBLB-7443
caauaaaaguaccagauaau

SEQ ID NO: 37731 - RNA, 20 nt, Artificial Sequence
  Synthetic oligonucleotide: CBLB-7444
gcccaccugccaccccuuau

SEQ ID NO: 37732 - RNA, 20 nt, Artificial Sequence
  Synthetic oligonucleotide: CBLB-7445
cuaacagcaaaagagaaacu

SEQ ID NO: 37733 - RNA, 20 nt, Artificial Sequence
  Synthetic oligonucleotide: CBLB-7446
aaaagagaaacucggaaacu

SEQ ID NO: 37734 - RNA, 20 nt, Artificial Sequence
  Synthetic oligonucleotide: CBLB-7447
uugcuaugaaacaaaagacu

SEQ ID NO: 37735 - RNA, 20 nt, Artificial Sequence
  Synthetic oligonucleotide: CBLB-7448
cgucagaaaggaauuggacu

SEQ ID NO: 37736 - RNA, 20 nt, Artificial Sequence
  Synthetic oligonucleotide: CBLB-7449
cuggagaaauucaucucccu

SEQ ID NO: 37737 - RNA, 20 nt, Artificial Sequence
  Synthetic oligonucleotide: CBLB-7450
accuguuuggcugcuguccu

SEQ ID NO: 37738 - RNA, 20 nt, Artificial Sequence
  Synthetic oligonucleotide: CBLB-7451
aaucucacagagaguaggcu

SEQ ID NO: 37739 - RNA, 20 nt, Artificial Sequence
  Synthetic oligonucleotide: CBLB-7452
ggguguugcuucuccgcucu

SEQ ID NO: 37740 - RNA, 20 nt, Artificial Sequence
  Synthetic oligonucleotide: CBLB-7453
gaaacuugggaaguuucagu

SEQ ID NO: 37741 - RNA, 20 nt, Artificial Sequence
  Synthetic oligonucleotide: CBLB-7454
gaauaaaucucacagagagu

SEQ ID NO: 37742 - RNA, 20 nt, Artificial Sequence
  Synthetic oligonucleotide: CBLB-7455
gagaugaauuucuccagcgu

SEQ ID NO: 37743 - RNA, 20 nt, Artificial Sequence
  Synthetic oligonucleotide: CBLB-7456
uggcaggugggcgugagcgu

SEQ ID NO: 37744 - RNA, 20 nt, Artificial Sequence
  Synthetic oligonucleotide: CBLB-7457
uuuaaagacuagccagaugu

SEQ ID NO: 37745 - RNA, 20 nt, Artificial Sequence
  Synthetic oligonucleotide: CBLB-7458
ccauuggcugcacccgcugu

SEQ ID NO: 37746 - RNA, 20 nt, Artificial Sequence
  Synthetic oligonucleotide: CBLB-7459
ucuaugacguugcuucuugu

SEQ ID NO: 37747 - RNA, 20 nt, Artificial Sequence
  Synthetic oligonucleotide: CBLB-7460
agacagcuacuguguuuugu

SEQ ID NO: 37748 - RNA, 20 nt, Artificial Sequence
  Synthetic oligonucleotide: CBLB-7461
aaagagaaacucggaaacuu

SEQ ID NO: 37749 - RNA, 20 nt, Artificial Sequence
  Synthetic oligonucleotide: CBLB-7462
cuuucagccccagauggcuu

SEQ ID NO: 37750 - RNA, 20 nt, Artificial Sequence
  Synthetic oligonucleotide: CBLB-7463
aucugguacuuuuauugcuu

SEQ ID NO: 37751 - RNA, 20 nt, Artificial Sequence
  Synthetic oligonucleotide: CBLB-7464
cuguccuggguagaaggguu

SEQ ID NO: 37752 - RNA, 20 nt, Artificial Sequence
  Synthetic oligonucleotide: CBLB-7465
uuuuucaucagccugauguu

SEQ ID NO: 37753 - RNA, 20 nt, Artificial Sequence
  Synthetic oligonucleotide: CBLB-7466
caugauuagcagagacuguu

SEQ ID NO: 37754 - RNA, 20 nt, Artificial Sequence
  Synthetic oligonucleotide: CBLB-7467
ugucuccuccucagucauuu

SEQ ID NO: 37755 - RNA, 17 nt, Artificial Sequence
  Synthetic oligonucleotide: CBLB-7468
aaguaaacugaaauaaa

SEQ ID NO: 37756 - RNA, 17 nt, Artificial Sequence
  Synthetic oligonucleotide: CBLB-7469
cuggacggcggcggcaa

SEQ ID NO: 37757 - RNA, 17 nt, Artificial Sequence
  Synthetic oligonucleotide: CBLB-7470
caccugacugguugcaa

SEQ ID NO: 37758 - RNA, 17 nt, Artificial Sequence
  Synthetic oligonucleotide: CBLB-7471
gauaaaauguuucucaa

SEQ ID NO: 37759 - RNA, 17 nt, Artificial Sequence
  Synthetic oligonucleotide: CBLB-7472
gcgccgaaaggcaagaa

SEQ ID NO: 37760 - RNA, 17 nt, Artificial Sequence
  Synthetic oligonucleotide: CBLB-7473
acagcuacggcgccgaa

SEQ ID NO: 37761 - RNA, 17 nt, Artificial Sequence
  Synthetic oligonucleotide: CBLB-7474
gaaaggcaagaagggaa

SEQ ID NO: 37762 - RNA, 17 nt, Artificial Sequence
  Synthetic oligonucleotide: CBLB-7475
uaaauucaaggcuguaa

SEQ ID NO: 37763 - RNA, 17 nt, Artificial Sequence
  Synthetic oligonucleotide: CBLB-7476
guccugugugugccaca

SEQ ID NO: 37764 - RNA, 17 nt, Artificial Sequence
  Synthetic oligonucleotide: CBLB-7477
gcacagaaauaaugaca

SEQ ID NO: 37765 - RNA, 17 nt, Artificial Sequence
  Synthetic oligonucleotide: CBLB-7478
acagccuugaauuuaca

SEQ ID NO: 37766 - RNA, 17 nt, Artificial Sequence
  Synthetic oligonucleotide: CBLB-7479
aaggcagcugagagcca

SEQ ID NO: 37767 - RNA, 17 nt, Artificial Sequence
  Synthetic oligonucleotide: CBLB-7480
uagccaggcgcgggcca

SEQ ID NO: 37768 - RNA, 17 nt, Artificial Sequence
  Synthetic oligonucleotide: CBLB-7481
uuaaccauguaaauuca

SEQ ID NO: 37769 - RNA, 17 nt, Artificial Sequence
  Synthetic oligonucleotide: CBLB-7482
ggcgccgaaaggcaaga

SEQ ID NO: 37770 - RNA, 17 nt, Artificial Sequence
  Synthetic oligonucleotide: CBLB-7483
cagcucgcucccgaaga

SEQ ID NO: 37771 - RNA, 17 nt, Artificial Sequence
  Synthetic oligonucleotide: CBLB-7484
cgggccaaggaggaaga

SEQ ID NO: 37772 - RNA, 17 nt, Artificial Sequence
  Synthetic oligonucleotide: CBLB-2104
ccgcaggccggggagga

SEQ ID NO: 37773 - RNA, 17 nt, Artificial Sequence
  Synthetic oligonucleotide: CBLB-7485
cgaaaggcaagaaggga

SEQ ID NO: 37774 - RNA, 17 nt, Artificial Sequence
  Synthetic oligonucleotide: CBLB-7486
ccccgagucgggcggga

SEQ ID NO: 37775 - RNA, 17 nt, Artificial Sequence
  Synthetic oligonucleotide: CBLB-7487
aaacugaaauaaaugga

SEQ ID NO: 37776 - RNA, 17 nt, Artificial Sequence
  Synthetic oligonucleotide: CBLB-7488
ccccacuucaaacugga

SEQ ID NO: 37777 - RNA, 17 nt, Artificial Sequence
  Synthetic oligonucleotide: CBLB-7489
uguaauuauuacuauga

SEQ ID NO: 37778 - RNA, 17 nt, Artificial Sequence
  Synthetic oligonucleotide: CBLB-7490
guguggauuugucuuga

SEQ ID NO: 37779 - RNA, 17 nt, Artificial Sequence
  Synthetic oligonucleotide: CBLB-7491
gugucucuggacagcua

SEQ ID NO: 37780 - RNA, 17 nt, Artificial Sequence
  Synthetic oligonucleotide: CBLB-7492
aaugccccacuucaaac

SEQ ID NO: 37781 - RNA, 17 nt, Artificial Sequence
  Synthetic oligonucleotide: CBLB-7493
gggcuccccacacacac

SEQ ID NO: 37782 - RNA, 17 nt, Artificial Sequence
  Synthetic oligonucleotide: CBLB-7494
accccuguggcacacac

SEQ ID NO: 37783 - RNA, 17 nt, Artificial Sequence
  Synthetic oligonucleotide: CBLB-7495
gguccugugugugccac

SEQ ID NO: 37784 - RNA, 17 nt, Artificial Sequence
  Synthetic oligonucleotide: CBLB-7496
acacuuuaucaccugac

SEQ ID NO: 37785 - RNA, 17 nt, Artificial Sequence
  Synthetic oligonucleotide: CBLB-7497
uggcacacacaggaccc

SEQ ID NO: 37786 - RNA, 17 nt, Artificial Sequence
  Synthetic oligonucleotide: CBLB-7498
cccgcgccuggcuaccc

SEQ ID NO: 37787 - RNA, 17 nt, Artificial Sequence
  Synthetic oligonucleotide: CBLB-7499
ccgcgccuggcuacccc

SEQ ID NO: 37788 - RNA, 17 nt, Artificial Sequence
  Synthetic oligonucleotide: CBLB-7500
ggcuaccccgggccccc

SEQ ID NO: 37789 - RNA, 17 nt, Artificial Sequence
  Synthetic oligonucleotide: CBLB-7501
uggcuaccccgggcccc

SEQ ID NO: 37790 - RNA, 17 nt, Artificial Sequence
  Synthetic oligonucleotide: CBLB-7502
ggaagaggggacagccc

SEQ ID NO: 37791 - RNA, 17 nt, Artificial Sequence
  Synthetic oligonucleotide: CBLB-7503
guguguguggggagccc

SEQ ID NO: 37792 - RNA, 17 nt, Artificial Sequence
  Synthetic oligonucleotide: CBLB-7504
acacuucuugccggccc

SEQ ID NO: 37793 - RNA, 17 nt, Artificial Sequence
  Synthetic oligonucleotide: CBLB-7505
ugccggcccgggggccc

SEQ ID NO: 37794 - RNA, 17 nt, Artificial Sequence
  Synthetic oligonucleotide: CBLB-7506
gaaguguggagccuccc

SEQ ID NO: 37795 - RNA, 17 nt, Artificial Sequence
  Synthetic oligonucleotide: CBLB-7507
cgaucccacucccagcc

SEQ ID NO: 37796 - RNA, 17 nt, Artificial Sequence
  Synthetic oligonucleotide: CBLB-7508
aaaggcagcugagagcc

SEQ ID NO: 37797 - RNA, 17 nt, Artificial Sequence
  Synthetic oligonucleotide: CBLB-7509
gggggcccgggguagcc

SEQ ID NO: 37798 - RNA, 17 nt, Artificial Sequence
  Synthetic oligonucleotide: CBLB-7510
ccuccuuggcccgcgcc

SEQ ID NO: 37799 - RNA, 17 nt, Artificial Sequence
  Synthetic oligonucleotide: CBLB-7511
gaagggaaggggucgcc

SEQ ID NO: 37800 - RNA, 17 nt, Artificial Sequence
  Synthetic oligonucleotide: CBLB-7512
accagaacccgcaggcc

SEQ ID NO: 37801 - RNA, 17 nt, Artificial Sequence
  Synthetic oligonucleotide: CBLB-7513
cacacuucuugccggcc

SEQ ID NO: 37802 - RNA, 17 nt, Artificial Sequence
  Synthetic oligonucleotide: CBLB-7514
uugccggcccgggggcc

SEQ ID NO: 37803 - RNA, 17 nt, Artificial Sequence
  Synthetic oligonucleotide: CBLB-7515
gcgaucccacucccagc

SEQ ID NO: 37804 - RNA, 17 nt, Artificial Sequence
  Synthetic oligonucleotide: CBLB-7516
gggcgggaggggagagc

SEQ ID NO: 37805 - RNA, 17 nt, Artificial Sequence
  Synthetic oligonucleotide: CBLB-7517
gccgcagcagcacuagc

SEQ ID NO: 37806 - RNA, 17 nt, Artificial Sequence
  Synthetic oligonucleotide: CBLB-7518
uaaagaccagaacccgc

SEQ ID NO: 37807 - RNA, 17 nt, Artificial Sequence
  Synthetic oligonucleotide: CBLB-7519
cgacucggggaggccgc

SEQ ID NO: 37808 - RNA, 17 nt, Artificial Sequence
  Synthetic oligonucleotide: CBLB-7520
ggagcaacccagcgcgc

SEQ ID NO: 37809 - RNA, 17 nt, Artificial Sequence
  Synthetic oligonucleotide: CBLB-7521
cucggaggccugcgcgc

SEQ ID NO: 37810 - RNA, 17 nt, Artificial Sequence
  Synthetic oligonucleotide: CBLB-7522
ccgggguagccaggcgc

SEQ ID NO: 37811 - RNA, 17 nt, Artificial Sequence
  Synthetic oligonucleotide: CBLB-7523
gagacacgcgugugcgc

SEQ ID NO: 37812 - RNA, 17 nt, Artificial Sequence
  Synthetic oligonucleotide: CBLB-7524
aggaggagaccgcucgc

SEQ ID NO: 37813 - RNA, 17 nt, Artificial Sequence
  Synthetic oligonucleotide: CBLB-7525
agaagggaaggggucgc

SEQ ID NO: 37814 - RNA, 17 nt, Artificial Sequence
  Synthetic oligonucleotide: CBLB-7526
gaccagaacccgcaggc

SEQ ID NO: 37815 - RNA, 17 nt, Artificial Sequence
  Synthetic oligonucleotide: CBLB-7527
guguggggagccccggc

SEQ ID NO: 37816 - RNA, 17 nt, Artificial Sequence
  Synthetic oligonucleotide: CBLB-7528
accccgggcccccgggc

SEQ ID NO: 37817 - RNA, 17 nt, Artificial Sequence
  Synthetic oligonucleotide: CBLB-7529
gccuccccgagucgggc

SEQ ID NO: 37818 - RNA, 17 nt, Artificial Sequence
  Synthetic oligonucleotide: CBLB-7530
ccuccuccccggccugc

SEQ ID NO: 37819 - RNA, 17 nt, Artificial Sequence
  Synthetic oligonucleotide: CBLB-7531
ggcuccacacuucuugc

SEQ ID NO: 37820 - RNA, 17 nt, Artificial Sequence
  Synthetic oligonucleotide: CBLB-7532
uugagaaacauuuuauc

SEQ ID NO: 37821 - RNA, 17 nt, Artificial Sequence
  Synthetic oligonucleotide: CBLB-7533
gcuguaaaggaaaacuc

SEQ ID NO: 37822 - RNA, 17 nt, Artificial Sequence
  Synthetic oligonucleotide: CBLB-7534
ccccucccgcccgacuc

SEQ ID NO: 37823 - RNA, 17 nt, Artificial Sequence
  Synthetic oligonucleotide: CBLB-7535
acacaggacccaggcuc

SEQ ID NO: 37824 - RNA, 17 nt, Artificial Sequence
  Synthetic oligonucleotide: CBLB-7536
gcuaccaacaauugcuc

SEQ ID NO: 37825 - RNA, 17 nt, Artificial Sequence
  Synthetic oligonucleotide: CBLB-7537
gcgcacacgcgugucuc

SEQ ID NO: 37826 - RNA, 17 nt, Artificial Sequence
  Synthetic oligonucleotide: CBLB-7538
ugccuuugcaaccaguc

SEQ ID NO: 37827 - RNA, 17 nt, Artificial Sequence
  Synthetic oligonucleotide: CBLB-7539
cgcggccuccccgaguc

SEQ ID NO: 37828 - RNA, 17 nt, Artificial Sequence
  Synthetic oligonucleotide: CBLB-7540
gugauaaagugugauuc

SEQ ID NO: 37829 - RNA, 17 nt, Artificial Sequence
  Synthetic oligonucleotide: CBLB-7541
uggguugcuccuucuuc

SEQ ID NO: 37830 - RNA, 17 nt, Artificial Sequence
  Synthetic oligonucleotide: CBLB-7542
ccccggccugcggguuc

SEQ ID NO: 37831 - RNA, 17 nt, Artificial Sequence
  Synthetic oligonucleotide: CBLB-7543
ucuuaguugcuagaaag

SEQ ID NO: 37832 - RNA, 17 nt, Artificial Sequence
  Synthetic oligonucleotide: CBLB-7544
gcgggccaaggaggaag

SEQ ID NO: 37833 - RNA, 17 nt, Artificial Sequence
  Synthetic oligonucleotide: CBLB-7545
aaaggcaagaagggaag

SEQ ID NO: 37834 - RNA, 17 nt, Artificial Sequence
  Synthetic oligonucleotide: CBLB-7546
cgccguccaguuugaag

SEQ ID NO: 37835 - RNA, 17 nt, Artificial Sequence
  Synthetic oligonucleotide: CBLB-7547
uccugugugugccacag

SEQ ID NO: 37836 - RNA, 17 nt, Artificial Sequence
  Synthetic oligonucleotide: CBLB-7548
gggccaaggaggaagag

SEQ ID NO: 37837 - RNA, 17 nt, Artificial Sequence
  Synthetic oligonucleotide: CBLB-7549
cgggcgggaggggagag

SEQ ID NO: 37838 - RNA, 17 nt, Artificial Sequence
  Synthetic oligonucleotide: CBLB-7550
gugggguguccagcgag

SEQ ID NO: 37839 - RNA, 17 nt, Artificial Sequence
  Synthetic oligonucleotide: CBLB-7551
cccgagucgggcgggag

SEQ ID NO: 37840 - RNA, 17 nt, Artificial Sequence
  Synthetic oligonucleotide: CBLB-7552
ggagccccggcugggag

SEQ ID NO: 37841 - RNA, 17 nt, Artificial Sequence
  Synthetic oligonucleotide: CBLB-7553
gcugcgugcguguggag

SEQ ID NO: 37842 - RNA, 17 nt, Artificial Sequence
  Synthetic oligonucleotide: CBLB-7554
auuguugguagcaugag

SEQ ID NO: 37843 - RNA, 17 nt, Artificial Sequence
  Synthetic oligonucleotide: CBLB-7555
aacgcuaucaacuguag

SEQ ID NO: 37844 - RNA, 17 nt, Artificial Sequence
  Synthetic oligonucleotide: CBLB-7556
cgcaggccuccgagacg

SEQ ID NO: 37845 - RNA, 17 nt, Artificial Sequence
  Synthetic oligonucleotide: CBLB-7557
cauuuuaucagguuacg

SEQ ID NO: 37846 - RNA, 17 nt, Artificial Sequence
  Synthetic oligonucleotide: CBLB-7558
cacuucuugccggcccg

SEQ ID NO: 37847 - RNA, 17 nt, Artificial Sequence
  Synthetic oligonucleotide: CBLB-7559
gccggcccgggggcccg

SEQ ID NO: 37848 - RNA, 17 nt, Artificial Sequence
  Synthetic oligonucleotide: CBLB-7560
gcugcugcggcgucccg

SEQ ID NO: 37849 - RNA, 17 nt, Artificial Sequence
  Synthetic oligonucleotide: CBLB-7561
gaucccacucccagccg

SEQ ID NO: 37850 - RNA, 17 nt, Artificial Sequence
  Synthetic oligonucleotide: CBLB-7562
aagggaaggggucgccg

SEQ ID NO: 37851 - RNA, 17 nt, Artificial Sequence
  Synthetic oligonucleotide: CBLB-7563
ccagaacccgcaggccg

SEQ ID NO: 37852 - RNA, 17 nt, Artificial Sequence
  Synthetic oligonucleotide: CBLB-7564
ccgacucggggaggccg

SEQ ID NO: 37853 - RNA, 17 nt, Artificial Sequence
  Synthetic oligonucleotide: CBLB-7565
cccgggguagccaggcg

SEQ ID NO: 37854 - RNA, 17 nt, Artificial Sequence
  Synthetic oligonucleotide: CBLB-7566
agagacacgcgugugcg

SEQ ID NO: 37855 - RNA, 17 nt, Artificial Sequence
  Synthetic oligonucleotide: CBLB-7567
cccucccgcccgacucg

SEQ ID NO: 37856 - RNA, 17 nt, Artificial Sequence
  Synthetic oligonucleotide: CBLB-7568
cacaggacccaggcucg

SEQ ID NO: 37857 - RNA, 17 nt, Artificial Sequence
  Synthetic oligonucleotide: CBLB-7569
ccaggcgcgggccaagg

SEQ ID NO: 37858 - RNA, 17 nt, Artificial Sequence
  Synthetic oligonucleotide: CBLB-7570
gcagcagcacuagcagg

SEQ ID NO: 37859 - RNA, 17 nt, Artificial Sequence
  Synthetic oligonucleotide: CBLB-7571
gcagcacuagcaggagg

SEQ ID NO: 37860 - RNA, 17 nt, Artificial Sequence
  Synthetic oligonucleotide: CBLB-7572
cccgcaggccggggagg

SEQ ID NO: 37861 - RNA, 17 nt, Artificial Sequence
  Synthetic oligonucleotide: CBLB-7573
cacuucaaacuggacgg

SEQ ID NO: 37862 - RNA, 17 nt, Artificial Sequence
  Synthetic oligonucleotide: CBLB-7574
acuucuugccggcccgg

SEQ ID NO: 37863 - RNA, 17 nt, Artificial Sequence
  Synthetic oligonucleotide: CBLB-7575
uucaaacuggacggcgg

SEQ ID NO: 37864 - RNA, 17 nt, Artificial Sequence
  Synthetic oligonucleotide: CBLB-7576
gcguuuccacgucucgg

SEQ ID NO: 37865 - RNA, 17 nt, Artificial Sequence
  Synthetic oligonucleotide: CBLB-7577
uccccgagucgggcggg

SEQ ID NO: 37866 - RNA, 17 nt, Artificial Sequence
  Synthetic oligonucleotide: CBLB-7578
ggccuccccgagucggg

SEQ ID NO: 37867 - RNA, 17 nt, Artificial Sequence
  Synthetic oligonucleotide: CBLB-7579
ugugugugccacagggg

SEQ ID NO: 37868 - RNA, 17 nt, Artificial Sequence
  Synthetic oligonucleotide: CBLB-7580
ggaaggggucgccgggg

SEQ ID NO: 37869 - RNA, 17 nt, Artificial Sequence
  Synthetic oligonucleotide: CBLB-7581
gaacccgcaggccgggg

SEQ ID NO: 37870 - RNA, 17 nt, Artificial Sequence
  Synthetic oligonucleotide: CBLB-7582
ucccgcccgacucgggg

SEQ ID NO: 37871 - RNA, 17 nt, Artificial Sequence
  Synthetic oligonucleotide: CBLB-7583
guugguagcaugagugg

SEQ ID NO: 37872 - RNA, 17 nt, Artificial Sequence
  Synthetic oligonucleotide: CBLB-7584
uggacaccccaccccug

SEQ ID NO: 37873 - RNA, 17 nt, Artificial Sequence
  Synthetic oligonucleotide: CBLB-7585
cccuccuccccggccug

SEQ ID NO: 37874 - RNA, 17 nt, Artificial Sequence
  Synthetic oligonucleotide: CBLB-7586
uccugcuagugcugcug

SEQ ID NO: 37875 - RNA, 17 nt, Artificial Sequence
  Synthetic oligonucleotide: CBLB-7587
cgggccggcaagaagug

SEQ ID NO: 37876 - RNA, 17 nt, Artificial Sequence
  Synthetic oligonucleotide: CBLB-7588
ccguccaguuugaagug

SEQ ID NO: 37877 - RNA, 17 nt, Artificial Sequence
  Synthetic oligonucleotide: CBLB-7589
acugggcugcgugcgug

SEQ ID NO: 37878 - RNA, 17 nt, Artificial Sequence
  Synthetic oligonucleotide: CBLB-7590
ggaggggagagcgggug

SEQ ID NO: 37879 - RNA, 17 nt, Artificial Sequence
  Synthetic oligonucleotide: CBLB-7591
ugugugccacaggggug

SEQ ID NO: 37880 - RNA, 17 nt, Artificial Sequence
  Synthetic oligonucleotide: CBLB-7592
acgcagcccagugugug

SEQ ID NO: 37881 - RNA, 17 nt, Artificial Sequence
  Synthetic oligonucleotide: CBLB-7593
gcagcccagugugugug

SEQ ID NO: 37882 - RNA, 17 nt, Artificial Sequence
  Synthetic oligonucleotide: CBLB-7594
guucugauauuuuacau

SEQ ID NO: 37883 - RNA, 17 nt, Artificial Sequence
  Synthetic oligonucleotide: CBLB-7595
ucuuucagcaauaucau

SEQ ID NO: 37884 - RNA, 17 nt, Artificial Sequence
  Synthetic oligonucleotide: CBLB-7596
ggcuccccacacacacu

SEQ ID NO: 37885 - RNA, 17 nt, Artificial Sequence
  Synthetic oligonucleotide: CBLB-7597
uccccucccgcccgacu

SEQ ID NO: 37886 - RNA, 17 nt, Artificial Sequence
  Synthetic oligonucleotide: CBLB-7598
uguccccucuuccuccu

SEQ ID NO: 37887 - RNA, 17 nt, Artificial Sequence
  Synthetic oligonucleotide: CBLB-7599
uauuacacuuuucagcu

SEQ ID NO: 37888 - RNA, 17 nt, Artificial Sequence
  Synthetic oligonucleotide: CBLB-7600
ucggaggccugcgcgcu

SEQ ID NO: 37889 - RNA, 17 nt, Artificial Sequence
  Synthetic oligonucleotide: CBLB-7601
cacacaggacccaggcu

SEQ ID NO: 37890 - RNA, 17 nt, Artificial Sequence
  Synthetic oligonucleotide: CBLB-7602
uguggggagccccggcu

SEQ ID NO: 37891 - RNA, 17 nt, Artificial Sequence
  Synthetic oligonucleotide: CBLB-7603
gagaaagcuacugugcu

SEQ ID NO: 37892 - RNA, 17 nt, Artificial Sequence
  Synthetic oligonucleotide: CBLB-7604
guugcguuuccacgucu

SEQ ID NO: 37893 - RNA, 17 nt, Artificial Sequence
  Synthetic oligonucleotide: CBLB-7605
gccguccaguuugaagu

SEQ ID NO: 37894 - RNA, 17 nt, Artificial Sequence
  Synthetic oligonucleotide: CBLB-7606
ccgcggccuccccgagu

SEQ ID NO: 37895 - RNA, 17 nt, Artificial Sequence
  Synthetic oligonucleotide: CBLB-7607
gagccccggcugggagu

SEQ ID NO: 37896 - RNA, 17 nt, Artificial Sequence
  Synthetic oligonucleotide: CBLB-7608
cugcgugcguguggagu

SEQ ID NO: 37897 - RNA, 17 nt, Artificial Sequence
  Synthetic oligonucleotide: CBLB-7609
gugugugccacaggggu

SEQ ID NO: 37898 - RNA, 17 nt, Artificial Sequence
  Synthetic oligonucleotide: CBLB-7610
uugguagcaugaguggu

SEQ ID NO: 37899 - RNA, 17 nt, Artificial Sequence
  Synthetic oligonucleotide: CBLB-7611
cgcagcccagugugugu

SEQ ID NO: 37900 - RNA, 17 nt, Artificial Sequence
  Synthetic oligonucleotide: CBLB-7612
aaguccagagcaauugu

SEQ ID NO: 37901 - RNA, 17 nt, Artificial Sequence
  Synthetic oligonucleotide: CBLB-7613
uucugauauuuuacauu

SEQ ID NO: 37902 - RNA, 17 nt, Artificial Sequence
  Synthetic oligonucleotide: CBLB-7614
cucuggacuucauacuu

SEQ ID NO: 37903 - RNA, 17 nt, Artificial Sequence
  Synthetic oligonucleotide: CBLB-7615
cuggguugcuccuucuu

SEQ ID NO: 37904 - RNA, 17 nt, Artificial Sequence
  Synthetic oligonucleotide: CBLB-7616
cuucccuucuugccuuu

SEQ ID NO: 37905 - RNA, 20 nt, Artificial Sequence
  Synthetic oligonucleotide: CBLB-7617
uugaaguaaacugaaauaaa

SEQ ID NO: 37906 - RNA, 20 nt, Artificial Sequence
  Synthetic oligonucleotide: CBLB-7618
aaacuggacggcggcggcaa

SEQ ID NO: 37907 - RNA, 20 nt, Artificial Sequence
  Synthetic oligonucleotide: CBLB-7619
uaucaccugacugguugcaa

SEQ ID NO: 37908 - RNA, 20 nt, Artificial Sequence
  Synthetic oligonucleotide: CBLB-7620
ccugauaaaauguuucucaa

SEQ ID NO: 37909 - RNA, 20 nt, Artificial Sequence
  Synthetic oligonucleotide: CBLB-7621
acggcgccgaaaggcaagaa

SEQ ID NO: 37910 - RNA, 20 nt, Artificial Sequence
  Synthetic oligonucleotide: CBLB-7622
uggacagcuacggcgccgaa

SEQ ID NO: 37911 - RNA, 20 nt, Artificial Sequence
  Synthetic oligonucleotide: CBLB-7623
gccgaaaggcaagaagggaa

SEQ ID NO: 37912 - RNA, 20 nt, Artificial Sequence
  Synthetic oligonucleotide: CBLB-7624
auguaaauucaaggcuguaa

SEQ ID NO: 37913 - RNA, 20 nt, Artificial Sequence
  Synthetic oligonucleotide: CBLB-7625
uggguccugugugugccaca

SEQ ID NO: 37914 - RNA, 20 nt, Artificial Sequence
  Synthetic oligonucleotide: CBLB-7626
cuggcacagaaauaaugaca

SEQ ID NO: 37915 - RNA, 20 nt, Artificial Sequence
  Synthetic oligonucleotide: CBLB-7627
uuuacagccuugaauuuaca

SEQ ID NO: 37916 - RNA, 20 nt, Artificial Sequence
  Synthetic oligonucleotide: CBLB-7628
gcaaaggcagcugagagcca

SEQ ID NO: 37917 - RNA, 20 nt, Artificial Sequence
  Synthetic oligonucleotide: CBLB-7629
ggguagccaggcgcgggcca

SEQ ID NO: 37918 - RNA, 20 nt, Artificial Sequence
  Synthetic oligonucleotide: CBLB-7630
aucuuaaccauguaaauuca

SEQ ID NO: 37919 - RNA, 20 nt, Artificial Sequence
  Synthetic oligonucleotide: CBLB-7631
uacggcgccgaaaggcaaga

SEQ ID NO: 37920 - RNA, 20 nt, Artificial Sequence
  Synthetic oligonucleotide: CBLB-7632
gaacagcucgcucccgaaga

SEQ ID NO: 37921 - RNA, 20 nt, Artificial Sequence
  Synthetic oligonucleotide: CBLB-7633
gcgcgggccaaggaggaaga

SEQ ID NO: 37922 - RNA, 20 nt, Artificial Sequence
  Synthetic oligonucleotide: CBLB-2030
aacccgcaggccggggagga

SEQ ID NO: 37923 - RNA, 20 nt, Artificial Sequence
  Synthetic oligonucleotide: CBLB-7634
cgccgaaaggcaagaaggga

SEQ ID NO: 37924 - RNA, 20 nt, Artificial Sequence
  Synthetic oligonucleotide: CBLB-7635
ccuccccgagucgggcggga

SEQ ID NO: 37925 - RNA, 20 nt, Artificial Sequence
  Synthetic oligonucleotide: CBLB-7636
aguaaacugaaauaaaugga

SEQ ID NO: 37926 - RNA, 20 nt, Artificial Sequence
  Synthetic oligonucleotide: CBLB-7637
augccccacuucaaacugga

SEQ ID NO: 37927 - RNA, 20 nt, Artificial Sequence
  Synthetic oligonucleotide: CBLB-7638
uacuguaauuauuacuauga

SEQ ID NO: 37928 - RNA, 20 nt, Artificial Sequence
  Synthetic oligonucleotide: CBLB-7639
cggguguggauuugucuuga

SEQ ID NO: 37929 - RNA, 20 nt, Artificial Sequence
  Synthetic oligonucleotide: CBLB-7640
cgcgugucucuggacagcua

SEQ ID NO: 37930 - RNA, 20 nt, Artificial Sequence
  Synthetic oligonucleotide: CBLB-7641
uuaaaugccccacuucaaac

SEQ ID NO: 37931 - RNA, 20 nt, Artificial Sequence
  Synthetic oligonucleotide: CBLB-7642
ccggggcuccccacacacac

SEQ ID NO: 37932 - RNA, 20 nt, Artificial Sequence
  Synthetic oligonucleotide: CBLB-7643
cccaccccuguggcacacac

SEQ ID NO: 37933 - RNA, 20 nt, Artificial Sequence
  Synthetic oligonucleotide: CBLB-7644
cuggguccugugugugccac

SEQ ID NO: 37934 - RNA, 20 nt, Artificial Sequence
  Synthetic oligonucleotide: CBLB-7645
aucacacuuuaucaccugac

SEQ ID NO: 37935 - RNA, 20 nt, Artificial Sequence
  Synthetic oligonucleotide: CBLB-7646
cuguggcacacacaggaccc

SEQ ID NO: 37936 - RNA, 20 nt, Artificial Sequence
  Synthetic oligonucleotide: CBLB-7647
uggcccgcgccuggcuaccc

SEQ ID NO: 37937 - RNA, 20 nt, Artificial Sequence
  Synthetic oligonucleotide: CBLB-7648
ggcccgcgccuggcuacccc

SEQ ID NO: 37938 - RNA, 20 nt, Artificial Sequence
  Synthetic oligonucleotide: CBLB-7649
ccuggcuaccccgggccccc

SEQ ID NO: 37939 - RNA, 20 nt, Artificial Sequence
  Synthetic oligonucleotide: CBLB-7650
gccuggcuaccccgggcccc

SEQ ID NO: 37940 - RNA, 20 nt, Artificial Sequence
  Synthetic oligonucleotide: CBLB-7651
ggaggaagaggggacagccc

SEQ ID NO: 37941 - RNA, 20 nt, Artificial Sequence
  Synthetic oligonucleotide: CBLB-7652
ccaguguguguggggagccc

SEQ ID NO: 37942 - RNA, 20 nt, Artificial Sequence
  Synthetic oligonucleotide: CBLB-7653
uccacacuucuugccggccc

SEQ ID NO: 37943 - RNA, 20 nt, Artificial Sequence
  Synthetic oligonucleotide: CBLB-7654
ucuugccggcccgggggccc

SEQ ID NO: 37944 - RNA, 20 nt, Artificial Sequence
  Synthetic oligonucleotide: CBLB-7655
caagaaguguggagccuccc

SEQ ID NO: 37945 - RNA, 20 nt, Artificial Sequence
  Synthetic oligonucleotide: CBLB-7656
cagcgaucccacucccagcc

SEQ ID NO: 37946 - RNA, 20 nt, Artificial Sequence
  Synthetic oligonucleotide: CBLB-7657
ggcaaaggcagcugagagcc

SEQ ID NO: 37947 - RNA, 20 nt, Artificial Sequence
  Synthetic oligonucleotide: CBLB-7658
cccgggggcccgggguagcc

SEQ ID NO: 37948 - RNA, 20 nt, Artificial Sequence
  Synthetic oligonucleotide: CBLB-7659
cuuccuccuuggcccgcgcc

SEQ ID NO: 37949 - RNA, 20 nt, Artificial Sequence
  Synthetic oligonucleotide: CBLB-7660
caagaagggaaggggucgcc

SEQ ID NO: 37950 - RNA, 20 nt, Artificial Sequence
  Synthetic oligonucleotide: CBLB-7661
aagaccagaacccgcaggcc

SEQ ID NO: 37951 - RNA, 20 nt, Artificial Sequence
  Synthetic oligonucleotide: CBLB-7662
cuccacacuucuugccggcc

SEQ ID NO: 37952 - RNA, 20 nt, Artificial Sequence
  Synthetic oligonucleotide: CBLB-7663
uucuugccggcccgggggcc

SEQ ID NO: 37953 - RNA, 20 nt, Artificial Sequence
  Synthetic oligonucleotide: CBLB-7664
ucagcgaucccacucccagc

SEQ ID NO: 37954 - RNA, 20 nt, Artificial Sequence
  Synthetic oligonucleotide: CBLB-7665
gucgggcgggaggggagagc

SEQ ID NO: 37955 - RNA, 20 nt, Artificial Sequence
  Synthetic oligonucleotide: CBLB-7666
gacgccgcagcagcacuagc

SEQ ID NO: 37956 - RNA, 20 nt, Artificial Sequence
  Synthetic oligonucleotide: CBLB-7667
auuuaaagaccagaacccgc

SEQ ID NO: 37957 - RNA, 20 nt, Artificial Sequence
  Synthetic oligonucleotide: CBLB-7668
gcccgacucggggaggccgc

SEQ ID NO: 37958 - RNA, 20 nt, Artificial Sequence
  Synthetic oligonucleotide: CBLB-7669
gaaggagcaacccagcgcgc

SEQ ID NO: 37959 - RNA, 20 nt, Artificial Sequence
  Synthetic oligonucleotide: CBLB-7670
cgucucggaggccugcgcgc

SEQ ID NO: 37960 - RNA, 20 nt, Artificial Sequence
  Synthetic oligonucleotide: CBLB-7671
ggcccgggguagccaggcgc

SEQ ID NO: 37961 - RNA, 20 nt, Artificial Sequence
  Synthetic oligonucleotide: CBLB-7672
ccagagacacgcgugugcgc

SEQ ID NO: 37962 - RNA, 20 nt, Artificial Sequence
  Synthetic oligonucleotide: CBLB-7673
aggaggaggagaccgcucgc

SEQ ID NO: 37963 - RNA, 20 nt, Artificial Sequence
  Synthetic oligonucleotide: CBLB-7674
gcaagaagggaaggggucgc

SEQ ID NO: 37964 - RNA, 20 nt, Artificial Sequence
  Synthetic oligonucleotide: CBLB-7675
aaagaccagaacccgcaggc

SEQ ID NO: 37965 - RNA, 20 nt, Artificial Sequence
  Synthetic oligonucleotide: CBLB-7676
uguguguggggagccccggc

SEQ ID NO: 37966 - RNA, 20 nt, Artificial Sequence
  Synthetic oligonucleotide: CBLB-7677
gcuaccccgggcccccgggc

SEQ ID NO: 37967 - RNA, 20 nt, Artificial Sequence
  Synthetic oligonucleotide: CBLB-7678
gcggccuccccgagucgggc

SEQ ID NO: 37968 - RNA, 20 nt, Artificial Sequence
  Synthetic oligonucleotide: CBLB-7679
cucccuccuccccggccugc

SEQ ID NO: 37969 - RNA, 20 nt, Artificial Sequence
  Synthetic oligonucleotide: CBLB-7680
ggaggcuccacacuucuugc

SEQ ID NO: 37970 - RNA, 20 nt, Artificial Sequence
  Synthetic oligonucleotide: CBLB-7681
ccauugagaaacauuuuauc

SEQ ID NO: 37971 - RNA, 20 nt, Artificial Sequence
  Synthetic oligonucleotide: CBLB-7682
aaggcuguaaaggaaaacuc

SEQ ID NO: 37972 - RNA, 20 nt, Artificial Sequence
  Synthetic oligonucleotide: CBLB-7683
ucuccccucccgcccgacuc

SEQ ID NO: 37973 - RNA, 20 nt, Artificial Sequence
  Synthetic oligonucleotide: CBLB-7684
cacacacaggacccaggcuc

SEQ ID NO: 37974 - RNA, 20 nt, Artificial Sequence
  Synthetic oligonucleotide: CBLB-7685
caugcuaccaacaauugcuc

SEQ ID NO: 37975 - RNA, 20 nt, Artificial Sequence
  Synthetic oligonucleotide: CBLB-7686
cccgcgcacacgcgugucuc

SEQ ID NO: 37976 - RNA, 20 nt, Artificial Sequence
  Synthetic oligonucleotide: CBLB-7687
augugccuuugcaaccaguc

SEQ ID NO: 37977 - RNA, 20 nt, Artificial Sequence
  Synthetic oligonucleotide: CBLB-7688
ucccgcggccuccccgaguc

SEQ ID NO: 37978 - RNA, 20 nt, Artificial Sequence
  Synthetic oligonucleotide: CBLB-7689
caggugauaaagugugauuc

SEQ ID NO: 37979 - RNA, 20 nt, Artificial Sequence
  Synthetic oligonucleotide: CBLB-7690
cgcuggguugcuccuucuuc

SEQ ID NO: 37980 - RNA, 20 nt, Artificial Sequence
  Synthetic oligonucleotide: CBLB-7691
ccuccccggccugcggguuc

SEQ ID NO: 37981 - RNA, 20 nt, Artificial Sequence
  Synthetic oligonucleotide: CBLB-7692
aauucuuaguugcuagaaag

SEQ ID NO: 37982 - RNA, 20 nt, Artificial Sequence
  Synthetic oligonucleotide: CBLB-7693
ggcgcgggccaaggaggaag

SEQ ID NO: 37983 - RNA, 20 nt, Artificial Sequence
  Synthetic oligonucleotide: CBLB-7694
ccgaaaggcaagaagggaag

SEQ ID NO: 37984 - RNA, 20 nt, Artificial Sequence
  Synthetic oligonucleotide: CBLB-7695
cgccgccguccaguuugaag

SEQ ID NO: 37985 - RNA, 20 nt, Artificial Sequence
  Synthetic oligonucleotide: CBLB-7696
ggguccugugugugccacag

SEQ ID NO: 37986 - RNA, 20 nt, Artificial Sequence
  Synthetic oligonucleotide: CBLB-7697
cgcgggccaaggaggaagag

SEQ ID NO: 37987 - RNA, 20 nt, Artificial Sequence
  Synthetic oligonucleotide: CBLB-7698
agucgggcgggaggggagag

SEQ ID NO: 37988 - RNA, 20 nt, Artificial Sequence
  Synthetic oligonucleotide: CBLB-7699
ggggugggguguccagcgag

SEQ ID NO: 37989 - RNA, 20 nt, Artificial Sequence
  Synthetic oligonucleotide: CBLB-7700
cuccccgagucgggcgggag

SEQ ID NO: 37990 - RNA, 20 nt, Artificial Sequence
  Synthetic oligonucleotide: CBLB-7701
uggggagccccggcugggag

SEQ ID NO: 37991 - RNA, 20 nt, Artificial Sequence
  Synthetic oligonucleotide: CBLB-7702
ugggcugcgugcguguggag

SEQ ID NO: 37992 - RNA, 20 nt, Artificial Sequence
  Synthetic oligonucleotide: CBLB-7703
gcaauuguugguagcaugag

SEQ ID NO: 37993 - RNA, 20 nt, Artificial Sequence
  Synthetic oligonucleotide: CBLB-7704
auaaacgcuaucaacuguag

SEQ ID NO: 37994 - RNA, 20 nt, Artificial Sequence
  Synthetic oligonucleotide: CBLB-7705
gcgcgcaggccuccgagacg

SEQ ID NO: 37995 - RNA, 20 nt, Artificial Sequence
  Synthetic oligonucleotide: CBLB-7706
aaacauuuuaucagguuacg

SEQ ID NO: 37996 - RNA, 20 nt, Artificial Sequence
  Synthetic oligonucleotide: CBLB-7707
ccacacuucuugccggcccg

SEQ ID NO: 37997 - RNA, 20 nt, Artificial Sequence
  Synthetic oligonucleotide: CBLB-7708
cuugccggcccgggggcccg

SEQ ID NO: 37998 - RNA, 20 nt, Artificial Sequence
  Synthetic oligonucleotide: CBLB-7709
agugcugcugcggcgucccg

SEQ ID NO: 37999 - RNA, 20 nt, Artificial Sequence
  Synthetic oligonucleotide: CBLB-7710
agcgaucccacucccagccg

SEQ ID NO: 38000 - RNA, 20 nt, Artificial Sequence
  Synthetic oligonucleotide: CBLB-7711
aagaagggaaggggucgccg

SEQ ID NO: 38001 - RNA, 20 nt, Artificial Sequence
  Synthetic oligonucleotide: CBLB-7712
agaccagaacccgcaggccg

SEQ ID NO: 38002 - RNA, 20 nt, Artificial Sequence
  Synthetic oligonucleotide: CBLB-7713
cgcccgacucggggaggccg

SEQ ID NO: 38003 - RNA, 20 nt, Artificial Sequence
  Synthetic oligonucleotide: CBLB-7714
gggcccgggguagccaggcg

SEQ ID NO: 38004 - RNA, 20 nt, Artificial Sequence
  Synthetic oligonucleotide: CBLB-7715
uccagagacacgcgugugcg

SEQ ID NO: 38005 - RNA, 20 nt, Artificial Sequence
  Synthetic oligonucleotide: CBLB-7716
cuccccucccgcccgacucg

SEQ ID NO: 38006 - RNA, 20 nt, Artificial Sequence
  Synthetic oligonucleotide: CBLB-7717
acacacaggacccaggcucg

SEQ ID NO: 38007 - RNA, 20 nt, Artificial Sequence
  Synthetic oligonucleotide: CBLB-7718
uagccaggcgcgggccaagg

SEQ ID NO: 38008 - RNA, 20 nt, Artificial Sequence
  Synthetic oligonucleotide: CBLB-7719
gccgcagcagcacuagcagg

SEQ ID NO: 38009 - RNA, 20 nt, Artificial Sequence
  Synthetic oligonucleotide: CBLB-7720
gcagcagcacuagcaggagg

SEQ ID NO: 38010 - RNA, 20 nt, Artificial Sequence
  Synthetic oligonucleotide: CBLB-7721
gaacccgcaggccggggagg

SEQ ID NO: 38011 - RNA, 20 nt, Artificial Sequence
  Synthetic oligonucleotide: CBLB-7722
ccccacuucaaacuggacgg

SEQ ID NO: 38012 - RNA, 20 nt, Artificial Sequence
  Synthetic oligonucleotide: CBLB-7723
cacacuucuugccggcccgg

SEQ ID NO: 38013 - RNA, 20 nt, Artificial Sequence
  Synthetic oligonucleotide: CBLB-7724
cacuucaaacuggacggcgg

SEQ ID NO: 38014 - RNA, 20 nt, Artificial Sequence
  Synthetic oligonucleotide: CBLB-7725
guugcguuuccacgucucgg

SEQ ID NO: 38015 - RNA, 20 nt, Artificial Sequence
  Synthetic oligonucleotide: CBLB-7726
gccuccccgagucgggcggg

SEQ ID NO: 38016 - RNA, 20 nt, Artificial Sequence
  Synthetic oligonucleotide: CBLB-7727
cgcggccuccccgagucggg

SEQ ID NO: 38017 - RNA, 20 nt, Artificial Sequence
  Synthetic oligonucleotide: CBLB-7728
uccugugugugccacagggg

SEQ ID NO: 38018 - RNA, 20 nt, Artificial Sequence
  Synthetic oligonucleotide: CBLB-7729
aagggaaggggucgccgggg

SEQ ID NO: 38019 - RNA, 20 nt, Artificial Sequence
  Synthetic oligonucleotide: CBLB-7730
ccagaacccgcaggccgggg

SEQ ID NO: 38020 - RNA, 20 nt, Artificial Sequence
  Synthetic oligonucleotide: CBLB-7731
cccucccgcccgacucgggg

SEQ ID NO: 38021 - RNA, 20 nt, Artificial Sequence
  Synthetic oligonucleotide: CBLB-7732
auuguugguagcaugagugg

SEQ ID NO: 38022 - RNA, 20 nt, Artificial Sequence
  Synthetic oligonucleotide: CBLB-7733
cgcuggacaccccaccccug

SEQ ID NO: 38023 - RNA, 20 nt, Artificial Sequence
  Synthetic oligonucleotide: CBLB-7734
uccuccugcuagugcugcug

SEQ ID NO: 38024 - RNA, 20 nt, Artificial Sequence
  Synthetic oligonucleotide: CBLB-7735
ccccgggccggcaagaagug

SEQ ID NO: 38025 - RNA, 20 nt, Artificial Sequence
  Synthetic oligonucleotide: CBLB-7736
ccgccguccaguuugaagug

SEQ ID NO: 38026 - RNA, 20 nt, Artificial Sequence
  Synthetic oligonucleotide: CBLB-7737
cacacugggcugcgugcgug

SEQ ID NO: 38027 - RNA, 20 nt, Artificial Sequence
  Synthetic oligonucleotide: CBLB-7738
gcgggaggggagagcgggug

SEQ ID NO: 38028 - RNA, 20 nt, Artificial Sequence
  Synthetic oligonucleotide: CBLB-7739
cugugugugccacaggggug

SEQ ID NO: 38029 - RNA, 20 nt, Artificial Sequence
  Synthetic oligonucleotide: CBLB-7740
cgcacgcagcccagugugug

SEQ ID NO: 38030 - RNA, 20 nt, Artificial Sequence
  Synthetic oligonucleotide: CBLB-7741
cacgcagcccagugugugug

SEQ ID NO: 38031 - RNA, 20 nt, Artificial Sequence
  Synthetic oligonucleotide: CBLB-7742
gauguucugauauuuuacau

SEQ ID NO: 38032 - RNA, 20 nt, Artificial Sequence
  Synthetic oligonucleotide: CBLB-7743
uugucuuucagcaauaucau

SEQ ID NO: 38033 - RNA, 20 nt, Artificial Sequence
  Synthetic oligonucleotide: CBLB-7744
cggggcuccccacacacacu

SEQ ID NO: 38034 - RNA, 20 nt, Artificial Sequence
  Synthetic oligonucleotide: CBLB-7745
cucuccccucccgcccgacu

SEQ ID NO: 38035 - RNA, 20 nt, Artificial Sequence
  Synthetic oligonucleotide: CBLB-7746
ggcuguccccucuuccuccu

SEQ ID NO: 38036 - RNA, 20 nt, Artificial Sequence
  Synthetic oligonucleotide: CBLB-7747
guuuauuacacuuuucagcu

SEQ ID NO: 38037 - RNA, 20 nt, Artificial Sequence
  Synthetic oligonucleotide: CBLB-7748
gucucggaggccugcgcgcu

SEQ ID NO: 38038 - RNA, 20 nt, Artificial Sequence
  Synthetic oligonucleotide: CBLB-7749
gcacacacaggacccaggcu

SEQ ID NO: 38039 - RNA, 20 nt, Artificial Sequence
  Synthetic oligonucleotide: CBLB-7750
guguguggggagccccggcu

SEQ ID NO: 38040 - RNA, 20 nt, Artificial Sequence
  Synthetic oligonucleotide: CBLB-7751
auuguugcguuuccacgucu

SEQ ID NO: 38041 - RNA, 20 nt, Artificial Sequence
  Synthetic oligonucleotide: CBLB-7752
gccgccguccaguuugaagu

SEQ ID NO: 38042 - RNA, 20 nt, Artificial Sequence
  Synthetic oligonucleotide: CBLB-7753
gucccgcggccuccccgagu

SEQ ID NO: 38043 - RNA, 20 nt, Artificial Sequence
  Synthetic oligonucleotide: CBLB-7754
ggggagccccggcugggagu

SEQ ID NO: 38044 - RNA, 20 nt, Artificial Sequence
  Synthetic oligonucleotide: CBLB-7755
gggcugcgugcguguggagu

SEQ ID NO: 38045 - RNA, 20 nt, Artificial Sequence
  Synthetic oligonucleotide: CBLB-7756
ccugugugugccacaggggu

SEQ ID NO: 38046 - RNA, 20 nt, Artificial Sequence
  Synthetic oligonucleotide: CBLB-7757
uuguugguagcaugaguggu

SEQ ID NO: 38047 - RNA, 20 nt, Artificial Sequence
  Synthetic oligonucleotide: CBLB-7758
gcacgcagcccagugugugu

SEQ ID NO: 38048 - RNA, 20 nt, Artificial Sequence
  Synthetic oligonucleotide: CBLB-7759
augaaguccagagcaauugu

SEQ ID NO: 38049 - RNA, 20 nt, Artificial Sequence
  Synthetic oligonucleotide: CBLB-7760
auguucugauauuuuacauu

SEQ ID NO: 38050 - RNA, 20 nt, Artificial Sequence
  Synthetic oligonucleotide: CBLB-7761
uugcucuggacuucauacuu

SEQ ID NO: 38051 - RNA, 20 nt, Artificial Sequence
  Synthetic oligonucleotide: CBLB-7762
gcgcuggguugcuccuucuu

SEQ ID NO: 38052 - RNA, 20 nt, Artificial Sequence
  Synthetic oligonucleotide: CBLB-7763
ccccuucccuucuugccuuu

SEQ ID NO: 38053 - RNA, 21 nt, Artificial Sequence
  Synthetic oligonucleotide: CBLB-7764
uagucuuuuguuucauagcaa

SEQ ID NO: 38054 - RNA, 22 nt, Artificial Sequence
  Synthetic oligonucleotide: CBLB-7765
cuagucuuuuguuucauagcaa

SEQ ID NO: 38055 - RNA, 23 nt, Artificial Sequence
  Synthetic oligonucleotide: CBLB-7766
ccuagucuuuuguuucauagcaa

SEQ ID NO: 38056 - RNA, 24 nt, Artificial Sequence
  Synthetic oligonucleotide: CBLB-7767
uccuagucuuuuguuucauagcaa

SEQ ID NO: 38057 - RNA, 18 nt, Artificial Sequence
  Synthetic oligonucleotide: CBLB-7768
gcucgcagcacgucagaa

SEQ ID NO: 38058 - RNA, 19 nt, Artificial Sequence
  Synthetic oligonucleotide: CBLB-7769
cgcucgcagcacgucagaa

SEQ ID NO: 38059 - RNA, 20 nt, Artificial Sequence
  Synthetic oligonucleotide: CBLB-7205
ccgcucgcagcacgucagaa

SEQ ID NO: 38060 - RNA, 21 nt, Artificial Sequence
  Synthetic oligonucleotide: CBLB-7770
cccgcucgcagcacgucagaa

SEQ ID NO: 38061 - RNA, 22 nt, Artificial Sequence
  Synthetic oligonucleotide: CBLB-7771
gcccgcucgcagcacgucagaa

SEQ ID NO: 38062 - RNA, 23 nt, Artificial Sequence
  Synthetic oligonucleotide: CBLB-7772
ggcccgcucgcagcacgucagaa

SEQ ID NO: 38063 - RNA, 24 nt, Artificial Sequence
  Synthetic oligonucleotide: CBLB-7773
aggcccgcucgcagcacgucagaa

SEQ ID NO: 38064 - RNA, 21 nt, Artificial Sequence
  Synthetic oligonucleotide: CBLB-7774
aaaugcagaauaaaucucaca

SEQ ID NO: 38065 - RNA, 22 nt, Artificial Sequence
  Synthetic oligonucleotide: CBLB-7775
aaaaugcagaauaaaucucaca

SEQ ID NO: 38066 - RNA, 23 nt, Artificial Sequence
  Synthetic oligonucleotide: CBLB-7776
uaaaaugcagaauaaaucucaca

SEQ ID NO: 38067 - RNA, 24 nt, Artificial Sequence
  Synthetic oligonucleotide: CBLB-7777
cuaaaaugcagaauaaaucucaca

SEQ ID NO: 38068 - RNA, 18 nt, Artificial Sequence
  Synthetic oligonucleotide: CBLB-7778
accgcgcacugcccgaca

SEQ ID NO: 38069 - RNA, 19 nt, Artificial Sequence
  Synthetic oligonucleotide: CBLB-7779
aaccgcgcacugcccgaca

SEQ ID NO: 38070 - RNA, 20 nt, Artificial Sequence
  Synthetic oligonucleotide: CBLB-7780
caaccgcgcacugcccgaca

SEQ ID NO: 38071 - RNA, 21 nt, Artificial Sequence
  Synthetic oligonucleotide: CBLB-7781
gcaaccgcgcacugcccgaca

SEQ ID NO: 38072 - RNA, 22 nt, Artificial Sequence
  Synthetic oligonucleotide: CBLB-7782
cgcaaccgcgcacugcccgaca

SEQ ID NO: 38073 - RNA, 23 nt, Artificial Sequence
  Synthetic oligonucleotide: CBLB-7783
gcgcaaccgcgcacugcccgaca

SEQ ID NO: 38074 - RNA, 24 nt, Artificial Sequence
  Synthetic oligonucleotide: CBLB-7784
cgcgcaaccgcgcacugcccgaca

SEQ ID NO: 38075 - RNA, 18 nt, Artificial Sequence
  Synthetic oligonucleotide: CBLB-7785
cgaaggagcuaaccaaua

SEQ ID NO: 38076 - RNA, 19 nt, Artificial Sequence
  Synthetic oligonucleotide: CBLB-7786
acgaaggagcuaaccaaua

SEQ ID NO: 38077 - RNA, 20 nt, Artificial Sequence
  Synthetic oligonucleotide: CBLB-7208
cacgaaggagcuaaccaaua

SEQ ID NO: 38078 - RNA, 21 nt, Artificial Sequence
  Synthetic oligonucleotide: CBLB-7787
gcacgaaggagcuaaccaaua

SEQ ID NO: 38079 - RNA, 22 nt, Artificial Sequence
  Synthetic oligonucleotide: CBLB-7788
ggcacgaaggagcuaaccaaua

SEQ ID NO: 38080 - RNA, 23 nt, Artificial Sequence
  Synthetic oligonucleotide: CBLB-7789
aggcacgaaggagcuaaccaaua

SEQ ID NO: 38081 - RNA, 24 nt, Artificial Sequence
  Synthetic oligonucleotide: CBLB-7790
aaggcacgaaggagcuaaccaaua

SEQ ID NO: 38082 - RNA, 21 nt, Artificial Sequence
  Synthetic oligonucleotide: CBLB-7791
uaaaucucacagagaguaggc

SEQ ID NO: 38083 - RNA, 22 nt, Artificial Sequence
  Synthetic oligonucleotide: CBLB-7792
auaaaucucacagagaguaggc

SEQ ID NO: 38084 - RNA, 23 nt, Artificial Sequence
  Synthetic oligonucleotide: CBLB-7793
aauaaaucucacagagaguaggc

SEQ ID NO: 38085 - RNA, 24 nt, Artificial Sequence
  Synthetic oligonucleotide: CBLB-7794
gaauaaaucucacagagaguaggc

SEQ ID NO: 38086 - RNA, 21 nt, Artificial Sequence
  Synthetic oligonucleotide: CBLB-7795
uagcaacagaguaguggcugg

SEQ ID NO: 38087 - RNA, 22 nt, Artificial Sequence
  Synthetic oligonucleotide: CBLB-7796
auagcaacagaguaguggcugg

SEQ ID NO: 38088 - RNA, 23 nt, Artificial Sequence
  Synthetic oligonucleotide: CBLB-7797
cauagcaacagaguaguggcugg

SEQ ID NO: 38089 - RNA, 24 nt, Artificial Sequence
  Synthetic oligonucleotide: CBLB-7798
ucauagcaacagaguaguggcugg

SEQ ID NO: 38090 - RNA, 18 nt, Artificial Sequence
  Synthetic oligonucleotide: CBLB-7799
guugcuucuccgcucugg

SEQ ID NO: 38091 - RNA, 19 nt, Artificial Sequence
  Synthetic oligonucleotide: CBLB-7800
uguugcuucuccgcucugg

SEQ ID NO: 38092 - RNA, 20 nt, Artificial Sequence
  Synthetic oligonucleotide: CBLB-7801
guguugcuucuccgcucugg

SEQ ID NO: 38093 - RNA, 21 nt, Artificial Sequence
  Synthetic oligonucleotide: CBLB-7802
agccacugagcuucuaaaaug

SEQ ID NO: 38094 - RNA, 22 nt, Artificial Sequence
  Synthetic oligonucleotide: CBLB-7803
cagccacugagcuucuaaaaug

SEQ ID NO: 38095 - RNA, 23 nt, Artificial Sequence
  Synthetic oligonucleotide: CBLB-7804
acagccacugagcuucuaaaaug

SEQ ID NO: 38096 - RNA, 24 nt, Artificial Sequence
  Synthetic oligonucleotide: CBLB-7805
aacagccacugagcuucuaaaaug

SEQ ID NO: 38097 - RNA, 21 nt, Artificial Sequence
  Synthetic oligonucleotide: CBLB-7806
gcaauaaaaguaccagauaau

SEQ ID NO: 38098 - RNA, 22 nt, Artificial Sequence
  Synthetic oligonucleotide: CBLB-7807
agcaauaaaaguaccagauaau

SEQ ID NO: 38099 - RNA, 23 nt, Artificial Sequence
  Synthetic oligonucleotide: CBLB-7808
aagcaauaaaaguaccagauaau

SEQ ID NO: 38100 - RNA, 24 nt, Artificial Sequence
  Synthetic oligonucleotide: CBLB-7809
aaagcaauaaaaguaccagauaau

SEQ ID NO: 38101 - RNA, 21 nt, Artificial Sequence
  Synthetic oligonucleotide: CBLB-7810
gagaguaggcuggggugacau

SEQ ID NO: 38102 - RNA, 22 nt, Artificial Sequence
  Synthetic oligonucleotide: CBLB-7811
agagaguaggcuggggugacau

SEQ ID NO: 38103 - RNA, 23 nt, Artificial Sequence
  Synthetic oligonucleotide: CBLB-7812
cagagaguaggcuggggugacau

SEQ ID NO: 38104 - RNA, 24 nt, Artificial Sequence
  Synthetic oligonucleotide: CBLB-7813
acagagaguaggcuggggugacau

SEQ ID NO: 38105 - RNA, 18 nt, Artificial Sequence
  Synthetic oligonucleotide: CBLB-7814
acagcuacuguguuuugu

SEQ ID NO: 38106 - RNA, 19 nt, Artificial Sequence
  Synthetic oligonucleotide: CBLB-7815
gacagcuacuguguuuugu

SEQ ID NO: 38107 - RNA, 20 nt, Artificial Sequence
  Synthetic oligonucleotide: CBLB-7460
agacagcuacuguguuuugu

SEQ ID NO: 38108 - RNA, 21 nt, Artificial Sequence
  Synthetic oligonucleotide: CBLB-7816
gagacagcuacuguguuuugu

SEQ ID NO: 38109 - RNA, 22 nt, Artificial Sequence
  Synthetic oligonucleotide: CBLB-7817
ggagacagcuacuguguuuugu

SEQ ID NO: 38110 - RNA, 23 nt, Artificial Sequence
  Synthetic oligonucleotide: CBLB-7818
aggagacagcuacuguguuuugu

SEQ ID NO: 38111 - RNA, 24 nt, Artificial Sequence
  Synthetic oligonucleotide: CBLB-7819
gaggagacagcuacuguguuuugu

SEQ ID NO: 38112 - RNA, 21 nt, Artificial Sequence
  Synthetic oligonucleotide: CBLB-7820
caacugaaacuucccaaguuu

SEQ ID NO: 38113 - RNA, 22 nt, Artificial Sequence
  Synthetic oligonucleotide: CBLB-7821
ccaacugaaacuucccaaguuu

SEQ ID NO: 38114 - RNA, 23 nt, Artificial Sequence
  Synthetic oligonucleotide: CBLB-7822
gccaacugaaacuucccaaguuu

SEQ ID NO: 38115 - RNA, 24 nt, Artificial Sequence
  Synthetic oligonucleotide: CBLB-7823
ugccaacugaaacuucccaaguuu

SEQ ID NO: 38116 - RNA, 21 nt, Artificial Sequence
  Synthetic oligonucleotide: CBLB-7824
cuacaguaagguuguuuuuaa

SEQ ID NO: 38117 - RNA, 22 nt, Artificial Sequence
  Synthetic oligonucleotide: CBLB-7825
gcuacaguaagguuguuuuuaa

SEQ ID NO: 38118 - RNA, 23 nt, Artificial Sequence
  Synthetic oligonucleotide: CBLB-7826
agcuacaguaagguuguuuuuaa

SEQ ID NO: 38119 - RNA, 24 nt, Artificial Sequence
  Synthetic oligonucleotide: CBLB-7827
cagcuacaguaagguuguuuuuaa

SEQ ID NO: 38120 - RNA, 18 nt, Artificial Sequence
  Synthetic oligonucleotide: CBLB-7828
gagguaacaaugcuggua

SEQ ID NO: 38121 - RNA, 19 nt, Artificial Sequence
  Synthetic oligonucleotide: CBLB-7829
agagguaacaaugcuggua

SEQ ID NO: 38122 - RNA, 20 nt, Artificial Sequence
  Synthetic oligonucleotide: CBLB-7830
aagagguaacaaugcuggua

SEQ ID NO: 38123 - RNA, 21 nt, Artificial Sequence
  Synthetic oligonucleotide: CBLB-7831
uagaccuguuuggcugcuguc

SEQ ID NO: 38124 - RNA, 22 nt, Artificial Sequence
  Synthetic oligonucleotide: CBLB-7832
auagaccuguuuggcugcuguc

SEQ ID NO: 38125 - RNA, 23 nt, Artificial Sequence
  Synthetic oligonucleotide: CBLB-7833
cauagaccuguuuggcugcuguc

SEQ ID NO: 38126 - RNA, 24 nt, Artificial Sequence
  Synthetic oligonucleotide: CBLB-7834
ucauagaccuguuuggcugcuguc

SEQ ID NO: 38127 - RNA, 21 nt, Artificial Sequence
  Synthetic oligonucleotide: CBLB-7835
uuuggcugcuguccuggguag

SEQ ID NO: 38128 - RNA, 22 nt, Artificial Sequence
  Synthetic oligonucleotide: CBLB-7836
guuuggcugcuguccuggguag

SEQ ID NO: 38129 - RNA, 23 nt, Artificial Sequence
  Synthetic oligonucleotide: CBLB-7837
uguuuggcugcuguccuggguag

SEQ ID NO: 38130 - RNA, 24 nt, Artificial Sequence
  Synthetic oligonucleotide: CBLB-7838
cuguuuggcugcuguccuggguag

SEQ ID NO: 38131 - RNA, 18 nt, Artificial Sequence
  Synthetic oligonucleotide: CBLB-7839
uuccacuuucguucccgg

SEQ ID NO: 38132 - RNA, 19 nt, Artificial Sequence
  Synthetic oligonucleotide: CBLB-7840
uuuccacuuucguucccgg

SEQ ID NO: 38133 - RNA, 20 nt, Artificial Sequence
  Synthetic oligonucleotide: CBLB-7841
guuuccacuuucguucccgg

SEQ ID NO: 38134 - RNA, 21 nt, Artificial Sequence
  Synthetic oligonucleotide: CBLB-7842
cguuuccacuuucguucccgg

SEQ ID NO: 38135 - RNA, 22 nt, Artificial Sequence
  Synthetic oligonucleotide: CBLB-7843
ccguuuccacuuucguucccgg

SEQ ID NO: 38136 - RNA, 23 nt, Artificial Sequence
  Synthetic oligonucleotide: CBLB-7844
cccguuuccacuuucguucccgg

SEQ ID NO: 38137 - RNA, 24 nt, Artificial Sequence
  Synthetic oligonucleotide: CBLB-7845
ucccguuuccacuuucguucccgg

SEQ ID NO: 38138 - RNA, 21 nt, Artificial Sequence
  Synthetic oligonucleotide: CBLB-7846
guccaggccccucauuucucu

SEQ ID NO: 38139 - RNA, 22 nt, Artificial Sequence
  Synthetic oligonucleotide: CBLB-7847
aguccaggccccucauuucucu

SEQ ID NO: 38140 - RNA, 23 nt, Artificial Sequence
  Synthetic oligonucleotide: CBLB-7848
gaguccaggccccucauuucucu

SEQ ID NO: 38141 - RNA, 24 nt, Artificial Sequence
  Synthetic oligonucleotide: CBLB-7849
agaguccaggccccucauuucucu

SEQ ID NO: 38142 - RNA, 18 nt, Artificial Sequence
  Synthetic oligonucleotide: CBLB-7850
ucuuuuguuucauagcaa

SEQ ID NO: 38143 - RNA, 19 nt, Artificial Sequence
  Synthetic oligonucleotide: CBLB-7851
gucuuuuguuucauagcaa

SEQ ID NO: 38144 - RNA, 20 nt, Artificial Sequence
  Synthetic oligonucleotide: CBLB-7852
agucuuuuguuucauagcaa

SEQ ID NO: 38145 - RNA, 18 nt, Artificial Sequence
  Synthetic oligonucleotide: CBLB-7853
ugcagaauaaaucucaca

SEQ ID NO: 38146 - RNA, 19 nt, Artificial Sequence
  Synthetic oligonucleotide: CBLB-7854
augcagaauaaaucucaca

SEQ ID NO: 38147 - RNA, 20 nt, Artificial Sequence
  Synthetic oligonucleotide: CBLB-7855
aaugcagaauaaaucucaca

SEQ ID NO: 38148 - RNA, 18 nt, Artificial Sequence
  Synthetic oligonucleotide: CBLB-7856
gggaaaggaaauggacga

SEQ ID NO: 38149 - RNA, 19 nt, Artificial Sequence
  Synthetic oligonucleotide: CBLB-7857
cgggaaaggaaauggacga

SEQ ID NO: 38150 - RNA, 20 nt, Artificial Sequence
  Synthetic oligonucleotide: CBLB-7388
acgggaaaggaaauggacga

SEQ ID NO: 38151 - RNA, 21 nt, Artificial Sequence
  Synthetic oligonucleotide: CBLB-7858
aacgggaaaggaaauggacga

SEQ ID NO: 38152 - RNA, 22 nt, Artificial Sequence
  Synthetic oligonucleotide: CBLB-7859
aaacgggaaaggaaauggacga

SEQ ID NO: 38153 - RNA, 23 nt, Artificial Sequence
  Synthetic oligonucleotide: CBLB-7860
gaaacgggaaaggaaauggacga

SEQ ID NO: 38154 - RNA, 24 nt, Artificial Sequence
  Synthetic oligonucleotide: CBLB-7861
ggaaacgggaaaggaaauggacga

SEQ ID NO: 38155 - RNA, 18 nt, Artificial Sequence
  Synthetic oligonucleotide: CBLB-7862
aucucacagagaguaggc

SEQ ID NO: 38156 - RNA, 19 nt, Artificial Sequence
  Synthetic oligonucleotide: CBLB-7863
aaucucacagagaguaggc

SEQ ID NO: 38157 - RNA, 20 nt, Artificial Sequence
  Synthetic oligonucleotide: CBLB-7412
aaaucucacagagaguaggc

SEQ ID NO: 38158 - RNA, 18 nt, Artificial Sequence
  Synthetic oligonucleotide: CBLB-7864
uuuugcuguuaguuuuag

SEQ ID NO: 38159 - RNA, 19 nt, Artificial Sequence
  Synthetic oligonucleotide: CBLB-7865
cuuuugcuguuaguuuuag

SEQ ID NO: 38160 - RNA, 20 nt, Artificial Sequence
  Synthetic oligonucleotide: CBLB-7431
ucuuuugcuguuaguuuuag

SEQ ID NO: 38161 - RNA, 21 nt, Artificial Sequence
  Synthetic oligonucleotide: CBLB-7866
cucuuuugcuguuaguuuuag

SEQ ID NO: 38162 - RNA, 22 nt, Artificial Sequence
  Synthetic oligonucleotide: CBLB-7867
ucucuuuugcuguuaguuuuag

SEQ ID NO: 38163 - RNA, 23 nt, Artificial Sequence
  Synthetic oligonucleotide: CBLB-7868
uucucuuuugcuguuaguuuuag

SEQ ID NO: 38164 - RNA, 24 nt, Artificial Sequence
  Synthetic oligonucleotide: CBLB-7869
uuucucuuuugcuguuaguuuuag

SEQ ID NO: 38165 - RNA, 18 nt, Artificial Sequence
  Synthetic oligonucleotide: CBLB-7870
caacagaguaguggcugg

SEQ ID NO: 38166 - RNA, 19 nt, Artificial Sequence
  Synthetic oligonucleotide: CBLB-7871
gcaacagaguaguggcugg

SEQ ID NO: 38167 - RNA, 20 nt, Artificial Sequence
  Synthetic oligonucleotide: CBLB-7872
agcaacagaguaguggcugg

SEQ ID NO: 38168 - RNA, 21 nt, Artificial Sequence
  Synthetic oligonucleotide: CBLB-7873
gguguugcuucuccgcucugg

SEQ ID NO: 38169 - RNA, 22 nt, Artificial Sequence
  Synthetic oligonucleotide: CBLB-7874
ggguguugcuucuccgcucugg

SEQ ID NO: 38170 - RNA, 23 nt, Artificial Sequence
  Synthetic oligonucleotide: CBLB-7875
aggguguugcuucuccgcucugg

SEQ ID NO: 38171 - RNA, 24 nt, Artificial Sequence
  Synthetic oligonucleotide: CBLB-7876
aaggguguugcuucuccgcucugg

SEQ ID NO: 38172 - RNA, 18 nt, Artificial Sequence
  Synthetic oligonucleotide: CBLB-7877
cacugagcuucuaaaaug

SEQ ID NO: 38173 - RNA, 19 nt, Artificial Sequence
  Synthetic oligonucleotide: CBLB-7878
ccacugagcuucuaaaaug

SEQ ID NO: 38174 - RNA, 20 nt, Artificial Sequence
  Synthetic oligonucleotide: CBLB-7879
gccacugagcuucuaaaaug

SEQ ID NO: 38175 - RNA, 18 nt, Artificial Sequence
  Synthetic oligonucleotide: CBLB-7880
auaaaaguaccagauaau

SEQ ID NO: 38176 - RNA, 19 nt, Artificial Sequence
  Synthetic oligonucleotide: CBLB-7881
aauaaaaguaccagauaau

SEQ ID NO: 38177 - RNA, 20 nt, Artificial Sequence
  Synthetic oligonucleotide: CBLB-7443
caauaaaaguaccagauaau

SEQ ID NO: 38178 - RNA, 18 nt, Artificial Sequence
  Synthetic oligonucleotide: CBLB-7882
aguaggcuggggugacau

SEQ ID NO: 38179 - RNA, 19 nt, Artificial Sequence
  Synthetic oligonucleotide: CBLB-7883
gaguaggcuggggugacau

SEQ ID NO: 38180 - RNA, 20 nt, Artificial Sequence
  Synthetic oligonucleotide: CBLB-7884
agaguaggcuggggugacau

SEQ ID NO: 38181 - RNA, 18 nt, Artificial Sequence
  Synthetic oligonucleotide: CBLB-7885
cugaaacuucccaaguuu

SEQ ID NO: 38182 - RNA, 19 nt, Artificial Sequence
  Synthetic oligonucleotide: CBLB-7886
acugaaacuucccaaguuu

SEQ ID NO: 38183 - RNA, 20 nt, Artificial Sequence
  Synthetic oligonucleotide: CBLB-7887
aacugaaacuucccaaguuu

SEQ ID NO: 38184 - RNA, 18 nt, Artificial Sequence
  Synthetic oligonucleotide: CBLB-7888
caguaagguuguuuuuaa

SEQ ID NO: 38185 - RNA, 19 nt, Artificial Sequence
  Synthetic oligonucleotide: CBLB-7889
acaguaagguuguuuuuaa

SEQ ID NO: 38186 - RNA, 20 nt, Artificial Sequence
  Synthetic oligonucleotide: CBLB-7890
uacaguaagguuguuuuuaa

SEQ ID NO: 38187 - RNA, 21 nt, Artificial Sequence
  Synthetic oligonucleotide: CBLB-7891
aaagagguaacaaugcuggua

SEQ ID NO: 38188 - RNA, 22 nt, Artificial Sequence
  Synthetic oligonucleotide: CBLB-7892
gaaagagguaacaaugcuggua

SEQ ID NO: 38189 - RNA, 23 nt, Artificial Sequence
  Synthetic oligonucleotide: CBLB-7893
agaaagagguaacaaugcuggua

SEQ ID NO: 38190 - RNA, 24 nt, Artificial Sequence
  Synthetic oligonucleotide: CBLB-7894
cagaaagagguaacaaugcuggua

SEQ ID NO: 38191 - RNA, 18 nt, Artificial Sequence
  Synthetic oligonucleotide: CBLB-7895
accuguuuggcugcuguc

SEQ ID NO: 38192 - RNA, 19 nt, Artificial Sequence
  Synthetic oligonucleotide: CBLB-7896
gaccuguuuggcugcuguc

SEQ ID NO: 38193 - RNA, 20 nt, Artificial Sequence
  Synthetic oligonucleotide: CBLB-7897
agaccuguuuggcugcuguc

SEQ ID NO: 38194 - RNA, 18 nt, Artificial Sequence
  Synthetic oligonucleotide: CBLB-7898
uuuggcagcccuagggag

SEQ ID NO: 38195 - RNA, 19 nt, Artificial Sequence
  Synthetic oligonucleotide: CBLB-7899
guuuggcagcccuagggag

SEQ ID NO: 38196 - RNA, 20 nt, Artificial Sequence
  Synthetic oligonucleotide: CBLB-7900
gguuuggcagcccuagggag

SEQ ID NO: 38197 - RNA, 21 nt, Artificial Sequence
  Synthetic oligonucleotide: CBLB-7901
ggguuuggcagcccuagggag

SEQ ID NO: 38198 - RNA, 22 nt, Artificial Sequence
  Synthetic oligonucleotide: CBLB-7902
aggguuuggcagcccuagggag

SEQ ID NO: 38199 - RNA, 23 nt, Artificial Sequence
  Synthetic oligonucleotide: CBLB-7903
aaggguuuggcagcccuagggag

SEQ ID NO: 38200 - RNA, 24 nt, Artificial Sequence
  Synthetic oligonucleotide: CBLB-7904
gaaggguuuggcagcccuagggag

SEQ ID NO: 38201 - RNA, 18 nt, Artificial Sequence
  Synthetic oligonucleotide: CBLB-7905
ggcugcuguccuggguag

SEQ ID NO: 38202 - RNA, 19 nt, Artificial Sequence
  Synthetic oligonucleotide: CBLB-7906
uggcugcuguccuggguag

SEQ ID NO: 38203 - RNA, 20 nt, Artificial Sequence
  Synthetic oligonucleotide: CBLB-7907
uuggcugcuguccuggguag

SEQ ID NO: 38204 - RNA, 18 nt, Artificial Sequence
  Synthetic oligonucleotide: CBLB-7908
caggccccucauuucucu

SEQ ID NO: 38205 - RNA, 19 nt, Artificial Sequence
  Synthetic oligonucleotide: CBLB-7909
ccaggccccucauuucucu

SEQ ID NO: 38206 - RNA, 20 nt, Artificial Sequence
  Synthetic oligonucleotide: CBLB-7910
uccaggccccucauuucucu

SEQ ID NO: 38207 - RNA, 18 nt, Artificial Sequence
  Synthetic oligonucleotide: CBLB-7911
uucuuguuggcuaucaaa

SEQ ID NO: 38208 - RNA, 19 nt, Artificial Sequence
  Synthetic oligonucleotide: CBLB-7912
cuucuuguuggcuaucaaa

SEQ ID NO: 38209 - RNA, 20 nt, Artificial Sequence
  Synthetic oligonucleotide: CBLB-7913
gcuucuuguuggcuaucaaa

SEQ ID NO: 38210 - RNA, 21 nt, Artificial Sequence
  Synthetic oligonucleotide: CBLB-7914
ugcuucuuguuggcuaucaaa

SEQ ID NO: 38211 - RNA, 22 nt, Artificial Sequence
  Synthetic oligonucleotide: CBLB-7915
uugcuucuuguuggcuaucaaa

SEQ ID NO: 38212 - RNA, 23 nt, Artificial Sequence
  Synthetic oligonucleotide: CBLB-7916
guugcuucuuguuggcuaucaaa

SEQ ID NO: 38213 - RNA, 24 nt, Artificial Sequence
  Synthetic oligonucleotide: CBLB-7917
cguugcuucuuguuggcuaucaaa

SEQ ID NO: 38214 - RNA, 18 nt, Artificial Sequence
  Synthetic oligonucleotide: CBLB-7918
acucucccgggaacgaaa

SEQ ID NO: 38215 - RNA, 19 nt, Artificial Sequence
  Synthetic oligonucleotide: CBLB-7919
gacucucccgggaacgaaa

SEQ ID NO: 38216 - RNA, 20 nt, Artificial Sequence
  Synthetic oligonucleotide: CBLB-7920
ggacucucccgggaacgaaa

SEQ ID NO: 38217 - RNA, 21 nt, Artificial Sequence
  Synthetic oligonucleotide: CBLB-7921
uggacucucccgggaacgaaa

SEQ ID NO: 38218 - RNA, 22 nt, Artificial Sequence
  Synthetic oligonucleotide: CBLB-7922
cuggacucucccgggaacgaaa

SEQ ID NO: 38219 - RNA, 23 nt, Artificial Sequence
  Synthetic oligonucleotide: CBLB-7923
ccuggacucucccgggaacgaaa

SEQ ID NO: 38220 - RNA, 24 nt, Artificial Sequence
  Synthetic oligonucleotide: CBLB-7924
gccuggacucucccgggaacgaaa

SEQ ID NO: 38221 - RNA, 18 nt, Artificial Sequence
  Synthetic oligonucleotide: CBLB-7925
cgggaacgaaaguggaaa

SEQ ID NO: 38222 - RNA, 19 nt, Artificial Sequence
  Synthetic oligonucleotide: CBLB-7926
ccgggaacgaaaguggaaa

SEQ ID NO: 38223 - RNA, 20 nt, Artificial Sequence
  Synthetic oligonucleotide: CBLB-7203
cccgggaacgaaaguggaaa

SEQ ID NO: 38224 - RNA, 21 nt, Artificial Sequence
  Synthetic oligonucleotide: CBLB-7927
ucccgggaacgaaaguggaaa

SEQ ID NO: 38225 - RNA, 22 nt, Artificial Sequence
  Synthetic oligonucleotide: CBLB-7928
cucccgggaacgaaaguggaaa

SEQ ID NO: 38226 - RNA, 23 nt, Artificial Sequence
  Synthetic oligonucleotide: CBLB-7929
ucucccgggaacgaaaguggaaa

SEQ ID NO: 38227 - RNA, 24 nt, Artificial Sequence
  Synthetic oligonucleotide: CBLB-7930
cucucccgggaacgaaaguggaaa

SEQ ID NO: 38228 - RNA, 18 nt, Artificial Sequence
  Synthetic oligonucleotide: CBLB-7931
gugacaucugaaugccaa

SEQ ID NO: 38229 - RNA, 19 nt, Artificial Sequence
  Synthetic oligonucleotide: CBLB-7932
ggugacaucugaaugccaa

SEQ ID NO: 38230 - RNA, 20 nt, Artificial Sequence
  Synthetic oligonucleotide: CBLB-7933
gggugacaucugaaugccaa

SEQ ID NO: 38231 - RNA, 21 nt, Artificial Sequence
  Synthetic oligonucleotide: CBLB-7934
ggggugacaucugaaugccaa

SEQ ID NO: 38232 - RNA, 22 nt, Artificial Sequence
  Synthetic oligonucleotide: CBLB-7935
uggggugacaucugaaugccaa

SEQ ID NO: 38233 - RNA, 23 nt, Artificial Sequence
  Synthetic oligonucleotide: CBLB-7936
cuggggugacaucugaaugccaa

SEQ ID NO: 38234 - RNA, 24 nt, Artificial Sequence
  Synthetic oligonucleotide: CBLB-7937
gcuggggugacaucugaaugccaa

SEQ ID NO: 38235 - RNA, 18 nt, Artificial Sequence
  Synthetic oligonucleotide: CBLB-7938
aauuggacucggagagaa

SEQ ID NO: 38236 - RNA, 19 nt, Artificial Sequence
  Synthetic oligonucleotide: CBLB-7939
gaauuggacucggagagaa

SEQ ID NO: 38237 - RNA, 20 nt, Artificial Sequence
  Synthetic oligonucleotide: CBLB-7940
ggaauuggacucggagagaa

SEQ ID NO: 38238 - RNA, 21 nt, Artificial Sequence
  Synthetic oligonucleotide: CBLB-7941
aggaauuggacucggagagaa

SEQ ID NO: 38239 - RNA, 22 nt, Artificial Sequence
  Synthetic oligonucleotide: CBLB-7942
aaggaauuggacucggagagaa

SEQ ID NO: 38240 - RNA, 23 nt, Artificial Sequence
  Synthetic oligonucleotide: CBLB-7943
aaaggaauuggacucggagagaa

SEQ ID NO: 38241 - RNA, 24 nt, Artificial Sequence
  Synthetic oligonucleotide: CBLB-7944
gaaaggaauuggacucggagagaa

SEQ ID NO: 38242 - RNA, 18 nt, Artificial Sequence
  Synthetic oligonucleotide: CBLB-7945
cagcacgucagaaaggaa

SEQ ID NO: 38243 - RNA, 19 nt, Artificial Sequence
  Synthetic oligonucleotide: CBLB-7946
gcagcacgucagaaaggaa

SEQ ID NO: 38244 - RNA, 20 nt, Artificial Sequence
  Synthetic oligonucleotide: CBLB-7947
cgcagcacgucagaaaggaa

SEQ ID NO: 38245 - RNA, 21 nt, Artificial Sequence
  Synthetic oligonucleotide: CBLB-7948
ucgcagcacgucagaaaggaa

SEQ ID NO: 38246 - RNA, 22 nt, Artificial Sequence
  Synthetic oligonucleotide: CBLB-7949
cucgcagcacgucagaaaggaa

SEQ ID NO: 38247 - RNA, 23 nt, Artificial Sequence
  Synthetic oligonucleotide: CBLB-7950
gcucgcagcacgucagaaaggaa

SEQ ID NO: 38248 - RNA, 24 nt, Artificial Sequence
  Synthetic oligonucleotide: CBLB-7951
cgcucgcagcacgucagaaaggaa

SEQ ID NO: 38249 - RNA, 18 nt, Artificial Sequence
  Synthetic oligonucleotide: CBLB-7952
guggaaacgggaaaggaa

SEQ ID NO: 38250 - RNA, 19 nt, Artificial Sequence
  Synthetic oligonucleotide: CBLB-7953
aguggaaacgggaaaggaa

SEQ ID NO: 38251 - RNA, 20 nt, Artificial Sequence
  Synthetic oligonucleotide: CBLB-7954
aaguggaaacgggaaaggaa

SEQ ID NO: 38252 - RNA, 21 nt, Artificial Sequence
  Synthetic oligonucleotide: CBLB-7955
aaaguggaaacgggaaaggaa

SEQ ID NO: 38253 - RNA, 22 nt, Artificial Sequence
  Synthetic oligonucleotide: CBLB-7956
gaaaguggaaacgggaaaggaa

SEQ ID NO: 38254 - RNA, 23 nt, Artificial Sequence
  Synthetic oligonucleotide: CBLB-7957
cgaaaguggaaacgggaaaggaa

SEQ ID NO: 38255 - RNA, 24 nt, Artificial Sequence
  Synthetic oligonucleotide: CBLB-7958
acgaaaguggaaacgggaaaggaa

SEQ ID NO: 38256 - RNA, 18 nt, Artificial Sequence
  Synthetic oligonucleotide: CBLB-7959
cgaaaguggaaacgggaa

SEQ ID NO: 38257 - RNA, 19 nt, Artificial Sequence
  Synthetic oligonucleotide: CBLB-7960
acgaaaguggaaacgggaa

SEQ ID NO: 38258 - RNA, 20 nt, Artificial Sequence
  Synthetic oligonucleotide: CBLB-7377
aacgaaaguggaaacgggaa

SEQ ID NO: 38259 - RNA, 21 nt, Artificial Sequence
  Synthetic oligonucleotide: CBLB-7961
gaacgaaaguggaaacgggaa

SEQ ID NO: 38260 - RNA, 22 nt, Artificial Sequence
  Synthetic oligonucleotide: CBLB-7962
ggaacgaaaguggaaacgggaa

SEQ ID NO: 38261 - RNA, 23 nt, Artificial Sequence
  Synthetic oligonucleotide: CBLB-7963
gggaacgaaaguggaaacgggaa

SEQ ID NO: 38262 - RNA, 24 nt, Artificial Sequence
  Synthetic oligonucleotide: CBLB-7964
cgggaacgaaaguggaaacgggaa

SEQ ID NO: 38263 - RNA, 18 nt, Artificial Sequence
  Synthetic oligonucleotide: CBLB-7965
ccgggaacgaaaguggaa

SEQ ID NO: 38264 - RNA, 19 nt, Artificial Sequence
  Synthetic oligonucleotide: CBLB-7966
cccgggaacgaaaguggaa

SEQ ID NO: 38265 - RNA, 20 nt, Artificial Sequence
  Synthetic oligonucleotide: CBLB-7967
ucccgggaacgaaaguggaa

SEQ ID NO: 38266 - RNA, 21 nt, Artificial Sequence
  Synthetic oligonucleotide: CBLB-7968
cucccgggaacgaaaguggaa

SEQ ID NO: 38267 - RNA, 22 nt, Artificial Sequence
  Synthetic oligonucleotide: CBLB-7969
ucucccgggaacgaaaguggaa

SEQ ID NO: 38268 - RNA, 23 nt, Artificial Sequence
  Synthetic oligonucleotide: CBLB-7970
cucucccgggaacgaaaguggaa

SEQ ID NO: 38269 - RNA, 24 nt, Artificial Sequence
  Synthetic oligonucleotide: CBLB-7971
acucucccgggaacgaaaguggaa

SEQ ID NO: 38270 - RNA, 18 nt, Artificial Sequence
  Synthetic oligonucleotide: CBLB-7972
aauaaaaguaccagauaa

SEQ ID NO: 38271 - RNA, 19 nt, Artificial Sequence
  Synthetic oligonucleotide: CBLB-7973
caauaaaaguaccagauaa

SEQ ID NO: 38272 - RNA, 20 nt, Artificial Sequence
  Synthetic oligonucleotide: CBLB-7380
gcaauaaaaguaccagauaa

SEQ ID NO: 38273 - RNA, 21 nt, Artificial Sequence
  Synthetic oligonucleotide: CBLB-7974
agcaauaaaaguaccagauaa

SEQ ID NO: 38274 - RNA, 22 nt, Artificial Sequence
  Synthetic oligonucleotide: CBLB-7975
aagcaauaaaaguaccagauaa

SEQ ID NO: 38275 - RNA, 23 nt, Artificial Sequence
  Synthetic oligonucleotide: CBLB-7976
aaagcaauaaaaguaccagauaa

SEQ ID NO: 38276 - RNA, 24 nt, Artificial Sequence
  Synthetic oligonucleotide: CBLB-7977
caaagcaauaaaaguaccagauaa

SEQ ID NO: 38277 - RNA, 18 nt, Artificial Sequence
  Synthetic oligonucleotide: CBLB-7978
caguacacaauggcccca

SEQ ID NO: 38278 - RNA, 19 nt, Artificial Sequence
  Synthetic oligonucleotide: CBLB-7979
acaguacacaauggcccca

SEQ ID NO: 38279 - RNA, 20 nt, Artificial Sequence
  Synthetic oligonucleotide: CBLB-7980
cacaguacacaauggcccca

SEQ ID NO: 38280 - RNA, 21 nt, Artificial Sequence
  Synthetic oligonucleotide: CBLB-7981
ccacaguacacaauggcccca

SEQ ID NO: 38281 - RNA, 22 nt, Artificial Sequence
  Synthetic oligonucleotide: CBLB-7982
uccacaguacacaauggcccca

SEQ ID NO: 38282 - RNA, 23 nt, Artificial Sequence
  Synthetic oligonucleotide: CBLB-7983
cuccacaguacacaauggcccca

SEQ ID NO: 38283 - RNA, 24 nt, Artificial Sequence
  Synthetic oligonucleotide: CBLB-7984
ccuccacaguacacaauggcccca

SEQ ID NO: 38284 - RNA, 18 nt, Artificial Sequence
  Synthetic oligonucleotide: CBLB-7985
caaaaagagcaacagcca

SEQ ID NO: 38285 - RNA, 19 nt, Artificial Sequence
  Synthetic oligonucleotide: CBLB-7986
ucaaaaagagcaacagcca

SEQ ID NO: 38286 - RNA, 20 nt, Artificial Sequence
  Synthetic oligonucleotide: CBLB-7987
aucaaaaagagcaacagcca

SEQ ID NO: 38287 - RNA, 21 nt, Artificial Sequence
  Synthetic oligonucleotide: CBLB-7988
uaucaaaaagagcaacagcca

SEQ ID NO: 38288 - RNA, 22 nt, Artificial Sequence
  Synthetic oligonucleotide: CBLB-7989
cuaucaaaaagagcaacagcca

SEQ ID NO: 38289 - RNA, 23 nt, Artificial Sequence
  Synthetic oligonucleotide: CBLB-7990
gcuaucaaaaagagcaacagcca

SEQ ID NO: 38290 - RNA, 24 nt, Artificial Sequence
  Synthetic oligonucleotide: CBLB-7991
ggcuaucaaaaagagcaacagcca

SEQ ID NO: 38291 - RNA, 18 nt, Artificial Sequence
  Synthetic oligonucleotide: CBLB-7992
cgacagcgggugcagcca

SEQ ID NO: 38292 - RNA, 19 nt, Artificial Sequence
  Synthetic oligonucleotide: CBLB-7993
ccgacagcgggugcagcca

SEQ ID NO: 38293 - RNA, 20 nt, Artificial Sequence
  Synthetic oligonucleotide: CBLB-7994
cccgacagcgggugcagcca

SEQ ID NO: 38294 - RNA, 21 nt, Artificial Sequence
  Synthetic oligonucleotide: CBLB-7995
gcccgacagcgggugcagcca

SEQ ID NO: 38295 - RNA, 22 nt, Artificial Sequence
  Synthetic oligonucleotide: CBLB-7996
ugcccgacagcgggugcagcca

SEQ ID NO: 38296 - RNA, 23 nt, Artificial Sequence
  Synthetic oligonucleotide: CBLB-7997
cugcccgacagcgggugcagcca

SEQ ID NO: 38297 - RNA, 24 nt, Artificial Sequence
  Synthetic oligonucleotide: CBLB-7998
acugcccgacagcgggugcagcca

SEQ ID NO: 38298 - RNA, 18 nt, Artificial Sequence
  Synthetic oligonucleotide: CBLB-7999
aaugcagaauaaaucuca

SEQ ID NO: 38299 - RNA, 19 nt, Artificial Sequence
  Synthetic oligonucleotide: CBLB-8000
aaaugcagaauaaaucuca

SEQ ID NO: 38300 - RNA, 20 nt, Artificial Sequence
  Synthetic oligonucleotide: CBLB-8001
aaaaugcagaauaaaucuca

SEQ ID NO: 38301 - RNA, 21 nt, Artificial Sequence
  Synthetic oligonucleotide: CBLB-8002
uaaaaugcagaauaaaucuca

SEQ ID NO: 38302 - RNA, 22 nt, Artificial Sequence
  Synthetic oligonucleotide: CBLB-8003
cuaaaaugcagaauaaaucuca

SEQ ID NO: 38303 - RNA, 23 nt, Artificial Sequence
  Synthetic oligonucleotide: CBLB-8004
ucuaaaaugcagaauaaaucuca

SEQ ID NO: 38304 - RNA, 24 nt, Artificial Sequence
  Synthetic oligonucleotide: CBLB-8005
uucuaaaaugcagaauaaaucuca

SEQ ID NO: 38305 - RNA, 18 nt, Artificial Sequence
  Synthetic oligonucleotide: CBLB-8006
cgcucgcagcacgucaga

SEQ ID NO: 38306 - RNA, 19 nt, Artificial Sequence
  Synthetic oligonucleotide: CBLB-8007
ccgcucgcagcacgucaga

SEQ ID NO: 38307 - RNA, 20 nt, Artificial Sequence
  Synthetic oligonucleotide: CBLB-8008
cccgcucgcagcacgucaga

SEQ ID NO: 38308 - RNA, 21 nt, Artificial Sequence
  Synthetic oligonucleotide: CBLB-8009
gcccgcucgcagcacgucaga

SEQ ID NO: 38309 - RNA, 22 nt, Artificial Sequence
  Synthetic oligonucleotide: CBLB-8010
ggcccgcucgcagcacgucaga

SEQ ID NO: 38310 - RNA, 23 nt, Artificial Sequence
  Synthetic oligonucleotide: CBLB-8011
aggcccgcucgcagcacgucaga

SEQ ID NO: 38311 - RNA, 24 nt, Artificial Sequence
  Synthetic oligonucleotide: CBLB-8012
aaggcccgcucgcagcacgucaga

SEQ ID NO: 38312 - RNA, 18 nt, Artificial Sequence
  Synthetic oligonucleotide: CBLB-8013
aagggaugcaaggcacga

SEQ ID NO: 38313 - RNA, 19 nt, Artificial Sequence
  Synthetic oligonucleotide: CBLB-8014
gaagggaugcaaggcacga

SEQ ID NO: 38314 - RNA, 20 nt, Artificial Sequence
  Synthetic oligonucleotide: CBLB-7207
cgaagggaugcaaggcacga

SEQ ID NO: 38315 - RNA, 21 nt, Artificial Sequence
  Synthetic oligonucleotide: CBLB-8015
acgaagggaugcaaggcacga

SEQ ID NO: 38316 - RNA, 22 nt, Artificial Sequence
  Synthetic oligonucleotide: CBLB-8016
gacgaagggaugcaaggcacga

SEQ ID NO: 38317 - RNA, 23 nt, Artificial Sequence
  Synthetic oligonucleotide: CBLB-8017
ggacgaagggaugcaaggcacga

SEQ ID NO: 38318 - RNA, 24 nt, Artificial Sequence
  Synthetic oligonucleotide: CBLB-8018
uggacgaagggaugcaaggcacga

SEQ ID NO: 38319 - RNA, 18 nt, Artificial Sequence
  Synthetic oligonucleotide: CBLB-8019
aaaggaauuggacucgga

SEQ ID NO: 38320 - RNA, 19 nt, Artificial Sequence
  Synthetic oligonucleotide: CBLB-8020
gaaaggaauuggacucgga

SEQ ID NO: 38321 - RNA, 20 nt, Artificial Sequence
  Synthetic oligonucleotide: CBLB-8021
agaaaggaauuggacucgga

SEQ ID NO: 38322 - RNA, 21 nt, Artificial Sequence
  Synthetic oligonucleotide: CBLB-8022
cagaaaggaauuggacucgga

SEQ ID NO: 38323 - RNA, 22 nt, Artificial Sequence
  Synthetic oligonucleotide: CBLB-8023
ucagaaaggaauuggacucgga

SEQ ID NO: 38324 - RNA, 23 nt, Artificial Sequence
  Synthetic oligonucleotide: CBLB-8024
gucagaaaggaauuggacucgga

SEQ ID NO: 38325 - RNA, 24 nt, Artificial Sequence
  Synthetic oligonucleotide: CBLB-8025
cgucagaaaggaauuggacucgga

SEQ ID NO: 38326 - RNA, 18 nt, Artificial Sequence
  Synthetic oligonucleotide: CBLB-8026
acgaaaguggaaacggga

SEQ ID NO: 38327 - RNA, 19 nt, Artificial Sequence
  Synthetic oligonucleotide: CBLB-8027
aacgaaaguggaaacggga

SEQ ID NO: 38328 - RNA, 20 nt, Artificial Sequence
  Synthetic oligonucleotide: CBLB-8028
gaacgaaaguggaaacggga

SEQ ID NO: 38329 - RNA, 21 nt, Artificial Sequence
  Synthetic oligonucleotide: CBLB-8029
ggaacgaaaguggaaacggga

SEQ ID NO: 38330 - RNA, 22 nt, Artificial Sequence
  Synthetic oligonucleotide: CBLB-8030
gggaacgaaaguggaaacggga

SEQ ID NO: 38331 - RNA, 23 nt, Artificial Sequence
  Synthetic oligonucleotide: CBLB-8031
cgggaacgaaaguggaaacggga

SEQ ID NO: 38332 - RNA, 24 nt, Artificial Sequence
  Synthetic oligonucleotide: CBLB-8032
ccgggaacgaaaguggaaacggga

SEQ ID NO: 38333 - RNA, 18 nt, Artificial Sequence
  Synthetic oligonucleotide: CBLB-8033
gccuggacucucccggga

SEQ ID NO: 38334 - RNA, 19 nt, Artificial Sequence
  Synthetic oligonucleotide: CBLB-8034
ggccuggacucucccggga

SEQ ID NO: 38335 - RNA, 20 nt, Artificial Sequence
  Synthetic oligonucleotide: CBLB-8035
gggccuggacucucccggga

SEQ ID NO: 38336 - RNA, 21 nt, Artificial Sequence
  Synthetic oligonucleotide: CBLB-8036
ggggccuggacucucccggga

SEQ ID NO: 38337 - RNA, 22 nt, Artificial Sequence
  Synthetic oligonucleotide: CBLB-8037
aggggccuggacucucccggga

SEQ ID NO: 38338 - RNA, 23 nt, Artificial Sequence
  Synthetic oligonucleotide: CBLB-8038
gaggggccuggacucucccggga

SEQ ID NO: 38339 - RNA, 24 nt, Artificial Sequence
  Synthetic oligonucleotide: CBLB-8039
ugaggggccuggacucucccggga

SEQ ID NO: 38340 - RNA, 18 nt, Artificial Sequence
  Synthetic oligonucleotide: CBLB-8040
ugggcgugagcgucggga

SEQ ID NO: 38341 - RNA, 19 nt, Artificial Sequence
  Synthetic oligonucleotide: CBLB-8041
gugggcgugagcgucggga

SEQ ID NO: 38342 - RNA, 20 nt, Artificial Sequence
  Synthetic oligonucleotide: CBLB-8042
ggugggcgugagcgucggga

SEQ ID NO: 38343 - RNA, 21 nt, Artificial Sequence
  Synthetic oligonucleotide: CBLB-8043
aggugggcgugagcgucggga

SEQ ID NO: 38344 - RNA, 22 nt, Artificial Sequence
  Synthetic oligonucleotide: CBLB-8044
caggugggcgugagcgucggga

SEQ ID NO: 38345 - RNA, 23 nt, Artificial Sequence
  Synthetic oligonucleotide: CBLB-8045
gcaggugggcgugagcgucggga

SEQ ID NO: 38346 - RNA, 24 nt, Artificial Sequence
  Synthetic oligonucleotide: CBLB-8046
ggcaggugggcgugagcgucggga

SEQ ID NO: 38347 - RNA, 18 nt, Artificial Sequence
  Synthetic oligonucleotide: CBLB-8047
gcgggugcagccaaugga

SEQ ID NO: 38348 - RNA, 19 nt, Artificial Sequence
  Synthetic oligonucleotide: CBLB-8048
agcgggugcagccaaugga

SEQ ID NO: 38349 - RNA, 20 nt, Artificial Sequence
  Synthetic oligonucleotide: CBLB-7392
cagcgggugcagccaaugga

SEQ ID NO: 38350 - RNA, 21 nt, Artificial Sequence
  Synthetic oligonucleotide: CBLB-8049
acagcgggugcagccaaugga

SEQ ID NO: 38351 - RNA, 22 nt, Artificial Sequence
  Synthetic oligonucleotide: CBLB-8050
gacagcgggugcagccaaugga

SEQ ID NO: 38352 - RNA, 23 nt, Artificial Sequence
  Synthetic oligonucleotide: CBLB-8051
cgacagcgggugcagccaaugga

SEQ ID NO: 38353 - RNA, 24 nt, Artificial Sequence
  Synthetic oligonucleotide: CBLB-8052
ccgacagcgggugcagccaaugga

SEQ ID NO: 38354 - RNA, 18 nt, Artificial Sequence
  Synthetic oligonucleotide: CBLB-8053
aaguuucugccuaaauga

SEQ ID NO: 38355 - RNA, 19 nt, Artificial Sequence
  Synthetic oligonucleotide: CBLB-8054
caaguuucugccuaaauga

SEQ ID NO: 38356 - RNA, 20 nt, Artificial Sequence
  Synthetic oligonucleotide: CBLB-8055
gcaaguuucugccuaaauga

SEQ ID NO: 38357 - RNA, 21 nt, Artificial Sequence
  Synthetic oligonucleotide: CBLB-8056
ugcaaguuucugccuaaauga

SEQ ID NO: 38358 - RNA, 22 nt, Artificial Sequence
  Synthetic oligonucleotide: CBLB-8057
gugcaaguuucugccuaaauga

SEQ ID NO: 38359 - RNA, 23 nt, Artificial Sequence
  Synthetic oligonucleotide: CBLB-8058
agugcaaguuucugccuaaauga

SEQ ID NO: 38360 - RNA, 24 nt, Artificial Sequence
  Synthetic oligonucleotide: CBLB-8059
uagugcaaguuucugccuaaauga

SEQ ID NO: 38361 - RNA, 18 nt, Artificial Sequence
  Synthetic oligonucleotide: CBLB-8060
caauaaaaguaccagaua

SEQ ID NO: 38362 - RNA, 19 nt, Artificial Sequence
  Synthetic oligonucleotide: CBLB-8061
gcaauaaaaguaccagaua

SEQ ID NO: 38363 - RNA, 20 nt, Artificial Sequence
  Synthetic oligonucleotide: CBLB-8062
agcaauaaaaguaccagaua

SEQ ID NO: 38364 - RNA, 21 nt, Artificial Sequence
  Synthetic oligonucleotide: CBLB-8063
aagcaauaaaaguaccagaua

SEQ ID NO: 38365 - RNA, 22 nt, Artificial Sequence
  Synthetic oligonucleotide: CBLB-8064
aaagcaauaaaaguaccagaua

SEQ ID NO: 38366 - RNA, 23 nt, Artificial Sequence
  Synthetic oligonucleotide: CBLB-8065
caaagcaauaaaaguaccagaua

SEQ ID NO: 38367 - RNA, 24 nt, Artificial Sequence
  Synthetic oligonucleotide: CBLB-8066
ccaaagcaauaaaaguaccagaua

SEQ ID NO: 38368 - RNA, 18 nt, Artificial Sequence
  Synthetic oligonucleotide: CBLB-8067
cuuuugcuguuaguuuua

SEQ ID NO: 38369 - RNA, 19 nt, Artificial Sequence
  Synthetic oligonucleotide: CBLB-8068
ucuuuugcuguuaguuuua

SEQ ID NO: 38370 - RNA, 20 nt, Artificial Sequence
  Synthetic oligonucleotide: CBLB-8069
cucuuuugcuguuaguuuua

SEQ ID NO: 38371 - RNA, 21 nt, Artificial Sequence
  Synthetic oligonucleotide: CBLB-8070
ucucuuuugcuguuaguuuua

SEQ ID NO: 38372 - RNA, 22 nt, Artificial Sequence
  Synthetic oligonucleotide: CBLB-8071
uucucuuuugcuguuaguuuua

SEQ ID NO: 38373 - RNA, 23 nt, Artificial Sequence
  Synthetic oligonucleotide: CBLB-8072
uuucucuuuugcuguuaguuuua

SEQ ID NO: 38374 - RNA, 24 nt, Artificial Sequence
  Synthetic oligonucleotide: CBLB-8073
guuucucuuuugcuguuaguuuua

SEQ ID NO: 38375 - RNA, 18 nt, Artificial Sequence
  Synthetic oligonucleotide: CBLB-8074
gggaacgaaaguggaaac

SEQ ID NO: 38376 - RNA, 19 nt, Artificial Sequence
  Synthetic oligonucleotide: CBLB-8075
cgggaacgaaaguggaaac

SEQ ID NO: 38377 - RNA, 20 nt, Artificial Sequence
  Synthetic oligonucleotide: CBLB-7209
ccgggaacgaaaguggaaac

SEQ ID NO: 38378 - RNA, 21 nt, Artificial Sequence
  Synthetic oligonucleotide: CBLB-8076
cccgggaacgaaaguggaaac

SEQ ID NO: 38379 - RNA, 22 nt, Artificial Sequence
  Synthetic oligonucleotide: CBLB-8077
ucccgggaacgaaaguggaaac

SEQ ID NO: 38380 - RNA, 23 nt, Artificial Sequence
  Synthetic oligonucleotide: CBLB-8078
cucccgggaacgaaaguggaaac

SEQ ID NO: 38381 - RNA, 24 nt, Artificial Sequence
  Synthetic oligonucleotide: CBLB-8079
ucucccgggaacgaaaguggaaac

SEQ ID NO: 38382 - RNA, 18 nt, Artificial Sequence
  Synthetic oligonucleotide: CBLB-8080
gggcgugagcgucgggac

SEQ ID NO: 38383 - RNA, 19 nt, Artificial Sequence
  Synthetic oligonucleotide: CBLB-8081
ugggcgugagcgucgggac

SEQ ID NO: 38384 - RNA, 20 nt, Artificial Sequence
  Synthetic oligonucleotide: CBLB-7210
gugggcgugagcgucgggac

SEQ ID NO: 38385 - RNA, 21 nt, Artificial Sequence
  Synthetic oligonucleotide: CBLB-8082
ggugggcgugagcgucgggac

SEQ ID NO: 38386 - RNA, 22 nt, Artificial Sequence
  Synthetic oligonucleotide: CBLB-8083
aggugggcgugagcgucgggac

SEQ ID NO: 38387 - RNA, 23 nt, Artificial Sequence
  Synthetic oligonucleotide: CBLB-8084
caggugggcgugagcgucgggac

SEQ ID NO: 38388 - RNA, 24 nt, Artificial Sequence
  Synthetic oligonucleotide: CBLB-8085
gcaggugggcgugagcgucgggac

SEQ ID NO: 38389 - RNA, 18 nt, Artificial Sequence
  Synthetic oligonucleotide: CBLB-8086
cgggugcagccaauggac

SEQ ID NO: 38390 - RNA, 19 nt, Artificial Sequence
  Synthetic oligonucleotide: CBLB-8087
gcgggugcagccaauggac

SEQ ID NO: 38391 - RNA, 20 nt, Artificial Sequence
  Synthetic oligonucleotide: CBLB-7401
agcgggugcagccaauggac

SEQ ID NO: 38392 - RNA, 21 nt, Artificial Sequence
  Synthetic oligonucleotide: CBLB-8088
cagcgggugcagccaauggac

SEQ ID NO: 38393 - RNA, 22 nt, Artificial Sequence
  Synthetic oligonucleotide: CBLB-8089
acagcgggugcagccaauggac

SEQ ID NO: 38394 - RNA, 23 nt, Artificial Sequence
  Synthetic oligonucleotide: CBLB-8090
gacagcgggugcagccaauggac

SEQ ID NO: 38395 - RNA, 24 nt, Artificial Sequence
  Synthetic oligonucleotide: CBLB-8091
cgacagcgggugcagccaauggac

SEQ ID NO: 38396 - RNA, 18 nt, Artificial Sequence
  Synthetic oligonucleotide: CBLB-8092
gucagaaaggaauuggac

SEQ ID NO: 38397 - RNA, 19 nt, Artificial Sequence
  Synthetic oligonucleotide: CBLB-8093
cgucagaaaggaauuggac

SEQ ID NO: 38398 - RNA, 20 nt, Artificial Sequence
  Synthetic oligonucleotide: CBLB-8094
acgucagaaaggaauuggac

SEQ ID NO: 38399 - RNA, 21 nt, Artificial Sequence
  Synthetic oligonucleotide: CBLB-8095
cacgucagaaaggaauuggac

SEQ ID NO: 38400 - RNA, 22 nt, Artificial Sequence
  Synthetic oligonucleotide: CBLB-8096
gcacgucagaaaggaauuggac

SEQ ID NO: 38401 - RNA, 23 nt, Artificial Sequence
  Synthetic oligonucleotide: CBLB-8097
agcacgucagaaaggaauuggac

SEQ ID NO: 38402 - RNA, 24 nt, Artificial Sequence
  Synthetic oligonucleotide: CBLB-8098
cagcacgucagaaaggaauuggac

SEQ ID NO: 38403 - RNA, 18 nt, Artificial Sequence
  Synthetic oligonucleotide: CBLB-8099
ggcgugagcgucgggacc

SEQ ID NO: 38404 - RNA, 19 nt, Artificial Sequence
  Synthetic oligonucleotide: CBLB-8100
gggcgugagcgucgggacc

SEQ ID NO: 38405 - RNA, 20 nt, Artificial Sequence
  Synthetic oligonucleotide: CBLB-7211
ugggcgugagcgucgggacc

SEQ ID NO: 38406 - RNA, 21 nt, Artificial Sequence
  Synthetic oligonucleotide: CBLB-8101
gugggcgugagcgucgggacc

SEQ ID NO: 38407 - RNA, 22 nt, Artificial Sequence
  Synthetic oligonucleotide: CBLB-8102
ggugggcgugagcgucgggacc

SEQ ID NO: 38408 - RNA, 23 nt, Artificial Sequence
  Synthetic oligonucleotide: CBLB-8103
aggugggcgugagcgucgggacc

SEQ ID NO: 38409 - RNA, 24 nt, Artificial Sequence
  Synthetic oligonucleotide: CBLB-8104
caggugggcgugagcgucgggacc

SEQ ID NO: 38410 - RNA, 18 nt, Artificial Sequence
  Synthetic oligonucleotide: CBLB-8105
cugccaaacccuucuacc

SEQ ID NO: 38411 - RNA, 19 nt, Artificial Sequence
  Synthetic oligonucleotide: CBLB-8106
gcugccaaacccuucuacc

SEQ ID NO: 38412 - RNA, 20 nt, Artificial Sequence
  Synthetic oligonucleotide: CBLB-8107
ggcugccaaacccuucuacc

SEQ ID NO: 38413 - RNA, 21 nt, Artificial Sequence
  Synthetic oligonucleotide: CBLB-8108
gggcugccaaacccuucuacc

SEQ ID NO: 38414 - RNA, 22 nt, Artificial Sequence
  Synthetic oligonucleotide: CBLB-8109
agggcugccaaacccuucuacc

SEQ ID NO: 38415 - RNA, 23 nt, Artificial Sequence
  Synthetic oligonucleotide: CBLB-8110
uagggcugccaaacccuucuacc

SEQ ID NO: 38416 - RNA, 24 nt, Artificial Sequence
  Synthetic oligonucleotide: CBLB-8111
cuagggcugccaaacccuucuacc

SEQ ID NO: 38417 - RNA, 18 nt, Artificial Sequence
  Synthetic oligonucleotide: CBLB-8112
cacaguacacaauggccc

SEQ ID NO: 38418 - RNA, 19 nt, Artificial Sequence
  Synthetic oligonucleotide: CBLB-8113
ccacaguacacaauggccc

SEQ ID NO: 38419 - RNA, 20 nt, Artificial Sequence
  Synthetic oligonucleotide: CBLB-8114
uccacaguacacaauggccc

SEQ ID NO: 38420 - RNA, 21 nt, Artificial Sequence
  Synthetic oligonucleotide: CBLB-8115
cuccacaguacacaauggccc

SEQ ID NO: 38421 - RNA, 22 nt, Artificial Sequence
  Synthetic oligonucleotide: CBLB-8116
ccuccacaguacacaauggccc

SEQ ID NO: 38422 - RNA, 23 nt, Artificial Sequence
  Synthetic oligonucleotide: CBLB-8117
uccuccacaguacacaauggccc

SEQ ID NO: 38423 - RNA, 24 nt, Artificial Sequence
  Synthetic oligonucleotide: CBLB-8118
guccuccacaguacacaauggccc

SEQ ID NO: 38424 - RNA, 18 nt, Artificial Sequence
  Synthetic oligonucleotide: CBLB-8119
uggagaaauucaucuccc

SEQ ID NO: 38425 - RNA, 19 nt, Artificial Sequence
  Synthetic oligonucleotide: CBLB-8120
cuggagaaauucaucuccc

SEQ ID NO: 38426 - RNA, 20 nt, Artificial Sequence
  Synthetic oligonucleotide: CBLB-8121
gcuggagaaauucaucuccc

SEQ ID NO: 38427 - RNA, 21 nt, Artificial Sequence
  Synthetic oligonucleotide: CBLB-8122
cgcuggagaaauucaucuccc

SEQ ID NO: 38428 - RNA, 22 nt, Artificial Sequence
  Synthetic oligonucleotide: CBLB-8123
acgcuggagaaauucaucuccc

SEQ ID NO: 38429 - RNA, 23 nt, Artificial Sequence
  Synthetic oligonucleotide: CBLB-8124
aacgcuggagaaauucaucuccc

SEQ ID NO: 38430 - RNA, 24 nt, Artificial Sequence
  Synthetic oligonucleotide: CBLB-8125
caacgcuggagaaauucaucuccc

SEQ ID NO: 38431 - RNA, 18 nt, Artificial Sequence
  Synthetic oligonucleotide: CBLB-8126
aggggccuggacucuccc

SEQ ID NO: 38432 - RNA, 19 nt, Artificial Sequence
  Synthetic oligonucleotide: CBLB-8127
gaggggccuggacucuccc

SEQ ID NO: 38433 - RNA, 20 nt, Artificial Sequence
  Synthetic oligonucleotide: CBLB-7404
ugaggggccuggacucuccc

SEQ ID NO: 38434 - RNA, 21 nt, Artificial Sequence
  Synthetic oligonucleotide: CBLB-8128
augaggggccuggacucuccc

SEQ ID NO: 38435 - RNA, 22 nt, Artificial Sequence
  Synthetic oligonucleotide: CBLB-8129
aaugaggggccuggacucuccc

SEQ ID NO: 38436 - RNA, 23 nt, Artificial Sequence
  Synthetic oligonucleotide: CBLB-8130
aaaugaggggccuggacucuccc

SEQ ID NO: 38437 - RNA, 24 nt, Artificial Sequence
  Synthetic oligonucleotide: CBLB-8131
gaaaugaggggccuggacucuccc

SEQ ID NO: 38438 - RNA, 18 nt, Artificial Sequence
  Synthetic oligonucleotide: CBLB-8132
gaggggccuggacucucc

SEQ ID NO: 38439 - RNA, 19 nt, Artificial Sequence
  Synthetic oligonucleotide: CBLB-8133
ugaggggccuggacucucc

SEQ ID NO: 38440 - RNA, 20 nt, Artificial Sequence
  Synthetic oligonucleotide: CBLB-7213
augaggggccuggacucucc

SEQ ID NO: 38441 - RNA, 21 nt, Artificial Sequence
  Synthetic oligonucleotide: CBLB-8134
aaugaggggccuggacucucc

SEQ ID NO: 38442 - RNA, 22 nt, Artificial Sequence
  Synthetic oligonucleotide: CBLB-8135
aaaugaggggccuggacucucc

SEQ ID NO: 38443 - RNA, 23 nt, Artificial Sequence
  Synthetic oligonucleotide: CBLB-8136
gaaaugaggggccuggacucucc

SEQ ID NO: 38444 - RNA, 24 nt, Artificial Sequence
  Synthetic oligonucleotide: CBLB-8137
agaaaugaggggccuggacucucc

SEQ ID NO: 38445 - RNA, 18 nt, Artificial Sequence
  Synthetic oligonucleotide: CBLB-8138
ucugggcggguccaacgc

SEQ ID NO: 38446 - RNA, 19 nt, Artificial Sequence
  Synthetic oligonucleotide: CBLB-8139
cucugggcggguccaacgc

SEQ ID NO: 38447 - RNA, 20 nt, Artificial Sequence
  Synthetic oligonucleotide: CBLB-7219
gcucugggcggguccaacgc

SEQ ID NO: 38448 - RNA, 21 nt, Artificial Sequence
  Synthetic oligonucleotide: CBLB-8140
cgcucugggcggguccaacgc

SEQ ID NO: 38449 - RNA, 22 nt, Artificial Sequence
  Synthetic oligonucleotide: CBLB-8141
ccgcucugggcggguccaacgc

SEQ ID NO: 38450 - RNA, 23 nt, Artificial Sequence
  Synthetic oligonucleotide: CBLB-8142
uccgcucugggcggguccaacgc

SEQ ID NO: 38451 - RNA, 24 nt, Artificial Sequence
  Synthetic oligonucleotide: CBLB-8143
cuccgcucugggcggguccaacgc

SEQ ID NO: 38452 - RNA, 18 nt, Artificial Sequence
  Synthetic oligonucleotide: CBLB-8144
gacgaagggaugcaaggc

SEQ ID NO: 38453 - RNA, 19 nt, Artificial Sequence
  Synthetic oligonucleotide: CBLB-8145
ggacgaagggaugcaaggc

SEQ ID NO: 38454 - RNA, 20 nt, Artificial Sequence
  Synthetic oligonucleotide: CBLB-8146
uggacgaagggaugcaaggc

SEQ ID NO: 38455 - RNA, 21 nt, Artificial Sequence
  Synthetic oligonucleotide: CBLB-8147
auggacgaagggaugcaaggc

SEQ ID NO: 38456 - RNA, 22 nt, Artificial Sequence
  Synthetic oligonucleotide: CBLB-8148
aauggacgaagggaugcaaggc

SEQ ID NO: 38457 - RNA, 23 nt, Artificial Sequence
  Synthetic oligonucleotide: CBLB-8149
aaauggacgaagggaugcaaggc

SEQ ID NO: 38458 - RNA, 24 nt, Artificial Sequence
  Synthetic oligonucleotide: CBLB-8150
gaaauggacgaagggaugcaaggc

SEQ ID NO: 38459 - RNA, 18 nt, Artificial Sequence
  Synthetic oligonucleotide: CBLB-8151
cggagagaaaugaggggc

SEQ ID NO: 38460 - RNA, 19 nt, Artificial Sequence
  Synthetic oligonucleotide: CBLB-8152
ucggagagaaaugaggggc

SEQ ID NO: 38461 - RNA, 20 nt, Artificial Sequence
  Synthetic oligonucleotide: CBLB-8153
cucggagagaaaugaggggc

SEQ ID NO: 38462 - RNA, 21 nt, Artificial Sequence
  Synthetic oligonucleotide: CBLB-8154
acucggagagaaaugaggggc

SEQ ID NO: 38463 - RNA, 22 nt, Artificial Sequence
  Synthetic oligonucleotide: CBLB-8155
gacucggagagaaaugaggggc

SEQ ID NO: 38464 - RNA, 23 nt, Artificial Sequence
  Synthetic oligonucleotide: CBLB-8156
ggacucggagagaaaugaggggc

SEQ ID NO: 38465 - RNA, 24 nt, Artificial Sequence
  Synthetic oligonucleotide: CBLB-8157
uggacucggagagaaaugaggggc

SEQ ID NO: 38466 - RNA, 18 nt, Artificial Sequence
  Synthetic oligonucleotide: CBLB-8158
aagggguggcaggugggc

SEQ ID NO: 38467 - RNA, 19 nt, Artificial Sequence
  Synthetic oligonucleotide: CBLB-8159
uaagggguggcaggugggc

SEQ ID NO: 38468 - RNA, 20 nt, Artificial Sequence
  Synthetic oligonucleotide: CBLB-8160
auaagggguggcaggugggc

SEQ ID NO: 38469 - RNA, 21 nt, Artificial Sequence
  Synthetic oligonucleotide: CBLB-8161
aauaagggguggcaggugggc

SEQ ID NO: 38470 - RNA, 22 nt, Artificial Sequence
  Synthetic oligonucleotide: CBLB-8162
caauaagggguggcaggugggc

SEQ ID NO: 38471 - RNA, 23 nt, Artificial Sequence
  Synthetic oligonucleotide: CBLB-8163
ccaauaagggguggcaggugggc

SEQ ID NO: 38472 - RNA, 24 nt, Artificial Sequence
  Synthetic oligonucleotide: CBLB-8164
accaauaagggguggcaggugggc

SEQ ID NO: 38473 - RNA, 18 nt, Artificial Sequence
  Synthetic oligonucleotide: CBLB-8165
uagcaacagaguaguggc

SEQ ID NO: 38474 - RNA, 19 nt, Artificial Sequence
  Synthetic oligonucleotide: CBLB-8166
auagcaacagaguaguggc

SEQ ID NO: 38475 - RNA, 20 nt, Artificial Sequence
  Synthetic oligonucleotide: CBLB-7415
cauagcaacagaguaguggc

SEQ ID NO: 38476 - RNA, 21 nt, Artificial Sequence
  Synthetic oligonucleotide: CBLB-8167
ucauagcaacagaguaguggc

SEQ ID NO: 38477 - RNA, 22 nt, Artificial Sequence
  Synthetic oligonucleotide: CBLB-8168
uucauagcaacagaguaguggc

SEQ ID NO: 38478 - RNA, 23 nt, Artificial Sequence
  Synthetic oligonucleotide: CBLB-8169
uuucauagcaacagaguaguggc

SEQ ID NO: 38479 - RNA, 24 nt, Artificial Sequence
  Synthetic oligonucleotide: CBLB-8170
guuucauagcaacagaguaguggc

SEQ ID NO: 38480 - RNA, 18 nt, Artificial Sequence
  Synthetic oligonucleotide: CBLB-8171
ccgggagccaaagccauc

SEQ ID NO: 38481 - RNA, 19 nt, Artificial Sequence
  Synthetic oligonucleotide: CBLB-8172
accgggagccaaagccauc

SEQ ID NO: 38482 - RNA, 20 nt, Artificial Sequence
  Synthetic oligonucleotide: CBLB-7418
gaccgggagccaaagccauc

SEQ ID NO: 38483 - RNA, 21 nt, Artificial Sequence
  Synthetic oligonucleotide: CBLB-8173
ggaccgggagccaaagccauc

SEQ ID NO: 38484 - RNA, 22 nt, Artificial Sequence
  Synthetic oligonucleotide: CBLB-8174
gggaccgggagccaaagccauc

SEQ ID NO: 38485 - RNA, 23 nt, Artificial Sequence
  Synthetic oligonucleotide: CBLB-8175
cgggaccgggagccaaagccauc

SEQ ID NO: 38486 - RNA, 24 nt, Artificial Sequence
  Synthetic oligonucleotide: CBLB-8176
ucgggaccgggagccaaagccauc

SEQ ID NO: 38487 - RNA, 18 nt, Artificial Sequence
  Synthetic oligonucleotide: CBLB-8177
ugaggggccuggacucuc

SEQ ID NO: 38488 - RNA, 19 nt, Artificial Sequence
  Synthetic oligonucleotide: CBLB-8178
augaggggccuggacucuc

SEQ ID NO: 38489 - RNA, 20 nt, Artificial Sequence
  Synthetic oligonucleotide: CBLB-8179
aaugaggggccuggacucuc

SEQ ID NO: 38490 - RNA, 21 nt, Artificial Sequence
  Synthetic oligonucleotide: CBLB-8180
aaaugaggggccuggacucuc

SEQ ID NO: 38491 - RNA, 22 nt, Artificial Sequence
  Synthetic oligonucleotide: CBLB-8181
gaaaugaggggccuggacucuc

SEQ ID NO: 38492 - RNA, 23 nt, Artificial Sequence
  Synthetic oligonucleotide: CBLB-8182
agaaaugaggggccuggacucuc

SEQ ID NO: 38493 - RNA, 24 nt, Artificial Sequence
  Synthetic oligonucleotide: CBLB-8183
gagaaaugaggggccuggacucuc

SEQ ID NO: 38494 - RNA, 18 nt, Artificial Sequence
  Synthetic oligonucleotide: CBLB-8184
cucucccgggaacgaaag

SEQ ID NO: 38495 - RNA, 19 nt, Artificial Sequence
  Synthetic oligonucleotide: CBLB-8185
acucucccgggaacgaaag

SEQ ID NO: 38496 - RNA, 20 nt, Artificial Sequence
  Synthetic oligonucleotide: CBLB-7223
gacucucccgggaacgaaag

SEQ ID NO: 38497 - RNA, 21 nt, Artificial Sequence
  Synthetic oligonucleotide: CBLB-8186
ggacucucccgggaacgaaag

SEQ ID NO: 38498 - RNA, 22 nt, Artificial Sequence
  Synthetic oligonucleotide: CBLB-8187
uggacucucccgggaacgaaag

SEQ ID NO: 38499 - RNA, 23 nt, Artificial Sequence
  Synthetic oligonucleotide: CBLB-8188
cuggacucucccgggaacgaaag

SEQ ID NO: 38500 - RNA, 24 nt, Artificial Sequence
  Synthetic oligonucleotide: CBLB-8189
ccuggacucucccgggaacgaaag

SEQ ID NO: 38501 - RNA, 18 nt, Artificial Sequence
  Synthetic oligonucleotide: CBLB-8190
gccaucuggggcugaaag

SEQ ID NO: 38502 - RNA, 19 nt, Artificial Sequence
  Synthetic oligonucleotide: CBLB-8191
agccaucuggggcugaaag

SEQ ID NO: 38503 - RNA, 20 nt, Artificial Sequence
  Synthetic oligonucleotide: CBLB-8192
aagccaucuggggcugaaag

SEQ ID NO: 38504 - RNA, 21 nt, Artificial Sequence
  Synthetic oligonucleotide: CBLB-8193
aaagccaucuggggcugaaag

SEQ ID NO: 38505 - RNA, 22 nt, Artificial Sequence
  Synthetic oligonucleotide: CBLB-8194
caaagccaucuggggcugaaag

SEQ ID NO: 38506 - RNA, 23 nt, Artificial Sequence
  Synthetic oligonucleotide: CBLB-8195
ccaaagccaucuggggcugaaag

SEQ ID NO: 38507 - RNA, 24 nt, Artificial Sequence
  Synthetic oligonucleotide: CBLB-8196
gccaaagccaucuggggcugaaag

SEQ ID NO: 38508 - RNA, 18 nt, Artificial Sequence
  Synthetic oligonucleotide: CBLB-8197
aguacacaauggccccag

SEQ ID NO: 38509 - RNA, 19 nt, Artificial Sequence
  Synthetic oligonucleotide: CBLB-8198
caguacacaauggccccag

SEQ ID NO: 38510 - RNA, 20 nt, Artificial Sequence
  Synthetic oligonucleotide: CBLB-7425
acaguacacaauggccccag

SEQ ID NO: 38511 - RNA, 21 nt, Artificial Sequence
  Synthetic oligonucleotide: CBLB-8199
cacaguacacaauggccccag

SEQ ID NO: 38512 - RNA, 22 nt, Artificial Sequence
  Synthetic oligonucleotide: CBLB-8200
ccacaguacacaauggccccag

SEQ ID NO: 38513 - RNA, 23 nt, Artificial Sequence
  Synthetic oligonucleotide: CBLB-8201
uccacaguacacaauggccccag

SEQ ID NO: 38514 - RNA, 24 nt, Artificial Sequence
  Synthetic oligonucleotide: CBLB-8202
cuccacaguacacaauggccccag

SEQ ID NO: 38515 - RNA, 18 nt, Artificial Sequence
  Synthetic oligonucleotide: CBLB-8203
accaauaagggguggcag

SEQ ID NO: 38516 - RNA, 19 nt, Artificial Sequence
  Synthetic oligonucleotide: CBLB-8204
aaccaauaagggguggcag

SEQ ID NO: 38517 - RNA, 20 nt, Artificial Sequence
  Synthetic oligonucleotide: CBLB-8205
uaaccaauaagggguggcag

SEQ ID NO: 38518 - RNA, 21 nt, Artificial Sequence
  Synthetic oligonucleotide: CBLB-8206
cuaaccaauaagggguggcag

SEQ ID NO: 38519 - RNA, 22 nt, Artificial Sequence
  Synthetic oligonucleotide: CBLB-8207
gcuaaccaauaagggguggcag

SEQ ID NO: 38520 - RNA, 23 nt, Artificial Sequence
  Synthetic oligonucleotide: CBLB-8208
agcuaaccaauaagggguggcag

SEQ ID NO: 38521 - RNA, 24 nt, Artificial Sequence
  Synthetic oligonucleotide: CBLB-8209
gagcuaaccaauaagggguggcag

SEQ ID NO: 38522 - RNA, 18 nt, Artificial Sequence
  Synthetic oligonucleotide: CBLB-8210
ucugccuaaaugacugag

SEQ ID NO: 38523 - RNA, 19 nt, Artificial Sequence
  Synthetic oligonucleotide: CBLB-8211
uucugccuaaaugacugag

SEQ ID NO: 38524 - RNA, 20 nt, Artificial Sequence
  Synthetic oligonucleotide: CBLB-8212
uuucugccuaaaugacugag

SEQ ID NO: 38525 - RNA, 21 nt, Artificial Sequence
  Synthetic oligonucleotide: CBLB-8213
guuucugccuaaaugacugag

SEQ ID NO: 38526 - RNA, 22 nt, Artificial Sequence
  Synthetic oligonucleotide: CBLB-8214
aguuucugccuaaaugacugag

SEQ ID NO: 38527 - RNA, 23 nt, Artificial Sequence
  Synthetic oligonucleotide: CBLB-8215
aaguuucugccuaaaugacugag

SEQ ID NO: 38528 - RNA, 24 nt, Artificial Sequence
  Synthetic oligonucleotide: CBLB-8216
caaguuucugccuaaaugacugag

SEQ ID NO: 38529 - RNA, 18 nt, Artificial Sequence
  Synthetic oligonucleotide: CBLB-8217
cucugggcggguccaacg

SEQ ID NO: 38530 - RNA, 19 nt, Artificial Sequence
  Synthetic oligonucleotide: CBLB-8218
gcucugggcggguccaacg

SEQ ID NO: 38531 - RNA, 20 nt, Artificial Sequence
  Synthetic oligonucleotide: CBLB-8219
cgcucugggcggguccaacg

SEQ ID NO: 38532 - RNA, 21 nt, Artificial Sequence
  Synthetic oligonucleotide: CBLB-8220
ccgcucugggcggguccaacg

SEQ ID NO: 38533 - RNA, 22 nt, Artificial Sequence
  Synthetic oligonucleotide: CBLB-8221
uccgcucugggcggguccaacg

SEQ ID NO: 38534 - RNA, 23 nt, Artificial Sequence
  Synthetic oligonucleotide: CBLB-8222
cuccgcucugggcggguccaacg

SEQ ID NO: 38535 - RNA, 24 nt, Artificial Sequence
  Synthetic oligonucleotide: CBLB-8223
ucuccgcucugggcggguccaacg

SEQ ID NO: 38536 - RNA, 18 nt, Artificial Sequence
  Synthetic oligonucleotide: CBLB-8224
gaagggaugcaaggcacg

SEQ ID NO: 38537 - RNA, 19 nt, Artificial Sequence
  Synthetic oligonucleotide: CBLB-8225
cgaagggaugcaaggcacg

SEQ ID NO: 38538 - RNA, 20 nt, Artificial Sequence
  Synthetic oligonucleotide: CBLB-8226
acgaagggaugcaaggcacg

SEQ ID NO: 38539 - RNA, 21 nt, Artificial Sequence
  Synthetic oligonucleotide: CBLB-8227
gacgaagggaugcaaggcacg

SEQ ID NO: 38540 - RNA, 22 nt, Artificial Sequence
  Synthetic oligonucleotide: CBLB-8228
ggacgaagggaugcaaggcacg

SEQ ID NO: 38541 - RNA, 23 nt, Artificial Sequence
  Synthetic oligonucleotide: CBLB-8229
uggacgaagggaugcaaggcacg

SEQ ID NO: 38542 - RNA, 24 nt, Artificial Sequence
  Synthetic oligonucleotide: CBLB-8230
auggacgaagggaugcaaggcacg

SEQ ID NO: 38543 - RNA, 18 nt, Artificial Sequence
  Synthetic oligonucleotide: CBLB-8231
cgggaaaggaaauggacg

SEQ ID NO: 38544 - RNA, 19 nt, Artificial Sequence
  Synthetic oligonucleotide: CBLB-8232
acgggaaaggaaauggacg

SEQ ID NO: 38545 - RNA, 20 nt, Artificial Sequence
  Synthetic oligonucleotide: CBLB-8233
aacgggaaaggaaauggacg

SEQ ID NO: 38546 - RNA, 21 nt, Artificial Sequence
  Synthetic oligonucleotide: CBLB-8234
aaacgggaaaggaaauggacg

SEQ ID NO: 38547 - RNA, 22 nt, Artificial Sequence
  Synthetic oligonucleotide: CBLB-8235
gaaacgggaaaggaaauggacg

SEQ ID NO: 38548 - RNA, 23 nt, Artificial Sequence
  Synthetic oligonucleotide: CBLB-8236
ggaaacgggaaaggaaauggacg

SEQ ID NO: 38549 - RNA, 24 nt, Artificial Sequence
  Synthetic oligonucleotide: CBLB-8237
uggaaacgggaaaggaaauggacg

SEQ ID NO: 38550 - RNA, 18 nt, Artificial Sequence
  Synthetic oligonucleotide: CBLB-8238
gggcggggccgggcgccg

SEQ ID NO: 38551 - RNA, 19 nt, Artificial Sequence
  Synthetic oligonucleotide: CBLB-8239
ggggcggggccgggcgccg

SEQ ID NO: 38552 - RNA, 20 nt, Artificial Sequence
  Synthetic oligonucleotide: CBLB-8240
gggggcggggccgggcgccg

SEQ ID NO: 38553 - RNA, 21 nt, Artificial Sequence
  Synthetic oligonucleotide: CBLB-8241
cgggggcggggccgggcgccg

SEQ ID NO: 38554 - RNA, 22 nt, Artificial Sequence
  Synthetic oligonucleotide: CBLB-8242
gcgggggcggggccgggcgccg

SEQ ID NO: 38555 - RNA, 23 nt, Artificial Sequence
  Synthetic oligonucleotide: CBLB-8243
ggcgggggcggggccgggcgccg

SEQ ID NO: 38556 - RNA, 24 nt, Artificial Sequence
  Synthetic oligonucleotide: CBLB-8244
gggcgggggcggggccgggcgccg

SEQ ID NO: 38557 - RNA, 18 nt, Artificial Sequence
  Synthetic oligonucleotide: CBLB-8245
ggcaggugggcgugagcg

SEQ ID NO: 38558 - RNA, 19 nt, Artificial Sequence
  Synthetic oligonucleotide: CBLB-8246
uggcaggugggcgugagcg

SEQ ID NO: 38559 - RNA, 20 nt, Artificial Sequence
  Synthetic oligonucleotide: CBLB-8247
guggcaggugggcgugagcg

SEQ ID NO: 38560 - RNA, 21 nt, Artificial Sequence
  Synthetic oligonucleotide: CBLB-8248
gguggcaggugggcgugagcg

SEQ ID NO: 38561 - RNA, 22 nt, Artificial Sequence
  Synthetic oligonucleotide: CBLB-8249
ggguggcaggugggcgugagcg

SEQ ID NO: 38562 - RNA, 23 nt, Artificial Sequence
  Synthetic oligonucleotide: CBLB-8250
gggguggcaggugggcgugagcg

SEQ ID NO: 38563 - RNA, 24 nt, Artificial Sequence
  Synthetic oligonucleotide: CBLB-8251
agggguggcaggugggcgugagcg

SEQ ID NO: 38564 - RNA, 18 nt, Artificial Sequence
  Synthetic oligonucleotide: CBLB-8252
agaaaggaauuggacucg

SEQ ID NO: 38565 - RNA, 19 nt, Artificial Sequence
  Synthetic oligonucleotide: CBLB-8253
cagaaaggaauuggacucg

SEQ ID NO: 38566 - RNA, 20 nt, Artificial Sequence
  Synthetic oligonucleotide: CBLB-8254
ucagaaaggaauuggacucg

SEQ ID NO: 38567 - RNA, 21 nt, Artificial Sequence
  Synthetic oligonucleotide: CBLB-8255
gucagaaaggaauuggacucg

SEQ ID NO: 38568 - RNA, 22 nt, Artificial Sequence
  Synthetic oligonucleotide: CBLB-8256
cgucagaaaggaauuggacucg

SEQ ID NO: 38569 - RNA, 23 nt, Artificial Sequence
  Synthetic oligonucleotide: CBLB-8257
acgucagaaaggaauuggacucg

SEQ ID NO: 38570 - RNA, 24 nt, Artificial Sequence
  Synthetic oligonucleotide: CBLB-8258
cacgucagaaaggaauuggacucg

SEQ ID NO: 38571 - RNA, 18 nt, Artificial Sequence
  Synthetic oligonucleotide: CBLB-8259
ccaucuggggcugaaagg

SEQ ID NO: 38572 - RNA, 19 nt, Artificial Sequence
  Synthetic oligonucleotide: CBLB-8260
gccaucuggggcugaaagg

SEQ ID NO: 38573 - RNA, 20 nt, Artificial Sequence
  Synthetic oligonucleotide: CBLB-7434
agccaucuggggcugaaagg

SEQ ID NO: 38574 - RNA, 21 nt, Artificial Sequence
  Synthetic oligonucleotide: CBLB-8261
aagccaucuggggcugaaagg

SEQ ID NO: 38575 - RNA, 22 nt, Artificial Sequence
  Synthetic oligonucleotide: CBLB-8262
aaagccaucuggggcugaaagg

SEQ ID NO: 38576 - RNA, 23 nt, Artificial Sequence
  Synthetic oligonucleotide: CBLB-8263
caaagccaucuggggcugaaagg

SEQ ID NO: 38577 - RNA, 24 nt, Artificial Sequence
  Synthetic oligonucleotide: CBLB-8264
ccaaagccaucuggggcugaaagg

SEQ ID NO: 38578 - RNA, 18 nt, Artificial Sequence
  Synthetic oligonucleotide: CBLB-8265
cugccuaaaugacugagg

SEQ ID NO: 38579 - RNA, 19 nt, Artificial Sequence
  Synthetic oligonucleotide: CBLB-8266
ucugccuaaaugacugagg

SEQ ID NO: 38580 - RNA, 20 nt, Artificial Sequence
  Synthetic oligonucleotide: CBLB-7436
uucugccuaaaugacugagg

SEQ ID NO: 38581 - RNA, 21 nt, Artificial Sequence
  Synthetic oligonucleotide: CBLB-8267
uuucugccuaaaugacugagg

SEQ ID NO: 38582 - RNA, 22 nt, Artificial Sequence
  Synthetic oligonucleotide: CBLB-8268
guuucugccuaaaugacugagg

SEQ ID NO: 38583 - RNA, 23 nt, Artificial Sequence
  Synthetic oligonucleotide: CBLB-8269
aguuucugccuaaaugacugagg

SEQ ID NO: 38584 - RNA, 24 nt, Artificial Sequence
  Synthetic oligonucleotide: CBLB-8270
aaguuucugccuaaaugacugagg

SEQ ID NO: 38585 - RNA, 18 nt, Artificial Sequence
  Synthetic oligonucleotide: CBLB-8271
aaucucacagagaguagg

SEQ ID NO: 38586 - RNA, 19 nt, Artificial Sequence
  Synthetic oligonucleotide: CBLB-8272
aaaucucacagagaguagg

SEQ ID NO: 38587 - RNA, 20 nt, Artificial Sequence
  Synthetic oligonucleotide: CBLB-8273
uaaaucucacagagaguagg

SEQ ID NO: 38588 - RNA, 21 nt, Artificial Sequence
  Synthetic oligonucleotide: CBLB-8274
auaaaucucacagagaguagg

SEQ ID NO: 38589 - RNA, 22 nt, Artificial Sequence
  Synthetic oligonucleotide: CBLB-8275
aauaaaucucacagagaguagg

SEQ ID NO: 38590 - RNA, 23 nt, Artificial Sequence
  Synthetic oligonucleotide: CBLB-8276
gaauaaaucucacagagaguagg

SEQ ID NO: 38591 - RNA, 24 nt, Artificial Sequence
  Synthetic oligonucleotide: CBLB-8277
agaauaaaucucacagagaguagg

SEQ ID NO: 38592 - RNA, 18 nt, Artificial Sequence
  Synthetic oligonucleotide: CBLB-8278
ggcggggcgggggcgggg

SEQ ID NO: 38593 - RNA, 19 nt, Artificial Sequence
  Synthetic oligonucleotide: CBLB-8279
gggcggggcgggggcgggg

SEQ ID NO: 38594 - RNA, 20 nt, Artificial Sequence
  Synthetic oligonucleotide: CBLB-8280
ggggcggggcgggggcgggg

SEQ ID NO: 38595 - RNA, 18 nt, Artificial Sequence
  Synthetic oligonucleotide: CBLB-8281
agccaaagccaucugggg

SEQ ID NO: 38596 - RNA, 19 nt, Artificial Sequence
  Synthetic oligonucleotide: CBLB-8282
gagccaaagccaucugggg

SEQ ID NO: 38597 - RNA, 20 nt, Artificial Sequence
  Synthetic oligonucleotide: CBLB-8283
ggagccaaagccaucugggg

SEQ ID NO: 38598 - RNA, 21 nt, Artificial Sequence
  Synthetic oligonucleotide: CBLB-8284
gggagccaaagccaucugggg

SEQ ID NO: 38599 - RNA, 22 nt, Artificial Sequence
  Synthetic oligonucleotide: CBLB-8285
cgggagccaaagccaucugggg

SEQ ID NO: 38600 - RNA, 23 nt, Artificial Sequence
  Synthetic oligonucleotide: CBLB-8286
ccgggagccaaagccaucugggg

SEQ ID NO: 38601 - RNA, 24 nt, Artificial Sequence
  Synthetic oligonucleotide: CBLB-8287
accgggagccaaagccaucugggg

SEQ ID NO: 38602 - RNA, 18 nt, Artificial Sequence
  Synthetic oligonucleotide: CBLB-8288
aaacgggaaaggaaaugg

SEQ ID NO: 38603 - RNA, 19 nt, Artificial Sequence
  Synthetic oligonucleotide: CBLB-8289
gaaacgggaaaggaaaugg

SEQ ID NO: 38604 - RNA, 20 nt, Artificial Sequence
  Synthetic oligonucleotide: CBLB-8290
ggaaacgggaaaggaaaugg

SEQ ID NO: 38605 - RNA, 21 nt, Artificial Sequence
  Synthetic oligonucleotide: CBLB-8291
uggaaacgggaaaggaaaugg

SEQ ID NO: 38606 - RNA, 22 nt, Artificial Sequence
  Synthetic oligonucleotide: CBLB-8292
guggaaacgggaaaggaaaugg

SEQ ID NO: 38607 - RNA, 23 nt, Artificial Sequence
  Synthetic oligonucleotide: CBLB-8293
aguggaaacgggaaaggaaaugg

SEQ ID NO: 38608 - RNA, 24 nt, Artificial Sequence
  Synthetic oligonucleotide: CBLB-8294
aaguggaaacgggaaaggaaaugg

SEQ ID NO: 38609 - RNA, 18 nt, Artificial Sequence
  Synthetic oligonucleotide: CBLB-8295
agcgggugcagccaaugg

SEQ ID NO: 38610 - RNA, 19 nt, Artificial Sequence
  Synthetic oligonucleotide: CBLB-8296
cagcgggugcagccaaugg

SEQ ID NO: 38611 - RNA, 20 nt, Artificial Sequence
  Synthetic oligonucleotide: CBLB-8297
acagcgggugcagccaaugg

SEQ ID NO: 38612 - RNA, 21 nt, Artificial Sequence
  Synthetic oligonucleotide: CBLB-8298
gacagcgggugcagccaaugg

SEQ ID NO: 38613 - RNA, 22 nt, Artificial Sequence
  Synthetic oligonucleotide: CBLB-8299
cgacagcgggugcagccaaugg

SEQ ID NO: 38614 - RNA, 23 nt, Artificial Sequence
  Synthetic oligonucleotide: CBLB-8300
ccgacagcgggugcagccaaugg

SEQ ID NO: 38615 - RNA, 24 nt, Artificial Sequence
  Synthetic oligonucleotide: CBLB-8301
cccgacagcgggugcagccaaugg

SEQ ID NO: 38616 - RNA, 18 nt, Artificial Sequence
  Synthetic oligonucleotide: CBLB-8302
auagcaacagaguagugg

SEQ ID NO: 38617 - RNA, 19 nt, Artificial Sequence
  Synthetic oligonucleotide: CBLB-8303
cauagcaacagaguagugg

SEQ ID NO: 38618 - RNA, 20 nt, Artificial Sequence
  Synthetic oligonucleotide: CBLB-8304
ucauagcaacagaguagugg

SEQ ID NO: 38619 - RNA, 21 nt, Artificial Sequence
  Synthetic oligonucleotide: CBLB-8305
uucauagcaacagaguagugg

SEQ ID NO: 38620 - RNA, 22 nt, Artificial Sequence
  Synthetic oligonucleotide: CBLB-8306
uuucauagcaacagaguagugg

SEQ ID NO: 38621 - RNA, 23 nt, Artificial Sequence
  Synthetic oligonucleotide: CBLB-8307
guuucauagcaacagaguagugg

SEQ ID NO: 38622 - RNA, 24 nt, Artificial Sequence
  Synthetic oligonucleotide: CBLB-8308
uguuucauagcaacagaguagugg

SEQ ID NO: 38623 - RNA, 18 nt, Artificial Sequence
  Synthetic oligonucleotide: CBLB-8309
uggacucggagagaaaug

SEQ ID NO: 38624 - RNA, 19 nt, Artificial Sequence
  Synthetic oligonucleotide: CBLB-8310
uuggacucggagagaaaug

SEQ ID NO: 38625 - RNA, 20 nt, Artificial Sequence
  Synthetic oligonucleotide: CBLB-7233
auuggacucggagagaaaug

SEQ ID NO: 38626 - RNA, 21 nt, Artificial Sequence
  Synthetic oligonucleotide: CBLB-8311
aauuggacucggagagaaaug

SEQ ID NO: 38627 - RNA, 22 nt, Artificial Sequence
  Synthetic oligonucleotide: CBLB-8312
gaauuggacucggagagaaaug

SEQ ID NO: 38628 - RNA, 23 nt, Artificial Sequence
  Synthetic oligonucleotide: CBLB-8313
ggaauuggacucggagagaaaug

SEQ ID NO: 38629 - RNA, 24 nt, Artificial Sequence
  Synthetic oligonucleotide: CBLB-8314
aggaauuggacucggagagaaaug

SEQ ID NO: 38630 - RNA, 18 nt, Artificial Sequence
  Synthetic oligonucleotide: CBLB-8315
uuucugccuaaaugacug

SEQ ID NO: 38631 - RNA, 19 nt, Artificial Sequence
  Synthetic oligonucleotide: CBLB-8316
guuucugccuaaaugacug

SEQ ID NO: 38632 - RNA, 20 nt, Artificial Sequence
  Synthetic oligonucleotide: CBLB-7439
aguuucugccuaaaugacug

SEQ ID NO: 38633 - RNA, 21 nt, Artificial Sequence
  Synthetic oligonucleotide: CBLB-8317
aaguuucugccuaaaugacug

SEQ ID NO: 38634 - RNA, 22 nt, Artificial Sequence
  Synthetic oligonucleotide: CBLB-8318
caaguuucugccuaaaugacug

SEQ ID NO: 38635 - RNA, 23 nt, Artificial Sequence
  Synthetic oligonucleotide: CBLB-8319
gcaaguuucugccuaaaugacug

SEQ ID NO: 38636 - RNA, 24 nt, Artificial Sequence
  Synthetic oligonucleotide: CBLB-8320
ugcaaguuucugccuaaaugacug

SEQ ID NO: 38637 - RNA, 18 nt, Artificial Sequence
  Synthetic oligonucleotide: CBLB-8321
ugggcggguccaacgcug

SEQ ID NO: 38638 - RNA, 19 nt, Artificial Sequence
  Synthetic oligonucleotide: CBLB-8322
cugggcggguccaacgcug

SEQ ID NO: 38639 - RNA, 20 nt, Artificial Sequence
  Synthetic oligonucleotide: CBLB-8323
ucugggcggguccaacgcug

SEQ ID NO: 38640 - RNA, 21 nt, Artificial Sequence
  Synthetic oligonucleotide: CBLB-8324
cucugggcggguccaacgcug

SEQ ID NO: 38641 - RNA, 22 nt, Artificial Sequence
  Synthetic oligonucleotide: CBLB-8325
gcucugggcggguccaacgcug

SEQ ID NO: 38642 - RNA, 23 nt, Artificial Sequence
  Synthetic oligonucleotide: CBLB-8326
cgcucugggcggguccaacgcug

SEQ ID NO: 38643 - RNA, 24 nt, Artificial Sequence
  Synthetic oligonucleotide: CBLB-8327
ccgcucugggcggguccaacgcug

SEQ ID NO: 38644 - RNA, 18 nt, Artificial Sequence
  Synthetic oligonucleotide: CBLB-8328
agaccaaacaucaggcug

SEQ ID NO: 38645 - RNA, 19 nt, Artificial Sequence
  Synthetic oligonucleotide: CBLB-8329
cagaccaaacaucaggcug

SEQ ID NO: 38646 - RNA, 20 nt, Artificial Sequence
  Synthetic oligonucleotide: CBLB-8330
gcagaccaaacaucaggcug

SEQ ID NO: 38647 - RNA, 21 nt, Artificial Sequence
  Synthetic oligonucleotide: CBLB-8331
ugcagaccaaacaucaggcug

SEQ ID NO: 38648 - RNA, 22 nt, Artificial Sequence
  Synthetic oligonucleotide: CBLB-8332
uugcagaccaaacaucaggcug

SEQ ID NO: 38649 - RNA, 23 nt, Artificial Sequence
  Synthetic oligonucleotide: CBLB-8333
auugcagaccaaacaucaggcug

SEQ ID NO: 38650 - RNA, 24 nt, Artificial Sequence
  Synthetic oligonucleotide: CBLB-8334
gauugcagaccaaacaucaggcug

SEQ ID NO: 38651 - RNA, 18 nt, Artificial Sequence
  Synthetic oligonucleotide: CBLB-8335
gacagcuacuguguuuug

SEQ ID NO: 38652 - RNA, 19 nt, Artificial Sequence
  Synthetic oligonucleotide: CBLB-8336
agacagcuacuguguuuug

SEQ ID NO: 38653 - RNA, 20 nt, Artificial Sequence
  Synthetic oligonucleotide: CBLB-8337
gagacagcuacuguguuuug

SEQ ID NO: 38654 - RNA, 21 nt, Artificial Sequence
  Synthetic oligonucleotide: CBLB-8338
ggagacagcuacuguguuuug

SEQ ID NO: 38655 - RNA, 22 nt, Artificial Sequence
  Synthetic oligonucleotide: CBLB-8339
aggagacagcuacuguguuuug

SEQ ID NO: 38656 - RNA, 23 nt, Artificial Sequence
  Synthetic oligonucleotide: CBLB-8340
gaggagacagcuacuguguuuug

SEQ ID NO: 38657 - RNA, 24 nt, Artificial Sequence
  Synthetic oligonucleotide: CBLB-8341
ggaggagacagcuacuguguuuug

SEQ ID NO: 38658 - RNA, 18 nt, Artificial Sequence
  Synthetic oligonucleotide: CBLB-8342
uuggacucggagagaaau

SEQ ID NO: 38659 - RNA, 19 nt, Artificial Sequence
  Synthetic oligonucleotide: CBLB-8343
auuggacucggagagaaau

SEQ ID NO: 38660 - RNA, 20 nt, Artificial Sequence
  Synthetic oligonucleotide: CBLB-8344
aauuggacucggagagaaau

SEQ ID NO: 38661 - RNA, 21 nt, Artificial Sequence
  Synthetic oligonucleotide: CBLB-8345
gaauuggacucggagagaaau

SEQ ID NO: 38662 - RNA, 22 nt, Artificial Sequence
  Synthetic oligonucleotide: CBLB-8346
ggaauuggacucggagagaaau

SEQ ID NO: 38663 - RNA, 23 nt, Artificial Sequence
  Synthetic oligonucleotide: CBLB-8347
aggaauuggacucggagagaaau

SEQ ID NO: 38664 - RNA, 24 nt, Artificial Sequence
  Synthetic oligonucleotide: CBLB-8348
aaggaauuggacucggagagaaau

SEQ ID NO: 38665 - RNA, 18 nt, Artificial Sequence
  Synthetic oligonucleotide: CBLB-8349
acgaaggagcuaaccaau

SEQ ID NO: 38666 - RNA, 19 nt, Artificial Sequence
  Synthetic oligonucleotide: CBLB-8350
cacgaaggagcuaaccaau

SEQ ID NO: 38667 - RNA, 20 nt, Artificial Sequence
  Synthetic oligonucleotide: CBLB-8351
gcacgaaggagcuaaccaau

SEQ ID NO: 38668 - RNA, 21 nt, Artificial Sequence
  Synthetic oligonucleotide: CBLB-8352
ggcacgaaggagcuaaccaau

SEQ ID NO: 38669 - RNA, 22 nt, Artificial Sequence
  Synthetic oligonucleotide: CBLB-8353
aggcacgaaggagcuaaccaau

SEQ ID NO: 38670 - RNA, 23 nt, Artificial Sequence
  Synthetic oligonucleotide: CBLB-8354
aaggcacgaaggagcuaaccaau

SEQ ID NO: 38671 - RNA, 24 nt, Artificial Sequence
  Synthetic oligonucleotide: CBLB-8355
caaggcacgaaggagcuaaccaau

SEQ ID NO: 38672 - RNA, 18 nt, Artificial Sequence
  Synthetic oligonucleotide: CBLB-8356
accgggagccaaagccau

SEQ ID NO: 38673 - RNA, 19 nt, Artificial Sequence
  Synthetic oligonucleotide: CBLB-8357
gaccgggagccaaagccau

SEQ ID NO: 38674 - RNA, 20 nt, Artificial Sequence
  Synthetic oligonucleotide: CBLB-8358
ggaccgggagccaaagccau

SEQ ID NO: 38675 - RNA, 21 nt, Artificial Sequence
  Synthetic oligonucleotide: CBLB-8359
gggaccgggagccaaagccau

SEQ ID NO: 38676 - RNA, 22 nt, Artificial Sequence
  Synthetic oligonucleotide: CBLB-8360
cgggaccgggagccaaagccau

SEQ ID NO: 38677 - RNA, 23 nt, Artificial Sequence
  Synthetic oligonucleotide: CBLB-8361
ucgggaccgggagccaaagccau

SEQ ID NO: 38678 - RNA, 24 nt, Artificial Sequence
  Synthetic oligonucleotide: CBLB-8362
gucgggaccgggagccaaagccau

SEQ ID NO: 38679 - RNA, 18 nt, Artificial Sequence
  Synthetic oligonucleotide: CBLB-8363
ucagaaaggaauuggacu

SEQ ID NO: 38680 - RNA, 19 nt, Artificial Sequence
  Synthetic oligonucleotide: CBLB-8364
gucagaaaggaauuggacu

SEQ ID NO: 38681 - RNA, 20 nt, Artificial Sequence
  Synthetic oligonucleotide: CBLB-7448
cgucagaaaggaauuggacu

SEQ ID NO: 38682 - RNA, 21 nt, Artificial Sequence
  Synthetic oligonucleotide: CBLB-8365
acgucagaaaggaauuggacu

SEQ ID NO: 38683 - RNA, 22 nt, Artificial Sequence
  Synthetic oligonucleotide: CBLB-8366
cacgucagaaaggaauuggacu

SEQ ID NO: 38684 - RNA, 23 nt, Artificial Sequence
  Synthetic oligonucleotide: CBLB-8367
gcacgucagaaaggaauuggacu

SEQ ID NO: 38685 - RNA, 24 nt, Artificial Sequence
  Synthetic oligonucleotide: CBLB-8368
agcacgucagaaaggaauuggacu

SEQ ID NO: 38686 - RNA, 18 nt, Artificial Sequence
  Synthetic oligonucleotide: CBLB-8369
guuucugccuaaaugacu

SEQ ID NO: 38687 - RNA, 19 nt, Artificial Sequence
  Synthetic oligonucleotide: CBLB-8370
aguuucugccuaaaugacu

SEQ ID NO: 38688 - RNA, 20 nt, Artificial Sequence
  Synthetic oligonucleotide: CBLB-8371
aaguuucugccuaaaugacu

SEQ ID NO: 38689 - RNA, 21 nt, Artificial Sequence
  Synthetic oligonucleotide: CBLB-8372
caaguuucugccuaaaugacu

SEQ ID NO: 38690 - RNA, 22 nt, Artificial Sequence
  Synthetic oligonucleotide: CBLB-8373
gcaaguuucugccuaaaugacu

SEQ ID NO: 38691 - RNA, 23 nt, Artificial Sequence
  Synthetic oligonucleotide: CBLB-8374
ugcaaguuucugccuaaaugacu

SEQ ID NO: 38692 - RNA, 24 nt, Artificial Sequence
  Synthetic oligonucleotide: CBLB-8375
gugcaaguuucugccuaaaugacu

SEQ ID NO: 38693 - RNA, 18 nt, Artificial Sequence
  Synthetic oligonucleotide: CBLB-8376
ggguguugcuucuccgcu

SEQ ID NO: 38694 - RNA, 19 nt, Artificial Sequence
  Synthetic oligonucleotide: CBLB-8377
aggguguugcuucuccgcu

SEQ ID NO: 38695 - RNA, 20 nt, Artificial Sequence
  Synthetic oligonucleotide: CBLB-8378
aaggguguugcuucuccgcu

SEQ ID NO: 38696 - RNA, 21 nt, Artificial Sequence
  Synthetic oligonucleotide: CBLB-8379
gaaggguguugcuucuccgcu

SEQ ID NO: 38697 - RNA, 22 nt, Artificial Sequence
  Synthetic oligonucleotide: CBLB-8380
ggaaggguguugcuucuccgcu

SEQ ID NO: 38698 - RNA, 23 nt, Artificial Sequence
  Synthetic oligonucleotide: CBLB-8381
uggaaggguguugcuucuccgcu

SEQ ID NO: 38699 - RNA, 24 nt, Artificial Sequence
  Synthetic oligonucleotide: CBLB-8382
cuggaaggguguugcuucuccgcu

SEQ ID NO: 38700 - RNA, 18 nt, Artificial Sequence
  Synthetic oligonucleotide: CBLB-8383
ggcccgcucgcagcacgu

SEQ ID NO: 38701 - RNA, 19 nt, Artificial Sequence
  Synthetic oligonucleotide: CBLB-8384
aggcccgcucgcagcacgu

SEQ ID NO: 38702 - RNA, 20 nt, Artificial Sequence
  Synthetic oligonucleotide: CBLB-8385
aaggcccgcucgcagcacgu

SEQ ID NO: 38703 - RNA, 21 nt, Artificial Sequence
  Synthetic oligonucleotide: CBLB-8386
gaaggcccgcucgcagcacgu

SEQ ID NO: 38704 - RNA, 22 nt, Artificial Sequence
  Synthetic oligonucleotide: CBLB-8387
ggaaggcccgcucgcagcacgu

SEQ ID NO: 38705 - RNA, 23 nt, Artificial Sequence
  Synthetic oligonucleotide: CBLB-8388
aggaaggcccgcucgcagcacgu

SEQ ID NO: 38706 - RNA, 24 nt, Artificial Sequence
  Synthetic oligonucleotide: CBLB-8389
gaggaaggcccgcucgcagcacgu

SEQ ID NO: 38707 - RNA, 18 nt, Artificial Sequence
  Synthetic oligonucleotide: CBLB-8390
gcaggugggcgugagcgu

SEQ ID NO: 38708 - RNA, 19 nt, Artificial Sequence
  Synthetic oligonucleotide: CBLB-8391
ggcaggugggcgugagcgu

SEQ ID NO: 38709 - RNA, 20 nt, Artificial Sequence
  Synthetic oligonucleotide: CBLB-7456
uggcaggugggcgugagcgu

SEQ ID NO: 38710 - RNA, 21 nt, Artificial Sequence
  Synthetic oligonucleotide: CBLB-8392
guggcaggugggcgugagcgu

SEQ ID NO: 38711 - RNA, 22 nt, Artificial Sequence
  Synthetic oligonucleotide: CBLB-8393
gguggcaggugggcgugagcgu

SEQ ID NO: 38712 - RNA, 23 nt, Artificial Sequence
  Synthetic oligonucleotide: CBLB-8394
ggguggcaggugggcgugagcgu

SEQ ID NO: 38713 - RNA, 24 nt, Artificial Sequence
  Synthetic oligonucleotide: CBLB-8395
gggguggcaggugggcgugagcgu

SEQ ID NO: 38714 - RNA, 18 nt, Artificial Sequence
  Synthetic oligonucleotide: CBLB-8396
cucuuuugcuguuaguuu

SEQ ID NO: 38715 - RNA, 19 nt, Artificial Sequence
  Synthetic oligonucleotide: CBLB-8397
ucucuuuugcuguuaguuu

SEQ ID NO: 38716 - RNA, 20 nt, Artificial Sequence
  Synthetic oligonucleotide: CBLB-8398
uucucuuuugcuguuaguuu

SEQ ID NO: 38717 - RNA, 21 nt, Artificial Sequence
  Synthetic oligonucleotide: CBLB-8399
uuucucuuuugcuguuaguuu

SEQ ID NO: 38718 - RNA, 22 nt, Artificial Sequence
  Synthetic oligonucleotide: CBLB-8400
guuucucuuuugcuguuaguuu

SEQ ID NO: 38719 - RNA, 23 nt, Artificial Sequence
  Synthetic oligonucleotide: CBLB-8401
aguuucucuuuugcuguuaguuu

SEQ ID NO: 38720 - RNA, 24 nt, Artificial Sequence
  Synthetic oligonucleotide: CBLB-8402
gaguuucucuuuugcuguuaguuu

SEQ ID NO: 38721 - RNA, 18 nt, Artificial Sequence
  Synthetic oligonucleotide: CBLB-8403
cuaaaacuaacagcaaaa

SEQ ID NO: 38722 - RNA, 19 nt, Artificial Sequence
  Synthetic oligonucleotide: CBLB-8404
ucuaaaacuaacagcaaaa

SEQ ID NO: 38723 - RNA, 20 nt, Artificial Sequence
  Synthetic oligonucleotide: CBLB-8405
cucuaaaacuaacagcaaaa

SEQ ID NO: 38724 - RNA, 21 nt, Artificial Sequence
  Synthetic oligonucleotide: CBLB-8406
ccucuaaaacuaacagcaaaa

SEQ ID NO: 38725 - RNA, 22 nt, Artificial Sequence
  Synthetic oligonucleotide: CBLB-8407
cccucuaaaacuaacagcaaaa

SEQ ID NO: 38726 - RNA, 23 nt, Artificial Sequence
  Synthetic oligonucleotide: CBLB-8408
ucccucuaaaacuaacagcaaaa

SEQ ID NO: 38727 - RNA, 24 nt, Artificial Sequence
  Synthetic oligonucleotide: CBLB-8409
aucccucuaaaacuaacagcaaaa

SEQ ID NO: 38728 - RNA, 18 nt, Artificial Sequence
  Synthetic oligonucleotide: CBLB-8410
cucuaaaacuaacagcaa

SEQ ID NO: 38729 - RNA, 19 nt, Artificial Sequence
  Synthetic oligonucleotide: CBLB-8411
ccucuaaaacuaacagcaa

SEQ ID NO: 38730 - RNA, 20 nt, Artificial Sequence
  Synthetic oligonucleotide: CBLB-8412
cccucuaaaacuaacagcaa

SEQ ID NO: 38731 - RNA, 21 nt, Artificial Sequence
  Synthetic oligonucleotide: CBLB-8413
ucccucuaaaacuaacagcaa

SEQ ID NO: 38732 - RNA, 22 nt, Artificial Sequence
  Synthetic oligonucleotide: CBLB-8414
aucccucuaaaacuaacagcaa

SEQ ID NO: 38733 - RNA, 23 nt, Artificial Sequence
  Synthetic oligonucleotide: CBLB-8415
aaucccucuaaaacuaacagcaa

SEQ ID NO: 38734 - RNA, 24 nt, Artificial Sequence
  Synthetic oligonucleotide: CBLB-8416
caaucccucuaaaacuaacagcaa

SEQ ID NO: 38735 - RNA, 18 nt, Artificial Sequence
  Synthetic oligonucleotide: CBLB-8417
uuuuaagagcacaaagaa

SEQ ID NO: 38736 - RNA, 19 nt, Artificial Sequence
  Synthetic oligonucleotide: CBLB-8418
uuuuuaagagcacaaagaa

SEQ ID NO: 38737 - RNA, 20 nt, Artificial Sequence
  Synthetic oligonucleotide: CBLB-7373
cuuuuuaagagcacaaagaa

SEQ ID NO: 38738 - RNA, 21 nt, Artificial Sequence
  Synthetic oligonucleotide: CBLB-8419
ccuuuuuaagagcacaaagaa

SEQ ID NO: 38739 - RNA, 22 nt, Artificial Sequence
  Synthetic oligonucleotide: CBLB-8420
gccuuuuuaagagcacaaagaa

SEQ ID NO: 38740 - RNA, 23 nt, Artificial Sequence
  Synthetic oligonucleotide: CBLB-8421
ggccuuuuuaagagcacaaagaa

SEQ ID NO: 38741 - RNA, 24 nt, Artificial Sequence
  Synthetic oligonucleotide: CBLB-8422
cggccuuuuuaagagcacaaagaa

SEQ ID NO: 38742 - RNA, 18 nt, Artificial Sequence
  Synthetic oligonucleotide: CBLB-8423
aaaagacuaggaagguaa

SEQ ID NO: 38743 - RNA, 19 nt, Artificial Sequence
  Synthetic oligonucleotide: CBLB-8424
caaaagacuaggaagguaa

SEQ ID NO: 38744 - RNA, 20 nt, Artificial Sequence
  Synthetic oligonucleotide: CBLB-8425
acaaaagacuaggaagguaa

SEQ ID NO: 38745 - RNA, 21 nt, Artificial Sequence
  Synthetic oligonucleotide: CBLB-8426
aacaaaagacuaggaagguaa

SEQ ID NO: 38746 - RNA, 22 nt, Artificial Sequence
  Synthetic oligonucleotide: CBLB-8427
aaacaaaagacuaggaagguaa

SEQ ID NO: 38747 - RNA, 23 nt, Artificial Sequence
  Synthetic oligonucleotide: CBLB-8428
gaaacaaaagacuaggaagguaa

SEQ ID NO: 38748 - RNA, 24 nt, Artificial Sequence
  Synthetic oligonucleotide: CBLB-8429
ugaaacaaaagacuaggaagguaa

SEQ ID NO: 38749 - RNA, 18 nt, Artificial Sequence
  Synthetic oligonucleotide: CBLB-8430
ggccuuuuuaagagcaca

SEQ ID NO: 38750 - RNA, 19 nt, Artificial Sequence
  Synthetic oligonucleotide: CBLB-8431
cggccuuuuuaagagcaca

SEQ ID NO: 38751 - RNA, 20 nt, Artificial Sequence
  Synthetic oligonucleotide: CBLB-8432
ucggccuuuuuaagagcaca

SEQ ID NO: 38752 - RNA, 21 nt, Artificial Sequence
  Synthetic oligonucleotide: CBLB-8433
gucggccuuuuuaagagcaca

SEQ ID NO: 38753 - RNA, 22 nt, Artificial Sequence
  Synthetic oligonucleotide: CBLB-8434
ugucggccuuuuuaagagcaca

SEQ ID NO: 38754 - RNA, 23 nt, Artificial Sequence
  Synthetic oligonucleotide: CBLB-8435
augucggccuuuuuaagagcaca

SEQ ID NO: 38755 - RNA, 24 nt, Artificial Sequence
  Synthetic oligonucleotide: CBLB-8436
gaugucggccuuuuuaagagcaca

SEQ ID NO: 38756 - RNA, 18 nt, Artificial Sequence
  Synthetic oligonucleotide: CBLB-8437
gcacaaagaagggagcca

SEQ ID NO: 38757 - RNA, 19 nt, Artificial Sequence
  Synthetic oligonucleotide: CBLB-8438
agcacaaagaagggagcca

SEQ ID NO: 38758 - RNA, 20 nt, Artificial Sequence
  Synthetic oligonucleotide: CBLB-8439
gagcacaaagaagggagcca

SEQ ID NO: 38759 - RNA, 21 nt, Artificial Sequence
  Synthetic oligonucleotide: CBLB-8440
agagcacaaagaagggagcca

SEQ ID NO: 38760 - RNA, 22 nt, Artificial Sequence
  Synthetic oligonucleotide: CBLB-8441
aagagcacaaagaagggagcca

SEQ ID NO: 38761 - RNA, 23 nt, Artificial Sequence
  Synthetic oligonucleotide: CBLB-8442
uaagagcacaaagaagggagcca

SEQ ID NO: 38762 - RNA, 24 nt, Artificial Sequence
  Synthetic oligonucleotide: CBLB-8443
uuaagagcacaaagaagggagcca

SEQ ID NO: 38763 - RNA, 18 nt, Artificial Sequence
  Synthetic oligonucleotide: CBLB-8444
uuuuuaagagcacaaaga

SEQ ID NO: 38764 - RNA, 19 nt, Artificial Sequence
  Synthetic oligonucleotide: CBLB-8445
cuuuuuaagagcacaaaga

SEQ ID NO: 38765 - RNA, 20 nt, Artificial Sequence
  Synthetic oligonucleotide: CBLB-7384
ccuuuuuaagagcacaaaga

SEQ ID NO: 38766 - RNA, 21 nt, Artificial Sequence
  Synthetic oligonucleotide: CBLB-8446
gccuuuuuaagagcacaaaga

SEQ ID NO: 38767 - RNA, 22 nt, Artificial Sequence
  Synthetic oligonucleotide: CBLB-8447
ggccuuuuuaagagcacaaaga

SEQ ID NO: 38768 - RNA, 23 nt, Artificial Sequence
  Synthetic oligonucleotide: CBLB-8448
cggccuuuuuaagagcacaaaga

SEQ ID NO: 38769 - RNA, 24 nt, Artificial Sequence
  Synthetic oligonucleotide: CBLB-8449
ucggccuuuuuaagagcacaaaga

SEQ ID NO: 38770 - RNA, 18 nt, Artificial Sequence
  Synthetic oligonucleotide: CBLB-8450
aaagaagggagccacaga

SEQ ID NO: 38771 - RNA, 19 nt, Artificial Sequence
  Synthetic oligonucleotide: CBLB-8451
caaagaagggagccacaga

SEQ ID NO: 38772 - RNA, 20 nt, Artificial Sequence
  Synthetic oligonucleotide: CBLB-8452
acaaagaagggagccacaga

SEQ ID NO: 38773 - RNA, 21 nt, Artificial Sequence
  Synthetic oligonucleotide: CBLB-8453
cacaaagaagggagccacaga

SEQ ID NO: 38774 - RNA, 22 nt, Artificial Sequence
  Synthetic oligonucleotide: CBLB-8454
gcacaaagaagggagccacaga

SEQ ID NO: 38775 - RNA, 23 nt, Artificial Sequence
  Synthetic oligonucleotide: CBLB-8455
agcacaaagaagggagccacaga

SEQ ID NO: 38776 - RNA, 24 nt, Artificial Sequence
  Synthetic oligonucleotide: CBLB-8456
gagcacaaagaagggagccacaga

SEQ ID NO: 38777 - RNA, 18 nt, Artificial Sequence
  Synthetic oligonucleotide: CBLB-8457
gcguuggacccgcccaga

SEQ ID NO: 38778 - RNA, 19 nt, Artificial Sequence
  Synthetic oligonucleotide: CBLB-8458
agcguuggacccgcccaga

SEQ ID NO: 38779 - RNA, 20 nt, Artificial Sequence
  Synthetic oligonucleotide: CBLB-8459
cagcguuggacccgcccaga

SEQ ID NO: 38780 - RNA, 21 nt, Artificial Sequence
  Synthetic oligonucleotide: CBLB-8460
ccagcguuggacccgcccaga

SEQ ID NO: 38781 - RNA, 22 nt, Artificial Sequence
  Synthetic oligonucleotide: CBLB-8461
uccagcguuggacccgcccaga

SEQ ID NO: 38782 - RNA, 23 nt, Artificial Sequence
  Synthetic oligonucleotide: CBLB-8462
cuccagcguuggacccgcccaga

SEQ ID NO: 38783 - RNA, 24 nt, Artificial Sequence
  Synthetic oligonucleotide: CBLB-8463
ucuccagcguuggacccgcccaga

SEQ ID NO: 38784 - RNA, 18 nt, Artificial Sequence
  Synthetic oligonucleotide: CBLB-8464
cuuucugacgugcugcga

SEQ ID NO: 38785 - RNA, 19 nt, Artificial Sequence
  Synthetic oligonucleotide: CBLB-8465
ccuuucugacgugcugcga

SEQ ID NO: 38786 - RNA, 20 nt, Artificial Sequence
  Synthetic oligonucleotide: CBLB-8466
uccuuucugacgugcugcga

SEQ ID NO: 38787 - RNA, 21 nt, Artificial Sequence
  Synthetic oligonucleotide: CBLB-8467
uuccuuucugacgugcugcga

SEQ ID NO: 38788 - RNA, 22 nt, Artificial Sequence
  Synthetic oligonucleotide: CBLB-8468
auuccuuucugacgugcugcga

SEQ ID NO: 38789 - RNA, 23 nt, Artificial Sequence
  Synthetic oligonucleotide: CBLB-8469
aauuccuuucugacgugcugcga

SEQ ID NO: 38790 - RNA, 24 nt, Artificial Sequence
  Synthetic oligonucleotide: CBLB-8470
caauuccuuucugacgugcugcga

SEQ ID NO: 38791 - RNA, 18 nt, Artificial Sequence
  Synthetic oligonucleotide: CBLB-8471
agguuguuuuuaaaugga

SEQ ID NO: 38792 - RNA, 19 nt, Artificial Sequence
  Synthetic oligonucleotide: CBLB-8472
aagguuguuuuuaaaugga

SEQ ID NO: 38793 - RNA, 20 nt, Artificial Sequence
  Synthetic oligonucleotide: CBLB-8473
uaagguuguuuuuaaaugga

SEQ ID NO: 38794 - RNA, 21 nt, Artificial Sequence
  Synthetic oligonucleotide: CBLB-8474
guaagguuguuuuuaaaugga

SEQ ID NO: 38795 - RNA, 22 nt, Artificial Sequence
  Synthetic oligonucleotide: CBLB-8475
aguaagguuguuuuuaaaugga

SEQ ID NO: 38796 - RNA, 23 nt, Artificial Sequence
  Synthetic oligonucleotide: CBLB-8476
caguaagguuguuuuuaaaugga

SEQ ID NO: 38797 - RNA, 24 nt, Artificial Sequence
  Synthetic oligonucleotide: CBLB-8477
acaguaagguuguuuuuaaaugga

SEQ ID NO: 38798 - RNA, 18 nt, Artificial Sequence
  Synthetic oligonucleotide: CBLB-8478
uacuguggaggacgugga

SEQ ID NO: 38799 - RNA, 19 nt, Artificial Sequence
  Synthetic oligonucleotide: CBLB-8479
guacuguggaggacgugga

SEQ ID NO: 38800 - RNA, 20 nt, Artificial Sequence
  Synthetic oligonucleotide: CBLB-7394
uguacuguggaggacgugga

SEQ ID NO: 38801 - RNA, 21 nt, Artificial Sequence
  Synthetic oligonucleotide: CBLB-8480
guguacuguggaggacgugga

SEQ ID NO: 38802 - RNA, 22 nt, Artificial Sequence
  Synthetic oligonucleotide: CBLB-8481
uguguacuguggaggacgugga

SEQ ID NO: 38803 - RNA, 23 nt, Artificial Sequence
  Synthetic oligonucleotide: CBLB-8482
uuguguacuguggaggacgugga

SEQ ID NO: 38804 - RNA, 24 nt, Artificial Sequence
  Synthetic oligonucleotide: CBLB-8483
auuguguacuguggaggacgugga

SEQ ID NO: 38805 - RNA, 18 nt, Artificial Sequence
  Synthetic oligonucleotide: CBLB-8484
aaggguuuggcagcccua

SEQ ID NO: 38806 - RNA, 19 nt, Artificial Sequence
  Synthetic oligonucleotide: CBLB-8485
gaaggguuuggcagcccua

SEQ ID NO: 38807 - RNA, 20 nt, Artificial Sequence
  Synthetic oligonucleotide: CBLB-7396
agaaggguuuggcagcccua

SEQ ID NO: 38808 - RNA, 21 nt, Artificial Sequence
  Synthetic oligonucleotide: CBLB-8486
uagaaggguuuggcagcccua

SEQ ID NO: 38809 - RNA, 22 nt, Artificial Sequence
  Synthetic oligonucleotide: CBLB-8487
guagaaggguuuggcagcccua

SEQ ID NO: 38810 - RNA, 23 nt, Artificial Sequence
  Synthetic oligonucleotide: CBLB-8488
gguagaaggguuuggcagcccua

SEQ ID NO: 38811 - RNA, 24 nt, Artificial Sequence
  Synthetic oligonucleotide: CBLB-8489
ggguagaaggguuuggcagcccua

SEQ ID NO: 38812 - RNA, 18 nt, Artificial Sequence
  Synthetic oligonucleotide: CBLB-8490
uaacagcaaaagagaaac

SEQ ID NO: 38813 - RNA, 19 nt, Artificial Sequence
  Synthetic oligonucleotide: CBLB-8491
cuaacagcaaaagagaaac

SEQ ID NO: 38814 - RNA, 20 nt, Artificial Sequence
  Synthetic oligonucleotide: CBLB-8492
acuaacagcaaaagagaaac

SEQ ID NO: 38815 - RNA, 21 nt, Artificial Sequence
  Synthetic oligonucleotide: CBLB-8493
aacuaacagcaaaagagaaac

SEQ ID NO: 38816 - RNA, 22 nt, Artificial Sequence
  Synthetic oligonucleotide: CBLB-8494
aaacuaacagcaaaagagaaac

SEQ ID NO: 38817 - RNA, 23 nt, Artificial Sequence
  Synthetic oligonucleotide: CBLB-8495
aaaacuaacagcaaaagagaaac

SEQ ID NO: 38818 - RNA, 24 nt, Artificial Sequence
  Synthetic oligonucleotide: CBLB-8496
uaaaacuaacagcaaaagagaaac

SEQ ID NO: 38819 - RNA, 18 nt, Artificial Sequence
  Synthetic oligonucleotide: CBLB-8497
aaagagaaacucggaaac

SEQ ID NO: 38820 - RNA, 19 nt, Artificial Sequence
  Synthetic oligonucleotide: CBLB-8498
aaaagagaaacucggaaac

SEQ ID NO: 38821 - RNA, 20 nt, Artificial Sequence
  Synthetic oligonucleotide: CBLB-8499
caaaagagaaacucggaaac

SEQ ID NO: 38822 - RNA, 21 nt, Artificial Sequence
  Synthetic oligonucleotide: CBLB-8500
gcaaaagagaaacucggaaac

SEQ ID NO: 38823 - RNA, 22 nt, Artificial Sequence
  Synthetic oligonucleotide: CBLB-8501
agcaaaagagaaacucggaaac

SEQ ID NO: 38824 - RNA, 23 nt, Artificial Sequence
  Synthetic oligonucleotide: CBLB-8502
cagcaaaagagaaacucggaaac

SEQ ID NO: 38825 - RNA, 24 nt, Artificial Sequence
  Synthetic oligonucleotide: CBLB-8503
acagcaaaagagaaacucggaaac

SEQ ID NO: 38826 - RNA, 18 nt, Artificial Sequence
  Synthetic oligonucleotide: CBLB-8504
cucuuuuugauagccaac

SEQ ID NO: 38827 - RNA, 19 nt, Artificial Sequence
  Synthetic oligonucleotide: CBLB-8505
gcucuuuuugauagccaac

SEQ ID NO: 38828 - RNA, 20 nt, Artificial Sequence
  Synthetic oligonucleotide: CBLB-8506
ugcucuuuuugauagccaac

SEQ ID NO: 38829 - RNA, 21 nt, Artificial Sequence
  Synthetic oligonucleotide: CBLB-8507
uugcucuuuuugauagccaac

SEQ ID NO: 38830 - RNA, 22 nt, Artificial Sequence
  Synthetic oligonucleotide: CBLB-8508
guugcucuuuuugauagccaac

SEQ ID NO: 38831 - RNA, 23 nt, Artificial Sequence
  Synthetic oligonucleotide: CBLB-8509
uguugcucuuuuugauagccaac

SEQ ID NO: 38832 - RNA, 24 nt, Artificial Sequence
  Synthetic oligonucleotide: CBLB-8510
cuguugcucuuuuugauagccaac

SEQ ID NO: 38833 - RNA, 18 nt, Artificial Sequence
  Synthetic oligonucleotide: CBLB-8511
ugcuaugaaacaaaagac

SEQ ID NO: 38834 - RNA, 19 nt, Artificial Sequence
  Synthetic oligonucleotide: CBLB-8512
uugcuaugaaacaaaagac

SEQ ID NO: 38835 - RNA, 20 nt, Artificial Sequence
  Synthetic oligonucleotide: CBLB-8513
guugcuaugaaacaaaagac

SEQ ID NO: 38836 - RNA, 21 nt, Artificial Sequence
  Synthetic oligonucleotide: CBLB-8514
uguugcuaugaaacaaaagac

SEQ ID NO: 38837 - RNA, 22 nt, Artificial Sequence
  Synthetic oligonucleotide: CBLB-8515
cuguugcuaugaaacaaaagac

SEQ ID NO: 38838 - RNA, 23 nt, Artificial Sequence
  Synthetic oligonucleotide: CBLB-8516
ucuguugcuaugaaacaaaagac

SEQ ID NO: 38839 - RNA, 24 nt, Artificial Sequence
  Synthetic oligonucleotide: CBLB-8517
cucuguugcuaugaaacaaaagac

SEQ ID NO: 38840 - RNA, 18 nt, Artificial Sequence
  Synthetic oligonucleotide: CBLB-8518
uuguguacuguggaggac

SEQ ID NO: 38841 - RNA, 19 nt, Artificial Sequence
  Synthetic oligonucleotide: CBLB-8519
auuguguacuguggaggac

SEQ ID NO: 38842 - RNA, 20 nt, Artificial Sequence
  Synthetic oligonucleotide: CBLB-8520
cauuguguacuguggaggac

SEQ ID NO: 38843 - RNA, 21 nt, Artificial Sequence
  Synthetic oligonucleotide: CBLB-8521
ccauuguguacuguggaggac

SEQ ID NO: 38844 - RNA, 22 nt, Artificial Sequence
  Synthetic oligonucleotide: CBLB-8522
gccauuguguacuguggaggac

SEQ ID NO: 38845 - RNA, 23 nt, Artificial Sequence
  Synthetic oligonucleotide: CBLB-8523
ggccauuguguacuguggaggac

SEQ ID NO: 38846 - RNA, 24 nt, Artificial Sequence
  Synthetic oligonucleotide: CBLB-8524
gggccauuguguacuguggaggac

SEQ ID NO: 38847 - RNA, 18 nt, Artificial Sequence
  Synthetic oligonucleotide: CBLB-8525
agaaggguuuggcagccc

SEQ ID NO: 38848 - RNA, 19 nt, Artificial Sequence
  Synthetic oligonucleotide: CBLB-8526
uagaaggguuuggcagccc

SEQ ID NO: 38849 - RNA, 20 nt, Artificial Sequence
  Synthetic oligonucleotide: CBLB-8527
guagaaggguuuggcagccc

SEQ ID NO: 38850 - RNA, 21 nt, Artificial Sequence
  Synthetic oligonucleotide: CBLB-8528
gguagaaggguuuggcagccc

SEQ ID NO: 38851 - RNA, 22 nt, Artificial Sequence
  Synthetic oligonucleotide: CBLB-8529
ggguagaaggguuuggcagccc

SEQ ID NO: 38852 - RNA, 23 nt, Artificial Sequence
  Synthetic oligonucleotide: CBLB-8530
uggguagaaggguuuggcagccc

SEQ ID NO: 38853 - RNA, 24 nt, Artificial Sequence
  Synthetic oligonucleotide: CBLB-8531
cuggguagaaggguuuggcagccc

SEQ ID NO: 38854 - RNA, 18 nt, Artificial Sequence
  Synthetic oligonucleotide: CBLB-8532
guuuccacuuucguuccc

SEQ ID NO: 38855 - RNA, 19 nt, Artificial Sequence
  Synthetic oligonucleotide: CBLB-8533
cguuuccacuuucguuccc

SEQ ID NO: 38856 - RNA, 20 nt, Artificial Sequence
  Synthetic oligonucleotide: CBLB-7212
ccguuuccacuuucguuccc

SEQ ID NO: 38857 - RNA, 21 nt, Artificial Sequence
  Synthetic oligonucleotide: CBLB-8534
cccguuuccacuuucguuccc

SEQ ID NO: 38858 - RNA, 22 nt, Artificial Sequence
  Synthetic oligonucleotide: CBLB-8535
ucccguuuccacuuucguuccc

SEQ ID NO: 38859 - RNA, 23 nt, Artificial Sequence
  Synthetic oligonucleotide: CBLB-8536
uucccguuuccacuuucguuccc

SEQ ID NO: 38860 - RNA, 24 nt, Artificial Sequence
  Synthetic oligonucleotide: CBLB-8537
uuucccguuuccacuuucguuccc

SEQ ID NO: 38861 - RNA, 18 nt, Artificial Sequence
  Synthetic oligonucleotide: CBLB-8538
uccagcguuggacccgcc

SEQ ID NO: 38862 - RNA, 19 nt, Artificial Sequence
  Synthetic oligonucleotide: CBLB-8539
cuccagcguuggacccgcc

SEQ ID NO: 38863 - RNA, 20 nt, Artificial Sequence
  Synthetic oligonucleotide: CBLB-8540
ucuccagcguuggacccgcc

SEQ ID NO: 38864 - RNA, 21 nt, Artificial Sequence
  Synthetic oligonucleotide: CBLB-8541
uucuccagcguuggacccgcc

SEQ ID NO: 38865 - RNA, 22 nt, Artificial Sequence
  Synthetic oligonucleotide: CBLB-8542
uuucuccagcguuggacccgcc

SEQ ID NO: 38866 - RNA, 23 nt, Artificial Sequence
  Synthetic oligonucleotide: CBLB-8543
auuucuccagcguuggacccgcc

SEQ ID NO: 38867 - RNA, 24 nt, Artificial Sequence
  Synthetic oligonucleotide: CBLB-8544
aauuucuccagcguuggacccgcc

SEQ ID NO: 38868 - RNA, 18 nt, Artificial Sequence
  Synthetic oligonucleotide: CBLB-8545
cguuuccacuuucguucc

SEQ ID NO: 38869 - RNA, 19 nt, Artificial Sequence
  Synthetic oligonucleotide: CBLB-8546
ccguuuccacuuucguucc

SEQ ID NO: 38870 - RNA, 20 nt, Artificial Sequence
  Synthetic oligonucleotide: CBLB-7410
cccguuuccacuuucguucc

SEQ ID NO: 38871 - RNA, 21 nt, Artificial Sequence
  Synthetic oligonucleotide: CBLB-8547
ucccguuuccacuuucguucc

SEQ ID NO: 38872 - RNA, 22 nt, Artificial Sequence
  Synthetic oligonucleotide: CBLB-8548
uucccguuuccacuuucguucc

SEQ ID NO: 38873 - RNA, 23 nt, Artificial Sequence
  Synthetic oligonucleotide: CBLB-8549
uuucccguuuccacuuucguucc

SEQ ID NO: 38874 - RNA, 24 nt, Artificial Sequence
  Synthetic oligonucleotide: CBLB-8550
cuuucccguuuccacuuucguucc

SEQ ID NO: 38875 - RNA, 18 nt, Artificial Sequence
  Synthetic oligonucleotide: CBLB-8551
uaggaagguaagcgaagc

SEQ ID NO: 38876 - RNA, 19 nt, Artificial Sequence
  Synthetic oligonucleotide: CBLB-8552
cuaggaagguaagcgaagc

SEQ ID NO: 38877 - RNA, 20 nt, Artificial Sequence
  Synthetic oligonucleotide: CBLB-7215
acuaggaagguaagcgaagc

SEQ ID NO: 38878 - RNA, 21 nt, Artificial Sequence
  Synthetic oligonucleotide: CBLB-8553
gacuaggaagguaagcgaagc

SEQ ID NO: 38879 - RNA, 22 nt, Artificial Sequence
  Synthetic oligonucleotide: CBLB-8554
agacuaggaagguaagcgaagc

SEQ ID NO: 38880 - RNA, 23 nt, Artificial Sequence
  Synthetic oligonucleotide: CBLB-8555
aagacuaggaagguaagcgaagc

SEQ ID NO: 38881 - RNA, 24 nt, Artificial Sequence
  Synthetic oligonucleotide: CBLB-8556
aaagacuaggaagguaagcgaagc

SEQ ID NO: 38882 - RNA, 18 nt, Artificial Sequence
  Synthetic oligonucleotide: CBLB-8557
cguggacggggcggcagc

SEQ ID NO: 38883 - RNA, 19 nt, Artificial Sequence
  Synthetic oligonucleotide: CBLB-8558
acguggacggggcggcagc

SEQ ID NO: 38884 - RNA, 20 nt, Artificial Sequence
  Synthetic oligonucleotide: CBLB-8559
gacguggacggggcggcagc

SEQ ID NO: 38885 - RNA, 21 nt, Artificial Sequence
  Synthetic oligonucleotide: CBLB-8560
ggacguggacggggcggcagc

SEQ ID NO: 38886 - RNA, 22 nt, Artificial Sequence
  Synthetic oligonucleotide: CBLB-8561
aggacguggacggggcggcagc

SEQ ID NO: 38887 - RNA, 23 nt, Artificial Sequence
  Synthetic oligonucleotide: CBLB-8562
gaggacguggacggggcggcagc

SEQ ID NO: 38888 - RNA, 24 nt, Artificial Sequence
  Synthetic oligonucleotide: CBLB-8563
ggaggacguggacggggcggcagc

SEQ ID NO: 38889 - RNA, 18 nt, Artificial Sequence
  Synthetic oligonucleotide: CBLB-8564
uggacggggcggcagcgc

SEQ ID NO: 38890 - RNA, 19 nt, Artificial Sequence
  Synthetic oligonucleotide: CBLB-8565
guggacggggcggcagcgc

SEQ ID NO: 38891 - RNA, 20 nt, Artificial Sequence
  Synthetic oligonucleotide: CBLB-8566
cguggacggggcggcagcgc

SEQ ID NO: 38892 - RNA, 21 nt, Artificial Sequence
  Synthetic oligonucleotide: CBLB-8567
acguggacggggcggcagcgc

SEQ ID NO: 38893 - RNA, 22 nt, Artificial Sequence
  Synthetic oligonucleotide: CBLB-8568
gacguggacggggcggcagcgc

SEQ ID NO: 38894 - RNA, 23 nt, Artificial Sequence
  Synthetic oligonucleotide: CBLB-8569
ggacguggacggggcggcagcgc

SEQ ID NO: 38895 - RNA, 24 nt, Artificial Sequence
  Synthetic oligonucleotide: CBLB-8570
aggacguggacggggcggcagcgc

SEQ ID NO: 38896 - RNA, 18 nt, Artificial Sequence
  Synthetic oligonucleotide: CBLB-8571
ugcgagcgggccuuccuc

SEQ ID NO: 38897 - RNA, 19 nt, Artificial Sequence
  Synthetic oligonucleotide: CBLB-8572
cugcgagcgggccuuccuc

SEQ ID NO: 38898 - RNA, 20 nt, Artificial Sequence
  Synthetic oligonucleotide: CBLB-7419
gcugcgagcgggccuuccuc

SEQ ID NO: 38899 - RNA, 21 nt, Artificial Sequence
  Synthetic oligonucleotide: CBLB-8573
ugcugcgagcgggccuuccuc

SEQ ID NO: 38900 - RNA, 22 nt, Artificial Sequence
  Synthetic oligonucleotide: CBLB-8574
gugcugcgagcgggccuuccuc

SEQ ID NO: 38901 - RNA, 23 nt, Artificial Sequence
  Synthetic oligonucleotide: CBLB-8575
cgugcugcgagcgggccuuccuc

SEQ ID NO: 38902 - RNA, 24 nt, Artificial Sequence
  Synthetic oligonucleotide: CBLB-8576
acgugcugcgagcgggccuuccuc

SEQ ID NO: 38903 - RNA, 18 nt, Artificial Sequence
  Synthetic oligonucleotide: CBLB-8577
ccguuuccacuuucguuc

SEQ ID NO: 38904 - RNA, 19 nt, Artificial Sequence
  Synthetic oligonucleotide: CBLB-8578
cccguuuccacuuucguuc

SEQ ID NO: 38905 - RNA, 20 nt, Artificial Sequence
  Synthetic oligonucleotide: CBLB-8579
ucccguuuccacuuucguuc

SEQ ID NO: 38906 - RNA, 21 nt, Artificial Sequence
  Synthetic oligonucleotide: CBLB-8580
uucccguuuccacuuucguuc

SEQ ID NO: 38907 - RNA, 22 nt, Artificial Sequence
  Synthetic oligonucleotide: CBLB-8581
uuucccguuuccacuuucguuc

SEQ ID NO: 38908 - RNA, 23 nt, Artificial Sequence
  Synthetic oligonucleotide: CBLB-8582
cuuucccguuuccacuuucguuc

SEQ ID NO: 38909 - RNA, 24 nt, Artificial Sequence
  Synthetic oligonucleotide: CBLB-8583
ccuuucccguuuccacuuucguuc

SEQ ID NO: 38910 - RNA, 18 nt, Artificial Sequence
  Synthetic oligonucleotide: CBLB-8584
cuuuuuaagagcacaaag

SEQ ID NO: 38911 - RNA, 19 nt, Artificial Sequence
  Synthetic oligonucleotide: CBLB-8585
ccuuuuuaagagcacaaag

SEQ ID NO: 38912 - RNA, 20 nt, Artificial Sequence
  Synthetic oligonucleotide: CBLB-8586
gccuuuuuaagagcacaaag

SEQ ID NO: 38913 - RNA, 21 nt, Artificial Sequence
  Synthetic oligonucleotide: CBLB-8587
ggccuuuuuaagagcacaaag

SEQ ID NO: 38914 - RNA, 22 nt, Artificial Sequence
  Synthetic oligonucleotide: CBLB-8588
cggccuuuuuaagagcacaaag

SEQ ID NO: 38915 - RNA, 23 nt, Artificial Sequence
  Synthetic oligonucleotide: CBLB-8589
ucggccuuuuuaagagcacaaag

SEQ ID NO: 38916 - RNA, 24 nt, Artificial Sequence
  Synthetic oligonucleotide: CBLB-8590
gucggccuuuuuaagagcacaaag

SEQ ID NO: 38917 - RNA, 18 nt, Artificial Sequence
  Synthetic oligonucleotide: CBLB-8591
cuaggaagguaagcgaag

SEQ ID NO: 38918 - RNA, 19 nt, Artificial Sequence
  Synthetic oligonucleotide: CBLB-8592
acuaggaagguaagcgaag

SEQ ID NO: 38919 - RNA, 20 nt, Artificial Sequence
  Synthetic oligonucleotide: CBLB-8593
gacuaggaagguaagcgaag

SEQ ID NO: 38920 - RNA, 21 nt, Artificial Sequence
  Synthetic oligonucleotide: CBLB-8594
agacuaggaagguaagcgaag

SEQ ID NO: 38921 - RNA, 22 nt, Artificial Sequence
  Synthetic oligonucleotide: CBLB-8595
aagacuaggaagguaagcgaag

SEQ ID NO: 38922 - RNA, 23 nt, Artificial Sequence
  Synthetic oligonucleotide: CBLB-8596
aaagacuaggaagguaagcgaag

SEQ ID NO: 38923 - RNA, 24 nt, Artificial Sequence
  Synthetic oligonucleotide: CBLB-8597
aaaagacuaggaagguaagcgaag

SEQ ID NO: 38924 - RNA, 18 nt, Artificial Sequence
  Synthetic oligonucleotide: CBLB-8598
cguuggacccgcccagag

SEQ ID NO: 38925 - RNA, 19 nt, Artificial Sequence
  Synthetic oligonucleotide: CBLB-8599
gcguuggacccgcccagag

SEQ ID NO: 38926 - RNA, 20 nt, Artificial Sequence
  Synthetic oligonucleotide: CBLB-7428
agcguuggacccgcccagag

SEQ ID NO: 38927 - RNA, 21 nt, Artificial Sequence
  Synthetic oligonucleotide: CBLB-8600
cagcguuggacccgcccagag

SEQ ID NO: 38928 - RNA, 22 nt, Artificial Sequence
  Synthetic oligonucleotide: CBLB-8601
ccagcguuggacccgcccagag

SEQ ID NO: 38929 - RNA, 23 nt, Artificial Sequence
  Synthetic oligonucleotide: CBLB-8602
uccagcguuggacccgcccagag

SEQ ID NO: 38930 - RNA, 24 nt, Artificial Sequence
  Synthetic oligonucleotide: CBLB-8603
cuccagcguuggacccgcccagag

SEQ ID NO: 38931 - RNA, 18 nt, Artificial Sequence
  Synthetic oligonucleotide: CBLB-8604
acggggcggcagcgcgag

SEQ ID NO: 38932 - RNA, 19 nt, Artificial Sequence
  Synthetic oligonucleotide: CBLB-8605
gacggggcggcagcgcgag

SEQ ID NO: 38933 - RNA, 20 nt, Artificial Sequence
  Synthetic oligonucleotide: CBLB-8606
ggacggggcggcagcgcgag

SEQ ID NO: 38934 - RNA, 21 nt, Artificial Sequence
  Synthetic oligonucleotide: CBLB-8607
uggacggggcggcagcgcgag

SEQ ID NO: 38935 - RNA, 22 nt, Artificial Sequence
  Synthetic oligonucleotide: CBLB-8608
guggacggggcggcagcgcgag

SEQ ID NO: 38936 - RNA, 23 nt, Artificial Sequence
  Synthetic oligonucleotide: CBLB-8609
cguggacggggcggcagcgcgag

SEQ ID NO: 38937 - RNA, 24 nt, Artificial Sequence
  Synthetic oligonucleotide: CBLB-8610
acguggacggggcggcagcgcgag

SEQ ID NO: 38938 - RNA, 18 nt, Artificial Sequence
  Synthetic oligonucleotide: CBLB-8611
uugcuuuggcaugauuag

SEQ ID NO: 38939 - RNA, 19 nt, Artificial Sequence
  Synthetic oligonucleotide: CBLB-8612
auugcuuuggcaugauuag

SEQ ID NO: 38940 - RNA, 20 nt, Artificial Sequence
  Synthetic oligonucleotide: CBLB-8613
uauugcuuuggcaugauuag

SEQ ID NO: 38941 - RNA, 21 nt, Artificial Sequence
  Synthetic oligonucleotide: CBLB-8614
uuauugcuuuggcaugauuag

SEQ ID NO: 38942 - RNA, 22 nt, Artificial Sequence
  Synthetic oligonucleotide: CBLB-8615
uuuauugcuuuggcaugauuag

SEQ ID NO: 38943 - RNA, 23 nt, Artificial Sequence
  Synthetic oligonucleotide: CBLB-8616
uuuuauugcuuuggcaugauuag

SEQ ID NO: 38944 - RNA, 24 nt, Artificial Sequence
  Synthetic oligonucleotide: CBLB-8617
cuuuuauugcuuuggcaugauuag

SEQ ID NO: 38945 - RNA, 18 nt, Artificial Sequence
  Synthetic oligonucleotide: CBLB-8618
agaugaauuucuccagcg

SEQ ID NO: 38946 - RNA, 19 nt, Artificial Sequence
  Synthetic oligonucleotide: CBLB-8619
gagaugaauuucuccagcg

SEQ ID NO: 38947 - RNA, 20 nt, Artificial Sequence
  Synthetic oligonucleotide: CBLB-8620
ggagaugaauuucuccagcg

SEQ ID NO: 38948 - RNA, 21 nt, Artificial Sequence
  Synthetic oligonucleotide: CBLB-8621
gggagaugaauuucuccagcg

SEQ ID NO: 38949 - RNA, 22 nt, Artificial Sequence
  Synthetic oligonucleotide: CBLB-8622
agggagaugaauuucuccagcg

SEQ ID NO: 38950 - RNA, 23 nt, Artificial Sequence
  Synthetic oligonucleotide: CBLB-8623
uagggagaugaauuucuccagcg

SEQ ID NO: 38951 - RNA, 24 nt, Artificial Sequence
  Synthetic oligonucleotide: CBLB-8624
cuagggagaugaauuucuccagcg

SEQ ID NO: 38952 - RNA, 18 nt, Artificial Sequence
  Synthetic oligonucleotide: CBLB-8625
uuggacccgcccagagcg

SEQ ID NO: 38953 - RNA, 19 nt, Artificial Sequence
  Synthetic oligonucleotide: CBLB-8626
guuggacccgcccagagcg

SEQ ID NO: 38954 - RNA, 20 nt, Artificial Sequence
  Synthetic oligonucleotide: CBLB-8627
cguuggacccgcccagagcg

SEQ ID NO: 38955 - RNA, 21 nt, Artificial Sequence
  Synthetic oligonucleotide: CBLB-8628
gcguuggacccgcccagagcg

SEQ ID NO: 38956 - RNA, 22 nt, Artificial Sequence
  Synthetic oligonucleotide: CBLB-8629
agcguuggacccgcccagagcg

SEQ ID NO: 38957 - RNA, 23 nt, Artificial Sequence
  Synthetic oligonucleotide: CBLB-8630
cagcguuggacccgcccagagcg

SEQ ID NO: 38958 - RNA, 24 nt, Artificial Sequence
  Synthetic oligonucleotide: CBLB-8631
ccagcguuggacccgcccagagcg

SEQ ID NO: 38959 - RNA, 18 nt, Artificial Sequence
  Synthetic oligonucleotide: CBLB-8632
ggacggggcggcagcgcg

SEQ ID NO: 38960 - RNA, 19 nt, Artificial Sequence
  Synthetic oligonucleotide: CBLB-8633
uggacggggcggcagcgcg

SEQ ID NO: 38961 - RNA, 20 nt, Artificial Sequence
  Synthetic oligonucleotide: CBLB-7433
guggacggggcggcagcgcg

SEQ ID NO: 38962 - RNA, 21 nt, Artificial Sequence
  Synthetic oligonucleotide: CBLB-8634
cguggacggggcggcagcgcg

SEQ ID NO: 38963 - RNA, 22 nt, Artificial Sequence
  Synthetic oligonucleotide: CBLB-8635
acguggacggggcggcagcgcg

SEQ ID NO: 38964 - RNA, 23 nt, Artificial Sequence
  Synthetic oligonucleotide: CBLB-8636
gacguggacggggcggcagcgcg

SEQ ID NO: 38965 - RNA, 24 nt, Artificial Sequence
  Synthetic oligonucleotide: CBLB-8637
ggacguggacggggcggcagcgcg

SEQ ID NO: 38966 - RNA, 18 nt, Artificial Sequence
  Synthetic oligonucleotide: CBLB-8638
ggcggcagcgcgaggagg

SEQ ID NO: 38967 - RNA, 19 nt, Artificial Sequence
  Synthetic oligonucleotide: CBLB-8639
gggcggcagcgcgaggagg

SEQ ID NO: 38968 - RNA, 20 nt, Artificial Sequence
  Synthetic oligonucleotide: CBLB-8640
ggggcggcagcgcgaggagg

SEQ ID NO: 38969 - RNA, 21 nt, Artificial Sequence
  Synthetic oligonucleotide: CBLB-8641
cggggcggcagcgcgaggagg

SEQ ID NO: 38970 - RNA, 22 nt, Artificial Sequence
  Synthetic oligonucleotide: CBLB-8642
acggggcggcagcgcgaggagg

SEQ ID NO: 38971 - RNA, 23 nt, Artificial Sequence
  Synthetic oligonucleotide: CBLB-8643
gacggggcggcagcgcgaggagg

SEQ ID NO: 38972 - RNA, 24 nt, Artificial Sequence
  Synthetic oligonucleotide: CBLB-8644
ggacggggcggcagcgcgaggagg

SEQ ID NO: 38973 - RNA, 18 nt, Artificial Sequence
  Synthetic oligonucleotide: CBLB-8645
ccuccucagucauuuagg

SEQ ID NO: 38974 - RNA, 19 nt, Artificial Sequence
  Synthetic oligonucleotide: CBLB-8646
uccuccucagucauuuagg

SEQ ID NO: 38975 - RNA, 20 nt, Artificial Sequence
  Synthetic oligonucleotide: CBLB-8647
cuccuccucagucauuuagg

SEQ ID NO: 38976 - RNA, 21 nt, Artificial Sequence
  Synthetic oligonucleotide: CBLB-8648
ucuccuccucagucauuuagg

SEQ ID NO: 38977 - RNA, 22 nt, Artificial Sequence
  Synthetic oligonucleotide: CBLB-8649
gucuccuccucagucauuuagg

SEQ ID NO: 38978 - RNA, 23 nt, Artificial Sequence
  Synthetic oligonucleotide: CBLB-8650
ugucuccuccucagucauuuagg

SEQ ID NO: 38979 - RNA, 24 nt, Artificial Sequence
  Synthetic oligonucleotide: CBLB-8651
cugucuccuccucagucauuuagg

SEQ ID NO: 38980 - RNA, 18 nt, Artificial Sequence
  Synthetic oligonucleotide: CBLB-8652
uuuggcugcuguccuggg

SEQ ID NO: 38981 - RNA, 19 nt, Artificial Sequence
  Synthetic oligonucleotide: CBLB-8653
guuuggcugcuguccuggg

SEQ ID NO: 38982 - RNA, 20 nt, Artificial Sequence
  Synthetic oligonucleotide: CBLB-8654
uguuuggcugcuguccuggg

SEQ ID NO: 38983 - RNA, 21 nt, Artificial Sequence
  Synthetic oligonucleotide: CBLB-8655
cuguuuggcugcuguccuggg

SEQ ID NO: 38984 - RNA, 22 nt, Artificial Sequence
  Synthetic oligonucleotide: CBLB-8656
ccuguuuggcugcuguccuggg

SEQ ID NO: 38985 - RNA, 23 nt, Artificial Sequence
  Synthetic oligonucleotide: CBLB-8657
accuguuuggcugcuguccuggg

SEQ ID NO: 38986 - RNA, 24 nt, Artificial Sequence
  Synthetic oligonucleotide: CBLB-8658
gaccuguuuggcugcuguccuggg

SEQ ID NO: 38987 - RNA, 18 nt, Artificial Sequence
  Synthetic oligonucleotide: CBLB-8659
aagagguaacaaugcugg

SEQ ID NO: 38988 - RNA, 19 nt, Artificial Sequence
  Synthetic oligonucleotide: CBLB-8660
aaagagguaacaaugcugg

SEQ ID NO: 38989 - RNA, 20 nt, Artificial Sequence
  Synthetic oligonucleotide: CBLB-8661
gaaagagguaacaaugcugg

SEQ ID NO: 38990 - RNA, 21 nt, Artificial Sequence
  Synthetic oligonucleotide: CBLB-8662
agaaagagguaacaaugcugg

SEQ ID NO: 38991 - RNA, 22 nt, Artificial Sequence
  Synthetic oligonucleotide: CBLB-8663
cagaaagagguaacaaugcugg

SEQ ID NO: 38992 - RNA, 23 nt, Artificial Sequence
  Synthetic oligonucleotide: CBLB-8664
acagaaagagguaacaaugcugg

SEQ ID NO: 38993 - RNA, 24 nt, Artificial Sequence
  Synthetic oligonucleotide: CBLB-8665
cacagaaagagguaacaaugcugg

SEQ ID NO: 38994 - RNA, 18 nt, Artificial Sequence
  Synthetic oligonucleotide: CBLB-8666
guacuguggaggacgugg

SEQ ID NO: 38995 - RNA, 19 nt, Artificial Sequence
  Synthetic oligonucleotide: CBLB-8667
uguacuguggaggacgugg

SEQ ID NO: 38996 - RNA, 20 nt, Artificial Sequence
  Synthetic oligonucleotide: CBLB-8668
guguacuguggaggacgugg

SEQ ID NO: 38997 - RNA, 21 nt, Artificial Sequence
  Synthetic oligonucleotide: CBLB-8669
uguguacuguggaggacgugg

SEQ ID NO: 38998 - RNA, 22 nt, Artificial Sequence
  Synthetic oligonucleotide: CBLB-8670
uuguguacuguggaggacgugg

SEQ ID NO: 38999 - RNA, 23 nt, Artificial Sequence
  Synthetic oligonucleotide: CBLB-8671
auuguguacuguggaggacgugg

SEQ ID NO: 39000 - RNA, 24 nt, Artificial Sequence
  Synthetic oligonucleotide: CBLB-8672
cauuguguacuguggaggacgugg

SEQ ID NO: 39001 - RNA, 18 nt, Artificial Sequence
  Synthetic oligonucleotide: CBLB-8673
uggggccauuguguacug

SEQ ID NO: 39002 - RNA, 19 nt, Artificial Sequence
  Synthetic oligonucleotide: CBLB-8674
cuggggccauuguguacug

SEQ ID NO: 39003 - RNA, 20 nt, Artificial Sequence
  Synthetic oligonucleotide: CBLB-7234
ucuggggccauuguguacug

SEQ ID NO: 39004 - RNA, 21 nt, Artificial Sequence
  Synthetic oligonucleotide: CBLB-8675
cucuggggccauuguguacug

SEQ ID NO: 39005 - RNA, 22 nt, Artificial Sequence
  Synthetic oligonucleotide: CBLB-8676
ccucuggggccauuguguacug

SEQ ID NO: 39006 - RNA, 23 nt, Artificial Sequence
  Synthetic oligonucleotide: CBLB-8677
uccucuggggccauuguguacug

SEQ ID NO: 39007 - RNA, 24 nt, Artificial Sequence
  Synthetic oligonucleotide: CBLB-8678
uuccucuggggccauuguguacug

SEQ ID NO: 39008 - RNA, 18 nt, Artificial Sequence
  Synthetic oligonucleotide: CBLB-8679
cauuggcugcacccgcug

SEQ ID NO: 39009 - RNA, 19 nt, Artificial Sequence
  Synthetic oligonucleotide: CBLB-8680
ccauuggcugcacccgcug

SEQ ID NO: 39010 - RNA, 20 nt, Artificial Sequence
  Synthetic oligonucleotide: CBLB-8681
uccauuggcugcacccgcug

SEQ ID NO: 39011 - RNA, 21 nt, Artificial Sequence
  Synthetic oligonucleotide: CBLB-8682
guccauuggcugcacccgcug

SEQ ID NO: 39012 - RNA, 22 nt, Artificial Sequence
  Synthetic oligonucleotide: CBLB-8683
cguccauuggcugcacccgcug

SEQ ID NO: 39013 - RNA, 23 nt, Artificial Sequence
  Synthetic oligonucleotide: CBLB-8684
ccguccauuggcugcacccgcug

SEQ ID NO: 39014 - RNA, 24 nt, Artificial Sequence
  Synthetic oligonucleotide: CBLB-8685
cccguccauuggcugcacccgcug

SEQ ID NO: 39015 - RNA, 18 nt, Artificial Sequence
  Synthetic oligonucleotide: CBLB-8686
gggccauuguguacugug

SEQ ID NO: 39016 - RNA, 19 nt, Artificial Sequence
  Synthetic oligonucleotide: CBLB-8687
ggggccauuguguacugug

SEQ ID NO: 39017 - RNA, 20 nt, Artificial Sequence
  Synthetic oligonucleotide: CBLB-8688
uggggccauuguguacugug

SEQ ID NO: 39018 - RNA, 21 nt, Artificial Sequence
  Synthetic oligonucleotide: CBLB-8689
cuggggccauuguguacugug

SEQ ID NO: 39019 - RNA, 22 nt, Artificial Sequence
  Synthetic oligonucleotide: CBLB-8690
ucuggggccauuguguacugug

SEQ ID NO: 39020 - RNA, 23 nt, Artificial Sequence
  Synthetic oligonucleotide: CBLB-8691
cucuggggccauuguguacugug

SEQ ID NO: 39021 - RNA, 24 nt, Artificial Sequence
  Synthetic oligonucleotide: CBLB-8692
ccucuggggccauuguguacugug

SEQ ID NO: 39022 - RNA, 18 nt, Artificial Sequence
  Synthetic oligonucleotide: CBLB-8693
aacagcaaaagagaaacu

SEQ ID NO: 39023 - RNA, 19 nt, Artificial Sequence
  Synthetic oligonucleotide: CBLB-8694
uaacagcaaaagagaaacu

SEQ ID NO: 39024 - RNA, 20 nt, Artificial Sequence
  Synthetic oligonucleotide: CBLB-7445
cuaacagcaaaagagaaacu

SEQ ID NO: 39025 - RNA, 21 nt, Artificial Sequence
  Synthetic oligonucleotide: CBLB-8695
acuaacagcaaaagagaaacu

SEQ ID NO: 39026 - RNA, 22 nt, Artificial Sequence
  Synthetic oligonucleotide: CBLB-8696
aacuaacagcaaaagagaaacu

SEQ ID NO: 39027 - RNA, 23 nt, Artificial Sequence
  Synthetic oligonucleotide: CBLB-8697
aaacuaacagcaaaagagaaacu

SEQ ID NO: 39028 - RNA, 24 nt, Artificial Sequence
  Synthetic oligonucleotide: CBLB-8698
aaaacuaacagcaaaagagaaacu

SEQ ID NO: 39029 - RNA, 18 nt, Artificial Sequence
  Synthetic oligonucleotide: CBLB-8699
aagagaaacucggaaacu

SEQ ID NO: 39030 - RNA, 19 nt, Artificial Sequence
  Synthetic oligonucleotide: CBLB-8700
aaagagaaacucggaaacu

SEQ ID NO: 39031 - RNA, 20 nt, Artificial Sequence
  Synthetic oligonucleotide: CBLB-7446
aaaagagaaacucggaaacu

SEQ ID NO: 39032 - RNA, 21 nt, Artificial Sequence
  Synthetic oligonucleotide: CBLB-8701
caaaagagaaacucggaaacu

SEQ ID NO: 39033 - RNA, 22 nt, Artificial Sequence
  Synthetic oligonucleotide: CBLB-8702
gcaaaagagaaacucggaaacu

SEQ ID NO: 39034 - RNA, 23 nt, Artificial Sequence
  Synthetic oligonucleotide: CBLB-8703
agcaaaagagaaacucggaaacu

SEQ ID NO: 39035 - RNA, 24 nt, Artificial Sequence
  Synthetic oligonucleotide: CBLB-8704
cagcaaaagagaaacucggaaacu

SEQ ID NO: 39036 - RNA, 18 nt, Artificial Sequence
  Synthetic oligonucleotide: CBLB-8705
gcuaugaaacaaaagacu

SEQ ID NO: 39037 - RNA, 19 nt, Artificial Sequence
  Synthetic oligonucleotide: CBLB-8706
ugcuaugaaacaaaagacu

SEQ ID NO: 39038 - RNA, 20 nt, Artificial Sequence
  Synthetic oligonucleotide: CBLB-7447
uugcuaugaaacaaaagacu

SEQ ID NO: 39039 - RNA, 21 nt, Artificial Sequence
  Synthetic oligonucleotide: CBLB-8707
guugcuaugaaacaaaagacu

SEQ ID NO: 39040 - RNA, 22 nt, Artificial Sequence
  Synthetic oligonucleotide: CBLB-8708
uguugcuaugaaacaaaagacu

SEQ ID NO: 39041 - RNA, 23 nt, Artificial Sequence
  Synthetic oligonucleotide: CBLB-8709
cuguugcuaugaaacaaaagacu

SEQ ID NO: 39042 - RNA, 24 nt, Artificial Sequence
  Synthetic oligonucleotide: CBLB-8710
ucuguugcuaugaaacaaaagacu

SEQ ID NO: 39043 - RNA, 18 nt, Artificial Sequence
  Synthetic oligonucleotide: CBLB-8711
cuggggccauuguguacu

SEQ ID NO: 39044 - RNA, 19 nt, Artificial Sequence
  Synthetic oligonucleotide: CBLB-8712
ucuggggccauuguguacu

SEQ ID NO: 39045 - RNA, 20 nt, Artificial Sequence
  Synthetic oligonucleotide: CBLB-8713
cucuggggccauuguguacu

SEQ ID NO: 39046 - RNA, 21 nt, Artificial Sequence
  Synthetic oligonucleotide: CBLB-8714
ccucuggggccauuguguacu

SEQ ID NO: 39047 - RNA, 22 nt, Artificial Sequence
  Synthetic oligonucleotide: CBLB-8715
uccucuggggccauuguguacu

SEQ ID NO: 39048 - RNA, 23 nt, Artificial Sequence
  Synthetic oligonucleotide: CBLB-8716
uuccucuggggccauuguguacu

SEQ ID NO: 39049 - RNA, 24 nt, Artificial Sequence
  Synthetic oligonucleotide: CBLB-8717
cuuccucuggggccauuguguacu

SEQ ID NO: 39050 - RNA, 18 nt, Artificial Sequence
  Synthetic oligonucleotide: CBLB-8718
gaaggguuuggcagcccu

SEQ ID NO: 39051 - RNA, 19 nt, Artificial Sequence
  Synthetic oligonucleotide: CBLB-8719
agaaggguuuggcagcccu

SEQ ID NO: 39052 - RNA, 20 nt, Artificial Sequence
  Synthetic oligonucleotide: CBLB-7239
uagaaggguuuggcagcccu

SEQ ID NO: 39053 - RNA, 21 nt, Artificial Sequence
  Synthetic oligonucleotide: CBLB-8720
guagaaggguuuggcagcccu

SEQ ID NO: 39054 - RNA, 22 nt, Artificial Sequence
  Synthetic oligonucleotide: CBLB-8721
gguagaaggguuuggcagcccu

SEQ ID NO: 39055 - RNA, 23 nt, Artificial Sequence
  Synthetic oligonucleotide: CBLB-8722
ggguagaaggguuuggcagcccu

SEQ ID NO: 39056 - RNA, 24 nt, Artificial Sequence
  Synthetic oligonucleotide: CBLB-8723
uggguagaaggguuuggcagcccu

SEQ ID NO: 39057 - RNA, 18 nt, Artificial Sequence
  Synthetic oligonucleotide: CBLB-8724
cugcgagcgggccuuccu

SEQ ID NO: 39058 - RNA, 19 nt, Artificial Sequence
  Synthetic oligonucleotide: CBLB-8725
gcugcgagcgggccuuccu

SEQ ID NO: 39059 - RNA, 20 nt, Artificial Sequence
  Synthetic oligonucleotide: CBLB-8726
ugcugcgagcgggccuuccu

SEQ ID NO: 39060 - RNA, 21 nt, Artificial Sequence
  Synthetic oligonucleotide: CBLB-8727
gugcugcgagcgggccuuccu

SEQ ID NO: 39061 - RNA, 22 nt, Artificial Sequence
  Synthetic oligonucleotide: CBLB-8728
cgugcugcgagcgggccuuccu

SEQ ID NO: 39062 - RNA, 23 nt, Artificial Sequence
  Synthetic oligonucleotide: CBLB-8729
acgugcugcgagcgggccuuccu

SEQ ID NO: 39063 - RNA, 24 nt, Artificial Sequence
  Synthetic oligonucleotide: CBLB-8730
gacgugcugcgagcgggccuuccu

SEQ ID NO: 39064 - RNA, 18 nt, Artificial Sequence
  Synthetic oligonucleotide: CBLB-8731
auuccuuucugacgugcu

SEQ ID NO: 39065 - RNA, 19 nt, Artificial Sequence
  Synthetic oligonucleotide: CBLB-8732
aauuccuuucugacgugcu

SEQ ID NO: 39066 - RNA, 20 nt, Artificial Sequence
  Synthetic oligonucleotide: CBLB-8733
caauuccuuucugacgugcu

SEQ ID NO: 39067 - RNA, 21 nt, Artificial Sequence
  Synthetic oligonucleotide: CBLB-8734
ccaauuccuuucugacgugcu

SEQ ID NO: 39068 - RNA, 22 nt, Artificial Sequence
  Synthetic oligonucleotide: CBLB-8735
uccaauuccuuucugacgugcu

SEQ ID NO: 39069 - RNA, 23 nt, Artificial Sequence
  Synthetic oligonucleotide: CBLB-8736
guccaauuccuuucugacgugcu

SEQ ID NO: 39070 - RNA, 24 nt, Artificial Sequence
  Synthetic oligonucleotide: CBLB-8737
aguccaauuccuuucugacgugcu

SEQ ID NO: 39071 - RNA, 18 nt, Artificial Sequence
  Synthetic oligonucleotide: CBLB-8738
agccacuacucuguugcu

SEQ ID NO: 39072 - RNA, 19 nt, Artificial Sequence
  Synthetic oligonucleotide: CBLB-8739
cagccacuacucuguugcu

SEQ ID NO: 39073 - RNA, 20 nt, Artificial Sequence
  Synthetic oligonucleotide: CBLB-8740
ccagccacuacucuguugcu

SEQ ID NO: 39074 - RNA, 21 nt, Artificial Sequence
  Synthetic oligonucleotide: CBLB-8741
uccagccacuacucuguugcu

SEQ ID NO: 39075 - RNA, 22 nt, Artificial Sequence
  Synthetic oligonucleotide: CBLB-8742
uuccagccacuacucuguugcu

SEQ ID NO: 39076 - RNA, 23 nt, Artificial Sequence
  Synthetic oligonucleotide: CBLB-8743
cuuccagccacuacucuguugcu

SEQ ID NO: 39077 - RNA, 24 nt, Artificial Sequence
  Synthetic oligonucleotide: CBLB-8744
ccuuccagccacuacucuguugcu

SEQ ID NO: 39078 - RNA, 18 nt, Artificial Sequence
  Synthetic oligonucleotide: CBLB-8745
caccccagccuacucucu

SEQ ID NO: 39079 - RNA, 19 nt, Artificial Sequence
  Synthetic oligonucleotide: CBLB-8746
ucaccccagccuacucucu

SEQ ID NO: 39080 - RNA, 20 nt, Artificial Sequence
  Synthetic oligonucleotide: CBLB-8747
gucaccccagccuacucucu

SEQ ID NO: 39081 - RNA, 21 nt, Artificial Sequence
  Synthetic oligonucleotide: CBLB-8748
ugucaccccagccuacucucu

SEQ ID NO: 39082 - RNA, 22 nt, Artificial Sequence
  Synthetic oligonucleotide: CBLB-8749
augucaccccagccuacucucu

SEQ ID NO: 39083 - RNA, 23 nt, Artificial Sequence
  Synthetic oligonucleotide: CBLB-8750
gaugucaccccagccuacucucu

SEQ ID NO: 39084 - RNA, 24 nt, Artificial Sequence
  Synthetic oligonucleotide: CBLB-8751
agaugucaccccagccuacucucu

SEQ ID NO: 39085 - RNA, 18 nt, Artificial Sequence
  Synthetic oligonucleotide: CBLB-8752
agagaaacucggaaacuu

SEQ ID NO: 39086 - RNA, 19 nt, Artificial Sequence
  Synthetic oligonucleotide: CBLB-8753
aagagaaacucggaaacuu

SEQ ID NO: 39087 - RNA, 20 nt, Artificial Sequence
  Synthetic oligonucleotide: CBLB-7461
aaagagaaacucggaaacuu

SEQ ID NO: 39088 - RNA, 21 nt, Artificial Sequence
  Synthetic oligonucleotide: CBLB-8754
aaaagagaaacucggaaacuu

SEQ ID NO: 39089 - RNA, 22 nt, Artificial Sequence
  Synthetic oligonucleotide: CBLB-8755
caaaagagaaacucggaaacuu

SEQ ID NO: 39090 - RNA, 23 nt, Artificial Sequence
  Synthetic oligonucleotide: CBLB-8756
gcaaaagagaaacucggaaacuu

SEQ ID NO: 39091 - RNA, 24 nt, Artificial Sequence
  Synthetic oligonucleotide: CBLB-8757
agcaaaagagaaacucggaaacuu

SEQ ID NO: 39092 - RNA, 18 nt, Artificial Sequence
  Synthetic oligonucleotide: CBLB-8758
gagauuuauucugcauuu

SEQ ID NO: 39093 - RNA, 19 nt, Artificial Sequence
  Synthetic oligonucleotide: CBLB-8759
ugagauuuauucugcauuu

SEQ ID NO: 39094 - RNA, 20 nt, Artificial Sequence
  Synthetic oligonucleotide: CBLB-8760
gugagauuuauucugcauuu

SEQ ID NO: 39095 - RNA, 21 nt, Artificial Sequence
  Synthetic oligonucleotide: CBLB-8761
ugugagauuuauucugcauuu

SEQ ID NO: 39096 - RNA, 22 nt, Artificial Sequence
  Synthetic oligonucleotide: CBLB-8762
cugugagauuuauucugcauuu

SEQ ID NO: 39097 - RNA, 23 nt, Artificial Sequence
  Synthetic oligonucleotide: CBLB-8763
ucugugagauuuauucugcauuu

SEQ ID NO: 39098 - RNA, 24 nt, Artificial Sequence
  Synthetic oligonucleotide: CBLB-8764
cucugugagauuuauucugcauuu

SEQ ID NO: 39099 - RNA, 18 nt, Artificial Sequence
  Synthetic oligonucleotide: CBLB-8765
ccagaugucggccuuuuu

SEQ ID NO: 39100 - RNA, 19 nt, Artificial Sequence
  Synthetic oligonucleotide: CBLB-8766
gccagaugucggccuuuuu

SEQ ID NO: 39101 - RNA, 20 nt, Artificial Sequence
  Synthetic oligonucleotide: CBLB-8767
agccagaugucggccuuuuu

SEQ ID NO: 39102 - RNA, 21 nt, Artificial Sequence
  Synthetic oligonucleotide: CBLB-8768
uagccagaugucggccuuuuu

SEQ ID NO: 39103 - RNA, 22 nt, Artificial Sequence
  Synthetic oligonucleotide: CBLB-8769
cuagccagaugucggccuuuuu

SEQ ID NO: 39104 - RNA, 23 nt, Artificial Sequence
  Synthetic oligonucleotide: CBLB-8770
acuagccagaugucggccuuuuu

SEQ ID NO: 39105 - RNA, 24 nt, Artificial Sequence
  Synthetic oligonucleotide: CBLB-8771
gacuagccagaugucggccuuuuu

SEQ ID NO: 39106 - RNA, 18 nt, Artificial Sequence
  Synthetic oligonucleotide: CBLB-8772
agagcaauuguugguagc

SEQ ID NO: 39107 - RNA, 19 nt, Artificial Sequence
  Synthetic oligonucleotide: CBLB-8773
cagagcaauuguugguagc

SEQ ID NO: 39108 - RNA, 20 nt, Artificial Sequence
  Synthetic oligonucleotide: CBLB-8774
ccagagcaauuguugguagc

SEQ ID NO: 39109 - RNA, 21 nt, Artificial Sequence
  Synthetic oligonucleotide: CBLB-8775
uccagagcaauuguugguagc

SEQ ID NO: 39110 - RNA, 22 nt, Artificial Sequence
  Synthetic oligonucleotide: CBLB-8776
guccagagcaauuguugguagc

SEQ ID NO: 39111 - RNA, 23 nt, Artificial Sequence
  Synthetic oligonucleotide: CBLB-8777
aguccagagcaauuguugguagc

SEQ ID NO: 39112 - RNA, 24 nt, Artificial Sequence
  Synthetic oligonucleotide: CBLB-8778
aaguccagagcaauuguugguagc

SEQ ID NO: 39113 - RNA, 18 nt, Artificial Sequence
  Synthetic oligonucleotide: CBLB-8779
ccagagacacgcgugugc

SEQ ID NO: 39114 - RNA, 19 nt, Artificial Sequence
  Synthetic oligonucleotide: CBLB-8780
uccagagacacgcgugugc

SEQ ID NO: 39115 - RNA, 20 nt, Artificial Sequence
  Synthetic oligonucleotide: CBLB-8781
guccagagacacgcgugugc

SEQ ID NO: 39116 - RNA, 21 nt, Artificial Sequence
  Synthetic oligonucleotide: CBLB-8782
uguccagagacacgcgugugc

SEQ ID NO: 39117 - RNA, 22 nt, Artificial Sequence
  Synthetic oligonucleotide: CBLB-8783
cuguccagagacacgcgugugc

SEQ ID NO: 39118 - RNA, 23 nt, Artificial Sequence
  Synthetic oligonucleotide: CBLB-8784
gcuguccagagacacgcgugugc

SEQ ID NO: 39119 - RNA, 24 nt, Artificial Sequence
  Synthetic oligonucleotide: CBLB-8785
agcuguccagagacacgcgugugc

SEQ ID NO: 39120 - RNA, 18 nt, Artificial Sequence
  Synthetic oligonucleotide: CBLB-8786
aggaaacaaaauuacuuc

SEQ ID NO: 39121 - RNA, 19 nt, Artificial Sequence
  Synthetic oligonucleotide: CBLB-8787
aaggaaacaaaauuacuuc

SEQ ID NO: 39122 - RNA, 20 nt, Artificial Sequence
  Synthetic oligonucleotide: CBLB-8788
caaggaaacaaaauuacuuc

SEQ ID NO: 39123 - RNA, 21 nt, Artificial Sequence
  Synthetic oligonucleotide: CBLB-8789
acaaggaaacaaaauuacuuc

SEQ ID NO: 39124 - RNA, 22 nt, Artificial Sequence
  Synthetic oligonucleotide: CBLB-8790
gacaaggaaacaaaauuacuuc

SEQ ID NO: 39125 - RNA, 23 nt, Artificial Sequence
  Synthetic oligonucleotide: CBLB-8791
ugacaaggaaacaaaauuacuuc

SEQ ID NO: 39126 - RNA, 24 nt, Artificial Sequence
  Synthetic oligonucleotide: CBLB-8792
augacaaggaaacaaaauuacuuc

SEQ ID NO: 39127 - RNA, 18 nt, Artificial Sequence
  Synthetic oligonucleotide: CBLB-8793
gggagccccggcugggag

SEQ ID NO: 39128 - RNA, 19 nt, Artificial Sequence
  Synthetic oligonucleotide: CBLB-8794
ggggagccccggcugggag

SEQ ID NO: 39129 - RNA, 20 nt, Artificial Sequence
  Synthetic oligonucleotide: CBLB-7701
uggggagccccggcugggag

SEQ ID NO: 39130 - RNA, 21 nt, Artificial Sequence
  Synthetic oligonucleotide: CBLB-8795
guggggagccccggcugggag

SEQ ID NO: 39131 - RNA, 22 nt, Artificial Sequence
  Synthetic oligonucleotide: CBLB-8796
uguggggagccccggcugggag

SEQ ID NO: 39132 - RNA, 23 nt, Artificial Sequence
  Synthetic oligonucleotide: CBLB-8797
guguggggagccccggcugggag

SEQ ID NO: 39133 - RNA, 24 nt, Artificial Sequence
  Synthetic oligonucleotide: CBLB-8798
uguguggggagccccggcugggag

SEQ ID NO: 39134 - RNA, 18 nt, Artificial Sequence
  Synthetic oligonucleotide: CBLB-8799
uguugguagcaugagugg

SEQ ID NO: 39135 - RNA, 19 nt, Artificial Sequence
  Synthetic oligonucleotide: CBLB-8800
uuguugguagcaugagugg

SEQ ID NO: 39136 - RNA, 20 nt, Artificial Sequence
  Synthetic oligonucleotide: CBLB-7732
auuguugguagcaugagugg

SEQ ID NO: 39137 - RNA, 21 nt, Artificial Sequence
  Synthetic oligonucleotide: CBLB-8801
aauuguugguagcaugagugg

SEQ ID NO: 39138 - RNA, 22 nt, Artificial Sequence
  Synthetic oligonucleotide: CBLB-8802
caauuguugguagcaugagugg

SEQ ID NO: 39139 - RNA, 23 nt, Artificial Sequence
  Synthetic oligonucleotide: CBLB-8803
gcaauuguugguagcaugagugg

SEQ ID NO: 39140 - RNA, 24 nt, Artificial Sequence
  Synthetic oligonucleotide: CBLB-8804
agcaauuguugguagcaugagugg

SEQ ID NO: 39141 - RNA, 18 nt, Artificial Sequence
  Synthetic oligonucleotide: CBLB-8805
aggcuguaaaggaaaacu

SEQ ID NO: 39142 - RNA, 19 nt, Artificial Sequence
  Synthetic oligonucleotide: CBLB-8806
aaggcuguaaaggaaaacu

SEQ ID NO: 39143 - RNA, 20 nt, Artificial Sequence
  Synthetic oligonucleotide: CBLB-8807
caaggcuguaaaggaaaacu

SEQ ID NO: 39144 - RNA, 21 nt, Artificial Sequence
  Synthetic oligonucleotide: CBLB-8808
ucaaggcuguaaaggaaaacu

SEQ ID NO: 39145 - RNA, 22 nt, Artificial Sequence
  Synthetic oligonucleotide: CBLB-8809
uucaaggcuguaaaggaaaacu

SEQ ID NO: 39146 - RNA, 23 nt, Artificial Sequence
  Synthetic oligonucleotide: CBLB-8810
auucaaggcuguaaaggaaaacu

SEQ ID NO: 39147 - RNA, 24 nt, Artificial Sequence
  Synthetic oligonucleotide: CBLB-8811
aauucaaggcuguaaaggaaaacu

SEQ ID NO: 39148 - RNA, 18 nt, Artificial Sequence
  Synthetic oligonucleotide: CBLB-8812
guguggggagccccggcu

SEQ ID NO: 39149 - RNA, 19 nt, Artificial Sequence
  Synthetic oligonucleotide: CBLB-8813
uguguggggagccccggcu

SEQ ID NO: 39150 - RNA, 20 nt, Artificial Sequence
  Synthetic oligonucleotide: CBLB-7750
guguguggggagccccggcu

SEQ ID NO: 39151 - RNA, 21 nt, Artificial Sequence
  Synthetic oligonucleotide: CBLB-8814
uguguguggggagccccggcu

SEQ ID NO: 39152 - RNA, 22 nt, Artificial Sequence
  Synthetic oligonucleotide: CBLB-8815
guguguguggggagccccggcu

SEQ ID NO: 39153 - RNA, 23 nt, Artificial Sequence
  Synthetic oligonucleotide: CBLB-8816
aguguguguggggagccccggcu

SEQ ID NO: 39154 - RNA, 24 nt, Artificial Sequence
  Synthetic oligonucleotide: CBLB-8817
caguguguguggggagccccggcu

SEQ ID NO: 39155 - RNA, 18 nt, Artificial Sequence
  Synthetic oligonucleotide: CBLB-8818
auguucugauauuuuaca

SEQ ID NO: 39156 - RNA, 19 nt, Artificial Sequence
  Synthetic oligonucleotide: CBLB-8819
gauguucugauauuuuaca

SEQ ID NO: 39157 - RNA, 20 nt, Artificial Sequence
  Synthetic oligonucleotide: CBLB-8820
agauguucugauauuuuaca

SEQ ID NO: 39158 - RNA, 21 nt, Artificial Sequence
  Synthetic oligonucleotide: CBLB-8821
cagauguucugauauuuuaca

SEQ ID NO: 39159 - RNA, 22 nt, Artificial Sequence
  Synthetic oligonucleotide: CBLB-8822
ucagauguucugauauuuuaca

SEQ ID NO: 39160 - RNA, 23 nt, Artificial Sequence
  Synthetic oligonucleotide: CBLB-8823
cucagauguucugauauuuuaca

SEQ ID NO: 39161 - RNA, 24 nt, Artificial Sequence
  Synthetic oligonucleotide: CBLB-8824
ucucagauguucugauauuuuaca

SEQ ID NO: 39162 - RNA, 18 nt, Artificial Sequence
  Synthetic oligonucleotide: CBLB-8825
gucgggcgggaggggaga

SEQ ID NO: 39163 - RNA, 19 nt, Artificial Sequence
  Synthetic oligonucleotide: CBLB-8826
agucgggcgggaggggaga

SEQ ID NO: 39164 - RNA, 20 nt, Artificial Sequence
  Synthetic oligonucleotide: CBLB-8827
gagucgggcgggaggggaga

SEQ ID NO: 39165 - RNA, 21 nt, Artificial Sequence
  Synthetic oligonucleotide: CBLB-8828
cgagucgggcgggaggggaga

SEQ ID NO: 39166 - RNA, 22 nt, Artificial Sequence
  Synthetic oligonucleotide: CBLB-8829
ccgagucgggcgggaggggaga

SEQ ID NO: 39167 - RNA, 23 nt, Artificial Sequence
  Synthetic oligonucleotide: CBLB-8830
cccgagucgggcgggaggggaga

SEQ ID NO: 39168 - RNA, 24 nt, Artificial Sequence
  Synthetic oligonucleotide: CBLB-8831
ccccgagucgggcgggaggggaga

SEQ ID NO: 39169 - RNA, 18 nt, Artificial Sequence
  Synthetic oligonucleotide: CBLB-8832
ccgaaaggcaagaaggga

SEQ ID NO: 39170 - RNA, 19 nt, Artificial Sequence
  Synthetic oligonucleotide: CBLB-8833
gccgaaaggcaagaaggga

SEQ ID NO: 39171 - RNA, 20 nt, Artificial Sequence
  Synthetic oligonucleotide: CBLB-7634
cgccgaaaggcaagaaggga

SEQ ID NO: 39172 - RNA, 21 nt, Artificial Sequence
  Synthetic oligonucleotide: CBLB-8834
gcgccgaaaggcaagaaggga

SEQ ID NO: 39173 - RNA, 22 nt, Artificial Sequence
  Synthetic oligonucleotide: CBLB-8835
ggcgccgaaaggcaagaaggga

SEQ ID NO: 39174 - RNA, 23 nt, Artificial Sequence
  Synthetic oligonucleotide: CBLB-8836
cggcgccgaaaggcaagaaggga

SEQ ID NO: 39175 - RNA, 24 nt, Artificial Sequence
  Synthetic oligonucleotide: CBLB-8837
acggcgccgaaaggcaagaaggga

SEQ ID NO: 39176 - RNA, 18 nt, Artificial Sequence
  Synthetic oligonucleotide: CBLB-8838
uuucugugccaguaauua

SEQ ID NO: 39177 - RNA, 19 nt, Artificial Sequence
  Synthetic oligonucleotide: CBLB-8839
auuucugugccaguaauua

SEQ ID NO: 39178 - RNA, 20 nt, Artificial Sequence
  Synthetic oligonucleotide: CBLB-8840
uauuucugugccaguaauua

SEQ ID NO: 39179 - RNA, 21 nt, Artificial Sequence
  Synthetic oligonucleotide: CBLB-8841
uuauuucugugccaguaauua

SEQ ID NO: 39180 - RNA, 22 nt, Artificial Sequence
  Synthetic oligonucleotide: CBLB-8842
auuauuucugugccaguaauua

SEQ ID NO: 39181 - RNA, 23 nt, Artificial Sequence
  Synthetic oligonucleotide: CBLB-8843
cauuauuucugugccaguaauua

SEQ ID NO: 39182 - RNA, 24 nt, Artificial Sequence
  Synthetic oligonucleotide: CBLB-8844
ucauuauuucugugccaguaauua

SEQ ID NO: 39183 - RNA, 18 nt, Artificial Sequence
  Synthetic oligonucleotide: CBLB-8845
ggguccugugugugccac

SEQ ID NO: 39184 - RNA, 19 nt, Artificial Sequence
  Synthetic oligonucleotide: CBLB-8846
uggguccugugugugccac

SEQ ID NO: 39185 - RNA, 20 nt, Artificial Sequence
  Synthetic oligonucleotide: CBLB-7644
cuggguccugugugugccac

SEQ ID NO: 39186 - RNA, 21 nt, Artificial Sequence
  Synthetic oligonucleotide: CBLB-8847
ccuggguccugugugugccac

SEQ ID NO: 39187 - RNA, 22 nt, Artificial Sequence
  Synthetic oligonucleotide: CBLB-8848
gccuggguccugugugugccac

SEQ ID NO: 39188 - RNA, 23 nt, Artificial Sequence
  Synthetic oligonucleotide: CBLB-8849
agccuggguccugugugugccac

SEQ ID NO: 39189 - RNA, 24 nt, Artificial Sequence
  Synthetic oligonucleotide: CBLB-8850
gagccuggguccugugugugccac

SEQ ID NO: 39190 - RNA, 18 nt, Artificial Sequence
  Synthetic oligonucleotide: CBLB-8851
gaguuuuccuuuacagcc

SEQ ID NO: 39191 - RNA, 19 nt, Artificial Sequence
  Synthetic oligonucleotide: CBLB-8852
ugaguuuuccuuuacagcc

SEQ ID NO: 39192 - RNA, 20 nt, Artificial Sequence
  Synthetic oligonucleotide: CBLB-8853
cugaguuuuccuuuacagcc

SEQ ID NO: 39193 - RNA, 21 nt, Artificial Sequence
  Synthetic oligonucleotide: CBLB-8854
ccugaguuuuccuuuacagcc

SEQ ID NO: 39194 - RNA, 22 nt, Artificial Sequence
  Synthetic oligonucleotide: CBLB-8855
uccugaguuuuccuuuacagcc

SEQ ID NO: 39195 - RNA, 23 nt, Artificial Sequence
  Synthetic oligonucleotide: CBLB-8856
auccugaguuuuccuuuacagcc

SEQ ID NO: 39196 - RNA, 24 nt, Artificial Sequence
  Synthetic oligonucleotide: CBLB-8857
gauccugaguuuuccuuuacagcc

SEQ ID NO: 39197 - RNA, 18 nt, Artificial Sequence
  Synthetic oligonucleotide: CBLB-8858
cuugccggcccgggggcc

SEQ ID NO: 39198 - RNA, 19 nt, Artificial Sequence
  Synthetic oligonucleotide: CBLB-8859
ucuugccggcccgggggcc

SEQ ID NO: 39199 - RNA, 20 nt, Artificial Sequence
  Synthetic oligonucleotide: CBLB-7663
uucuugccggcccgggggcc

SEQ ID NO: 39200 - RNA, 21 nt, Artificial Sequence
  Synthetic oligonucleotide: CBLB-8860
cuucuugccggcccgggggcc

SEQ ID NO: 39201 - RNA, 22 nt, Artificial Sequence
  Synthetic oligonucleotide: CBLB-8861
acuucuugccggcccgggggcc

SEQ ID NO: 39202 - RNA, 23 nt, Artificial Sequence
  Synthetic oligonucleotide: CBLB-8862
cacuucuugccggcccgggggcc

SEQ ID NO: 39203 - RNA, 24 nt, Artificial Sequence
  Synthetic oligonucleotide: CBLB-8863
acacuucuugccggcccgggggcc

SEQ ID NO: 39204 - RNA, 18 nt, Artificial Sequence
  Synthetic oligonucleotide: CBLB-8864
cggcgucccgcggccucc

SEQ ID NO: 39205 - RNA, 19 nt, Artificial Sequence
  Synthetic oligonucleotide: CBLB-8865
gcggcgucccgcggccucc

SEQ ID NO: 39206 - RNA, 20 nt, Artificial Sequence
  Synthetic oligonucleotide: CBLB-8866
ugcggcgucccgcggccucc

SEQ ID NO: 39207 - RNA, 21 nt, Artificial Sequence
  Synthetic oligonucleotide: CBLB-8867
cugcggcgucccgcggccucc

SEQ ID NO: 39208 - RNA, 22 nt, Artificial Sequence
  Synthetic oligonucleotide: CBLB-8868
gcugcggcgucccgcggccucc

SEQ ID NO: 39209 - RNA, 23 nt, Artificial Sequence
  Synthetic oligonucleotide: CBLB-8869
ugcugcggcgucccgcggccucc

SEQ ID NO: 39210 - RNA, 24 nt, Artificial Sequence
  Synthetic oligonucleotide: CBLB-8870
cugcugcggcgucccgcggccucc

SEQ ID NO: 39211 - RNA, 18 nt, Artificial Sequence
  Synthetic oligonucleotide: CBLB-8871
uuauuacuaugaaggauc

SEQ ID NO: 39212 - RNA, 19 nt, Artificial Sequence
  Synthetic oligonucleotide: CBLB-8872
auuauuacuaugaaggauc

SEQ ID NO: 39213 - RNA, 20 nt, Artificial Sequence
  Synthetic oligonucleotide: CBLB-8873
aauuauuacuaugaaggauc

SEQ ID NO: 39214 - RNA, 21 nt, Artificial Sequence
  Synthetic oligonucleotide: CBLB-8874
uaauuauuacuaugaaggauc

SEQ ID NO: 39215 - RNA, 22 nt, Artificial Sequence
  Synthetic oligonucleotide: CBLB-8875
guaauuauuacuaugaaggauc

SEQ ID NO: 39216 - RNA, 23 nt, Artificial Sequence
  Synthetic oligonucleotide: CBLB-8876
uguaauuauuacuaugaaggauc

SEQ ID NO: 39217 - RNA, 24 nt, Artificial Sequence
  Synthetic oligonucleotide: CBLB-8877
cuguaauuauuacuaugaaggauc

SEQ ID NO: 39218 - RNA, 18 nt, Artificial Sequence
  Synthetic oligonucleotide: CBLB-8878
gucucggaggccugcgcg

SEQ ID NO: 39219 - RNA, 19 nt, Artificial Sequence
  Synthetic oligonucleotide: CBLB-8879
cgucucggaggccugcgcg

SEQ ID NO: 39220 - RNA, 20 nt, Artificial Sequence
  Synthetic oligonucleotide: CBLB-8880
acgucucggaggccugcgcg

SEQ ID NO: 39221 - RNA, 21 nt, Artificial Sequence
  Synthetic oligonucleotide: CBLB-8881
cacgucucggaggccugcgcg

SEQ ID NO: 39222 - RNA, 22 nt, Artificial Sequence
  Synthetic oligonucleotide: CBLB-8882
ccacgucucggaggccugcgcg

SEQ ID NO: 39223 - RNA, 23 nt, Artificial Sequence
  Synthetic oligonucleotide: CBLB-8883
uccacgucucggaggccugcgcg

SEQ ID NO: 39224 - RNA, 24 nt, Artificial Sequence
  Synthetic oligonucleotide: CBLB-8884
uuccacgucucggaggccugcgcg

SEQ ID NO: 39225 - RNA, 18 nt, Artificial Sequence
  Synthetic oligonucleotide: CBLB-8885
cugugugugccacagggg

SEQ ID NO: 39226 - RNA, 19 nt, Artificial Sequence
  Synthetic oligonucleotide: CBLB-8886
ccugugugugccacagggg

SEQ ID NO: 39227 - RNA, 20 nt, Artificial Sequence
  Synthetic oligonucleotide: CBLB-7728
uccugugugugccacagggg

SEQ ID NO: 39228 - RNA, 21 nt, Artificial Sequence
  Synthetic oligonucleotide: CBLB-8887
guccugugugugccacagggg

SEQ ID NO: 39229 - RNA, 22 nt, Artificial Sequence
  Synthetic oligonucleotide: CBLB-8888
gguccugugugugccacagggg

SEQ ID NO: 39230 - RNA, 23 nt, Artificial Sequence
  Synthetic oligonucleotide: CBLB-8889
ggguccugugugugccacagggg

SEQ ID NO: 39231 - RNA, 24 nt, Artificial Sequence
  Synthetic oligonucleotide: CBLB-8890
uggguccugugugugccacagggg

SEQ ID NO: 39232 - RNA, 18 nt, Artificial Sequence
  Synthetic oligonucleotide: CBLB-8891
acuguaauuauuacuaug

SEQ ID NO: 39233 - RNA, 19 nt, Artificial Sequence
  Synthetic oligonucleotide: CBLB-8892
uacuguaauuauuacuaug

SEQ ID NO: 39234 - RNA, 20 nt, Artificial Sequence
  Synthetic oligonucleotide: CBLB-8893
auacuguaauuauuacuaug

SEQ ID NO: 39235 - RNA, 21 nt, Artificial Sequence
  Synthetic oligonucleotide: CBLB-8894
aauacuguaauuauuacuaug

SEQ ID NO: 39236 - RNA, 22 nt, Artificial Sequence
  Synthetic oligonucleotide: CBLB-8895
uaauacuguaauuauuacuaug

SEQ ID NO: 39237 - RNA, 23 nt, Artificial Sequence
  Synthetic oligonucleotide: CBLB-8896
uuaauacuguaauuauuacuaug

SEQ ID NO: 39238 - RNA, 24 nt, Artificial Sequence
  Synthetic oligonucleotide: CBLB-8897
uuuaauacuguaauuauuacuaug

SEQ ID NO: 39239 - RNA, 18 nt, Artificial Sequence
  Synthetic oligonucleotide: CBLB-8898
cacugggcugcgugcgug

SEQ ID NO: 39240 - RNA, 19 nt, Artificial Sequence
  Synthetic oligonucleotide: CBLB-8899
acacugggcugcgugcgug

SEQ ID NO: 39241 - RNA, 20 nt, Artificial Sequence
  Synthetic oligonucleotide: CBLB-7737
cacacugggcugcgugcgug

SEQ ID NO: 39242 - RNA, 21 nt, Artificial Sequence
  Synthetic oligonucleotide: CBLB-8900
acacacugggcugcgugcgug

SEQ ID NO: 39243 - RNA, 22 nt, Artificial Sequence
  Synthetic oligonucleotide: CBLB-8901
cacacacugggcugcgugcgug

SEQ ID NO: 39244 - RNA, 23 nt, Artificial Sequence
  Synthetic oligonucleotide: CBLB-8902
acacacacugggcugcgugcgug

SEQ ID NO: 39245 - RNA, 24 nt, Artificial Sequence
  Synthetic oligonucleotide: CBLB-8903
cacacacacugggcugcgugcgug

SEQ ID NO: 39246 - RNA, 18 nt, Artificial Sequence
  Synthetic oligonucleotide: CBLB-8904
aaccacuuucuagcaacu

SEQ ID NO: 39247 - RNA, 19 nt, Artificial Sequence
  Synthetic oligonucleotide: CBLB-8905
uaaccacuuucuagcaacu

SEQ ID NO: 39248 - RNA, 20 nt, Artificial Sequence
  Synthetic oligonucleotide: CBLB-8906
cuaaccacuuucuagcaacu

SEQ ID NO: 39249 - RNA, 21 nt, Artificial Sequence
  Synthetic oligonucleotide: CBLB-8907
ucuaaccacuuucuagcaacu

SEQ ID NO: 39250 - RNA, 22 nt, Artificial Sequence
  Synthetic oligonucleotide: CBLB-8908
uucuaaccacuuucuagcaacu

SEQ ID NO: 39251 - RNA, 23 nt, Artificial Sequence
  Synthetic oligonucleotide: CBLB-8909
guucuaaccacuuucuagcaacu

SEQ ID NO: 39252 - RNA, 24 nt, Artificial Sequence
  Synthetic oligonucleotide: CBLB-8910
gguucuaaccacuuucuagcaacu

SEQ ID NO: 39253 - RNA, 18 nt, Artificial Sequence
  Synthetic oligonucleotide: CBLB-8911
cgggaggggagagcgggu

SEQ ID NO: 39254 - RNA, 19 nt, Artificial Sequence
  Synthetic oligonucleotide: CBLB-8912
gcgggaggggagagcgggu

SEQ ID NO: 39255 - RNA, 20 nt, Artificial Sequence
  Synthetic oligonucleotide: CBLB-8913
ggcgggaggggagagcgggu

SEQ ID NO: 39256 - RNA, 21 nt, Artificial Sequence
  Synthetic oligonucleotide: CBLB-8914
gggcgggaggggagagcgggu

SEQ ID NO: 39257 - RNA, 22 nt, Artificial Sequence
  Synthetic oligonucleotide: CBLB-8915
cgggcgggaggggagagcgggu

SEQ ID NO: 39258 - RNA, 23 nt, Artificial Sequence
  Synthetic oligonucleotide: CBLB-8916
ucgggcgggaggggagagcgggu

SEQ ID NO: 39259 - RNA, 24 nt, Artificial Sequence
  Synthetic oligonucleotide: CBLB-8917
gucgggcgggaggggagagcgggu

SEQ ID NO: 39260 - RNA, 18 nt, Artificial Sequence
  Synthetic oligonucleotide: CBLB-8918
uaaaugccccacuucaaa

SEQ ID NO: 39261 - RNA, 19 nt, Artificial Sequence
  Synthetic oligonucleotide: CBLB-8919
uuaaaugccccacuucaaa

SEQ ID NO: 39262 - RNA, 20 nt, Artificial Sequence
  Synthetic oligonucleotide: CBLB-8920
uuuaaaugccccacuucaaa

SEQ ID NO: 39263 - RNA, 21 nt, Artificial Sequence
  Synthetic oligonucleotide: CBLB-8921
cuuuaaaugccccacuucaaa

SEQ ID NO: 39264 - RNA, 22 nt, Artificial Sequence
  Synthetic oligonucleotide: CBLB-8922
ucuuuaaaugccccacuucaaa

SEQ ID NO: 39265 - RNA, 23 nt, Artificial Sequence
  Synthetic oligonucleotide: CBLB-8923
gucuuuaaaugccccacuucaaa

SEQ ID NO: 39266 - RNA, 24 nt, Artificial Sequence
  Synthetic oligonucleotide: CBLB-8924
ggucuuuaaaugccccacuucaaa

SEQ ID NO: 39267 - RNA, 18 nt, Artificial Sequence
  Synthetic oligonucleotide: CBLB-8925
gaaguaaacugaaauaaa

SEQ ID NO: 39268 - RNA, 19 nt, Artificial Sequence
  Synthetic oligonucleotide: CBLB-8926
ugaaguaaacugaaauaaa

SEQ ID NO: 39269 - RNA, 20 nt, Artificial Sequence
  Synthetic oligonucleotide: CBLB-7617
uugaaguaaacugaaauaaa

SEQ ID NO: 39270 - RNA, 21 nt, Artificial Sequence
  Synthetic oligonucleotide: CBLB-8927
auugaaguaaacugaaauaaa

SEQ ID NO: 39271 - RNA, 22 nt, Artificial Sequence
  Synthetic oligonucleotide: CBLB-8928
gauugaaguaaacugaaauaaa

SEQ ID NO: 39272 - RNA, 23 nt, Artificial Sequence
  Synthetic oligonucleotide: CBLB-8929
ggauugaaguaaacugaaauaaa

SEQ ID NO: 39273 - RNA, 24 nt, Artificial Sequence
  Synthetic oligonucleotide: CBLB-8930
gggauugaaguaaacugaaauaaa

SEQ ID NO: 39274 - RNA, 18 nt, Artificial Sequence
  Synthetic oligonucleotide: CBLB-8931
uggugggauugaaguaaa

SEQ ID NO: 39275 - RNA, 19 nt, Artificial Sequence
  Synthetic oligonucleotide: CBLB-8932
guggugggauugaaguaaa

SEQ ID NO: 39276 - RNA, 20 nt, Artificial Sequence
  Synthetic oligonucleotide: CBLB-8933
aguggugggauugaaguaaa

SEQ ID NO: 39277 - RNA, 21 nt, Artificial Sequence
  Synthetic oligonucleotide: CBLB-8934
gaguggugggauugaaguaaa

SEQ ID NO: 39278 - RNA, 22 nt, Artificial Sequence
  Synthetic oligonucleotide: CBLB-8935
ugaguggugggauugaaguaaa

SEQ ID NO: 39279 - RNA, 23 nt, Artificial Sequence
  Synthetic oligonucleotide: CBLB-8936
augaguggugggauugaaguaaa

SEQ ID NO: 39280 - RNA, 24 nt, Artificial Sequence
  Synthetic oligonucleotide: CBLB-8937
caugaguggugggauugaaguaaa

SEQ ID NO: 39281 - RNA, 18 nt, Artificial Sequence
  Synthetic oligonucleotide: CBLB-8938
ugaaguaaacugaaauaa

SEQ ID NO: 39282 - RNA, 19 nt, Artificial Sequence
  Synthetic oligonucleotide: CBLB-8939
uugaaguaaacugaaauaa

SEQ ID NO: 39283 - RNA, 20 nt, Artificial Sequence
  Synthetic oligonucleotide: CBLB-8940
auugaaguaaacugaaauaa

SEQ ID NO: 39284 - RNA, 21 nt, Artificial Sequence
  Synthetic oligonucleotide: CBLB-8941
gauugaaguaaacugaaauaa

SEQ ID NO: 39285 - RNA, 22 nt, Artificial Sequence
  Synthetic oligonucleotide: CBLB-8942
ggauugaaguaaacugaaauaa

SEQ ID NO: 39286 - RNA, 23 nt, Artificial Sequence
  Synthetic oligonucleotide: CBLB-8943
gggauugaaguaaacugaaauaa

SEQ ID NO: 39287 - RNA, 24 nt, Artificial Sequence
  Synthetic oligonucleotide: CBLB-8944
ugggauugaaguaaacugaaauaa

SEQ ID NO: 39288 - RNA, 18 nt, Artificial Sequence
  Synthetic oligonucleotide: CBLB-8945
guaaauucaaggcuguaa

SEQ ID NO: 39289 - RNA, 19 nt, Artificial Sequence
  Synthetic oligonucleotide: CBLB-8946
uguaaauucaaggcuguaa

SEQ ID NO: 39290 - RNA, 20 nt, Artificial Sequence
  Synthetic oligonucleotide: CBLB-7624
auguaaauucaaggcuguaa

SEQ ID NO: 39291 - RNA, 21 nt, Artificial Sequence
  Synthetic oligonucleotide: CBLB-8947
cauguaaauucaaggcuguaa

SEQ ID NO: 39292 - RNA, 22 nt, Artificial Sequence
  Synthetic oligonucleotide: CBLB-8948
ccauguaaauucaaggcuguaa

SEQ ID NO: 39293 - RNA, 23 nt, Artificial Sequence
  Synthetic oligonucleotide: CBLB-8949
accauguaaauucaaggcuguaa

SEQ ID NO: 39294 - RNA, 24 nt, Artificial Sequence
  Synthetic oligonucleotide: CBLB-8950
aaccauguaaauucaaggcuguaa

SEQ ID NO: 39295 - RNA, 18 nt, Artificial Sequence
  Synthetic oligonucleotide: CBLB-8951
ccaccccuguggcacaca

SEQ ID NO: 39296 - RNA, 19 nt, Artificial Sequence
  Synthetic oligonucleotide: CBLB-8952
cccaccccuguggcacaca

SEQ ID NO: 39297 - RNA, 20 nt, Artificial Sequence
  Synthetic oligonucleotide: CBLB-8953
ccccaccccuguggcacaca

SEQ ID NO: 39298 - RNA, 21 nt, Artificial Sequence
  Synthetic oligonucleotide: CBLB-8954
accccaccccuguggcacaca

SEQ ID NO: 39299 - RNA, 22 nt, Artificial Sequence
  Synthetic oligonucleotide: CBLB-8955
caccccaccccuguggcacaca

SEQ ID NO: 39300 - RNA, 23 nt, Artificial Sequence
  Synthetic oligonucleotide: CBLB-8956
acaccccaccccuguggcacaca

SEQ ID NO: 39301 - RNA, 24 nt, Artificial Sequence
  Synthetic oligonucleotide: CBLB-8957
gacaccccaccccuguggcacaca

SEQ ID NO: 39302 - RNA, 18 nt, Artificial Sequence
  Synthetic oligonucleotide: CBLB-8958
ggcacagaaauaaugaca

SEQ ID NO: 39303 - RNA, 19 nt, Artificial Sequence
  Synthetic oligonucleotide: CBLB-8959
uggcacagaaauaaugaca

SEQ ID NO: 39304 - RNA, 20 nt, Artificial Sequence
  Synthetic oligonucleotide: CBLB-7626
cuggcacagaaauaaugaca

SEQ ID NO: 39305 - RNA, 21 nt, Artificial Sequence
  Synthetic oligonucleotide: CBLB-8960
acuggcacagaaauaaugaca

SEQ ID NO: 39306 - RNA, 22 nt, Artificial Sequence
  Synthetic oligonucleotide: CBLB-8961
uacuggcacagaaauaaugaca

SEQ ID NO: 39307 - RNA, 23 nt, Artificial Sequence
  Synthetic oligonucleotide: CBLB-8962
uuacuggcacagaaauaaugaca

SEQ ID NO: 39308 - RNA, 24 nt, Artificial Sequence
  Synthetic oligonucleotide: CBLB-8963
auuacuggcacagaaauaaugaca

SEQ ID NO: 39309 - RNA, 18 nt, Artificial Sequence
  Synthetic oligonucleotide: CBLB-8964
agaaagugguuagaacca

SEQ ID NO: 39310 - RNA, 19 nt, Artificial Sequence
  Synthetic oligonucleotide: CBLB-8965
uagaaagugguuagaacca

SEQ ID NO: 39311 - RNA, 20 nt, Artificial Sequence
  Synthetic oligonucleotide: CBLB-8966
cuagaaagugguuagaacca

SEQ ID NO: 39312 - RNA, 21 nt, Artificial Sequence
  Synthetic oligonucleotide: CBLB-8967
gcuagaaagugguuagaacca

SEQ ID NO: 39313 - RNA, 22 nt, Artificial Sequence
  Synthetic oligonucleotide: CBLB-8968
ugcuagaaagugguuagaacca

SEQ ID NO: 39314 - RNA, 23 nt, Artificial Sequence
  Synthetic oligonucleotide: CBLB-8969
uugcuagaaagugguuagaacca

SEQ ID NO: 39315 - RNA, 24 nt, Artificial Sequence
  Synthetic oligonucleotide: CBLB-8970
guugcuagaaagugguuagaacca

SEQ ID NO: 39316 - RNA, 18 nt, Artificial Sequence
  Synthetic oligonucleotide: CBLB-8971
acagcucgcucccgaaga

SEQ ID NO: 39317 - RNA, 19 nt, Artificial Sequence
  Synthetic oligonucleotide: CBLB-8972
aacagcucgcucccgaaga

SEQ ID NO: 39318 - RNA, 20 nt, Artificial Sequence
  Synthetic oligonucleotide: CBLB-7632
gaacagcucgcucccgaaga

SEQ ID NO: 39319 - RNA, 21 nt, Artificial Sequence
  Synthetic oligonucleotide: CBLB-8973
agaacagcucgcucccgaaga

SEQ ID NO: 39320 - RNA, 22 nt, Artificial Sequence
  Synthetic oligonucleotide: CBLB-8974
gagaacagcucgcucccgaaga

SEQ ID NO: 39321 - RNA, 23 nt, Artificial Sequence
  Synthetic oligonucleotide: CBLB-8975
ugagaacagcucgcucccgaaga

SEQ ID NO: 39322 - RNA, 24 nt, Artificial Sequence
  Synthetic oligonucleotide: CBLB-8976
cugagaacagcucgcucccgaaga

SEQ ID NO: 39323 - RNA, 18 nt, Artificial Sequence
  Synthetic oligonucleotide: CBLB-8977
ggggagccccggcuggga

SEQ ID NO: 39324 - RNA, 19 nt, Artificial Sequence
  Synthetic oligonucleotide: CBLB-8978
uggggagccccggcuggga

SEQ ID NO: 39325 - RNA, 20 nt, Artificial Sequence
  Synthetic oligonucleotide: CBLB-8979
guggggagccccggcuggga

SEQ ID NO: 39326 - RNA, 21 nt, Artificial Sequence
  Synthetic oligonucleotide: CBLB-8980
uguggggagccccggcuggga

SEQ ID NO: 39327 - RNA, 22 nt, Artificial Sequence
  Synthetic oligonucleotide: CBLB-8981
guguggggagccccggcuggga

SEQ ID NO: 39328 - RNA, 23 nt, Artificial Sequence
  Synthetic oligonucleotide: CBLB-8982
uguguggggagccccggcuggga

SEQ ID NO: 39329 - RNA, 24 nt, Artificial Sequence
  Synthetic oligonucleotide: CBLB-8983
guguguggggagccccggcuggga

SEQ ID NO: 39330 - RNA, 18 nt, Artificial Sequence
  Synthetic oligonucleotide: CBLB-8984
guagcaugagugguggga

SEQ ID NO: 39331 - RNA, 19 nt, Artificial Sequence
  Synthetic oligonucleotide: CBLB-8985
gguagcaugagugguggga

SEQ ID NO: 39332 - RNA, 20 nt, Artificial Sequence
  Synthetic oligonucleotide: CBLB-8986
ugguagcaugagugguggga

SEQ ID NO: 39333 - RNA, 21 nt, Artificial Sequence
  Synthetic oligonucleotide: CBLB-8987
uugguagcaugagugguggga

SEQ ID NO: 39334 - RNA, 22 nt, Artificial Sequence
  Synthetic oligonucleotide: CBLB-8988
guugguagcaugagugguggga

SEQ ID NO: 39335 - RNA, 23 nt, Artificial Sequence
  Synthetic oligonucleotide: CBLB-8989
uguugguagcaugagugguggga

SEQ ID NO: 39336 - RNA, 24 nt, Artificial Sequence
  Synthetic oligonucleotide: CBLB-8990
uuguugguagcaugagugguggga

SEQ ID NO: 39337 - RNA, 18 nt, Artificial Sequence
  Synthetic oligonucleotide: CBLB-8991
gcuaucaacuguagugga

SEQ ID NO: 39338 - RNA, 19 nt, Artificial Sequence
  Synthetic oligonucleotide: CBLB-8992
cgcuaucaacuguagugga

SEQ ID NO: 39339 - RNA, 20 nt, Artificial Sequence
  Synthetic oligonucleotide: CBLB-8993
acgcuaucaacuguagugga

SEQ ID NO: 39340 - RNA, 21 nt, Artificial Sequence
  Synthetic oligonucleotide: CBLB-8994
aacgcuaucaacuguagugga

SEQ ID NO: 39341 - RNA, 22 nt, Artificial Sequence
  Synthetic oligonucleotide: CBLB-8995
aaacgcuaucaacuguagugga

SEQ ID NO: 39342 - RNA, 23 nt, Artificial Sequence
  Synthetic oligonucleotide: CBLB-8996
uaaacgcuaucaacuguagugga

SEQ ID NO: 39343 - RNA, 24 nt, Artificial Sequence
  Synthetic oligonucleotide: CBLB-8997
auaaacgcuaucaacuguagugga

SEQ ID NO: 39344 - RNA, 18 nt, Artificial Sequence
  Synthetic oligonucleotide: CBLB-8998
uaaacgcuaucaacugua

SEQ ID NO: 39345 - RNA, 19 nt, Artificial Sequence
  Synthetic oligonucleotide: CBLB-8999
auaaacgcuaucaacugua

SEQ ID NO: 39346 - RNA, 20 nt, Artificial Sequence
  Synthetic oligonucleotide: CBLB-9000
aauaaacgcuaucaacugua

SEQ ID NO: 39347 - RNA, 21 nt, Artificial Sequence
  Synthetic oligonucleotide: CBLB-9001
uaauaaacgcuaucaacugua

SEQ ID NO: 39348 - RNA, 22 nt, Artificial Sequence
  Synthetic oligonucleotide: CBLB-9002
guaauaaacgcuaucaacugua

SEQ ID NO: 39349 - RNA, 23 nt, Artificial Sequence
  Synthetic oligonucleotide: CBLB-9003
uguaauaaacgcuaucaacugua

SEQ ID NO: 39350 - RNA, 24 nt, Artificial Sequence
  Synthetic oligonucleotide: CBLB-9004
guguaauaaacgcuaucaacugua

SEQ ID NO: 39351 - RNA, 18 nt, Artificial Sequence
  Synthetic oligonucleotide: CBLB-9005
uguaaauucaaggcugua

SEQ ID NO: 39352 - RNA, 19 nt, Artificial Sequence
  Synthetic oligonucleotide: CBLB-9006
auguaaauucaaggcugua

SEQ ID NO: 39353 - RNA, 20 nt, Artificial Sequence
  Synthetic oligonucleotide: CBLB-9007
cauguaaauucaaggcugua

SEQ ID NO: 39354 - RNA, 21 nt, Artificial Sequence
  Synthetic oligonucleotide: CBLB-9008
ccauguaaauucaaggcugua

SEQ ID NO: 39355 - RNA, 22 nt, Artificial Sequence
  Synthetic oligonucleotide: CBLB-9009
accauguaaauucaaggcugua

SEQ ID NO: 39356 - RNA, 23 nt, Artificial Sequence
  Synthetic oligonucleotide: CBLB-9010
aaccauguaaauucaaggcugua

SEQ ID NO: 39357 - RNA, 24 nt, Artificial Sequence
  Synthetic oligonucleotide: CBLB-9011
uaaccauguaaauucaaggcugua

SEQ ID NO: 39358 - RNA, 18 nt, Artificial Sequence
  Synthetic oligonucleotide: CBLB-9012
cgcgcaggccuccgagac

SEQ ID NO: 39359 - RNA, 19 nt, Artificial Sequence
  Synthetic oligonucleotide: CBLB-9013
gcgcgcaggccuccgagac

SEQ ID NO: 39360 - RNA, 20 nt, Artificial Sequence
  Synthetic oligonucleotide: CBLB-9014
agcgcgcaggccuccgagac

SEQ ID NO: 39361 - RNA, 21 nt, Artificial Sequence
  Synthetic oligonucleotide: CBLB-9015
cagcgcgcaggccuccgagac

SEQ ID NO: 39362 - RNA, 22 nt, Artificial Sequence
  Synthetic oligonucleotide: CBLB-9016
ccagcgcgcaggccuccgagac

SEQ ID NO: 39363 - RNA, 23 nt, Artificial Sequence
  Synthetic oligonucleotide: CBLB-9017
cccagcgcgcaggccuccgagac

SEQ ID NO: 39364 - RNA, 24 nt, Artificial Sequence
  Synthetic oligonucleotide: CBLB-9018
acccagcgcgcaggccuccgagac

SEQ ID NO: 39365 - RNA, 18 nt, Artificial Sequence
  Synthetic oligonucleotide: CBLB-9019
ucuccccucccgcccgac

SEQ ID NO: 39366 - RNA, 19 nt, Artificial Sequence
  Synthetic oligonucleotide: CBLB-9020
cucuccccucccgcccgac

SEQ ID NO: 39367 - RNA, 20 nt, Artificial Sequence
  Synthetic oligonucleotide: CBLB-9021
gcucuccccucccgcccgac

SEQ ID NO: 39368 - RNA, 21 nt, Artificial Sequence
  Synthetic oligonucleotide: CBLB-9022
cgcucuccccucccgcccgac

SEQ ID NO: 39369 - RNA, 22 nt, Artificial Sequence
  Synthetic oligonucleotide: CBLB-9023
ccgcucuccccucccgcccgac

SEQ ID NO: 39370 - RNA, 23 nt, Artificial Sequence
  Synthetic oligonucleotide: CBLB-9024
cccgcucuccccucccgcccgac

SEQ ID NO: 39371 - RNA, 24 nt, Artificial Sequence
  Synthetic oligonucleotide: CBLB-9025
acccgcucuccccucccgcccgac

SEQ ID NO: 39372 - RNA, 18 nt, Artificial Sequence
  Synthetic oligonucleotide: CBLB-9026
uggcacagaaauaaugac

SEQ ID NO: 39373 - RNA, 19 nt, Artificial Sequence
  Synthetic oligonucleotide: CBLB-9027
cuggcacagaaauaaugac

SEQ ID NO: 39374 - RNA, 20 nt, Artificial Sequence
  Synthetic oligonucleotide: CBLB-9028
acuggcacagaaauaaugac

SEQ ID NO: 39375 - RNA, 21 nt, Artificial Sequence
  Synthetic oligonucleotide: CBLB-9029
uacuggcacagaaauaaugac

SEQ ID NO: 39376 - RNA, 22 nt, Artificial Sequence
  Synthetic oligonucleotide: CBLB-9030
uuacuggcacagaaauaaugac

SEQ ID NO: 39377 - RNA, 23 nt, Artificial Sequence
  Synthetic oligonucleotide: CBLB-9031
auuacuggcacagaaauaaugac

SEQ ID NO: 39378 - RNA, 24 nt, Artificial Sequence
  Synthetic oligonucleotide: CBLB-9032
aauuacuggcacagaaauaaugac

SEQ ID NO: 39379 - RNA, 18 nt, Artificial Sequence
  Synthetic oligonucleotide: CBLB-9033
ggcccgcgccuggcuacc

SEQ ID NO: 39380 - RNA, 19 nt, Artificial Sequence
  Synthetic oligonucleotide: CBLB-9034
uggcccgcgccuggcuacc

SEQ ID NO: 39381 - RNA, 20 nt, Artificial Sequence
  Synthetic oligonucleotide: CBLB-9035
uuggcccgcgccuggcuacc

SEQ ID NO: 39382 - RNA, 21 nt, Artificial Sequence
  Synthetic oligonucleotide: CBLB-9036
cuuggcccgcgccuggcuacc

SEQ ID NO: 39383 - RNA, 22 nt, Artificial Sequence
  Synthetic oligonucleotide: CBLB-9037
ccuuggcccgcgccuggcuacc

SEQ ID NO: 39384 - RNA, 23 nt, Artificial Sequence
  Synthetic oligonucleotide: CBLB-9038
uccuuggcccgcgccuggcuacc

SEQ ID NO: 39385 - RNA, 24 nt, Artificial Sequence
  Synthetic oligonucleotide: CBLB-9039
cuccuuggcccgcgccuggcuacc

SEQ ID NO: 39386 - RNA, 18 nt, Artificial Sequence
  Synthetic oligonucleotide: CBLB-9040
ccuggcuaccccgggccc

SEQ ID NO: 39387 - RNA, 19 nt, Artificial Sequence
  Synthetic oligonucleotide: CBLB-9041
gccuggcuaccccgggccc

SEQ ID NO: 39388 - RNA, 20 nt, Artificial Sequence
  Synthetic oligonucleotide: CBLB-9042
cgccuggcuaccccgggccc

SEQ ID NO: 39389 - RNA, 21 nt, Artificial Sequence
  Synthetic oligonucleotide: CBLB-9043
gcgccuggcuaccccgggccc

SEQ ID NO: 39390 - RNA, 22 nt, Artificial Sequence
  Synthetic oligonucleotide: CBLB-9044
cgcgccuggcuaccccgggccc

SEQ ID NO: 39391 - RNA, 23 nt, Artificial Sequence
  Synthetic oligonucleotide: CBLB-9045
ccgcgccuggcuaccccgggccc

SEQ ID NO: 39392 - RNA, 24 nt, Artificial Sequence
  Synthetic oligonucleotide: CBLB-9046
cccgcgccuggcuaccccgggccc

SEQ ID NO: 39393 - RNA, 18 nt, Artificial Sequence
  Synthetic oligonucleotide: CBLB-9047
gcccgacucggggaggcc

SEQ ID NO: 39394 - RNA, 19 nt, Artificial Sequence
  Synthetic oligonucleotide: CBLB-9048
cgcccgacucggggaggcc

SEQ ID NO: 39395 - RNA, 20 nt, Artificial Sequence
  Synthetic oligonucleotide: CBLB-9049
ccgcccgacucggggaggcc

SEQ ID NO: 39396 - RNA, 21 nt, Artificial Sequence
  Synthetic oligonucleotide: CBLB-9050
cccgcccgacucggggaggcc

SEQ ID NO: 39397 - RNA, 22 nt, Artificial Sequence
  Synthetic oligonucleotide: CBLB-9051
ucccgcccgacucggggaggcc

SEQ ID NO: 39398 - RNA, 23 nt, Artificial Sequence
  Synthetic oligonucleotide: CBLB-9052
cucccgcccgacucggggaggcc

SEQ ID NO: 39399 - RNA, 24 nt, Artificial Sequence
  Synthetic oligonucleotide: CBLB-9053
ccucccgcccgacucggggaggcc

SEQ ID NO: 39400 - RNA, 18 nt, Artificial Sequence
  Synthetic oligonucleotide: CBLB-9054
gcaaaggcagcugagagc

SEQ ID NO: 39401 - RNA, 19 nt, Artificial Sequence
  Synthetic oligonucleotide: CBLB-9055
ggcaaaggcagcugagagc

SEQ ID NO: 39402 - RNA, 20 nt, Artificial Sequence
  Synthetic oligonucleotide: CBLB-9056
cggcaaaggcagcugagagc

SEQ ID NO: 39403 - RNA, 21 nt, Artificial Sequence
  Synthetic oligonucleotide: CBLB-9057
gcggcaaaggcagcugagagc

SEQ ID NO: 39404 - RNA, 22 nt, Artificial Sequence
  Synthetic oligonucleotide: CBLB-9058
ggcggcaaaggcagcugagagc

SEQ ID NO: 39405 - RNA, 23 nt, Artificial Sequence
  Synthetic oligonucleotide: CBLB-9059
cggcggcaaaggcagcugagagc

SEQ ID NO: 39406 - RNA, 24 nt, Artificial Sequence
  Synthetic oligonucleotide: CBLB-9060
gcggcggcaaaggcagcugagagc

SEQ ID NO: 39407 - RNA, 18 nt, Artificial Sequence
  Synthetic oligonucleotide: CBLB-9061
cgccgcagcagcacuagc

SEQ ID NO: 39408 - RNA, 19 nt, Artificial Sequence
  Synthetic oligonucleotide: CBLB-9062
acgccgcagcagcacuagc

SEQ ID NO: 39409 - RNA, 20 nt, Artificial Sequence
  Synthetic oligonucleotide: CBLB-7666
gacgccgcagcagcacuagc

SEQ ID NO: 39410 - RNA, 21 nt, Artificial Sequence
  Synthetic oligonucleotide: CBLB-9063
ggacgccgcagcagcacuagc

SEQ ID NO: 39411 - RNA, 22 nt, Artificial Sequence
  Synthetic oligonucleotide: CBLB-9064
gggacgccgcagcagcacuagc

SEQ ID NO: 39412 - RNA, 23 nt, Artificial Sequence
  Synthetic oligonucleotide: CBLB-9065
cgggacgccgcagcagcacuagc

SEQ ID NO: 39413 - RNA, 24 nt, Artificial Sequence
  Synthetic oligonucleotide: CBLB-9066
gcgggacgccgcagcagcacuagc

SEQ ID NO: 39414 - RNA, 18 nt, Artificial Sequence
  Synthetic oligonucleotide: CBLB-9067
cacacacaggacccaggc

SEQ ID NO: 39415 - RNA, 19 nt, Artificial Sequence
  Synthetic oligonucleotide: CBLB-9068
gcacacacaggacccaggc

SEQ ID NO: 39416 - RNA, 20 nt, Artificial Sequence
  Synthetic oligonucleotide: CBLB-9069
ggcacacacaggacccaggc

SEQ ID NO: 39417 - RNA, 21 nt, Artificial Sequence
  Synthetic oligonucleotide: CBLB-9070
uggcacacacaggacccaggc

SEQ ID NO: 39418 - RNA, 22 nt, Artificial Sequence
  Synthetic oligonucleotide: CBLB-9071
guggcacacacaggacccaggc

SEQ ID NO: 39419 - RNA, 23 nt, Artificial Sequence
  Synthetic oligonucleotide: CBLB-9072
uguggcacacacaggacccaggc

SEQ ID NO: 39420 - RNA, 24 nt, Artificial Sequence
  Synthetic oligonucleotide: CBLB-9073
cuguggcacacacaggacccaggc

SEQ ID NO: 39421 - RNA, 18 nt, Artificial Sequence
  Synthetic oligonucleotide: CBLB-9074
uguguggggagccccggc

SEQ ID NO: 39422 - RNA, 19 nt, Artificial Sequence
  Synthetic oligonucleotide: CBLB-9075
guguguggggagccccggc

SEQ ID NO: 39423 - RNA, 20 nt, Artificial Sequence
  Synthetic oligonucleotide: CBLB-7676
uguguguggggagccccggc

SEQ ID NO: 39424 - RNA, 21 nt, Artificial Sequence
  Synthetic oligonucleotide: CBLB-9076
guguguguggggagccccggc

SEQ ID NO: 39425 - RNA, 22 nt, Artificial Sequence
  Synthetic oligonucleotide: CBLB-9077
aguguguguggggagccccggc

SEQ ID NO: 39426 - RNA, 23 nt, Artificial Sequence
  Synthetic oligonucleotide: CBLB-9078
caguguguguggggagccccggc

SEQ ID NO: 39427 - RNA, 24 nt, Artificial Sequence
  Synthetic oligonucleotide: CBLB-9079
ccaguguguguggggagccccggc

SEQ ID NO: 39428 - RNA, 18 nt, Artificial Sequence
  Synthetic oligonucleotide: CBLB-9080
ccgggcccccgggccggc

SEQ ID NO: 39429 - RNA, 19 nt, Artificial Sequence
  Synthetic oligonucleotide: CBLB-9081
cccgggcccccgggccggc

SEQ ID NO: 39430 - RNA, 20 nt, Artificial Sequence
  Synthetic oligonucleotide: CBLB-9082
ccccgggcccccgggccggc

SEQ ID NO: 39431 - RNA, 21 nt, Artificial Sequence
  Synthetic oligonucleotide: CBLB-9083
accccgggcccccgggccggc

SEQ ID NO: 39432 - RNA, 22 nt, Artificial Sequence
  Synthetic oligonucleotide: CBLB-9084
uaccccgggcccccgggccggc

SEQ ID NO: 39433 - RNA, 23 nt, Artificial Sequence
  Synthetic oligonucleotide: CBLB-9085
cuaccccgggcccccgggccggc

SEQ ID NO: 39434 - RNA, 24 nt, Artificial Sequence
  Synthetic oligonucleotide: CBLB-9086
gcuaccccgggcccccgggccggc

SEQ ID NO: 39435 - RNA, 18 nt, Artificial Sequence
  Synthetic oligonucleotide: CBLB-9087
auuaaaauucuuaguugc

SEQ ID NO: 39436 - RNA, 19 nt, Artificial Sequence
  Synthetic oligonucleotide: CBLB-9088
uauuaaaauucuuaguugc

SEQ ID NO: 39437 - RNA, 20 nt, Artificial Sequence
  Synthetic oligonucleotide: CBLB-9089
guauuaaaauucuuaguugc

SEQ ID NO: 39438 - RNA, 21 nt, Artificial Sequence
  Synthetic oligonucleotide: CBLB-9090
aguauuaaaauucuuaguugc

SEQ ID NO: 39439 - RNA, 22 nt, Artificial Sequence
  Synthetic oligonucleotide: CBLB-9091
caguauuaaaauucuuaguugc

SEQ ID NO: 39440 - RNA, 23 nt, Artificial Sequence
  Synthetic oligonucleotide: CBLB-9092
acaguauuaaaauucuuaguugc

SEQ ID NO: 39441 - RNA, 24 nt, Artificial Sequence
  Synthetic oligonucleotide: CBLB-9093
uacaguauuaaaauucuuaguugc

SEQ ID NO: 39442 - RNA, 18 nt, Artificial Sequence
  Synthetic oligonucleotide: CBLB-9094
uccccucccgcccgacuc

SEQ ID NO: 39443 - RNA, 19 nt, Artificial Sequence
  Synthetic oligonucleotide: CBLB-9095
cuccccucccgcccgacuc

SEQ ID NO: 39444 - RNA, 20 nt, Artificial Sequence
  Synthetic oligonucleotide: CBLB-7683
ucuccccucccgcccgacuc

SEQ ID NO: 39445 - RNA, 21 nt, Artificial Sequence
  Synthetic oligonucleotide: CBLB-9096
cucuccccucccgcccgacuc

SEQ ID NO: 39446 - RNA, 22 nt, Artificial Sequence
  Synthetic oligonucleotide: CBLB-9097
gcucuccccucccgcccgacuc

SEQ ID NO: 39447 - RNA, 23 nt, Artificial Sequence
  Synthetic oligonucleotide: CBLB-9098
cgcucuccccucccgcccgacuc

SEQ ID NO: 39448 - RNA, 24 nt, Artificial Sequence
  Synthetic oligonucleotide: CBLB-9099
ccgcucuccccucccgcccgacuc

SEQ ID NO: 39449 - RNA, 18 nt, Artificial Sequence
  Synthetic oligonucleotide: CBLB-9100
gcugagaacagcucgcuc

SEQ ID NO: 39450 - RNA, 19 nt, Artificial Sequence
  Synthetic oligonucleotide: CBLB-9101
cgcugagaacagcucgcuc

SEQ ID NO: 39451 - RNA, 20 nt, Artificial Sequence
  Synthetic oligonucleotide: CBLB-9102
ucgcugagaacagcucgcuc

SEQ ID NO: 39452 - RNA, 21 nt, Artificial Sequence
  Synthetic oligonucleotide: CBLB-9103
aucgcugagaacagcucgcuc

SEQ ID NO: 39453 - RNA, 22 nt, Artificial Sequence
  Synthetic oligonucleotide: CBLB-9104
gaucgcugagaacagcucgcuc

SEQ ID NO: 39454 - RNA, 23 nt, Artificial Sequence
  Synthetic oligonucleotide: CBLB-9105
ggaucgcugagaacagcucgcuc

SEQ ID NO: 39455 - RNA, 24 nt, Artificial Sequence
  Synthetic oligonucleotide: CBLB-9106
gggaucgcugagaacagcucgcuc

SEQ ID NO: 39456 - RNA, 18 nt, Artificial Sequence
  Synthetic oligonucleotide: CBLB-9107
guuccaaaguaugaaguc

SEQ ID NO: 39457 - RNA, 19 nt, Artificial Sequence
  Synthetic oligonucleotide: CBLB-9108
aguuccaaaguaugaaguc

SEQ ID NO: 39458 - RNA, 20 nt, Artificial Sequence
  Synthetic oligonucleotide: CBLB-9109
aaguuccaaaguaugaaguc

SEQ ID NO: 39459 - RNA, 21 nt, Artificial Sequence
  Synthetic oligonucleotide: CBLB-9110
aaaguuccaaaguaugaaguc

SEQ ID NO: 39460 - RNA, 22 nt, Artificial Sequence
  Synthetic oligonucleotide: CBLB-9111
gaaaguuccaaaguaugaaguc

SEQ ID NO: 39461 - RNA, 23 nt, Artificial Sequence
  Synthetic oligonucleotide: CBLB-9112
agaaaguuccaaaguaugaaguc

SEQ ID NO: 39462 - RNA, 24 nt, Artificial Sequence
  Synthetic oligonucleotide: CBLB-9113
aagaaaguuccaaaguaugaaguc

SEQ ID NO: 39463 - RNA, 18 nt, Artificial Sequence
  Synthetic oligonucleotide: CBLB-9114
uucggcgccguagcuguc

SEQ ID NO: 39464 - RNA, 19 nt, Artificial Sequence
  Synthetic oligonucleotide: CBLB-9115
uuucggcgccguagcuguc

SEQ ID NO: 39465 - RNA, 20 nt, Artificial Sequence
  Synthetic oligonucleotide: CBLB-9116
cuuucggcgccguagcuguc

SEQ ID NO: 39466 - RNA, 21 nt, Artificial Sequence
  Synthetic oligonucleotide: CBLB-9117
ccuuucggcgccguagcuguc

SEQ ID NO: 39467 - RNA, 22 nt, Artificial Sequence
  Synthetic oligonucleotide: CBLB-9118
gccuuucggcgccguagcuguc

SEQ ID NO: 39468 - RNA, 23 nt, Artificial Sequence
  Synthetic oligonucleotide: CBLB-9119
ugccuuucggcgccguagcuguc

SEQ ID NO: 39469 - RNA, 24 nt, Artificial Sequence
  Synthetic oligonucleotide: CBLB-9120
uugccuuucggcgccguagcuguc

SEQ ID NO: 39470 - RNA, 18 nt, Artificial Sequence
  Synthetic oligonucleotide: CBLB-9121
acaucugagauguccaag

SEQ ID NO: 39471 - RNA, 19 nt, Artificial Sequence
  Synthetic oligonucleotide: CBLB-9122
aacaucugagauguccaag

SEQ ID NO: 39472 - RNA, 20 nt, Artificial Sequence
  Synthetic oligonucleotide: CBLB-9123
gaacaucugagauguccaag

SEQ ID NO: 39473 - RNA, 21 nt, Artificial Sequence
  Synthetic oligonucleotide: CBLB-9124
agaacaucugagauguccaag

SEQ ID NO: 39474 - RNA, 22 nt, Artificial Sequence
  Synthetic oligonucleotide: CBLB-9125
cagaacaucugagauguccaag

SEQ ID NO: 39475 - RNA, 23 nt, Artificial Sequence
  Synthetic oligonucleotide: CBLB-9126
ucagaacaucugagauguccaag

SEQ ID NO: 39476 - RNA, 24 nt, Artificial Sequence
  Synthetic oligonucleotide: CBLB-9127
aucagaacaucugagauguccaag

SEQ ID NO: 39477 - RNA, 18 nt, Artificial Sequence
  Synthetic oligonucleotide: CBLB-9128
aacagcucgcucccgaag

SEQ ID NO: 39478 - RNA, 19 nt, Artificial Sequence
  Synthetic oligonucleotide: CBLB-9129
gaacagcucgcucccgaag

SEQ ID NO: 39479 - RNA, 20 nt, Artificial Sequence
  Synthetic oligonucleotide: CBLB-9130
agaacagcucgcucccgaag

SEQ ID NO: 39480 - RNA, 21 nt, Artificial Sequence
  Synthetic oligonucleotide: CBLB-9131
gagaacagcucgcucccgaag

SEQ ID NO: 39481 - RNA, 22 nt, Artificial Sequence
  Synthetic oligonucleotide: CBLB-9132
ugagaacagcucgcucccgaag

SEQ ID NO: 39482 - RNA, 23 nt, Artificial Sequence
  Synthetic oligonucleotide: CBLB-9133
cugagaacagcucgcucccgaag

SEQ ID NO: 39483 - RNA, 24 nt, Artificial Sequence
  Synthetic oligonucleotide: CBLB-9134
gcugagaacagcucgcucccgaag

SEQ ID NO: 39484 - RNA, 18 nt, Artificial Sequence
  Synthetic oligonucleotide: CBLB-9135
ccgcagcagcacuagcag

SEQ ID NO: 39485 - RNA, 19 nt, Artificial Sequence
  Synthetic oligonucleotide: CBLB-9136
gccgcagcagcacuagcag

SEQ ID NO: 39486 - RNA, 20 nt, Artificial Sequence
  Synthetic oligonucleotide: CBLB-9137
cgccgcagcagcacuagcag

SEQ ID NO: 39487 - RNA, 21 nt, Artificial Sequence
  Synthetic oligonucleotide: CBLB-9138
acgccgcagcagcacuagcag

SEQ ID NO: 39488 - RNA, 22 nt, Artificial Sequence
  Synthetic oligonucleotide: CBLB-9139
gacgccgcagcagcacuagcag

SEQ ID NO: 39489 - RNA, 23 nt, Artificial Sequence
  Synthetic oligonucleotide: CBLB-9140
ggacgccgcagcagcacuagcag

SEQ ID NO: 39490 - RNA, 24 nt, Artificial Sequence
  Synthetic oligonucleotide: CBLB-9141
gggacgccgcagcagcacuagcag

SEQ ID NO: 39491 - RNA, 18 nt, Artificial Sequence
  Synthetic oligonucleotide: CBLB-9142
cggcggcggcaaaggcag

SEQ ID NO: 39492 - RNA, 19 nt, Artificial Sequence
  Synthetic oligonucleotide: CBLB-9143
acggcggcggcaaaggcag

SEQ ID NO: 39493 - RNA, 20 nt, Artificial Sequence
  Synthetic oligonucleotide: CBLB-9144
gacggcggcggcaaaggcag

SEQ ID NO: 39494 - RNA, 21 nt, Artificial Sequence
  Synthetic oligonucleotide: CBLB-9145
ggacggcggcggcaaaggcag

SEQ ID NO: 39495 - RNA, 22 nt, Artificial Sequence
  Synthetic oligonucleotide: CBLB-9146
uggacggcggcggcaaaggcag

SEQ ID NO: 39496 - RNA, 23 nt, Artificial Sequence
  Synthetic oligonucleotide: CBLB-9147
cuggacggcggcggcaaaggcag

SEQ ID NO: 39497 - RNA, 24 nt, Artificial Sequence
  Synthetic oligonucleotide: CBLB-9148
acuggacggcggcggcaaaggcag

SEQ ID NO: 39498 - RNA, 18 nt, Artificial Sequence
  Synthetic oligonucleotide: CBLB-9149
cagcagcacuagcaggag

SEQ ID NO: 39499 - RNA, 19 nt, Artificial Sequence
  Synthetic oligonucleotide: CBLB-9150
gcagcagcacuagcaggag

SEQ ID NO: 39500 - RNA, 20 nt, Artificial Sequence
  Synthetic oligonucleotide: CBLB-9151
cgcagcagcacuagcaggag

SEQ ID NO: 39501 - RNA, 21 nt, Artificial Sequence
  Synthetic oligonucleotide: CBLB-9152
ccgcagcagcacuagcaggag

SEQ ID NO: 39502 - RNA, 22 nt, Artificial Sequence
  Synthetic oligonucleotide: CBLB-9153
gccgcagcagcacuagcaggag

SEQ ID NO: 39503 - RNA, 23 nt, Artificial Sequence
  Synthetic oligonucleotide: CBLB-9154
cgccgcagcagcacuagcaggag

SEQ ID NO: 39504 - RNA, 24 nt, Artificial Sequence
  Synthetic oligonucleotide: CBLB-9155
acgccgcagcagcacuagcaggag

SEQ ID NO: 39505 - RNA, 18 nt, Artificial Sequence
  Synthetic oligonucleotide: CBLB-9156
acgccgcagcagcacuag

SEQ ID NO: 39506 - RNA, 19 nt, Artificial Sequence
  Synthetic oligonucleotide: CBLB-9157
gacgccgcagcagcacuag

SEQ ID NO: 39507 - RNA, 20 nt, Artificial Sequence
  Synthetic oligonucleotide: CBLB-9158
ggacgccgcagcagcacuag

SEQ ID NO: 39508 - RNA, 21 nt, Artificial Sequence
  Synthetic oligonucleotide: CBLB-9159
gggacgccgcagcagcacuag

SEQ ID NO: 39509 - RNA, 22 nt, Artificial Sequence
  Synthetic oligonucleotide: CBLB-9160
cgggacgccgcagcagcacuag

SEQ ID NO: 39510 - RNA, 23 nt, Artificial Sequence
  Synthetic oligonucleotide: CBLB-9161
gcgggacgccgcagcagcacuag

SEQ ID NO: 39511 - RNA, 24 nt, Artificial Sequence
  Synthetic oligonucleotide: CBLB-9162
cgcgggacgccgcagcagcacuag

SEQ ID NO: 39512 - RNA, 18 nt, Artificial Sequence
  Synthetic oligonucleotide: CBLB-9163
aaacgcuaucaacuguag

SEQ ID NO: 39513 - RNA, 19 nt, Artificial Sequence
  Synthetic oligonucleotide: CBLB-9164
uaaacgcuaucaacuguag

SEQ ID NO: 39514 - RNA, 20 nt, Artificial Sequence
  Synthetic oligonucleotide: CBLB-7704
auaaacgcuaucaacuguag

SEQ ID NO: 39515 - RNA, 21 nt, Artificial Sequence
  Synthetic oligonucleotide: CBLB-9165
aauaaacgcuaucaacuguag

SEQ ID NO: 39516 - RNA, 22 nt, Artificial Sequence
  Synthetic oligonucleotide: CBLB-9166
uaauaaacgcuaucaacuguag

SEQ ID NO: 39517 - RNA, 23 nt, Artificial Sequence
  Synthetic oligonucleotide: CBLB-9167
guaauaaacgcuaucaacuguag

SEQ ID NO: 39518 - RNA, 24 nt, Artificial Sequence
  Synthetic oligonucleotide: CBLB-9168
uguaauaaacgcuaucaacuguag

SEQ ID NO: 39519 - RNA, 18 nt, Artificial Sequence
  Synthetic oligonucleotide: CBLB-9169
gcgcaggccuccgagacg

SEQ ID NO: 39520 - RNA, 19 nt, Artificial Sequence
  Synthetic oligonucleotide: CBLB-9170
cgcgcaggccuccgagacg

SEQ ID NO: 39521 - RNA, 20 nt, Artificial Sequence
  Synthetic oligonucleotide: CBLB-7705
gcgcgcaggccuccgagacg

SEQ ID NO: 39522 - RNA, 21 nt, Artificial Sequence
  Synthetic oligonucleotide: CBLB-9171
agcgcgcaggccuccgagacg

SEQ ID NO: 39523 - RNA, 22 nt, Artificial Sequence
  Synthetic oligonucleotide: CBLB-9172
cagcgcgcaggccuccgagacg

SEQ ID NO: 39524 - RNA, 23 nt, Artificial Sequence
  Synthetic oligonucleotide: CBLB-9173
ccagcgcgcaggccuccgagacg

SEQ ID NO: 39525 - RNA, 24 nt, Artificial Sequence
  Synthetic oligonucleotide: CBLB-9174
cccagcgcgcaggccuccgagacg

SEQ ID NO: 39526 - RNA, 18 nt, Artificial Sequence
  Synthetic oligonucleotide: CBLB-9175
gagaacagcucgcucccg

SEQ ID NO: 39527 - RNA, 19 nt, Artificial Sequence
  Synthetic oligonucleotide: CBLB-9176
ugagaacagcucgcucccg

SEQ ID NO: 39528 - RNA, 20 nt, Artificial Sequence
  Synthetic oligonucleotide: CBLB-9177
cugagaacagcucgcucccg

SEQ ID NO: 39529 - RNA, 21 nt, Artificial Sequence
  Synthetic oligonucleotide: CBLB-9178
gcugagaacagcucgcucccg

SEQ ID NO: 39530 - RNA, 22 nt, Artificial Sequence
  Synthetic oligonucleotide: CBLB-9179
cgcugagaacagcucgcucccg

SEQ ID NO: 39531 - RNA, 23 nt, Artificial Sequence
  Synthetic oligonucleotide: CBLB-9180
ucgcugagaacagcucgcucccg

SEQ ID NO: 39532 - RNA, 24 nt, Artificial Sequence
  Synthetic oligonucleotide: CBLB-9181
aucgcugagaacagcucgcucccg

SEQ ID NO: 39533 - RNA, 18 nt, Artificial Sequence
  Synthetic oligonucleotide: CBLB-9182
cccgacucggggaggccg

SEQ ID NO: 39534 - RNA, 19 nt, Artificial Sequence
  Synthetic oligonucleotide: CBLB-9183
gcccgacucggggaggccg

SEQ ID NO: 39535 - RNA, 20 nt, Artificial Sequence
  Synthetic oligonucleotide: CBLB-7713
cgcccgacucggggaggccg

SEQ ID NO: 39536 - RNA, 21 nt, Artificial Sequence
  Synthetic oligonucleotide: CBLB-9184
ccgcccgacucggggaggccg

SEQ ID NO: 39537 - RNA, 22 nt, Artificial Sequence
  Synthetic oligonucleotide: CBLB-9185
cccgcccgacucggggaggccg

SEQ ID NO: 39538 - RNA, 23 nt, Artificial Sequence
  Synthetic oligonucleotide: CBLB-9186
ucccgcccgacucggggaggccg

SEQ ID NO: 39539 - RNA, 24 nt, Artificial Sequence
  Synthetic oligonucleotide: CBLB-9187
cucccgcccgacucggggaggccg

SEQ ID NO: 39540 - RNA, 18 nt, Artificial Sequence
  Synthetic oligonucleotide: CBLB-9188
cggcugggagugggaucg

SEQ ID NO: 39541 - RNA, 19 nt, Artificial Sequence
  Synthetic oligonucleotide: CBLB-9189
ccggcugggagugggaucg

SEQ ID NO: 39542 - RNA, 20 nt, Artificial Sequence
  Synthetic oligonucleotide: CBLB-9190
cccggcugggagugggaucg

SEQ ID NO: 39543 - RNA, 21 nt, Artificial Sequence
  Synthetic oligonucleotide: CBLB-9191
ccccggcugggagugggaucg

SEQ ID NO: 39544 - RNA, 22 nt, Artificial Sequence
  Synthetic oligonucleotide: CBLB-9192
gccccggcugggagugggaucg

SEQ ID NO: 39545 - RNA, 23 nt, Artificial Sequence
  Synthetic oligonucleotide: CBLB-9193
agccccggcugggagugggaucg

SEQ ID NO: 39546 - RNA, 24 nt, Artificial Sequence
  Synthetic oligonucleotide: CBLB-9194
gagccccggcugggagugggaucg

SEQ ID NO: 39547 - RNA, 18 nt, Artificial Sequence
  Synthetic oligonucleotide: CBLB-9195
ccccucccgcccgacucg

SEQ ID NO: 39548 - RNA, 19 nt, Artificial Sequence
  Synthetic oligonucleotide: CBLB-9196
uccccucccgcccgacucg

SEQ ID NO: 39549 - RNA, 20 nt, Artificial Sequence
  Synthetic oligonucleotide: CBLB-7716
cuccccucccgcccgacucg

SEQ ID NO: 39550 - RNA, 21 nt, Artificial Sequence
  Synthetic oligonucleotide: CBLB-9197
ucuccccucccgcccgacucg

SEQ ID NO: 39551 - RNA, 22 nt, Artificial Sequence
  Synthetic oligonucleotide: CBLB-9198
cucuccccucccgcccgacucg

SEQ ID NO: 39552 - RNA, 23 nt, Artificial Sequence
  Synthetic oligonucleotide: CBLB-9199
gcucuccccucccgcccgacucg

SEQ ID NO: 39553 - RNA, 24 nt, Artificial Sequence
  Synthetic oligonucleotide: CBLB-9200
cgcucuccccucccgcccgacucg

SEQ ID NO: 39554 - RNA, 18 nt, Artificial Sequence
  Synthetic oligonucleotide: CBLB-9201
ggaggaggagaccgcucg

SEQ ID NO: 39555 - RNA, 19 nt, Artificial Sequence
  Synthetic oligonucleotide: CBLB-9202
aggaggaggagaccgcucg

SEQ ID NO: 39556 - RNA, 20 nt, Artificial Sequence
  Synthetic oligonucleotide: CBLB-9203
caggaggaggagaccgcucg

SEQ ID NO: 39557 - RNA, 21 nt, Artificial Sequence
  Synthetic oligonucleotide: CBLB-9204
gcaggaggaggagaccgcucg

SEQ ID NO: 39558 - RNA, 22 nt, Artificial Sequence
  Synthetic oligonucleotide: CBLB-9205
agcaggaggaggagaccgcucg

SEQ ID NO: 39559 - RNA, 23 nt, Artificial Sequence
  Synthetic oligonucleotide: CBLB-9206
uagcaggaggaggagaccgcucg

SEQ ID NO: 39560 - RNA, 24 nt, Artificial Sequence
  Synthetic oligonucleotide: CBLB-9207
cuagcaggaggaggagaccgcucg

SEQ ID NO: 39561 - RNA, 18 nt, Artificial Sequence
  Synthetic oligonucleotide: CBLB-9208
cgcagcagcacuagcagg

SEQ ID NO: 39562 - RNA, 19 nt, Artificial Sequence
  Synthetic oligonucleotide: CBLB-9209
ccgcagcagcacuagcagg

SEQ ID NO: 39563 - RNA, 20 nt, Artificial Sequence
  Synthetic oligonucleotide: CBLB-7719
gccgcagcagcacuagcagg

SEQ ID NO: 39564 - RNA, 21 nt, Artificial Sequence
  Synthetic oligonucleotide: CBLB-9210
cgccgcagcagcacuagcagg

SEQ ID NO: 39565 - RNA, 22 nt, Artificial Sequence
  Synthetic oligonucleotide: CBLB-9211
acgccgcagcagcacuagcagg

SEQ ID NO: 39566 - RNA, 23 nt, Artificial Sequence
  Synthetic oligonucleotide: CBLB-9212
gacgccgcagcagcacuagcagg

SEQ ID NO: 39567 - RNA, 24 nt, Artificial Sequence
  Synthetic oligonucleotide: CBLB-9213
ggacgccgcagcagcacuagcagg

SEQ ID NO: 39568 - RNA, 18 nt, Artificial Sequence
  Synthetic oligonucleotide: CBLB-9214
agcagcacuagcaggagg

SEQ ID NO: 39569 - RNA, 19 nt, Artificial Sequence
  Synthetic oligonucleotide: CBLB-9215
cagcagcacuagcaggagg

SEQ ID NO: 39570 - RNA, 20 nt, Artificial Sequence
  Synthetic oligonucleotide: CBLB-7720
gcagcagcacuagcaggagg

SEQ ID NO: 39571 - RNA, 21 nt, Artificial Sequence
  Synthetic oligonucleotide: CBLB-9216
cgcagcagcacuagcaggagg

SEQ ID NO: 39572 - RNA, 22 nt, Artificial Sequence
  Synthetic oligonucleotide: CBLB-9217
ccgcagcagcacuagcaggagg

SEQ ID NO: 39573 - RNA, 23 nt, Artificial Sequence
  Synthetic oligonucleotide: CBLB-9218
gccgcagcagcacuagcaggagg

SEQ ID NO: 39574 - RNA, 24 nt, Artificial Sequence
  Synthetic oligonucleotide: CBLB-9219
cgccgcagcagcacuagcaggagg

SEQ ID NO: 39575 - RNA, 18 nt, Artificial Sequence
  Synthetic oligonucleotide: CBLB-9220
guguguggggagccccgg

SEQ ID NO: 39576 - RNA, 19 nt, Artificial Sequence
  Synthetic oligonucleotide: CBLB-9221
uguguguggggagccccgg

SEQ ID NO: 39577 - RNA, 20 nt, Artificial Sequence
  Synthetic oligonucleotide: CBLB-9222
guguguguggggagccccgg

SEQ ID NO: 39578 - RNA, 21 nt, Artificial Sequence
  Synthetic oligonucleotide: CBLB-9223
aguguguguggggagccccgg

SEQ ID NO: 39579 - RNA, 22 nt, Artificial Sequence
  Synthetic oligonucleotide: CBLB-9224
caguguguguggggagccccgg

SEQ ID NO: 39580 - RNA, 23 nt, Artificial Sequence
  Synthetic oligonucleotide: CBLB-9225
ccaguguguguggggagccccgg

SEQ ID NO: 39581 - RNA, 24 nt, Artificial Sequence
  Synthetic oligonucleotide: CBLB-9226
cccaguguguguggggagccccgg

SEQ ID NO: 39582 - RNA, 18 nt, Artificial Sequence
  Synthetic oligonucleotide: CBLB-9227
ccgggccggcaagaagug

SEQ ID NO: 39583 - RNA, 19 nt, Artificial Sequence
  Synthetic oligonucleotide: CBLB-9228
cccgggccggcaagaagug

SEQ ID NO: 39584 - RNA, 20 nt, Artificial Sequence
  Synthetic oligonucleotide: CBLB-7735
ccccgggccggcaagaagug

SEQ ID NO: 39585 - RNA, 21 nt, Artificial Sequence
  Synthetic oligonucleotide: CBLB-9229
cccccgggccggcaagaagug

SEQ ID NO: 39586 - RNA, 22 nt, Artificial Sequence
  Synthetic oligonucleotide: CBLB-9230
gcccccgggccggcaagaagug

SEQ ID NO: 39587 - RNA, 23 nt, Artificial Sequence
  Synthetic oligonucleotide: CBLB-9231
ggcccccgggccggcaagaagug

SEQ ID NO: 39588 - RNA, 24 nt, Artificial Sequence
  Synthetic oligonucleotide: CBLB-9232
gggcccccgggccggcaagaagug

SEQ ID NO: 39589 - RNA, 18 nt, Artificial Sequence
  Synthetic oligonucleotide: CBLB-9233
uuguugguagcaugagug

SEQ ID NO: 39590 - RNA, 19 nt, Artificial Sequence
  Synthetic oligonucleotide: CBLB-9234
auuguugguagcaugagug

SEQ ID NO: 39591 - RNA, 20 nt, Artificial Sequence
  Synthetic oligonucleotide: CBLB-9235
aauuguugguagcaugagug

SEQ ID NO: 39592 - RNA, 21 nt, Artificial Sequence
  Synthetic oligonucleotide: CBLB-9236
caauuguugguagcaugagug

SEQ ID NO: 39593 - RNA, 22 nt, Artificial Sequence
  Synthetic oligonucleotide: CBLB-9237
gcaauuguugguagcaugagug

SEQ ID NO: 39594 - RNA, 23 nt, Artificial Sequence
  Synthetic oligonucleotide: CBLB-9238
agcaauuguugguagcaugagug

SEQ ID NO: 39595 - RNA, 24 nt, Artificial Sequence
  Synthetic oligonucleotide: CBLB-9239
gagcaauuguugguagcaugagug

SEQ ID NO: 39596 - RNA, 18 nt, Artificial Sequence
  Synthetic oligonucleotide: CBLB-9240
cacgcagcccagugugug

SEQ ID NO: 39597 - RNA, 19 nt, Artificial Sequence
  Synthetic oligonucleotide: CBLB-9241
gcacgcagcccagugugug

SEQ ID NO: 39598 - RNA, 20 nt, Artificial Sequence
  Synthetic oligonucleotide: CBLB-7740
cgcacgcagcccagugugug

SEQ ID NO: 39599 - RNA, 21 nt, Artificial Sequence
  Synthetic oligonucleotide: CBLB-9242
acgcacgcagcccagugugug

SEQ ID NO: 39600 - RNA, 22 nt, Artificial Sequence
  Synthetic oligonucleotide: CBLB-9243
cacgcacgcagcccagugugug

SEQ ID NO: 39601 - RNA, 23 nt, Artificial Sequence
  Synthetic oligonucleotide: CBLB-9244
acacgcacgcagcccagugugug

SEQ ID NO: 39602 - RNA, 24 nt, Artificial Sequence
  Synthetic oligonucleotide: CBLB-9245
cacacgcacgcagcccagugugug

SEQ ID NO: 39603 - RNA, 18 nt, Artificial Sequence
  Synthetic oligonucleotide: CBLB-9246
cgcagcccagugugugug

SEQ ID NO: 39604 - RNA, 19 nt, Artificial Sequence
  Synthetic oligonucleotide: CBLB-9247
acgcagcccagugugugug

SEQ ID NO: 39605 - RNA, 20 nt, Artificial Sequence
  Synthetic oligonucleotide: CBLB-7741
cacgcagcccagugugugug

SEQ ID NO: 39606 - RNA, 21 nt, Artificial Sequence
  Synthetic oligonucleotide: CBLB-9248
gcacgcagcccagugugugug

SEQ ID NO: 39607 - RNA, 22 nt, Artificial Sequence
  Synthetic oligonucleotide: CBLB-9249
cgcacgcagcccagugugugug

SEQ ID NO: 39608 - RNA, 23 nt, Artificial Sequence
  Synthetic oligonucleotide: CBLB-9250
acgcacgcagcccagugugugug

SEQ ID NO: 39609 - RNA, 24 nt, Artificial Sequence
  Synthetic oligonucleotide: CBLB-9251
cacgcacgcagcccagugugugug

SEQ ID NO: 39610 - RNA, 18 nt, Artificial Sequence
  Synthetic oligonucleotide: CBLB-9252
guuuaaccuaugauauug

SEQ ID NO: 39611 - RNA, 19 nt, Artificial Sequence
  Synthetic oligonucleotide: CBLB-9253
uguuuaaccuaugauauug

SEQ ID NO: 39612 - RNA, 20 nt, Artificial Sequence
  Synthetic oligonucleotide: CBLB-9254
uuguuuaaccuaugauauug

SEQ ID NO: 39613 - RNA, 21 nt, Artificial Sequence
  Synthetic oligonucleotide: CBLB-9255
uuuguuuaaccuaugauauug

SEQ ID NO: 39614 - RNA, 22 nt, Artificial Sequence
  Synthetic oligonucleotide: CBLB-9256
auuuguuuaaccuaugauauug

SEQ ID NO: 39615 - RNA, 23 nt, Artificial Sequence
  Synthetic oligonucleotide: CBLB-9257
cauuuguuuaaccuaugauauug

SEQ ID NO: 39616 - RNA, 24 nt, Artificial Sequence
  Synthetic oligonucleotide: CBLB-9258
gcauuuguuuaaccuaugauauug

SEQ ID NO: 39617 - RNA, 18 nt, Artificial Sequence
  Synthetic oligonucleotide: CBLB-9259
uguaaaauaucagaacau

SEQ ID NO: 39618 - RNA, 19 nt, Artificial Sequence
  Synthetic oligonucleotide: CBLB-9260
auguaaaauaucagaacau

SEQ ID NO: 39619 - RNA, 20 nt, Artificial Sequence
  Synthetic oligonucleotide: CBLB-9261
aauguaaaauaucagaacau

SEQ ID NO: 39620 - RNA, 21 nt, Artificial Sequence
  Synthetic oligonucleotide: CBLB-9262
caauguaaaauaucagaacau

SEQ ID NO: 39621 - RNA, 22 nt, Artificial Sequence
  Synthetic oligonucleotide: CBLB-9263
ccaauguaaaauaucagaacau

SEQ ID NO: 39622 - RNA, 23 nt, Artificial Sequence
  Synthetic oligonucleotide: CBLB-9264
cccaauguaaaauaucagaacau

SEQ ID NO: 39623 - RNA, 24 nt, Artificial Sequence
  Synthetic oligonucleotide: CBLB-9265
acccaauguaaaauaucagaacau

SEQ ID NO: 39624 - RNA, 18 nt, Artificial Sequence
  Synthetic oligonucleotide: CBLB-9266
acgugguuagagcaagau

SEQ ID NO: 39625 - RNA, 19 nt, Artificial Sequence
  Synthetic oligonucleotide: CBLB-9267
uacgugguuagagcaagau

SEQ ID NO: 39626 - RNA, 20 nt, Artificial Sequence
  Synthetic oligonucleotide: CBLB-9268
uuacgugguuagagcaagau

SEQ ID NO: 39627 - RNA, 21 nt, Artificial Sequence
  Synthetic oligonucleotide: CBLB-9269
guuacgugguuagagcaagau

SEQ ID NO: 39628 - RNA, 22 nt, Artificial Sequence
  Synthetic oligonucleotide: CBLB-9270
gguuacgugguuagagcaagau

SEQ ID NO: 39629 - RNA, 23 nt, Artificial Sequence
  Synthetic oligonucleotide: CBLB-9271
agguuacgugguuagagcaagau

SEQ ID NO: 39630 - RNA, 24 nt, Artificial Sequence
  Synthetic oligonucleotide: CBLB-9272
cagguuacgugguuagagcaagau

SEQ ID NO: 39631 - RNA, 18 nt, Artificial Sequence
  Synthetic oligonucleotide: CBLB-9273
aaacccaauguaaaauau

SEQ ID NO: 39632 - RNA, 19 nt, Artificial Sequence
  Synthetic oligonucleotide: CBLB-9274
aaaacccaauguaaaauau

SEQ ID NO: 39633 - RNA, 20 nt, Artificial Sequence
  Synthetic oligonucleotide: CBLB-9275
aaaaacccaauguaaaauau

SEQ ID NO: 39634 - RNA, 21 nt, Artificial Sequence
  Synthetic oligonucleotide: CBLB-9276
aaaaaacccaauguaaaauau

SEQ ID NO: 39635 - RNA, 22 nt, Artificial Sequence
  Synthetic oligonucleotide: CBLB-9277
caaaaaacccaauguaaaauau

SEQ ID NO: 39636 - RNA, 23 nt, Artificial Sequence
  Synthetic oligonucleotide: CBLB-9278
acaaaaaacccaauguaaaauau

SEQ ID NO: 39637 - RNA, 24 nt, Artificial Sequence
  Synthetic oligonucleotide: CBLB-9279
aacaaaaaacccaauguaaaauau

SEQ ID NO: 39638 - RNA, 18 nt, Artificial Sequence
  Synthetic oligonucleotide: CBLB-9280
cuccccucccgcccgacu

SEQ ID NO: 39639 - RNA, 19 nt, Artificial Sequence
  Synthetic oligonucleotide: CBLB-9281
ucuccccucccgcccgacu

SEQ ID NO: 39640 - RNA, 20 nt, Artificial Sequence
  Synthetic oligonucleotide: CBLB-7745
cucuccccucccgcccgacu

SEQ ID NO: 39641 - RNA, 21 nt, Artificial Sequence
  Synthetic oligonucleotide: CBLB-9282
gcucuccccucccgcccgacu

SEQ ID NO: 39642 - RNA, 22 nt, Artificial Sequence
  Synthetic oligonucleotide: CBLB-9283
cgcucuccccucccgcccgacu

SEQ ID NO: 39643 - RNA, 23 nt, Artificial Sequence
  Synthetic oligonucleotide: CBLB-9284
ccgcucuccccucccgcccgacu

SEQ ID NO: 39644 - RNA, 24 nt, Artificial Sequence
  Synthetic oligonucleotide: CBLB-9285
cccgcucuccccucccgcccgacu

SEQ ID NO: 39645 - RNA, 18 nt, Artificial Sequence
  Synthetic oligonucleotide: CBLB-9286
aacccagcgcgcaggccu

SEQ ID NO: 39646 - RNA, 19 nt, Artificial Sequence
  Synthetic oligonucleotide: CBLB-9287
caacccagcgcgcaggccu

SEQ ID NO: 39647 - RNA, 20 nt, Artificial Sequence
  Synthetic oligonucleotide: CBLB-9288
gcaacccagcgcgcaggccu

SEQ ID NO: 39648 - RNA, 21 nt, Artificial Sequence
  Synthetic oligonucleotide: CBLB-9289
agcaacccagcgcgcaggccu

SEQ ID NO: 39649 - RNA, 22 nt, Artificial Sequence
  Synthetic oligonucleotide: CBLB-9290
gagcaacccagcgcgcaggccu

SEQ ID NO: 39650 - RNA, 23 nt, Artificial Sequence
  Synthetic oligonucleotide: CBLB-9291
ggagcaacccagcgcgcaggccu

SEQ ID NO: 39651 - RNA, 24 nt, Artificial Sequence
  Synthetic oligonucleotide: CBLB-9292
aggagcaacccagcgcgcaggccu

SEQ ID NO: 39652 - RNA, 18 nt, Artificial Sequence
  Synthetic oligonucleotide: CBLB-9293
gcggcggcaaaggcagcu

SEQ ID NO: 39653 - RNA, 19 nt, Artificial Sequence
  Synthetic oligonucleotide: CBLB-9294
ggcggcggcaaaggcagcu

SEQ ID NO: 39654 - RNA, 20 nt, Artificial Sequence
  Synthetic oligonucleotide: CBLB-9295
cggcggcggcaaaggcagcu

SEQ ID NO: 39655 - RNA, 21 nt, Artificial Sequence
  Synthetic oligonucleotide: CBLB-9296
acggcggcggcaaaggcagcu

SEQ ID NO: 39656 - RNA, 22 nt, Artificial Sequence
  Synthetic oligonucleotide: CBLB-9297
gacggcggcggcaaaggcagcu

SEQ ID NO: 39657 - RNA, 23 nt, Artificial Sequence
  Synthetic oligonucleotide: CBLB-9298
ggacggcggcggcaaaggcagcu

SEQ ID NO: 39658 - RNA, 24 nt, Artificial Sequence
  Synthetic oligonucleotide: CBLB-9299
uggacggcggcggcaaaggcagcu

SEQ ID NO: 39659 - RNA, 18 nt, Artificial Sequence
  Synthetic oligonucleotide: CBLB-9300
gcugggagugggaucgcu

SEQ ID NO: 39660 - RNA, 19 nt, Artificial Sequence
  Synthetic oligonucleotide: CBLB-9301
ggcugggagugggaucgcu

SEQ ID NO: 39661 - RNA, 20 nt, Artificial Sequence
  Synthetic oligonucleotide: CBLB-9302
cggcugggagugggaucgcu

SEQ ID NO: 39662 - RNA, 21 nt, Artificial Sequence
  Synthetic oligonucleotide: CBLB-9303
ccggcugggagugggaucgcu

SEQ ID NO: 39663 - RNA, 22 nt, Artificial Sequence
  Synthetic oligonucleotide: CBLB-9304
cccggcugggagugggaucgcu

SEQ ID NO: 39664 - RNA, 23 nt, Artificial Sequence
  Synthetic oligonucleotide: CBLB-9305
ccccggcugggagugggaucgcu

SEQ ID NO: 39665 - RNA, 24 nt, Artificial Sequence
  Synthetic oligonucleotide: CBLB-9306
gccccggcugggagugggaucgcu

SEQ ID NO: 39666 - RNA, 18 nt, Artificial Sequence
  Synthetic oligonucleotide: CBLB-9307
acacacaggacccaggcu

SEQ ID NO: 39667 - RNA, 19 nt, Artificial Sequence
  Synthetic oligonucleotide: CBLB-9308
cacacacaggacccaggcu

SEQ ID NO: 39668 - RNA, 20 nt, Artificial Sequence
  Synthetic oligonucleotide: CBLB-7749
gcacacacaggacccaggcu

SEQ ID NO: 39669 - RNA, 21 nt, Artificial Sequence
  Synthetic oligonucleotide: CBLB-9309
ggcacacacaggacccaggcu

SEQ ID NO: 39670 - RNA, 22 nt, Artificial Sequence
  Synthetic oligonucleotide: CBLB-9310
uggcacacacaggacccaggcu

SEQ ID NO: 39671 - RNA, 23 nt, Artificial Sequence
  Synthetic oligonucleotide: CBLB-9311
guggcacacacaggacccaggcu

SEQ ID NO: 39672 - RNA, 24 nt, Artificial Sequence
  Synthetic oligonucleotide: CBLB-9312
uguggcacacacaggacccaggcu

SEQ ID NO: 39673 - RNA, 18 nt, Artificial Sequence
  Synthetic oligonucleotide: CBLB-9313
gaaagaaaguuccaaagu

SEQ ID NO: 39674 - RNA, 19 nt, Artificial Sequence
  Synthetic oligonucleotide: CBLB-9314
ggaaagaaaguuccaaagu

SEQ ID NO: 39675 - RNA, 20 nt, Artificial Sequence
  Synthetic oligonucleotide: CBLB-9315
uggaaagaaaguuccaaagu

SEQ ID NO: 39676 - RNA, 21 nt, Artificial Sequence
  Synthetic oligonucleotide: CBLB-9316
guggaaagaaaguuccaaagu

SEQ ID NO: 39677 - RNA, 22 nt, Artificial Sequence
  Synthetic oligonucleotide: CBLB-9317
aguggaaagaaaguuccaaagu

SEQ ID NO: 39678 - RNA, 23 nt, Artificial Sequence
  Synthetic oligonucleotide: CBLB-9318
uaguggaaagaaaguuccaaagu

SEQ ID NO: 39679 - RNA, 24 nt, Artificial Sequence
  Synthetic oligonucleotide: CBLB-9319
guaguggaaagaaaguuccaaagu

SEQ ID NO: 39680 - RNA, 18 nt, Artificial Sequence
  Synthetic oligonucleotide: CBLB-9320
cccgggccggcaagaagu

SEQ ID NO: 39681 - RNA, 19 nt, Artificial Sequence
  Synthetic oligonucleotide: CBLB-9321
ccccgggccggcaagaagu

SEQ ID NO: 39682 - RNA, 20 nt, Artificial Sequence
  Synthetic oligonucleotide: CBLB-9322
cccccgggccggcaagaagu

SEQ ID NO: 39683 - RNA, 21 nt, Artificial Sequence
  Synthetic oligonucleotide: CBLB-9323
gcccccgggccggcaagaagu

SEQ ID NO: 39684 - RNA, 22 nt, Artificial Sequence
  Synthetic oligonucleotide: CBLB-9324
ggcccccgggccggcaagaagu

SEQ ID NO: 39685 - RNA, 23 nt, Artificial Sequence
  Synthetic oligonucleotide: CBLB-9325
gggcccccgggccggcaagaagu

SEQ ID NO: 39686 - RNA, 24 nt, Artificial Sequence
  Synthetic oligonucleotide: CBLB-9326
cgggcccccgggccggcaagaagu

SEQ ID NO: 39687 - RNA, 18 nt, Artificial Sequence
  Synthetic oligonucleotide: CBLB-9327
uaguugcuagaaaguggu

SEQ ID NO: 39688 - RNA, 19 nt, Artificial Sequence
  Synthetic oligonucleotide: CBLB-9328
uuaguugcuagaaaguggu

SEQ ID NO: 39689 - RNA, 20 nt, Artificial Sequence
  Synthetic oligonucleotide: CBLB-9329
cuuaguugcuagaaaguggu

SEQ ID NO: 39690 - RNA, 21 nt, Artificial Sequence
  Synthetic oligonucleotide: CBLB-9330
ucuuaguugcuagaaaguggu

SEQ ID NO: 39691 - RNA, 22 nt, Artificial Sequence
  Synthetic oligonucleotide: CBLB-9331
uucuuaguugcuagaaaguggu

SEQ ID NO: 39692 - RNA, 23 nt, Artificial Sequence
  Synthetic oligonucleotide: CBLB-9332
auucuuaguugcuagaaaguggu

SEQ ID NO: 39693 - RNA, 24 nt, Artificial Sequence
  Synthetic oligonucleotide: CBLB-9333
aauucuuaguugcuagaaaguggu

SEQ ID NO: 39694 - RNA, 18 nt, Artificial Sequence
  Synthetic oligonucleotide: CBLB-9334
uuuaucagguuacguggu

SEQ ID NO: 39695 - RNA, 19 nt, Artificial Sequence
  Synthetic oligonucleotide: CBLB-9335
uuuuaucagguuacguggu

SEQ ID NO: 39696 - RNA, 20 nt, Artificial Sequence
  Synthetic oligonucleotide: CBLB-9336
auuuuaucagguuacguggu

SEQ ID NO: 39697 - RNA, 21 nt, Artificial Sequence
  Synthetic oligonucleotide: CBLB-9337
cauuuuaucagguuacguggu

SEQ ID NO: 39698 - RNA, 22 nt, Artificial Sequence
  Synthetic oligonucleotide: CBLB-9338
acauuuuaucagguuacguggu

SEQ ID NO: 39699 - RNA, 23 nt, Artificial Sequence
  Synthetic oligonucleotide: CBLB-9339
aacauuuuaucagguuacguggu

SEQ ID NO: 39700 - RNA, 24 nt, Artificial Sequence
  Synthetic oligonucleotide: CBLB-9340
aaacauuuuaucagguuacguggu

SEQ ID NO: 39701 - RNA, 18 nt, Artificial Sequence
  Synthetic oligonucleotide: CBLB-9341
gcacgcagcccagugugu

SEQ ID NO: 39702 - RNA, 19 nt, Artificial Sequence
  Synthetic oligonucleotide: CBLB-9342
cgcacgcagcccagugugu

SEQ ID NO: 39703 - RNA, 20 nt, Artificial Sequence
  Synthetic oligonucleotide: CBLB-9343
acgcacgcagcccagugugu

SEQ ID NO: 39704 - RNA, 21 nt, Artificial Sequence
  Synthetic oligonucleotide: CBLB-9344
cacgcacgcagcccagugugu

SEQ ID NO: 39705 - RNA, 22 nt, Artificial Sequence
  Synthetic oligonucleotide: CBLB-9345
acacgcacgcagcccagugugu

SEQ ID NO: 39706 - RNA, 23 nt, Artificial Sequence
  Synthetic oligonucleotide: CBLB-9346
cacacgcacgcagcccagugugu

SEQ ID NO: 39707 - RNA, 24 nt, Artificial Sequence
  Synthetic oligonucleotide: CBLB-9347
ccacacgcacgcagcccagugugu

SEQ ID NO: 39708 - RNA, 18 nt, Artificial Sequence
  Synthetic oligonucleotide: CBLB-9348
acgcagcccagugugugu

SEQ ID NO: 39709 - RNA, 19 nt, Artificial Sequence
  Synthetic oligonucleotide: CBLB-9349
cacgcagcccagugugugu

SEQ ID NO: 39710 - RNA, 20 nt, Artificial Sequence
  Synthetic oligonucleotide: CBLB-7758
gcacgcagcccagugugugu

SEQ ID NO: 39711 - RNA, 21 nt, Artificial Sequence
  Synthetic oligonucleotide: CBLB-9350
cgcacgcagcccagugugugu

SEQ ID NO: 39712 - RNA, 22 nt, Artificial Sequence
  Synthetic oligonucleotide: CBLB-9351
acgcacgcagcccagugugugu

SEQ ID NO: 39713 - RNA, 23 nt, Artificial Sequence
  Synthetic oligonucleotide: CBLB-9352
cacgcacgcagcccagugugugu

SEQ ID NO: 39714 - RNA, 24 nt, Artificial Sequence
  Synthetic oligonucleotide: CBLB-9353
acacgcacgcagcccagugugugu

SEQ ID NO: 39715 - RNA, 18 nt, Artificial Sequence
  Synthetic oligonucleotide: CBLB-9354
aaagugguuagaaccauu

SEQ ID NO: 39716 - RNA, 19 nt, Artificial Sequence
  Synthetic oligonucleotide: CBLB-9355
gaaagugguuagaaccauu

SEQ ID NO: 39717 - RNA, 20 nt, Artificial Sequence
  Synthetic oligonucleotide: CBLB-9356
agaaagugguuagaaccauu

SEQ ID NO: 39718 - RNA, 21 nt, Artificial Sequence
  Synthetic oligonucleotide: CBLB-9357
uagaaagugguuagaaccauu

SEQ ID NO: 39719 - RNA, 22 nt, Artificial Sequence
  Synthetic oligonucleotide: CBLB-9358
cuagaaagugguuagaaccauu

SEQ ID NO: 39720 - RNA, 23 nt, Artificial Sequence
  Synthetic oligonucleotide: CBLB-9359
gcuagaaagugguuagaaccauu

SEQ ID NO: 39721 - RNA, 24 nt, Artificial Sequence
  Synthetic oligonucleotide: CBLB-9360
ugcuagaaagugguuagaaccauu

SEQ ID NO: 39722 - RNA, 18 nt, Artificial Sequence
  Synthetic oligonucleotide: CBLB-9361
auuuuaauuugacgaaaa

SEQ ID NO: 39723 - RNA, 19 nt, Artificial Sequence
  Synthetic oligonucleotide: CBLB-9362
gauuuuaauuugacgaaaa

SEQ ID NO: 39724 - RNA, 20 nt, Artificial Sequence
  Synthetic oligonucleotide: CBLB-9363
agauuuuaauuugacgaaaa

SEQ ID NO: 39725 - RNA, 21 nt, Artificial Sequence
  Synthetic oligonucleotide: CBLB-9364
aagauuuuaauuugacgaaaa

SEQ ID NO: 39726 - RNA, 22 nt, Artificial Sequence
  Synthetic oligonucleotide: CBLB-9365
uaagauuuuaauuugacgaaaa

SEQ ID NO: 39727 - RNA, 23 nt, Artificial Sequence
  Synthetic oligonucleotide: CBLB-9366
uuaagauuuuaauuugacgaaaa

SEQ ID NO: 39728 - RNA, 24 nt, Artificial Sequence
  Synthetic oligonucleotide: CBLB-9367
guuaagauuuuaauuugacgaaaa

SEQ ID NO: 39729 - RNA, 18 nt, Artificial Sequence
  Synthetic oligonucleotide: CBLB-9368
ggcgccgaaaggcaagaa

SEQ ID NO: 39730 - RNA, 19 nt, Artificial Sequence
  Synthetic oligonucleotide: CBLB-9369
cggcgccgaaaggcaagaa

SEQ ID NO: 39731 - RNA, 20 nt, Artificial Sequence
  Synthetic oligonucleotide: CBLB-7621
acggcgccgaaaggcaagaa

SEQ ID NO: 39732 - RNA, 21 nt, Artificial Sequence
  Synthetic oligonucleotide: CBLB-9370
uacggcgccgaaaggcaagaa

SEQ ID NO: 39733 - RNA, 22 nt, Artificial Sequence
  Synthetic oligonucleotide: CBLB-9371
cuacggcgccgaaaggcaagaa

SEQ ID NO: 39734 - RNA, 23 nt, Artificial Sequence
  Synthetic oligonucleotide: CBLB-9372
gcuacggcgccgaaaggcaagaa

SEQ ID NO: 39735 - RNA, 24 nt, Artificial Sequence
  Synthetic oligonucleotide: CBLB-9373
agcuacggcgccgaaaggcaagaa

SEQ ID NO: 39736 - RNA, 18 nt, Artificial Sequence
  Synthetic oligonucleotide: CBLB-9374
gcgcgggccaaggaggaa

SEQ ID NO: 39737 - RNA, 19 nt, Artificial Sequence
  Synthetic oligonucleotide: CBLB-9375
ggcgcgggccaaggaggaa

SEQ ID NO: 39738 - RNA, 20 nt, Artificial Sequence
  Synthetic oligonucleotide: CBLB-9376
aggcgcgggccaaggaggaa

SEQ ID NO: 39739 - RNA, 21 nt, Artificial Sequence
  Synthetic oligonucleotide: CBLB-9377
caggcgcgggccaaggaggaa

SEQ ID NO: 39740 - RNA, 22 nt, Artificial Sequence
  Synthetic oligonucleotide: CBLB-9378
ccaggcgcgggccaaggaggaa

SEQ ID NO: 39741 - RNA, 23 nt, Artificial Sequence
  Synthetic oligonucleotide: CBLB-9379
gccaggcgcgggccaaggaggaa

SEQ ID NO: 39742 - RNA, 24 nt, Artificial Sequence
  Synthetic oligonucleotide: CBLB-9380
agccaggcgcgggccaaggaggaa

SEQ ID NO: 39743 - RNA, 18 nt, Artificial Sequence
  Synthetic oligonucleotide: CBLB-9381
gccgccguccaguuugaa

SEQ ID NO: 39744 - RNA, 19 nt, Artificial Sequence
  Synthetic oligonucleotide: CBLB-9382
cgccgccguccaguuugaa

SEQ ID NO: 39745 - RNA, 20 nt, Artificial Sequence
  Synthetic oligonucleotide: CBLB-9383
ccgccgccguccaguuugaa

SEQ ID NO: 39746 - RNA, 21 nt, Artificial Sequence
  Synthetic oligonucleotide: CBLB-9384
gccgccgccguccaguuugaa

SEQ ID NO: 39747 - RNA, 22 nt, Artificial Sequence
  Synthetic oligonucleotide: CBLB-9385
ugccgccgccguccaguuugaa

SEQ ID NO: 39748 - RNA, 23 nt, Artificial Sequence
  Synthetic oligonucleotide: CBLB-9386
uugccgccgccguccaguuugaa

SEQ ID NO: 39749 - RNA, 24 nt, Artificial Sequence
  Synthetic oligonucleotide: CBLB-9387
uuugccgccgccguccaguuugaa

SEQ ID NO: 39750 - RNA, 18 nt, Artificial Sequence
  Synthetic oligonucleotide: CBLB-9388
cggggcuccccacacaca

SEQ ID NO: 39751 - RNA, 19 nt, Artificial Sequence
  Synthetic oligonucleotide: CBLB-9389
ccggggcuccccacacaca

SEQ ID NO: 39752 - RNA, 20 nt, Artificial Sequence
  Synthetic oligonucleotide: CBLB-9390
gccggggcuccccacacaca

SEQ ID NO: 39753 - RNA, 21 nt, Artificial Sequence
  Synthetic oligonucleotide: CBLB-9391
agccggggcuccccacacaca

SEQ ID NO: 39754 - RNA, 22 nt, Artificial Sequence
  Synthetic oligonucleotide: CBLB-9392
cagccggggcuccccacacaca

SEQ ID NO: 39755 - RNA, 23 nt, Artificial Sequence
  Synthetic oligonucleotide: CBLB-9393
ccagccggggcuccccacacaca

SEQ ID NO: 39756 - RNA, 24 nt, Artificial Sequence
  Synthetic oligonucleotide: CBLB-9394
cccagccggggcuccccacacaca

SEQ ID NO: 39757 - RNA, 18 nt, Artificial Sequence
  Synthetic oligonucleotide: CBLB-9395
guagccaggcgcgggcca

SEQ ID NO: 39758 - RNA, 19 nt, Artificial Sequence
  Synthetic oligonucleotide: CBLB-9396
gguagccaggcgcgggcca

SEQ ID NO: 39759 - RNA, 20 nt, Artificial Sequence
  Synthetic oligonucleotide: CBLB-7629
ggguagccaggcgcgggcca

SEQ ID NO: 39760 - RNA, 21 nt, Artificial Sequence
  Synthetic oligonucleotide: CBLB-9397
gggguagccaggcgcgggcca

SEQ ID NO: 39761 - RNA, 22 nt, Artificial Sequence
  Synthetic oligonucleotide: CBLB-9398
cgggguagccaggcgcgggcca

SEQ ID NO: 39762 - RNA, 23 nt, Artificial Sequence
  Synthetic oligonucleotide: CBLB-9399
ccgggguagccaggcgcgggcca

SEQ ID NO: 39763 - RNA, 24 nt, Artificial Sequence
  Synthetic oligonucleotide: CBLB-9400
cccgggguagccaggcgcgggcca

SEQ ID NO: 39764 - RNA, 18 nt, Artificial Sequence
  Synthetic oligonucleotide: CBLB-9401
uggguccugugugugcca

SEQ ID NO: 39765 - RNA, 19 nt, Artificial Sequence
  Synthetic oligonucleotide: CBLB-9402
cuggguccugugugugcca

SEQ ID NO: 39766 - RNA, 20 nt, Artificial Sequence
  Synthetic oligonucleotide: CBLB-9403
ccuggguccugugugugcca

SEQ ID NO: 39767 - RNA, 21 nt, Artificial Sequence
  Synthetic oligonucleotide: CBLB-9404
gccuggguccugugugugcca

SEQ ID NO: 39768 - RNA, 22 nt, Artificial Sequence
  Synthetic oligonucleotide: CBLB-9405
agccuggguccugugugugcca

SEQ ID NO: 39769 - RNA, 23 nt, Artificial Sequence
  Synthetic oligonucleotide: CBLB-9406
gagccuggguccugugugugcca

SEQ ID NO: 39770 - RNA, 24 nt, Artificial Sequence
  Synthetic oligonucleotide: CBLB-9407
cgagccuggguccugugugugcca

SEQ ID NO: 39771 - RNA, 18 nt, Artificial Sequence
  Synthetic oligonucleotide: CBLB-9408
acagggguggggugucca

SEQ ID NO: 39772 - RNA, 19 nt, Artificial Sequence
  Synthetic oligonucleotide: CBLB-9409
cacagggguggggugucca

SEQ ID NO: 39773 - RNA, 20 nt, Artificial Sequence
  Synthetic oligonucleotide: CBLB-9410
ccacagggguggggugucca

SEQ ID NO: 39774 - RNA, 21 nt, Artificial Sequence
  Synthetic oligonucleotide: CBLB-9411
gccacagggguggggugucca

SEQ ID NO: 39775 - RNA, 22 nt, Artificial Sequence
  Synthetic oligonucleotide: CBLB-9412
ugccacagggguggggugucca

SEQ ID NO: 39776 - RNA, 23 nt, Artificial Sequence
  Synthetic oligonucleotide: CBLB-9413
gugccacagggguggggugucca

SEQ ID NO: 39777 - RNA, 24 nt, Artificial Sequence
  Synthetic oligonucleotide: CBLB-9414
ugugccacagggguggggugucca

SEQ ID NO: 39778 - RNA, 18 nt, Artificial Sequence
  Synthetic oligonucleotide: CBLB-9415
cggcgccgaaaggcaaga

SEQ ID NO: 39779 - RNA, 19 nt, Artificial Sequence
  Synthetic oligonucleotide: CBLB-9416
acggcgccgaaaggcaaga

SEQ ID NO: 39780 - RNA, 20 nt, Artificial Sequence
  Synthetic oligonucleotide: CBLB-7631
uacggcgccgaaaggcaaga

SEQ ID NO: 39781 - RNA, 21 nt, Artificial Sequence
  Synthetic oligonucleotide: CBLB-9417
cuacggcgccgaaaggcaaga

SEQ ID NO: 39782 - RNA, 22 nt, Artificial Sequence
  Synthetic oligonucleotide: CBLB-9418
gcuacggcgccgaaaggcaaga

SEQ ID NO: 39783 - RNA, 23 nt, Artificial Sequence
  Synthetic oligonucleotide: CBLB-9419
agcuacggcgccgaaaggcaaga

SEQ ID NO: 39784 - RNA, 24 nt, Artificial Sequence
  Synthetic oligonucleotide: CBLB-9420
cagcuacggcgccgaaaggcaaga

SEQ ID NO: 39785 - RNA, 18 nt, Artificial Sequence
  Synthetic oligonucleotide: CBLB-9421
gcgggccaaggaggaaga

SEQ ID NO: 39786 - RNA, 19 nt, Artificial Sequence
  Synthetic oligonucleotide: CBLB-9422
cgcgggccaaggaggaaga

SEQ ID NO: 39787 - RNA, 20 nt, Artificial Sequence
  Synthetic oligonucleotide: CBLB-7633
gcgcgggccaaggaggaaga

SEQ ID NO: 39788 - RNA, 21 nt, Artificial Sequence
  Synthetic oligonucleotide: CBLB-9423
ggcgcgggccaaggaggaaga

SEQ ID NO: 39789 - RNA, 22 nt, Artificial Sequence
  Synthetic oligonucleotide: CBLB-9424
aggcgcgggccaaggaggaaga

SEQ ID NO: 39790 - RNA, 23 nt, Artificial Sequence
  Synthetic oligonucleotide: CBLB-9425
caggcgcgggccaaggaggaaga

SEQ ID NO: 39791 - RNA, 24 nt, Artificial Sequence
  Synthetic oligonucleotide: CBLB-9426
ccaggcgcgggccaaggaggaaga

SEQ ID NO: 39792 - RNA, 18 nt, Artificial Sequence
  Synthetic oligonucleotide: CBLB-9427
cccgcaggccggggagga

SEQ ID NO: 39793 - RNA, 19 nt, Artificial Sequence
  Synthetic oligonucleotide: CBLB-9428
acccgcaggccggggagga

SEQ ID NO: 39794 - RNA, 20 nt, Artificial Sequence
  Synthetic oligonucleotide: CBLB-2030
aacccgcaggccggggagga

SEQ ID NO: 39795 - RNA, 21 nt, Artificial Sequence
  Synthetic oligonucleotide: CBLB-9429
gaacccgcaggccggggagga

SEQ ID NO: 39796 - RNA, 22 nt, Artificial Sequence
  Synthetic oligonucleotide: CBLB-9430
agaacccgcaggccggggagga

SEQ ID NO: 39797 - RNA, 23 nt, Artificial Sequence
  Synthetic oligonucleotide: CBLB-9431
cagaacccgcaggccggggagga

SEQ ID NO: 39798 - RNA, 24 nt, Artificial Sequence
  Synthetic oligonucleotide: CBLB-9432
ccagaacccgcaggccggggagga

SEQ ID NO: 39799 - RNA, 18 nt, Artificial Sequence
  Synthetic oligonucleotide: CBLB-9433
uccccgagucgggcggga

SEQ ID NO: 39800 - RNA, 19 nt, Artificial Sequence
  Synthetic oligonucleotide: CBLB-9434
cuccccgagucgggcggga

SEQ ID NO: 39801 - RNA, 20 nt, Artificial Sequence
  Synthetic oligonucleotide: CBLB-7635
ccuccccgagucgggcggga

SEQ ID NO: 39802 - RNA, 21 nt, Artificial Sequence
  Synthetic oligonucleotide: CBLB-9435
gccuccccgagucgggcggga

SEQ ID NO: 39803 - RNA, 22 nt, Artificial Sequence
  Synthetic oligonucleotide: CBLB-9436
ggccuccccgagucgggcggga

SEQ ID NO: 39804 - RNA, 23 nt, Artificial Sequence
  Synthetic oligonucleotide: CBLB-9437
cggccuccccgagucgggcggga

SEQ ID NO: 39805 - RNA, 24 nt, Artificial Sequence
  Synthetic oligonucleotide: CBLB-9438
gcggccuccccgagucgggcggga

SEQ ID NO: 39806 - RNA, 18 nt, Artificial Sequence
  Synthetic oligonucleotide: CBLB-9439
guugcuccuucuucggga

SEQ ID NO: 39807 - RNA, 19 nt, Artificial Sequence
  Synthetic oligonucleotide: CBLB-9440
gguugcuccuucuucggga

SEQ ID NO: 39808 - RNA, 20 nt, Artificial Sequence
  Synthetic oligonucleotide: CBLB-9441
ggguugcuccuucuucggga

SEQ ID NO: 39809 - RNA, 21 nt, Artificial Sequence
  Synthetic oligonucleotide: CBLB-9442
uggguugcuccuucuucggga

SEQ ID NO: 39810 - RNA, 22 nt, Artificial Sequence
  Synthetic oligonucleotide: CBLB-9443
cuggguugcuccuucuucggga

SEQ ID NO: 39811 - RNA, 23 nt, Artificial Sequence
  Synthetic oligonucleotide: CBLB-9444
gcuggguugcuccuucuucggga

SEQ ID NO: 39812 - RNA, 24 nt, Artificial Sequence
  Synthetic oligonucleotide: CBLB-9445
cgcuggguugcuccuucuucggga

SEQ ID NO: 39813 - RNA, 18 nt, Artificial Sequence
  Synthetic oligonucleotide: CBLB-9446
gggcugcgugcgugugga

SEQ ID NO: 39814 - RNA, 19 nt, Artificial Sequence
  Synthetic oligonucleotide: CBLB-9447
ugggcugcgugcgugugga

SEQ ID NO: 39815 - RNA, 20 nt, Artificial Sequence
  Synthetic oligonucleotide: CBLB-9448
cugggcugcgugcgugugga

SEQ ID NO: 39816 - RNA, 21 nt, Artificial Sequence
  Synthetic oligonucleotide: CBLB-9449
acugggcugcgugcgugugga

SEQ ID NO: 39817 - RNA, 22 nt, Artificial Sequence
  Synthetic oligonucleotide: CBLB-9450
cacugggcugcgugcgugugga

SEQ ID NO: 39818 - RNA, 23 nt, Artificial Sequence
  Synthetic oligonucleotide: CBLB-9451
acacugggcugcgugcgugugga

SEQ ID NO: 39819 - RNA, 24 nt, Artificial Sequence
  Synthetic oligonucleotide: CBLB-9452
cacacugggcugcgugcgugugga

SEQ ID NO: 39820 - RNA, 18 nt, Artificial Sequence
  Synthetic oligonucleotide: CBLB-9453
aguggggcauuuaaagac

SEQ ID NO: 39821 - RNA, 19 nt, Artificial Sequence
  Synthetic oligonucleotide: CBLB-9454
aaguggggcauuuaaagac

SEQ ID NO: 39822 - RNA, 20 nt, Artificial Sequence
  Synthetic oligonucleotide: CBLB-9455
gaaguggggcauuuaaagac

SEQ ID NO: 39823 - RNA, 21 nt, Artificial Sequence
  Synthetic oligonucleotide: CBLB-9456
ugaaguggggcauuuaaagac

SEQ ID NO: 39824 - RNA, 22 nt, Artificial Sequence
  Synthetic oligonucleotide: CBLB-9457
uugaaguggggcauuuaaagac

SEQ ID NO: 39825 - RNA, 23 nt, Artificial Sequence
  Synthetic oligonucleotide: CBLB-9458
uuugaaguggggcauuuaaagac

SEQ ID NO: 39826 - RNA, 24 nt, Artificial Sequence
  Synthetic oligonucleotide: CBLB-9459
guuugaaguggggcauuuaaagac

SEQ ID NO: 39827 - RNA, 18 nt, Artificial Sequence
  Synthetic oligonucleotide: CBLB-9460
cacacuucuugccggccc

SEQ ID NO: 39828 - RNA, 19 nt, Artificial Sequence
  Synthetic oligonucleotide: CBLB-9461
ccacacuucuugccggccc

SEQ ID NO: 39829 - RNA, 20 nt, Artificial Sequence
  Synthetic oligonucleotide: CBLB-7653
uccacacuucuugccggccc

SEQ ID NO: 39830 - RNA, 21 nt, Artificial Sequence
  Synthetic oligonucleotide: CBLB-9462
cuccacacuucuugccggccc

SEQ ID NO: 39831 - RNA, 22 nt, Artificial Sequence
  Synthetic oligonucleotide: CBLB-9463
gcuccacacuucuugccggccc

SEQ ID NO: 39832 - RNA, 23 nt, Artificial Sequence
  Synthetic oligonucleotide: CBLB-9464
ggcuccacacuucuugccggccc

SEQ ID NO: 39833 - RNA, 24 nt, Artificial Sequence
  Synthetic oligonucleotide: CBLB-9465
aggcuccacacuucuugccggccc

SEQ ID NO: 39834 - RNA, 18 nt, Artificial Sequence
  Synthetic oligonucleotide: CBLB-9466
agaagggaaggggucgcc

SEQ ID NO: 39835 - RNA, 19 nt, Artificial Sequence
  Synthetic oligonucleotide: CBLB-9467
aagaagggaaggggucgcc

SEQ ID NO: 39836 - RNA, 20 nt, Artificial Sequence
  Synthetic oligonucleotide: CBLB-7660
caagaagggaaggggucgcc

SEQ ID NO: 39837 - RNA, 21 nt, Artificial Sequence
  Synthetic oligonucleotide: CBLB-9468
gcaagaagggaaggggucgcc

SEQ ID NO: 39838 - RNA, 22 nt, Artificial Sequence
  Synthetic oligonucleotide: CBLB-9469
ggcaagaagggaaggggucgcc

SEQ ID NO: 39839 - RNA, 23 nt, Artificial Sequence
  Synthetic oligonucleotide: CBLB-9470
aggcaagaagggaaggggucgcc

SEQ ID NO: 39840 - RNA, 24 nt, Artificial Sequence
  Synthetic oligonucleotide: CBLB-9471
aaggcaagaagggaaggggucgcc

SEQ ID NO: 39841 - RNA, 18 nt, Artificial Sequence
  Synthetic oligonucleotide: CBLB-9472
gaccagaacccgcaggcc

SEQ ID NO: 39842 - RNA, 19 nt, Artificial Sequence
  Synthetic oligonucleotide: CBLB-9473
agaccagaacccgcaggcc

SEQ ID NO: 39843 - RNA, 20 nt, Artificial Sequence
  Synthetic oligonucleotide: CBLB-7661
aagaccagaacccgcaggcc

SEQ ID NO: 39844 - RNA, 21 nt, Artificial Sequence
  Synthetic oligonucleotide: CBLB-9474
aaagaccagaacccgcaggcc

SEQ ID NO: 39845 - RNA, 22 nt, Artificial Sequence
  Synthetic oligonucleotide: CBLB-9475
uaaagaccagaacccgcaggcc

SEQ ID NO: 39846 - RNA, 23 nt, Artificial Sequence
  Synthetic oligonucleotide: CBLB-9476
uuaaagaccagaacccgcaggcc

SEQ ID NO: 39847 - RNA, 24 nt, Artificial Sequence
  Synthetic oligonucleotide: CBLB-9477
uuuaaagaccagaacccgcaggcc

SEQ ID NO: 39848 - RNA, 18 nt, Artificial Sequence
  Synthetic oligonucleotide: CBLB-9478
ccacacuucuugccggcc

SEQ ID NO: 39849 - RNA, 19 nt, Artificial Sequence
  Synthetic oligonucleotide: CBLB-9479
uccacacuucuugccggcc

SEQ ID NO: 39850 - RNA, 20 nt, Artificial Sequence
  Synthetic oligonucleotide: CBLB-7662
cuccacacuucuugccggcc

SEQ ID NO: 39851 - RNA, 21 nt, Artificial Sequence
  Synthetic oligonucleotide: CBLB-9480
gcuccacacuucuugccggcc

SEQ ID NO: 39852 - RNA, 22 nt, Artificial Sequence
  Synthetic oligonucleotide: CBLB-9481
ggcuccacacuucuugccggcc

SEQ ID NO: 39853 - RNA, 23 nt, Artificial Sequence
  Synthetic oligonucleotide: CBLB-9482
aggcuccacacuucuugccggcc

SEQ ID NO: 39854 - RNA, 24 nt, Artificial Sequence
  Synthetic oligonucleotide: CBLB-9483
gaggcuccacacuucuugccggcc

SEQ ID NO: 39855 - RNA, 18 nt, Artificial Sequence
  Synthetic oligonucleotide: CBLB-9484
gguagccaggcgcgggcc

SEQ ID NO: 39856 - RNA, 19 nt, Artificial Sequence
  Synthetic oligonucleotide: CBLB-9485
ggguagccaggcgcgggcc

SEQ ID NO: 39857 - RNA, 20 nt, Artificial Sequence
  Synthetic oligonucleotide: CBLB-9486
gggguagccaggcgcgggcc

SEQ ID NO: 39858 - RNA, 21 nt, Artificial Sequence
  Synthetic oligonucleotide: CBLB-9487
cgggguagccaggcgcgggcc

SEQ ID NO: 39859 - RNA, 22 nt, Artificial Sequence
  Synthetic oligonucleotide: CBLB-9488
ccgggguagccaggcgcgggcc

SEQ ID NO: 39860 - RNA, 23 nt, Artificial Sequence
  Synthetic oligonucleotide: CBLB-9489
cccgggguagccaggcgcgggcc

SEQ ID NO: 39861 - RNA, 24 nt, Artificial Sequence
  Synthetic oligonucleotide: CBLB-9490
gcccgggguagccaggcgcgggcc

SEQ ID NO: 39862 - RNA, 18 nt, Artificial Sequence
  Synthetic oligonucleotide: CBLB-9491
agcgaucccacucccagc

SEQ ID NO: 39863 - RNA, 19 nt, Artificial Sequence
  Synthetic oligonucleotide: CBLB-9492
cagcgaucccacucccagc

SEQ ID NO: 39864 - RNA, 20 nt, Artificial Sequence
  Synthetic oligonucleotide: CBLB-7664
ucagcgaucccacucccagc

SEQ ID NO: 39865 - RNA, 21 nt, Artificial Sequence
  Synthetic oligonucleotide: CBLB-9493
cucagcgaucccacucccagc

SEQ ID NO: 39866 - RNA, 22 nt, Artificial Sequence
  Synthetic oligonucleotide: CBLB-9494
ucucagcgaucccacucccagc

SEQ ID NO: 39867 - RNA, 23 nt, Artificial Sequence
  Synthetic oligonucleotide: CBLB-9495
uucucagcgaucccacucccagc

SEQ ID NO: 39868 - RNA, 24 nt, Artificial Sequence
  Synthetic oligonucleotide: CBLB-9496
guucucagcgaucccacucccagc

SEQ ID NO: 39869 - RNA, 18 nt, Artificial Sequence
  Synthetic oligonucleotide: CBLB-9497
uuuauuacacuuuucagc

SEQ ID NO: 39870 - RNA, 19 nt, Artificial Sequence
  Synthetic oligonucleotide: CBLB-9498
guuuauuacacuuuucagc

SEQ ID NO: 39871 - RNA, 20 nt, Artificial Sequence
  Synthetic oligonucleotide: CBLB-9499
cguuuauuacacuuuucagc

SEQ ID NO: 39872 - RNA, 21 nt, Artificial Sequence
  Synthetic oligonucleotide: CBLB-9500
gcguuuauuacacuuuucagc

SEQ ID NO: 39873 - RNA, 22 nt, Artificial Sequence
  Synthetic oligonucleotide: CBLB-9501
agcguuuauuacacuuuucagc

SEQ ID NO: 39874 - RNA, 23 nt, Artificial Sequence
  Synthetic oligonucleotide: CBLB-9502
uagcguuuauuacacuuuucagc

SEQ ID NO: 39875 - RNA, 24 nt, Artificial Sequence
  Synthetic oligonucleotide: CBLB-9503
auagcguuuauuacacuuuucagc

SEQ ID NO: 39876 - RNA, 18 nt, Artificial Sequence
  Synthetic oligonucleotide: CBLB-9504
aagaagggaaggggucgc

SEQ ID NO: 39877 - RNA, 19 nt, Artificial Sequence
  Synthetic oligonucleotide: CBLB-9505
caagaagggaaggggucgc

SEQ ID NO: 39878 - RNA, 20 nt, Artificial Sequence
  Synthetic oligonucleotide: CBLB-7674
gcaagaagggaaggggucgc

SEQ ID NO: 39879 - RNA, 21 nt, Artificial Sequence
  Synthetic oligonucleotide: CBLB-9506
ggcaagaagggaaggggucgc

SEQ ID NO: 39880 - RNA, 22 nt, Artificial Sequence
  Synthetic oligonucleotide: CBLB-9507
aggcaagaagggaaggggucgc

SEQ ID NO: 39881 - RNA, 23 nt, Artificial Sequence
  Synthetic oligonucleotide: CBLB-9508
aaggcaagaagggaaggggucgc

SEQ ID NO: 39882 - RNA, 24 nt, Artificial Sequence
  Synthetic oligonucleotide: CBLB-9509
aaaggcaagaagggaaggggucgc

SEQ ID NO: 39883 - RNA, 18 nt, Artificial Sequence
  Synthetic oligonucleotide: CBLB-9510
gcuacggcgccgaaaggc

SEQ ID NO: 39884 - RNA, 19 nt, Artificial Sequence
  Synthetic oligonucleotide: CBLB-9511
agcuacggcgccgaaaggc

SEQ ID NO: 39885 - RNA, 20 nt, Artificial Sequence
  Synthetic oligonucleotide: CBLB-9512
cagcuacggcgccgaaaggc

SEQ ID NO: 39886 - RNA, 21 nt, Artificial Sequence
  Synthetic oligonucleotide: CBLB-9513
acagcuacggcgccgaaaggc

SEQ ID NO: 39887 - RNA, 22 nt, Artificial Sequence
  Synthetic oligonucleotide: CBLB-9514
gacagcuacggcgccgaaaggc

SEQ ID NO: 39888 - RNA, 23 nt, Artificial Sequence
  Synthetic oligonucleotide: CBLB-9515
ggacagcuacggcgccgaaaggc

SEQ ID NO: 39889 - RNA, 24 nt, Artificial Sequence
  Synthetic oligonucleotide: CBLB-9516
uggacagcuacggcgccgaaaggc

SEQ ID NO: 39890 - RNA, 18 nt, Artificial Sequence
  Synthetic oligonucleotide: CBLB-9517
ggcccgggguagccaggc

SEQ ID NO: 39891 - RNA, 19 nt, Artificial Sequence
  Synthetic oligonucleotide: CBLB-9518
gggcccgggguagccaggc

SEQ ID NO: 39892 - RNA, 20 nt, Artificial Sequence
  Synthetic oligonucleotide: CBLB-9519
ggggcccgggguagccaggc

SEQ ID NO: 39893 - RNA, 21 nt, Artificial Sequence
  Synthetic oligonucleotide: CBLB-9520
gggggcccgggguagccaggc

SEQ ID NO: 39894 - RNA, 22 nt, Artificial Sequence
  Synthetic oligonucleotide: CBLB-9521
cgggggcccgggguagccaggc

SEQ ID NO: 39895 - RNA, 23 nt, Artificial Sequence
  Synthetic oligonucleotide: CBLB-9522
ccgggggcccgggguagccaggc

SEQ ID NO: 39896 - RNA, 24 nt, Artificial Sequence
  Synthetic oligonucleotide: CBLB-9523
cccgggggcccgggguagccaggc

SEQ ID NO: 39897 - RNA, 18 nt, Artificial Sequence
  Synthetic oligonucleotide: CBLB-9524
agaccagaacccgcaggc

SEQ ID NO: 39898 - RNA, 19 nt, Artificial Sequence
  Synthetic oligonucleotide: CBLB-9525
aagaccagaacccgcaggc

SEQ ID NO: 39899 - RNA, 20 nt, Artificial Sequence
  Synthetic oligonucleotide: CBLB-7675
aaagaccagaacccgcaggc

SEQ ID NO: 39900 - RNA, 21 nt, Artificial Sequence
  Synthetic oligonucleotide: CBLB-9526
uaaagaccagaacccgcaggc

SEQ ID NO: 39901 - RNA, 22 nt, Artificial Sequence
  Synthetic oligonucleotide: CBLB-9527
uuaaagaccagaacccgcaggc

SEQ ID NO: 39902 - RNA, 23 nt, Artificial Sequence
  Synthetic oligonucleotide: CBLB-9528
uuuaaagaccagaacccgcaggc

SEQ ID NO: 39903 - RNA, 24 nt, Artificial Sequence
  Synthetic oligonucleotide: CBLB-9529
auuuaaagaccagaacccgcaggc

SEQ ID NO: 39904 - RNA, 18 nt, Artificial Sequence
  Synthetic oligonucleotide: CBLB-9530
uccacacuucuugccggc

SEQ ID NO: 39905 - RNA, 19 nt, Artificial Sequence
  Synthetic oligonucleotide: CBLB-9531
cuccacacuucuugccggc

SEQ ID NO: 39906 - RNA, 20 nt, Artificial Sequence
  Synthetic oligonucleotide: CBLB-9532
gcuccacacuucuugccggc

SEQ ID NO: 39907 - RNA, 21 nt, Artificial Sequence
  Synthetic oligonucleotide: CBLB-9533
ggcuccacacuucuugccggc

SEQ ID NO: 39908 - RNA, 22 nt, Artificial Sequence
  Synthetic oligonucleotide: CBLB-9534
aggcuccacacuucuugccggc

SEQ ID NO: 39909 - RNA, 23 nt, Artificial Sequence
  Synthetic oligonucleotide: CBLB-9535
gaggcuccacacuucuugccggc

SEQ ID NO: 39910 - RNA, 24 nt, Artificial Sequence
  Synthetic oligonucleotide: CBLB-9536
ggaggcuccacacuucuugccggc

SEQ ID NO: 39911 - RNA, 18 nt, Artificial Sequence
  Synthetic oligonucleotide: CBLB-9537
ggccuccccgagucgggc

SEQ ID NO: 39912 - RNA, 19 nt, Artificial Sequence
  Synthetic oligonucleotide: CBLB-9538
cggccuccccgagucgggc

SEQ ID NO: 39913 - RNA, 20 nt, Artificial Sequence
  Synthetic oligonucleotide: CBLB-7678
gcggccuccccgagucgggc

SEQ ID NO: 39914 - RNA, 21 nt, Artificial Sequence
  Synthetic oligonucleotide: CBLB-9539
cgcggccuccccgagucgggc

SEQ ID NO: 39915 - RNA, 22 nt, Artificial Sequence
  Synthetic oligonucleotide: CBLB-9540
ccgcggccuccccgagucgggc

SEQ ID NO: 39916 - RNA, 23 nt, Artificial Sequence
  Synthetic oligonucleotide: CBLB-9541
cccgcggccuccccgagucgggc

SEQ ID NO: 39917 - RNA, 24 nt, Artificial Sequence
  Synthetic oligonucleotide: CBLB-9542
ucccgcggccuccccgagucgggc

SEQ ID NO: 39918 - RNA, 18 nt, Artificial Sequence
  Synthetic oligonucleotide: CBLB-9543
ucuugccggcccgggggc

SEQ ID NO: 39919 - RNA, 19 nt, Artificial Sequence
  Synthetic oligonucleotide: CBLB-9544
uucuugccggcccgggggc

SEQ ID NO: 39920 - RNA, 20 nt, Artificial Sequence
  Synthetic oligonucleotide: CBLB-9545
cuucuugccggcccgggggc

SEQ ID NO: 39921 - RNA, 21 nt, Artificial Sequence
  Synthetic oligonucleotide: CBLB-9546
acuucuugccggcccgggggc

SEQ ID NO: 39922 - RNA, 22 nt, Artificial Sequence
  Synthetic oligonucleotide: CBLB-9547
cacuucuugccggcccgggggc

SEQ ID NO: 39923 - RNA, 23 nt, Artificial Sequence
  Synthetic oligonucleotide: CBLB-9548
acacuucuugccggcccgggggc

SEQ ID NO: 39924 - RNA, 24 nt, Artificial Sequence
  Synthetic oligonucleotide: CBLB-9549
cacacuucuugccggcccgggggc

SEQ ID NO: 39925 - RNA, 18 nt, Artificial Sequence
  Synthetic oligonucleotide: CBLB-9550
uuguugcguuuccacguc

SEQ ID NO: 39926 - RNA, 19 nt, Artificial Sequence
  Synthetic oligonucleotide: CBLB-9551
auuguugcguuuccacguc

SEQ ID NO: 39927 - RNA, 20 nt, Artificial Sequence
  Synthetic oligonucleotide: CBLB-9552
aauuguugcguuuccacguc

SEQ ID NO: 39928 - RNA, 21 nt, Artificial Sequence
  Synthetic oligonucleotide: CBLB-9553
uaauuguugcguuuccacguc

SEQ ID NO: 39929 - RNA, 22 nt, Artificial Sequence
  Synthetic oligonucleotide: CBLB-9554
guaauuguugcguuuccacguc

SEQ ID NO: 39930 - RNA, 23 nt, Artificial Sequence
  Synthetic oligonucleotide: CBLB-9555
gguaauuguugcguuuccacguc

SEQ ID NO: 39931 - RNA, 24 nt, Artificial Sequence
  Synthetic oligonucleotide: CBLB-9556
cgguaauuguugcguuuccacguc

SEQ ID NO: 39932 - RNA, 18 nt, Artificial Sequence
  Synthetic oligonucleotide: CBLB-9557
ggugauaaagugugauuc

SEQ ID NO: 39933 - RNA, 19 nt, Artificial Sequence
  Synthetic oligonucleotide: CBLB-9558
aggugauaaagugugauuc

SEQ ID NO: 39934 - RNA, 20 nt, Artificial Sequence
  Synthetic oligonucleotide: CBLB-7689
caggugauaaagugugauuc

SEQ ID NO: 39935 - RNA, 21 nt, Artificial Sequence
  Synthetic oligonucleotide: CBLB-9559
ucaggugauaaagugugauuc

SEQ ID NO: 39936 - RNA, 22 nt, Artificial Sequence
  Synthetic oligonucleotide: CBLB-9560
gucaggugauaaagugugauuc

SEQ ID NO: 39937 - RNA, 23 nt, Artificial Sequence
  Synthetic oligonucleotide: CBLB-9561
agucaggugauaaagugugauuc

SEQ ID NO: 39938 - RNA, 24 nt, Artificial Sequence
  Synthetic oligonucleotide: CBLB-9562
cagucaggugauaaagugugauuc

SEQ ID NO: 39939 - RNA, 18 nt, Artificial Sequence
  Synthetic oligonucleotide: CBLB-9563
cuggguugcuccuucuuc

SEQ ID NO: 39940 - RNA, 19 nt, Artificial Sequence
  Synthetic oligonucleotide: CBLB-9564
gcuggguugcuccuucuuc

SEQ ID NO: 39941 - RNA, 20 nt, Artificial Sequence
  Synthetic oligonucleotide: CBLB-7690
cgcuggguugcuccuucuuc

SEQ ID NO: 39942 - RNA, 21 nt, Artificial Sequence
  Synthetic oligonucleotide: CBLB-9565
gcgcuggguugcuccuucuuc

SEQ ID NO: 39943 - RNA, 22 nt, Artificial Sequence
  Synthetic oligonucleotide: CBLB-9566
cgcgcuggguugcuccuucuuc

SEQ ID NO: 39944 - RNA, 23 nt, Artificial Sequence
  Synthetic oligonucleotide: CBLB-9567
gcgcgcuggguugcuccuucuuc

SEQ ID NO: 39945 - RNA, 24 nt, Artificial Sequence
  Synthetic oligonucleotide: CBLB-9568
ugcgcgcuggguugcuccuucuuc

SEQ ID NO: 39946 - RNA, 18 nt, Artificial Sequence
  Synthetic oligonucleotide: CBLB-9569
agccaggcgcgggccaag

SEQ ID NO: 39947 - RNA, 19 nt, Artificial Sequence
  Synthetic oligonucleotide: CBLB-9570
uagccaggcgcgggccaag

SEQ ID NO: 39948 - RNA, 20 nt, Artificial Sequence
  Synthetic oligonucleotide: CBLB-9571
guagccaggcgcgggccaag

SEQ ID NO: 39949 - RNA, 21 nt, Artificial Sequence
  Synthetic oligonucleotide: CBLB-9572
gguagccaggcgcgggccaag

SEQ ID NO: 39950 - RNA, 22 nt, Artificial Sequence
  Synthetic oligonucleotide: CBLB-9573
ggguagccaggcgcgggccaag

SEQ ID NO: 39951 - RNA, 23 nt, Artificial Sequence
  Synthetic oligonucleotide: CBLB-9574
gggguagccaggcgcgggccaag

SEQ ID NO: 39952 - RNA, 24 nt, Artificial Sequence
  Synthetic oligonucleotide: CBLB-9575
cgggguagccaggcgcgggccaag

SEQ ID NO: 39953 - RNA, 18 nt, Artificial Sequence
  Synthetic oligonucleotide: CBLB-9576
acggcgccgaaaggcaag

SEQ ID NO: 39954 - RNA, 19 nt, Artificial Sequence
  Synthetic oligonucleotide: CBLB-9577
uacggcgccgaaaggcaag

SEQ ID NO: 39955 - RNA, 20 nt, Artificial Sequence
  Synthetic oligonucleotide: CBLB-9578
cuacggcgccgaaaggcaag

SEQ ID NO: 39956 - RNA, 21 nt, Artificial Sequence
  Synthetic oligonucleotide: CBLB-9579
gcuacggcgccgaaaggcaag

SEQ ID NO: 39957 - RNA, 22 nt, Artificial Sequence
  Synthetic oligonucleotide: CBLB-9580
agcuacggcgccgaaaggcaag

SEQ ID NO: 39958 - RNA, 23 nt, Artificial Sequence
  Synthetic oligonucleotide: CBLB-9581
cagcuacggcgccgaaaggcaag

SEQ ID NO: 39959 - RNA, 24 nt, Artificial Sequence
  Synthetic oligonucleotide: CBLB-9582
acagcuacggcgccgaaaggcaag

SEQ ID NO: 39960 - RNA, 18 nt, Artificial Sequence
  Synthetic oligonucleotide: CBLB-9583
cgcgggccaaggaggaag

SEQ ID NO: 39961 - RNA, 19 nt, Artificial Sequence
  Synthetic oligonucleotide: CBLB-9584
gcgcgggccaaggaggaag

SEQ ID NO: 39962 - RNA, 20 nt, Artificial Sequence
  Synthetic oligonucleotide: CBLB-7693
ggcgcgggccaaggaggaag

SEQ ID NO: 39963 - RNA, 21 nt, Artificial Sequence
  Synthetic oligonucleotide: CBLB-9585
aggcgcgggccaaggaggaag

SEQ ID NO: 39964 - RNA, 22 nt, Artificial Sequence
  Synthetic oligonucleotide: CBLB-9586
caggcgcgggccaaggaggaag

SEQ ID NO: 39965 - RNA, 23 nt, Artificial Sequence
  Synthetic oligonucleotide: CBLB-9587
ccaggcgcgggccaaggaggaag

SEQ ID NO: 39966 - RNA, 24 nt, Artificial Sequence
  Synthetic oligonucleotide: CBLB-9588
gccaggcgcgggccaaggaggaag

SEQ ID NO: 39967 - RNA, 18 nt, Artificial Sequence
  Synthetic oligonucleotide: CBLB-9589
ccgccguccaguuugaag

SEQ ID NO: 39968 - RNA, 19 nt, Artificial Sequence
  Synthetic oligonucleotide: CBLB-9590
gccgccguccaguuugaag

SEQ ID NO: 39969 - RNA, 20 nt, Artificial Sequence
  Synthetic oligonucleotide: CBLB-7695
cgccgccguccaguuugaag

SEQ ID NO: 39970 - RNA, 21 nt, Artificial Sequence
  Synthetic oligonucleotide: CBLB-9591
ccgccgccguccaguuugaag

SEQ ID NO: 39971 - RNA, 22 nt, Artificial Sequence
  Synthetic oligonucleotide: CBLB-9592
gccgccgccguccaguuugaag

SEQ ID NO: 39972 - RNA, 23 nt, Artificial Sequence
  Synthetic oligonucleotide: CBLB-9593
ugccgccgccguccaguuugaag

SEQ ID NO: 39973 - RNA, 24 nt, Artificial Sequence
  Synthetic oligonucleotide: CBLB-9594
uugccgccgccguccaguuugaag

SEQ ID NO: 39974 - RNA, 18 nt, Artificial Sequence
  Synthetic oligonucleotide: CBLB-9595
cagcgaucccacucccag

SEQ ID NO: 39975 - RNA, 19 nt, Artificial Sequence
  Synthetic oligonucleotide: CBLB-9596
ucagcgaucccacucccag

SEQ ID NO: 39976 - RNA, 20 nt, Artificial Sequence
  Synthetic oligonucleotide: CBLB-9597
cucagcgaucccacucccag

SEQ ID NO: 39977 - RNA, 21 nt, Artificial Sequence
  Synthetic oligonucleotide: CBLB-9598
ucucagcgaucccacucccag

SEQ ID NO: 39978 - RNA, 22 nt, Artificial Sequence
  Synthetic oligonucleotide: CBLB-9599
uucucagcgaucccacucccag

SEQ ID NO: 39979 - RNA, 23 nt, Artificial Sequence
  Synthetic oligonucleotide: CBLB-9600
guucucagcgaucccacucccag

SEQ ID NO: 39980 - RNA, 24 nt, Artificial Sequence
  Synthetic oligonucleotide: CBLB-9601
uguucucagcgaucccacucccag

SEQ ID NO: 39981 - RNA, 18 nt, Artificial Sequence
  Synthetic oligonucleotide: CBLB-9602
ucccgcggccuccccgag

SEQ ID NO: 39982 - RNA, 19 nt, Artificial Sequence
  Synthetic oligonucleotide: CBLB-9603
gucccgcggccuccccgag

SEQ ID NO: 39983 - RNA, 20 nt, Artificial Sequence
  Synthetic oligonucleotide: CBLB-9604
cgucccgcggccuccccgag

SEQ ID NO: 39984 - RNA, 21 nt, Artificial Sequence
  Synthetic oligonucleotide: CBLB-9605
gcgucccgcggccuccccgag

SEQ ID NO: 39985 - RNA, 22 nt, Artificial Sequence
  Synthetic oligonucleotide: CBLB-9606
ggcgucccgcggccuccccgag

SEQ ID NO: 39986 - RNA, 23 nt, Artificial Sequence
  Synthetic oligonucleotide: CBLB-9607
cggcgucccgcggccuccccgag

SEQ ID NO: 39987 - RNA, 24 nt, Artificial Sequence
  Synthetic oligonucleotide: CBLB-9608
gcggcgucccgcggccuccccgag

SEQ ID NO: 39988 - RNA, 18 nt, Artificial Sequence
  Synthetic oligonucleotide: CBLB-9609
ccccgagucgggcgggag

SEQ ID NO: 39989 - RNA, 19 nt, Artificial Sequence
  Synthetic oligonucleotide: CBLB-9610
uccccgagucgggcgggag

SEQ ID NO: 39990 - RNA, 20 nt, Artificial Sequence
  Synthetic oligonucleotide: CBLB-7700
cuccccgagucgggcgggag

SEQ ID NO: 39991 - RNA, 21 nt, Artificial Sequence
  Synthetic oligonucleotide: CBLB-9611
ccuccccgagucgggcgggag

SEQ ID NO: 39992 - RNA, 22 nt, Artificial Sequence
  Synthetic oligonucleotide: CBLB-9612
gccuccccgagucgggcgggag

SEQ ID NO: 39993 - RNA, 23 nt, Artificial Sequence
  Synthetic oligonucleotide: CBLB-9613
ggccuccccgagucgggcgggag

SEQ ID NO: 39994 - RNA, 24 nt, Artificial Sequence
  Synthetic oligonucleotide: CBLB-9614
cggccuccccgagucgggcgggag

SEQ ID NO: 39995 - RNA, 18 nt, Artificial Sequence
  Synthetic oligonucleotide: CBLB-9615
aacccgcaggccggggag

SEQ ID NO: 39996 - RNA, 19 nt, Artificial Sequence
  Synthetic oligonucleotide: CBLB-9616
gaacccgcaggccggggag

SEQ ID NO: 39997 - RNA, 20 nt, Artificial Sequence
  Synthetic oligonucleotide: CBLB-9617
agaacccgcaggccggggag

SEQ ID NO: 39998 - RNA, 21 nt, Artificial Sequence
  Synthetic oligonucleotide: CBLB-9618
cagaacccgcaggccggggag

SEQ ID NO: 39999 - RNA, 22 nt, Artificial Sequence
  Synthetic oligonucleotide: CBLB-9619
ccagaacccgcaggccggggag

SEQ ID NO: 40000 - RNA, 23 nt, Artificial Sequence
  Synthetic oligonucleotide: CBLB-9620
accagaacccgcaggccggggag

SEQ ID NO: 40001 - RNA, 24 nt, Artificial Sequence
  Synthetic oligonucleotide: CBLB-9621
gaccagaacccgcaggccggggag

SEQ ID NO: 40002 - RNA, 18 nt, Artificial Sequence
  Synthetic oligonucleotide: CBLB-9622
ggcugcgugcguguggag

SEQ ID NO: 40003 - RNA, 19 nt, Artificial Sequence
  Synthetic oligonucleotide: CBLB-9623
gggcugcgugcguguggag

SEQ ID NO: 40004 - RNA, 20 nt, Artificial Sequence
  Synthetic oligonucleotide: CBLB-7702
ugggcugcgugcguguggag

SEQ ID NO: 40005 - RNA, 21 nt, Artificial Sequence
  Synthetic oligonucleotide: CBLB-9624
cugggcugcgugcguguggag

SEQ ID NO: 40006 - RNA, 22 nt, Artificial Sequence
  Synthetic oligonucleotide: CBLB-9625
acugggcugcgugcguguggag

SEQ ID NO: 40007 - RNA, 23 nt, Artificial Sequence
  Synthetic oligonucleotide: CBLB-9626
cacugggcugcgugcguguggag

SEQ ID NO: 40008 - RNA, 24 nt, Artificial Sequence
  Synthetic oligonucleotide: CBLB-9627
acacugggcugcgugcguguggag

SEQ ID NO: 40009 - RNA, 18 nt, Artificial Sequence
  Synthetic oligonucleotide: CBLB-9628
gaagggaaggggucgccg

SEQ ID NO: 40010 - RNA, 19 nt, Artificial Sequence
  Synthetic oligonucleotide: CBLB-9629
agaagggaaggggucgccg

SEQ ID NO: 40011 - RNA, 20 nt, Artificial Sequence
  Synthetic oligonucleotide: CBLB-7711
aagaagggaaggggucgccg

SEQ ID NO: 40012 - RNA, 21 nt, Artificial Sequence
  Synthetic oligonucleotide: CBLB-9630
caagaagggaaggggucgccg

SEQ ID NO: 40013 - RNA, 22 nt, Artificial Sequence
  Synthetic oligonucleotide: CBLB-9631
gcaagaagggaaggggucgccg

SEQ ID NO: 40014 - RNA, 23 nt, Artificial Sequence
  Synthetic oligonucleotide: CBLB-9632
ggcaagaagggaaggggucgccg

SEQ ID NO: 40015 - RNA, 24 nt, Artificial Sequence
  Synthetic oligonucleotide: CBLB-9633
aggcaagaagggaaggggucgccg

SEQ ID NO: 40016 - RNA, 18 nt, Artificial Sequence
  Synthetic oligonucleotide: CBLB-9634
accagaacccgcaggccg

SEQ ID NO: 40017 - RNA, 19 nt, Artificial Sequence
  Synthetic oligonucleotide: CBLB-9635
gaccagaacccgcaggccg

SEQ ID NO: 40018 - RNA, 20 nt, Artificial Sequence
  Synthetic oligonucleotide: CBLB-7712
agaccagaacccgcaggccg

SEQ ID NO: 40019 - RNA, 21 nt, Artificial Sequence
  Synthetic oligonucleotide: CBLB-9636
aagaccagaacccgcaggccg

SEQ ID NO: 40020 - RNA, 22 nt, Artificial Sequence
  Synthetic oligonucleotide: CBLB-9637
aaagaccagaacccgcaggccg

SEQ ID NO: 40021 - RNA, 23 nt, Artificial Sequence
  Synthetic oligonucleotide: CBLB-9638
uaaagaccagaacccgcaggccg

SEQ ID NO: 40022 - RNA, 24 nt, Artificial Sequence
  Synthetic oligonucleotide: CBLB-9639
uuaaagaccagaacccgcaggccg

SEQ ID NO: 40023 - RNA, 18 nt, Artificial Sequence
  Synthetic oligonucleotide: CBLB-9640
cucuggacagcuacggcg

SEQ ID NO: 40024 - RNA, 19 nt, Artificial Sequence
  Synthetic oligonucleotide: CBLB-9641
ucucuggacagcuacggcg

SEQ ID NO: 40025 - RNA, 20 nt, Artificial Sequence
  Synthetic oligonucleotide: CBLB-9642
gucucuggacagcuacggcg

SEQ ID NO: 40026 - RNA, 21 nt, Artificial Sequence
  Synthetic oligonucleotide: CBLB-9643
ugucucuggacagcuacggcg

SEQ ID NO: 40027 - RNA, 22 nt, Artificial Sequence
  Synthetic oligonucleotide: CBLB-9644
gugucucuggacagcuacggcg

SEQ ID NO: 40028 - RNA, 23 nt, Artificial Sequence
  Synthetic oligonucleotide: CBLB-9645
cgugucucuggacagcuacggcg

SEQ ID NO: 40029 - RNA, 24 nt, Artificial Sequence
  Synthetic oligonucleotide: CBLB-9646
gcgugucucuggacagcuacggcg

SEQ ID NO: 40030 - RNA, 18 nt, Artificial Sequence
  Synthetic oligonucleotide: CBLB-9647
caagaagggaaggggucg

SEQ ID NO: 40031 - RNA, 19 nt, Artificial Sequence
  Synthetic oligonucleotide: CBLB-9648
gcaagaagggaaggggucg

SEQ ID NO: 40032 - RNA, 20 nt, Artificial Sequence
  Synthetic oligonucleotide: CBLB-9649
ggcaagaagggaaggggucg

SEQ ID NO: 40033 - RNA, 21 nt, Artificial Sequence
  Synthetic oligonucleotide: CBLB-9650
aggcaagaagggaaggggucg

SEQ ID NO: 40034 - RNA, 22 nt, Artificial Sequence
  Synthetic oligonucleotide: CBLB-9651
aaggcaagaagggaaggggucg

SEQ ID NO: 40035 - RNA, 23 nt, Artificial Sequence
  Synthetic oligonucleotide: CBLB-9652
aaaggcaagaagggaaggggucg

SEQ ID NO: 40036 - RNA, 24 nt, Artificial Sequence
  Synthetic oligonucleotide: CBLB-9653
gaaaggcaagaagggaaggggucg

SEQ ID NO: 40037 - RNA, 18 nt, Artificial Sequence
  Synthetic oligonucleotide: CBLB-9654
gccaggcgcgggccaagg

SEQ ID NO: 40038 - RNA, 19 nt, Artificial Sequence
  Synthetic oligonucleotide: CBLB-9655
agccaggcgcgggccaagg

SEQ ID NO: 40039 - RNA, 20 nt, Artificial Sequence
  Synthetic oligonucleotide: CBLB-7718
uagccaggcgcgggccaagg

SEQ ID NO: 40040 - RNA, 21 nt, Artificial Sequence
  Synthetic oligonucleotide: CBLB-9656
guagccaggcgcgggccaagg

SEQ ID NO: 40041 - RNA, 22 nt, Artificial Sequence
  Synthetic oligonucleotide: CBLB-9657
gguagccaggcgcgggccaagg

SEQ ID NO: 40042 - RNA, 23 nt, Artificial Sequence
  Synthetic oligonucleotide: CBLB-9658
ggguagccaggcgcgggccaagg

SEQ ID NO: 40043 - RNA, 24 nt, Artificial Sequence
  Synthetic oligonucleotide: CBLB-9659
gggguagccaggcgcgggccaagg

SEQ ID NO: 40044 - RNA, 18 nt, Artificial Sequence
  Synthetic oligonucleotide: CBLB-9660
aagaccagaacccgcagg

SEQ ID NO: 40045 - RNA, 19 nt, Artificial Sequence
  Synthetic oligonucleotide: CBLB-9661
aaagaccagaacccgcagg

SEQ ID NO: 40046 - RNA, 20 nt, Artificial Sequence
  Synthetic oligonucleotide: CBLB-9662
uaaagaccagaacccgcagg

SEQ ID NO: 40047 - RNA, 21 nt, Artificial Sequence
  Synthetic oligonucleotide: CBLB-9663
uuaaagaccagaacccgcagg

SEQ ID NO: 40048 - RNA, 22 nt, Artificial Sequence
  Synthetic oligonucleotide: CBLB-9664
uuuaaagaccagaacccgcagg

SEQ ID NO: 40049 - RNA, 23 nt, Artificial Sequence
  Synthetic oligonucleotide: CBLB-9665
auuuaaagaccagaacccgcagg

SEQ ID NO: 40050 - RNA, 24 nt, Artificial Sequence
  Synthetic oligonucleotide: CBLB-9666
cauuuaaagaccagaacccgcagg

SEQ ID NO: 40051 - RNA, 18 nt, Artificial Sequence
  Synthetic oligonucleotide: CBLB-9667
aggcgcgggccaaggagg

SEQ ID NO: 40052 - RNA, 19 nt, Artificial Sequence
  Synthetic oligonucleotide: CBLB-9668
caggcgcgggccaaggagg

SEQ ID NO: 40053 - RNA, 20 nt, Artificial Sequence
  Synthetic oligonucleotide: CBLB-9669
ccaggcgcgggccaaggagg

SEQ ID NO: 40054 - RNA, 21 nt, Artificial Sequence
  Synthetic oligonucleotide: CBLB-9670
gccaggcgcgggccaaggagg

SEQ ID NO: 40055 - RNA, 22 nt, Artificial Sequence
  Synthetic oligonucleotide: CBLB-9671
agccaggcgcgggccaaggagg

SEQ ID NO: 40056 - RNA, 23 nt, Artificial Sequence
  Synthetic oligonucleotide: CBLB-9672
uagccaggcgcgggccaaggagg

SEQ ID NO: 40057 - RNA, 24 nt, Artificial Sequence
  Synthetic oligonucleotide: CBLB-9673
guagccaggcgcgggccaaggagg

SEQ ID NO: 40058 - RNA, 18 nt, Artificial Sequence
  Synthetic oligonucleotide: CBLB-9674
acccgcaggccggggagg

SEQ ID NO: 40059 - RNA, 19 nt, Artificial Sequence
  Synthetic oligonucleotide: CBLB-9675
aacccgcaggccggggagg

SEQ ID NO: 40060 - RNA, 20 nt, Artificial Sequence
  Synthetic oligonucleotide: CBLB-7721
gaacccgcaggccggggagg

SEQ ID NO: 40061 - RNA, 21 nt, Artificial Sequence
  Synthetic oligonucleotide: CBLB-9676
agaacccgcaggccggggagg

SEQ ID NO: 40062 - RNA, 22 nt, Artificial Sequence
  Synthetic oligonucleotide: CBLB-9677
cagaacccgcaggccggggagg

SEQ ID NO: 40063 - RNA, 23 nt, Artificial Sequence
  Synthetic oligonucleotide: CBLB-9678
ccagaacccgcaggccggggagg

SEQ ID NO: 40064 - RNA, 24 nt, Artificial Sequence
  Synthetic oligonucleotide: CBLB-9679
accagaacccgcaggccggggagg

SEQ ID NO: 40065 - RNA, 18 nt, Artificial Sequence
  Synthetic oligonucleotide: CBLB-9680
ccuccccgagucgggcgg

SEQ ID NO: 40066 - RNA, 19 nt, Artificial Sequence
  Synthetic oligonucleotide: CBLB-9681
gccuccccgagucgggcgg

SEQ ID NO: 40067 - RNA, 20 nt, Artificial Sequence
  Synthetic oligonucleotide: CBLB-9682
ggccuccccgagucgggcgg

SEQ ID NO: 40068 - RNA, 21 nt, Artificial Sequence
  Synthetic oligonucleotide: CBLB-9683
cggccuccccgagucgggcgg

SEQ ID NO: 40069 - RNA, 22 nt, Artificial Sequence
  Synthetic oligonucleotide: CBLB-9684
gcggccuccccgagucgggcgg

SEQ ID NO: 40070 - RNA, 23 nt, Artificial Sequence
  Synthetic oligonucleotide: CBLB-9685
cgcggccuccccgagucgggcgg

SEQ ID NO: 40071 - RNA, 24 nt, Artificial Sequence
  Synthetic oligonucleotide: CBLB-9686
ccgcggccuccccgagucgggcgg

SEQ ID NO: 40072 - RNA, 18 nt, Artificial Sequence
  Synthetic oligonucleotide: CBLB-9687
gcggccuccccgagucgg

SEQ ID NO: 40073 - RNA, 19 nt, Artificial Sequence
  Synthetic oligonucleotide: CBLB-9688
cgcggccuccccgagucgg

SEQ ID NO: 40074 - RNA, 20 nt, Artificial Sequence
  Synthetic oligonucleotide: CBLB-9689
ccgcggccuccccgagucgg

SEQ ID NO: 40075 - RNA, 21 nt, Artificial Sequence
  Synthetic oligonucleotide: CBLB-9690
cccgcggccuccccgagucgg

SEQ ID NO: 40076 - RNA, 22 nt, Artificial Sequence
  Synthetic oligonucleotide: CBLB-9691
ucccgcggccuccccgagucgg

SEQ ID NO: 40077 - RNA, 23 nt, Artificial Sequence
  Synthetic oligonucleotide: CBLB-9692
gucccgcggccuccccgagucgg

SEQ ID NO: 40078 - RNA, 24 nt, Artificial Sequence
  Synthetic oligonucleotide: CBLB-9693
cgucccgcggccuccccgagucgg

SEQ ID NO: 40079 - RNA, 18 nt, Artificial Sequence
  Synthetic oligonucleotide: CBLB-9694
gccgaaaggcaagaaggg

SEQ ID NO: 40080 - RNA, 19 nt, Artificial Sequence
  Synthetic oligonucleotide: CBLB-9695
cgccgaaaggcaagaaggg

SEQ ID NO: 40081 - RNA, 20 nt, Artificial Sequence
  Synthetic oligonucleotide: CBLB-9696
gcgccgaaaggcaagaaggg

SEQ ID NO: 40082 - RNA, 21 nt, Artificial Sequence
  Synthetic oligonucleotide: CBLB-9697
ggcgccgaaaggcaagaaggg

SEQ ID NO: 40083 - RNA, 22 nt, Artificial Sequence
  Synthetic oligonucleotide: CBLB-9698
cggcgccgaaaggcaagaaggg

SEQ ID NO: 40084 - RNA, 23 nt, Artificial Sequence
  Synthetic oligonucleotide: CBLB-9699
acggcgccgaaaggcaagaaggg

SEQ ID NO: 40085 - RNA, 24 nt, Artificial Sequence
  Synthetic oligonucleotide: CBLB-9700
uacggcgccgaaaggcaagaaggg

SEQ ID NO: 40086 - RNA, 18 nt, Artificial Sequence
  Synthetic oligonucleotide: CBLB-9701
ccugugugugccacaggg

SEQ ID NO: 40087 - RNA, 19 nt, Artificial Sequence
  Synthetic oligonucleotide: CBLB-9702
uccugugugugccacaggg

SEQ ID NO: 40088 - RNA, 20 nt, Artificial Sequence
  Synthetic oligonucleotide: CBLB-9703
guccugugugugccacaggg

SEQ ID NO: 40089 - RNA, 21 nt, Artificial Sequence
  Synthetic oligonucleotide: CBLB-9704
gguccugugugugccacaggg

SEQ ID NO: 40090 - RNA, 22 nt, Artificial Sequence
  Synthetic oligonucleotide: CBLB-9705
ggguccugugugugccacaggg

SEQ ID NO: 40091 - RNA, 23 nt, Artificial Sequence
  Synthetic oligonucleotide: CBLB-9706
uggguccugugugugccacaggg

SEQ ID NO: 40092 - RNA, 24 nt, Artificial Sequence
  Synthetic oligonucleotide: CBLB-9707
cuggguccugugugugccacaggg

SEQ ID NO: 40093 - RNA, 18 nt, Artificial Sequence
  Synthetic oligonucleotide: CBLB-9708
ccgagucgggcgggaggg

SEQ ID NO: 40094 - RNA, 19 nt, Artificial Sequence
  Synthetic oligonucleotide: CBLB-9709
cccgagucgggcgggaggg

SEQ ID NO: 40095 - RNA, 20 nt, Artificial Sequence
  Synthetic oligonucleotide: CBLB-9710
ccccgagucgggcgggaggg

SEQ ID NO: 40096 - RNA, 21 nt, Artificial Sequence
  Synthetic oligonucleotide: CBLB-9711
uccccgagucgggcgggaggg

SEQ ID NO: 40097 - RNA, 22 nt, Artificial Sequence
  Synthetic oligonucleotide: CBLB-9712
cuccccgagucgggcgggaggg

SEQ ID NO: 40098 - RNA, 23 nt, Artificial Sequence
  Synthetic oligonucleotide: CBLB-9713
ccuccccgagucgggcgggaggg

SEQ ID NO: 40099 - RNA, 24 nt, Artificial Sequence
  Synthetic oligonucleotide: CBLB-9714
gccuccccgagucgggcgggaggg

SEQ ID NO: 40100 - RNA, 18 nt, Artificial Sequence
  Synthetic oligonucleotide: CBLB-9715
cagaacccgcaggccggg

SEQ ID NO: 40101 - RNA, 19 nt, Artificial Sequence
  Synthetic oligonucleotide: CBLB-9716
ccagaacccgcaggccggg

SEQ ID NO: 40102 - RNA, 20 nt, Artificial Sequence
  Synthetic oligonucleotide: CBLB-9717
accagaacccgcaggccggg

SEQ ID NO: 40103 - RNA, 21 nt, Artificial Sequence
  Synthetic oligonucleotide: CBLB-9718
gaccagaacccgcaggccggg

SEQ ID NO: 40104 - RNA, 22 nt, Artificial Sequence
  Synthetic oligonucleotide: CBLB-9719
agaccagaacccgcaggccggg

SEQ ID NO: 40105 - RNA, 23 nt, Artificial Sequence
  Synthetic oligonucleotide: CBLB-9720
aagaccagaacccgcaggccggg

SEQ ID NO: 40106 - RNA, 24 nt, Artificial Sequence
  Synthetic oligonucleotide: CBLB-9721
aaagaccagaacccgcaggccggg

SEQ ID NO: 40107 - RNA, 18 nt, Artificial Sequence
  Synthetic oligonucleotide: CBLB-9722
cuccccgagucgggcggg

SEQ ID NO: 40108 - RNA, 19 nt, Artificial Sequence
  Synthetic oligonucleotide: CBLB-9723
ccuccccgagucgggcggg

SEQ ID NO: 40109 - RNA, 20 nt, Artificial Sequence
  Synthetic oligonucleotide: CBLB-7726
gccuccccgagucgggcggg

SEQ ID NO: 40110 - RNA, 21 nt, Artificial Sequence
  Synthetic oligonucleotide: CBLB-9724
ggccuccccgagucgggcggg

SEQ ID NO: 40111 - RNA, 22 nt, Artificial Sequence
  Synthetic oligonucleotide: CBLB-9725
cggccuccccgagucgggcggg

SEQ ID NO: 40112 - RNA, 23 nt, Artificial Sequence
  Synthetic oligonucleotide: CBLB-9726
gcggccuccccgagucgggcggg

SEQ ID NO: 40113 - RNA, 24 nt, Artificial Sequence
  Synthetic oligonucleotide: CBLB-9727
cgcggccuccccgagucgggcggg

SEQ ID NO: 40114 - RNA, 18 nt, Artificial Sequence
  Synthetic oligonucleotide: CBLB-9728
cggccuccccgagucggg

SEQ ID NO: 40115 - RNA, 19 nt, Artificial Sequence
  Synthetic oligonucleotide: CBLB-9729
gcggccuccccgagucggg

SEQ ID NO: 40116 - RNA, 20 nt, Artificial Sequence
  Synthetic oligonucleotide: CBLB-7727
cgcggccuccccgagucggg

SEQ ID NO: 40117 - RNA, 21 nt, Artificial Sequence
  Synthetic oligonucleotide: CBLB-9730
ccgcggccuccccgagucggg

SEQ ID NO: 40118 - RNA, 22 nt, Artificial Sequence
  Synthetic oligonucleotide: CBLB-9731
cccgcggccuccccgagucggg

SEQ ID NO: 40119 - RNA, 23 nt, Artificial Sequence
  Synthetic oligonucleotide: CBLB-9732
ucccgcggccuccccgagucggg

SEQ ID NO: 40120 - RNA, 24 nt, Artificial Sequence
  Synthetic oligonucleotide: CBLB-9733
gucccgcggccuccccgagucggg

SEQ ID NO: 40121 - RNA, 18 nt, Artificial Sequence
  Synthetic oligonucleotide: CBLB-9734
agaacccgcaggccgggg

SEQ ID NO: 40122 - RNA, 19 nt, Artificial Sequence
  Synthetic oligonucleotide: CBLB-9735
cagaacccgcaggccgggg

SEQ ID NO: 40123 - RNA, 20 nt, Artificial Sequence
  Synthetic oligonucleotide: CBLB-7730
ccagaacccgcaggccgggg

SEQ ID NO: 40124 - RNA, 21 nt, Artificial Sequence
  Synthetic oligonucleotide: CBLB-9736
accagaacccgcaggccgggg

SEQ ID NO: 40125 - RNA, 22 nt, Artificial Sequence
  Synthetic oligonucleotide: CBLB-9737
gaccagaacccgcaggccgggg

SEQ ID NO: 40126 - RNA, 23 nt, Artificial Sequence
  Synthetic oligonucleotide: CBLB-9738
agaccagaacccgcaggccgggg

SEQ ID NO: 40127 - RNA, 24 nt, Artificial Sequence
  Synthetic oligonucleotide: CBLB-9739
aagaccagaacccgcaggccgggg

SEQ ID NO: 40128 - RNA, 18 nt, Artificial Sequence
  Synthetic oligonucleotide: CBLB-9740
gguuaagauuuuaauuug

SEQ ID NO: 40129 - RNA, 19 nt, Artificial Sequence
  Synthetic oligonucleotide: CBLB-9741
ugguuaagauuuuaauuug

SEQ ID NO: 40130 - RNA, 20 nt, Artificial Sequence
  Synthetic oligonucleotide: CBLB-9742
augguuaagauuuuaauuug

SEQ ID NO: 40131 - RNA, 21 nt, Artificial Sequence
  Synthetic oligonucleotide: CBLB-9743
caugguuaagauuuuaauuug

SEQ ID NO: 40132 - RNA, 22 nt, Artificial Sequence
  Synthetic oligonucleotide: CBLB-9744
acaugguuaagauuuuaauuug

SEQ ID NO: 40133 - RNA, 23 nt, Artificial Sequence
  Synthetic oligonucleotide: CBLB-9745
uacaugguuaagauuuuaauuug

SEQ ID NO: 40134 - RNA, 24 nt, Artificial Sequence
  Synthetic oligonucleotide: CBLB-9746
uuacaugguuaagauuuuaauuug

SEQ ID NO: 40135 - RNA, 18 nt, Artificial Sequence
  Synthetic oligonucleotide: CBLB-9747
ugcucuggacuucauacu

SEQ ID NO: 40136 - RNA, 19 nt, Artificial Sequence
  Synthetic oligonucleotide: CBLB-9748
uugcucuggacuucauacu

SEQ ID NO: 40137 - RNA, 20 nt, Artificial Sequence
  Synthetic oligonucleotide: CBLB-9749
auugcucuggacuucauacu

SEQ ID NO: 40138 - RNA, 21 nt, Artificial Sequence
  Synthetic oligonucleotide: CBLB-9750
aauugcucuggacuucauacu

SEQ ID NO: 40139 - RNA, 22 nt, Artificial Sequence
  Synthetic oligonucleotide: CBLB-9751
caauugcucuggacuucauacu

SEQ ID NO: 40140 - RNA, 23 nt, Artificial Sequence
  Synthetic oligonucleotide: CBLB-9752
acaauugcucuggacuucauacu

SEQ ID NO: 40141 - RNA, 24 nt, Artificial Sequence
  Synthetic oligonucleotide: CBLB-9753
aacaauugcucuggacuucauacu

SEQ ID NO: 40142 - RNA, 18 nt, Artificial Sequence
  Synthetic oligonucleotide: CBLB-9754
aauacuguaauuauuacu

SEQ ID NO: 40143 - RNA, 19 nt, Artificial Sequence
  Synthetic oligonucleotide: CBLB-9755
uaauacuguaauuauuacu

SEQ ID NO: 40144 - RNA, 20 nt, Artificial Sequence
  Synthetic oligonucleotide: CBLB-9756
uuaauacuguaauuauuacu

SEQ ID NO: 40145 - RNA, 21 nt, Artificial Sequence
  Synthetic oligonucleotide: CBLB-9757
uuuaauacuguaauuauuacu

SEQ ID NO: 40146 - RNA, 22 nt, Artificial Sequence
  Synthetic oligonucleotide: CBLB-9758
uuuuaauacuguaauuauuacu

SEQ ID NO: 40147 - RNA, 23 nt, Artificial Sequence
  Synthetic oligonucleotide: CBLB-9759
auuuuaauacuguaauuauuacu

SEQ ID NO: 40148 - RNA, 24 nt, Artificial Sequence
  Synthetic oligonucleotide: CBLB-9760
aauuuuaauacuguaauuauuacu

SEQ ID NO: 40149 - RNA, 18 nt, Artificial Sequence
  Synthetic oligonucleotide: CBLB-9761
augcuaccaacaauugcu

SEQ ID NO: 40150 - RNA, 19 nt, Artificial Sequence
  Synthetic oligonucleotide: CBLB-9762
caugcuaccaacaauugcu

SEQ ID NO: 40151 - RNA, 20 nt, Artificial Sequence
  Synthetic oligonucleotide: CBLB-9763
ucaugcuaccaacaauugcu

SEQ ID NO: 40152 - RNA, 21 nt, Artificial Sequence
  Synthetic oligonucleotide: CBLB-9764
cucaugcuaccaacaauugcu

SEQ ID NO: 40153 - RNA, 22 nt, Artificial Sequence
  Synthetic oligonucleotide: CBLB-9765
acucaugcuaccaacaauugcu

SEQ ID NO: 40154 - RNA, 23 nt, Artificial Sequence
  Synthetic oligonucleotide: CBLB-9766
cacucaugcuaccaacaauugcu

SEQ ID NO: 40155 - RNA, 24 nt, Artificial Sequence
  Synthetic oligonucleotide: CBLB-9767
ccacucaugcuaccaacaauugcu

SEQ ID NO: 40156 - RNA, 18 nt, Artificial Sequence
  Synthetic oligonucleotide: CBLB-9768
uguugcguuuccacgucu

SEQ ID NO: 40157 - RNA, 19 nt, Artificial Sequence
  Synthetic oligonucleotide: CBLB-9769
uuguugcguuuccacgucu

SEQ ID NO: 40158 - RNA, 20 nt, Artificial Sequence
  Synthetic oligonucleotide: CBLB-7751
auuguugcguuuccacgucu

SEQ ID NO: 40159 - RNA, 21 nt, Artificial Sequence
  Synthetic oligonucleotide: CBLB-9770
aauuguugcguuuccacgucu

SEQ ID NO: 40160 - RNA, 22 nt, Artificial Sequence
  Synthetic oligonucleotide: CBLB-9771
uaauuguugcguuuccacgucu

SEQ ID NO: 40161 - RNA, 23 nt, Artificial Sequence
  Synthetic oligonucleotide: CBLB-9772
guaauuguugcguuuccacgucu

SEQ ID NO: 40162 - RNA, 24 nt, Artificial Sequence
  Synthetic oligonucleotide: CBLB-9773
gguaauuguugcguuuccacgucu

SEQ ID NO: 40163 - RNA, 18 nt, Artificial Sequence
  Synthetic oligonucleotide: CBLB-9774
ccgcgcacacgcgugucu

SEQ ID NO: 40164 - RNA, 19 nt, Artificial Sequence
  Synthetic oligonucleotide: CBLB-9775
cccgcgcacacgcgugucu

SEQ ID NO: 40165 - RNA, 20 nt, Artificial Sequence
  Synthetic oligonucleotide: CBLB-9776
acccgcgcacacgcgugucu

SEQ ID NO: 40166 - RNA, 21 nt, Artificial Sequence
  Synthetic oligonucleotide: CBLB-9777
gacccgcgcacacgcgugucu

SEQ ID NO: 40167 - RNA, 22 nt, Artificial Sequence
  Synthetic oligonucleotide: CBLB-9778
ggacccgcgcacacgcgugucu

SEQ ID NO: 40168 - RNA, 23 nt, Artificial Sequence
  Synthetic oligonucleotide: CBLB-9779
gggacccgcgcacacgcgugucu

SEQ ID NO: 40169 - RNA, 24 nt, Artificial Sequence
  Synthetic oligonucleotide: CBLB-9780
ugggacccgcgcacacgcgugucu

SEQ ID NO: 40170 - RNA, 18 nt, Artificial Sequence
  Synthetic oligonucleotide: CBLB-9781
cgcuggguugcuccuucu

SEQ ID NO: 40171 - RNA, 19 nt, Artificial Sequence
  Synthetic oligonucleotide: CBLB-9782
gcgcuggguugcuccuucu

SEQ ID NO: 40172 - RNA, 20 nt, Artificial Sequence
  Synthetic oligonucleotide: CBLB-9783
cgcgcuggguugcuccuucu

SEQ ID NO: 40173 - RNA, 21 nt, Artificial Sequence
  Synthetic oligonucleotide: CBLB-9784
gcgcgcuggguugcuccuucu

SEQ ID NO: 40174 - RNA, 22 nt, Artificial Sequence
  Synthetic oligonucleotide: CBLB-9785
ugcgcgcuggguugcuccuucu

SEQ ID NO: 40175 - RNA, 23 nt, Artificial Sequence
  Synthetic oligonucleotide: CBLB-9786
cugcgcgcuggguugcuccuucu

SEQ ID NO: 40176 - RNA, 24 nt, Artificial Sequence
  Synthetic oligonucleotide: CBLB-9787
ccugcgcgcuggguugcuccuucu

SEQ ID NO: 40177 - RNA, 18 nt, Artificial Sequence
  Synthetic oligonucleotide: CBLB-9788
uugccgccgccguccagu

SEQ ID NO: 40178 - RNA, 19 nt, Artificial Sequence
  Synthetic oligonucleotide: CBLB-9789
uuugccgccgccguccagu

SEQ ID NO: 40179 - RNA, 20 nt, Artificial Sequence
  Synthetic oligonucleotide: CBLB-9790
cuuugccgccgccguccagu

SEQ ID NO: 40180 - RNA, 21 nt, Artificial Sequence
  Synthetic oligonucleotide: CBLB-9791
ccuuugccgccgccguccagu

SEQ ID NO: 40181 - RNA, 22 nt, Artificial Sequence
  Synthetic oligonucleotide: CBLB-9792
gccuuugccgccgccguccagu

SEQ ID NO: 40182 - RNA, 23 nt, Artificial Sequence
  Synthetic oligonucleotide: CBLB-9793
ugccuuugccgccgccguccagu

SEQ ID NO: 40183 - RNA, 24 nt, Artificial Sequence
  Synthetic oligonucleotide: CBLB-9794
cugccuuugccgccgccguccagu

SEQ ID NO: 40184 - RNA, 18 nt, Artificial Sequence
  Synthetic oligonucleotide: CBLB-9795
acacugggcugcgugcgu

SEQ ID NO: 40185 - RNA, 19 nt, Artificial Sequence
  Synthetic oligonucleotide: CBLB-9796
cacacugggcugcgugcgu

SEQ ID NO: 40186 - RNA, 20 nt, Artificial Sequence
  Synthetic oligonucleotide: CBLB-9797
acacacugggcugcgugcgu

SEQ ID NO: 40187 - RNA, 21 nt, Artificial Sequence
  Synthetic oligonucleotide: CBLB-9798
cacacacugggcugcgugcgu

SEQ ID NO: 40188 - RNA, 22 nt, Artificial Sequence
  Synthetic oligonucleotide: CBLB-9799
acacacacugggcugcgugcgu

SEQ ID NO: 40189 - RNA, 23 nt, Artificial Sequence
  Synthetic oligonucleotide: CBLB-9800
cacacacacugggcugcgugcgu

SEQ ID NO: 40190 - RNA, 24 nt, Artificial Sequence
  Synthetic oligonucleotide: CBLB-9801
ccacacacacugggcugcgugcgu

SEQ ID NO: 40191 - RNA, 18 nt, Artificial Sequence
  Synthetic oligonucleotide: CBLB-9802
aggugauaaagugugauu

SEQ ID NO: 40192 - RNA, 19 nt, Artificial Sequence
  Synthetic oligonucleotide: CBLB-9803
caggugauaaagugugauu

SEQ ID NO: 40193 - RNA, 20 nt, Artificial Sequence
  Synthetic oligonucleotide: CBLB-9804
ucaggugauaaagugugauu

SEQ ID NO: 40194 - RNA, 21 nt, Artificial Sequence
  Synthetic oligonucleotide: CBLB-9805
gucaggugauaaagugugauu

SEQ ID NO: 40195 - RNA, 22 nt, Artificial Sequence
  Synthetic oligonucleotide: CBLB-9806
agucaggugauaaagugugauu

SEQ ID NO: 40196 - RNA, 23 nt, Artificial Sequence
  Synthetic oligonucleotide: CBLB-9807
cagucaggugauaaagugugauu

SEQ ID NO: 40197 - RNA, 24 nt, Artificial Sequence
  Synthetic oligonucleotide: CBLB-9808
ccagucaggugauaaagugugauu

SEQ ID NO: 40198 - RNA, 18 nt, Artificial Sequence
  Synthetic oligonucleotide: CBLB-9809
gcucuggacuucauacuu

SEQ ID NO: 40199 - RNA, 19 nt, Artificial Sequence
  Synthetic oligonucleotide: CBLB-9810
ugcucuggacuucauacuu

SEQ ID NO: 40200 - RNA, 20 nt, Artificial Sequence
  Synthetic oligonucleotide: CBLB-7761
uugcucuggacuucauacuu

SEQ ID NO: 40201 - RNA, 21 nt, Artificial Sequence
  Synthetic oligonucleotide: CBLB-9811
auugcucuggacuucauacuu

SEQ ID NO: 40202 - RNA, 22 nt, Artificial Sequence
  Synthetic oligonucleotide: CBLB-9812
aauugcucuggacuucauacuu

SEQ ID NO: 40203 - RNA, 23 nt, Artificial Sequence
  Synthetic oligonucleotide: CBLB-9813
caauugcucuggacuucauacuu

SEQ ID NO: 40204 - RNA, 24 nt, Artificial Sequence
  Synthetic oligonucleotide: CBLB-9814
acaauugcucuggacuucauacuu

SEQ ID NO: 40205 - RNA, 18 nt, Artificial Sequence
  Synthetic oligonucleotide: CBLB-9815
gcuggguugcuccuucuu

SEQ ID NO: 40206 - RNA, 19 nt, Artificial Sequence
  Synthetic oligonucleotide: CBLB-9816
cgcuggguugcuccuucuu

SEQ ID NO: 40207 - RNA, 20 nt, Artificial Sequence
  Synthetic oligonucleotide: CBLB-7762
gcgcuggguugcuccuucuu

SEQ ID NO: 40208 - RNA, 21 nt, Artificial Sequence
  Synthetic oligonucleotide: CBLB-9817
cgcgcuggguugcuccuucuu

SEQ ID NO: 40209 - RNA, 22 nt, Artificial Sequence
  Synthetic oligonucleotide: CBLB-9818
gcgcgcuggguugcuccuucuu

SEQ ID NO: 40210 - RNA, 23 nt, Artificial Sequence
  Synthetic oligonucleotide: CBLB-9819
ugcgcgcuggguugcuccuucuu

SEQ ID NO: 40211 - RNA, 24 nt, Artificial Sequence
  Synthetic oligonucleotide: CBLB-9820
cugcgcgcuggguugcuccuucuu

SEQ ID NO: 40212 - RNA, 17 nt, Artificial Sequence
  Synthetic oligonucleotide: CBLB-9821
cccgccuuucagcccca

SEQ ID NO: 40213 - RNA, 17 nt, Artificial Sequence
  Synthetic oligonucleotide: CBLB-9822
gccaaacaggucuauga

SEQ ID NO: 40214 - RNA, 17 nt, Artificial Sequence
  Synthetic oligonucleotide: CBLB-9823
ugucggagucaccuuua

SEQ ID NO: 40215 - RNA, 17 nt, Artificial Sequence
  Synthetic oligonucleotide: CBLB-9824
aguaguggcuggaaggg

SEQ ID NO: 40216 - RNA, 17 nt, Artificial Sequence
  Synthetic oligonucleotide: CBLB-9825
aaaggcgggacuuccug

SEQ ID NO: 40217 - RNA, 17 nt, Artificial Sequence
  Synthetic oligonucleotide: CBLB-9826
ggccagcguugucaacu

SEQ ID NO: 40218 - RNA, 17 nt, Artificial Sequence
  Synthetic oligonucleotide: CBLB-9827
ggcugaaaggcgggacu

SEQ ID NO: 40219 - RNA, 17 nt, Artificial Sequence
  Synthetic oligonucleotide: CBLB-9828
ccauuaucugguacuuu

SEQ ID NO: 40220 - RNA, 20 nt, Artificial Sequence
  Synthetic oligonucleotide: CBLB-9829
agucccgccuuucagcccca

SEQ ID NO: 40221 - RNA, 20 nt, Artificial Sequence
  Synthetic oligonucleotide: CBLB-7987
aucaaaaagagcaacagcca

SEQ ID NO: 40222 - RNA, 20 nt, Artificial Sequence
  Synthetic oligonucleotide: CBLB-9830
gcagccaaacaggucuauga

SEQ ID NO: 40223 - RNA, 20 nt, Artificial Sequence
  Synthetic oligonucleotide: CBLB-9831
uuuugucggagucaccuuua

SEQ ID NO: 40224 - RNA, 20 nt, Artificial Sequence
  Synthetic oligonucleotide: CBLB-9832
cagaguaguggcuggaaggg

SEQ ID NO: 40225 - RNA, 20 nt, Artificial Sequence
  Synthetic oligonucleotide: CBLB-9833
cugaaaggcgggacuuccug

SEQ ID NO: 40226 - RNA, 20 nt, Artificial Sequence
  Synthetic oligonucleotide: CBLB-9834
cugguacuuuuauugcuuug

SEQ ID NO: 40227 - RNA, 20 nt, Artificial Sequence
  Synthetic oligonucleotide: CBLB-9835
uuuggccagcguugucaacu

SEQ ID NO: 40228 - RNA, 20 nt, Artificial Sequence
  Synthetic oligonucleotide: CBLB-9836
uggggcugaaaggcgggacu

SEQ ID NO: 40229 - RNA, 20 nt, Artificial Sequence
  Synthetic oligonucleotide: CBLB-8747
gucaccccagccuacucucu

SEQ ID NO: 40230 - RNA, 20 nt, Artificial Sequence
  Synthetic oligonucleotide: CBLB-9837
uucccauuaucugguacuuu

SEQ ID NO: 40231 - RNA, 17 nt, Artificial Sequence
  Synthetic oligonucleotide: CBLB-9838
aaaaagagcaacagcca

SEQ ID NO: 40232 - RNA, 17 nt, Artificial Sequence
  Synthetic oligonucleotide: CBLB-9839
uuuugcuguuaguuuua

SEQ ID NO: 40233 - RNA, 17 nt, Artificial Sequence
  Synthetic oligonucleotide: CBLB-9840
guacuuuuauugcuuug

SEQ ID NO: 40234 - RNA, 17 nt, Artificial Sequence
  Synthetic oligonucleotide: CBLB-9841
accccagccuacucucu

SEQ ID NO: 40235 - RNA, 20 nt, Artificial Sequence
  Synthetic oligonucleotide: CBLB-8069
cucuuuugcuguuaguuuua

SEQ ID NO: 40236 - RNA, 17 nt, Artificial Sequence
  Synthetic oligonucleotide: CBLB-9842
accagucaggugauaaa

SEQ ID NO: 40237 - RNA, 17 nt, Artificial Sequence
  Synthetic oligonucleotide: CBLB-9843
cagguuacgugguuaga

SEQ ID NO: 40238 - RNA, 17 nt, Artificial Sequence
  Synthetic oligonucleotide: CBLB-9844
aagacaagucccagcac

SEQ ID NO: 40239 - RNA, 17 nt, Artificial Sequence
  Synthetic oligonucleotide: CBLB-9845
cgggaggggagagcggg

SEQ ID NO: 40240 - RNA, 17 nt, Artificial Sequence
  Synthetic oligonucleotide: CBLB-9846
gccuugaauuuacaugg

SEQ ID NO: 40241 - RNA, 17 nt, Artificial Sequence
  Synthetic oligonucleotide: CBLB-9847
uguugguagcaugagug

SEQ ID NO: 40242 - RNA, 17 nt, Artificial Sequence
  Synthetic oligonucleotide: CBLB-9848
uacauuggguuuuuugu

SEQ ID NO: 40243 - RNA, 17 nt, Artificial Sequence
  Synthetic oligonucleotide: CBLB-9849
uagcguuuauuacacuu

SEQ ID NO: 40244 - RNA, 20 nt, Artificial Sequence
  Synthetic oligonucleotide: CBLB-9850
gcaaccagucaggugauaaa

SEQ ID NO: 40245 - RNA, 20 nt, Artificial Sequence
  Synthetic oligonucleotide: CBLB-9851
uaucagguuacgugguuaga

SEQ ID NO: 40246 - RNA, 20 nt, Artificial Sequence
  Synthetic oligonucleotide: CBLB-9852
ugaaagacaagucccagcac

SEQ ID NO: 40247 - RNA, 20 nt, Artificial Sequence
  Synthetic oligonucleotide: CBLB-9853
gggcgggaggggagagcggg

SEQ ID NO: 40248 - RNA, 20 nt, Artificial Sequence
  Synthetic oligonucleotide: CBLB-9854
acagccuugaauuuacaugg

SEQ ID NO: 40249 - RNA, 20 nt, Artificial Sequence
  Synthetic oligonucleotide: CBLB-9235
aauuguugguagcaugagug

SEQ ID NO: 40250 - RNA, 20 nt, Artificial Sequence
  Synthetic oligonucleotide: CBLB-9855
uuuuacauuggguuuuuugu

SEQ ID NO: 40251 - RNA, 20 nt, Artificial Sequence
  Synthetic oligonucleotide: CBLB-9856
ugauagcguuuauuacacuu

SEQ ID NO: 40252 - RNA, 17 nt, Artificial Sequence
  Synthetic oligonucleotide: BID-170
guugaccugaggggaaa

SEQ ID NO: 40253 - RNA, 17 nt, Artificial Sequence
  Synthetic oligonucleotide: BID-82
caguggcgaccuggaaa

SEQ ID NO: 40254 - RNA, 17 nt, Artificial Sequence
  Synthetic oligonucleotide: BID-159
uccccucaggucaacaa

SEQ ID NO: 40255 - RNA, 17 nt, Artificial Sequence
  Synthetic oligonucleotide: BID-335
gaaggagcugaccucaa

SEQ ID NO: 40256 - RNA, 17 nt, Artificial Sequence
  Synthetic oligonucleotide: BID-2528
auccccuagagcaagaa

SEQ ID NO: 40257 - RNA, 17 nt, Artificial Sequence
  Synthetic oligonucleotide: BID-175
uguugaccugaggggaa

SEQ ID NO: 40258 - RNA, 17 nt, Artificial Sequence
  Synthetic oligonucleotide: BID-91
ccaguggcgaccuggaa

SEQ ID NO: 40259 - RNA, 17 nt, Artificial Sequence
  Synthetic oligonucleotide: BID-2529
cuaggggauggacugaa

SEQ ID NO: 40260 - RNA, 17 nt, Artificial Sequence
  Synthetic oligonucleotide: BID-252
ccuccgggccuggugaa

SEQ ID NO: 40261 - RNA, 17 nt, Artificial Sequence
  Synthetic oligonucleotide: BID-297
ugugcaggaccggaaca

SEQ ID NO: 40262 - RNA, 17 nt, Artificial Sequence
  Synthetic oligonucleotide: BID-301
ggccuacccuagagaca

SEQ ID NO: 40263 - RNA, 17 nt, Artificial Sequence
  Synthetic oligonucleotide: BID-90
ccgcgcugcccaggcca

SEQ ID NO: 40264 - RNA, 17 nt, Artificial Sequence
  Synthetic oligonucleotide: BID-352
cugcagcagcugcucca

SEQ ID NO: 40265 - RNA, 17 nt, Artificial Sequence
  Synthetic oligonucleotide: BID-92
ucugaccucacagucca

SEQ ID NO: 40266 - RNA, 17 nt, Artificial Sequence
  Synthetic oligonucleotide: BID-261
ccaggucggggacagca

SEQ ID NO: 40267 - RNA, 17 nt, Artificial Sequence
  Synthetic oligonucleotide: BID-347
cagggccagcaccagca

SEQ ID NO: 40268 - RNA, 17 nt, Artificial Sequence
  Synthetic oligonucleotide: BID-346
cuucuuggccagcagca

SEQ ID NO: 40269 - RNA, 17 nt, Artificial Sequence
  Synthetic oligonucleotide: BID-341
aaagacaucacggagca

SEQ ID NO: 40270 - RNA, 17 nt, Artificial Sequence
  Synthetic oligonucleotide: BID-257
gaaucuguguucaggca

SEQ ID NO: 40271 - RNA, 17 nt, Artificial Sequence
  Synthetic oligonucleotide: BID-262
gguguuccugagcugca

SEQ ID NO: 40272 - RNA, 17 nt, Artificial Sequence
  Synthetic oligonucleotide: BID-340
uugugugaaagacauca

SEQ ID NO: 40273 - RNA, 17 nt, Artificial Sequence
  Synthetic oligonucleotide: BID-2530
ggaaggagcugaccuca

SEQ ID NO: 40274 - RNA, 17 nt, Artificial Sequence
  Synthetic oligonucleotide: BID-154
caacgguuccagccuca

SEQ ID NO: 40275 - RNA, 17 nt, Artificial Sequence
  Synthetic oligonucleotide: BID-306
ccugcugcuggccaaga

SEQ ID NO: 40276 - RNA, 17 nt, Artificial Sequence
  Synthetic oligonucleotide: BID-357
uuccgguccugcacaga

SEQ ID NO: 40277 - RNA, 17 nt, Artificial Sequence
  Synthetic oligonucleotide: BID-302
cccuagagacauggaga

SEQ ID NO: 40278 - RNA, 17 nt, Artificial Sequence
  Synthetic oligonucleotide: BID-37
ggcucggugggcagcga

SEQ ID NO: 40279 - RNA, 17 nt, Artificial Sequence
  Synthetic oligonucleotide: BID-342
acaucacggagcaagga

SEQ ID NO: 40280 - RNA, 17 nt, Artificial Sequence
  Synthetic oligonucleotide: BID-241
cguucaccaggcccgga

SEQ ID NO: 40281 - RNA, 17 nt, Artificial Sequence
  Synthetic oligonucleotide: BID-2531
uuucuugcucuagggga

SEQ ID NO: 40282 - RNA, 17 nt, Artificial Sequence
  Synthetic oligonucleotide: BID-183
cuggcuccccaguggga

SEQ ID NO: 40283 - RNA, 17 nt, Artificial Sequence
  Synthetic oligonucleotide: BID-43
cggugcuggggucauga

SEQ ID NO: 40284 - RNA, 17 nt, Artificial Sequence
  Synthetic oligonucleotide: BID-166
gaugagcugcagacuga

SEQ ID NO: 40285 - RNA, 17 nt, Artificial Sequence
  Synthetic oligonucleotide: BID-143
aaccguuguugaccuga

SEQ ID NO: 40286 - RNA, 17 nt, Artificial Sequence
  Synthetic oligonucleotide: BID-267
ucggaggaggugaguga

SEQ ID NO: 40287 - RNA, 17 nt, Artificial Sequence
  Synthetic oligonucleotide: BID-245
ggcccggagggaugcua

SEQ ID NO: 40288 - RNA, 17 nt, Artificial Sequence
  Synthetic oligonucleotide: BID-2532
ucuccuuucuugcucua

SEQ ID NO: 40289 - RNA, 17 nt, Artificial Sequence
  Synthetic oligonucleotide: BID-349
ccuucuccaugucucua

SEQ ID NO: 40290 - RNA, 17 nt, Artificial Sequence
  Synthetic oligonucleotide: BID-296
cugugcaggaccggaac

SEQ ID NO: 40291 - RNA, 17 nt, Artificial Sequence
  Synthetic oligonucleotide: BID-151
caucguagcccucccac

SEQ ID NO: 40292 - RNA, 17 nt, Artificial Sequence
  Synthetic oligonucleotide: BID-80
ccuuuccaggucgccac

SEQ ID NO: 40293 - RNA, 17 nt, Artificial Sequence
  Synthetic oligonucleotide: BID-184
cacuggggagccagcac

SEQ ID NO: 40294 - RNA, 17 nt, Artificial Sequence
  Synthetic oligonucleotide: BID-169
cagagagcuggacgcac

SEQ ID NO: 40295 - RNA, 17 nt, Artificial Sequence
  Synthetic oligonucleotide: BID-251
cacucaccuccuccgac

SEQ ID NO: 40296 - RNA, 17 nt, Artificial Sequence
  Synthetic oligonucleotide: BID-295
gccccucugugcaggac

SEQ ID NO: 40297 - RNA, 17 nt, Artificial Sequence
  Synthetic oligonucleotide: BID-2533
aguuccagaagugugac

SEQ ID NO: 40298 - RNA, 17 nt, Artificial Sequence
  Synthetic oligonucleotide: BID-343
caaggacggcgugugac

SEQ ID NO: 40299 - RNA, 17 nt, Artificial Sequence
  Synthetic oligonucleotide: BID-156
gugcaucacaaaccuac

SEQ ID NO: 40300 - RNA, 17 nt, Artificial Sequence
  Synthetic oligonucleotide: BID-359
gaggggcacacagaacc

SEQ ID NO: 40301 - RNA, 17 nt, Artificial Sequence
  Synthetic oligonucleotide: BID-87
cugggacacugugaacc

SEQ ID NO: 40302 - RNA, 17 nt, Artificial Sequence
  Synthetic oligonucleotide: BID-260
gggccaggccguucacc

SEQ ID NO: 40303 - RNA, 17 nt, Artificial Sequence
  Synthetic oligonucleotide: BID-249
ccaugcuguccccgacc

SEQ ID NO: 40304 - RNA, 17 nt, Artificial Sequence
  Synthetic oligonucleotide: BID-81
gugucccaguggcgacc

SEQ ID NO: 40305 - RNA, 17 nt, Artificial Sequence
  Synthetic oligonucleotide: BID-298
ggaccggaacagggacc

SEQ ID NO: 40306 - RNA, 17 nt, Artificial Sequence
  Synthetic oligonucleotide: BID-266
ugccaggcaccucgccc

SEQ ID NO: 40307 - RNA, 17 nt, Artificial Sequence
  Synthetic oligonucleotide: BID-299
ggaccuggccacugccc

SEQ ID NO: 40308 - RNA, 17 nt, Artificial Sequence
  Synthetic oligonucleotide: BID-89
gagcugccgcgcugccc

SEQ ID NO: 40309 - RNA, 17 nt, Artificial Sequence
  Synthetic oligonucleotide: BID-2534
aggggagucaggaagcc

SEQ ID NO: 40310 - RNA, 17 nt, Artificial Sequence
  Synthetic oligonucleotide: BID-256
aggccguucaccaggcc

SEQ ID NO: 40311 - RNA, 17 nt, Artificial Sequence
  Synthetic oligonucleotide: BID-253
gggccuggugaacggcc

SEQ ID NO: 40312 - RNA, 17 nt, Artificial Sequence
  Synthetic oligonucleotide: BID-45
ugcuccuccagccggcc

SEQ ID NO: 40313 - RNA, 17 nt, Artificial Sequence
  Synthetic oligonucleotide: BID-276
uccugagcugcagggcc

SEQ ID NO: 40314 - RNA, 17 nt, Artificial Sequence
  Synthetic oligonucleotide: BID-237
uagcaucccuccgggcc

SEQ ID NO: 40315 - RNA, 17 nt, Artificial Sequence
  Synthetic oligonucleotide: BID-52
gugggcagcgaggggcc

SEQ ID NO: 40316 - RNA, 17 nt, Artificial Sequence
  Synthetic oligonucleotide: BID-97
ccucacaguccauggcc

SEQ ID NO: 40317 - RNA, 17 nt, Artificial Sequence
  Synthetic oligonucleotide: BID-354
gcuccagggcaguggcc

SEQ ID NO: 40318 - RNA, 17 nt, Artificial Sequence
  Synthetic oligonucleotide: BID-270
gaccugggcgaggugcc

SEQ ID NO: 40319 - RNA, 17 nt, Artificial Sequence
  Synthetic oligonucleotide: BID-240
ucauccggaauauugcc

SEQ ID NO: 40320 - RNA, 17 nt, Artificial Sequence
  Synthetic oligonucleotide: BID-84
cagcuccgacucacucc

SEQ ID NO: 40321 - RNA, 17 nt, Artificial Sequence
  Synthetic oligonucleotide: BID-236
gaccguagcaucccucc

SEQ ID NO: 40322 - RNA, 17 nt, Artificial Sequence
  Synthetic oligonucleotide: BID-351
ccugcagcagcugcucc

SEQ ID NO: 40323 - RNA, 17 nt, Artificial Sequence
  Synthetic oligonucleotide: BID-100
ucugugugucccuuucc

SEQ ID NO: 40324 - RNA, 17 nt, Artificial Sequence
  Synthetic oligonucleotide: BID-178
cucuauucuucccaagc

SEQ ID NO: 40325 - RNA, 17 nt, Artificial Sequence
  Synthetic oligonucleotide: BID-2535
aaggggagucaggaagc

SEQ ID NO: 40326 - RNA, 17 nt, Artificial Sequence
  Synthetic oligonucleotide: BID-265
agcucaggaacaccagc

SEQ ID NO: 40327 - RNA, 17 nt, Artificial Sequence
  Synthetic oligonucleotide: BID-46
cacugugcuccuccagc

SEQ ID NO: 40328 - RNA, 17 nt, Artificial Sequence
  Synthetic oligonucleotide: BID-345
ccuucuuggccagcagc

SEQ ID NO: 40329 - RNA, 17 nt, Artificial Sequence
  Synthetic oligonucleotide: BID-174
cagcuuccgcagagagc

SEQ ID NO: 40330 - RNA, 17 nt, Artificial Sequence
  Synthetic oligonucleotide: BID-268
agaaucuguguucaggc

SEQ ID NO: 40331 - RNA, 17 nt, Artificial Sequence
  Synthetic oligonucleotide: BID-179
uugggaagaauagaggc

SEQ ID NO: 40332 - RNA, 17 nt, Artificial Sequence
  Synthetic oligonucleotide: BID-168
gcacucaucccugaggc

SEQ ID NO: 40333 - RNA, 17 nt, Artificial Sequence
  Synthetic oligonucleotide: BID-246
caccuccuccgaccggc

SEQ ID NO: 40334 - RNA, 17 nt, Artificial Sequence
  Synthetic oligonucleotide: BID-48
cgaggggccgggccggc

SEQ ID NO: 40335 - RNA, 17 nt, Artificial Sequence
  Synthetic oligonucleotide: BID-185
agaggcagguaggcggc

SEQ ID NO: 40336 - RNA, 17 nt, Artificial Sequence
  Synthetic oligonucleotide: BID-50
gcagcgaggggccgggc

SEQ ID NO: 40337 - RNA, 17 nt, Artificial Sequence
  Synthetic oligonucleotide: BID-54
ggugggcagcgaggggc

SEQ ID NO: 40338 - RNA, 17 nt, Artificial Sequence
  Synthetic oligonucleotide: BID-51
guaagugggcugggggc

SEQ ID NO: 40339 - RNA, 17 nt, Artificial Sequence
  Synthetic oligonucleotide: BID-38
ggauucuguaagugggc

SEQ ID NO: 40340 - RNA, 17 nt, Artificial Sequence
  Synthetic oligonucleotide: BID-303
gaaggagaagaccaugc

SEQ ID NO: 40341 - RNA, 17 nt, Artificial Sequence
  Synthetic oligonucleotide: BID-93
gaggccagauccccugc

SEQ ID NO: 40342 - RNA, 17 nt, Artificial Sequence
  Synthetic oligonucleotide: BID-271
ugguguuccugagcugc

SEQ ID NO: 40343 - RNA, 17 nt, Artificial Sequence
  Synthetic oligonucleotide: BID-305
ggugcuggcccugcugc

SEQ ID NO: 40344 - RNA, 17 nt, Artificial Sequence
  Synthetic oligonucleotide: BID-300
ccuggagcagcugcugc

SEQ ID NO: 40345 - RNA, 17 nt, Artificial Sequence
  Synthetic oligonucleotide: BID-163
ccacgagcugccagugc

SEQ ID NO: 40346 - RNA, 17 nt, Artificial Sequence
  Synthetic oligonucleotide: BID-26
cgaaugugcagcggugc

SEQ ID NO: 40347 - RNA, 17 nt, Artificial Sequence
  Synthetic oligonucleotide: BID-304
gaagaccaugcuggugc

SEQ ID NO: 40348 - RNA, 17 nt, Artificial Sequence
  Synthetic oligonucleotide: BID-294
ugugugccccucugugc

SEQ ID NO: 40349 - RNA, 17 nt, Artificial Sequence
  Synthetic oligonucleotide: BID-258
gucaagaagacaucauc

SEQ ID NO: 40350 - RNA, 17 nt, Artificial Sequence
  Synthetic oligonucleotide: BID-83
ggcacccgcaggggauc

SEQ ID NO: 40351 - RNA, 17 nt, Artificial Sequence
  Synthetic oligonucleotide: BID-186
gacuccccuuuccccuc

SEQ ID NO: 40352 - RNA, 17 nt, Artificial Sequence
  Synthetic oligonucleotide: BID-239
ggaccguagcaucccuc

SEQ ID NO: 40353 - RNA, 17 nt, Artificial Sequence
  Synthetic oligonucleotide: BID-153
acaacgguuccagccuc

SEQ ID NO: 40354 - RNA, 17 nt, Artificial Sequence
  Synthetic oligonucleotide: BID-277
gccuggcccugcagcuc

SEQ ID NO: 40355 - RNA, 17 nt, Artificial Sequence
  Synthetic oligonucleotide: BID-191
gaggggaaaggggaguc

SEQ ID NO: 40356 - RNA, 17 nt, Artificial Sequence
  Synthetic oligonucleotide: BID-263
ggcaccucgcccagguc

SEQ ID NO: 40357 - RNA, 17 nt, Artificial Sequence
  Synthetic oligonucleotide: BID-259
ggugccuggcaauauuc

SEQ ID NO: 40358 - RNA, 17 nt, Artificial Sequence
  Synthetic oligonucleotide: BID-2536
uuagccagucacacuuc

SEQ ID NO: 40359 - RNA, 17 nt, Artificial Sequence
  Synthetic oligonucleotide: BID-339
cguaggugcguagguuc

SEQ ID NO: 40360 - RNA, 17 nt, Artificial Sequence
  Synthetic oligonucleotide: BID-355
uggccaggucccuguuc

SEQ ID NO: 40361 - RNA, 17 nt, Artificial Sequence
  Synthetic oligonucleotide: BID-272
uuucagaaucuguguuc

SEQ ID NO: 40362 - RNA, 17 nt, Artificial Sequence
  Synthetic oligonucleotide: BID-336
aaggguucuuacauuuc

SEQ ID NO: 40363 - RNA, 17 nt, Artificial Sequence
  Synthetic oligonucleotide: BID-172
uugaccugaggggaaag

SEQ ID NO: 40364 - RNA, 17 nt, Artificial Sequence
  Synthetic oligonucleotide: BID-165
ccucuauucuucccaag

SEQ ID NO: 40365 - RNA, 17 nt, Artificial Sequence
  Synthetic oligonucleotide: BID-34
agugcggauucuguaag

SEQ ID NO: 40366 - RNA, 17 nt, Artificial Sequence
  Synthetic oligonucleotide: BID-356
guuccgguccugcacag

SEQ ID NO: 40367 - RNA, 17 nt, Artificial Sequence
  Synthetic oligonucleotide: BID-182
cagugcuggcuccccag

SEQ ID NO: 40368 - RNA, 17 nt, Artificial Sequence
  Synthetic oligonucleotide: BID-86
gguucacagugucccag

SEQ ID NO: 40369 - RNA, 17 nt, Artificial Sequence
  Synthetic oligonucleotide: BID-269
aaucuguguucaggcag

SEQ ID NO: 40370 - RNA, 17 nt, Artificial Sequence
  Synthetic oligonucleotide: BID-353
cagcugcuccagggcag

SEQ ID NO: 40371 - RNA, 17 nt, Artificial Sequence
  Synthetic oligonucleotide: BID-33
caaauacgaaugugcag

SEQ ID NO: 40372 - RNA, 17 nt, Artificial Sequence
  Synthetic oligonucleotide: BID-96
auggacugugaggucag

SEQ ID NO: 40373 - RNA, 17 nt, Artificial Sequence
  Synthetic oligonucleotide: BID-102
gaaagggacacacagag

SEQ ID NO: 40374 - RNA, 17 nt, Artificial Sequence
  Synthetic oligonucleotide: BID-358
uccgguccugcacagag

SEQ ID NO: 40375 - RNA, 17 nt, Artificial Sequence
  Synthetic oligonucleotide: BID-36
gcucggugggcagcgag

SEQ ID NO: 40376 - RNA, 17 nt, Artificial Sequence
  Synthetic oligonucleotide: BID-164
uucuucccaagcgggag

SEQ ID NO: 40377 - RNA, 17 nt, Artificial Sequence
  Synthetic oligonucleotide: BID-150
accguuguugaccugag

SEQ ID NO: 40378 - RNA, 17 nt, Artificial Sequence
  Synthetic oligonucleotide: BID-155
ccgcuugggaagaauag

SEQ ID NO: 40379 - RNA, 17 nt, Artificial Sequence
  Synthetic oligonucleotide: BID-2537
cuccuuucuugcucuag

SEQ ID NO: 40380 - RNA, 17 nt, Artificial Sequence
  Synthetic oligonucleotide: BID-94
ccauggccugggcagcg

SEQ ID NO: 40381 - RNA, 17 nt, Artificial Sequence
  Synthetic oligonucleotide: BID-39
uggcucggugggcagcg

SEQ ID NO: 40382 - RNA, 17 nt, Artificial Sequence
  Synthetic oligonucleotide: BID-254
agggccugaggaccgcg

SEQ ID NO: 40383 - RNA, 17 nt, Artificial Sequence
  Synthetic oligonucleotide: BID-255
uguccccgaccugggcg

SEQ ID NO: 40384 - RNA, 17 nt, Artificial Sequence
  Synthetic oligonucleotide: BID-176
ccagcacuggcagcucg

SEQ ID NO: 40385 - RNA, 17 nt, Artificial Sequence
  Synthetic oligonucleotide: BID-244
gcaccucgcccaggucg

SEQ ID NO: 40386 - RNA, 17 nt, Artificial Sequence
  Synthetic oligonucleotide: BID-307
gcugcuggccaagaagg

SEQ ID NO: 40387 - RNA, 17 nt, Artificial Sequence
  Synthetic oligonucleotide: BID-243
caccagccggucggagg

SEQ ID NO: 40388 - RNA, 17 nt, Artificial Sequence
  Synthetic oligonucleotide: BID-190
gaauagaggcagguagg

SEQ ID NO: 40389 - RNA, 17 nt, Artificial Sequence
  Synthetic oligonucleotide: BID-242
ccguucaccaggcccgg

SEQ ID NO: 40390 - RNA, 17 nt, Artificial Sequence
  Synthetic oligonucleotide: BID-32
gggucaugauggcucgg

SEQ ID NO: 40391 - RNA, 17 nt, Artificial Sequence
  Synthetic oligonucleotide: BID-231
gaacaccagccggucgg

SEQ ID NO: 40392 - RNA, 17 nt, Artificial Sequence
  Synthetic oligonucleotide: BID-274
cuguguucaggcagggg

SEQ ID NO: 40393 - RNA, 17 nt, Artificial Sequence
  Synthetic oligonucleotide: BID-181
gcuggcuccccaguggg

SEQ ID NO: 40394 - RNA, 17 nt, Artificial Sequence
  Synthetic oligonucleotide: BID-99
gggacacacagaguggg

SEQ ID NO: 40395 - RNA, 17 nt, Artificial Sequence
  Synthetic oligonucleotide: BID-53
ggggccgggccggcugg

SEQ ID NO: 40396 - RNA, 17 nt, Artificial Sequence
  Synthetic oligonucleotide: BID-40
uucuguaagugggcugg

SEQ ID NO: 40397 - RNA, 17 nt, Artificial Sequence
  Synthetic oligonucleotide: BID-177
ugucagaacagcuuugg

SEQ ID NO: 40398 - RNA, 17 nt, Artificial Sequence
  Synthetic oligonucleotide: BID-148
ucguagcccucccacug

SEQ ID NO: 40399 - RNA, 17 nt, Artificial Sequence
  Synthetic oligonucleotide: BID-157
gaaccguuguugaccug

SEQ ID NO: 40400 - RNA, 17 nt, Artificial Sequence
  Synthetic oligonucleotide: BID-101
agaggccagauccccug

SEQ ID NO: 40401 - RNA, 17 nt, Artificial Sequence
  Synthetic oligonucleotide: BID-171
ugaugcacucaucccug

SEQ ID NO: 40402 - RNA, 17 nt, Artificial Sequence
  Synthetic oligonucleotide: BID-275
aggugagugagggccug

SEQ ID NO: 40403 - RNA, 17 nt, Artificial Sequence
  Synthetic oligonucleotide: BID-41
auucuguaagugggcug

SEQ ID NO: 40404 - RNA, 17 nt, Artificial Sequence
  Synthetic oligonucleotide: BID-180
agcgggaguggcugcug

SEQ ID NO: 40405 - RNA, 17 nt, Artificial Sequence
  Synthetic oligonucleotide: BID-35
aaugugcagcggugcug

SEQ ID NO: 40406 - RNA, 17 nt, Artificial Sequence
  Synthetic oligonucleotide: BID-167
gugcguccagcucucug

SEQ ID NO: 40407 - RNA, 17 nt, Artificial Sequence
  Synthetic oligonucleotide: BID-47
gcuggaggagcacagug

SEQ ID NO: 40408 - RNA, 17 nt, Artificial Sequence
  Synthetic oligonucleotide: BID-273
gucggaggaggugagug

SEQ ID NO: 40409 - RNA, 17 nt, Artificial Sequence
  Synthetic oligonucleotide: BID-308
accuacgcaccuacgug

SEQ ID NO: 40410 - RNA, 17 nt, Artificial Sequence
  Synthetic oligonucleotide: BID-95
ccaggccauggacugug

SEQ ID NO: 40411 - RNA, 17 nt, Artificial Sequence
  Synthetic oligonucleotide: BID-309
aaauguaagaacccuug

SEQ ID NO: 40412 - RNA, 17 nt, Artificial Sequence
  Synthetic oligonucleotide: BID-152
aucguagcccucccacu

SEQ ID NO: 40413 - RNA, 17 nt, Artificial Sequence
  Synthetic oligonucleotide: BID-79
cuuuccaggucgccacu

SEQ ID NO: 40414 - RNA, 17 nt, Artificial Sequence
  Synthetic oligonucleotide: BID-162
agagagcuggacgcacu

SEQ ID NO: 40415 - RNA, 17 nt, Artificial Sequence
  Synthetic oligonucleotide: BID-248
caugcuguccccgaccu

SEQ ID NO: 40416 - RNA, 17 nt, Artificial Sequence
  Synthetic oligonucleotide: BID-88
cucacaguccauggccu

SEQ ID NO: 40417 - RNA, 17 nt, Artificial Sequence
  Synthetic oligonucleotide: BID-189
cagcagccacucccgcu

SEQ ID NO: 40418 - RNA, 17 nt, Artificial Sequence
  Synthetic oligonucleotide: BID-49
uaagugggcugggggcu

SEQ ID NO: 40419 - RNA, 17 nt, Artificial Sequence
  Synthetic oligonucleotide: BID-42
gauucuguaagugggcu

SEQ ID NO: 40420 - RNA, 17 nt, Artificial Sequence
  Synthetic oligonucleotide: BID-44
cuggggucaugauggcu

SEQ ID NO: 40421 - RNA, 17 nt, Artificial Sequence
  Synthetic oligonucleotide: BID-31
gaaugugcagcggugcu

SEQ ID NO: 40422 - RNA, 17 nt, Artificial Sequence
  Synthetic oligonucleotide: BID-2538
uucuccuuucuugcucu

SEQ ID NO: 40423 - RNA, 17 nt, Artificial Sequence
  Synthetic oligonucleotide: BID-348
uccuucuccaugucucu

SEQ ID NO: 40424 - RNA, 17 nt, Artificial Sequence
  Synthetic oligonucleotide: BID-344
gugacuggccaccuucu

SEQ ID NO: 40425 - RNA, 17 nt, Artificial Sequence
  Synthetic oligonucleotide: BID-27
gugcggauucuguaagu

SEQ ID NO: 40426 - RNA, 17 nt, Artificial Sequence
  Synthetic oligonucleotide: BID-161
ggaagccaaacaccagu

SEQ ID NO: 40427 - RNA, 17 nt, Artificial Sequence
  Synthetic oligonucleotide: BID-188
agugcuggcuccccagu

SEQ ID NO: 40428 - RNA, 17 nt, Artificial Sequence
  Synthetic oligonucleotide: BID-98
aaagggacacacagagu

SEQ ID NO: 40429 - RNA, 17 nt, Artificial Sequence
  Synthetic oligonucleotide: BID-85
gugaaccaggagugagu

SEQ ID NO: 40430 - RNA, 17 nt, Artificial Sequence
  Synthetic oligonucleotide: BID-337
ggcuaagcuccucacgu

SEQ ID NO: 40431 - RNA, 17 nt, Artificial Sequence
  Synthetic oligonucleotide: BID-247
gggccugaggaccgcgu

SEQ ID NO: 40432 - RNA, 17 nt, Artificial Sequence
  Synthetic oligonucleotide: BID-338
uccucacguaggugcgu

SEQ ID NO: 40433 - RNA, 17 nt, Artificial Sequence
  Synthetic oligonucleotide: BID-264
aggcaccucgcccaggu

SEQ ID NO: 40434 - RNA, 17 nt, Artificial Sequence
  Synthetic oligonucleotide: BID-187
gaagaauagaggcaggu

SEQ ID NO: 40435 - RNA, 17 nt, Artificial Sequence
  Synthetic oligonucleotide: BID-250
caggaacaccagccggu

SEQ ID NO: 40436 - RNA, 17 nt, Artificial Sequence
  Synthetic oligonucleotide: BID-28
ggucaugauggcucggu

SEQ ID NO: 40437 - RNA, 17 nt, Artificial Sequence
  Synthetic oligonucleotide: BID-350
cuccaugucucuagggu

SEQ ID NO: 40438 - RNA, 17 nt, Artificial Sequence
  Synthetic oligonucleotide: BID-173
uguugucagaacagcuu

SEQ ID NO: 40439 - RNA, 17 nt, Artificial Sequence
  Synthetic oligonucleotide: BID-158
agcagccacucccgcuu

SEQ ID NO: 40440 - RNA, 17 nt, Artificial Sequence
  Synthetic oligonucleotide: BID-160
acaaaccuacugguguu

SEQ ID NO: 40441 - RNA, 20 nt, Artificial Sequence
  Synthetic oligonucleotide: BID-64
ucccaguggcgaccuggaaa

SEQ ID NO: 40442 - RNA, 20 nt, Artificial Sequence
  Synthetic oligonucleotide: BID-114
cguuguugaccugaggggaa

SEQ ID NO: 40443 - RNA, 20 nt, Artificial Sequence
  Synthetic oligonucleotide: BID-58
gucccaguggcgaccuggaa

SEQ ID NO: 40444 - RNA, 20 nt, Artificial Sequence
  Synthetic oligonucleotide: BID-2539
gcucuaggggauggacugaa

SEQ ID NO: 40445 - RNA, 20 nt, Artificial Sequence
  Synthetic oligonucleotide: BID-201
aucccuccgggccuggugaa

SEQ ID NO: 40446 - RNA, 20 nt, Artificial Sequence
  Synthetic oligonucleotide: BID-281
cucugugcaggaccggaaca

SEQ ID NO: 40447 - RNA, 20 nt, Artificial Sequence
  Synthetic oligonucleotide: BID-216
cgcccaggucggggacagca

SEQ ID NO: 40448 - RNA, 20 nt, Artificial Sequence
  Synthetic oligonucleotide: BID-115
caacaacgguuccagccuca

SEQ ID NO: 40449 - RNA, 20 nt, Artificial Sequence
  Synthetic oligonucleotide: BID-332
cuguuccgguccugcacaga

SEQ ID NO: 40450 - RNA, 20 nt, Artificial Sequence
  Synthetic oligonucleotide: BID-7
gauggcucggugggcagcga

SEQ ID NO: 40451 - RNA, 20 nt, Artificial Sequence
  Synthetic oligonucleotide: BID-211
ggccguucaccaggcccgga

SEQ ID NO: 40452 - RNA, 20 nt, Artificial Sequence
  Synthetic oligonucleotide: BID-111
uacgaugagcugcagacuga

SEQ ID NO: 40453 - RNA, 20 nt, Artificial Sequence
  Synthetic oligonucleotide: BID-105
uggaaccguuguugaccuga

SEQ ID NO: 40454 - RNA, 20 nt, Artificial Sequence
  Synthetic oligonucleotide: BID-212
ccaggcccggagggaugcua

SEQ ID NO: 40455 - RNA, 20 nt, Artificial Sequence
  Synthetic oligonucleotide: BID-280
ccucugugcaggaccggaac

SEQ ID NO: 40456 - RNA, 20 nt, Artificial Sequence
  Synthetic oligonucleotide: BID-104
gcucaucguagcccucccac

SEQ ID NO: 40457 - RNA, 20 nt, Artificial Sequence
  Synthetic oligonucleotide: BID-59
gucccuuuccaggucgccac

SEQ ID NO: 40458 - RNA, 20 nt, Artificial Sequence
  Synthetic oligonucleotide: BID-117
ccgcagagagcuggacgcac

SEQ ID NO: 40459 - RNA, 20 nt, Artificial Sequence
  Synthetic oligonucleotide: BID-318
gagcaaggacggcgugugac

SEQ ID NO: 40460 - RNA, 20 nt, Artificial Sequence
  Synthetic oligonucleotide: BID-108
ugagugcaucacaaaccuac

SEQ ID NO: 40461 - RNA, 20 nt, Artificial Sequence
  Synthetic oligonucleotide: BID-205
gguccaugcuguccccgacc

SEQ ID NO: 40462 - RNA, 20 nt, Artificial Sequence
  Synthetic oligonucleotide: BID-60
acagugucccaguggcgacc

SEQ ID NO: 40463 - RNA, 20 nt, Artificial Sequence
  Synthetic oligonucleotide: BID-210
uauugccaggcaccucgccc

SEQ ID NO: 40464 - RNA, 20 nt, Artificial Sequence
  Synthetic oligonucleotide: BID-56
ucggagcugccgcgcugccc

SEQ ID NO: 40465 - RNA, 20 nt, Artificial Sequence
  Synthetic oligonucleotide: BID-203
uccgggccuggugaacggcc

SEQ ID NO: 40466 - RNA, 20 nt, Artificial Sequence
  Synthetic oligonucleotide: BID-196
ccguagcaucccuccgggcc

SEQ ID NO: 40467 - RNA, 20 nt, Artificial Sequence
  Synthetic oligonucleotide: BID-217
cccgaccugggcgaggugcc

SEQ ID NO: 40468 - RNA, 20 nt, Artificial Sequence
  Synthetic oligonucleotide: BID-194
acaucauccggaauauugcc

SEQ ID NO: 40469 - RNA, 20 nt, Artificial Sequence
  Synthetic oligonucleotide: BID-63
cggcagcuccgacucacucc

SEQ ID NO: 40470 - RNA, 20 nt, Artificial Sequence
  Synthetic oligonucleotide: BID-198
auggaccguagcaucccucc

SEQ ID NO: 40471 - RNA, 20 nt, Artificial Sequence
  Synthetic oligonucleotide: BID-119
cgcuugggaagaauagaggc

SEQ ID NO: 40472 - RNA, 20 nt, Artificial Sequence
  Synthetic oligonucleotide: BID-207
acucaccuccuccgaccggc

SEQ ID NO: 40473 - RNA, 20 nt, Artificial Sequence
  Synthetic oligonucleotide: BID-6
ugcggauucuguaagugggc

SEQ ID NO: 40474 - RNA, 20 nt, Artificial Sequence
  Synthetic oligonucleotide: BID-129
gggccacgagcugccagugc

SEQ ID NO: 40475 - RNA, 20 nt, Artificial Sequence
  Synthetic oligonucleotide: BID-1
auacgaaugugcagcggugc

SEQ ID NO: 40476 - RNA, 20 nt, Artificial Sequence
  Synthetic oligonucleotide: BID-197
cauggaccguagcaucccuc

SEQ ID NO: 40477 - RNA, 20 nt, Artificial Sequence
  Synthetic oligonucleotide: BID-106
ucaacaacgguuccagccuc

SEQ ID NO: 40478 - RNA, 20 nt, Artificial Sequence
  Synthetic oligonucleotide: BID-314
ucacguaggugcguagguuc

SEQ ID NO: 40479 - RNA, 20 nt, Artificial Sequence
  Synthetic oligonucleotide: BID-331
ccuguuccgguccugcacag

SEQ ID NO: 40480 - RNA, 20 nt, Artificial Sequence
  Synthetic oligonucleotide: BID-2
caacaaauacgaaugugcag

SEQ ID NO: 40481 - RNA, 20 nt, Artificial Sequence
  Synthetic oligonucleotide: BID-333
uguuccgguccugcacagag

SEQ ID NO: 40482 - RNA, 20 nt, Artificial Sequence
  Synthetic oligonucleotide: BID-18
auggcucggugggcagcgag

SEQ ID NO: 40483 - RNA, 20 nt, Artificial Sequence
  Synthetic oligonucleotide: BID-112
cuauucuucccaagcgggag

SEQ ID NO: 40484 - RNA, 20 nt, Artificial Sequence
  Synthetic oligonucleotide: BID-107
ggaaccguuguugaccugag

SEQ ID NO: 40485 - RNA, 20 nt, Artificial Sequence
  Synthetic oligonucleotide: BID-110
cucccgcuugggaagaauag

SEQ ID NO: 40486 - RNA, 20 nt, Artificial Sequence
  Synthetic oligonucleotide: BID-9
ugauggcucggugggcagcg

SEQ ID NO: 40487 - RNA, 20 nt, Artificial Sequence
  Synthetic oligonucleotide: BID-213
gugagggccugaggaccgcg

SEQ ID NO: 40488 - RNA, 20 nt, Artificial Sequence
  Synthetic oligonucleotide: BID-215
ugcuguccccgaccugggcg

SEQ ID NO: 40489 - RNA, 20 nt, Artificial Sequence
  Synthetic oligonucleotide: BID-218
caggcaccucgcccaggucg

SEQ ID NO: 40490 - RNA, 20 nt, Artificial Sequence
  Synthetic oligonucleotide: BID-199
gaacaccagccggucggagg

SEQ ID NO: 40491 - RNA, 20 nt, Artificial Sequence
  Synthetic oligonucleotide: BID-195
aggccguucaccaggcccgg

SEQ ID NO: 40492 - RNA, 20 nt, Artificial Sequence
  Synthetic oligonucleotide: BID-8
cuggggucaugauggcucgg

SEQ ID NO: 40493 - RNA, 20 nt, Artificial Sequence
  Synthetic oligonucleotide: BID-200
caggaacaccagccggucgg

SEQ ID NO: 40494 - RNA, 20 nt, Artificial Sequence
  Synthetic oligonucleotide: BID-134
ucaucguagcccucccacug

SEQ ID NO: 40495 - RNA, 20 nt, Artificial Sequence
  Synthetic oligonucleotide: BID-118
cuggaaccguuguugaccug

SEQ ID NO: 40496 - RNA, 20 nt, Artificial Sequence
  Synthetic oligonucleotide: BID-17
cggauucuguaagugggcug

SEQ ID NO: 40497 - RNA, 20 nt, Artificial Sequence
  Synthetic oligonucleotide: BID-4
acgaaugugcagcggugcug

SEQ ID NO: 40498 - RNA, 20 nt, Artificial Sequence
  Synthetic oligonucleotide: BID-292
agaaccuacgcaccuacgug

SEQ ID NO: 40499 - RNA, 20 nt, Artificial Sequence
  Synthetic oligonucleotide: BID-109
cucaucguagcccucccacu

SEQ ID NO: 40500 - RNA, 20 nt, Artificial Sequence
  Synthetic oligonucleotide: BID-61
ucccuuuccaggucgccacu

SEQ ID NO: 40501 - RNA, 20 nt, Artificial Sequence
  Synthetic oligonucleotide: BID-116
cgcagagagcuggacgcacu

SEQ ID NO: 40502 - RNA, 20 nt, Artificial Sequence
  Synthetic oligonucleotide: BID-202
guccaugcuguccccgaccu

SEQ ID NO: 40503 - RNA, 20 nt, Artificial Sequence
  Synthetic oligonucleotide: BID-5
gcggauucuguaagugggcu

SEQ ID NO: 40504 - RNA, 20 nt, Artificial Sequence
  Synthetic oligonucleotide: BID-14
uacgaaugugcagcggugcu

SEQ ID NO: 40505 - RNA, 20 nt, Artificial Sequence
  Synthetic oligonucleotide: BID-319
cgugugacuggccaccuucu

SEQ ID NO: 40506 - RNA, 20 nt, Artificial Sequence
  Synthetic oligonucleotide: BID-15
acagugcggauucuguaagu

SEQ ID NO: 40507 - RNA, 20 nt, Artificial Sequence
  Synthetic oligonucleotide: BID-312
ucuggcuaagcuccucacgu

SEQ ID NO: 40508 - RNA, 20 nt, Artificial Sequence
  Synthetic oligonucleotide: BID-204
ugagggccugaggaccgcgu

SEQ ID NO: 40509 - RNA, 20 nt, Artificial Sequence
  Synthetic oligonucleotide: BID-313
agcuccucacguaggugcgu

SEQ ID NO: 40510 - RNA, 20 nt, Artificial Sequence
  Synthetic oligonucleotide: BID-214
gcucaggaacaccagccggu

SEQ ID NO: 40511 - RNA, 20 nt, Artificial Sequence
  Synthetic oligonucleotide: BID-3
uggggucaugauggcucggu

SEQ ID NO: 40512 - RNA, 20 nt, Artificial Sequence
  Synthetic oligonucleotide: BID-113
cgcagcagccacucccgcuu

SEQ ID NO: 40513 - RNA, 20 nt, Artificial Sequence
  Synthetic oligonucleotide: BID-120
aucacaaaccuacugguguu

SEQ ID NO: 40514 - RNA, 17 nt, Artificial Sequence
  Synthetic oligonucleotide: BID-192
ggggaaggagguggggc

SEQ ID NO: 40515 - RNA, 20 nt, Artificial Sequence
  Synthetic oligonucleotide: BID-135
guuguugaccugaggggaaa

SEQ ID NO: 40516 - RNA, 20 nt, Artificial Sequence
  Synthetic oligonucleotide: BID-127
cuuuccccucaggucaacaa

SEQ ID NO: 40517 - RNA, 20 nt, Artificial Sequence
  Synthetic oligonucleotide: BID-310
agggaaggagcugaccucaa

SEQ ID NO: 40518 - RNA, 20 nt, Artificial Sequence
  Synthetic oligonucleotide: BID-2540
uccauccccuagagcaagaa

SEQ ID NO: 40519 - RNA, 20 nt, Artificial Sequence
  Synthetic oligonucleotide: BID-285
gcaggccuacccuagagaca

SEQ ID NO: 40520 - RNA, 20 nt, Artificial Sequence
  Synthetic oligonucleotide: BID-66
cugccgcgcugcccaggcca

SEQ ID NO: 40521 - RNA, 20 nt, Artificial Sequence
  Synthetic oligonucleotide: BID-327
ggccugcagcagcugcucca

SEQ ID NO: 40522 - RNA, 20 nt, Artificial Sequence
  Synthetic oligonucleotide: BID-73
gccucugaccucacagucca

SEQ ID NO: 40523 - RNA, 20 nt, Artificial Sequence
  Synthetic oligonucleotide: BID-322
cagcagggccagcaccagca

SEQ ID NO: 40524 - RNA, 20 nt, Artificial Sequence
  Synthetic oligonucleotide: BID-321
caccuucuuggccagcagca

SEQ ID NO: 40525 - RNA, 20 nt, Artificial Sequence
  Synthetic oligonucleotide: BID-316
gugaaagacaucacggagca

SEQ ID NO: 40526 - RNA, 20 nt, Artificial Sequence
  Synthetic oligonucleotide: BID-227
ucagaaucuguguucaggca

SEQ ID NO: 40527 - RNA, 20 nt, Artificial Sequence
  Synthetic oligonucleotide: BID-225
gcugguguuccugagcugca

SEQ ID NO: 40528 - RNA, 20 nt, Artificial Sequence
  Synthetic oligonucleotide: BID-315
cuguugugugaaagacauca

SEQ ID NO: 40529 - RNA, 20 nt, Artificial Sequence
  Synthetic oligonucleotide: BID-290
ggcccugcugcuggccaaga

SEQ ID NO: 40530 - RNA, 20 nt, Artificial Sequence
  Synthetic oligonucleotide: BID-286
cuacccuagagacauggaga

SEQ ID NO: 40531 - RNA, 20 nt, Artificial Sequence
  Synthetic oligonucleotide: BID-317
aagacaucacggagcaagga

SEQ ID NO: 40532 - RNA, 20 nt, Artificial Sequence
  Synthetic oligonucleotide: BID-2541
uccuuucuugcucuagggga

SEQ ID NO: 40533 - RNA, 20 nt, Artificial Sequence
  Synthetic oligonucleotide: BID-147
gugcuggcuccccaguggga

SEQ ID NO: 40534 - RNA, 20 nt, Artificial Sequence
  Synthetic oligonucleotide: BID-20
cagcggugcuggggucauga

SEQ ID NO: 40535 - RNA, 20 nt, Artificial Sequence
  Synthetic oligonucleotide: BID-208
cggucggaggaggugaguga

SEQ ID NO: 40536 - RNA, 20 nt, Artificial Sequence
  Synthetic oligonucleotide: BID-2542
uuuucuccuuucuugcucua

SEQ ID NO: 40537 - RNA, 20 nt, Artificial Sequence
  Synthetic oligonucleotide: BID-324
ucuccuucuccaugucucua

SEQ ID NO: 40538 - RNA, 20 nt, Artificial Sequence
  Synthetic oligonucleotide: BID-121
ucccacuggggagccagcac

SEQ ID NO: 40539 - RNA, 20 nt, Artificial Sequence
  Synthetic oligonucleotide: BID-222
ccucacucaccuccuccgac

SEQ ID NO: 40540 - RNA, 20 nt, Artificial Sequence
  Synthetic oligonucleotide: BID-279
ugugccccucugugcaggac

SEQ ID NO: 40541 - RNA, 20 nt, Artificial Sequence
  Synthetic oligonucleotide: BID-2543
gacaguuccagaagugugac

SEQ ID NO: 40542 - RNA, 20 nt, Artificial Sequence
  Synthetic oligonucleotide: BID-334
acagaggggcacacagaacc

SEQ ID NO: 40543 - RNA, 20 nt, Artificial Sequence
  Synthetic oligonucleotide: BID-57
ccacugggacacugugaacc

SEQ ID NO: 40544 - RNA, 20 nt, Artificial Sequence
  Synthetic oligonucleotide: BID-228
gcagggccaggccguucacc

SEQ ID NO: 40545 - RNA, 20 nt, Artificial Sequence
  Synthetic oligonucleotide: BID-282
gcaggaccggaacagggacc

SEQ ID NO: 40546 - RNA, 20 nt, Artificial Sequence
  Synthetic oligonucleotide: BID-283
cagggaccuggccacugccc

SEQ ID NO: 40547 - RNA, 20 nt, Artificial Sequence
  Synthetic oligonucleotide: BID-2544
gaaaggggagucaggaagcc

SEQ ID NO: 40548 - RNA, 20 nt, Artificial Sequence
  Synthetic oligonucleotide: BID-229
gccaggccguucaccaggcc

SEQ ID NO: 40549 - RNA, 20 nt, Artificial Sequence
  Synthetic oligonucleotide: BID-21
cugugcuccuccagccggcc

SEQ ID NO: 40550 - RNA, 20 nt, Artificial Sequence
  Synthetic oligonucleotide: BID-233
uguuccugagcugcagggcc

SEQ ID NO: 40551 - RNA, 20 nt, Artificial Sequence
  Synthetic oligonucleotide: BID-19
ucggugggcagcgaggggcc

SEQ ID NO: 40552 - RNA, 20 nt, Artificial Sequence
  Synthetic oligonucleotide: BID-70
ugaccucacaguccauggcc

SEQ ID NO: 40553 - RNA, 20 nt, Artificial Sequence
  Synthetic oligonucleotide: BID-329
gcugcuccagggcaguggcc

SEQ ID NO: 40554 - RNA, 20 nt, Artificial Sequence
  Synthetic oligonucleotide: BID-326
aggccugcagcagcugcucc

SEQ ID NO: 40555 - RNA, 20 nt, Artificial Sequence
  Synthetic oligonucleotide: BID-77
cacucugugugucccuuucc

SEQ ID NO: 40556 - RNA, 20 nt, Artificial Sequence
  Synthetic oligonucleotide: BID-123
ugccucuauucuucccaagc

SEQ ID NO: 40557 - RNA, 20 nt, Artificial Sequence
  Synthetic oligonucleotide: BID-2545
ggaaaggggagucaggaagc

SEQ ID NO: 40558 - RNA, 20 nt, Artificial Sequence
  Synthetic oligonucleotide: BID-221
ugcagcucaggaacaccagc

SEQ ID NO: 40559 - RNA, 20 nt, Artificial Sequence
  Synthetic oligonucleotide: BID-13
ccgcacugugcuccuccagc

SEQ ID NO: 40560 - RNA, 20 nt, Artificial Sequence
  Synthetic oligonucleotide: BID-320
ccaccuucuuggccagcagc

SEQ ID NO: 40561 - RNA, 20 nt, Artificial Sequence
  Synthetic oligonucleotide: BID-124
caacagcuuccgcagagagc

SEQ ID NO: 40562 - RNA, 20 nt, Artificial Sequence
  Synthetic oligonucleotide: BID-226
uucagaaucuguguucaggc

SEQ ID NO: 40563 - RNA, 20 nt, Artificial Sequence
  Synthetic oligonucleotide: BID-126
gaugcacucaucccugaggc

SEQ ID NO: 40564 - RNA, 20 nt, Artificial Sequence
  Synthetic oligonucleotide: BID-23
cagcgaggggccgggccggc

SEQ ID NO: 40565 - RNA, 20 nt, Artificial Sequence
  Synthetic oligonucleotide: BID-132
aauagaggcagguaggcggc

SEQ ID NO: 40566 - RNA, 20 nt, Artificial Sequence
  Synthetic oligonucleotide: BID-29
ugggcagcgaggggccgggc

SEQ ID NO: 40567 - RNA, 20 nt, Artificial Sequence
  Synthetic oligonucleotide: BID-24
cucggugggcagcgaggggc

SEQ ID NO: 40568 - RNA, 20 nt, Artificial Sequence
  Synthetic oligonucleotide: BID-22
ucuguaagugggcugggggc

SEQ ID NO: 40569 - RNA, 20 nt, Artificial Sequence
  Synthetic oligonucleotide: BID-287
ggagaaggagaagaccaugc

SEQ ID NO: 40570 - RNA, 20 nt, Artificial Sequence
  Synthetic oligonucleotide: BID-69
ucagaggccagauccccugc

SEQ ID NO: 40571 - RNA, 20 nt, Artificial Sequence
  Synthetic oligonucleotide: BID-235
ggcugguguuccugagcugc

SEQ ID NO: 40572 - RNA, 20 nt, Artificial Sequence
  Synthetic oligonucleotide: BID-289
gcuggugcuggcccugcugc

SEQ ID NO: 40573 - RNA, 20 nt, Artificial Sequence
  Synthetic oligonucleotide: BID-284
ugcccuggagcagcugcugc

SEQ ID NO: 40574 - RNA, 20 nt, Artificial Sequence
  Synthetic oligonucleotide: BID-288
ggagaagaccaugcuggugc

SEQ ID NO: 40575 - RNA, 20 nt, Artificial Sequence
  Synthetic oligonucleotide: BID-278
uucugugugccccucugugc

SEQ ID NO: 40576 - RNA, 20 nt, Artificial Sequence
  Synthetic oligonucleotide: BID-224
aaagucaagaagacaucauc

SEQ ID NO: 40577 - RNA, 20 nt, Artificial Sequence
  Synthetic oligonucleotide: BID-146
ccugacuccccuuuccccuc

SEQ ID NO: 40578 - RNA, 20 nt, Artificial Sequence
  Synthetic oligonucleotide: BID-232
acggccuggcccugcagcuc

SEQ ID NO: 40579 - RNA, 20 nt, Artificial Sequence
  Synthetic oligonucleotide: BID-144
ccugaggggaaaggggaguc

SEQ ID NO: 40580 - RNA, 20 nt, Artificial Sequence
  Synthetic oligonucleotide: BID-234
ccaggcaccucgcccagguc

SEQ ID NO: 40581 - RNA, 20 nt, Artificial Sequence
  Synthetic oligonucleotide: BID-206
cgaggugccuggcaauauuc

SEQ ID NO: 40582 - RNA, 20 nt, Artificial Sequence
  Synthetic oligonucleotide: BID-330
caguggccaggucccuguuc

SEQ ID NO: 40583 - RNA, 20 nt, Artificial Sequence
  Synthetic oligonucleotide: BID-220
gacuuucagaaucuguguuc

SEQ ID NO: 40584 - RNA, 20 nt, Artificial Sequence
  Synthetic oligonucleotide: BID-311
cucaaggguucuuacauuuc

SEQ ID NO: 40585 - RNA, 20 nt, Artificial Sequence
  Synthetic oligonucleotide: BID-130
uuguugaccugaggggaaag

SEQ ID NO: 40586 - RNA, 20 nt, Artificial Sequence
  Synthetic oligonucleotide: BID-141
cugccucuauucuucccaag

SEQ ID NO: 40587 - RNA, 20 nt, Artificial Sequence
  Synthetic oligonucleotide: BID-10
cacagugcggauucuguaag

SEQ ID NO: 40588 - RNA, 20 nt, Artificial Sequence
  Synthetic oligonucleotide: BID-139
ugccagugcuggcuccccag

SEQ ID NO: 40589 - RNA, 20 nt, Artificial Sequence
  Synthetic oligonucleotide: BID-62
ccugguucacagugucccag

SEQ ID NO: 40590 - RNA, 20 nt, Artificial Sequence
  Synthetic oligonucleotide: BID-230
cagaaucuguguucaggcag

SEQ ID NO: 40591 - RNA, 20 nt, Artificial Sequence
  Synthetic oligonucleotide: BID-328
cagcagcugcuccagggcag

SEQ ID NO: 40592 - RNA, 20 nt, Artificial Sequence
  Synthetic oligonucleotide: BID-72
gccauggacugugaggucag

SEQ ID NO: 40593 - RNA, 20 nt, Artificial Sequence
  Synthetic oligonucleotide: BID-78
cuggaaagggacacacagag

SEQ ID NO: 40594 - RNA, 20 nt, Artificial Sequence
  Synthetic oligonucleotide: BID-2546
uuucuccuuucuugcucuag

SEQ ID NO: 40595 - RNA, 20 nt, Artificial Sequence
  Synthetic oligonucleotide: BID-71
aguccauggccugggcagcg

SEQ ID NO: 40596 - RNA, 20 nt, Artificial Sequence
  Synthetic oligonucleotide: BID-138
gagccagcacuggcagcucg

SEQ ID NO: 40597 - RNA, 20 nt, Artificial Sequence
  Synthetic oligonucleotide: BID-291
ccugcugcuggccaagaagg

SEQ ID NO: 40598 - RNA, 20 nt, Artificial Sequence
  Synthetic oligonucleotide: BID-149
gaagaauagaggcagguagg

SEQ ID NO: 40599 - RNA, 20 nt, Artificial Sequence
  Synthetic oligonucleotide: BID-223
aaucuguguucaggcagggg

SEQ ID NO: 40600 - RNA, 20 nt, Artificial Sequence
  Synthetic oligonucleotide: BID-142
agugcuggcuccccaguggg

SEQ ID NO: 40601 - RNA, 20 nt, Artificial Sequence
  Synthetic oligonucleotide: BID-74
aaagggacacacagaguggg

SEQ ID NO: 40602 - RNA, 20 nt, Artificial Sequence
  Synthetic oligonucleotide: BID-25
cgaggggccgggccggcugg

SEQ ID NO: 40603 - RNA, 20 nt, Artificial Sequence
  Synthetic oligonucleotide: BID-16
ggauucuguaagugggcugg

SEQ ID NO: 40604 - RNA, 20 nt, Artificial Sequence
  Synthetic oligonucleotide: BID-122
uguugucagaacagcuuugg

SEQ ID NO: 40605 - RNA, 20 nt, Artificial Sequence
  Synthetic oligonucleotide: BID-75
gucagaggccagauccccug

SEQ ID NO: 40606 - RNA, 20 nt, Artificial Sequence
  Synthetic oligonucleotide: BID-125
uugugaugcacucaucccug

SEQ ID NO: 40607 - RNA, 20 nt, Artificial Sequence
  Synthetic oligonucleotide: BID-238
aggaggugagugagggccug

SEQ ID NO: 40608 - RNA, 20 nt, Artificial Sequence
  Synthetic oligonucleotide: BID-133
ccaagcgggaguggcugcug

SEQ ID NO: 40609 - RNA, 20 nt, Artificial Sequence
  Synthetic oligonucleotide: BID-131
ccagugcguccagcucucug

SEQ ID NO: 40610 - RNA, 20 nt, Artificial Sequence
  Synthetic oligonucleotide: BID-12
ccggcuggaggagcacagug

SEQ ID NO: 40611 - RNA, 20 nt, Artificial Sequence
  Synthetic oligonucleotide: BID-209
ccggucggaggaggugagug

SEQ ID NO: 40612 - RNA, 20 nt, Artificial Sequence
  Synthetic oligonucleotide: BID-67
ugcccaggccauggacugug

SEQ ID NO: 40613 - RNA, 20 nt, Artificial Sequence
  Synthetic oligonucleotide: BID-293
cagaaauguaagaacccuug

SEQ ID NO: 40614 - RNA, 20 nt, Artificial Sequence
  Synthetic oligonucleotide: BID-65
gaccucacaguccauggccu

SEQ ID NO: 40615 - RNA, 20 nt, Artificial Sequence
  Synthetic oligonucleotide: BID-137
ccgcagcagccacucccgcu

SEQ ID NO: 40616 - RNA, 20 nt, Artificial Sequence
  Synthetic oligonucleotide: BID-30
cuguaagugggcugggggcu

SEQ ID NO: 40617 - RNA, 20 nt, Artificial Sequence
  Synthetic oligonucleotide: BID-11
gugcuggggucaugauggcu

SEQ ID NO: 40618 - RNA, 20 nt, Artificial Sequence
  Synthetic oligonucleotide: BID-2547
uuuuucuccuuucuugcucu

SEQ ID NO: 40619 - RNA, 20 nt, Artificial Sequence
  Synthetic oligonucleotide: BID-323
uucuccuucuccaugucucu

SEQ ID NO: 40620 - RNA, 20 nt, Artificial Sequence
  Synthetic oligonucleotide: BID-140
ggaggaagccaaacaccagu

SEQ ID NO: 40621 - RNA, 20 nt, Artificial Sequence
  Synthetic oligonucleotide: BID-128
gccagugcuggcuccccagu

SEQ ID NO: 40622 - RNA, 20 nt, Artificial Sequence
  Synthetic oligonucleotide: BID-76
uggaaagggacacacagagu

SEQ ID NO: 40623 - RNA, 20 nt, Artificial Sequence
  Synthetic oligonucleotide: BID-68
acugugaaccaggagugagu

SEQ ID NO: 40624 - RNA, 20 nt, Artificial Sequence
  Synthetic oligonucleotide: BID-219
gccaggcaccucgcccaggu

SEQ ID NO: 40625 - RNA, 20 nt, Artificial Sequence
  Synthetic oligonucleotide: BID-145
ugggaagaauagaggcaggu

SEQ ID NO: 40626 - RNA, 20 nt, Artificial Sequence
  Synthetic oligonucleotide: BID-325
cuucuccaugucucuagggu

SEQ ID NO: 40627 - RNA, 20 nt, Artificial Sequence
  Synthetic oligonucleotide: BID-136
agcuguugucagaacagcuu

SEQ ID NO: 40628 - RNA, 18 nt, Artificial Sequence
  Synthetic oligonucleotide: BID-2548
gaccuggaaagggacaca

SEQ ID NO: 40629 - RNA, 19 nt, Artificial Sequence
  Synthetic oligonucleotide: BID-2549
cgaccuggaaagggacaca

SEQ ID NO: 40630 - RNA, 20 nt, Artificial Sequence
  Synthetic oligonucleotide: BID-549
gcgaccuggaaagggacaca

SEQ ID NO: 40631 - RNA, 18 nt, Artificial Sequence
  Synthetic oligonucleotide: BID-2550
cacauucguauuuguuga

SEQ ID NO: 40632 - RNA, 19 nt, Artificial Sequence
  Synthetic oligonucleotide: BID-2551
gcacauucguauuuguuga

SEQ ID NO: 40633 - RNA, 20 nt, Artificial Sequence
  Synthetic oligonucleotide: BID-554
ugcacauucguauuuguuga

SEQ ID NO: 40634 - RNA, 18 nt, Artificial Sequence
  Synthetic oligonucleotide: BID-2552
ccucuauucuucccaagc

SEQ ID NO: 40635 - RNA, 19 nt, Artificial Sequence
  Synthetic oligonucleotide: BID-2553
gccucuauucuucccaagc

SEQ ID NO: 40636 - RNA, 20 nt, Artificial Sequence
  Synthetic oligonucleotide: BID-123
ugccucuauucuucccaagc

SEQ ID NO: 40637 - RNA, 18 nt, Artificial Sequence
  Synthetic oligonucleotide: BID-2554
gccguucaccaggcccgg

SEQ ID NO: 40638 - RNA, 19 nt, Artificial Sequence
  Synthetic oligonucleotide: BID-2555
ggccguucaccaggcccgg

SEQ ID NO: 40639 - RNA, 20 nt, Artificial Sequence
  Synthetic oligonucleotide: BID-195
aggccguucaccaggcccgg

SEQ ID NO: 40640 - RNA, 18 nt, Artificial Sequence
  Synthetic oligonucleotide: BID-2556
gcugcacauucguauuug

SEQ ID NO: 40641 - RNA, 19 nt, Artificial Sequence
  Synthetic oligonucleotide: BID-2557
cgcugcacauucguauuug

SEQ ID NO: 40642 - RNA, 20 nt, Artificial Sequence
  Synthetic oligonucleotide: BID-553
ccgcugcacauucguauuug

SEQ ID NO: 40643 - RNA, 18 nt, Artificial Sequence
  Synthetic oligonucleotide: BID-2558
gaggugccuggcaauauu

SEQ ID NO: 40644 - RNA, 19 nt, Artificial Sequence
  Synthetic oligonucleotide: BID-2559
cgaggugccuggcaauauu

SEQ ID NO: 40645 - RNA, 20 nt, Artificial Sequence
  Synthetic oligonucleotide: BID-510
gcgaggugccuggcaauauu

SEQ ID NO: 40646 - RNA, 18 nt, Artificial Sequence
  Synthetic oligonucleotide: BID-2560
ugaugucuucuugacuuu

SEQ ID NO: 40647 - RNA, 19 nt, Artificial Sequence
  Synthetic oligonucleotide: BID-2561
augaugucuucuugacuuu

SEQ ID NO: 40648 - RNA, 20 nt, Artificial Sequence
  Synthetic oligonucleotide: BID-511
gaugaugucuucuugacuuu

SEQ ID NO: 40649 - RNA, 18 nt, Artificial Sequence
  Synthetic oligonucleotide: BID-2562
gaugucuuucacacaaca

SEQ ID NO: 40650 - RNA, 19 nt, Artificial Sequence
  Synthetic oligonucleotide: BID-2563
ugaugucuuucacacaaca

SEQ ID NO: 40651 - RNA, 20 nt, Artificial Sequence
  Synthetic oligonucleotide: BID-627
gugaugucuuucacacaaca

SEQ ID NO: 40652 - RNA, 18 nt, Artificial Sequence
  Synthetic oligonucleotide: BID-2564
acugggacacugugaacc

SEQ ID NO: 40653 - RNA, 19 nt, Artificial Sequence
  Synthetic oligonucleotide: BID-2565
cacugggacacugugaacc

SEQ ID NO: 40654 - RNA, 20 nt, Artificial Sequence
  Synthetic oligonucleotide: BID-57
ccacugggacacugugaacc

SEQ ID NO: 40655 - RNA, 18 nt, Artificial Sequence
  Synthetic oligonucleotide: BID-2566
acgaaugugcagcggugc

SEQ ID NO: 40656 - RNA, 19 nt, Artificial Sequence
  Synthetic oligonucleotide: BID-2567
uacgaaugugcagcggugc

SEQ ID NO: 40657 - RNA, 20 nt, Artificial Sequence
  Synthetic oligonucleotide: BID-1
auacgaaugugcagcggugc

SEQ ID NO: 40658 - RNA, 18 nt, Artificial Sequence
  Synthetic oligonucleotide: BID-2568
aacaacgguuccagccuc

SEQ ID NO: 40659 - RNA, 19 nt, Artificial Sequence
  Synthetic oligonucleotide: BID-2569
caacaacgguuccagccuc

SEQ ID NO: 40660 - RNA, 20 nt, Artificial Sequence
  Synthetic oligonucleotide: BID-106
ucaacaacgguuccagccuc

SEQ ID NO: 40661 - RNA, 18 nt, Artificial Sequence
  Synthetic oligonucleotide: BID-2570
accagccggucggaggag

SEQ ID NO: 40662 - RNA, 19 nt, Artificial Sequence
  Synthetic oligonucleotide: BID-2571
caccagccggucggaggag

SEQ ID NO: 40663 - RNA, 20 nt, Artificial Sequence
  Synthetic oligonucleotide: BID-425
acaccagccggucggaggag

SEQ ID NO: 40664 - RNA, 18 nt, Artificial Sequence
  Synthetic oligonucleotide: BID-2572
acgguuccagccucaggg

SEQ ID NO: 40665 - RNA, 19 nt, Artificial Sequence
  Synthetic oligonucleotide: BID-2573
aacgguuccagccucaggg

SEQ ID NO: 40666 - RNA, 20 nt, Artificial Sequence
  Synthetic oligonucleotide: BID-392
caacgguuccagccucaggg

SEQ ID NO: 40667 - RNA, 18 nt, Artificial Sequence
  Synthetic oligonucleotide: BID-2574
cagccacucccgcuuggg

SEQ ID NO: 40668 - RNA, 19 nt, Artificial Sequence
  Synthetic oligonucleotide: BID-2575
gcagccacucccgcuuggg

SEQ ID NO: 40669 - RNA, 20 nt, Artificial Sequence
  Synthetic oligonucleotide: BID-406
agcagccacucccgcuuggg

SEQ ID NO: 40670 - RNA, 18 nt, Artificial Sequence
  Synthetic oligonucleotide: BID-2576
ucagaggccagauccccu

SEQ ID NO: 40671 - RNA, 19 nt, Artificial Sequence
  Synthetic oligonucleotide: BID-2577
gucagaggccagauccccu

SEQ ID NO: 40672 - RNA, 20 nt, Artificial Sequence
  Synthetic oligonucleotide: BID-389
ggucagaggccagauccccu

SEQ ID NO: 40673 - RNA, 18 nt, Artificial Sequence
  Synthetic oligonucleotide: BID-2578
cggcuggaggagcacagu

SEQ ID NO: 40674 - RNA, 19 nt, Artificial Sequence
  Synthetic oligonucleotide: BID-2579
ccggcuggaggagcacagu

SEQ ID NO: 40675 - RNA, 20 nt, Artificial Sequence
  Synthetic oligonucleotide: BID-372
gccggcuggaggagcacagu

SEQ ID NO: 40676 - RNA, 21 nt, Artificial Sequence
  Synthetic oligonucleotide: BID-2580
ggcgaccuggaaagggacaca

SEQ ID NO: 40677 - RNA, 22 nt, Artificial Sequence
  Synthetic oligonucleotide: BID-2581
uggcgaccuggaaagggacaca

SEQ ID NO: 40678 - RNA, 23 nt, Artificial Sequence
  Synthetic oligonucleotide: BID-2582
guggcgaccuggaaagggacaca

SEQ ID NO: 40679 - RNA, 24 nt, Artificial Sequence
  Synthetic oligonucleotide: BID-2583
aguggcgaccuggaaagggacaca

SEQ ID NO: 40680 - RNA, 18 nt, Artificial Sequence
  Synthetic oligonucleotide: BID-2584
uucguauuuguugaauga

SEQ ID NO: 40681 - RNA, 19 nt, Artificial Sequence
  Synthetic oligonucleotide: BID-2585
auucguauuuguugaauga

SEQ ID NO: 40682 - RNA, 20 nt, Artificial Sequence
  Synthetic oligonucleotide: BID-555
cauucguauuuguugaauga

SEQ ID NO: 40683 - RNA, 21 nt, Artificial Sequence
  Synthetic oligonucleotide: BID-2586
acauucguauuuguugaauga

SEQ ID NO: 40684 - RNA, 22 nt, Artificial Sequence
  Synthetic oligonucleotide: BID-2587
cacauucguauuuguugaauga

SEQ ID NO: 40685 - RNA, 23 nt, Artificial Sequence
  Synthetic oligonucleotide: BID-2588
gcacauucguauuuguugaauga

SEQ ID NO: 40686 - RNA, 24 nt, Artificial Sequence
  Synthetic oligonucleotide: BID-2589
ugcacauucguauuuguugaauga

SEQ ID NO: 40687 - RNA, 21 nt, Artificial Sequence
  Synthetic oligonucleotide: BID-2590
cugcacauucguauuuguuga

SEQ ID NO: 40688 - RNA, 22 nt, Artificial Sequence
  Synthetic oligonucleotide: BID-2591
gcugcacauucguauuuguuga

SEQ ID NO: 40689 - RNA, 23 nt, Artificial Sequence
  Synthetic oligonucleotide: BID-2592
cgcugcacauucguauuuguuga

SEQ ID NO: 40690 - RNA, 24 nt, Artificial Sequence
  Synthetic oligonucleotide: BID-2593
ccgcugcacauucguauuuguuga

SEQ ID NO: 40691 - RNA, 18 nt, Artificial Sequence
  Synthetic oligonucleotide: BID-2594
cagcccccagcccacuua

SEQ ID NO: 40692 - RNA, 19 nt, Artificial Sequence
  Synthetic oligonucleotide: BID-2595
ccagcccccagcccacuua

SEQ ID NO: 40693 - RNA, 20 nt, Artificial Sequence
  Synthetic oligonucleotide: BID-551
cccagcccccagcccacuua

SEQ ID NO: 40694 - RNA, 21 nt, Artificial Sequence
  Synthetic oligonucleotide: BID-2596
gcccagcccccagcccacuua

SEQ ID NO: 40695 - RNA, 22 nt, Artificial Sequence
  Synthetic oligonucleotide: BID-2597
ggcccagcccccagcccacuua

SEQ ID NO: 40696 - RNA, 23 nt, Artificial Sequence
  Synthetic oligonucleotide: BID-2598
aggcccagcccccagcccacuua

SEQ ID NO: 40697 - RNA, 24 nt, Artificial Sequence
  Synthetic oligonucleotide: BID-2599
aaggcccagcccccagcccacuua

SEQ ID NO: 40698 - RNA, 18 nt, Artificial Sequence
  Synthetic oligonucleotide: BID-2600
caagaaaggagaaaaagc

SEQ ID NO: 40699 - RNA, 19 nt, Artificial Sequence
  Synthetic oligonucleotide: BID-2601
gcaagaaaggagaaaaagc

SEQ ID NO: 40700 - RNA, 20 nt, Artificial Sequence
  Synthetic oligonucleotide: BID-2602
agcaagaaaggagaaaaagc

SEQ ID NO: 40701 - RNA, 21 nt, Artificial Sequence
  Synthetic oligonucleotide: BID-2603
gagcaagaaaggagaaaaagc

SEQ ID NO: 40702 - RNA, 22 nt, Artificial Sequence
  Synthetic oligonucleotide: BID-2604
agagcaagaaaggagaaaaagc

SEQ ID NO: 40703 - RNA, 23 nt, Artificial Sequence
  Synthetic oligonucleotide: BID-2605
uagagcaagaaaggagaaaaagc

SEQ ID NO: 40704 - RNA, 24 nt, Artificial Sequence
  Synthetic oligonucleotide: BID-2606
cuagagcaagaaaggagaaaaagc

SEQ ID NO: 40705 - RNA, 21 nt, Artificial Sequence
  Synthetic oligonucleotide: BID-2607
cugccucuauucuucccaagc

SEQ ID NO: 40706 - RNA, 22 nt, Artificial Sequence
  Synthetic oligonucleotide: BID-2608
ccugccucuauucuucccaagc

SEQ ID NO: 40707 - RNA, 23 nt, Artificial Sequence
  Synthetic oligonucleotide: BID-2609
accugccucuauucuucccaagc

SEQ ID NO: 40708 - RNA, 24 nt, Artificial Sequence
  Synthetic oligonucleotide: BID-2610
uaccugccucuauucuucccaagc

SEQ ID NO: 40709 - RNA, 18 nt, Artificial Sequence
  Synthetic oligonucleotide: BID-2611
ucuccuucuccaugucuc

SEQ ID NO: 40710 - RNA, 19 nt, Artificial Sequence
  Synthetic oligonucleotide: BID-2612
uucuccuucuccaugucuc

SEQ ID NO: 40711 - RNA, 20 nt, Artificial Sequence
  Synthetic oligonucleotide: BID-663
cuucuccuucuccaugucuc

SEQ ID NO: 40712 - RNA, 21 nt, Artificial Sequence
  Synthetic oligonucleotide: BID-2613
ucuucuccuucuccaugucuc

SEQ ID NO: 40713 - RNA, 22 nt, Artificial Sequence
  Synthetic oligonucleotide: BID-2614
gucuucuccuucuccaugucuc

SEQ ID NO: 40714 - RNA, 23 nt, Artificial Sequence
  Synthetic oligonucleotide: BID-2615
ggucuucuccuucuccaugucuc

SEQ ID NO: 40715 - RNA, 24 nt, Artificial Sequence
  Synthetic oligonucleotide: BID-2616
uggucuucuccuucuccaugucuc

SEQ ID NO: 40716 - RNA, 18 nt, Artificial Sequence
  Synthetic oligonucleotide: BID-2617
guugaccugaggggaaag

SEQ ID NO: 40717 - RNA, 19 nt, Artificial Sequence
  Synthetic oligonucleotide: BID-2618
uguugaccugaggggaaag

SEQ ID NO: 40718 - RNA, 20 nt, Artificial Sequence
  Synthetic oligonucleotide: BID-130
uuguugaccugaggggaaag

SEQ ID NO: 40719 - RNA, 21 nt, Artificial Sequence
  Synthetic oligonucleotide: BID-2619
guuguugaccugaggggaaag

SEQ ID NO: 40720 - RNA, 22 nt, Artificial Sequence
  Synthetic oligonucleotide: BID-2620
cguuguugaccugaggggaaag

SEQ ID NO: 40721 - RNA, 23 nt, Artificial Sequence
  Synthetic oligonucleotide: BID-2621
ccguuguugaccugaggggaaag

SEQ ID NO: 40722 - RNA, 24 nt, Artificial Sequence
  Synthetic oligonucleotide: BID-2622
accguuguugaccugaggggaaag

SEQ ID NO: 40723 - RNA, 21 nt, Artificial Sequence
  Synthetic oligonucleotide: BID-2623
caggccguucaccaggcccgg

SEQ ID NO: 40724 - RNA, 22 nt, Artificial Sequence
  Synthetic oligonucleotide: BID-2624
ccaggccguucaccaggcccgg

SEQ ID NO: 40725 - RNA, 23 nt, Artificial Sequence
  Synthetic oligonucleotide: BID-2625
gccaggccguucaccaggcccgg

SEQ ID NO: 40726 - RNA, 24 nt, Artificial Sequence
  Synthetic oligonucleotide: BID-2626
ggccaggccguucaccaggcccgg

SEQ ID NO: 40727 - RNA, 21 nt, Artificial Sequence
  Synthetic oligonucleotide: BID-2627
accgcugcacauucguauuug

SEQ ID NO: 40728 - RNA, 22 nt, Artificial Sequence
  Synthetic oligonucleotide: BID-2628
caccgcugcacauucguauuug

SEQ ID NO: 40729 - RNA, 23 nt, Artificial Sequence
  Synthetic oligonucleotide: BID-2629
gcaccgcugcacauucguauuug

SEQ ID NO: 40730 - RNA, 24 nt, Artificial Sequence
  Synthetic oligonucleotide: BID-2630
agcaccgcugcacauucguauuug

SEQ ID NO: 40731 - RNA, 21 nt, Artificial Sequence
  Synthetic oligonucleotide: BID-2631
ggcgaggugccuggcaauauu

SEQ ID NO: 40732 - RNA, 22 nt, Artificial Sequence
  Synthetic oligonucleotide: BID-2632
gggcgaggugccuggcaauauu

SEQ ID NO: 40733 - RNA, 23 nt, Artificial Sequence
  Synthetic oligonucleotide: BID-2633
ugggcgaggugccuggcaauauu

SEQ ID NO: 40734 - RNA, 24 nt, Artificial Sequence
  Synthetic oligonucleotide: BID-2634
cugggcgaggugccuggcaauauu

SEQ ID NO: 40735 - RNA, 21 nt, Artificial Sequence
  Synthetic oligonucleotide: BID-2635
ggaugaugucuucuugacuuu

SEQ ID NO: 40736 - RNA, 22 nt, Artificial Sequence
  Synthetic oligonucleotide: BID-2636
cggaugaugucuucuugacuuu

SEQ ID NO: 40737 - RNA, 23 nt, Artificial Sequence
  Synthetic oligonucleotide: BID-2637
ccggaugaugucuucuugacuuu

SEQ ID NO: 40738 - RNA, 24 nt, Artificial Sequence
  Synthetic oligonucleotide: BID-2638
uccggaugaugucuucuugacuuu

SEQ ID NO: 40739 - RNA, 21 nt, Artificial Sequence
  Synthetic oligonucleotide: BID-2639
cgugaugucuuucacacaaca

SEQ ID NO: 40740 - RNA, 22 nt, Artificial Sequence
  Synthetic oligonucleotide: BID-2640
ccgugaugucuuucacacaaca

SEQ ID NO: 40741 - RNA, 23 nt, Artificial Sequence
  Synthetic oligonucleotide: BID-2641
uccgugaugucuuucacacaaca

SEQ ID NO: 40742 - RNA, 24 nt, Artificial Sequence
  Synthetic oligonucleotide: BID-2642
cuccgugaugucuuucacacaaca

SEQ ID NO: 40743 - RNA, 18 nt, Artificial Sequence
  Synthetic oligonucleotide: BID-2643
ggacacugugaaccagga

SEQ ID NO: 40744 - RNA, 19 nt, Artificial Sequence
  Synthetic oligonucleotide: BID-2644
gggacacugugaaccagga

SEQ ID NO: 40745 - RNA, 20 nt, Artificial Sequence
  Synthetic oligonucleotide: BID-383
ugggacacugugaaccagga

SEQ ID NO: 40746 - RNA, 21 nt, Artificial Sequence
  Synthetic oligonucleotide: BID-2645
cugggacacugugaaccagga

SEQ ID NO: 40747 - RNA, 22 nt, Artificial Sequence
  Synthetic oligonucleotide: BID-2646
acugggacacugugaaccagga

SEQ ID NO: 40748 - RNA, 23 nt, Artificial Sequence
  Synthetic oligonucleotide: BID-2647
cacugggacacugugaaccagga

SEQ ID NO: 40749 - RNA, 24 nt, Artificial Sequence
  Synthetic oligonucleotide: BID-2648
ccacugggacacugugaaccagga

SEQ ID NO: 40750 - RNA, 18 nt, Artificial Sequence
  Synthetic oligonucleotide: BID-2649
uucuccuuucuugcucua

SEQ ID NO: 40751 - RNA, 19 nt, Artificial Sequence
  Synthetic oligonucleotide: BID-2650
uuucuccuuucuugcucua

SEQ ID NO: 40752 - RNA, 20 nt, Artificial Sequence
  Synthetic oligonucleotide: BID-2542
uuuucuccuuucuugcucua

SEQ ID NO: 40753 - RNA, 21 nt, Artificial Sequence
  Synthetic oligonucleotide: BID-2651
uuuuucuccuuucuugcucua

SEQ ID NO: 40754 - RNA, 22 nt, Artificial Sequence
  Synthetic oligonucleotide: BID-2652
cuuuuucuccuuucuugcucua

SEQ ID NO: 40755 - RNA, 23 nt, Artificial Sequence
  Synthetic oligonucleotide: BID-2653
gcuuuuucuccuuucuugcucua

SEQ ID NO: 40756 - RNA, 24 nt, Artificial Sequence
  Synthetic oligonucleotide: BID-2654
ggcuuuuucuccuuucuugcucua

SEQ ID NO: 40757 - RNA, 21 nt, Artificial Sequence
  Synthetic oligonucleotide: BID-2655
gccacugggacacugugaacc

SEQ ID NO: 40758 - RNA, 22 nt, Artificial Sequence
  Synthetic oligonucleotide: BID-2656
cgccacugggacacugugaacc

SEQ ID NO: 40759 - RNA, 23 nt, Artificial Sequence
  Synthetic oligonucleotide: BID-2657
ucgccacugggacacugugaacc

SEQ ID NO: 40760 - RNA, 24 nt, Artificial Sequence
  Synthetic oligonucleotide: BID-2658
gucgccacugggacacugugaacc

SEQ ID NO: 40761 - RNA, 21 nt, Artificial Sequence
  Synthetic oligonucleotide: BID-2659
aauacgaaugugcagcggugc

SEQ ID NO: 40762 - RNA, 22 nt, Artificial Sequence
  Synthetic oligonucleotide: BID-2660
aaauacgaaugugcagcggugc

SEQ ID NO: 40763 - RNA, 23 nt, Artificial Sequence
  Synthetic oligonucleotide: BID-2661
caaauacgaaugugcagcggugc

SEQ ID NO: 40764 - RNA, 24 nt, Artificial Sequence
  Synthetic oligonucleotide: BID-2662
acaaauacgaaugugcagcggugc

SEQ ID NO: 40765 - RNA, 18 nt, Artificial Sequence
  Synthetic oligonucleotide: BID-2663
agucaagaagacaucauc

SEQ ID NO: 40766 - RNA, 19 nt, Artificial Sequence
  Synthetic oligonucleotide: BID-2664
aagucaagaagacaucauc

SEQ ID NO: 40767 - RNA, 20 nt, Artificial Sequence
  Synthetic oligonucleotide: BID-224
aaagucaagaagacaucauc

SEQ ID NO: 40768 - RNA, 21 nt, Artificial Sequence
  Synthetic oligonucleotide: BID-2665
gaaagucaagaagacaucauc

SEQ ID NO: 40769 - RNA, 22 nt, Artificial Sequence
  Synthetic oligonucleotide: BID-2666
ugaaagucaagaagacaucauc

SEQ ID NO: 40770 - RNA, 23 nt, Artificial Sequence
  Synthetic oligonucleotide: BID-2667
cugaaagucaagaagacaucauc

SEQ ID NO: 40771 - RNA, 24 nt, Artificial Sequence
  Synthetic oligonucleotide: BID-2668
ucugaaagucaagaagacaucauc

SEQ ID NO: 40772 - RNA, 21 nt, Artificial Sequence
  Synthetic oligonucleotide: BID-2669
gucaacaacgguuccagccuc

SEQ ID NO: 40773 - RNA, 22 nt, Artificial Sequence
  Synthetic oligonucleotide: BID-2670
ggucaacaacgguuccagccuc

SEQ ID NO: 40774 - RNA, 23 nt, Artificial Sequence
  Synthetic oligonucleotide: BID-2671
aggucaacaacgguuccagccuc

SEQ ID NO: 40775 - RNA, 24 nt, Artificial Sequence
  Synthetic oligonucleotide: BID-2672
caggucaacaacgguuccagccuc

SEQ ID NO: 40776 - RNA, 21 nt, Artificial Sequence
  Synthetic oligonucleotide: BID-2673
aacaccagccggucggaggag

SEQ ID NO: 40777 - RNA, 22 nt, Artificial Sequence
  Synthetic oligonucleotide: BID-2674
gaacaccagccggucggaggag

SEQ ID NO: 40778 - RNA, 23 nt, Artificial Sequence
  Synthetic oligonucleotide: BID-2675
ggaacaccagccggucggaggag

SEQ ID NO: 40779 - RNA, 24 nt, Artificial Sequence
  Synthetic oligonucleotide: BID-2676
aggaacaccagccggucggaggag

SEQ ID NO: 40780 - RNA, 21 nt, Artificial Sequence
  Synthetic oligonucleotide: BID-2677
acaacgguuccagccucaggg

SEQ ID NO: 40781 - RNA, 22 nt, Artificial Sequence
  Synthetic oligonucleotide: BID-2678
aacaacgguuccagccucaggg

SEQ ID NO: 40782 - RNA, 23 nt, Artificial Sequence
  Synthetic oligonucleotide: BID-2679
caacaacgguuccagccucaggg

SEQ ID NO: 40783 - RNA, 24 nt, Artificial Sequence
  Synthetic oligonucleotide: BID-2680
ucaacaacgguuccagccucaggg

SEQ ID NO: 40784 - RNA, 21 nt, Artificial Sequence
  Synthetic oligonucleotide: BID-2681
cagcagccacucccgcuuggg

SEQ ID NO: 40785 - RNA, 22 nt, Artificial Sequence
  Synthetic oligonucleotide: BID-2682
gcagcagccacucccgcuuggg

SEQ ID NO: 40786 - RNA, 23 nt, Artificial Sequence
  Synthetic oligonucleotide: BID-2683
cgcagcagccacucccgcuuggg

SEQ ID NO: 40787 - RNA, 24 nt, Artificial Sequence
  Synthetic oligonucleotide: BID-2684
ccgcagcagccacucccgcuuggg

SEQ ID NO: 40788 - RNA, 18 nt, Artificial Sequence
  Synthetic oligonucleotide: BID-2685
uucauucauucaacaaau

SEQ ID NO: 40789 - RNA, 19 nt, Artificial Sequence
  Synthetic oligonucleotide: BID-2686
auucauucauucaacaaau

SEQ ID NO: 40790 - RNA, 20 nt, Artificial Sequence
  Synthetic oligonucleotide: BID-360
cauucauucauucaacaaau

SEQ ID NO: 40791 - RNA, 21 nt, Artificial Sequence
  Synthetic oligonucleotide: BID-2687
ucauucauucauucaacaaau

SEQ ID NO: 40792 - RNA, 22 nt, Artificial Sequence
  Synthetic oligonucleotide: BID-2688
uucauucauucauucaacaaau

SEQ ID NO: 40793 - RNA, 23 nt, Artificial Sequence
  Synthetic oligonucleotide: BID-2689
guucauucauucauucaacaaau

SEQ ID NO: 40794 - RNA, 24 nt, Artificial Sequence
  Synthetic oligonucleotide: BID-2690
gguucauucauucauucaacaaau

SEQ ID NO: 40795 - RNA, 21 nt, Artificial Sequence
  Synthetic oligonucleotide: BID-2691
aggucagaggccagauccccu

SEQ ID NO: 40796 - RNA, 22 nt, Artificial Sequence
  Synthetic oligonucleotide: BID-2692
gaggucagaggccagauccccu

SEQ ID NO: 40797 - RNA, 23 nt, Artificial Sequence
  Synthetic oligonucleotide: BID-2693
ugaggucagaggccagauccccu

SEQ ID NO: 40798 - RNA, 24 nt, Artificial Sequence
  Synthetic oligonucleotide: BID-2694
gugaggucagaggccagauccccu

SEQ ID NO: 40799 - RNA, 21 nt, Artificial Sequence
  Synthetic oligonucleotide: BID-2695
ggccggcuggaggagcacagu

SEQ ID NO: 40800 - RNA, 22 nt, Artificial Sequence
  Synthetic oligonucleotide: BID-2696
gggccggcuggaggagcacagu

SEQ ID NO: 40801 - RNA, 23 nt, Artificial Sequence
  Synthetic oligonucleotide: BID-2697
cgggccggcuggaggagcacagu

SEQ ID NO: 40802 - RNA, 24 nt, Artificial Sequence
  Synthetic oligonucleotide: BID-2698
ccgggccggcuggaggagcacagu

SEQ ID NO: 40803 - RNA, 18 nt, Artificial Sequence
  Synthetic oligonucleotide: BID-2699
uguugaccugaggggaaa

SEQ ID NO: 40804 - RNA, 19 nt, Artificial Sequence
  Synthetic oligonucleotide: BID-2700
uuguugaccugaggggaaa

SEQ ID NO: 40805 - RNA, 20 nt, Artificial Sequence
  Synthetic oligonucleotide: BID-135
guuguugaccugaggggaaa

SEQ ID NO: 40806 - RNA, 21 nt, Artificial Sequence
  Synthetic oligonucleotide: BID-2701
cguuguugaccugaggggaaa

SEQ ID NO: 40807 - RNA, 22 nt, Artificial Sequence
  Synthetic oligonucleotide: BID-2702
ccguuguugaccugaggggaaa

SEQ ID NO: 40808 - RNA, 23 nt, Artificial Sequence
  Synthetic oligonucleotide: BID-2703
accguuguugaccugaggggaaa

SEQ ID NO: 40809 - RNA, 24 nt, Artificial Sequence
  Synthetic oligonucleotide: BID-2704
aaccguuguugaccugaggggaaa

SEQ ID NO: 40810 - RNA, 18 nt, Artificial Sequence
  Synthetic oligonucleotide: BID-2705
ugccucuauucuucccaa

SEQ ID NO: 40811 - RNA, 19 nt, Artificial Sequence
  Synthetic oligonucleotide: BID-2706
cugccucuauucuucccaa

SEQ ID NO: 40812 - RNA, 20 nt, Artificial Sequence
  Synthetic oligonucleotide: BID-515
ccugccucuauucuucccaa

SEQ ID NO: 40813 - RNA, 21 nt, Artificial Sequence
  Synthetic oligonucleotide: BID-2707
accugccucuauucuucccaa

SEQ ID NO: 40814 - RNA, 22 nt, Artificial Sequence
  Synthetic oligonucleotide: BID-2708
uaccugccucuauucuucccaa

SEQ ID NO: 40815 - RNA, 23 nt, Artificial Sequence
  Synthetic oligonucleotide: BID-2709
cuaccugccucuauucuucccaa

SEQ ID NO: 40816 - RNA, 24 nt, Artificial Sequence
  Synthetic oligonucleotide: BID-2710
ccuaccugccucuauucuucccaa

SEQ ID NO: 40817 - RNA, 18 nt, Artificial Sequence
  Synthetic oligonucleotide: BID-2711
cauccccuagagcaagaa

SEQ ID NO: 40818 - RNA, 19 nt, Artificial Sequence
  Synthetic oligonucleotide: BID-2712
ccauccccuagagcaagaa

SEQ ID NO: 40819 - RNA, 20 nt, Artificial Sequence
  Synthetic oligonucleotide: BID-2540
uccauccccuagagcaagaa

SEQ ID NO: 40820 - RNA, 21 nt, Artificial Sequence
  Synthetic oligonucleotide: BID-2713
guccauccccuagagcaagaa

SEQ ID NO: 40821 - RNA, 22 nt, Artificial Sequence
  Synthetic oligonucleotide: BID-2714
aguccauccccuagagcaagaa

SEQ ID NO: 40822 - RNA, 23 nt, Artificial Sequence
  Synthetic oligonucleotide: BID-2715
caguccauccccuagagcaagaa

SEQ ID NO: 40823 - RNA, 24 nt, Artificial Sequence
  Synthetic oligonucleotide: BID-2716
ucaguccauccccuagagcaagaa

SEQ ID NO: 40824 - RNA, 18 nt, Artificial Sequence
  Synthetic oligonucleotide: BID-2717
uuguugaccugaggggaa

SEQ ID NO: 40825 - RNA, 19 nt, Artificial Sequence
  Synthetic oligonucleotide: BID-2718
guuguugaccugaggggaa

SEQ ID NO: 40826 - RNA, 20 nt, Artificial Sequence
  Synthetic oligonucleotide: BID-114
cguuguugaccugaggggaa

SEQ ID NO: 40827 - RNA, 21 nt, Artificial Sequence
  Synthetic oligonucleotide: BID-2719
ccguuguugaccugaggggaa

SEQ ID NO: 40828 - RNA, 22 nt, Artificial Sequence
  Synthetic oligonucleotide: BID-2720
accguuguugaccugaggggaa

SEQ ID NO: 40829 - RNA, 23 nt, Artificial Sequence
  Synthetic oligonucleotide: BID-2721
aaccguuguugaccugaggggaa

SEQ ID NO: 40830 - RNA, 24 nt, Artificial Sequence
  Synthetic oligonucleotide: BID-2722
gaaccguuguugaccugaggggaa

SEQ ID NO: 40831 - RNA, 18 nt, Artificial Sequence
  Synthetic oligonucleotide: BID-2723
cccaguggcgaccuggaa

SEQ ID NO: 40832 - RNA, 19 nt, Artificial Sequence
  Synthetic oligonucleotide: BID-2724
ucccaguggcgaccuggaa

SEQ ID NO: 40833 - RNA, 20 nt, Artificial Sequence
  Synthetic oligonucleotide: BID-58
gucccaguggcgaccuggaa

SEQ ID NO: 40834 - RNA, 21 nt, Artificial Sequence
  Synthetic oligonucleotide: BID-2725
ugucccaguggcgaccuggaa

SEQ ID NO: 40835 - RNA, 22 nt, Artificial Sequence
  Synthetic oligonucleotide: BID-2726
gugucccaguggcgaccuggaa

SEQ ID NO: 40836 - RNA, 23 nt, Artificial Sequence
  Synthetic oligonucleotide: BID-2727
agugucccaguggcgaccuggaa

SEQ ID NO: 40837 - RNA, 24 nt, Artificial Sequence
  Synthetic oligonucleotide: BID-2728
cagugucccaguggcgaccuggaa

SEQ ID NO: 40838 - RNA, 18 nt, Artificial Sequence
  Synthetic oligonucleotide: BID-2729
ccugcacagaggggcaca

SEQ ID NO: 40839 - RNA, 19 nt, Artificial Sequence
  Synthetic oligonucleotide: BID-2730
uccugcacagaggggcaca

SEQ ID NO: 40840 - RNA, 20 nt, Artificial Sequence
  Synthetic oligonucleotide: BID-668
guccugcacagaggggcaca

SEQ ID NO: 40841 - RNA, 21 nt, Artificial Sequence
  Synthetic oligonucleotide: BID-2731
gguccugcacagaggggcaca

SEQ ID NO: 40842 - RNA, 22 nt, Artificial Sequence
  Synthetic oligonucleotide: BID-2732
cgguccugcacagaggggcaca

SEQ ID NO: 40843 - RNA, 23 nt, Artificial Sequence
  Synthetic oligonucleotide: BID-2733
ccgguccugcacagaggggcaca

SEQ ID NO: 40844 - RNA, 24 nt, Artificial Sequence
  Synthetic oligonucleotide: BID-2734
uccgguccugcacagaggggcaca

SEQ ID NO: 40845 - RNA, 18 nt, Artificial Sequence
  Synthetic oligonucleotide: BID-2735
cuguuccgguccugcaca

SEQ ID NO: 40846 - RNA, 19 nt, Artificial Sequence
  Synthetic oligonucleotide: BID-2736
ccuguuccgguccugcaca

SEQ ID NO: 40847 - RNA, 20 nt, Artificial Sequence
  Synthetic oligonucleotide: BID-666
cccuguuccgguccugcaca

SEQ ID NO: 40848 - RNA, 21 nt, Artificial Sequence
  Synthetic oligonucleotide: BID-2737
ucccuguuccgguccugcaca

SEQ ID NO: 40849 - RNA, 22 nt, Artificial Sequence
  Synthetic oligonucleotide: BID-2738
gucccuguuccgguccugcaca

SEQ ID NO: 40850 - RNA, 23 nt, Artificial Sequence
  Synthetic oligonucleotide: BID-2739
ggucccuguuccgguccugcaca

SEQ ID NO: 40851 - RNA, 24 nt, Artificial Sequence
  Synthetic oligonucleotide: BID-2740
aggucccuguuccgguccugcaca

SEQ ID NO: 40852 - RNA, 18 nt, Artificial Sequence
  Synthetic oligonucleotide: BID-2741
ccggccccucgcugccca

SEQ ID NO: 40853 - RNA, 19 nt, Artificial Sequence
  Synthetic oligonucleotide: BID-2742
cccggccccucgcugccca

SEQ ID NO: 40854 - RNA, 20 nt, Artificial Sequence
  Synthetic oligonucleotide: BID-552
gcccggccccucgcugccca

SEQ ID NO: 40855 - RNA, 21 nt, Artificial Sequence
  Synthetic oligonucleotide: BID-2743
ggcccggccccucgcugccca

SEQ ID NO: 40856 - RNA, 22 nt, Artificial Sequence
  Synthetic oligonucleotide: BID-2744
cggcccggccccucgcugccca

SEQ ID NO: 40857 - RNA, 23 nt, Artificial Sequence
  Synthetic oligonucleotide: BID-2745
ccggcccggccccucgcugccca

SEQ ID NO: 40858 - RNA, 24 nt, Artificial Sequence
  Synthetic oligonucleotide: BID-2746
gccggcccggccccucgcugccca

SEQ ID NO: 40859 - RNA, 18 nt, Artificial Sequence
  Synthetic oligonucleotide: BID-2747
cucaucguagcccuccca

SEQ ID NO: 40860 - RNA, 19 nt, Artificial Sequence
  Synthetic oligonucleotide: BID-2748
gcucaucguagcccuccca

SEQ ID NO: 40861 - RNA, 20 nt, Artificial Sequence
  Synthetic oligonucleotide: BID-518
agcucaucguagcccuccca

SEQ ID NO: 40862 - RNA, 21 nt, Artificial Sequence
  Synthetic oligonucleotide: BID-2749
cagcucaucguagcccuccca

SEQ ID NO: 40863 - RNA, 22 nt, Artificial Sequence
  Synthetic oligonucleotide: BID-2750
gcagcucaucguagcccuccca

SEQ ID NO: 40864 - RNA, 23 nt, Artificial Sequence
  Synthetic oligonucleotide: BID-2751
ugcagcucaucguagcccuccca

SEQ ID NO: 40865 - RNA, 24 nt, Artificial Sequence
  Synthetic oligonucleotide: BID-2752
cugcagcucaucguagcccuccca

SEQ ID NO: 40866 - RNA, 18 nt, Artificial Sequence
  Synthetic oligonucleotide: BID-2753
cccuguuccgguccugca

SEQ ID NO: 40867 - RNA, 19 nt, Artificial Sequence
  Synthetic oligonucleotide: BID-2754
ucccuguuccgguccugca

SEQ ID NO: 40868 - RNA, 20 nt, Artificial Sequence
  Synthetic oligonucleotide: BID-665
gucccuguuccgguccugca

SEQ ID NO: 40869 - RNA, 21 nt, Artificial Sequence
  Synthetic oligonucleotide: BID-2755
ggucccuguuccgguccugca

SEQ ID NO: 40870 - RNA, 22 nt, Artificial Sequence
  Synthetic oligonucleotide: BID-2756
aggucccuguuccgguccugca

SEQ ID NO: 40871 - RNA, 23 nt, Artificial Sequence
  Synthetic oligonucleotide: BID-2757
caggucccuguuccgguccugca

SEQ ID NO: 40872 - RNA, 24 nt, Artificial Sequence
  Synthetic oligonucleotide: BID-2758
ccaggucccuguuccgguccugca

SEQ ID NO: 40873 - RNA, 18 nt, Artificial Sequence
  Synthetic oligonucleotide: BID-2759
guugugugaaagacauca

SEQ ID NO: 40874 - RNA, 19 nt, Artificial Sequence
  Synthetic oligonucleotide: BID-2760
uguugugugaaagacauca

SEQ ID NO: 40875 - RNA, 20 nt, Artificial Sequence
  Synthetic oligonucleotide: BID-315
cuguugugugaaagacauca

SEQ ID NO: 40876 - RNA, 21 nt, Artificial Sequence
  Synthetic oligonucleotide: BID-2761
acuguugugugaaagacauca

SEQ ID NO: 40877 - RNA, 22 nt, Artificial Sequence
  Synthetic oligonucleotide: BID-2762
cacuguugugugaaagacauca

SEQ ID NO: 40878 - RNA, 23 nt, Artificial Sequence
  Synthetic oligonucleotide: BID-2763
ucacuguugugugaaagacauca

SEQ ID NO: 40879 - RNA, 24 nt, Artificial Sequence
  Synthetic oligonucleotide: BID-2764
uucacuguugugugaaagacauca

SEQ ID NO: 40880 - RNA, 18 nt, Artificial Sequence
  Synthetic oligonucleotide: BID-2765
ccauccccuagagcaaga

SEQ ID NO: 40881 - RNA, 19 nt, Artificial Sequence
  Synthetic oligonucleotide: BID-2766
uccauccccuagagcaaga

SEQ ID NO: 40882 - RNA, 20 nt, Artificial Sequence
  Synthetic oligonucleotide: BID-2767
guccauccccuagagcaaga

SEQ ID NO: 40883 - RNA, 21 nt, Artificial Sequence
  Synthetic oligonucleotide: BID-2768
aguccauccccuagagcaaga

SEQ ID NO: 40884 - RNA, 22 nt, Artificial Sequence
  Synthetic oligonucleotide: BID-2769
caguccauccccuagagcaaga

SEQ ID NO: 40885 - RNA, 23 nt, Artificial Sequence
  Synthetic oligonucleotide: BID-2770
ucaguccauccccuagagcaaga

SEQ ID NO: 40886 - RNA, 24 nt, Artificial Sequence
  Synthetic oligonucleotide: BID-2771
uucaguccauccccuagagcaaga

SEQ ID NO: 40887 - RNA, 18 nt, Artificial Sequence
  Synthetic oligonucleotide: BID-2772
uggaaagggacacacaga

SEQ ID NO: 40888 - RNA, 19 nt, Artificial Sequence
  Synthetic oligonucleotide: BID-2773
cuggaaagggacacacaga

SEQ ID NO: 40889 - RNA, 20 nt, Artificial Sequence
  Synthetic oligonucleotide: BID-550
ccuggaaagggacacacaga

SEQ ID NO: 40890 - RNA, 21 nt, Artificial Sequence
  Synthetic oligonucleotide: BID-2774
accuggaaagggacacacaga

SEQ ID NO: 40891 - RNA, 22 nt, Artificial Sequence
  Synthetic oligonucleotide: BID-2775
gaccuggaaagggacacacaga

SEQ ID NO: 40892 - RNA, 23 nt, Artificial Sequence
  Synthetic oligonucleotide: BID-2776
cgaccuggaaagggacacacaga

SEQ ID NO: 40893 - RNA, 24 nt, Artificial Sequence
  Synthetic oligonucleotide: BID-2777
gcgaccuggaaagggacacacaga

SEQ ID NO: 40894 - RNA, 18 nt, Artificial Sequence
  Synthetic oligonucleotide: BID-2778
guuguugaccugagggga

SEQ ID NO: 40895 - RNA, 19 nt, Artificial Sequence
  Synthetic oligonucleotide: BID-2779
cguuguugaccugagggga

SEQ ID NO: 40896 - RNA, 20 nt, Artificial Sequence
  Synthetic oligonucleotide: BID-537
ccguuguugaccugagggga

SEQ ID NO: 40897 - RNA, 21 nt, Artificial Sequence
  Synthetic oligonucleotide: BID-2780
accguuguugaccugagggga

SEQ ID NO: 40898 - RNA, 22 nt, Artificial Sequence
  Synthetic oligonucleotide: BID-2781
aaccguuguugaccugagggga

SEQ ID NO: 40899 - RNA, 23 nt, Artificial Sequence
  Synthetic oligonucleotide: BID-2782
gaaccguuguugaccugagggga

SEQ ID NO: 40900 - RNA, 24 nt, Artificial Sequence
  Synthetic oligonucleotide: BID-2783
ggaaccguuguugaccugagggga

SEQ ID NO: 40901 - RNA, 18 nt, Artificial Sequence
  Synthetic oligonucleotide: BID-2784
ucccaguggcgaccugga

SEQ ID NO: 40902 - RNA, 19 nt, Artificial Sequence
  Synthetic oligonucleotide: BID-2785
gucccaguggcgaccugga

SEQ ID NO: 40903 - RNA, 20 nt, Artificial Sequence
  Synthetic oligonucleotide: BID-547
ugucccaguggcgaccugga

SEQ ID NO: 40904 - RNA, 21 nt, Artificial Sequence
  Synthetic oligonucleotide: BID-2786
gugucccaguggcgaccugga

SEQ ID NO: 40905 - RNA, 22 nt, Artificial Sequence
  Synthetic oligonucleotide: BID-2787
agugucccaguggcgaccugga

SEQ ID NO: 40906 - RNA, 23 nt, Artificial Sequence
  Synthetic oligonucleotide: BID-2788
cagugucccaguggcgaccugga

SEQ ID NO: 40907 - RNA, 24 nt, Artificial Sequence
  Synthetic oligonucleotide: BID-2789
acagugucccaguggcgaccugga

SEQ ID NO: 40908 - RNA, 18 nt, Artificial Sequence
  Synthetic oligonucleotide: BID-2790
uauuuguugaaugaauga

SEQ ID NO: 40909 - RNA, 19 nt, Artificial Sequence
  Synthetic oligonucleotide: BID-2791
guauuuguugaaugaauga

SEQ ID NO: 40910 - RNA, 20 nt, Artificial Sequence
  Synthetic oligonucleotide: BID-556
cguauuuguugaaugaauga

SEQ ID NO: 40911 - RNA, 21 nt, Artificial Sequence
  Synthetic oligonucleotide: BID-2792
ucguauuuguugaaugaauga

SEQ ID NO: 40912 - RNA, 22 nt, Artificial Sequence
  Synthetic oligonucleotide: BID-2793
uucguauuuguugaaugaauga

SEQ ID NO: 40913 - RNA, 23 nt, Artificial Sequence
  Synthetic oligonucleotide: BID-2794
auucguauuuguugaaugaauga

SEQ ID NO: 40914 - RNA, 24 nt, Artificial Sequence
  Synthetic oligonucleotide: BID-2795
cauucguauuuguugaaugaauga

SEQ ID NO: 40915 - RNA, 18 nt, Artificial Sequence
  Synthetic oligonucleotide: BID-2796
gaaccguuguugaccuga

SEQ ID NO: 40916 - RNA, 19 nt, Artificial Sequence
  Synthetic oligonucleotide: BID-2797
ggaaccguuguugaccuga

SEQ ID NO: 40917 - RNA, 20 nt, Artificial Sequence
  Synthetic oligonucleotide: BID-105
uggaaccguuguugaccuga

SEQ ID NO: 40918 - RNA, 21 nt, Artificial Sequence
  Synthetic oligonucleotide: BID-2798
cuggaaccguuguugaccuga

SEQ ID NO: 40919 - RNA, 22 nt, Artificial Sequence
  Synthetic oligonucleotide: BID-2799
gcuggaaccguuguugaccuga

SEQ ID NO: 40920 - RNA, 23 nt, Artificial Sequence
  Synthetic oligonucleotide: BID-2800
ggcuggaaccguuguugaccuga

SEQ ID NO: 40921 - RNA, 24 nt, Artificial Sequence
  Synthetic oligonucleotide: BID-2801
aggcuggaaccguuguugaccuga

SEQ ID NO: 40922 - RNA, 18 nt, Artificial Sequence
  Synthetic oligonucleotide: BID-2802
ucaucguagcccucccac

SEQ ID NO: 40923 - RNA, 19 nt, Artificial Sequence
  Synthetic oligonucleotide: BID-2803
cucaucguagcccucccac

SEQ ID NO: 40924 - RNA, 20 nt, Artificial Sequence
  Synthetic oligonucleotide: BID-104
gcucaucguagcccucccac

SEQ ID NO: 40925 - RNA, 21 nt, Artificial Sequence
  Synthetic oligonucleotide: BID-2804
agcucaucguagcccucccac

SEQ ID NO: 40926 - RNA, 22 nt, Artificial Sequence
  Synthetic oligonucleotide: BID-2805
cagcucaucguagcccucccac

SEQ ID NO: 40927 - RNA, 23 nt, Artificial Sequence
  Synthetic oligonucleotide: BID-2806
gcagcucaucguagcccucccac

SEQ ID NO: 40928 - RNA, 24 nt, Artificial Sequence
  Synthetic oligonucleotide: BID-2807
ugcagcucaucguagcccucccac

SEQ ID NO: 40929 - RNA, 18 nt, Artificial Sequence
  Synthetic oligonucleotide: BID-2808
guccaugcuguccccgac

SEQ ID NO: 40930 - RNA, 19 nt, Artificial Sequence
  Synthetic oligonucleotide: BID-2809
gguccaugcuguccccgac

SEQ ID NO: 40931 - RNA, 20 nt, Artificial Sequence
  Synthetic oligonucleotide: BID-508
cgguccaugcuguccccgac

SEQ ID NO: 40932 - RNA, 21 nt, Artificial Sequence
  Synthetic oligonucleotide: BID-2810
acgguccaugcuguccccgac

SEQ ID NO: 40933 - RNA, 22 nt, Artificial Sequence
  Synthetic oligonucleotide: BID-2811
uacgguccaugcuguccccgac

SEQ ID NO: 40934 - RNA, 23 nt, Artificial Sequence
  Synthetic oligonucleotide: BID-2812
cuacgguccaugcuguccccgac

SEQ ID NO: 40935 - RNA, 24 nt, Artificial Sequence
  Synthetic oligonucleotide: BID-2813
gcuacgguccaugcuguccccgac

SEQ ID NO: 40936 - RNA, 18 nt, Artificial Sequence
  Synthetic oligonucleotide: BID-2814
cagugucccaguggcgac

SEQ ID NO: 40937 - RNA, 19 nt, Artificial Sequence
  Synthetic oligonucleotide: BID-2815
acagugucccaguggcgac

SEQ ID NO: 40938 - RNA, 20 nt, Artificial Sequence
  Synthetic oligonucleotide: BID-545
cacagugucccaguggcgac

SEQ ID NO: 40939 - RNA, 21 nt, Artificial Sequence
  Synthetic oligonucleotide: BID-2816
ucacagugucccaguggcgac

SEQ ID NO: 40940 - RNA, 22 nt, Artificial Sequence
  Synthetic oligonucleotide: BID-2817
uucacagugucccaguggcgac

SEQ ID NO: 40941 - RNA, 23 nt, Artificial Sequence
  Synthetic oligonucleotide: BID-2818
guucacagugucccaguggcgac

SEQ ID NO: 40942 - RNA, 24 nt, Artificial Sequence
  Synthetic oligonucleotide: BID-2819
gguucacagugucccaguggcgac

SEQ ID NO: 40943 - RNA, 18 nt, Artificial Sequence
  Synthetic oligonucleotide: BID-2820
gcuggaaccguuguugac

SEQ ID NO: 40944 - RNA, 19 nt, Artificial Sequence
  Synthetic oligonucleotide: BID-2821
ggcuggaaccguuguugac

SEQ ID NO: 40945 - RNA, 20 nt, Artificial Sequence
  Synthetic oligonucleotide: BID-532
aggcuggaaccguuguugac

SEQ ID NO: 40946 - RNA, 21 nt, Artificial Sequence
  Synthetic oligonucleotide: BID-2822
gaggcuggaaccguuguugac

SEQ ID NO: 40947 - RNA, 22 nt, Artificial Sequence
  Synthetic oligonucleotide: BID-2823
ugaggcuggaaccguuguugac

SEQ ID NO: 40948 - RNA, 23 nt, Artificial Sequence
  Synthetic oligonucleotide: BID-2824
cugaggcuggaaccguuguugac

SEQ ID NO: 40949 - RNA, 24 nt, Artificial Sequence
  Synthetic oligonucleotide: BID-2825
ccugaggcuggaaccguuguugac

SEQ ID NO: 40950 - RNA, 18 nt, Artificial Sequence
  Synthetic oligonucleotide: BID-2826
agugucccaguggcgacc

SEQ ID NO: 40951 - RNA, 19 nt, Artificial Sequence
  Synthetic oligonucleotide: BID-2827
cagugucccaguggcgacc

SEQ ID NO: 40952 - RNA, 20 nt, Artificial Sequence
  Synthetic oligonucleotide: BID-60
acagugucccaguggcgacc

SEQ ID NO: 40953 - RNA, 21 nt, Artificial Sequence
  Synthetic oligonucleotide: BID-2828
cacagugucccaguggcgacc

SEQ ID NO: 40954 - RNA, 22 nt, Artificial Sequence
  Synthetic oligonucleotide: BID-2829
ucacagugucccaguggcgacc

SEQ ID NO: 40955 - RNA, 23 nt, Artificial Sequence
  Synthetic oligonucleotide: BID-2830
uucacagugucccaguggcgacc

SEQ ID NO: 40956 - RNA, 24 nt, Artificial Sequence
  Synthetic oligonucleotide: BID-2831
guucacagugucccaguggcgacc

SEQ ID NO: 40957 - RNA, 18 nt, Artificial Sequence
  Synthetic oligonucleotide: BID-2832
uccguucaguccaucccc

SEQ ID NO: 40958 - RNA, 19 nt, Artificial Sequence
  Synthetic oligonucleotide: BID-2833
guccguucaguccaucccc

SEQ ID NO: 40959 - RNA, 20 nt, Artificial Sequence
  Synthetic oligonucleotide: BID-2834
uguccguucaguccaucccc

SEQ ID NO: 40960 - RNA, 21 nt, Artificial Sequence
  Synthetic oligonucleotide: BID-2835
cuguccguucaguccaucccc

SEQ ID NO: 40961 - RNA, 22 nt, Artificial Sequence
  Synthetic oligonucleotide: BID-2836
acuguccguucaguccaucccc

SEQ ID NO: 40962 - RNA, 23 nt, Artificial Sequence
  Synthetic oligonucleotide: BID-2837
aacuguccguucaguccaucccc

SEQ ID NO: 40963 - RNA, 24 nt, Artificial Sequence
  Synthetic oligonucleotide: BID-2838
gaacuguccguucaguccaucccc

SEQ ID NO: 40964 - RNA, 18 nt, Artificial Sequence
  Synthetic oligonucleotide: BID-2839
caggccguucaccaggcc

SEQ ID NO: 40965 - RNA, 19 nt, Artificial Sequence
  Synthetic oligonucleotide: BID-2840
ccaggccguucaccaggcc

SEQ ID NO: 40966 - RNA, 20 nt, Artificial Sequence
  Synthetic oligonucleotide: BID-229
gccaggccguucaccaggcc

SEQ ID NO: 40967 - RNA, 21 nt, Artificial Sequence
  Synthetic oligonucleotide: BID-2841
ggccaggccguucaccaggcc

SEQ ID NO: 40968 - RNA, 22 nt, Artificial Sequence
  Synthetic oligonucleotide: BID-2842
gggccaggccguucaccaggcc

SEQ ID NO: 40969 - RNA, 23 nt, Artificial Sequence
  Synthetic oligonucleotide: BID-2843
agggccaggccguucaccaggcc

SEQ ID NO: 40970 - RNA, 24 nt, Artificial Sequence
  Synthetic oligonucleotide: BID-2844
cagggccaggccguucaccaggcc

SEQ ID NO: 40971 - RNA, 18 nt, Artificial Sequence
  Synthetic oligonucleotide: BID-2845
uuugugaugcacucaucc

SEQ ID NO: 40972 - RNA, 19 nt, Artificial Sequence
  Synthetic oligonucleotide: BID-2846
guuugugaugcacucaucc

SEQ ID NO: 40973 - RNA, 20 nt, Artificial Sequence
  Synthetic oligonucleotide: BID-529
gguuugugaugcacucaucc

SEQ ID NO: 40974 - RNA, 21 nt, Artificial Sequence
  Synthetic oligonucleotide: BID-2847
agguuugugaugcacucaucc

SEQ ID NO: 40975 - RNA, 22 nt, Artificial Sequence
  Synthetic oligonucleotide: BID-2848
uagguuugugaugcacucaucc

SEQ ID NO: 40976 - RNA, 23 nt, Artificial Sequence
  Synthetic oligonucleotide: BID-2849
guagguuugugaugcacucaucc

SEQ ID NO: 40977 - RNA, 24 nt, Artificial Sequence
  Synthetic oligonucleotide: BID-2850
aguagguuugugaugcacucaucc

SEQ ID NO: 40978 - RNA, 18 nt, Artificial Sequence
  Synthetic oligonucleotide: BID-2851
caguccauccccuagagc

SEQ ID NO: 40979 - RNA, 19 nt, Artificial Sequence
  Synthetic oligonucleotide: BID-2852
ucaguccauccccuagagc

SEQ ID NO: 40980 - RNA, 20 nt, Artificial Sequence
  Synthetic oligonucleotide: BID-2853
uucaguccauccccuagagc

SEQ ID NO: 40981 - RNA, 21 nt, Artificial Sequence
  Synthetic oligonucleotide: BID-2854
guucaguccauccccuagagc

SEQ ID NO: 40982 - RNA, 22 nt, Artificial Sequence
  Synthetic oligonucleotide: BID-2855
cguucaguccauccccuagagc

SEQ ID NO: 40983 - RNA, 23 nt, Artificial Sequence
  Synthetic oligonucleotide: BID-2856
ccguucaguccauccccuagagc

SEQ ID NO: 40984 - RNA, 24 nt, Artificial Sequence
  Synthetic oligonucleotide: BID-2857
uccguucaguccauccccuagagc

SEQ ID NO: 40985 - RNA, 18 nt, Artificial Sequence
  Synthetic oligonucleotide: BID-2858
ugaaagacaucacggagc

SEQ ID NO: 40986 - RNA, 19 nt, Artificial Sequence
  Synthetic oligonucleotide: BID-2859
gugaaagacaucacggagc

SEQ ID NO: 40987 - RNA, 20 nt, Artificial Sequence
  Synthetic oligonucleotide: BID-661
ugugaaagacaucacggagc

SEQ ID NO: 40988 - RNA, 21 nt, Artificial Sequence
  Synthetic oligonucleotide: BID-2860
gugugaaagacaucacggagc

SEQ ID NO: 40989 - RNA, 22 nt, Artificial Sequence
  Synthetic oligonucleotide: BID-2861
ugugugaaagacaucacggagc

SEQ ID NO: 40990 - RNA, 23 nt, Artificial Sequence
  Synthetic oligonucleotide: BID-2862
uugugugaaagacaucacggagc

SEQ ID NO: 40991 - RNA, 24 nt, Artificial Sequence
  Synthetic oligonucleotide: BID-2863
guugugugaaagacaucacggagc

SEQ ID NO: 40992 - RNA, 18 nt, Artificial Sequence
  Synthetic oligonucleotide: BID-2864
ccaggccguucaccaggc

SEQ ID NO: 40993 - RNA, 19 nt, Artificial Sequence
  Synthetic oligonucleotide: BID-2865
gccaggccguucaccaggc

SEQ ID NO: 40994 - RNA, 20 nt, Artificial Sequence
  Synthetic oligonucleotide: BID-504
ggccaggccguucaccaggc

SEQ ID NO: 40995 - RNA, 21 nt, Artificial Sequence
  Synthetic oligonucleotide: BID-2866
gggccaggccguucaccaggc

SEQ ID NO: 40996 - RNA, 22 nt, Artificial Sequence
  Synthetic oligonucleotide: BID-2867
agggccaggccguucaccaggc

SEQ ID NO: 40997 - RNA, 23 nt, Artificial Sequence
  Synthetic oligonucleotide: BID-2868
cagggccaggccguucaccaggc

SEQ ID NO: 40998 - RNA, 24 nt, Artificial Sequence
  Synthetic oligonucleotide: BID-2869
gcagggccaggccguucaccaggc

SEQ ID NO: 40999 - RNA, 18 nt, Artificial Sequence
  Synthetic oligonucleotide: BID-2870
cagaaucuguguucaggc

SEQ ID NO: 41000 - RNA, 19 nt, Artificial Sequence
  Synthetic oligonucleotide: BID-2871
ucagaaucuguguucaggc

SEQ ID NO: 41001 - RNA, 20 nt, Artificial Sequence
  Synthetic oligonucleotide: BID-226
uucagaaucuguguucaggc

SEQ ID NO: 41002 - RNA, 21 nt, Artificial Sequence
  Synthetic oligonucleotide: BID-2872
uuucagaaucuguguucaggc

SEQ ID NO: 41003 - RNA, 22 nt, Artificial Sequence
  Synthetic oligonucleotide: BID-2873
cuuucagaaucuguguucaggc

SEQ ID NO: 41004 - RNA, 23 nt, Artificial Sequence
  Synthetic oligonucleotide: BID-2874
acuuucagaaucuguguucaggc

SEQ ID NO: 41005 - RNA, 24 nt, Artificial Sequence
  Synthetic oligonucleotide: BID-2875
gacuuucagaaucuguguucaggc

SEQ ID NO: 41006 - RNA, 18 nt, Artificial Sequence
  Synthetic oligonucleotide: BID-2876
ugcacucaucccugaggc

SEQ ID NO: 41007 - RNA, 19 nt, Artificial Sequence
  Synthetic oligonucleotide: BID-2877
augcacucaucccugaggc

SEQ ID NO: 41008 - RNA, 20 nt, Artificial Sequence
  Synthetic oligonucleotide: BID-126
gaugcacucaucccugaggc

SEQ ID NO: 41009 - RNA, 21 nt, Artificial Sequence
  Synthetic oligonucleotide: BID-2878
ugaugcacucaucccugaggc

SEQ ID NO: 41010 - RNA, 22 nt, Artificial Sequence
  Synthetic oligonucleotide: BID-2879
gugaugcacucaucccugaggc

SEQ ID NO: 41011 - RNA, 23 nt, Artificial Sequence
  Synthetic oligonucleotide: BID-2880
ugugaugcacucaucccugaggc

SEQ ID NO: 41012 - RNA, 24 nt, Artificial Sequence
  Synthetic oligonucleotide: BID-2881
uugugaugcacucaucccugaggc

SEQ ID NO: 41013 - RNA, 18 nt, Artificial Sequence
  Synthetic oligonucleotide: BID-2882
gaccucacaguccauggc

SEQ ID NO: 41014 - RNA, 19 nt, Artificial Sequence
  Synthetic oligonucleotide: BID-2883
ugaccucacaguccauggc

SEQ ID NO: 41015 - RNA, 20 nt, Artificial Sequence
  Synthetic oligonucleotide: BID-544
cugaccucacaguccauggc

SEQ ID NO: 41016 - RNA, 21 nt, Artificial Sequence
  Synthetic oligonucleotide: BID-2884
ucugaccucacaguccauggc

SEQ ID NO: 41017 - RNA, 22 nt, Artificial Sequence
  Synthetic oligonucleotide: BID-2885
cucugaccucacaguccauggc

SEQ ID NO: 41018 - RNA, 23 nt, Artificial Sequence
  Synthetic oligonucleotide: BID-2886
ccucugaccucacaguccauggc

SEQ ID NO: 41019 - RNA, 24 nt, Artificial Sequence
  Synthetic oligonucleotide: BID-2887
gccucugaccucacaguccauggc

SEQ ID NO: 41020 - RNA, 18 nt, Artificial Sequence
  Synthetic oligonucleotide: BID-2888
uguugugugaaagacauc

SEQ ID NO: 41021 - RNA, 19 nt, Artificial Sequence
  Synthetic oligonucleotide: BID-2889
cuguugugugaaagacauc

SEQ ID NO: 41022 - RNA, 20 nt, Artificial Sequence
  Synthetic oligonucleotide: BID-659
acuguugugugaaagacauc

SEQ ID NO: 41023 - RNA, 21 nt, Artificial Sequence
  Synthetic oligonucleotide: BID-2890
cacuguugugugaaagacauc

SEQ ID NO: 41024 - RNA, 22 nt, Artificial Sequence
  Synthetic oligonucleotide: BID-2891
ucacuguugugugaaagacauc

SEQ ID NO: 41025 - RNA, 23 nt, Artificial Sequence
  Synthetic oligonucleotide: BID-2892
uucacuguugugugaaagacauc

SEQ ID NO: 41026 - RNA, 24 nt, Artificial Sequence
  Synthetic oligonucleotide: BID-2893
auucacuguugugugaaagacauc

SEQ ID NO: 41027 - RNA, 18 nt, Artificial Sequence
  Synthetic oligonucleotide: BID-2894
ggccugcagcagcugcuc

SEQ ID NO: 41028 - RNA, 19 nt, Artificial Sequence
  Synthetic oligonucleotide: BID-2895
aggccugcagcagcugcuc

SEQ ID NO: 41029 - RNA, 20 nt, Artificial Sequence
  Synthetic oligonucleotide: BID-664
uaggccugcagcagcugcuc

SEQ ID NO: 41030 - RNA, 21 nt, Artificial Sequence
  Synthetic oligonucleotide: BID-2896
guaggccugcagcagcugcuc

SEQ ID NO: 41031 - RNA, 22 nt, Artificial Sequence
  Synthetic oligonucleotide: BID-2897
gguaggccugcagcagcugcuc

SEQ ID NO: 41032 - RNA, 23 nt, Artificial Sequence
  Synthetic oligonucleotide: BID-2898
ggguaggccugcagcagcugcuc

SEQ ID NO: 41033 - RNA, 24 nt, Artificial Sequence
  Synthetic oligonucleotide: BID-2899
aggguaggccugcagcagcugcuc

SEQ ID NO: 41034 - RNA, 18 nt, Artificial Sequence
  Synthetic oligonucleotide: BID-2900
ugaggggaaaggggaguc

SEQ ID NO: 41035 - RNA, 19 nt, Artificial Sequence
  Synthetic oligonucleotide: BID-2901
cugaggggaaaggggaguc

SEQ ID NO: 41036 - RNA, 20 nt, Artificial Sequence
  Synthetic oligonucleotide: BID-144
ccugaggggaaaggggaguc

SEQ ID NO: 41037 - RNA, 21 nt, Artificial Sequence
  Synthetic oligonucleotide: BID-2902
accugaggggaaaggggaguc

SEQ ID NO: 41038 - RNA, 22 nt, Artificial Sequence
  Synthetic oligonucleotide: BID-2903
gaccugaggggaaaggggaguc

SEQ ID NO: 41039 - RNA, 23 nt, Artificial Sequence
  Synthetic oligonucleotide: BID-2904
ugaccugaggggaaaggggaguc

SEQ ID NO: 41040 - RNA, 24 nt, Artificial Sequence
  Synthetic oligonucleotide: BID-2905
uugaccugaggggaaaggggaguc

SEQ ID NO: 41041 - RNA, 18 nt, Artificial Sequence
  Synthetic oligonucleotide: BID-2906
uccgaccggcugguguuc

SEQ ID NO: 41042 - RNA, 19 nt, Artificial Sequence
  Synthetic oligonucleotide: BID-2907
cuccgaccggcugguguuc

SEQ ID NO: 41043 - RNA, 20 nt, Artificial Sequence
  Synthetic oligonucleotide: BID-502
ccuccgaccggcugguguuc

SEQ ID NO: 41044 - RNA, 21 nt, Artificial Sequence
  Synthetic oligonucleotide: BID-2908
uccuccgaccggcugguguuc

SEQ ID NO: 41045 - RNA, 22 nt, Artificial Sequence
  Synthetic oligonucleotide: BID-2909
cuccuccgaccggcugguguuc

SEQ ID NO: 41046 - RNA, 23 nt, Artificial Sequence
  Synthetic oligonucleotide: BID-2910
ccuccuccgaccggcugguguuc

SEQ ID NO: 41047 - RNA, 24 nt, Artificial Sequence
  Synthetic oligonucleotide: BID-2911
accuccuccgaccggcugguguuc

SEQ ID NO: 41048 - RNA, 18 nt, Artificial Sequence
  Synthetic oligonucleotide: BID-2912
uccccuagagcaagaaag

SEQ ID NO: 41049 - RNA, 19 nt, Artificial Sequence
  Synthetic oligonucleotide: BID-2913
auccccuagagcaagaaag

SEQ ID NO: 41050 - RNA, 20 nt, Artificial Sequence
  Synthetic oligonucleotide: BID-2914
cauccccuagagcaagaaag

SEQ ID NO: 41051 - RNA, 21 nt, Artificial Sequence
  Synthetic oligonucleotide: BID-2915
ccauccccuagagcaagaaag

SEQ ID NO: 41052 - RNA, 22 nt, Artificial Sequence
  Synthetic oligonucleotide: BID-2916
uccauccccuagagcaagaaag

SEQ ID NO: 41053 - RNA, 23 nt, Artificial Sequence
  Synthetic oligonucleotide: BID-2917
guccauccccuagagcaagaaag

SEQ ID NO: 41054 - RNA, 24 nt, Artificial Sequence
  Synthetic oligonucleotide: BID-2918
aguccauccccuagagcaagaaag

SEQ ID NO: 41055 - RNA, 18 nt, Artificial Sequence
  Synthetic oligonucleotide: BID-2919
gccucuauucuucccaag

SEQ ID NO: 41056 - RNA, 19 nt, Artificial Sequence
  Synthetic oligonucleotide: BID-2920
ugccucuauucuucccaag

SEQ ID NO: 41057 - RNA, 20 nt, Artificial Sequence
  Synthetic oligonucleotide: BID-141
cugccucuauucuucccaag

SEQ ID NO: 41058 - RNA, 21 nt, Artificial Sequence
  Synthetic oligonucleotide: BID-2921
ccugccucuauucuucccaag

SEQ ID NO: 41059 - RNA, 22 nt, Artificial Sequence
  Synthetic oligonucleotide: BID-2922
accugccucuauucuucccaag

SEQ ID NO: 41060 - RNA, 23 nt, Artificial Sequence
  Synthetic oligonucleotide: BID-2923
uaccugccucuauucuucccaag

SEQ ID NO: 41061 - RNA, 24 nt, Artificial Sequence
  Synthetic oligonucleotide: BID-2924
cuaccugccucuauucuucccaag

SEQ ID NO: 41062 - RNA, 18 nt, Artificial Sequence
  Synthetic oligonucleotide: BID-2925
gaaaggggagucaggaag

SEQ ID NO: 41063 - RNA, 19 nt, Artificial Sequence
  Synthetic oligonucleotide: BID-2926
ggaaaggggagucaggaag

SEQ ID NO: 41064 - RNA, 20 nt, Artificial Sequence
  Synthetic oligonucleotide: BID-543
gggaaaggggagucaggaag

SEQ ID NO: 41065 - RNA, 21 nt, Artificial Sequence
  Synthetic oligonucleotide: BID-2927
ggggaaaggggagucaggaag

SEQ ID NO: 41066 - RNA, 22 nt, Artificial Sequence
  Synthetic oligonucleotide: BID-2928
aggggaaaggggagucaggaag

SEQ ID NO: 41067 - RNA, 23 nt, Artificial Sequence
  Synthetic oligonucleotide: BID-2929
gaggggaaaggggagucaggaag

SEQ ID NO: 41068 - RNA, 24 nt, Artificial Sequence
  Synthetic oligonucleotide: BID-2930
ugaggggaaaggggagucaggaag

SEQ ID NO: 41069 - RNA, 18 nt, Artificial Sequence
  Synthetic oligonucleotide: BID-2931
uguuccgguccugcacag

SEQ ID NO: 41070 - RNA, 19 nt, Artificial Sequence
  Synthetic oligonucleotide: BID-2932
cuguuccgguccugcacag

SEQ ID NO: 41071 - RNA, 20 nt, Artificial Sequence
  Synthetic oligonucleotide: BID-331
ccuguuccgguccugcacag

SEQ ID NO: 41072 - RNA, 21 nt, Artificial Sequence
  Synthetic oligonucleotide: BID-2933
cccuguuccgguccugcacag

SEQ ID NO: 41073 - RNA, 22 nt, Artificial Sequence
  Synthetic oligonucleotide: BID-2934
ucccuguuccgguccugcacag

SEQ ID NO: 41074 - RNA, 23 nt, Artificial Sequence
  Synthetic oligonucleotide: BID-2935
gucccuguuccgguccugcacag

SEQ ID NO: 41075 - RNA, 24 nt, Artificial Sequence
  Synthetic oligonucleotide: BID-2936
ggucccuguuccgguccugcacag

SEQ ID NO: 41076 - RNA, 18 nt, Artificial Sequence
  Synthetic oligonucleotide: BID-2937
caccuucuuggccagcag

SEQ ID NO: 41077 - RNA, 19 nt, Artificial Sequence
  Synthetic oligonucleotide: BID-2938
ccaccuucuuggccagcag

SEQ ID NO: 41078 - RNA, 20 nt, Artificial Sequence
  Synthetic oligonucleotide: BID-662
gccaccuucuuggccagcag

SEQ ID NO: 41079 - RNA, 21 nt, Artificial Sequence
  Synthetic oligonucleotide: BID-2939
ggccaccuucuuggccagcag

SEQ ID NO: 41080 - RNA, 22 nt, Artificial Sequence
  Synthetic oligonucleotide: BID-2940
uggccaccuucuuggccagcag

SEQ ID NO: 41081 - RNA, 23 nt, Artificial Sequence
  Synthetic oligonucleotide: BID-2941
cuggccaccuucuuggccagcag

SEQ ID NO: 41082 - RNA, 24 nt, Artificial Sequence
  Synthetic oligonucleotide: BID-2942
acuggccaccuucuuggccagcag

SEQ ID NO: 41083 - RNA, 18 nt, Artificial Sequence
  Synthetic oligonucleotide: BID-2943
aaccguuguugaccugag

SEQ ID NO: 41084 - RNA, 19 nt, Artificial Sequence
  Synthetic oligonucleotide: BID-2944
gaaccguuguugaccugag

SEQ ID NO: 41085 - RNA, 20 nt, Artificial Sequence
  Synthetic oligonucleotide: BID-107
ggaaccguuguugaccugag

SEQ ID NO: 41086 - RNA, 21 nt, Artificial Sequence
  Synthetic oligonucleotide: BID-2945
uggaaccguuguugaccugag

SEQ ID NO: 41087 - RNA, 22 nt, Artificial Sequence
  Synthetic oligonucleotide: BID-2946
cuggaaccguuguugaccugag

SEQ ID NO: 41088 - RNA, 23 nt, Artificial Sequence
  Synthetic oligonucleotide: BID-2947
gcuggaaccguuguugaccugag

SEQ ID NO: 41089 - RNA, 24 nt, Artificial Sequence
  Synthetic oligonucleotide: BID-2948
ggcuggaaccguuguugaccugag

SEQ ID NO: 41090 - RNA, 18 nt, Artificial Sequence
  Synthetic oligonucleotide: BID-2949
ggccguucaccaggcccg

SEQ ID NO: 41091 - RNA, 19 nt, Artificial Sequence
  Synthetic oligonucleotide: BID-2950
aggccguucaccaggcccg

SEQ ID NO: 41092 - RNA, 20 nt, Artificial Sequence
  Synthetic oligonucleotide: BID-506
caggccguucaccaggcccg

SEQ ID NO: 41093 - RNA, 21 nt, Artificial Sequence
  Synthetic oligonucleotide: BID-2951
ccaggccguucaccaggcccg

SEQ ID NO: 41094 - RNA, 22 nt, Artificial Sequence
  Synthetic oligonucleotide: BID-2952
gccaggccguucaccaggcccg

SEQ ID NO: 41095 - RNA, 23 nt, Artificial Sequence
  Synthetic oligonucleotide: BID-2953
ggccaggccguucaccaggcccg

SEQ ID NO: 41096 - RNA, 24 nt, Artificial Sequence
  Synthetic oligonucleotide: BID-2954
gggccaggccguucaccaggcccg

SEQ ID NO: 41097 - RNA, 18 nt, Artificial Sequence
  Synthetic oligonucleotide: BID-2955
ucagaaucuguguucagg

SEQ ID NO: 41098 - RNA, 19 nt, Artificial Sequence
  Synthetic oligonucleotide: BID-2956
uucagaaucuguguucagg

SEQ ID NO: 41099 - RNA, 20 nt, Artificial Sequence
  Synthetic oligonucleotide: BID-512
uuucagaaucuguguucagg

SEQ ID NO: 41100 - RNA, 21 nt, Artificial Sequence
  Synthetic oligonucleotide: BID-2957
cuuucagaaucuguguucagg

SEQ ID NO: 41101 - RNA, 22 nt, Artificial Sequence
  Synthetic oligonucleotide: BID-2958
acuuucagaaucuguguucagg

SEQ ID NO: 41102 - RNA, 23 nt, Artificial Sequence
  Synthetic oligonucleotide: BID-2959
gacuuucagaaucuguguucagg

SEQ ID NO: 41103 - RNA, 24 nt, Artificial Sequence
  Synthetic oligonucleotide: BID-2960
ugacuuucagaaucuguguucagg

SEQ ID NO: 41104 - RNA, 18 nt, Artificial Sequence
  Synthetic oligonucleotide: BID-2961
augcacucaucccugagg

SEQ ID NO: 41105 - RNA, 19 nt, Artificial Sequence
  Synthetic oligonucleotide: BID-2962
gaugcacucaucccugagg

SEQ ID NO: 41106 - RNA, 20 nt, Artificial Sequence
  Synthetic oligonucleotide: BID-530
ugaugcacucaucccugagg

SEQ ID NO: 41107 - RNA, 21 nt, Artificial Sequence
  Synthetic oligonucleotide: BID-2963
gugaugcacucaucccugagg

SEQ ID NO: 41108 - RNA, 22 nt, Artificial Sequence
  Synthetic oligonucleotide: BID-2964
ugugaugcacucaucccugagg

SEQ ID NO: 41109 - RNA, 23 nt, Artificial Sequence
  Synthetic oligonucleotide: BID-2965
uugugaugcacucaucccugagg

SEQ ID NO: 41110 - RNA, 24 nt, Artificial Sequence
  Synthetic oligonucleotide: BID-2966
uuugugaugcacucaucccugagg

SEQ ID NO: 41111 - RNA, 18 nt, Artificial Sequence
  Synthetic oligonucleotide: BID-2967
guguucaggcaggggcgg

SEQ ID NO: 41112 - RNA, 19 nt, Artificial Sequence
  Synthetic oligonucleotide: BID-2968
uguguucaggcaggggcgg

SEQ ID NO: 41113 - RNA, 20 nt, Artificial Sequence
  Synthetic oligonucleotide: BID-514
cuguguucaggcaggggcgg

SEQ ID NO: 41114 - RNA, 21 nt, Artificial Sequence
  Synthetic oligonucleotide: BID-2969
ucuguguucaggcaggggcgg

SEQ ID NO: 41115 - RNA, 22 nt, Artificial Sequence
  Synthetic oligonucleotide: BID-2970
aucuguguucaggcaggggcgg

SEQ ID NO: 41116 - RNA, 23 nt, Artificial Sequence
  Synthetic oligonucleotide: BID-2971
aaucuguguucaggcaggggcgg

SEQ ID NO: 41117 - RNA, 24 nt, Artificial Sequence
  Synthetic oligonucleotide: BID-2972
gaaucuguguucaggcaggggcgg

SEQ ID NO: 41118 - RNA, 18 nt, Artificial Sequence
  Synthetic oligonucleotide: BID-2973
augcuguccccgaccugg

SEQ ID NO: 41119 - RNA, 19 nt, Artificial Sequence
  Synthetic oligonucleotide: BID-2974
caugcuguccccgaccugg

SEQ ID NO: 41120 - RNA, 20 nt, Artificial Sequence
  Synthetic oligonucleotide: BID-509
ccaugcuguccccgaccugg

SEQ ID NO: 41121 - RNA, 21 nt, Artificial Sequence
  Synthetic oligonucleotide: BID-2975
uccaugcuguccccgaccugg

SEQ ID NO: 41122 - RNA, 22 nt, Artificial Sequence
  Synthetic oligonucleotide: BID-2976
guccaugcuguccccgaccugg

SEQ ID NO: 41123 - RNA, 23 nt, Artificial Sequence
  Synthetic oligonucleotide: BID-2977
gguccaugcuguccccgaccugg

SEQ ID NO: 41124 - RNA, 24 nt, Artificial Sequence
  Synthetic oligonucleotide: BID-2978
cgguccaugcuguccccgaccugg

SEQ ID NO: 41125 - RNA, 18 nt, Artificial Sequence
  Synthetic oligonucleotide: BID-2979
uugucagaacagcuuugg

SEQ ID NO: 41126 - RNA, 19 nt, Artificial Sequence
  Synthetic oligonucleotide: BID-2980
guugucagaacagcuuugg

SEQ ID NO: 41127 - RNA, 20 nt, Artificial Sequence
  Synthetic oligonucleotide: BID-122
uguugucagaacagcuuugg

SEQ ID NO: 41128 - RNA, 21 nt, Artificial Sequence
  Synthetic oligonucleotide: BID-2981
cuguugucagaacagcuuugg

SEQ ID NO: 41129 - RNA, 22 nt, Artificial Sequence
  Synthetic oligonucleotide: BID-2982
gcuguugucagaacagcuuugg

SEQ ID NO: 41130 - RNA, 23 nt, Artificial Sequence
  Synthetic oligonucleotide: BID-2983
agcuguugucagaacagcuuugg

SEQ ID NO: 41131 - RNA, 24 nt, Artificial Sequence
  Synthetic oligonucleotide: BID-2984
aagcuguugucagaacagcuuugg

SEQ ID NO: 41132 - RNA, 18 nt, Artificial Sequence
  Synthetic oligonucleotide: BID-2985
aucguagcccucccacug

SEQ ID NO: 41133 - RNA, 19 nt, Artificial Sequence
  Synthetic oligonucleotide: BID-2986
caucguagcccucccacug

SEQ ID NO: 41134 - RNA, 20 nt, Artificial Sequence
  Synthetic oligonucleotide: BID-134
ucaucguagcccucccacug

SEQ ID NO: 41135 - RNA, 21 nt, Artificial Sequence
  Synthetic oligonucleotide: BID-2987
cucaucguagcccucccacug

SEQ ID NO: 41136 - RNA, 22 nt, Artificial Sequence
  Synthetic oligonucleotide: BID-2988
gcucaucguagcccucccacug

SEQ ID NO: 41137 - RNA, 23 nt, Artificial Sequence
  Synthetic oligonucleotide: BID-2989
agcucaucguagcccucccacug

SEQ ID NO: 41138 - RNA, 24 nt, Artificial Sequence
  Synthetic oligonucleotide: BID-2990
cagcucaucguagcccucccacug

SEQ ID NO: 41139 - RNA, 18 nt, Artificial Sequence
  Synthetic oligonucleotide: BID-2991
ggaaccguuguugaccug

SEQ ID NO: 41140 - RNA, 19 nt, Artificial Sequence
  Synthetic oligonucleotide: BID-2992
uggaaccguuguugaccug

SEQ ID NO: 41141 - RNA, 20 nt, Artificial Sequence
  Synthetic oligonucleotide: BID-118
cuggaaccguuguugaccug

SEQ ID NO: 41142 - RNA, 21 nt, Artificial Sequence
  Synthetic oligonucleotide: BID-2993
gcuggaaccguuguugaccug

SEQ ID NO: 41143 - RNA, 22 nt, Artificial Sequence
  Synthetic oligonucleotide: BID-2994
ggcuggaaccguuguugaccug

SEQ ID NO: 41144 - RNA, 23 nt, Artificial Sequence
  Synthetic oligonucleotide: BID-2995
aggcuggaaccguuguugaccug

SEQ ID NO: 41145 - RNA, 24 nt, Artificial Sequence
  Synthetic oligonucleotide: BID-2996
gaggcuggaaccguuguugaccug

SEQ ID NO: 41146 - RNA, 18 nt, Artificial Sequence
  Synthetic oligonucleotide: BID-2997
gcugguguuccugagcug

SEQ ID NO: 41147 - RNA, 19 nt, Artificial Sequence
  Synthetic oligonucleotide: BID-2998
ggcugguguuccugagcug

SEQ ID NO: 41148 - RNA, 20 nt, Artificial Sequence
  Synthetic oligonucleotide: BID-503
cggcugguguuccugagcug

SEQ ID NO: 41149 - RNA, 21 nt, Artificial Sequence
  Synthetic oligonucleotide: BID-2999
ccggcugguguuccugagcug

SEQ ID NO: 41150 - RNA, 22 nt, Artificial Sequence
  Synthetic oligonucleotide: BID-3000
accggcugguguuccugagcug

SEQ ID NO: 41151 - RNA, 23 nt, Artificial Sequence
  Synthetic oligonucleotide: BID-3001
gaccggcugguguuccugagcug

SEQ ID NO: 41152 - RNA, 24 nt, Artificial Sequence
  Synthetic oligonucleotide: BID-3002
cgaccggcugguguuccugagcug

SEQ ID NO: 41153 - RNA, 18 nt, Artificial Sequence
  Synthetic oligonucleotide: BID-3003
agugcguccagcucucug

SEQ ID NO: 41154 - RNA, 19 nt, Artificial Sequence
  Synthetic oligonucleotide: BID-3004
cagugcguccagcucucug

SEQ ID NO: 41155 - RNA, 20 nt, Artificial Sequence
  Synthetic oligonucleotide: BID-131
ccagugcguccagcucucug

SEQ ID NO: 41156 - RNA, 21 nt, Artificial Sequence
  Synthetic oligonucleotide: BID-3005
cccagugcguccagcucucug

SEQ ID NO: 41157 - RNA, 22 nt, Artificial Sequence
  Synthetic oligonucleotide: BID-3006
gcccagugcguccagcucucug

SEQ ID NO: 41158 - RNA, 23 nt, Artificial Sequence
  Synthetic oligonucleotide: BID-3007
ggcccagugcguccagcucucug

SEQ ID NO: 41159 - RNA, 24 nt, Artificial Sequence
  Synthetic oligonucleotide: BID-3008
uggcccagugcguccagcucucug

SEQ ID NO: 41160 - RNA, 18 nt, Artificial Sequence
  Synthetic oligonucleotide: BID-3009
guugucagaacagcuuug

SEQ ID NO: 41161 - RNA, 19 nt, Artificial Sequence
  Synthetic oligonucleotide: BID-3010
uguugucagaacagcuuug

SEQ ID NO: 41162 - RNA, 20 nt, Artificial Sequence
  Synthetic oligonucleotide: BID-527
cuguugucagaacagcuuug

SEQ ID NO: 41163 - RNA, 21 nt, Artificial Sequence
  Synthetic oligonucleotide: BID-3011
gcuguugucagaacagcuuug

SEQ ID NO: 41164 - RNA, 22 nt, Artificial Sequence
  Synthetic oligonucleotide: BID-3012
agcuguugucagaacagcuuug

SEQ ID NO: 41165 - RNA, 23 nt, Artificial Sequence
  Synthetic oligonucleotide: BID-3013
aagcuguugucagaacagcuuug

SEQ ID NO: 41166 - RNA, 24 nt, Artificial Sequence
  Synthetic oligonucleotide: BID-3014
gaagcuguugucagaacagcuuug

SEQ ID NO: 41167 - RNA, 18 nt, Artificial Sequence
  Synthetic oligonucleotide: BID-3015
caucguagcccucccacu

SEQ ID NO: 41168 - RNA, 19 nt, Artificial Sequence
  Synthetic oligonucleotide: BID-3016
ucaucguagcccucccacu

SEQ ID NO: 41169 - RNA, 20 nt, Artificial Sequence
  Synthetic oligonucleotide: BID-109
cucaucguagcccucccacu

SEQ ID NO: 41170 - RNA, 21 nt, Artificial Sequence
  Synthetic oligonucleotide: BID-3017
gcucaucguagcccucccacu

SEQ ID NO: 41171 - RNA, 22 nt, Artificial Sequence
  Synthetic oligonucleotide: BID-3018
agcucaucguagcccucccacu

SEQ ID NO: 41172 - RNA, 23 nt, Artificial Sequence
  Synthetic oligonucleotide: BID-3019
cagcucaucguagcccucccacu

SEQ ID NO: 41173 - RNA, 24 nt, Artificial Sequence
  Synthetic oligonucleotide: BID-3020
gcagcucaucguagcccucccacu

SEQ ID NO: 41174 - RNA, 18 nt, Artificial Sequence
  Synthetic oligonucleotide: BID-3021
uggaaccguuguugaccu

SEQ ID NO: 41175 - RNA, 19 nt, Artificial Sequence
  Synthetic oligonucleotide: BID-3022
cuggaaccguuguugaccu

SEQ ID NO: 41176 - RNA, 20 nt, Artificial Sequence
  Synthetic oligonucleotide: BID-533
gcuggaaccguuguugaccu

SEQ ID NO: 41177 - RNA, 21 nt, Artificial Sequence
  Synthetic oligonucleotide: BID-3023
ggcuggaaccguuguugaccu

SEQ ID NO: 41178 - RNA, 22 nt, Artificial Sequence
  Synthetic oligonucleotide: BID-3024
aggcuggaaccguuguugaccu

SEQ ID NO: 41179 - RNA, 23 nt, Artificial Sequence
  Synthetic oligonucleotide: BID-3025
gaggcuggaaccguuguugaccu

SEQ ID NO: 41180 - RNA, 24 nt, Artificial Sequence
  Synthetic oligonucleotide: BID-3026
ugaggcuggaaccguuguugaccu

SEQ ID NO: 41181 - RNA, 18 nt, Artificial Sequence
  Synthetic oligonucleotide: BID-3027
gcuguugucagaacagcu

SEQ ID NO: 41182 - RNA, 19 nt, Artificial Sequence
  Synthetic oligonucleotide: BID-3028
agcuguugucagaacagcu

SEQ ID NO: 41183 - RNA, 20 nt, Artificial Sequence
  Synthetic oligonucleotide: BID-525
aagcuguugucagaacagcu

SEQ ID NO: 41184 - RNA, 21 nt, Artificial Sequence
  Synthetic oligonucleotide: BID-3029
gaagcuguugucagaacagcu

SEQ ID NO: 41185 - RNA, 22 nt, Artificial Sequence
  Synthetic oligonucleotide: BID-3030
ggaagcuguugucagaacagcu

SEQ ID NO: 41186 - RNA, 23 nt, Artificial Sequence
  Synthetic oligonucleotide: BID-3031
cggaagcuguugucagaacagcu

SEQ ID NO: 41187 - RNA, 24 nt, Artificial Sequence
  Synthetic oligonucleotide: BID-3032
gcggaagcuguugucagaacagcu

SEQ ID NO: 41188 - RNA, 18 nt, Artificial Sequence
  Synthetic oligonucleotide: BID-3033
cagugcguccagcucucu

SEQ ID NO: 41189 - RNA, 19 nt, Artificial Sequence
  Synthetic oligonucleotide: BID-3034
ccagugcguccagcucucu

SEQ ID NO: 41190 - RNA, 20 nt, Artificial Sequence
  Synthetic oligonucleotide: BID-522
cccagugcguccagcucucu

SEQ ID NO: 41191 - RNA, 21 nt, Artificial Sequence
  Synthetic oligonucleotide: BID-3035
gcccagugcguccagcucucu

SEQ ID NO: 41192 - RNA, 22 nt, Artificial Sequence
  Synthetic oligonucleotide: BID-3036
ggcccagugcguccagcucucu

SEQ ID NO: 41193 - RNA, 23 nt, Artificial Sequence
  Synthetic oligonucleotide: BID-3037
uggcccagugcguccagcucucu

SEQ ID NO: 41194 - RNA, 24 nt, Artificial Sequence
  Synthetic oligonucleotide: BID-3038
guggcccagugcguccagcucucu

SEQ ID NO: 41195 - RNA, 18 nt, Artificial Sequence
  Synthetic oligonucleotide: BID-3039
cugaggggaaaggggagu

SEQ ID NO: 41196 - RNA, 19 nt, Artificial Sequence
  Synthetic oligonucleotide: BID-3040
ccugaggggaaaggggagu

SEQ ID NO: 41197 - RNA, 20 nt, Artificial Sequence
  Synthetic oligonucleotide: BID-541
accugaggggaaaggggagu

SEQ ID NO: 41198 - RNA, 21 nt, Artificial Sequence
  Synthetic oligonucleotide: BID-3041
gaccugaggggaaaggggagu

SEQ ID NO: 41199 - RNA, 22 nt, Artificial Sequence
  Synthetic oligonucleotide: BID-3042
ugaccugaggggaaaggggagu

SEQ ID NO: 41200 - RNA, 23 nt, Artificial Sequence
  Synthetic oligonucleotide: BID-3043
uugaccugaggggaaaggggagu

SEQ ID NO: 41201 - RNA, 24 nt, Artificial Sequence
  Synthetic oligonucleotide: BID-3044
guugaccugaggggaaaggggagu

SEQ ID NO: 41202 - RNA, 18 nt, Artificial Sequence
  Synthetic oligonucleotide: BID-3045
aauaaaauucacuguugu

SEQ ID NO: 41203 - RNA, 19 nt, Artificial Sequence
  Synthetic oligonucleotide: BID-3046
uaauaaaauucacuguugu

SEQ ID NO: 41204 - RNA, 20 nt, Artificial Sequence
  Synthetic oligonucleotide: BID-658
uuaauaaaauucacuguugu

SEQ ID NO: 41205 - RNA, 21 nt, Artificial Sequence
  Synthetic oligonucleotide: BID-3047
guuaauaaaauucacuguugu

SEQ ID NO: 41206 - RNA, 22 nt, Artificial Sequence
  Synthetic oligonucleotide: BID-3048
gguuaauaaaauucacuguugu

SEQ ID NO: 41207 - RNA, 23 nt, Artificial Sequence
  Synthetic oligonucleotide: BID-3049
ugguuaauaaaauucacuguugu

SEQ ID NO: 41208 - RNA, 24 nt, Artificial Sequence
  Synthetic oligonucleotide: BID-3050
cugguuaauaaaauucacuguugu

SEQ ID NO: 41209 - RNA, 18 nt, Artificial Sequence
  Synthetic oligonucleotide: BID-3051
cucugcggaagcuguugu

SEQ ID NO: 41210 - RNA, 19 nt, Artificial Sequence
  Synthetic oligonucleotide: BID-3052
ucucugcggaagcuguugu

SEQ ID NO: 41211 - RNA, 20 nt, Artificial Sequence
  Synthetic oligonucleotide: BID-524
cucucugcggaagcuguugu

SEQ ID NO: 41212 - RNA, 21 nt, Artificial Sequence
  Synthetic oligonucleotide: BID-3053
gcucucugcggaagcuguugu

SEQ ID NO: 41213 - RNA, 22 nt, Artificial Sequence
  Synthetic oligonucleotide: BID-3054
agcucucugcggaagcuguugu

SEQ ID NO: 41214 - RNA, 23 nt, Artificial Sequence
  Synthetic oligonucleotide: BID-3055
cagcucucugcggaagcuguugu

SEQ ID NO: 41215 - RNA, 24 nt, Artificial Sequence
  Synthetic oligonucleotide: BID-3056
ccagcucucugcggaagcuguugu

SEQ ID NO: 41216 - RNA, 18 nt, Artificial Sequence
  Synthetic oligonucleotide: BID-3057
cuguugucagaacagcuu

SEQ ID NO: 41217 - RNA, 19 nt, Artificial Sequence
  Synthetic oligonucleotide: BID-3058
gcuguugucagaacagcuu

SEQ ID NO: 41218 - RNA, 20 nt, Artificial Sequence
  Synthetic oligonucleotide: BID-136
agcuguugucagaacagcuu

SEQ ID NO: 41219 - RNA, 21 nt, Artificial Sequence
  Synthetic oligonucleotide: BID-3059
aagcuguugucagaacagcuu

SEQ ID NO: 41220 - RNA, 22 nt, Artificial Sequence
  Synthetic oligonucleotide: BID-3060
gaagcuguugucagaacagcuu

SEQ ID NO: 41221 - RNA, 23 nt, Artificial Sequence
  Synthetic oligonucleotide: BID-3061
ggaagcuguugucagaacagcuu

SEQ ID NO: 41222 - RNA, 24 nt, Artificial Sequence
  Synthetic oligonucleotide: BID-3062
cggaagcuguugucagaacagcuu

SEQ ID NO: 41223 - RNA, 18 nt, Artificial Sequence
  Synthetic oligonucleotide: BID-3063
acucccgcuugggaagaa

SEQ ID NO: 41224 - RNA, 19 nt, Artificial Sequence
  Synthetic oligonucleotide: BID-3064
cacucccgcuugggaagaa

SEQ ID NO: 41225 - RNA, 20 nt, Artificial Sequence
  Synthetic oligonucleotide: BID-407
ccacucccgcuugggaagaa

SEQ ID NO: 41226 - RNA, 21 nt, Artificial Sequence
  Synthetic oligonucleotide: BID-3065
gccacucccgcuugggaagaa

SEQ ID NO: 41227 - RNA, 22 nt, Artificial Sequence
  Synthetic oligonucleotide: BID-3066
agccacucccgcuugggaagaa

SEQ ID NO: 41228 - RNA, 23 nt, Artificial Sequence
  Synthetic oligonucleotide: BID-3067
cagccacucccgcuugggaagaa

SEQ ID NO: 41229 - RNA, 24 nt, Artificial Sequence
  Synthetic oligonucleotide: BID-3068
gcagccacucccgcuugggaagaa

SEQ ID NO: 41230 - RNA, 18 nt, Artificial Sequence
  Synthetic oligonucleotide: BID-3069
cucugugcaggaccggaa

SEQ ID NO: 41231 - RNA, 19 nt, Artificial Sequence
  Synthetic oligonucleotide: BID-3070
ccucugugcaggaccggaa

SEQ ID NO: 41232 - RNA, 20 nt, Artificial Sequence
  Synthetic oligonucleotide: BID-615
cccucugugcaggaccggaa

SEQ ID NO: 41233 - RNA, 21 nt, Artificial Sequence
  Synthetic oligonucleotide: BID-3071
ccccucugugcaggaccggaa

SEQ ID NO: 41234 - RNA, 22 nt, Artificial Sequence
  Synthetic oligonucleotide: BID-3072
gccccucugugcaggaccggaa

SEQ ID NO: 41235 - RNA, 23 nt, Artificial Sequence
  Synthetic oligonucleotide: BID-3073
ugccccucugugcaggaccggaa

SEQ ID NO: 41236 - RNA, 24 nt, Artificial Sequence
  Synthetic oligonucleotide: BID-3074
gugccccucugugcaggaccggaa

SEQ ID NO: 41237 - RNA, 18 nt, Artificial Sequence
  Synthetic oligonucleotide: BID-3075
acagugcggauucuguaa

SEQ ID NO: 41238 - RNA, 19 nt, Artificial Sequence
  Synthetic oligonucleotide: BID-3076
cacagugcggauucuguaa

SEQ ID NO: 41239 - RNA, 20 nt, Artificial Sequence
  Synthetic oligonucleotide: BID-373
gcacagugcggauucuguaa

SEQ ID NO: 41240 - RNA, 21 nt, Artificial Sequence
  Synthetic oligonucleotide: BID-3077
agcacagugcggauucuguaa

SEQ ID NO: 41241 - RNA, 22 nt, Artificial Sequence
  Synthetic oligonucleotide: BID-3078
gagcacagugcggauucuguaa

SEQ ID NO: 41242 - RNA, 23 nt, Artificial Sequence
  Synthetic oligonucleotide: BID-3079
ggagcacagugcggauucuguaa

SEQ ID NO: 41243 - RNA, 24 nt, Artificial Sequence
  Synthetic oligonucleotide: BID-3080
aggagcacagugcggauucuguaa

SEQ ID NO: 41244 - RNA, 18 nt, Artificial Sequence
  Synthetic oligonucleotide: BID-3081
aggccuacccuagagaca

SEQ ID NO: 41245 - RNA, 19 nt, Artificial Sequence
  Synthetic oligonucleotide: BID-3082
caggccuacccuagagaca

SEQ ID NO: 41246 - RNA, 20 nt, Artificial Sequence
  Synthetic oligonucleotide: BID-285
gcaggccuacccuagagaca

SEQ ID NO: 41247 - RNA, 21 nt, Artificial Sequence
  Synthetic oligonucleotide: BID-3083
ugcaggccuacccuagagaca

SEQ ID NO: 41248 - RNA, 22 nt, Artificial Sequence
  Synthetic oligonucleotide: BID-3084
cugcaggccuacccuagagaca

SEQ ID NO: 41249 - RNA, 23 nt, Artificial Sequence
  Synthetic oligonucleotide: BID-3085
gcugcaggccuacccuagagaca

SEQ ID NO: 41250 - RNA, 24 nt, Artificial Sequence
  Synthetic oligonucleotide: BID-3086
ugcugcaggccuacccuagagaca

SEQ ID NO: 41251 - RNA, 18 nt, Artificial Sequence
  Synthetic oligonucleotide: BID-3087
gccagugcuggcucccca

SEQ ID NO: 41252 - RNA, 19 nt, Artificial Sequence
  Synthetic oligonucleotide: BID-3088
ugccagugcuggcucccca

SEQ ID NO: 41253 - RNA, 20 nt, Artificial Sequence
  Synthetic oligonucleotide: BID-398
cugccagugcuggcucccca

SEQ ID NO: 41254 - RNA, 21 nt, Artificial Sequence
  Synthetic oligonucleotide: BID-3089
gcugccagugcuggcucccca

SEQ ID NO: 41255 - RNA, 22 nt, Artificial Sequence
  Synthetic oligonucleotide: BID-3090
agcugccagugcuggcucccca

SEQ ID NO: 41256 - RNA, 23 nt, Artificial Sequence
  Synthetic oligonucleotide: BID-3091
gagcugccagugcuggcucccca

SEQ ID NO: 41257 - RNA, 24 nt, Artificial Sequence
  Synthetic oligonucleotide: BID-3092
cgagcugccagugcuggcucccca

SEQ ID NO: 41258 - RNA, 18 nt, Artificial Sequence
  Synthetic oligonucleotide: BID-3093
ucccuuuccaggucgcca

SEQ ID NO: 41259 - RNA, 19 nt, Artificial Sequence
  Synthetic oligonucleotide: BID-3094
gucccuuuccaggucgcca

SEQ ID NO: 41260 - RNA, 20 nt, Artificial Sequence
  Synthetic oligonucleotide: BID-378
ugucccuuuccaggucgcca

SEQ ID NO: 41261 - RNA, 21 nt, Artificial Sequence
  Synthetic oligonucleotide: BID-3095
gugucccuuuccaggucgcca

SEQ ID NO: 41262 - RNA, 22 nt, Artificial Sequence
  Synthetic oligonucleotide: BID-3096
ugugucccuuuccaggucgcca

SEQ ID NO: 41263 - RNA, 23 nt, Artificial Sequence
  Synthetic oligonucleotide: BID-3097
gugugucccuuuccaggucgcca

SEQ ID NO: 41264 - RNA, 24 nt, Artificial Sequence
  Synthetic oligonucleotide: BID-3098
ugugugucccuuuccaggucgcca

SEQ ID NO: 41265 - RNA, 18 nt, Artificial Sequence
  Synthetic oligonucleotide: BID-3099
cgcagagagcuggacgca

SEQ ID NO: 41266 - RNA, 19 nt, Artificial Sequence
  Synthetic oligonucleotide: BID-3100
ccgcagagagcuggacgca

SEQ ID NO: 41267 - RNA, 20 nt, Artificial Sequence
  Synthetic oligonucleotide: BID-396
uccgcagagagcuggacgca

SEQ ID NO: 41268 - RNA, 21 nt, Artificial Sequence
  Synthetic oligonucleotide: BID-3101
uuccgcagagagcuggacgca

SEQ ID NO: 41269 - RNA, 22 nt, Artificial Sequence
  Synthetic oligonucleotide: BID-3102
cuuccgcagagagcuggacgca

SEQ ID NO: 41270 - RNA, 23 nt, Artificial Sequence
  Synthetic oligonucleotide: BID-3103
gcuuccgcagagagcuggacgca

SEQ ID NO: 41271 - RNA, 24 nt, Artificial Sequence
  Synthetic oligonucleotide: BID-3104
agcuuccgcagagagcuggacgca

SEQ ID NO: 41272 - RNA, 18 nt, Artificial Sequence
  Synthetic oligonucleotide: BID-3105
cugacaacagcuuccgca

SEQ ID NO: 41273 - RNA, 19 nt, Artificial Sequence
  Synthetic oligonucleotide: BID-3106
ucugacaacagcuuccgca

SEQ ID NO: 41274 - RNA, 20 nt, Artificial Sequence
  Synthetic oligonucleotide: BID-394
uucugacaacagcuuccgca

SEQ ID NO: 41275 - RNA, 21 nt, Artificial Sequence
  Synthetic oligonucleotide: BID-3107
guucugacaacagcuuccgca

SEQ ID NO: 41276 - RNA, 22 nt, Artificial Sequence
  Synthetic oligonucleotide: BID-3108
uguucugacaacagcuuccgca

SEQ ID NO: 41277 - RNA, 23 nt, Artificial Sequence
  Synthetic oligonucleotide: BID-3109
cuguucugacaacagcuuccgca

SEQ ID NO: 41278 - RNA, 24 nt, Artificial Sequence
  Synthetic oligonucleotide: BID-3110
gcuguucugacaacagcuuccgca

SEQ ID NO: 41279 - RNA, 18 nt, Artificial Sequence
  Synthetic oligonucleotide: BID-3111
augauggcucggugggca

SEQ ID NO: 41280 - RNA, 19 nt, Artificial Sequence
  Synthetic oligonucleotide: BID-3112
caugauggcucggugggca

SEQ ID NO: 41281 - RNA, 20 nt, Artificial Sequence
  Synthetic oligonucleotide: BID-364
ucaugauggcucggugggca

SEQ ID NO: 41282 - RNA, 21 nt, Artificial Sequence
  Synthetic oligonucleotide: BID-3113
gucaugauggcucggugggca

SEQ ID NO: 41283 - RNA, 22 nt, Artificial Sequence
  Synthetic oligonucleotide: BID-3114
ggucaugauggcucggugggca

SEQ ID NO: 41284 - RNA, 23 nt, Artificial Sequence
  Synthetic oligonucleotide: BID-3115
gggucaugauggcucggugggca

SEQ ID NO: 41285 - RNA, 24 nt, Artificial Sequence
  Synthetic oligonucleotide: BID-3116
ggggucaugauggcucggugggca

SEQ ID NO: 41286 - RNA, 18 nt, Artificial Sequence
  Synthetic oligonucleotide: BID-3117
acccuagagacauggaga

SEQ ID NO: 41287 - RNA, 19 nt, Artificial Sequence
  Synthetic oligonucleotide: BID-3118
uacccuagagacauggaga

SEQ ID NO: 41288 - RNA, 20 nt, Artificial Sequence
  Synthetic oligonucleotide: BID-286
cuacccuagagacauggaga

SEQ ID NO: 41289 - RNA, 21 nt, Artificial Sequence
  Synthetic oligonucleotide: BID-3119
ccuacccuagagacauggaga

SEQ ID NO: 41290 - RNA, 22 nt, Artificial Sequence
  Synthetic oligonucleotide: BID-3120
gccuacccuagagacauggaga

SEQ ID NO: 41291 - RNA, 23 nt, Artificial Sequence
  Synthetic oligonucleotide: BID-3121
ggccuacccuagagacauggaga

SEQ ID NO: 41292 - RNA, 24 nt, Artificial Sequence
  Synthetic oligonucleotide: BID-3122
aggccuacccuagagacauggaga

SEQ ID NO: 41293 - RNA, 18 nt, Artificial Sequence
  Synthetic oligonucleotide: BID-3123
gugccccucugugcagga

SEQ ID NO: 41294 - RNA, 19 nt, Artificial Sequence
  Synthetic oligonucleotide: BID-3124
ugugccccucugugcagga

SEQ ID NO: 41295 - RNA, 20 nt, Artificial Sequence
  Synthetic oligonucleotide: BID-613
gugugccccucugugcagga

SEQ ID NO: 41296 - RNA, 21 nt, Artificial Sequence
  Synthetic oligonucleotide: BID-3125
ugugugccccucugugcagga

SEQ ID NO: 41297 - RNA, 22 nt, Artificial Sequence
  Synthetic oligonucleotide: BID-3126
cugugugccccucugugcagga

SEQ ID NO: 41298 - RNA, 23 nt, Artificial Sequence
  Synthetic oligonucleotide: BID-3127
ucugugugccccucugugcagga

SEQ ID NO: 41299 - RNA, 24 nt, Artificial Sequence
  Synthetic oligonucleotide: BID-3128
uucugugugccccucugugcagga

SEQ ID NO: 41300 - RNA, 18 nt, Artificial Sequence
  Synthetic oligonucleotide: BID-3129
cuugcucuaggggaugga

SEQ ID NO: 41301 - RNA, 19 nt, Artificial Sequence
  Synthetic oligonucleotide: BID-3130
ucuugcucuaggggaugga

SEQ ID NO: 41302 - RNA, 20 nt, Artificial Sequence
  Synthetic oligonucleotide: BID-3131
uucuugcucuaggggaugga

SEQ ID NO: 41303 - RNA, 21 nt, Artificial Sequence
  Synthetic oligonucleotide: BID-3132
uuucuugcucuaggggaugga

SEQ ID NO: 41304 - RNA, 22 nt, Artificial Sequence
  Synthetic oligonucleotide: BID-3133
cuuucuugcucuaggggaugga

SEQ ID NO: 41305 - RNA, 23 nt, Artificial Sequence
  Synthetic oligonucleotide: BID-3134
ccuuucuugcucuaggggaugga

SEQ ID NO: 41306 - RNA, 24 nt, Artificial Sequence
  Synthetic oligonucleotide: BID-3135
uccuuucuugcucuaggggaugga

SEQ ID NO: 41307 - RNA, 18 nt, Artificial Sequence
  Synthetic oligonucleotide: BID-3136
cucuaggggauggacuga

SEQ ID NO: 41308 - RNA, 19 nt, Artificial Sequence
  Synthetic oligonucleotide: BID-3137
gcucuaggggauggacuga

SEQ ID NO: 41309 - RNA, 20 nt, Artificial Sequence
  Synthetic oligonucleotide: BID-3138
ugcucuaggggauggacuga

SEQ ID NO: 41310 - RNA, 21 nt, Artificial Sequence
  Synthetic oligonucleotide: BID-3139
uugcucuaggggauggacuga

SEQ ID NO: 41311 - RNA, 22 nt, Artificial Sequence
  Synthetic oligonucleotide: BID-3140
cuugcucuaggggauggacuga

SEQ ID NO: 41312 - RNA, 23 nt, Artificial Sequence
  Synthetic oligonucleotide: BID-3141
ucuugcucuaggggauggacuga

SEQ ID NO: 41313 - RNA, 24 nt, Artificial Sequence
  Synthetic oligonucleotide: BID-3142
uucuugcucuaggggauggacuga

SEQ ID NO: 41314 - RNA, 18 nt, Artificial Sequence
  Synthetic oligonucleotide: BID-3143
gccggucggaggagguga

SEQ ID NO: 41315 - RNA, 19 nt, Artificial Sequence
  Synthetic oligonucleotide: BID-3144
agccggucggaggagguga

SEQ ID NO: 41316 - RNA, 20 nt, Artificial Sequence
  Synthetic oligonucleotide: BID-426
cagccggucggaggagguga

SEQ ID NO: 41317 - RNA, 21 nt, Artificial Sequence
  Synthetic oligonucleotide: BID-3145
ccagccggucggaggagguga

SEQ ID NO: 41318 - RNA, 22 nt, Artificial Sequence
  Synthetic oligonucleotide: BID-3146
accagccggucggaggagguga

SEQ ID NO: 41319 - RNA, 23 nt, Artificial Sequence
  Synthetic oligonucleotide: BID-3147
caccagccggucggaggagguga

SEQ ID NO: 41320 - RNA, 24 nt, Artificial Sequence
  Synthetic oligonucleotide: BID-3148
acaccagccggucggaggagguga

SEQ ID NO: 41321 - RNA, 18 nt, Artificial Sequence
  Synthetic oligonucleotide: BID-3149
ucugugcaggaccggaac

SEQ ID NO: 41322 - RNA, 19 nt, Artificial Sequence
  Synthetic oligonucleotide: BID-3150
cucugugcaggaccggaac

SEQ ID NO: 41323 - RNA, 20 nt, Artificial Sequence
  Synthetic oligonucleotide: BID-280
ccucugugcaggaccggaac

SEQ ID NO: 41324 - RNA, 21 nt, Artificial Sequence
  Synthetic oligonucleotide: BID-3151
cccucugugcaggaccggaac

SEQ ID NO: 41325 - RNA, 22 nt, Artificial Sequence
  Synthetic oligonucleotide: BID-3152
ccccucugugcaggaccggaac

SEQ ID NO: 41326 - RNA, 23 nt, Artificial Sequence
  Synthetic oligonucleotide: BID-3153
gccccucugugcaggaccggaac

SEQ ID NO: 41327 - RNA, 24 nt, Artificial Sequence
  Synthetic oligonucleotide: BID-3154
ugccccucugugcaggaccggaac

SEQ ID NO: 41328 - RNA, 18 nt, Artificial Sequence
  Synthetic oligonucleotide: BID-3155
cacugggacacugugaac

SEQ ID NO: 41329 - RNA, 19 nt, Artificial Sequence
  Synthetic oligonucleotide: BID-3156
ccacugggacacugugaac

SEQ ID NO: 41330 - RNA, 20 nt, Artificial Sequence
  Synthetic oligonucleotide: BID-381
gccacugggacacugugaac

SEQ ID NO: 41331 - RNA, 21 nt, Artificial Sequence
  Synthetic oligonucleotide: BID-3157
cgccacugggacacugugaac

SEQ ID NO: 41332 - RNA, 22 nt, Artificial Sequence
  Synthetic oligonucleotide: BID-3158
ucgccacugggacacugugaac

SEQ ID NO: 41333 - RNA, 23 nt, Artificial Sequence
  Synthetic oligonucleotide: BID-3159
gucgccacugggacacugugaac

SEQ ID NO: 41334 - RNA, 24 nt, Artificial Sequence
  Synthetic oligonucleotide: BID-3160
ggucgccacugggacacugugaac

SEQ ID NO: 41335 - RNA, 18 nt, Artificial Sequence
  Synthetic oligonucleotide: BID-3161
acagugaauuuuauuaac

SEQ ID NO: 41336 - RNA, 19 nt, Artificial Sequence
  Synthetic oligonucleotide: BID-3162
aacagugaauuuuauuaac

SEQ ID NO: 41337 - RNA, 20 nt, Artificial Sequence
  Synthetic oligonucleotide: BID-628
caacagugaauuuuauuaac

SEQ ID NO: 41338 - RNA, 21 nt, Artificial Sequence
  Synthetic oligonucleotide: BID-3163
acaacagugaauuuuauuaac

SEQ ID NO: 41339 - RNA, 22 nt, Artificial Sequence
  Synthetic oligonucleotide: BID-3164
cacaacagugaauuuuauuaac

SEQ ID NO: 41340 - RNA, 23 nt, Artificial Sequence
  Synthetic oligonucleotide: BID-3165
acacaacagugaauuuuauuaac

SEQ ID NO: 41341 - RNA, 24 nt, Artificial Sequence
  Synthetic oligonucleotide: BID-3166
cacacaacagugaauuuuauuaac

SEQ ID NO: 41342 - RNA, 18 nt, Artificial Sequence
  Synthetic oligonucleotide: BID-3167
cccuuuccaggucgccac

SEQ ID NO: 41343 - RNA, 19 nt, Artificial Sequence
  Synthetic oligonucleotide: BID-3168
ucccuuuccaggucgccac

SEQ ID NO: 41344 - RNA, 20 nt, Artificial Sequence
  Synthetic oligonucleotide: BID-59
gucccuuuccaggucgccac

SEQ ID NO: 41345 - RNA, 21 nt, Artificial Sequence
  Synthetic oligonucleotide: BID-3169
ugucccuuuccaggucgccac

SEQ ID NO: 41346 - RNA, 22 nt, Artificial Sequence
  Synthetic oligonucleotide: BID-3170
gugucccuuuccaggucgccac

SEQ ID NO: 41347 - RNA, 23 nt, Artificial Sequence
  Synthetic oligonucleotide: BID-3171
ugugucccuuuccaggucgccac

SEQ ID NO: 41348 - RNA, 24 nt, Artificial Sequence
  Synthetic oligonucleotide: BID-3172
gugugucccuuuccaggucgccac

SEQ ID NO: 41349 - RNA, 18 nt, Artificial Sequence
  Synthetic oligonucleotide: BID-3173
caggccuacccuagagac

SEQ ID NO: 41350 - RNA, 19 nt, Artificial Sequence
  Synthetic oligonucleotide: BID-3174
gcaggccuacccuagagac

SEQ ID NO: 41351 - RNA, 20 nt, Artificial Sequence
  Synthetic oligonucleotide: BID-620
ugcaggccuacccuagagac

SEQ ID NO: 41352 - RNA, 21 nt, Artificial Sequence
  Synthetic oligonucleotide: BID-3175
cugcaggccuacccuagagac

SEQ ID NO: 41353 - RNA, 22 nt, Artificial Sequence
  Synthetic oligonucleotide: BID-3176
gcugcaggccuacccuagagac

SEQ ID NO: 41354 - RNA, 23 nt, Artificial Sequence
  Synthetic oligonucleotide: BID-3177
ugcugcaggccuacccuagagac

SEQ ID NO: 41355 - RNA, 24 nt, Artificial Sequence
  Synthetic oligonucleotide: BID-3178
cugcugcaggccuacccuagagac

SEQ ID NO: 41356 - RNA, 18 nt, Artificial Sequence
  Synthetic oligonucleotide: BID-3179
ugccccucugugcaggac

SEQ ID NO: 41357 - RNA, 19 nt, Artificial Sequence
  Synthetic oligonucleotide: BID-3180
gugccccucugugcaggac

SEQ ID NO: 41358 - RNA, 20 nt, Artificial Sequence
  Synthetic oligonucleotide: BID-279
ugugccccucugugcaggac

SEQ ID NO: 41359 - RNA, 21 nt, Artificial Sequence
  Synthetic oligonucleotide: BID-3181
gugugccccucugugcaggac

SEQ ID NO: 41360 - RNA, 22 nt, Artificial Sequence
  Synthetic oligonucleotide: BID-3182
ugugugccccucugugcaggac

SEQ ID NO: 41361 - RNA, 23 nt, Artificial Sequence
  Synthetic oligonucleotide: BID-3183
cugugugccccucugugcaggac

SEQ ID NO: 41362 - RNA, 24 nt, Artificial Sequence
  Synthetic oligonucleotide: BID-3184
ucugugugccccucugugcaggac

SEQ ID NO: 41363 - RNA, 18 nt, Artificial Sequence
  Synthetic oligonucleotide: BID-3185
cagaaccuacgcaccuac

SEQ ID NO: 41364 - RNA, 19 nt, Artificial Sequence
  Synthetic oligonucleotide: BID-3186
ccagaaccuacgcaccuac

SEQ ID NO: 41365 - RNA, 20 nt, Artificial Sequence
  Synthetic oligonucleotide: BID-629
accagaaccuacgcaccuac

SEQ ID NO: 41366 - RNA, 21 nt, Artificial Sequence
  Synthetic oligonucleotide: BID-3187
aaccagaaccuacgcaccuac

SEQ ID NO: 41367 - RNA, 22 nt, Artificial Sequence
  Synthetic oligonucleotide: BID-3188
uaaccagaaccuacgcaccuac

SEQ ID NO: 41368 - RNA, 23 nt, Artificial Sequence
  Synthetic oligonucleotide: BID-3189
uuaaccagaaccuacgcaccuac

SEQ ID NO: 41369 - RNA, 24 nt, Artificial Sequence
  Synthetic oligonucleotide: BID-3190
auuaaccagaaccuacgcaccuac

SEQ ID NO: 41370 - RNA, 18 nt, Artificial Sequence
  Synthetic oligonucleotide: BID-3191
ccagaaauguaagaaccc

SEQ ID NO: 41371 - RNA, 19 nt, Artificial Sequence
  Synthetic oligonucleotide: BID-3192
gccagaaauguaagaaccc

SEQ ID NO: 41372 - RNA, 20 nt, Artificial Sequence
  Synthetic oligonucleotide: BID-634
agccagaaauguaagaaccc

SEQ ID NO: 41373 - RNA, 21 nt, Artificial Sequence
  Synthetic oligonucleotide: BID-3193
uagccagaaauguaagaaccc

SEQ ID NO: 41374 - RNA, 22 nt, Artificial Sequence
  Synthetic oligonucleotide: BID-3194
uuagccagaaauguaagaaccc

SEQ ID NO: 41375 - RNA, 23 nt, Artificial Sequence
  Synthetic oligonucleotide: BID-3195
cuuagccagaaauguaagaaccc

SEQ ID NO: 41376 - RNA, 24 nt, Artificial Sequence
  Synthetic oligonucleotide: BID-3196
gcuuagccagaaauguaagaaccc

SEQ ID NO: 41377 - RNA, 18 nt, Artificial Sequence
  Synthetic oligonucleotide: BID-3197
gcugcugcaggccuaccc

SEQ ID NO: 41378 - RNA, 19 nt, Artificial Sequence
  Synthetic oligonucleotide: BID-3198
agcugcugcaggccuaccc

SEQ ID NO: 41379 - RNA, 20 nt, Artificial Sequence
  Synthetic oligonucleotide: BID-619
cagcugcugcaggccuaccc

SEQ ID NO: 41380 - RNA, 21 nt, Artificial Sequence
  Synthetic oligonucleotide: BID-3199
gcagcugcugcaggccuaccc

SEQ ID NO: 41381 - RNA, 22 nt, Artificial Sequence
  Synthetic oligonucleotide: BID-3200
agcagcugcugcaggccuaccc

SEQ ID NO: 41382 - RNA, 23 nt, Artificial Sequence
  Synthetic oligonucleotide: BID-3201
gagcagcugcugcaggccuaccc

SEQ ID NO: 41383 - RNA, 24 nt, Artificial Sequence
  Synthetic oligonucleotide: BID-3202
ggagcagcugcugcaggccuaccc

SEQ ID NO: 41384 - RNA, 18 nt, Artificial Sequence
  Synthetic oligonucleotide: BID-3203
gggaccuggccacugccc

SEQ ID NO: 41385 - RNA, 19 nt, Artificial Sequence
  Synthetic oligonucleotide: BID-3204
agggaccuggccacugccc

SEQ ID NO: 41386 - RNA, 20 nt, Artificial Sequence
  Synthetic oligonucleotide: BID-283
cagggaccuggccacugccc

SEQ ID NO: 41387 - RNA, 21 nt, Artificial Sequence
  Synthetic oligonucleotide: BID-3205
acagggaccuggccacugccc

SEQ ID NO: 41388 - RNA, 22 nt, Artificial Sequence
  Synthetic oligonucleotide: BID-3206
aacagggaccuggccacugccc

SEQ ID NO: 41389 - RNA, 23 nt, Artificial Sequence
  Synthetic oligonucleotide: BID-3207
gaacagggaccuggccacugccc

SEQ ID NO: 41390 - RNA, 24 nt, Artificial Sequence
  Synthetic oligonucleotide: BID-3208
ggaacagggaccuggccacugccc

SEQ ID NO: 41391 - RNA, 18 nt, Artificial Sequence
  Synthetic oligonucleotide: BID-3209
ugccgcgcugcccaggcc

SEQ ID NO: 41392 - RNA, 19 nt, Artificial Sequence
  Synthetic oligonucleotide: BID-3210
cugccgcgcugcccaggcc

SEQ ID NO: 41393 - RNA, 20 nt, Artificial Sequence
  Synthetic oligonucleotide: BID-386
gcugccgcgcugcccaggcc

SEQ ID NO: 41394 - RNA, 21 nt, Artificial Sequence
  Synthetic oligonucleotide: BID-3211
agcugccgcgcugcccaggcc

SEQ ID NO: 41395 - RNA, 22 nt, Artificial Sequence
  Synthetic oligonucleotide: BID-3212
gagcugccgcgcugcccaggcc

SEQ ID NO: 41396 - RNA, 23 nt, Artificial Sequence
  Synthetic oligonucleotide: BID-3213
ggagcugccgcgcugcccaggcc

SEQ ID NO: 41397 - RNA, 24 nt, Artificial Sequence
  Synthetic oligonucleotide: BID-3214
cggagcugccgcgcugcccaggcc

SEQ ID NO: 41398 - RNA, 18 nt, Artificial Sequence
  Synthetic oligonucleotide: BID-3215
agcuggacgcacugggcc

SEQ ID NO: 41399 - RNA, 19 nt, Artificial Sequence
  Synthetic oligonucleotide: BID-3216
gagcuggacgcacugggcc

SEQ ID NO: 41400 - RNA, 20 nt, Artificial Sequence
  Synthetic oligonucleotide: BID-397
agagcuggacgcacugggcc

SEQ ID NO: 41401 - RNA, 21 nt, Artificial Sequence
  Synthetic oligonucleotide: BID-3217
gagagcuggacgcacugggcc

SEQ ID NO: 41402 - RNA, 22 nt, Artificial Sequence
  Synthetic oligonucleotide: BID-3218
agagagcuggacgcacugggcc

SEQ ID NO: 41403 - RNA, 23 nt, Artificial Sequence
  Synthetic oligonucleotide: BID-3219
cagagagcuggacgcacugggcc

SEQ ID NO: 41404 - RNA, 24 nt, Artificial Sequence
  Synthetic oligonucleotide: BID-3220
gcagagagcuggacgcacugggcc

SEQ ID NO: 41405 - RNA, 18 nt, Artificial Sequence
  Synthetic oligonucleotide: BID-3221
cuggcccugcugcuggcc

SEQ ID NO: 41406 - RNA, 19 nt, Artificial Sequence
  Synthetic oligonucleotide: BID-3222
gcuggcccugcugcuggcc

SEQ ID NO: 41407 - RNA, 20 nt, Artificial Sequence
  Synthetic oligonucleotide: BID-626
ugcuggcccugcugcuggcc

SEQ ID NO: 41408 - RNA, 21 nt, Artificial Sequence
  Synthetic oligonucleotide: BID-3223
gugcuggcccugcugcuggcc

SEQ ID NO: 41409 - RNA, 22 nt, Artificial Sequence
  Synthetic oligonucleotide: BID-3224
ggugcuggcccugcugcuggcc

SEQ ID NO: 41410 - RNA, 23 nt, Artificial Sequence
  Synthetic oligonucleotide: BID-3225
uggugcuggcccugcugcuggcc

SEQ ID NO: 41411 - RNA, 24 nt, Artificial Sequence
  Synthetic oligonucleotide: BID-3226
cuggugcuggcccugcugcuggcc

SEQ ID NO: 41412 - RNA, 18 nt, Artificial Sequence
  Synthetic oligonucleotide: BID-3227
agggaccuggccacugcc

SEQ ID NO: 41413 - RNA, 19 nt, Artificial Sequence
  Synthetic oligonucleotide: BID-3228
cagggaccuggccacugcc

SEQ ID NO: 41414 - RNA, 20 nt, Artificial Sequence
  Synthetic oligonucleotide: BID-617
acagggaccuggccacugcc

SEQ ID NO: 41415 - RNA, 21 nt, Artificial Sequence
  Synthetic oligonucleotide: BID-3229
aacagggaccuggccacugcc

SEQ ID NO: 41416 - RNA, 22 nt, Artificial Sequence
  Synthetic oligonucleotide: BID-3230
gaacagggaccuggccacugcc

SEQ ID NO: 41417 - RNA, 23 nt, Artificial Sequence
  Synthetic oligonucleotide: BID-3231
ggaacagggaccuggccacugcc

SEQ ID NO: 41418 - RNA, 24 nt, Artificial Sequence
  Synthetic oligonucleotide: BID-3232
cggaacagggaccuggccacugcc

SEQ ID NO: 41419 - RNA, 18 nt, Artificial Sequence
  Synthetic oligonucleotide: BID-3233
gcccaggucggggacagc

SEQ ID NO: 41420 - RNA, 19 nt, Artificial Sequence
  Synthetic oligonucleotide: BID-3234
cgcccaggucggggacagc

SEQ ID NO: 41421 - RNA, 20 nt, Artificial Sequence
  Synthetic oligonucleotide: BID-416
ucgcccaggucggggacagc

SEQ ID NO: 41422 - RNA, 21 nt, Artificial Sequence
  Synthetic oligonucleotide: BID-3235
cucgcccaggucggggacagc

SEQ ID NO: 41423 - RNA, 22 nt, Artificial Sequence
  Synthetic oligonucleotide: BID-3236
ccucgcccaggucggggacagc

SEQ ID NO: 41424 - RNA, 23 nt, Artificial Sequence
  Synthetic oligonucleotide: BID-3237
accucgcccaggucggggacagc

SEQ ID NO: 41425 - RNA, 24 nt, Artificial Sequence
  Synthetic oligonucleotide: BID-3238
caccucgcccaggucggggacagc

SEQ ID NO: 41426 - RNA, 18 nt, Artificial Sequence
  Synthetic oligonucleotide: BID-3239
gauggcucggugggcagc

SEQ ID NO: 41427 - RNA, 19 nt, Artificial Sequence
  Synthetic oligonucleotide: BID-3240
ugauggcucggugggcagc

SEQ ID NO: 41428 - RNA, 20 nt, Artificial Sequence
  Synthetic oligonucleotide: BID-365
augauggcucggugggcagc

SEQ ID NO: 41429 - RNA, 21 nt, Artificial Sequence
  Synthetic oligonucleotide: BID-3241
caugauggcucggugggcagc

SEQ ID NO: 41430 - RNA, 22 nt, Artificial Sequence
  Synthetic oligonucleotide: BID-3242
ucaugauggcucggugggcagc

SEQ ID NO: 41431 - RNA, 23 nt, Artificial Sequence
  Synthetic oligonucleotide: BID-3243
gucaugauggcucggugggcagc

SEQ ID NO: 41432 - RNA, 24 nt, Artificial Sequence
  Synthetic oligonucleotide: BID-3244
ggucaugauggcucggugggcagc

SEQ ID NO: 41433 - RNA, 18 nt, Artificial Sequence
  Synthetic oligonucleotide: BID-3245
cuacgugaggagcuuagc

SEQ ID NO: 41434 - RNA, 19 nt, Artificial Sequence
  Synthetic oligonucleotide: BID-3246
ccuacgugaggagcuuagc

SEQ ID NO: 41435 - RNA, 20 nt, Artificial Sequence
  Synthetic oligonucleotide: BID-632
accuacgugaggagcuuagc

SEQ ID NO: 41436 - RNA, 21 nt, Artificial Sequence
  Synthetic oligonucleotide: BID-3247
caccuacgugaggagcuuagc

SEQ ID NO: 41437 - RNA, 22 nt, Artificial Sequence
  Synthetic oligonucleotide: BID-3248
gcaccuacgugaggagcuuagc

SEQ ID NO: 41438 - RNA, 23 nt, Artificial Sequence
  Synthetic oligonucleotide: BID-3249
cgcaccuacgugaggagcuuagc

SEQ ID NO: 41439 - RNA, 24 nt, Artificial Sequence
  Synthetic oligonucleotide: BID-3250
acgcaccuacgugaggagcuuagc

SEQ ID NO: 41440 - RNA, 18 nt, Artificial Sequence
  Synthetic oligonucleotide: BID-3251
ugagggccugaggaccgc

SEQ ID NO: 41441 - RNA, 19 nt, Artificial Sequence
  Synthetic oligonucleotide: BID-3252
gugagggccugaggaccgc

SEQ ID NO: 41442 - RNA, 20 nt, Artificial Sequence
  Synthetic oligonucleotide: BID-430
agugagggccugaggaccgc

SEQ ID NO: 41443 - RNA, 21 nt, Artificial Sequence
  Synthetic oligonucleotide: BID-3253
gagugagggccugaggaccgc

SEQ ID NO: 41444 - RNA, 22 nt, Artificial Sequence
  Synthetic oligonucleotide: BID-3254
ugagugagggccugaggaccgc

SEQ ID NO: 41445 - RNA, 23 nt, Artificial Sequence
  Synthetic oligonucleotide: BID-3255
gugagugagggccugaggaccgc

SEQ ID NO: 41446 - RNA, 24 nt, Artificial Sequence
  Synthetic oligonucleotide: BID-3256
ggugagugagggccugaggaccgc

SEQ ID NO: 41447 - RNA, 18 nt, Artificial Sequence
  Synthetic oligonucleotide: BID-3257
cgcagcagccacucccgc

SEQ ID NO: 41448 - RNA, 19 nt, Artificial Sequence
  Synthetic oligonucleotide: BID-3258
ccgcagcagccacucccgc

SEQ ID NO: 41449 - RNA, 20 nt, Artificial Sequence
  Synthetic oligonucleotide: BID-403
accgcagcagccacucccgc

SEQ ID NO: 41450 - RNA, 21 nt, Artificial Sequence
  Synthetic oligonucleotide: BID-3259
aaccgcagcagccacucccgc

SEQ ID NO: 41451 - RNA, 22 nt, Artificial Sequence
  Synthetic oligonucleotide: BID-3260
caaccgcagcagccacucccgc

SEQ ID NO: 41452 - RNA, 23 nt, Artificial Sequence
  Synthetic oligonucleotide: BID-3261
gcaaccgcagcagccacucccgc

SEQ ID NO: 41453 - RNA, 24 nt, Artificial Sequence
  Synthetic oligonucleotide: BID-3262
ggcaaccgcagcagccacucccgc

SEQ ID NO: 41454 - RNA, 18 nt, Artificial Sequence
  Synthetic oligonucleotide: BID-3263
gcgaggggccgggccggc

SEQ ID NO: 41455 - RNA, 19 nt, Artificial Sequence
  Synthetic oligonucleotide: BID-3264
agcgaggggccgggccggc

SEQ ID NO: 41456 - RNA, 20 nt, Artificial Sequence
  Synthetic oligonucleotide: BID-23
cagcgaggggccgggccggc

SEQ ID NO: 41457 - RNA, 21 nt, Artificial Sequence
  Synthetic oligonucleotide: BID-3265
gcagcgaggggccgggccggc

SEQ ID NO: 41458 - RNA, 22 nt, Artificial Sequence
  Synthetic oligonucleotide: BID-3266
ggcagcgaggggccgggccggc

SEQ ID NO: 41459 - RNA, 23 nt, Artificial Sequence
  Synthetic oligonucleotide: BID-3267
gggcagcgaggggccgggccggc

SEQ ID NO: 41460 - RNA, 24 nt, Artificial Sequence
  Synthetic oligonucleotide: BID-3268
ugggcagcgaggggccgggccggc

SEQ ID NO: 41461 - RNA, 18 nt, Artificial Sequence
  Synthetic oligonucleotide: BID-3269
gaggaggugagugagggc

SEQ ID NO: 41462 - RNA, 19 nt, Artificial Sequence
  Synthetic oligonucleotide: BID-3270
ggaggaggugagugagggc

SEQ ID NO: 41463 - RNA, 20 nt, Artificial Sequence
  Synthetic oligonucleotide: BID-428
cggaggaggugagugagggc

SEQ ID NO: 41464 - RNA, 21 nt, Artificial Sequence
  Synthetic oligonucleotide: BID-3271
ucggaggaggugagugagggc

SEQ ID NO: 41465 - RNA, 22 nt, Artificial Sequence
  Synthetic oligonucleotide: BID-3272
gucggaggaggugagugagggc

SEQ ID NO: 41466 - RNA, 23 nt, Artificial Sequence
  Synthetic oligonucleotide: BID-3273
ggucggaggaggugagugagggc

SEQ ID NO: 41467 - RNA, 24 nt, Artificial Sequence
  Synthetic oligonucleotide: BID-3274
cggucggaggaggugagugagggc

SEQ ID NO: 41468 - RNA, 18 nt, Artificial Sequence
  Synthetic oligonucleotide: BID-3275
cggauucuguaagugggc

SEQ ID NO: 41469 - RNA, 19 nt, Artificial Sequence
  Synthetic oligonucleotide: BID-3276
gcggauucuguaagugggc

SEQ ID NO: 41470 - RNA, 20 nt, Artificial Sequence
  Synthetic oligonucleotide: BID-6
ugcggauucuguaagugggc

SEQ ID NO: 41471 - RNA, 21 nt, Artificial Sequence
  Synthetic oligonucleotide: BID-3277
gugcggauucuguaagugggc

SEQ ID NO: 41472 - RNA, 22 nt, Artificial Sequence
  Synthetic oligonucleotide: BID-3278
agugcggauucuguaagugggc

SEQ ID NO: 41473 - RNA, 23 nt, Artificial Sequence
  Synthetic oligonucleotide: BID-3279
cagugcggauucuguaagugggc

SEQ ID NO: 41474 - RNA, 24 nt, Artificial Sequence
  Synthetic oligonucleotide: BID-3280
acagugcggauucuguaagugggc

SEQ ID NO: 41475 - RNA, 18 nt, Artificial Sequence
  Synthetic oligonucleotide: BID-3281
ugucucugccgccccugc

SEQ ID NO: 41476 - RNA, 19 nt, Artificial Sequence
  Synthetic oligonucleotide: BID-3282
cugucucugccgccccugc

SEQ ID NO: 41477 - RNA, 20 nt, Artificial Sequence
  Synthetic oligonucleotide: BID-408
ucugucucugccgccccugc

SEQ ID NO: 41478 - RNA, 18 nt, Artificial Sequence
  Synthetic oligonucleotide: BID-3283
ggccuggcccugcagcuc

SEQ ID NO: 41479 - RNA, 19 nt, Artificial Sequence
  Synthetic oligonucleotide: BID-3284
cggccuggcccugcagcuc

SEQ ID NO: 41480 - RNA, 20 nt, Artificial Sequence
  Synthetic oligonucleotide: BID-232
acggccuggcccugcagcuc

SEQ ID NO: 41481 - RNA, 21 nt, Artificial Sequence
  Synthetic oligonucleotide: BID-3285
aacggccuggcccugcagcuc

SEQ ID NO: 41482 - RNA, 22 nt, Artificial Sequence
  Synthetic oligonucleotide: BID-3286
gaacggccuggcccugcagcuc

SEQ ID NO: 41483 - RNA, 23 nt, Artificial Sequence
  Synthetic oligonucleotide: BID-3287
ugaacggccuggcccugcagcuc

SEQ ID NO: 41484 - RNA, 24 nt, Artificial Sequence
  Synthetic oligonucleotide: BID-3288
gugaacggccuggcccugcagcuc

SEQ ID NO: 41485 - RNA, 18 nt, Artificial Sequence
  Synthetic oligonucleotide: BID-3289
uuuucuccuuucuugcuc

SEQ ID NO: 41486 - RNA, 19 nt, Artificial Sequence
  Synthetic oligonucleotide: BID-3290
uuuuucuccuuucuugcuc

SEQ ID NO: 41487 - RNA, 20 nt, Artificial Sequence
  Synthetic oligonucleotide: BID-3291
cuuuuucuccuuucuugcuc

SEQ ID NO: 41488 - RNA, 21 nt, Artificial Sequence
  Synthetic oligonucleotide: BID-3292
gcuuuuucuccuuucuugcuc

SEQ ID NO: 41489 - RNA, 22 nt, Artificial Sequence
  Synthetic oligonucleotide: BID-3293
ggcuuuuucuccuuucuugcuc

SEQ ID NO: 41490 - RNA, 23 nt, Artificial Sequence
  Synthetic oligonucleotide: BID-3294
uggcuuuuucuccuuucuugcuc

SEQ ID NO: 41491 - RNA, 24 nt, Artificial Sequence
  Synthetic oligonucleotide: BID-3295
cuggcuuuuucuccuuucuugcuc

SEQ ID NO: 41492 - RNA, 18 nt, Artificial Sequence
  Synthetic oligonucleotide: BID-3296
acacagauucugaaaguc

SEQ ID NO: 41493 - RNA, 19 nt, Artificial Sequence
  Synthetic oligonucleotide: BID-3297
aacacagauucugaaaguc

SEQ ID NO: 41494 - RNA, 20 nt, Artificial Sequence
  Synthetic oligonucleotide: BID-410
gaacacagauucugaaaguc

SEQ ID NO: 41495 - RNA, 21 nt, Artificial Sequence
  Synthetic oligonucleotide: BID-3298
ugaacacagauucugaaaguc

SEQ ID NO: 41496 - RNA, 22 nt, Artificial Sequence
  Synthetic oligonucleotide: BID-3299
cugaacacagauucugaaaguc

SEQ ID NO: 41497 - RNA, 23 nt, Artificial Sequence
  Synthetic oligonucleotide: BID-3300
ccugaacacagauucugaaaguc

SEQ ID NO: 41498 - RNA, 24 nt, Artificial Sequence
  Synthetic oligonucleotide: BID-3301
gccugaacacagauucugaaaguc

SEQ ID NO: 41499 - RNA, 18 nt, Artificial Sequence
  Synthetic oligonucleotide: BID-3302
aggcaccucgcccagguc

SEQ ID NO: 41500 - RNA, 19 nt, Artificial Sequence
  Synthetic oligonucleotide: BID-3303
caggcaccucgcccagguc

SEQ ID NO: 41501 - RNA, 20 nt, Artificial Sequence
  Synthetic oligonucleotide: BID-234
ccaggcaccucgcccagguc

SEQ ID NO: 41502 - RNA, 21 nt, Artificial Sequence
  Synthetic oligonucleotide: BID-3304
gccaggcaccucgcccagguc

SEQ ID NO: 41503 - RNA, 22 nt, Artificial Sequence
  Synthetic oligonucleotide: BID-3305
ugccaggcaccucgcccagguc

SEQ ID NO: 41504 - RNA, 23 nt, Artificial Sequence
  Synthetic oligonucleotide: BID-3306
uugccaggcaccucgcccagguc

SEQ ID NO: 41505 - RNA, 24 nt, Artificial Sequence
  Synthetic oligonucleotide: BID-3307
auugccaggcaccucgcccagguc

SEQ ID NO: 41506 - RNA, 18 nt, Artificial Sequence
  Synthetic oligonucleotide: BID-3308
ggacugaacggacaguuc

SEQ ID NO: 41507 - RNA, 19 nt, Artificial Sequence
  Synthetic oligonucleotide: BID-3309
uggacugaacggacaguuc

SEQ ID NO: 41508 - RNA, 20 nt, Artificial Sequence
  Synthetic oligonucleotide: BID-3310
auggacugaacggacaguuc

SEQ ID NO: 41509 - RNA, 21 nt, Artificial Sequence
  Synthetic oligonucleotide: BID-3311
gauggacugaacggacaguuc

SEQ ID NO: 41510 - RNA, 22 nt, Artificial Sequence
  Synthetic oligonucleotide: BID-3312
ggauggacugaacggacaguuc

SEQ ID NO: 41511 - RNA, 23 nt, Artificial Sequence
  Synthetic oligonucleotide: BID-3313
gggauggacugaacggacaguuc

SEQ ID NO: 41512 - RNA, 24 nt, Artificial Sequence
  Synthetic oligonucleotide: BID-3314
ggggauggacugaacggacaguuc

SEQ ID NO: 41513 - RNA, 18 nt, Artificial Sequence
  Synthetic oligonucleotide: BID-3315
ccuagagacauggagaag

SEQ ID NO: 41514 - RNA, 19 nt, Artificial Sequence
  Synthetic oligonucleotide: BID-3316
cccuagagacauggagaag

SEQ ID NO: 41515 - RNA, 20 nt, Artificial Sequence
  Synthetic oligonucleotide: BID-625
acccuagagacauggagaag

SEQ ID NO: 41516 - RNA, 21 nt, Artificial Sequence
  Synthetic oligonucleotide: BID-3317
uacccuagagacauggagaag

SEQ ID NO: 41517 - RNA, 22 nt, Artificial Sequence
  Synthetic oligonucleotide: BID-3318
cuacccuagagacauggagaag

SEQ ID NO: 41518 - RNA, 23 nt, Artificial Sequence
  Synthetic oligonucleotide: BID-3319
ccuacccuagagacauggagaag

SEQ ID NO: 41519 - RNA, 24 nt, Artificial Sequence
  Synthetic oligonucleotide: BID-3320
gccuacccuagagacauggagaag

SEQ ID NO: 41520 - RNA, 18 nt, Artificial Sequence
  Synthetic oligonucleotide: BID-3321
ccagugcuggcuccccag

SEQ ID NO: 41521 - RNA, 19 nt, Artificial Sequence
  Synthetic oligonucleotide: BID-3322
gccagugcuggcuccccag

SEQ ID NO: 41522 - RNA, 20 nt, Artificial Sequence
  Synthetic oligonucleotide: BID-139
ugccagugcuggcuccccag

SEQ ID NO: 41523 - RNA, 21 nt, Artificial Sequence
  Synthetic oligonucleotide: BID-3323
cugccagugcuggcuccccag

SEQ ID NO: 41524 - RNA, 22 nt, Artificial Sequence
  Synthetic oligonucleotide: BID-3324
gcugccagugcuggcuccccag

SEQ ID NO: 41525 - RNA, 23 nt, Artificial Sequence
  Synthetic oligonucleotide: BID-3325
agcugccagugcuggcuccccag

SEQ ID NO: 41526 - RNA, 24 nt, Artificial Sequence
  Synthetic oligonucleotide: BID-3326
gagcugccagugcuggcuccccag

SEQ ID NO: 41527 - RNA, 18 nt, Artificial Sequence
  Synthetic oligonucleotide: BID-3327
aacagcuuccgcagagag

SEQ ID NO: 41528 - RNA, 19 nt, Artificial Sequence
  Synthetic oligonucleotide: BID-3328
caacagcuuccgcagagag

SEQ ID NO: 41529 - RNA, 20 nt, Artificial Sequence
  Synthetic oligonucleotide: BID-395
acaacagcuuccgcagagag

SEQ ID NO: 41530 - RNA, 21 nt, Artificial Sequence
  Synthetic oligonucleotide: BID-3329
gacaacagcuuccgcagagag

SEQ ID NO: 41531 - RNA, 22 nt, Artificial Sequence
  Synthetic oligonucleotide: BID-3330
ugacaacagcuuccgcagagag

SEQ ID NO: 41532 - RNA, 23 nt, Artificial Sequence
  Synthetic oligonucleotide: BID-3331
cugacaacagcuuccgcagagag

SEQ ID NO: 41533 - RNA, 24 nt, Artificial Sequence
  Synthetic oligonucleotide: BID-3332
ucugacaacagcuuccgcagagag

SEQ ID NO: 41534 - RNA, 18 nt, Artificial Sequence
  Synthetic oligonucleotide: BID-3333
uacccuagagacauggag

SEQ ID NO: 41535 - RNA, 19 nt, Artificial Sequence
  Synthetic oligonucleotide: BID-3334
cuacccuagagacauggag

SEQ ID NO: 41536 - RNA, 20 nt, Artificial Sequence
  Synthetic oligonucleotide: BID-623
ccuacccuagagacauggag

SEQ ID NO: 41537 - RNA, 21 nt, Artificial Sequence
  Synthetic oligonucleotide: BID-3335
gccuacccuagagacauggag

SEQ ID NO: 41538 - RNA, 22 nt, Artificial Sequence
  Synthetic oligonucleotide: BID-3336
ggccuacccuagagacauggag

SEQ ID NO: 41539 - RNA, 23 nt, Artificial Sequence
  Synthetic oligonucleotide: BID-3337
aggccuacccuagagacauggag

SEQ ID NO: 41540 - RNA, 24 nt, Artificial Sequence
  Synthetic oligonucleotide: BID-3338
caggccuacccuagagacauggag

SEQ ID NO: 41541 - RNA, 18 nt, Artificial Sequence
  Synthetic oligonucleotide: BID-3339
cugugaaccaggagugag

SEQ ID NO: 41542 - RNA, 19 nt, Artificial Sequence
  Synthetic oligonucleotide: BID-3340
acugugaaccaggagugag

SEQ ID NO: 41543 - RNA, 20 nt, Artificial Sequence
  Synthetic oligonucleotide: BID-384
cacugugaaccaggagugag

SEQ ID NO: 41544 - RNA, 21 nt, Artificial Sequence
  Synthetic oligonucleotide: BID-3341
acacugugaaccaggagugag

SEQ ID NO: 41545 - RNA, 22 nt, Artificial Sequence
  Synthetic oligonucleotide: BID-3342
gacacugugaaccaggagugag

SEQ ID NO: 41546 - RNA, 23 nt, Artificial Sequence
  Synthetic oligonucleotide: BID-3343
ggacacugugaaccaggagugag

SEQ ID NO: 41547 - RNA, 24 nt, Artificial Sequence
  Synthetic oligonucleotide: BID-3344
gggacacugugaaccaggagugag

SEQ ID NO: 41548 - RNA, 18 nt, Artificial Sequence
  Synthetic oligonucleotide: BID-3345
cccagugggagggcuacg

SEQ ID NO: 41549 - RNA, 19 nt, Artificial Sequence
  Synthetic oligonucleotide: BID-3346
ccccagugggagggcuacg

SEQ ID NO: 41550 - RNA, 20 nt, Artificial Sequence
  Synthetic oligonucleotide: BID-402
uccccagugggagggcuacg

SEQ ID NO: 41551 - RNA, 21 nt, Artificial Sequence
  Synthetic oligonucleotide: BID-3347
cuccccagugggagggcuacg

SEQ ID NO: 41552 - RNA, 22 nt, Artificial Sequence
  Synthetic oligonucleotide: BID-3348
gcuccccagugggagggcuacg

SEQ ID NO: 41553 - RNA, 23 nt, Artificial Sequence
  Synthetic oligonucleotide: BID-3349
ggcuccccagugggagggcuacg

SEQ ID NO: 41554 - RNA, 24 nt, Artificial Sequence
  Synthetic oligonucleotide: BID-3350
uggcuccccagugggagggcuacg

SEQ ID NO: 41555 - RNA, 18 nt, Artificial Sequence
  Synthetic oligonucleotide: BID-3351
uucugacaacagcuuccg

SEQ ID NO: 41556 - RNA, 19 nt, Artificial Sequence
  Synthetic oligonucleotide: BID-3352
guucugacaacagcuuccg

SEQ ID NO: 41557 - RNA, 20 nt, Artificial Sequence
  Synthetic oligonucleotide: BID-393
uguucugacaacagcuuccg

SEQ ID NO: 41558 - RNA, 21 nt, Artificial Sequence
  Synthetic oligonucleotide: BID-3353
cuguucugacaacagcuuccg

SEQ ID NO: 41559 - RNA, 22 nt, Artificial Sequence
  Synthetic oligonucleotide: BID-3354
gcuguucugacaacagcuuccg

SEQ ID NO: 41560 - RNA, 23 nt, Artificial Sequence
  Synthetic oligonucleotide: BID-3355
agcuguucugacaacagcuuccg

SEQ ID NO: 41561 - RNA, 24 nt, Artificial Sequence
  Synthetic oligonucleotide: BID-3356
aagcuguucugacaacagcuuccg

SEQ ID NO: 41562 - RNA, 18 nt, Artificial Sequence
  Synthetic oligonucleotide: BID-3357
auggcucggugggcagcg

SEQ ID NO: 41563 - RNA, 19 nt, Artificial Sequence
  Synthetic oligonucleotide: BID-3358
gauggcucggugggcagcg

SEQ ID NO: 41564 - RNA, 20 nt, Artificial Sequence
  Synthetic oligonucleotide: BID-9
ugauggcucggugggcagcg

SEQ ID NO: 41565 - RNA, 21 nt, Artificial Sequence
  Synthetic oligonucleotide: BID-3359
augauggcucggugggcagcg

SEQ ID NO: 41566 - RNA, 22 nt, Artificial Sequence
  Synthetic oligonucleotide: BID-3360
caugauggcucggugggcagcg

SEQ ID NO: 41567 - RNA, 23 nt, Artificial Sequence
  Synthetic oligonucleotide: BID-3361
ucaugauggcucggugggcagcg

SEQ ID NO: 41568 - RNA, 24 nt, Artificial Sequence
  Synthetic oligonucleotide: BID-3362
gucaugauggcucggugggcagcg

SEQ ID NO: 41569 - RNA, 18 nt, Artificial Sequence
  Synthetic oligonucleotide: BID-3363
uggggucaugauggcucg

SEQ ID NO: 41570 - RNA, 19 nt, Artificial Sequence
  Synthetic oligonucleotide: BID-3364
cuggggucaugauggcucg

SEQ ID NO: 41571 - RNA, 20 nt, Artificial Sequence
  Synthetic oligonucleotide: BID-363
gcuggggucaugauggcucg

SEQ ID NO: 41572 - RNA, 21 nt, Artificial Sequence
  Synthetic oligonucleotide: BID-3365
ugcuggggucaugauggcucg

SEQ ID NO: 41573 - RNA, 22 nt, Artificial Sequence
  Synthetic oligonucleotide: BID-3366
gugcuggggucaugauggcucg

SEQ ID NO: 41574 - RNA, 23 nt, Artificial Sequence
  Synthetic oligonucleotide: BID-3367
ggugcuggggucaugauggcucg

SEQ ID NO: 41575 - RNA, 24 nt, Artificial Sequence
  Synthetic oligonucleotide: BID-3368
cggugcuggggucaugauggcucg

SEQ ID NO: 41576 - RNA, 18 nt, Artificial Sequence
  Synthetic oligonucleotide: BID-3369
aggaacaccagccggucg

SEQ ID NO: 41577 - RNA, 19 nt, Artificial Sequence
  Synthetic oligonucleotide: BID-3370
caggaacaccagccggucg

SEQ ID NO: 41578 - RNA, 20 nt, Artificial Sequence
  Synthetic oligonucleotide: BID-423
ucaggaacaccagccggucg

SEQ ID NO: 41579 - RNA, 21 nt, Artificial Sequence
  Synthetic oligonucleotide: BID-3371
cucaggaacaccagccggucg

SEQ ID NO: 41580 - RNA, 22 nt, Artificial Sequence
  Synthetic oligonucleotide: BID-3372
gcucaggaacaccagccggucg

SEQ ID NO: 41581 - RNA, 23 nt, Artificial Sequence
  Synthetic oligonucleotide: BID-3373
agcucaggaacaccagccggucg

SEQ ID NO: 41582 - RNA, 24 nt, Artificial Sequence
  Synthetic oligonucleotide: BID-3374
cagcucaggaacaccagccggucg

SEQ ID NO: 41583 - RNA, 18 nt, Artificial Sequence
  Synthetic oligonucleotide: BID-3375
ccaggcaccucgcccagg

SEQ ID NO: 41584 - RNA, 19 nt, Artificial Sequence
  Synthetic oligonucleotide: BID-3376
gccaggcaccucgcccagg

SEQ ID NO: 41585 - RNA, 20 nt, Artificial Sequence
  Synthetic oligonucleotide: BID-413
ugccaggcaccucgcccagg

SEQ ID NO: 41586 - RNA, 21 nt, Artificial Sequence
  Synthetic oligonucleotide: BID-3377
uugccaggcaccucgcccagg

SEQ ID NO: 41587 - RNA, 22 nt, Artificial Sequence
  Synthetic oligonucleotide: BID-3378
auugccaggcaccucgcccagg

SEQ ID NO: 41588 - RNA, 23 nt, Artificial Sequence
  Synthetic oligonucleotide: BID-3379
uauugccaggcaccucgcccagg

SEQ ID NO: 41589 - RNA, 24 nt, Artificial Sequence
  Synthetic oligonucleotide: BID-3380
auauugccaggcaccucgcccagg

SEQ ID NO: 41590 - RNA, 18 nt, Artificial Sequence
  Synthetic oligonucleotide: BID-3381
cucaggaacaccagccgg

SEQ ID NO: 41591 - RNA, 19 nt, Artificial Sequence
  Synthetic oligonucleotide: BID-3382
gcucaggaacaccagccgg

SEQ ID NO: 41592 - RNA, 20 nt, Artificial Sequence
  Synthetic oligonucleotide: BID-421
agcucaggaacaccagccgg

SEQ ID NO: 41593 - RNA, 21 nt, Artificial Sequence
  Synthetic oligonucleotide: BID-3383
cagcucaggaacaccagccgg

SEQ ID NO: 41594 - RNA, 22 nt, Artificial Sequence
  Synthetic oligonucleotide: BID-3384
gcagcucaggaacaccagccgg

SEQ ID NO: 41595 - RNA, 23 nt, Artificial Sequence
  Synthetic oligonucleotide: BID-3385
ugcagcucaggaacaccagccgg

SEQ ID NO: 41596 - RNA, 24 nt, Artificial Sequence
  Synthetic oligonucleotide: BID-3386
cugcagcucaggaacaccagccgg

SEQ ID NO: 41597 - RNA, 18 nt, Artificial Sequence
  Synthetic oligonucleotide: BID-3387
agcgaggggccgggccgg

SEQ ID NO: 41598 - RNA, 19 nt, Artificial Sequence
  Synthetic oligonucleotide: BID-3388
cagcgaggggccgggccgg

SEQ ID NO: 41599 - RNA, 20 nt, Artificial Sequence
  Synthetic oligonucleotide: BID-368
gcagcgaggggccgggccgg

SEQ ID NO: 41600 - RNA, 21 nt, Artificial Sequence
  Synthetic oligonucleotide: BID-3389
ggcagcgaggggccgggccgg

SEQ ID NO: 41601 - RNA, 22 nt, Artificial Sequence
  Synthetic oligonucleotide: BID-3390
gggcagcgaggggccgggccgg

SEQ ID NO: 41602 - RNA, 23 nt, Artificial Sequence
  Synthetic oligonucleotide: BID-3391
ugggcagcgaggggccgggccgg

SEQ ID NO: 41603 - RNA, 24 nt, Artificial Sequence
  Synthetic oligonucleotide: BID-3392
gugggcagcgaggggccgggccgg

SEQ ID NO: 41604 - RNA, 18 nt, Artificial Sequence
  Synthetic oligonucleotide: BID-3393
ggaacaccagccggucgg

SEQ ID NO: 41605 - RNA, 19 nt, Artificial Sequence
  Synthetic oligonucleotide: BID-3394
aggaacaccagccggucgg

SEQ ID NO: 41606 - RNA, 20 nt, Artificial Sequence
  Synthetic oligonucleotide: BID-200
caggaacaccagccggucgg

SEQ ID NO: 41607 - RNA, 21 nt, Artificial Sequence
  Synthetic oligonucleotide: BID-3395
ucaggaacaccagccggucgg

SEQ ID NO: 41608 - RNA, 22 nt, Artificial Sequence
  Synthetic oligonucleotide: BID-3396
cucaggaacaccagccggucgg

SEQ ID NO: 41609 - RNA, 23 nt, Artificial Sequence
  Synthetic oligonucleotide: BID-3397
gcucaggaacaccagccggucgg

SEQ ID NO: 41610 - RNA, 24 nt, Artificial Sequence
  Synthetic oligonucleotide: BID-3398
agcucaggaacaccagccggucgg

SEQ ID NO: 41611 - RNA, 18 nt, Artificial Sequence
  Synthetic oligonucleotide: BID-3399
ucggugggcagcgagggg

SEQ ID NO: 41612 - RNA, 19 nt, Artificial Sequence
  Synthetic oligonucleotide: BID-3400
cucggugggcagcgagggg

SEQ ID NO: 41613 - RNA, 20 nt, Artificial Sequence
  Synthetic oligonucleotide: BID-367
gcucggugggcagcgagggg

SEQ ID NO: 41614 - RNA, 21 nt, Artificial Sequence
  Synthetic oligonucleotide: BID-3401
ggcucggugggcagcgagggg

SEQ ID NO: 41615 - RNA, 22 nt, Artificial Sequence
  Synthetic oligonucleotide: BID-3402
uggcucggugggcagcgagggg

SEQ ID NO: 41616 - RNA, 23 nt, Artificial Sequence
  Synthetic oligonucleotide: BID-3403
auggcucggugggcagcgagggg

SEQ ID NO: 41617 - RNA, 24 nt, Artificial Sequence
  Synthetic oligonucleotide: BID-3404
gauggcucggugggcagcgagggg

SEQ ID NO: 41618 - RNA, 18 nt, Artificial Sequence
  Synthetic oligonucleotide: BID-3405
ccuuucuugcucuagggg

SEQ ID NO: 41619 - RNA, 19 nt, Artificial Sequence
  Synthetic oligonucleotide: BID-3406
uccuuucuugcucuagggg

SEQ ID NO: 41620 - RNA, 20 nt, Artificial Sequence
  Synthetic oligonucleotide: BID-3407
cuccuuucuugcucuagggg

SEQ ID NO: 41621 - RNA, 21 nt, Artificial Sequence
  Synthetic oligonucleotide: BID-3408
ucuccuuucuugcucuagggg

SEQ ID NO: 41622 - RNA, 22 nt, Artificial Sequence
  Synthetic oligonucleotide: BID-3409
uucuccuuucuugcucuagggg

SEQ ID NO: 41623 - RNA, 23 nt, Artificial Sequence
  Synthetic oligonucleotide: BID-3410
uuucuccuuucuugcucuagggg

SEQ ID NO: 41624 - RNA, 24 nt, Artificial Sequence
  Synthetic oligonucleotide: BID-3411
uuuucuccuuucuugcucuagggg

SEQ ID NO: 41625 - RNA, 18 nt, Artificial Sequence
  Synthetic oligonucleotide: BID-3412
cuguaagugggcuggggg

SEQ ID NO: 41626 - RNA, 19 nt, Artificial Sequence
  Synthetic oligonucleotide: BID-3413
ucuguaagugggcuggggg

SEQ ID NO: 41627 - RNA, 20 nt, Artificial Sequence
  Synthetic oligonucleotide: BID-377
uucuguaagugggcuggggg

SEQ ID NO: 41628 - RNA, 21 nt, Artificial Sequence
  Synthetic oligonucleotide: BID-3414
auucuguaagugggcuggggg

SEQ ID NO: 41629 - RNA, 22 nt, Artificial Sequence
  Synthetic oligonucleotide: BID-3415
gauucuguaagugggcuggggg

SEQ ID NO: 41630 - RNA, 23 nt, Artificial Sequence
  Synthetic oligonucleotide: BID-3416
ggauucuguaagugggcuggggg

SEQ ID NO: 41631 - RNA, 24 nt, Artificial Sequence
  Synthetic oligonucleotide: BID-3417
cggauucuguaagugggcuggggg

SEQ ID NO: 41632 - RNA, 18 nt, Artificial Sequence
  Synthetic oligonucleotide: BID-3418
gcggauucuguaaguggg

SEQ ID NO: 41633 - RNA, 19 nt, Artificial Sequence
  Synthetic oligonucleotide: BID-3419
ugcggauucuguaaguggg

SEQ ID NO: 41634 - RNA, 20 nt, Artificial Sequence
  Synthetic oligonucleotide: BID-374
gugcggauucuguaaguggg

SEQ ID NO: 41635 - RNA, 21 nt, Artificial Sequence
  Synthetic oligonucleotide: BID-3420
agugcggauucuguaaguggg

SEQ ID NO: 41636 - RNA, 22 nt, Artificial Sequence
  Synthetic oligonucleotide: BID-3421
cagugcggauucuguaaguggg

SEQ ID NO: 41637 - RNA, 23 nt, Artificial Sequence
  Synthetic oligonucleotide: BID-3422
acagugcggauucuguaaguggg

SEQ ID NO: 41638 - RNA, 24 nt, Artificial Sequence
  Synthetic oligonucleotide: BID-3423
cacagugcggauucuguaaguggg

SEQ ID NO: 41639 - RNA, 18 nt, Artificial Sequence
  Synthetic oligonucleotide: BID-3424
aggggccgggccggcugg

SEQ ID NO: 41640 - RNA, 19 nt, Artificial Sequence
  Synthetic oligonucleotide: BID-3425
gaggggccgggccggcugg

SEQ ID NO: 41641 - RNA, 20 nt, Artificial Sequence
  Synthetic oligonucleotide: BID-25
cgaggggccgggccggcugg

SEQ ID NO: 41642 - RNA, 21 nt, Artificial Sequence
  Synthetic oligonucleotide: BID-3426
gcgaggggccgggccggcugg

SEQ ID NO: 41643 - RNA, 22 nt, Artificial Sequence
  Synthetic oligonucleotide: BID-3427
agcgaggggccgggccggcugg

SEQ ID NO: 41644 - RNA, 23 nt, Artificial Sequence
  Synthetic oligonucleotide: BID-3428
cagcgaggggccgggccggcugg

SEQ ID NO: 41645 - RNA, 24 nt, Artificial Sequence
  Synthetic oligonucleotide: BID-3429
gcagcgaggggccgggccggcugg

SEQ ID NO: 41646 - RNA, 18 nt, Artificial Sequence
  Synthetic oligonucleotide: BID-3430
gugcuggcuccccagugg

SEQ ID NO: 41647 - RNA, 19 nt, Artificial Sequence
  Synthetic oligonucleotide: BID-3431
agugcuggcuccccagugg

SEQ ID NO: 41648 - RNA, 20 nt, Artificial Sequence
  Synthetic oligonucleotide: BID-401
cagugcuggcuccccagugg

SEQ ID NO: 41649 - RNA, 21 nt, Artificial Sequence
  Synthetic oligonucleotide: BID-3432
ccagugcuggcuccccagugg

SEQ ID NO: 41650 - RNA, 22 nt, Artificial Sequence
  Synthetic oligonucleotide: BID-3433
gccagugcuggcuccccagugg

SEQ ID NO: 41651 - RNA, 23 nt, Artificial Sequence
  Synthetic oligonucleotide: BID-3434
ugccagugcuggcuccccagugg

SEQ ID NO: 41652 - RNA, 24 nt, Artificial Sequence
  Synthetic oligonucleotide: BID-3435
cugccagugcuggcuccccagugg

SEQ ID NO: 41653 - RNA, 18 nt, Artificial Sequence
  Synthetic oligonucleotide: BID-3436
gccuacccuagagacaug

SEQ ID NO: 41654 - RNA, 19 nt, Artificial Sequence
  Synthetic oligonucleotide: BID-3437
ggccuacccuagagacaug

SEQ ID NO: 41655 - RNA, 20 nt, Artificial Sequence
  Synthetic oligonucleotide: BID-622
aggccuacccuagagacaug

SEQ ID NO: 41656 - RNA, 21 nt, Artificial Sequence
  Synthetic oligonucleotide: BID-3438
caggccuacccuagagacaug

SEQ ID NO: 41657 - RNA, 22 nt, Artificial Sequence
  Synthetic oligonucleotide: BID-3439
gcaggccuacccuagagacaug

SEQ ID NO: 41658 - RNA, 23 nt, Artificial Sequence
  Synthetic oligonucleotide: BID-3440
ugcaggccuacccuagagacaug

SEQ ID NO: 41659 - RNA, 24 nt, Artificial Sequence
  Synthetic oligonucleotide: BID-3441
cugcaggccuacccuagagacaug

SEQ ID NO: 41660 - RNA, 18 nt, Artificial Sequence
  Synthetic oligonucleotide: BID-3442
agcaucccuccgggccug

SEQ ID NO: 41661 - RNA, 19 nt, Artificial Sequence
  Synthetic oligonucleotide: BID-3443
uagcaucccuccgggccug

SEQ ID NO: 41662 - RNA, 20 nt, Artificial Sequence
  Synthetic oligonucleotide: BID-418
guagcaucccuccgggccug

SEQ ID NO: 41663 - RNA, 21 nt, Artificial Sequence
  Synthetic oligonucleotide: BID-3444
cguagcaucccuccgggccug

SEQ ID NO: 41664 - RNA, 22 nt, Artificial Sequence
  Synthetic oligonucleotide: BID-3445
ccguagcaucccuccgggccug

SEQ ID NO: 41665 - RNA, 23 nt, Artificial Sequence
  Synthetic oligonucleotide: BID-3446
accguagcaucccuccgggccug

SEQ ID NO: 41666 - RNA, 24 nt, Artificial Sequence
  Synthetic oligonucleotide: BID-3447
gaccguagcaucccuccgggccug

SEQ ID NO: 41667 - RNA, 18 nt, Artificial Sequence
  Synthetic oligonucleotide: BID-3448
gaggggccgggccggcug

SEQ ID NO: 41668 - RNA, 19 nt, Artificial Sequence
  Synthetic oligonucleotide: BID-3449
cgaggggccgggccggcug

SEQ ID NO: 41669 - RNA, 20 nt, Artificial Sequence
  Synthetic oligonucleotide: BID-370
gcgaggggccgggccggcug

SEQ ID NO: 41670 - RNA, 21 nt, Artificial Sequence
  Synthetic oligonucleotide: BID-3450
agcgaggggccgggccggcug

SEQ ID NO: 41671 - RNA, 22 nt, Artificial Sequence
  Synthetic oligonucleotide: BID-3451
cagcgaggggccgggccggcug

SEQ ID NO: 41672 - RNA, 23 nt, Artificial Sequence
  Synthetic oligonucleotide: BID-3452
gcagcgaggggccgggccggcug

SEQ ID NO: 41673 - RNA, 24 nt, Artificial Sequence
  Synthetic oligonucleotide: BID-3453
ggcagcgaggggccgggccggcug

SEQ ID NO: 41674 - RNA, 18 nt, Artificial Sequence
  Synthetic oligonucleotide: BID-3454
aaccuacgcaccuacgug

SEQ ID NO: 41675 - RNA, 19 nt, Artificial Sequence
  Synthetic oligonucleotide: BID-3455
gaaccuacgcaccuacgug

SEQ ID NO: 41676 - RNA, 20 nt, Artificial Sequence
  Synthetic oligonucleotide: BID-292
agaaccuacgcaccuacgug

SEQ ID NO: 41677 - RNA, 21 nt, Artificial Sequence
  Synthetic oligonucleotide: BID-3456
cagaaccuacgcaccuacgug

SEQ ID NO: 41678 - RNA, 22 nt, Artificial Sequence
  Synthetic oligonucleotide: BID-3457
ccagaaccuacgcaccuacgug

SEQ ID NO: 41679 - RNA, 23 nt, Artificial Sequence
  Synthetic oligonucleotide: BID-3458
accagaaccuacgcaccuacgug

SEQ ID NO: 41680 - RNA, 24 nt, Artificial Sequence
  Synthetic oligonucleotide: BID-3459
aaccagaaccuacgcaccuacgug

SEQ ID NO: 41681 - RNA, 18 nt, Artificial Sequence
  Synthetic oligonucleotide: BID-3460
uacgaaugugcagcggug

SEQ ID NO: 41682 - RNA, 19 nt, Artificial Sequence
  Synthetic oligonucleotide: BID-3461
auacgaaugugcagcggug

SEQ ID NO: 41683 - RNA, 20 nt, Artificial Sequence
  Synthetic oligonucleotide: BID-361
aauacgaaugugcagcggug

SEQ ID NO: 41684 - RNA, 21 nt, Artificial Sequence
  Synthetic oligonucleotide: BID-3462
aaauacgaaugugcagcggug

SEQ ID NO: 41685 - RNA, 22 nt, Artificial Sequence
  Synthetic oligonucleotide: BID-3463
caaauacgaaugugcagcggug

SEQ ID NO: 41686 - RNA, 23 nt, Artificial Sequence
  Synthetic oligonucleotide: BID-3464
acaaauacgaaugugcagcggug

SEQ ID NO: 41687 - RNA, 24 nt, Artificial Sequence
  Synthetic oligonucleotide: BID-3465
aacaaauacgaaugugcagcggug

SEQ ID NO: 41688 - RNA, 18 nt, Artificial Sequence
  Synthetic oligonucleotide: BID-3466
ucugugugccccucugug

SEQ ID NO: 41689 - RNA, 19 nt, Artificial Sequence
  Synthetic oligonucleotide: BID-3467
uucugugugccccucugug

SEQ ID NO: 41690 - RNA, 20 nt, Artificial Sequence
  Synthetic oligonucleotide: BID-612
guucugugugccccucugug

SEQ ID NO: 41691 - RNA, 21 nt, Artificial Sequence
  Synthetic oligonucleotide: BID-3468
gguucugugugccccucugug

SEQ ID NO: 41692 - RNA, 22 nt, Artificial Sequence
  Synthetic oligonucleotide: BID-3469
agguucugugugccccucugug

SEQ ID NO: 41693 - RNA, 23 nt, Artificial Sequence
  Synthetic oligonucleotide: BID-3470
cagguucugugugccccucugug

SEQ ID NO: 41694 - RNA, 24 nt, Artificial Sequence
  Synthetic oligonucleotide: BID-3471
ccagguucugugugccccucugug

SEQ ID NO: 41695 - RNA, 18 nt, Artificial Sequence
  Synthetic oligonucleotide: BID-3472
aagucaagaagacaucau

SEQ ID NO: 41696 - RNA, 19 nt, Artificial Sequence
  Synthetic oligonucleotide: BID-3473
aaagucaagaagacaucau

SEQ ID NO: 41697 - RNA, 20 nt, Artificial Sequence
  Synthetic oligonucleotide: BID-411
gaaagucaagaagacaucau

SEQ ID NO: 41698 - RNA, 21 nt, Artificial Sequence
  Synthetic oligonucleotide: BID-3474
ugaaagucaagaagacaucau

SEQ ID NO: 41699 - RNA, 22 nt, Artificial Sequence
  Synthetic oligonucleotide: BID-3475
cugaaagucaagaagacaucau

SEQ ID NO: 41700 - RNA, 23 nt, Artificial Sequence
  Synthetic oligonucleotide: BID-3476
ucugaaagucaagaagacaucau

SEQ ID NO: 41701 - RNA, 24 nt, Artificial Sequence
  Synthetic oligonucleotide: BID-3477
uucugaaagucaagaagacaucau

SEQ ID NO: 41702 - RNA, 18 nt, Artificial Sequence
  Synthetic oligonucleotide: BID-3478
ggucgccacugggacacu

SEQ ID NO: 41703 - RNA, 19 nt, Artificial Sequence
  Synthetic oligonucleotide: BID-3479
aggucgccacugggacacu

SEQ ID NO: 41704 - RNA, 20 nt, Artificial Sequence
  Synthetic oligonucleotide: BID-380
caggucgccacugggacacu

SEQ ID NO: 41705 - RNA, 21 nt, Artificial Sequence
  Synthetic oligonucleotide: BID-3480
ccaggucgccacugggacacu

SEQ ID NO: 41706 - RNA, 22 nt, Artificial Sequence
  Synthetic oligonucleotide: BID-3481
uccaggucgccacugggacacu

SEQ ID NO: 41707 - RNA, 23 nt, Artificial Sequence
  Synthetic oligonucleotide: BID-3482
uuccaggucgccacugggacacu

SEQ ID NO: 41708 - RNA, 24 nt, Artificial Sequence
  Synthetic oligonucleotide: BID-3483
uuuccaggucgccacugggacacu

SEQ ID NO: 41709 - RNA, 18 nt, Artificial Sequence
  Synthetic oligonucleotide: BID-3484
cugcccaggccauggacu

SEQ ID NO: 41710 - RNA, 19 nt, Artificial Sequence
  Synthetic oligonucleotide: BID-3485
gcugcccaggccauggacu

SEQ ID NO: 41711 - RNA, 20 nt, Artificial Sequence
  Synthetic oligonucleotide: BID-387
cgcugcccaggccauggacu

SEQ ID NO: 41712 - RNA, 21 nt, Artificial Sequence
  Synthetic oligonucleotide: BID-3486
gcgcugcccaggccauggacu

SEQ ID NO: 41713 - RNA, 22 nt, Artificial Sequence
  Synthetic oligonucleotide: BID-3487
cgcgcugcccaggccauggacu

SEQ ID NO: 41714 - RNA, 23 nt, Artificial Sequence
  Synthetic oligonucleotide: BID-3488
ccgcgcugcccaggccauggacu

SEQ ID NO: 41715 - RNA, 24 nt, Artificial Sequence
  Synthetic oligonucleotide: BID-3489
gccgcgcugcccaggccauggacu

SEQ ID NO: 41716 - RNA, 18 nt, Artificial Sequence
  Synthetic oligonucleotide: BID-3490
auggaccguagcaucccu

SEQ ID NO: 41717 - RNA, 19 nt, Artificial Sequence
  Synthetic oligonucleotide: BID-3491
cauggaccguagcaucccu

SEQ ID NO: 41718 - RNA, 20 nt, Artificial Sequence
  Synthetic oligonucleotide: BID-417
gcauggaccguagcaucccu

SEQ ID NO: 41719 - RNA, 21 nt, Artificial Sequence
  Synthetic oligonucleotide: BID-3492
agcauggaccguagcaucccu

SEQ ID NO: 41720 - RNA, 22 nt, Artificial Sequence
  Synthetic oligonucleotide: BID-3493
cagcauggaccguagcaucccu

SEQ ID NO: 41721 - RNA, 23 nt, Artificial Sequence
  Synthetic oligonucleotide: BID-3494
acagcauggaccguagcaucccu

SEQ ID NO: 41722 - RNA, 24 nt, Artificial Sequence
  Synthetic oligonucleotide: BID-3495
gacagcauggaccguagcaucccu

SEQ ID NO: 41723 - RNA, 18 nt, Artificial Sequence
  Synthetic oligonucleotide: BID-3496
caacaacgguuccagccu

SEQ ID NO: 41724 - RNA, 19 nt, Artificial Sequence
  Synthetic oligonucleotide: BID-3497
ucaacaacgguuccagccu

SEQ ID NO: 41725 - RNA, 20 nt, Artificial Sequence
  Synthetic oligonucleotide: BID-390
gucaacaacgguuccagccu

SEQ ID NO: 41726 - RNA, 21 nt, Artificial Sequence
  Synthetic oligonucleotide: BID-3498
ggucaacaacgguuccagccu

SEQ ID NO: 41727 - RNA, 22 nt, Artificial Sequence
  Synthetic oligonucleotide: BID-3499
aggucaacaacgguuccagccu

SEQ ID NO: 41728 - RNA, 23 nt, Artificial Sequence
  Synthetic oligonucleotide: BID-3500
caggucaacaacgguuccagccu

SEQ ID NO: 41729 - RNA, 24 nt, Artificial Sequence
  Synthetic oligonucleotide: BID-3501
ucaggucaacaacgguuccagccu

SEQ ID NO: 41730 - RNA, 18 nt, Artificial Sequence
  Synthetic oligonucleotide: BID-3502
ggaggugagugagggccu

SEQ ID NO: 41731 - RNA, 19 nt, Artificial Sequence
  Synthetic oligonucleotide: BID-3503
aggaggugagugagggccu

SEQ ID NO: 41732 - RNA, 20 nt, Artificial Sequence
  Synthetic oligonucleotide: BID-429
gaggaggugagugagggccu

SEQ ID NO: 41733 - RNA, 21 nt, Artificial Sequence
  Synthetic oligonucleotide: BID-3504
ggaggaggugagugagggccu

SEQ ID NO: 41734 - RNA, 22 nt, Artificial Sequence
  Synthetic oligonucleotide: BID-3505
cggaggaggugagugagggccu

SEQ ID NO: 41735 - RNA, 23 nt, Artificial Sequence
  Synthetic oligonucleotide: BID-3506
ucggaggaggugagugagggccu

SEQ ID NO: 41736 - RNA, 24 nt, Artificial Sequence
  Synthetic oligonucleotide: BID-3507
gucggaggaggugagugagggccu

SEQ ID NO: 41737 - RNA, 18 nt, Artificial Sequence
  Synthetic oligonucleotide: BID-3508
cggccuggcccugcagcu

SEQ ID NO: 41738 - RNA, 19 nt, Artificial Sequence
  Synthetic oligonucleotide: BID-3509
acggccuggcccugcagcu

SEQ ID NO: 41739 - RNA, 20 nt, Artificial Sequence
  Synthetic oligonucleotide: BID-419
aacggccuggcccugcagcu

SEQ ID NO: 41740 - RNA, 21 nt, Artificial Sequence
  Synthetic oligonucleotide: BID-3510
gaacggccuggcccugcagcu

SEQ ID NO: 41741 - RNA, 22 nt, Artificial Sequence
  Synthetic oligonucleotide: BID-3511
ugaacggccuggcccugcagcu

SEQ ID NO: 41742 - RNA, 23 nt, Artificial Sequence
  Synthetic oligonucleotide: BID-3512
gugaacggccuggcccugcagcu

SEQ ID NO: 41743 - RNA, 24 nt, Artificial Sequence
  Synthetic oligonucleotide: BID-3513
ggugaacggccuggcccugcagcu

SEQ ID NO: 41744 - RNA, 18 nt, Artificial Sequence
  Synthetic oligonucleotide: BID-3514
gcagcagccacucccgcu

SEQ ID NO: 41745 - RNA, 19 nt, Artificial Sequence
  Synthetic oligonucleotide: BID-3515
cgcagcagccacucccgcu

SEQ ID NO: 41746 - RNA, 20 nt, Artificial Sequence
  Synthetic oligonucleotide: BID-137
ccgcagcagccacucccgcu

SEQ ID NO: 41747 - RNA, 21 nt, Artificial Sequence
  Synthetic oligonucleotide: BID-3516
accgcagcagccacucccgcu

SEQ ID NO: 41748 - RNA, 22 nt, Artificial Sequence
  Synthetic oligonucleotide: BID-3517
aaccgcagcagccacucccgcu

SEQ ID NO: 41749 - RNA, 23 nt, Artificial Sequence
  Synthetic oligonucleotide: BID-3518
caaccgcagcagccacucccgcu

SEQ ID NO: 41750 - RNA, 24 nt, Artificial Sequence
  Synthetic oligonucleotide: BID-3519
gcaaccgcagcagccacucccgcu

SEQ ID NO: 41751 - RNA, 18 nt, Artificial Sequence
  Synthetic oligonucleotide: BID-3520
ggauucuguaagugggcu

SEQ ID NO: 41752 - RNA, 19 nt, Artificial Sequence
  Synthetic oligonucleotide: BID-3521
cggauucuguaagugggcu

SEQ ID NO: 41753 - RNA, 20 nt, Artificial Sequence
  Synthetic oligonucleotide: BID-5
gcggauucuguaagugggcu

SEQ ID NO: 41754 - RNA, 21 nt, Artificial Sequence
  Synthetic oligonucleotide: BID-3522
ugcggauucuguaagugggcu

SEQ ID NO: 41755 - RNA, 22 nt, Artificial Sequence
  Synthetic oligonucleotide: BID-3523
gugcggauucuguaagugggcu

SEQ ID NO: 41756 - RNA, 23 nt, Artificial Sequence
  Synthetic oligonucleotide: BID-3524
agugcggauucuguaagugggcu

SEQ ID NO: 41757 - RNA, 24 nt, Artificial Sequence
  Synthetic oligonucleotide: BID-3525
cagugcggauucuguaagugggcu

SEQ ID NO: 41758 - RNA, 18 nt, Artificial Sequence
  Synthetic oligonucleotide: BID-3526
uuucuccuuucuugcucu

SEQ ID NO: 41759 - RNA, 19 nt, Artificial Sequence
  Synthetic oligonucleotide: BID-3527
uuuucuccuuucuugcucu

SEQ ID NO: 41760 - RNA, 20 nt, Artificial Sequence
  Synthetic oligonucleotide: BID-2547
uuuuucuccuuucuugcucu

SEQ ID NO: 41761 - RNA, 21 nt, Artificial Sequence
  Synthetic oligonucleotide: BID-3528
cuuuuucuccuuucuugcucu

SEQ ID NO: 41762 - RNA, 22 nt, Artificial Sequence
  Synthetic oligonucleotide: BID-3529
gcuuuuucuccuuucuugcucu

SEQ ID NO: 41763 - RNA, 23 nt, Artificial Sequence
  Synthetic oligonucleotide: BID-3530
ggcuuuuucuccuuucuugcucu

SEQ ID NO: 41764 - RNA, 24 nt, Artificial Sequence
  Synthetic oligonucleotide: BID-3531
uggcuuuuucuccuuucuugcucu

SEQ ID NO: 41765 - RNA, 18 nt, Artificial Sequence
  Synthetic oligonucleotide: BID-3532
cagugcuggcuccccagu

SEQ ID NO: 41766 - RNA, 19 nt, Artificial Sequence
  Synthetic oligonucleotide: BID-3533
ccagugcuggcuccccagu

SEQ ID NO: 41767 - RNA, 20 nt, Artificial Sequence
  Synthetic oligonucleotide: BID-128
gccagugcuggcuccccagu

SEQ ID NO: 41768 - RNA, 21 nt, Artificial Sequence
  Synthetic oligonucleotide: BID-3534
ugccagugcuggcuccccagu

SEQ ID NO: 41769 - RNA, 22 nt, Artificial Sequence
  Synthetic oligonucleotide: BID-3535
cugccagugcuggcuccccagu

SEQ ID NO: 41770 - RNA, 23 nt, Artificial Sequence
  Synthetic oligonucleotide: BID-3536
gcugccagugcuggcuccccagu

SEQ ID NO: 41771 - RNA, 24 nt, Artificial Sequence
  Synthetic oligonucleotide: BID-3537
agcugccagugcuggcuccccagu

SEQ ID NO: 41772 - RNA, 18 nt, Artificial Sequence
  Synthetic oligonucleotide: BID-3538
ugugaaccaggagugagu

SEQ ID NO: 41773 - RNA, 19 nt, Artificial Sequence
  Synthetic oligonucleotide: BID-3539
cugugaaccaggagugagu

SEQ ID NO: 41774 - RNA, 20 nt, Artificial Sequence
  Synthetic oligonucleotide: BID-68
acugugaaccaggagugagu

SEQ ID NO: 41775 - RNA, 21 nt, Artificial Sequence
  Synthetic oligonucleotide: BID-3540
cacugugaaccaggagugagu

SEQ ID NO: 41776 - RNA, 22 nt, Artificial Sequence
  Synthetic oligonucleotide: BID-3541
acacugugaaccaggagugagu

SEQ ID NO: 41777 - RNA, 23 nt, Artificial Sequence
  Synthetic oligonucleotide: BID-3542
gacacugugaaccaggagugagu

SEQ ID NO: 41778 - RNA, 24 nt, Artificial Sequence
  Synthetic oligonucleotide: BID-3543
ggacacugugaaccaggagugagu

SEQ ID NO: 41779 - RNA, 18 nt, Artificial Sequence
  Synthetic oligonucleotide: BID-3544
cggucggaggaggugagu

SEQ ID NO: 41780 - RNA, 19 nt, Artificial Sequence
  Synthetic oligonucleotide: BID-3545
ccggucggaggaggugagu

SEQ ID NO: 41781 - RNA, 20 nt, Artificial Sequence
  Synthetic oligonucleotide: BID-427
gccggucggaggaggugagu

SEQ ID NO: 41782 - RNA, 21 nt, Artificial Sequence
  Synthetic oligonucleotide: BID-3546
agccggucggaggaggugagu

SEQ ID NO: 41783 - RNA, 22 nt, Artificial Sequence
  Synthetic oligonucleotide: BID-3547
cagccggucggaggaggugagu

SEQ ID NO: 41784 - RNA, 23 nt, Artificial Sequence
  Synthetic oligonucleotide: BID-3548
ccagccggucggaggaggugagu

SEQ ID NO: 41785 - RNA, 24 nt, Artificial Sequence
  Synthetic oligonucleotide: BID-3549
accagccggucggaggaggugagu

SEQ ID NO: 41786 - RNA, 18 nt, Artificial Sequence
  Synthetic oligonucleotide: BID-3550
gaaccuacgcaccuacgu

SEQ ID NO: 41787 - RNA, 19 nt, Artificial Sequence
  Synthetic oligonucleotide: BID-3551
agaaccuacgcaccuacgu

SEQ ID NO: 41788 - RNA, 20 nt, Artificial Sequence
  Synthetic oligonucleotide: BID-630
cagaaccuacgcaccuacgu

SEQ ID NO: 41789 - RNA, 21 nt, Artificial Sequence
  Synthetic oligonucleotide: BID-3552
ccagaaccuacgcaccuacgu

SEQ ID NO: 41790 - RNA, 22 nt, Artificial Sequence
  Synthetic oligonucleotide: BID-3553
accagaaccuacgcaccuacgu

SEQ ID NO: 41791 - RNA, 23 nt, Artificial Sequence
  Synthetic oligonucleotide: BID-3554
aaccagaaccuacgcaccuacgu

SEQ ID NO: 41792 - RNA, 24 nt, Artificial Sequence
  Synthetic oligonucleotide: BID-3555
uaaccagaaccuacgcaccuacgu

SEQ ID NO: 41793 - RNA, 18 nt, Artificial Sequence
  Synthetic oligonucleotide: BID-3556
caggcaccucgcccaggu

SEQ ID NO: 41794 - RNA, 19 nt, Artificial Sequence
  Synthetic oligonucleotide: BID-3557
ccaggcaccucgcccaggu

SEQ ID NO: 41795 - RNA, 20 nt, Artificial Sequence
  Synthetic oligonucleotide: BID-219
gccaggcaccucgcccaggu

SEQ ID NO: 41796 - RNA, 21 nt, Artificial Sequence
  Synthetic oligonucleotide: BID-3558
ugccaggcaccucgcccaggu

SEQ ID NO: 41797 - RNA, 22 nt, Artificial Sequence
  Synthetic oligonucleotide: BID-3559
uugccaggcaccucgcccaggu

SEQ ID NO: 41798 - RNA, 23 nt, Artificial Sequence
  Synthetic oligonucleotide: BID-3560
auugccaggcaccucgcccaggu

SEQ ID NO: 41799 - RNA, 24 nt, Artificial Sequence
  Synthetic oligonucleotide: BID-3561
uauugccaggcaccucgcccaggu

SEQ ID NO: 41800 - RNA, 18 nt, Artificial Sequence
  Synthetic oligonucleotide: BID-3562
ggccauggacugugaggu

SEQ ID NO: 41801 - RNA, 19 nt, Artificial Sequence
  Synthetic oligonucleotide: BID-3563
aggccauggacugugaggu

SEQ ID NO: 41802 - RNA, 20 nt, Artificial Sequence
  Synthetic oligonucleotide: BID-388
caggccauggacugugaggu

SEQ ID NO: 41803 - RNA, 21 nt, Artificial Sequence
  Synthetic oligonucleotide: BID-3564
ccaggccauggacugugaggu

SEQ ID NO: 41804 - RNA, 22 nt, Artificial Sequence
  Synthetic oligonucleotide: BID-3565
cccaggccauggacugugaggu

SEQ ID NO: 41805 - RNA, 23 nt, Artificial Sequence
  Synthetic oligonucleotide: BID-3566
gcccaggccauggacugugaggu

SEQ ID NO: 41806 - RNA, 24 nt, Artificial Sequence
  Synthetic oligonucleotide: BID-3567
ugcccaggccauggacugugaggu

SEQ ID NO: 41807 - RNA, 18 nt, Artificial Sequence
  Synthetic oligonucleotide: BID-3568
ucaggaacaccagccggu

SEQ ID NO: 41808 - RNA, 19 nt, Artificial Sequence
  Synthetic oligonucleotide: BID-3569
cucaggaacaccagccggu

SEQ ID NO: 41809 - RNA, 20 nt, Artificial Sequence
  Synthetic oligonucleotide: BID-214
gcucaggaacaccagccggu

SEQ ID NO: 41810 - RNA, 21 nt, Artificial Sequence
  Synthetic oligonucleotide: BID-3570
agcucaggaacaccagccggu

SEQ ID NO: 41811 - RNA, 22 nt, Artificial Sequence
  Synthetic oligonucleotide: BID-3571
cagcucaggaacaccagccggu

SEQ ID NO: 41812 - RNA, 23 nt, Artificial Sequence
  Synthetic oligonucleotide: BID-3572
gcagcucaggaacaccagccggu

SEQ ID NO: 41813 - RNA, 24 nt, Artificial Sequence
  Synthetic oligonucleotide: BID-3573
ugcagcucaggaacaccagccggu

SEQ ID NO: 41814 - RNA, 18 nt, Artificial Sequence
  Synthetic oligonucleotide: BID-3574
gagcuuagccagaaaugu

SEQ ID NO: 41815 - RNA, 19 nt, Artificial Sequence
  Synthetic oligonucleotide: BID-3575
ggagcuuagccagaaaugu

SEQ ID NO: 41816 - RNA, 20 nt, Artificial Sequence
  Synthetic oligonucleotide: BID-633
aggagcuuagccagaaaugu

SEQ ID NO: 41817 - RNA, 21 nt, Artificial Sequence
  Synthetic oligonucleotide: BID-3576
gaggagcuuagccagaaaugu

SEQ ID NO: 41818 - RNA, 22 nt, Artificial Sequence
  Synthetic oligonucleotide: BID-3577
ugaggagcuuagccagaaaugu

SEQ ID NO: 41819 - RNA, 23 nt, Artificial Sequence
  Synthetic oligonucleotide: BID-3578
gugaggagcuuagccagaaaugu

SEQ ID NO: 41820 - RNA, 24 nt, Artificial Sequence
  Synthetic oligonucleotide: BID-3579
cgugaggagcuuagccagaaaugu

SEQ ID NO: 41821 - RNA, 18 nt, Artificial Sequence
  Synthetic oligonucleotide: BID-3580
ccugccugaacacagauu

SEQ ID NO: 41822 - RNA, 19 nt, Artificial Sequence
  Synthetic oligonucleotide: BID-3581
cccugccugaacacagauu

SEQ ID NO: 41823 - RNA, 20 nt, Artificial Sequence
  Synthetic oligonucleotide: BID-409
ccccugccugaacacagauu

SEQ ID NO: 41824 - RNA, 21 nt, Artificial Sequence
  Synthetic oligonucleotide: BID-3582
gccccugccugaacacagauu

SEQ ID NO: 41825 - RNA, 22 nt, Artificial Sequence
  Synthetic oligonucleotide: BID-3583
cgccccugccugaacacagauu

SEQ ID NO: 41826 - RNA, 23 nt, Artificial Sequence
  Synthetic oligonucleotide: BID-3584
ccgccccugccugaacacagauu

SEQ ID NO: 41827 - RNA, 24 nt, Artificial Sequence
  Synthetic oligonucleotide: BID-3585
gccgccccugccugaacacagauu

SEQ ID NO: 41828 - RNA, 18 nt, Artificial Sequence
  Synthetic oligonucleotide: BID-3586
cagcagccacucccgcuu

SEQ ID NO: 41829 - RNA, 19 nt, Artificial Sequence
  Synthetic oligonucleotide: BID-3587
gcagcagccacucccgcuu

SEQ ID NO: 41830 - RNA, 20 nt, Artificial Sequence
  Synthetic oligonucleotide: BID-113
cgcagcagccacucccgcuu

SEQ ID NO: 41831 - RNA, 21 nt, Artificial Sequence
  Synthetic oligonucleotide: BID-3588
ccgcagcagccacucccgcuu

SEQ ID NO: 41832 - RNA, 22 nt, Artificial Sequence
  Synthetic oligonucleotide: BID-3589
accgcagcagccacucccgcuu

SEQ ID NO: 41833 - RNA, 23 nt, Artificial Sequence
  Synthetic oligonucleotide: BID-3590
aaccgcagcagccacucccgcuu

SEQ ID NO: 41834 - RNA, 24 nt, Artificial Sequence
  Synthetic oligonucleotide: BID-3591
caaccgcagcagccacucccgcuu

SEQ ID NO: 41835 - RNA, 17 nt, Artificial Sequence
  Synthetic oligonucleotide: BID-683
ugccgccccugccugaa

SEQ ID NO: 41836 - RNA, 17 nt, Artificial Sequence
  Synthetic oligonucleotide: BID-3592
gcaaccgcagcagccac

SEQ ID NO: 41837 - RNA, 17 nt, Artificial Sequence
  Synthetic oligonucleotide: BID-3593
uccaaagcuguucugac

SEQ ID NO: 41838 - RNA, 17 nt, Artificial Sequence
  Synthetic oligonucleotide: BID-682
cggcuggaggagcacag

SEQ ID NO: 41839 - RNA, 17 nt, Artificial Sequence
  Synthetic oligonucleotide: BID-3594
gcggaagcuguugucag

SEQ ID NO: 41840 - RNA, 17 nt, Artificial Sequence
  Synthetic oligonucleotide: BID-308
accuacgcaccuacgug

SEQ ID NO: 41841 - RNA, 17 nt, Artificial Sequence
  Synthetic oligonucleotide: BID-3595
ucacaaaccuacuggug

SEQ ID NO: 41842 - RNA, 20 nt, Artificial Sequence
  Synthetic oligonucleotide: BID-681
cucugccgccccugccugaa

SEQ ID NO: 41843 - RNA, 20 nt, Artificial Sequence
  Synthetic oligonucleotide: BID-3596
auggcaaccgcagcagccac

SEQ ID NO: 41844 - RNA, 20 nt, Artificial Sequence
  Synthetic oligonucleotide: BID-3597
uccuccaaagcuguucugac

SEQ ID NO: 41845 - RNA, 20 nt, Artificial Sequence
  Synthetic oligonucleotide: BID-680
ggccggcuggaggagcacag

SEQ ID NO: 41846 - RNA, 20 nt, Artificial Sequence
  Synthetic oligonucleotide: BID-3598
ucugcggaagcuguugucag

SEQ ID NO: 41847 - RNA, 20 nt, Artificial Sequence
  Synthetic oligonucleotide: BID-292
agaaccuacgcaccuacgug

SEQ ID NO: 41848 - RNA, 20 nt, Artificial Sequence
  Synthetic oligonucleotide: BID-3599
gcaucacaaaccuacuggug

SEQ ID NO: 41849 - RNA, 17 nt, Artificial Sequence
  Synthetic oligonucleotide: BID-2446
uuccgauccgccggcaa

SEQ ID NO: 41850 - RNA, 17 nt, Artificial Sequence
  Synthetic oligonucleotide: BID-2525
ucccaggcgcgcggaca

SEQ ID NO: 41851 - RNA, 17 nt, Artificial Sequence
  Synthetic oligonucleotide: BID-2445
auuccgauccgccggca

SEQ ID NO: 41852 - RNA, 17 nt, Artificial Sequence
  Synthetic oligonucleotide: BID-2355
cucccgagcggagcuca

SEQ ID NO: 41853 - RNA, 17 nt, Artificial Sequence
  Synthetic oligonucleotide: BID-2465
gccggccgcgccgagga

SEQ ID NO: 41854 - RNA, 17 nt, Artificial Sequence
  Synthetic oligonucleotide: BID-2510
cggcgcguaccccggga

SEQ ID NO: 41855 - RNA, 17 nt, Artificial Sequence
  Synthetic oligonucleotide: BID-2270
gcgcccccgcggcugga

SEQ ID NO: 41856 - RNA, 17 nt, Artificial Sequence
  Synthetic oligonucleotide: BID-2526
uacccgcuuccuccuua

SEQ ID NO: 41857 - RNA, 17 nt, Artificial Sequence
  Synthetic oligonucleotide: BID-2358
ucagagcggccgcuuac

SEQ ID NO: 41858 - RNA, 17 nt, Artificial Sequence
  Synthetic oligonucleotide: BID-2507
gggcucggcgcguaccc

SEQ ID NO: 41859 - RNA, 17 nt, Artificial Sequence
  Synthetic oligonucleotide: BID-2508
ggcucggcgcguacccc

SEQ ID NO: 41860 - RNA, 17 nt, Artificial Sequence
  Synthetic oligonucleotide: BID-2485
ccaccgcggucgggccc

SEQ ID NO: 41861 - RNA, 17 nt, Artificial Sequence
  Synthetic oligonucleotide: BID-3600
cuucggccccccacgcc

SEQ ID NO: 41862 - RNA, 17 nt, Artificial Sequence
  Synthetic oligonucleotide: BID-2263
gaccguguccgcgcgcc

SEQ ID NO: 41863 - RNA, 17 nt, Artificial Sequence
  Synthetic oligonucleotide: BID-2266
gagacgcugccucggcc

SEQ ID NO: 41864 - RNA, 17 nt, Artificial Sequence
  Synthetic oligonucleotide: BID-2444
cggggauuccgauccgc

SEQ ID NO: 41865 - RNA, 17 nt, Artificial Sequence
  Synthetic oligonucleotide: BID-2303
gcccuccucggcgcggc

SEQ ID NO: 41866 - RNA, 17 nt, Artificial Sequence
  Synthetic oligonucleotide: BID-26
cgaaugugcagcggugc

SEQ ID NO: 41867 - RNA, 17 nt, Artificial Sequence
  Synthetic oligonucleotide: BID-2354
ccucccgagcggagcuc

SEQ ID NO: 41868 - RNA, 17 nt, Artificial Sequence
  Synthetic oligonucleotide: BID-2430
gggcgagccccaguaag

SEQ ID NO: 41869 - RNA, 17 nt, Artificial Sequence
  Synthetic oligonucleotide: BID-2284
accgcggugggagccag

SEQ ID NO: 41870 - RNA, 17 nt, Artificial Sequence
  Synthetic oligonucleotide: BID-2351
aauccccgcccacaccg

SEQ ID NO: 41871 - RNA, 17 nt, Artificial Sequence
  Synthetic oligonucleotide: BID-2314
gguccgccucggaggcg

SEQ ID NO: 41872 - RNA, 17 nt, Artificial Sequence
  Synthetic oligonucleotide: BID-2260
cgcggggcgccauaagg

SEQ ID NO: 41873 - RNA, 17 nt, Artificial Sequence
  Synthetic oligonucleotide: BID-2282
ccugggcccgaccgcgg

SEQ ID NO: 41874 - RNA, 17 nt, Artificial Sequence
  Synthetic oligonucleotide: BID-2311
ggucggguccgccucgg

SEQ ID NO: 41875 - RNA, 17 nt, Artificial Sequence
  Synthetic oligonucleotide: BID-32
gggucaugauggcucgg

SEQ ID NO: 41876 - RNA, 17 nt, Artificial Sequence
  Synthetic oligonucleotide: BID-2447
cgauccgccggcaaggg

SEQ ID NO: 41877 - RNA, 17 nt, Artificial Sequence
  Synthetic oligonucleotide: BID-2487
cgcggucgggcccaggg

SEQ ID NO: 41878 - RNA, 17 nt, Artificial Sequence
  Synthetic oligonucleotide: BID-2509
ucggcgcguaccccggg

SEQ ID NO: 41879 - RNA, 17 nt, Artificial Sequence
  Synthetic oligonucleotide: BID-2433
ccugagcuccgcucggg

SEQ ID NO: 41880 - RNA, 17 nt, Artificial Sequence
  Synthetic oligonucleotide: BID-2360
agagcggccgcuuacug

SEQ ID NO: 41881 - RNA, 17 nt, Artificial Sequence
  Synthetic oligonucleotide: BID-2350
cacccuugccggcggau

SEQ ID NO: 41882 - RNA, 17 nt, Artificial Sequence
  Synthetic oligonucleotide: BID-2359
cagagcggccgcuuacu

SEQ ID NO: 41883 - RNA, 17 nt, Artificial Sequence
  Synthetic oligonucleotide: BID-2310
gagggucggguccgccu

SEQ ID NO: 41884 - RNA, 17 nt, Artificial Sequence
  Synthetic oligonucleotide: BID-2264
accguguccgcgcgccu

SEQ ID NO: 41885 - RNA, 17 nt, Artificial Sequence
  Synthetic oligonucleotide: BID-2301
cgcccgggcgcccuccu

SEQ ID NO: 41886 - RNA, 17 nt, Artificial Sequence
  Synthetic oligonucleotide: BID-31
gaaugugcagcggugcu

SEQ ID NO: 41887 - RNA, 17 nt, Artificial Sequence
  Synthetic oligonucleotide: BID-2283
cugggcccgaccgcggu

SEQ ID NO: 41888 - RNA, 17 nt, Artificial Sequence
  Synthetic oligonucleotide: BID-28
ggucaugauggcucggu

SEQ ID NO: 41889 - RNA, 20 nt, Artificial Sequence
  Synthetic oligonucleotide: BID-2174
ggauuccgauccgccggcaa

SEQ ID NO: 41890 - RNA, 20 nt, Artificial Sequence
  Synthetic oligonucleotide: BID-2253
gucucccaggcgcgcggaca

SEQ ID NO: 41891 - RNA, 20 nt, Artificial Sequence
  Synthetic oligonucleotide: BID-2214
ucccaccgcggucgggccca

SEQ ID NO: 41892 - RNA, 20 nt, Artificial Sequence
  Synthetic oligonucleotide: BID-2173
gggauuccgauccgccggca

SEQ ID NO: 41893 - RNA, 20 nt, Artificial Sequence
  Synthetic oligonucleotide: BID-2084
cuccucccgagcggagcuca

SEQ ID NO: 41894 - RNA, 20 nt, Artificial Sequence
  Synthetic oligonucleotide: BID-2142
aaggccgguccagccgcaga

SEQ ID NO: 41895 - RNA, 20 nt, Artificial Sequence
  Synthetic oligonucleotide: BID-7
gauggcucggugggcagcga

SEQ ID NO: 41896 - RNA, 20 nt, Artificial Sequence
  Synthetic oligonucleotide: BID-2193
ccugccggccgcgccgagga

SEQ ID NO: 41897 - RNA, 20 nt, Artificial Sequence
  Synthetic oligonucleotide: BID-2238
gcucggcgcguaccccggga

SEQ ID NO: 41898 - RNA, 20 nt, Artificial Sequence
  Synthetic oligonucleotide: BID-1999
cccgcgcccccgcggcugga

SEQ ID NO: 41899 - RNA, 20 nt, Artificial Sequence
  Synthetic oligonucleotide: BID-1988
gaagcgcgcggggcgccaua

SEQ ID NO: 41900 - RNA, 20 nt, Artificial Sequence
  Synthetic oligonucleotide: BID-2254
gacuacccgcuuccuccuua

SEQ ID NO: 41901 - RNA, 20 nt, Artificial Sequence
  Synthetic oligonucleotide: BID-2090
ucgcccgcuccuuagagcac

SEQ ID NO: 41902 - RNA, 20 nt, Artificial Sequence
  Synthetic oligonucleotide: BID-2235
cuggggcucggcgcguaccc

SEQ ID NO: 41903 - RNA, 20 nt, Artificial Sequence
  Synthetic oligonucleotide: BID-2236
uggggcucggcgcguacccc

SEQ ID NO: 41904 - RNA, 20 nt, Artificial Sequence
  Synthetic oligonucleotide: BID-2213
cucccaccgcggucgggccc

SEQ ID NO: 41905 - RNA, 20 nt, Artificial Sequence
  Synthetic oligonucleotide: BID-1992
gucgaccguguccgcgcgcc

SEQ ID NO: 41906 - RNA, 20 nt, Artificial Sequence
  Synthetic oligonucleotide: BID-2194
gccgcgccgaggagggcgcc

SEQ ID NO: 41907 - RNA, 20 nt, Artificial Sequence
  Synthetic oligonucleotide: BID-2073
gaggagaaaacccgcgggcc

SEQ ID NO: 41908 - RNA, 20 nt, Artificial Sequence
  Synthetic oligonucleotide: BID-2075
gaaaacccgcgggccuggcc

SEQ ID NO: 41909 - RNA, 20 nt, Artificial Sequence
  Synthetic oligonucleotide: BID-2181
ccgcggguuuucuccucucc

SEQ ID NO: 41910 - RNA, 20 nt, Artificial Sequence
  Synthetic oligonucleotide: BID-13
ccgcacugugcuccuccagc

SEQ ID NO: 41911 - RNA, 20 nt, Artificial Sequence
  Synthetic oligonucleotide: BID-2162
gagcuccgcucgggaggagc

SEQ ID NO: 41912 - RNA, 20 nt, Artificial Sequence
  Synthetic oligonucleotide: BID-2172
gggcggggauuccgauccgc

SEQ ID NO: 41913 - RNA, 20 nt, Artificial Sequence
  Synthetic oligonucleotide: BID-2042
gucggguccgccucggaggc

SEQ ID NO: 41914 - RNA, 20 nt, Artificial Sequence
  Synthetic oligonucleotide: BID-2163
uccgcucgggaggagccggc

SEQ ID NO: 41915 - RNA, 20 nt, Artificial Sequence
  Synthetic oligonucleotide: BID-2225
uccacgccggggcaggcggc

SEQ ID NO: 41916 - RNA, 20 nt, Artificial Sequence
  Synthetic oligonucleotide: BID-6
ugcggauucuguaagugggc

SEQ ID NO: 41917 - RNA, 20 nt, Artificial Sequence
  Synthetic oligonucleotide: BID-1
auacgaaugugcagcggugc

SEQ ID NO: 41918 - RNA, 20 nt, Artificial Sequence
  Synthetic oligonucleotide: BID-2204
gcgggagagacccggcccuc

SEQ ID NO: 41919 - RNA, 20 nt, Artificial Sequence
  Synthetic oligonucleotide: BID-2212
cucuggcucccaccgcgguc

SEQ ID NO: 41920 - RNA, 20 nt, Artificial Sequence
  Synthetic oligonucleotide: BID-2158
agcgggcgagccccaguaag

SEQ ID NO: 41921 - RNA, 20 nt, Artificial Sequence
  Synthetic oligonucleotide: BID-10
cacagugcggauucuguaag

SEQ ID NO: 41922 - RNA, 20 nt, Artificial Sequence
  Synthetic oligonucleotide: BID-2013
ccgaccgcggugggagccag

SEQ ID NO: 41923 - RNA, 20 nt, Artificial Sequence
  Synthetic oligonucleotide: BID-2080
cggaauccccgcccacaccg

SEQ ID NO: 41924 - RNA, 20 nt, Artificial Sequence
  Synthetic oligonucleotide: BID-2191
ccgaccugccggccgcgccg

SEQ ID NO: 41925 - RNA, 20 nt, Artificial Sequence
  Synthetic oligonucleotide: BID-2182
cgcggguuuucuccucuccg

SEQ ID NO: 41926 - RNA, 20 nt, Artificial Sequence
  Synthetic oligonucleotide: BID-2085
agcucagggcugacaaagcg

SEQ ID NO: 41927 - RNA, 20 nt, Artificial Sequence
  Synthetic oligonucleotide: BID-2252
ggcagcgucucccaggcgcg

SEQ ID NO: 41928 - RNA, 20 nt, Artificial Sequence
  Synthetic oligonucleotide: BID-2043
ucggguccgccucggaggcg

SEQ ID NO: 41929 - RNA, 20 nt, Artificial Sequence
  Synthetic oligonucleotide: BID-2240
cgcguaccccgggaggggcg

SEQ ID NO: 41930 - RNA, 20 nt, Artificial Sequence
  Synthetic oligonucleotide: BID-2246
acccuccagccgcgggggcg

SEQ ID NO: 41931 - RNA, 20 nt, Artificial Sequence
  Synthetic oligonucleotide: BID-1989
gcgcgcggggcgccauaagg

SEQ ID NO: 41932 - RNA, 20 nt, Artificial Sequence
  Synthetic oligonucleotide: BID-2041
ggucggguccgccucggagg

SEQ ID NO: 41933 - RNA, 20 nt, Artificial Sequence
  Synthetic oligonucleotide: BID-2078
gugcaggccacccuugccgg

SEQ ID NO: 41934 - RNA, 20 nt, Artificial Sequence
  Synthetic oligonucleotide: BID-2245
ucaccacccuccagccgcgg

SEQ ID NO: 41935 - RNA, 20 nt, Artificial Sequence
  Synthetic oligonucleotide: BID-2040
gagggucggguccgccucgg

SEQ ID NO: 41936 - RNA, 20 nt, Artificial Sequence
  Synthetic oligonucleotide: BID-2175
uuccgauccgccggcaaggg

SEQ ID NO: 41937 - RNA, 20 nt, Artificial Sequence
  Synthetic oligonucleotide: BID-2237
ggcucggcgcguaccccggg

SEQ ID NO: 41938 - RNA, 20 nt, Artificial Sequence
  Synthetic oligonucleotide: BID-2161
agcccugagcuccgcucggg

SEQ ID NO: 41939 - RNA, 20 nt, Artificial Sequence
  Synthetic oligonucleotide: BID-2089
gucagagcggccgcuuacug

SEQ ID NO: 41940 - RNA, 20 nt, Artificial Sequence
  Synthetic oligonucleotide: BID-2208
caggucgcugcugaggccug

SEQ ID NO: 41941 - RNA, 20 nt, Artificial Sequence
  Synthetic oligonucleotide: BID-2205
cggcccucaggucgcugcug

SEQ ID NO: 41942 - RNA, 20 nt, Artificial Sequence
  Synthetic oligonucleotide: BID-4
acgaaugugcagcggugcug

SEQ ID NO: 41943 - RNA, 20 nt, Artificial Sequence
  Synthetic oligonucleotide: BID-2035
cggccggcaggucggugcug

SEQ ID NO: 41944 - RNA, 20 nt, Artificial Sequence
  Synthetic oligonucleotide: BID-2079
ggccacccuugccggcggau

SEQ ID NO: 41945 - RNA, 20 nt, Artificial Sequence
  Synthetic oligonucleotide: BID-2088
ggucagagcggccgcuuacu

SEQ ID NO: 41946 - RNA, 20 nt, Artificial Sequence
  Synthetic oligonucleotide: BID-2039
gcugagggucggguccgccu

SEQ ID NO: 41947 - RNA, 20 nt, Artificial Sequence
  Synthetic oligonucleotide: BID-1993
ucgaccguguccgcgcgccu

SEQ ID NO: 41948 - RNA, 20 nt, Artificial Sequence
  Synthetic oligonucleotide: BID-2207
ucaggucgcugcugaggccu

SEQ ID NO: 41949 - RNA, 20 nt, Artificial Sequence
  Synthetic oligonucleotide: BID-5
gcggauucuguaagugggcu

SEQ ID NO: 41950 - RNA, 20 nt, Artificial Sequence
  Synthetic oligonucleotide: BID-11
gugcuggggucaugauggcu

SEQ ID NO: 41951 - RNA, 20 nt, Artificial Sequence
  Synthetic oligonucleotide: BID-2093
ggauccucgcugcugcugcu

SEQ ID NO: 41952 - RNA, 20 nt, Artificial Sequence
  Synthetic oligonucleotide: BID-14
uacgaaugugcagcggugcu

SEQ ID NO: 41953 - RNA, 20 nt, Artificial Sequence
  Synthetic oligonucleotide: BID-15
acagugcggauucuguaagu

SEQ ID NO: 41954 - RNA, 20 nt, Artificial Sequence
  Synthetic oligonucleotide: BID-2211
ccucuggcucccaccgcggu

SEQ ID NO: 41955 - RNA, 20 nt, Artificial Sequence
  Synthetic oligonucleotide: BID-2012
gcccugggcccgaccgcggu

SEQ ID NO: 41956 - RNA, 20 nt, Artificial Sequence
  Synthetic oligonucleotide: BID-3
uggggucaugauggcucggu

SEQ ID NO: 41957 - RNA, 17 nt, Artificial Sequence
  Synthetic oligonucleotide: BID-2376
aguggcugggcuggcaa

SEQ ID NO: 41958 - RNA, 17 nt, Artificial Sequence
  Synthetic oligonucleotide: BID-2438
cggugcuggaaagacca

SEQ ID NO: 41959 - RNA, 17 nt, Artificial Sequence
  Synthetic oligonucleotide: BID-2367
guggcugaaugacccca

SEQ ID NO: 41960 - RNA, 17 nt, Artificial Sequence
  Synthetic oligonucleotide: BID-2486
caccgcggucgggccca

SEQ ID NO: 41961 - RNA, 17 nt, Artificial Sequence
  Synthetic oligonucleotide: BID-2422
gcuucagagcucuccca

SEQ ID NO: 41962 - RNA, 17 nt, Artificial Sequence
  Synthetic oligonucleotide: BID-2499
ggggcaggcggcaggca

SEQ ID NO: 41963 - RNA, 17 nt, Artificial Sequence
  Synthetic oligonucleotide: BID-2407
gccuucaccugcaggca

SEQ ID NO: 41964 - RNA, 17 nt, Artificial Sequence
  Synthetic oligonucleotide: BID-2375
aaguggcugggcuggca

SEQ ID NO: 41965 - RNA, 17 nt, Artificial Sequence
  Synthetic oligonucleotide: BID-2278
ccccggcguggagcuca

SEQ ID NO: 41966 - RNA, 17 nt, Artificial Sequence
  Synthetic oligonucleotide: BID-2501
gcggcaggcagggguca

SEQ ID NO: 41967 - RNA, 17 nt, Artificial Sequence
  Synthetic oligonucleotide: BID-2321
cguggccuggggauuca

SEQ ID NO: 41968 - RNA, 17 nt, Artificial Sequence
  Synthetic oligonucleotide: BID-2414
gccgguccagccgcaga

SEQ ID NO: 41969 - RNA, 17 nt, Artificial Sequence
  Synthetic oligonucleotide: BID-3601
cgggcguggggggccga

SEQ ID NO: 41970 - RNA, 17 nt, Artificial Sequence
  Synthetic oligonucleotide: BID-37
ggcucggugggcagcga

SEQ ID NO: 41971 - RNA, 17 nt, Artificial Sequence
  Synthetic oligonucleotide: BID-2286
cggugggagccagagga

SEQ ID NO: 41972 - RNA, 17 nt, Artificial Sequence
  Synthetic oligonucleotide: BID-2470
gagggcgcccgggcgga

SEQ ID NO: 41973 - RNA, 17 nt, Artificial Sequence
  Synthetic oligonucleotide: BID-2324
ccuggggauucagggga

SEQ ID NO: 41974 - RNA, 17 nt, Artificial Sequence
  Synthetic oligonucleotide: BID-2333
ggugcggggcgcgggga

SEQ ID NO: 41975 - RNA, 17 nt, Artificial Sequence
  Synthetic oligonucleotide: BID-2315
cgccucggaggcgggga

SEQ ID NO: 41976 - RNA, 17 nt, Artificial Sequence
  Synthetic oligonucleotide: BID-2337
gggcgcggggaggggga

SEQ ID NO: 41977 - RNA, 17 nt, Artificial Sequence
  Synthetic oligonucleotide: BID-43
cggugcuggggucauga

SEQ ID NO: 41978 - RNA, 17 nt, Artificial Sequence
  Synthetic oligonucleotide: BID-2296
ccucagcagcgaccuga

SEQ ID NO: 41979 - RNA, 17 nt, Artificial Sequence
  Synthetic oligonucleotide: BID-2420
agccacuugguggcuga

SEQ ID NO: 41980 - RNA, 17 nt, Artificial Sequence
  Synthetic oligonucleotide: BID-2307
cggcaggucggugcuga

SEQ ID NO: 41981 - RNA, 17 nt, Artificial Sequence
  Synthetic oligonucleotide: BID-2412
acccugccugcagguga

SEQ ID NO: 41982 - RNA, 17 nt, Artificial Sequence
  Synthetic oligonucleotide: BID-2259
gcgcgcggggcgccaua

SEQ ID NO: 41983 - RNA, 17 nt, Artificial Sequence
  Synthetic oligonucleotide: BID-2427
ucauugccagugcucua

SEQ ID NO: 41984 - RNA, 17 nt, Artificial Sequence
  Synthetic oligonucleotide: BID-2361
cccgcuccuuagagcac

SEQ ID NO: 41985 - RNA, 17 nt, Artificial Sequence
  Synthetic oligonucleotide: BID-2502
cggcaggcaggggucac

SEQ ID NO: 41986 - RNA, 17 nt, Artificial Sequence
  Synthetic oligonucleotide: BID-2404
gccuucugcggcuggac

SEQ ID NO: 41987 - RNA, 17 nt, Artificial Sequence
  Synthetic oligonucleotide: BID-2448
caaggguggccugcacc

SEQ ID NO: 41988 - RNA, 17 nt, Artificial Sequence
  Synthetic oligonucleotide: BID-2475
gggaggcgggagagacc

SEQ ID NO: 41989 - RNA, 17 nt, Artificial Sequence
  Synthetic oligonucleotide: BID-2369
augaccccaggggaccc

SEQ ID NO: 41990 - RNA, 17 nt, Artificial Sequence
  Synthetic oligonucleotide: BID-2366
aguggcugaaugacccc

SEQ ID NO: 41991 - RNA, 17 nt, Artificial Sequence
  Synthetic oligonucleotide: BID-2294
cggggggucagagcccc

SEQ ID NO: 41992 - RNA, 17 nt, Artificial Sequence
  Synthetic oligonucleotide: BID-2457
cccuccccugaaucccc

SEQ ID NO: 41993 - RNA, 17 nt, Artificial Sequence
  Synthetic oligonucleotide: BID-2423
gcucucccagggucccc

SEQ ID NO: 41994 - RNA, 17 nt, Artificial Sequence
  Synthetic oligonucleotide: BID-2340
ggggccgaggccagccc

SEQ ID NO: 41995 - RNA, 17 nt, Artificial Sequence
  Synthetic oligonucleotide: BID-3602
uucggccccccacgccc

SEQ ID NO: 41996 - RNA, 17 nt, Artificial Sequence
  Synthetic oligonucleotide: BID-2279
gggcccgccgcccgccc

SEQ ID NO: 41997 - RNA, 17 nt, Artificial Sequence
  Synthetic oligonucleotide: BID-3603
cccgccccggcccgccc

SEQ ID NO: 41998 - RNA, 17 nt, Artificial Sequence
  Synthetic oligonucleotide: BID-3604
cacgcccgggcccgccc

SEQ ID NO: 41999 - RNA, 17 nt, Artificial Sequence
  Synthetic oligonucleotide: BID-2300
ccgccuccccuccgccc

SEQ ID NO: 42000 - RNA, 17 nt, Artificial Sequence
  Synthetic oligonucleotide: BID-2467
cgccgaggagggcgccc

SEQ ID NO: 42001 - RNA, 17 nt, Artificial Sequence
  Synthetic oligonucleotide: BID-3605
cgggccggggcgggccc

SEQ ID NO: 42002 - RNA, 17 nt, Artificial Sequence
  Synthetic oligonucleotide: BID-2275
cugccugccgccugccc

SEQ ID NO: 42003 - RNA, 17 nt, Artificial Sequence
  Synthetic oligonucleotide: BID-2273
gcacccgcgccccuccc

SEQ ID NO: 42004 - RNA, 17 nt, Artificial Sequence
  Synthetic oligonucleotide: BID-2421
ggcuucagagcucuccc

SEQ ID NO: 42005 - RNA, 17 nt, Artificial Sequence
  Synthetic oligonucleotide: BID-2523
ccgaggcagcgucuccc

SEQ ID NO: 42006 - RNA, 17 nt, Artificial Sequence
  Synthetic oligonucleotide: BID-2493
gcccugagcuccacgcc

SEQ ID NO: 42007 - RNA, 17 nt, Artificial Sequence
  Synthetic oligonucleotide: BID-2299
cccgccuccccuccgcc

SEQ ID NO: 42008 - RNA, 17 nt, Artificial Sequence
  Synthetic oligonucleotide: BID-2466
gcgccgaggagggcgcc

SEQ ID NO: 42009 - RNA, 17 nt, Artificial Sequence
  Synthetic oligonucleotide: BID-2478
aggucgcugcugaggcc

SEQ ID NO: 42010 - RNA, 17 nt, Artificial Sequence
  Synthetic oligonucleotide: BID-2449
guggccugcacccggcc

SEQ ID NO: 42011 - RNA, 17 nt, Artificial Sequence
  Synthetic oligonucleotide: BID-45
ugcuccuccagccggcc

SEQ ID NO: 42012 - RNA, 17 nt, Artificial Sequence
  Synthetic oligonucleotide: BID-2298
gcagcgaccugagggcc

SEQ ID NO: 42013 - RNA, 17 nt, Artificial Sequence
  Synthetic oligonucleotide: BID-2344
gagaaaacccgcgggcc

SEQ ID NO: 42014 - RNA, 17 nt, Artificial Sequence
  Synthetic oligonucleotide: BID-52
gugggcagcgaggggcc

SEQ ID NO: 42015 - RNA, 17 nt, Artificial Sequence
  Synthetic oligonucleotide: BID-2346
aacccgcgggccuggcc

SEQ ID NO: 42016 - RNA, 17 nt, Artificial Sequence
  Synthetic oligonucleotide: BID-2317
guccucuccacguggcc

SEQ ID NO: 42017 - RNA, 17 nt, Artificial Sequence
  Synthetic oligonucleotide: BID-2272
ugcacccgcgccccucc

SEQ ID NO: 42018 - RNA, 17 nt, Artificial Sequence
  Synthetic oligonucleotide: BID-2453
cggguuuucuccucucc

SEQ ID NO: 42019 - RNA, 17 nt, Artificial Sequence
  Synthetic oligonucleotide: BID-2521
ggggcgcgggcgcgucc

SEQ ID NO: 42020 - RNA, 17 nt, Artificial Sequence
  Synthetic oligonucleotide: BID-2262
cgccauaaggaggaagc

SEQ ID NO: 42021 - RNA, 17 nt, Artificial Sequence
  Synthetic oligonucleotide: BID-46
cacugugcuccuccagc

SEQ ID NO: 42022 - RNA, 17 nt, Artificial Sequence
  Synthetic oligonucleotide: BID-2429
ccagugcucuaaggagc

SEQ ID NO: 42023 - RNA, 17 nt, Artificial Sequence
  Synthetic oligonucleotide: BID-2434
cuccgcucgggaggagc

SEQ ID NO: 42024 - RNA, 17 nt, Artificial Sequence
  Synthetic oligonucleotide: BID-2492
ggcccugagcuccacgc

SEQ ID NO: 42025 - RNA, 17 nt, Artificial Sequence
  Synthetic oligonucleotide: BID-2343
gagaggagaaaacccgc

SEQ ID NO: 42026 - RNA, 17 nt, Artificial Sequence
  Synthetic oligonucleotide: BID-2451
cacccggccaggcccgc

SEQ ID NO: 42027 - RNA, 17 nt, Artificial Sequence
  Synthetic oligonucleotide: BID-2515
caccacccuccagccgc

SEQ ID NO: 42028 - RNA, 17 nt, Artificial Sequence
  Synthetic oligonucleotide: BID-2257
cgaaggaggaagcgcgc

SEQ ID NO: 42029 - RNA, 17 nt, Artificial Sequence
  Synthetic oligonucleotide: BID-2513
uaccccgggaggggcgc

SEQ ID NO: 42030 - RNA, 17 nt, Artificial Sequence
  Synthetic oligonucleotide: BID-2330
ggaggggugcggggcgc

SEQ ID NO: 42031 - RNA, 17 nt, Artificial Sequence
  Synthetic oligonucleotide: BID-2519
uccagccgcgggggcgc

SEQ ID NO: 42032 - RNA, 17 nt, Artificial Sequence
  Synthetic oligonucleotide: BID-2413
ugccugcaggugaaggc

SEQ ID NO: 42033 - RNA, 17 nt, Artificial Sequence
  Synthetic oligonucleotide: BID-2498
cggggcaggcggcaggc

SEQ ID NO: 42034 - RNA, 17 nt, Artificial Sequence
  Synthetic oligonucleotide: BID-2406
ggccuucaccugcaggc

SEQ ID NO: 42035 - RNA, 17 nt, Artificial Sequence
  Synthetic oligonucleotide: BID-2313
ggguccgccucggaggc

SEQ ID NO: 42036 - RNA, 17 nt, Artificial Sequence
  Synthetic oligonucleotide: BID-2290
gccagaggaggggaggc

SEQ ID NO: 42037 - RNA, 17 nt, Artificial Sequence
  Synthetic oligonucleotide: BID-2474
ccgggcggaggggaggc

SEQ ID NO: 42038 - RNA, 17 nt, Artificial Sequence
  Synthetic oligonucleotide: BID-2435
gcucgggaggagccggc

SEQ ID NO: 42039 - RNA, 17 nt, Artificial Sequence
  Synthetic oligonucleotide: BID-2304
uccucggcgcggccggc

SEQ ID NO: 42040 - RNA, 17 nt, Artificial Sequence
  Synthetic oligonucleotide: BID-48
cgaggggccgggccggc

SEQ ID NO: 42041 - RNA, 17 nt, Artificial Sequence
  Synthetic oligonucleotide: BID-2268
gcccgcgcccccgcggc

SEQ ID NO: 42042 - RNA, 17 nt, Artificial Sequence
  Synthetic oligonucleotide: BID-2497
acgccggggcaggcggc

SEQ ID NO: 42043 - RNA, 17 nt, Artificial Sequence
  Synthetic oligonucleotide: BID-2491
ggcccagggcgggcggc

SEQ ID NO: 42044 - RNA, 17 nt, Artificial Sequence
  Synthetic oligonucleotide: BID-2403
gcugggccuucugcggc

SEQ ID NO: 42045 - RNA, 17 nt, Artificial Sequence
  Synthetic oligonucleotide: BID-2488
gcggucgggcccagggc

SEQ ID NO: 42046 - RNA, 17 nt, Artificial Sequence
  Synthetic oligonucleotide: BID-2297
agcagcgaccugagggc

SEQ ID NO: 42047 - RNA, 17 nt, Artificial Sequence
  Synthetic oligonucleotide: BID-2503
aggcaggggucacgggc

SEQ ID NO: 42048 - RNA, 17 nt, Artificial Sequence
  Synthetic oligonucleotide: BID-50
gcagcgaggggccgggc

SEQ ID NO: 42049 - RNA, 17 nt, Artificial Sequence
  Synthetic oligonucleotide: BID-3606
ggcgggccggggcgggc

SEQ ID NO: 42050 - RNA, 17 nt, Artificial Sequence
  Synthetic oligonucleotide: BID-54
ggugggcagcgaggggc

SEQ ID NO: 42051 - RNA, 17 nt, Artificial Sequence
  Synthetic oligonucleotide: BID-2495
gagcuccacgccggggc

SEQ ID NO: 42052 - RNA, 17 nt, Artificial Sequence
  Synthetic oligonucleotide: BID-3607
ccggggcgggccggggc

SEQ ID NO: 42053 - RNA, 17 nt, Artificial Sequence
  Synthetic oligonucleotide: BID-3608
cgggggcgggccggggc

SEQ ID NO: 42054 - RNA, 17 nt, Artificial Sequence
  Synthetic oligonucleotide: BID-2455
uuucuccucuccggggc

SEQ ID NO: 42055 - RNA, 17 nt, Artificial Sequence
  Synthetic oligonucleotide: BID-51
guaagugggcugggggc

SEQ ID NO: 42056 - RNA, 17 nt, Artificial Sequence
  Synthetic oligonucleotide: BID-2374
ccaccaaguggcugggc

SEQ ID NO: 42057 - RNA, 17 nt, Artificial Sequence
  Synthetic oligonucleotide: BID-38
ggauucuguaagugggc

SEQ ID NO: 42058 - RNA, 17 nt, Artificial Sequence
  Synthetic oligonucleotide: BID-2442
aagaccacggugugggc

SEQ ID NO: 42059 - RNA, 17 nt, Artificial Sequence
  Synthetic oligonucleotide: BID-2345
aaacccgcgggccuggc

SEQ ID NO: 42060 - RNA, 17 nt, Artificial Sequence
  Synthetic oligonucleotide: BID-2372
cucagccaccaaguggc

SEQ ID NO: 42061 - RNA, 17 nt, Artificial Sequence
  Synthetic oligonucleotide: BID-2352
gcaccgcagacaccugc

SEQ ID NO: 42062 - RNA, 17 nt, Artificial Sequence
  Synthetic oligonucleotide: BID-2405
gaccggccuucaccugc

SEQ ID NO: 42063 - RNA, 17 nt, Artificial Sequence
  Synthetic oligonucleotide: BID-2462
ccucagcaccgaccugc

SEQ ID NO: 42064 - RNA, 17 nt, Artificial Sequence
  Synthetic oligonucleotide: BID-2411
gccccaacccugccugc

SEQ ID NO: 42065 - RNA, 17 nt, Artificial Sequence
  Synthetic oligonucleotide: BID-2363
auccucgcugcugcugc

SEQ ID NO: 42066 - RNA, 17 nt, Artificial Sequence
  Synthetic oligonucleotide: BID-2437
gcaggugucugcggugc

SEQ ID NO: 42067 - RNA, 17 nt, Artificial Sequence
  Synthetic oligonucleotide: BID-2347
cgggccuggccgggugc

SEQ ID NO: 42068 - RNA, 17 nt, Artificial Sequence
  Synthetic oligonucleotide: BID-2327
auucaggggaggggugc

SEQ ID NO: 42069 - RNA, 17 nt, Artificial Sequence
  Synthetic oligonucleotide: BID-2348
gugcaggccacccuugc

SEQ ID NO: 42070 - RNA, 17 nt, Artificial Sequence
  Synthetic oligonucleotide: BID-2476
ggagagacccggcccuc

SEQ ID NO: 42071 - RNA, 17 nt, Artificial Sequence
  Synthetic oligonucleotide: BID-2481
ccccgccuccccuccuc

SEQ ID NO: 42072 - RNA, 17 nt, Artificial Sequence
  Synthetic oligonucleotide: BID-2277
gccccggcguggagcuc

SEQ ID NO: 42073 - RNA, 17 nt, Artificial Sequence
  Synthetic oligonucleotide: BID-2432
agcccugagcuccgcuc

SEQ ID NO: 42074 - RNA, 17 nt, Artificial Sequence
  Synthetic oligonucleotide: BID-2452
gcggguuuucuccucuc

SEQ ID NO: 42075 - RNA, 17 nt, Artificial Sequence
  Synthetic oligonucleotide: BID-2520
gggggcgcgggcgcguc

SEQ ID NO: 42076 - RNA, 17 nt, Artificial Sequence
  Synthetic oligonucleotide: BID-2484
uggcucccaccgcgguc

SEQ ID NO: 42077 - RNA, 17 nt, Artificial Sequence
  Synthetic oligonucleotide: BID-2309
ggucggugcugaggguc

SEQ ID NO: 42078 - RNA, 17 nt, Artificial Sequence
  Synthetic oligonucleotide: BID-2320
acguggccuggggauuc

SEQ ID NO: 42079 - RNA, 17 nt, Artificial Sequence
  Synthetic oligonucleotide: BID-2371
agcccucagccaccaag

SEQ ID NO: 42080 - RNA, 17 nt, Artificial Sequence
  Synthetic oligonucleotide: BID-2261
gcgccauaaggaggaag

SEQ ID NO: 42081 - RNA, 17 nt, Artificial Sequence
  Synthetic oligonucleotide: BID-34
agugcggauucuguaag

SEQ ID NO: 42082 - RNA, 17 nt, Artificial Sequence
  Synthetic oligonucleotide: BID-2368
uggcugaaugaccccag

SEQ ID NO: 42083 - RNA, 17 nt, Artificial Sequence
  Synthetic oligonucleotide: BID-2500
gggcaggcggcaggcag

SEQ ID NO: 42084 - RNA, 17 nt, Artificial Sequence
  Synthetic oligonucleotide: BID-33
caaauacgaaugugcag

SEQ ID NO: 42085 - RNA, 17 nt, Artificial Sequence
  Synthetic oligonucleotide: BID-2322
guggccuggggauucag

SEQ ID NO: 42086 - RNA, 17 nt, Artificial Sequence
  Synthetic oligonucleotide: BID-2357
acaaagcgcggucagag

SEQ ID NO: 42087 - RNA, 17 nt, Artificial Sequence
  Synthetic oligonucleotide: BID-2353
ugccggcuccucccgag

SEQ ID NO: 42088 - RNA, 17 nt, Artificial Sequence
  Synthetic oligonucleotide: BID-36
gcucggugggcagcgag

SEQ ID NO: 42089 - RNA, 17 nt, Artificial Sequence
  Synthetic oligonucleotide: BID-2428
gccagugcucuaaggag

SEQ ID NO: 42090 - RNA, 17 nt, Artificial Sequence
  Synthetic oligonucleotide: BID-2287
ggugggagccagaggag

SEQ ID NO: 42091 - RNA, 17 nt, Artificial Sequence
  Synthetic oligonucleotide: BID-2341
cgaggccagccccggag

SEQ ID NO: 42092 - RNA, 17 nt, Artificial Sequence
  Synthetic oligonucleotide: BID-2471
agggcgcccgggcggag

SEQ ID NO: 42093 - RNA, 17 nt, Artificial Sequence
  Synthetic oligonucleotide: BID-2511
ggcgcguaccccgggag

SEQ ID NO: 42094 - RNA, 17 nt, Artificial Sequence
  Synthetic oligonucleotide: BID-2325
cuggggauucaggggag

SEQ ID NO: 42095 - RNA, 17 nt, Artificial Sequence
  Synthetic oligonucleotide: BID-2334
gugcggggcgcggggag

SEQ ID NO: 42096 - RNA, 17 nt, Artificial Sequence
  Synthetic oligonucleotide: BID-2338
ggcgcggggagggggag

SEQ ID NO: 42097 - RNA, 17 nt, Artificial Sequence
  Synthetic oligonucleotide: BID-2459
ccccaggccacguggag

SEQ ID NO: 42098 - RNA, 17 nt, Artificial Sequence
  Synthetic oligonucleotide: BID-2365
gcugggaaacuguugag

SEQ ID NO: 42099 - RNA, 17 nt, Artificial Sequence
  Synthetic oligonucleotide: BID-2458
ugaauccccaggccacg

SEQ ID NO: 42100 - RNA, 17 nt, Artificial Sequence
  Synthetic oligonucleotide: BID-2316
guuguguccucuccacg

SEQ ID NO: 42101 - RNA, 17 nt, Artificial Sequence
  Synthetic oligonucleotide: BID-2482
uccucuggcucccaccg

SEQ ID NO: 42102 - RNA, 17 nt, Artificial Sequence
  Synthetic oligonucleotide: BID-2281
cgcccugggcccgaccg

SEQ ID NO: 42103 - RNA, 17 nt, Artificial Sequence
  Synthetic oligonucleotide: BID-2342
ggagaggagaaaacccg

SEQ ID NO: 42104 - RNA, 17 nt, Artificial Sequence
  Synthetic oligonucleotide: BID-2267
acgcgcccgcgcccccg

SEQ ID NO: 42105 - RNA, 17 nt, Artificial Sequence
  Synthetic oligonucleotide: BID-2450
gcacccggccaggcccg

SEQ ID NO: 42106 - RNA, 17 nt, Artificial Sequence
  Synthetic oligonucleotide: BID-2274
cacccgcgccccucccg

SEQ ID NO: 42107 - RNA, 17 nt, Artificial Sequence
  Synthetic oligonucleotide: BID-2514
ucaccacccuccagccg

SEQ ID NO: 42108 - RNA, 17 nt, Artificial Sequence
  Synthetic oligonucleotide: BID-2494
cccugagcuccacgccg

SEQ ID NO: 42109 - RNA, 17 nt, Artificial Sequence
  Synthetic oligonucleotide: BID-2463
accugccggccgcgccg

SEQ ID NO: 42110 - RNA, 17 nt, Artificial Sequence
  Synthetic oligonucleotide: BID-2522
cgggcgcguccgggccg

SEQ ID NO: 42111 - RNA, 17 nt, Artificial Sequence
  Synthetic oligonucleotide: BID-3609
cgggccggggcgggccg

SEQ ID NO: 42112 - RNA, 17 nt, Artificial Sequence
  Synthetic oligonucleotide: BID-2339
gggagggggaggggccg

SEQ ID NO: 42113 - RNA, 17 nt, Artificial Sequence
  Synthetic oligonucleotide: BID-2460
agccuuccccgccuccg

SEQ ID NO: 42114 - RNA, 17 nt, Artificial Sequence
  Synthetic oligonucleotide: BID-2454
ggguuuucuccucuccg

SEQ ID NO: 42115 - RNA, 17 nt, Artificial Sequence
  Synthetic oligonucleotide: BID-2356
ucagggcugacaaagcg

SEQ ID NO: 42116 - RNA, 17 nt, Artificial Sequence
  Synthetic oligonucleotide: BID-2426
ucccagcagcagcagcg

SEQ ID NO: 42117 - RNA, 17 nt, Artificial Sequence
  Synthetic oligonucleotide: BID-39
uggcucggugggcagcg

SEQ ID NO: 42118 - RNA, 17 nt, Artificial Sequence
  Synthetic oligonucleotide: BID-2516
accacccuccagccgcg

SEQ ID NO: 42119 - RNA, 17 nt, Artificial Sequence
  Synthetic oligonucleotide: BID-2256
ccgaaggaggaagcgcg

SEQ ID NO: 42120 - RNA, 17 nt, Artificial Sequence
  Synthetic oligonucleotide: BID-2258
gaaggaggaagcgcgcg

SEQ ID NO: 42121 - RNA, 17 nt, Artificial Sequence
  Synthetic oligonucleotide: BID-2524
agcgucucccaggcgcg

SEQ ID NO: 42122 - RNA, 17 nt, Artificial Sequence
  Synthetic oligonucleotide: BID-2331
gaggggugcggggcgcg

SEQ ID NO: 42123 - RNA, 17 nt, Artificial Sequence
  Synthetic oligonucleotide: BID-2291
ccagaggaggggaggcg

SEQ ID NO: 42124 - RNA, 17 nt, Artificial Sequence
  Synthetic oligonucleotide: BID-2276
ugccgccugccccggcg

SEQ ID NO: 42125 - RNA, 17 nt, Artificial Sequence
  Synthetic oligonucleotide: BID-2302
gggcgcccuccucggcg

SEQ ID NO: 42126 - RNA, 17 nt, Artificial Sequence
  Synthetic oligonucleotide: BID-3610
cggggcgggcccgggcg

SEQ ID NO: 42127 - RNA, 17 nt, Artificial Sequence
  Synthetic oligonucleotide: BID-2512
guaccccgggaggggcg

SEQ ID NO: 42128 - RNA, 17 nt, Artificial Sequence
  Synthetic oligonucleotide: BID-2329
gggaggggugcggggcg

SEQ ID NO: 42129 - RNA, 17 nt, Artificial Sequence
  Synthetic oligonucleotide: BID-2518
cuccagccgcgggggcg

SEQ ID NO: 42130 - RNA, 17 nt, Artificial Sequence
  Synthetic oligonucleotide: BID-2443
agaccacggugugggcg

SEQ ID NO: 42131 - RNA, 17 nt, Artificial Sequence
  Synthetic oligonucleotide: BID-2328
uucaggggaggggugcg

SEQ ID NO: 42132 - RNA, 17 nt, Artificial Sequence
  Synthetic oligonucleotide: BID-3611
gcguggggggccgaagg

SEQ ID NO: 42133 - RNA, 17 nt, Artificial Sequence
  Synthetic oligonucleotide: BID-2496
cuccacgccggggcagg

SEQ ID NO: 42134 - RNA, 17 nt, Artificial Sequence
  Synthetic oligonucleotide: BID-2285
gcggugggagccagagg

SEQ ID NO: 42135 - RNA, 17 nt, Artificial Sequence
  Synthetic oligonucleotide: BID-2464
ugccggccgcgccgagg

SEQ ID NO: 42136 - RNA, 17 nt, Artificial Sequence
  Synthetic oligonucleotide: BID-2461
cuuccccgccuccgagg

SEQ ID NO: 42137 - RNA, 17 nt, Artificial Sequence
  Synthetic oligonucleotide: BID-2312
cggguccgccucggagg

SEQ ID NO: 42138 - RNA, 17 nt, Artificial Sequence
  Synthetic oligonucleotide: BID-2289
agccagaggaggggagg

SEQ ID NO: 42139 - RNA, 17 nt, Artificial Sequence
  Synthetic oligonucleotide: BID-2473
cccgggcggaggggagg

SEQ ID NO: 42140 - RNA, 17 nt, Artificial Sequence
  Synthetic oligonucleotide: BID-2335
ugcggggcgcggggagg

SEQ ID NO: 42141 - RNA, 17 nt, Artificial Sequence
  Synthetic oligonucleotide: BID-2349
caggccacccuugccgg

SEQ ID NO: 42142 - RNA, 17 nt, Artificial Sequence
  Synthetic oligonucleotide: BID-2517
ccacccuccagccgcgg

SEQ ID NO: 42143 - RNA, 17 nt, Artificial Sequence
  Synthetic oligonucleotide: BID-2292
cagaggaggggaggcgg

SEQ ID NO: 42144 - RNA, 17 nt, Artificial Sequence
  Synthetic oligonucleotide: BID-2469
ggagggcgcccgggcgg

SEQ ID NO: 42145 - RNA, 17 nt, Artificial Sequence
  Synthetic oligonucleotide: BID-2490
gggcccagggcgggcgg

SEQ ID NO: 42146 - RNA, 17 nt, Artificial Sequence
  Synthetic oligonucleotide: BID-2271
cccccgcggcuggaggg

SEQ ID NO: 42147 - RNA, 17 nt, Artificial Sequence
  Synthetic oligonucleotide: BID-2468
cgaggagggcgcccggg

SEQ ID NO: 42148 - RNA, 17 nt, Artificial Sequence
  Synthetic oligonucleotide: BID-2293
agaggaggggaggcggg

SEQ ID NO: 42149 - RNA, 17 nt, Artificial Sequence
  Synthetic oligonucleotide: BID-2489
gucgggcccagggcggg

SEQ ID NO: 42150 - RNA, 17 nt, Artificial Sequence
  Synthetic oligonucleotide: BID-2323
gccuggggauucagggg

SEQ ID NO: 42151 - RNA, 17 nt, Artificial Sequence
  Synthetic oligonucleotide: BID-2288
gggagccagaggagggg

SEQ ID NO: 42152 - RNA, 17 nt, Artificial Sequence
  Synthetic oligonucleotide: BID-2472
gcgcccgggcggagggg

SEQ ID NO: 42153 - RNA, 17 nt, Artificial Sequence
  Synthetic oligonucleotide: BID-3612
gccggggcgggccgggg

SEQ ID NO: 42154 - RNA, 17 nt, Artificial Sequence
  Synthetic oligonucleotide: BID-2332
gggugcggggcgcgggg

SEQ ID NO: 42155 - RNA, 17 nt, Artificial Sequence
  Synthetic oligonucleotide: BID-2336
ggggcgcggggaggggg

SEQ ID NO: 42156 - RNA, 17 nt, Artificial Sequence
  Synthetic oligonucleotide: BID-3613
gcgggcccgggcguggg

SEQ ID NO: 42157 - RNA, 17 nt, Artificial Sequence
  Synthetic oligonucleotide: BID-2441
aaagaccacgguguggg

SEQ ID NO: 42158 - RNA, 17 nt, Artificial Sequence
  Synthetic oligonucleotide: BID-53
ggggccgggccggcugg

SEQ ID NO: 42159 - RNA, 17 nt, Artificial Sequence
  Synthetic oligonucleotide: BID-2269
cgcgcccccgcggcugg

SEQ ID NO: 42160 - RNA, 17 nt, Artificial Sequence
  Synthetic oligonucleotide: BID-40
uucuguaagugggcugg

SEQ ID NO: 42161 - RNA, 17 nt, Artificial Sequence
  Synthetic oligonucleotide: BID-3614
ggcgggcccgggcgugg

SEQ ID NO: 42162 - RNA, 17 nt, Artificial Sequence
  Synthetic oligonucleotide: BID-2418
ccagcccagccacuugg

SEQ ID NO: 42163 - RNA, 17 nt, Artificial Sequence
  Synthetic oligonucleotide: BID-2295
gccucagcagcgaccug

SEQ ID NO: 42164 - RNA, 17 nt, Artificial Sequence
  Synthetic oligonucleotide: BID-2425
ucucccaggguccccug

SEQ ID NO: 42165 - RNA, 17 nt, Artificial Sequence
  Synthetic oligonucleotide: BID-2480
gucgcugcugaggccug

SEQ ID NO: 42166 - RNA, 17 nt, Artificial Sequence
  Synthetic oligonucleotide: BID-2319
ccucuccacguggccug

SEQ ID NO: 42167 - RNA, 17 nt, Artificial Sequence
  Synthetic oligonucleotide: BID-2505
gcaggggucacgggcug

SEQ ID NO: 42168 - RNA, 17 nt, Artificial Sequence
  Synthetic oligonucleotide: BID-41
auucuguaagugggcug

SEQ ID NO: 42169 - RNA, 17 nt, Artificial Sequence
  Synthetic oligonucleotide: BID-2419
cagccacuugguggcug

SEQ ID NO: 42170 - RNA, 17 nt, Artificial Sequence
  Synthetic oligonucleotide: BID-2477
cccucaggucgcugcug

SEQ ID NO: 42171 - RNA, 17 nt, Artificial Sequence
  Synthetic oligonucleotide: BID-35
aaugugcagcggugcug

SEQ ID NO: 42172 - RNA, 17 nt, Artificial Sequence
  Synthetic oligonucleotide: BID-2306
ccggcaggucggugcug

SEQ ID NO: 42173 - RNA, 17 nt, Artificial Sequence
  Synthetic oligonucleotide: BID-2436
gagccggcaggugucug

SEQ ID NO: 42174 - RNA, 17 nt, Artificial Sequence
  Synthetic oligonucleotide: BID-2402
gggggcugggccuucug

SEQ ID NO: 42175 - RNA, 17 nt, Artificial Sequence
  Synthetic oligonucleotide: BID-47
gcuggaggagcacagug

SEQ ID NO: 42176 - RNA, 17 nt, Artificial Sequence
  Synthetic oligonucleotide: BID-3615
gggcgggcccgggcgug

SEQ ID NO: 42177 - RNA, 17 nt, Artificial Sequence
  Synthetic oligonucleotide: BID-2439
cuggaaagaccacggug

SEQ ID NO: 42178 - RNA, 17 nt, Artificial Sequence
  Synthetic oligonucleotide: BID-2326
gauucaggggaggggug

SEQ ID NO: 42179 - RNA, 17 nt, Artificial Sequence
  Synthetic oligonucleotide: BID-2362
gcacuggcaaugaugug

SEQ ID NO: 42180 - RNA, 17 nt, Artificial Sequence
  Synthetic oligonucleotide: BID-2410
accugcaggcaggguug

SEQ ID NO: 42181 - RNA, 17 nt, Artificial Sequence
  Synthetic oligonucleotide: BID-2417
uugccagcccagccacu

SEQ ID NO: 42182 - RNA, 17 nt, Artificial Sequence
  Synthetic oligonucleotide: BID-2370
ugaccccaggggacccu

SEQ ID NO: 42183 - RNA, 17 nt, Artificial Sequence
  Synthetic oligonucleotide: BID-2424
cucucccaggguccccu

SEQ ID NO: 42184 - RNA, 17 nt, Artificial Sequence
  Synthetic oligonucleotide: BID-2280
ggcccgccgcccgcccu

SEQ ID NO: 42185 - RNA, 17 nt, Artificial Sequence
  Synthetic oligonucleotide: BID-2479
ggucgcugcugaggccu

SEQ ID NO: 42186 - RNA, 17 nt, Artificial Sequence
  Synthetic oligonucleotide: BID-2456
cucuccggggcuggccu

SEQ ID NO: 42187 - RNA, 17 nt, Artificial Sequence
  Synthetic oligonucleotide: BID-2318
uccucuccacguggccu

SEQ ID NO: 42188 - RNA, 17 nt, Artificial Sequence
  Synthetic oligonucleotide: BID-2265
ccugggagacgcugccu

SEQ ID NO: 42189 - RNA, 17 nt, Artificial Sequence
  Synthetic oligonucleotide: BID-2431
cagcccugagcuccgcu

SEQ ID NO: 42190 - RNA, 17 nt, Artificial Sequence
  Synthetic oligonucleotide: BID-2504
ggcaggggucacgggcu

SEQ ID NO: 42191 - RNA, 17 nt, Artificial Sequence
  Synthetic oligonucleotide: BID-49
uaagugggcugggggcu

SEQ ID NO: 42192 - RNA, 17 nt, Artificial Sequence
  Synthetic oligonucleotide: BID-2506
ggucacgggcuggggcu

SEQ ID NO: 42193 - RNA, 17 nt, Artificial Sequence
  Synthetic oligonucleotide: BID-42
gauucuguaagugggcu

SEQ ID NO: 42194 - RNA, 17 nt, Artificial Sequence
  Synthetic oligonucleotide: BID-44
cuggggucaugauggcu

SEQ ID NO: 42195 - RNA, 17 nt, Artificial Sequence
  Synthetic oligonucleotide: BID-2373
ucagccaccaaguggcu

SEQ ID NO: 42196 - RNA, 17 nt, Artificial Sequence
  Synthetic oligonucleotide: BID-2364
uccucgcugcugcugcu

SEQ ID NO: 42197 - RNA, 17 nt, Artificial Sequence
  Synthetic oligonucleotide: BID-27
gugcggauucuguaagu

SEQ ID NO: 42198 - RNA, 17 nt, Artificial Sequence
  Synthetic oligonucleotide: BID-3616
ggggcgggcccgggcgu

SEQ ID NO: 42199 - RNA, 17 nt, Artificial Sequence
  Synthetic oligonucleotide: BID-2305
cggcgcggccggcaggu

SEQ ID NO: 42200 - RNA, 17 nt, Artificial Sequence
  Synthetic oligonucleotide: BID-2483
cuggcucccaccgcggu

SEQ ID NO: 42201 - RNA, 17 nt, Artificial Sequence
  Synthetic oligonucleotide: BID-2408
ucaccugcaggcagggu

SEQ ID NO: 42202 - RNA, 17 nt, Artificial Sequence
  Synthetic oligonucleotide: BID-2308
aggucggugcugagggu

SEQ ID NO: 42203 - RNA, 17 nt, Artificial Sequence
  Synthetic oligonucleotide: BID-2440
uggaaagaccacggugu

SEQ ID NO: 42204 - RNA, 17 nt, Artificial Sequence
  Synthetic oligonucleotide: BID-2527
ccgcgcgcuuccuccuu

SEQ ID NO: 42205 - RNA, 17 nt, Artificial Sequence
  Synthetic oligonucleotide: BID-2409
caccugcaggcaggguu

SEQ ID NO: 42206 - RNA, 20 nt, Artificial Sequence
  Synthetic oligonucleotide: BID-2105
ccaaguggcugggcuggcaa

SEQ ID NO: 42207 - RNA, 20 nt, Artificial Sequence
  Synthetic oligonucleotide: BID-2166
cugcggugcuggaaagacca

SEQ ID NO: 42208 - RNA, 20 nt, Artificial Sequence
  Synthetic oligonucleotide: BID-2096
ugaguggcugaaugacccca

SEQ ID NO: 42209 - RNA, 20 nt, Artificial Sequence
  Synthetic oligonucleotide: BID-2150
agggcuucagagcucuccca

SEQ ID NO: 42210 - RNA, 20 nt, Artificial Sequence
  Synthetic oligonucleotide: BID-2227
gccggggcaggcggcaggca

SEQ ID NO: 42211 - RNA, 20 nt, Artificial Sequence
  Synthetic oligonucleotide: BID-2136
ccggccuucaccugcaggca

SEQ ID NO: 42212 - RNA, 20 nt, Artificial Sequence
  Synthetic oligonucleotide: BID-2104
accaaguggcugggcuggca

SEQ ID NO: 42213 - RNA, 20 nt, Artificial Sequence
  Synthetic oligonucleotide: BID-2007
cugccccggcguggagcuca

SEQ ID NO: 42214 - RNA, 20 nt, Artificial Sequence
  Synthetic oligonucleotide: BID-2229
caggcggcaggcagggguca

SEQ ID NO: 42215 - RNA, 20 nt, Artificial Sequence
  Synthetic oligonucleotide: BID-2050
ccacguggccuggggauuca

SEQ ID NO: 42216 - RNA, 20 nt, Artificial Sequence
  Synthetic oligonucleotide: BID-3617
gcccgggcguggggggccga

SEQ ID NO: 42217 - RNA, 20 nt, Artificial Sequence
  Synthetic oligonucleotide: BID-2015
ccgcggugggagccagagga

SEQ ID NO: 42218 - RNA, 20 nt, Artificial Sequence
  Synthetic oligonucleotide: BID-2198
gaggagggcgcccgggcgga

SEQ ID NO: 42219 - RNA, 20 nt, Artificial Sequence
  Synthetic oligonucleotide: BID-2053
uggccuggggauucagggga

SEQ ID NO: 42220 - RNA, 20 nt, Artificial Sequence
  Synthetic oligonucleotide: BID-2062
aggggugcggggcgcgggga

SEQ ID NO: 42221 - RNA, 20 nt, Artificial Sequence
  Synthetic oligonucleotide: BID-2044
guccgccucggaggcgggga

SEQ ID NO: 42222 - RNA, 20 nt, Artificial Sequence
  Synthetic oligonucleotide: BID-2066
gcggggcgcggggaggggga

SEQ ID NO: 42223 - RNA, 20 nt, Artificial Sequence
  Synthetic oligonucleotide: BID-20
cagcggugcuggggucauga

SEQ ID NO: 42224 - RNA, 20 nt, Artificial Sequence
  Synthetic oligonucleotide: BID-2025
aggccucagcagcgaccuga

SEQ ID NO: 42225 - RNA, 20 nt, Artificial Sequence
  Synthetic oligonucleotide: BID-2148
cccagccacuugguggcuga

SEQ ID NO: 42226 - RNA, 20 nt, Artificial Sequence
  Synthetic oligonucleotide: BID-2036
ggccggcaggucggugcuga

SEQ ID NO: 42227 - RNA, 20 nt, Artificial Sequence
  Synthetic oligonucleotide: BID-2140
ccaacccugccugcagguga

SEQ ID NO: 42228 - RNA, 20 nt, Artificial Sequence
  Synthetic oligonucleotide: BID-2155
acaucauugccagugcucua

SEQ ID NO: 42229 - RNA, 20 nt, Artificial Sequence
  Synthetic oligonucleotide: BID-2230
aggcggcaggcaggggucac

SEQ ID NO: 42230 - RNA, 20 nt, Artificial Sequence
  Synthetic oligonucleotide: BID-2133
ugggccuucugcggcuggac

SEQ ID NO: 42231 - RNA, 20 nt, Artificial Sequence
  Synthetic oligonucleotide: BID-2087
cggucagagcggccgcuuac

SEQ ID NO: 42232 - RNA, 20 nt, Artificial Sequence
  Synthetic oligonucleotide: BID-2176
cggcaaggguggccugcacc

SEQ ID NO: 42233 - RNA, 20 nt, Artificial Sequence
  Synthetic oligonucleotide: BID-2203
gaggggaggcgggagagacc

SEQ ID NO: 42234 - RNA, 20 nt, Artificial Sequence
  Synthetic oligonucleotide: BID-2098
ugaaugaccccaggggaccc

SEQ ID NO: 42235 - RNA, 20 nt, Artificial Sequence
  Synthetic oligonucleotide: BID-2095
uugaguggcugaaugacccc

SEQ ID NO: 42236 - RNA, 20 nt, Artificial Sequence
  Synthetic oligonucleotide: BID-2023
aggcggggggucagagcccc

SEQ ID NO: 42237 - RNA, 20 nt, Artificial Sequence
  Synthetic oligonucleotide: BID-2185
caccccuccccugaaucccc

SEQ ID NO: 42238 - RNA, 20 nt, Artificial Sequence
  Synthetic oligonucleotide: BID-2151
agagcucucccagggucccc

SEQ ID NO: 42239 - RNA, 20 nt, Artificial Sequence
  Synthetic oligonucleotide: BID-2069
ggaggggccgaggccagccc

SEQ ID NO: 42240 - RNA, 20 nt, Artificial Sequence
  Synthetic oligonucleotide: BID-3618
uccuucggccccccacgccc

SEQ ID NO: 42241 - RNA, 20 nt, Artificial Sequence
  Synthetic oligonucleotide: BID-2008
ucagggcccgccgcccgccc

SEQ ID NO: 42242 - RNA, 20 nt, Artificial Sequence
  Synthetic oligonucleotide: BID-3619
gggcccgccccggcccgccc

SEQ ID NO: 42243 - RNA, 20 nt, Artificial Sequence
  Synthetic oligonucleotide: BID-3620
ccccacgcccgggcccgccc

SEQ ID NO: 42244 - RNA, 20 nt, Artificial Sequence
  Synthetic oligonucleotide: BID-2029
cucccgccuccccuccgccc

SEQ ID NO: 42245 - RNA, 20 nt, Artificial Sequence
  Synthetic oligonucleotide: BID-2195
ccgcgccgaggagggcgccc

SEQ ID NO: 42246 - RNA, 20 nt, Artificial Sequence
  Synthetic oligonucleotide: BID-3621
gggcgggccggggcgggccc

SEQ ID NO: 42247 - RNA, 20 nt, Artificial Sequence
  Synthetic oligonucleotide: BID-2004
ccccugccugccgccugccc

SEQ ID NO: 42248 - RNA, 20 nt, Artificial Sequence
  Synthetic oligonucleotide: BID-2002
agugcacccgcgccccuccc

SEQ ID NO: 42249 - RNA, 20 nt, Artificial Sequence
  Synthetic oligonucleotide: BID-2149
gagggcuucagagcucuccc

SEQ ID NO: 42250 - RNA, 20 nt, Artificial Sequence
  Synthetic oligonucleotide: BID-2251
gggccgaggcagcgucuccc

SEQ ID NO: 42251 - RNA, 20 nt, Artificial Sequence
  Synthetic oligonucleotide: BID-3622
cuccuucggccccccacgcc

SEQ ID NO: 42252 - RNA, 20 nt, Artificial Sequence
  Synthetic oligonucleotide: BID-2221
cgggcccugagcuccacgcc

SEQ ID NO: 42253 - RNA, 20 nt, Artificial Sequence
  Synthetic oligonucleotide: BID-2028
ucucccgccuccccuccgcc

SEQ ID NO: 42254 - RNA, 20 nt, Artificial Sequence
  Synthetic oligonucleotide: BID-2206
cucaggucgcugcugaggcc

SEQ ID NO: 42255 - RNA, 20 nt, Artificial Sequence
  Synthetic oligonucleotide: BID-2177
aggguggccugcacccggcc

SEQ ID NO: 42256 - RNA, 20 nt, Artificial Sequence
  Synthetic oligonucleotide: BID-21
cugugcuccuccagccggcc

SEQ ID NO: 42257 - RNA, 20 nt, Artificial Sequence
  Synthetic oligonucleotide: BID-1995
ugggagacgcugccucggcc

SEQ ID NO: 42258 - RNA, 20 nt, Artificial Sequence
  Synthetic oligonucleotide: BID-2027
ucagcagcgaccugagggcc

SEQ ID NO: 42259 - RNA, 20 nt, Artificial Sequence
  Synthetic oligonucleotide: BID-19
ucggugggcagcgaggggcc

SEQ ID NO: 42260 - RNA, 20 nt, Artificial Sequence
  Synthetic oligonucleotide: BID-2046
uguguccucuccacguggcc

SEQ ID NO: 42261 - RNA, 20 nt, Artificial Sequence
  Synthetic oligonucleotide: BID-2001
gagugcacccgcgccccucc

SEQ ID NO: 42262 - RNA, 20 nt, Artificial Sequence
  Synthetic oligonucleotide: BID-2249
gcgggggcgcgggcgcgucc

SEQ ID NO: 42263 - RNA, 20 nt, Artificial Sequence
  Synthetic oligonucleotide: BID-1991
gggcgccauaaggaggaagc

SEQ ID NO: 42264 - RNA, 20 nt, Artificial Sequence
  Synthetic oligonucleotide: BID-2157
uugccagugcucuaaggagc

SEQ ID NO: 42265 - RNA, 20 nt, Artificial Sequence
  Synthetic oligonucleotide: BID-2220
gcgggcccugagcuccacgc

SEQ ID NO: 42266 - RNA, 20 nt, Artificial Sequence
  Synthetic oligonucleotide: BID-2072
ccggagaggagaaaacccgc

SEQ ID NO: 42267 - RNA, 20 nt, Artificial Sequence
  Synthetic oligonucleotide: BID-2179
cugcacccggccaggcccgc

SEQ ID NO: 42268 - RNA, 20 nt, Artificial Sequence
  Synthetic oligonucleotide: BID-2243
acucaccacccuccagccgc

SEQ ID NO: 42269 - RNA, 20 nt, Artificial Sequence
  Synthetic oligonucleotide: BID-1986
ggccgaaggaggaagcgcgc

SEQ ID NO: 42270 - RNA, 20 nt, Artificial Sequence
  Synthetic oligonucleotide: BID-2241
gcguaccccgggaggggcgc

SEQ ID NO: 42271 - RNA, 20 nt, Artificial Sequence
  Synthetic oligonucleotide: BID-2059
aggggaggggugcggggcgc

SEQ ID NO: 42272 - RNA, 20 nt, Artificial Sequence
  Synthetic oligonucleotide: BID-2247
cccuccagccgcgggggcgc

SEQ ID NO: 42273 - RNA, 20 nt, Artificial Sequence
  Synthetic oligonucleotide: BID-2141
cccugccugcaggugaaggc

SEQ ID NO: 42274 - RNA, 20 nt, Artificial Sequence
  Synthetic oligonucleotide: BID-2226
cgccggggcaggcggcaggc

SEQ ID NO: 42275 - RNA, 20 nt, Artificial Sequence
  Synthetic oligonucleotide: BID-2135
accggccuucaccugcaggc

SEQ ID NO: 42276 - RNA, 20 nt, Artificial Sequence
  Synthetic oligonucleotide: BID-2019
ggagccagaggaggggaggc

SEQ ID NO: 42277 - RNA, 20 nt, Artificial Sequence
  Synthetic oligonucleotide: BID-2202
cgcccgggcggaggggaggc

SEQ ID NO: 42278 - RNA, 20 nt, Artificial Sequence
  Synthetic oligonucleotide: BID-2033
cccuccucggcgcggccggc

SEQ ID NO: 42279 - RNA, 20 nt, Artificial Sequence
  Synthetic oligonucleotide: BID-23
cagcgaggggccgggccggc

SEQ ID NO: 42280 - RNA, 20 nt, Artificial Sequence
  Synthetic oligonucleotide: BID-1997
cgcgcccgcgcccccgcggc

SEQ ID NO: 42281 - RNA, 20 nt, Artificial Sequence
  Synthetic oligonucleotide: BID-2032
ggcgcccuccucggcgcggc

SEQ ID NO: 42282 - RNA, 20 nt, Artificial Sequence
  Synthetic oligonucleotide: BID-2219
ucgggcccagggcgggcggc

SEQ ID NO: 42283 - RNA, 20 nt, Artificial Sequence
  Synthetic oligonucleotide: BID-2132
ggggcugggccuucugcggc

SEQ ID NO: 42284 - RNA, 20 nt, Artificial Sequence
  Synthetic oligonucleotide: BID-2216
accgcggucgggcccagggc

SEQ ID NO: 42285 - RNA, 20 nt, Artificial Sequence
  Synthetic oligonucleotide: BID-2026
cucagcagcgaccugagggc

SEQ ID NO: 42286 - RNA, 20 nt, Artificial Sequence
  Synthetic oligonucleotide: BID-2231
ggcaggcaggggucacgggc

SEQ ID NO: 42287 - RNA, 20 nt, Artificial Sequence
  Synthetic oligonucleotide: BID-29
ugggcagcgaggggccgggc

SEQ ID NO: 42288 - RNA, 20 nt, Artificial Sequence
  Synthetic oligonucleotide: BID-3623
gggggcgggccggggcgggc

SEQ ID NO: 42289 - RNA, 20 nt, Artificial Sequence
  Synthetic oligonucleotide: BID-24
cucggugggcagcgaggggc

SEQ ID NO: 42290 - RNA, 20 nt, Artificial Sequence
  Synthetic oligonucleotide: BID-2223
ccugagcuccacgccggggc

SEQ ID NO: 42291 - RNA, 20 nt, Artificial Sequence
  Synthetic oligonucleotide: BID-3624
gggccggggcgggccggggc

SEQ ID NO: 42292 - RNA, 20 nt, Artificial Sequence
  Synthetic oligonucleotide: BID-2183
gguuuucuccucuccggggc

SEQ ID NO: 42293 - RNA, 20 nt, Artificial Sequence
  Synthetic oligonucleotide: BID-22
ucuguaagugggcugggggc

SEQ ID NO: 42294 - RNA, 20 nt, Artificial Sequence
  Synthetic oligonucleotide: BID-2103
cagccaccaaguggcugggc

SEQ ID NO: 42295 - RNA, 20 nt, Artificial Sequence
  Synthetic oligonucleotide: BID-2170
ggaaagaccacggugugggc

SEQ ID NO: 42296 - RNA, 20 nt, Artificial Sequence
  Synthetic oligonucleotide: BID-2074
agaaaacccgcgggccuggc

SEQ ID NO: 42297 - RNA, 20 nt, Artificial Sequence
  Synthetic oligonucleotide: BID-2101
gcccucagccaccaaguggc

SEQ ID NO: 42298 - RNA, 20 nt, Artificial Sequence
  Synthetic oligonucleotide: BID-2081
ccagcaccgcagacaccugc

SEQ ID NO: 42299 - RNA, 20 nt, Artificial Sequence
  Synthetic oligonucleotide: BID-2134
cuggaccggccuucaccugc

SEQ ID NO: 42300 - RNA, 20 nt, Artificial Sequence
  Synthetic oligonucleotide: BID-2190
gacccucagcaccgaccugc

SEQ ID NO: 42301 - RNA, 20 nt, Artificial Sequence
  Synthetic oligonucleotide: BID-2092
cggauccucgcugcugcugc

SEQ ID NO: 42302 - RNA, 20 nt, Artificial Sequence
  Synthetic oligonucleotide: BID-2165
ccggcaggugucugcggugc

SEQ ID NO: 42303 - RNA, 20 nt, Artificial Sequence
  Synthetic oligonucleotide: BID-2076
ccgcgggccuggccgggugc

SEQ ID NO: 42304 - RNA, 20 nt, Artificial Sequence
  Synthetic oligonucleotide: BID-2056
gggauucaggggaggggugc

SEQ ID NO: 42305 - RNA, 20 nt, Artificial Sequence
  Synthetic oligonucleotide: BID-2077
cgggugcaggccacccuugc

SEQ ID NO: 42306 - RNA, 20 nt, Artificial Sequence
  Synthetic oligonucleotide: BID-2209
accccccgccuccccuccuc

SEQ ID NO: 42307 - RNA, 20 nt, Artificial Sequence
  Synthetic oligonucleotide: BID-2083
gcuccucccgagcggagcuc

SEQ ID NO: 42308 - RNA, 20 nt, Artificial Sequence
  Synthetic oligonucleotide: BID-2006
ccugccccggcguggagcuc

SEQ ID NO: 42309 - RNA, 20 nt, Artificial Sequence
  Synthetic oligonucleotide: BID-2160
gucagcccugagcuccgcuc

SEQ ID NO: 42310 - RNA, 20 nt, Artificial Sequence
  Synthetic oligonucleotide: BID-2180
cccgcggguuuucuccucuc

SEQ ID NO: 42311 - RNA, 20 nt, Artificial Sequence
  Synthetic oligonucleotide: BID-2248
cgcgggggcgcgggcgcguc

SEQ ID NO: 42312 - RNA, 20 nt, Artificial Sequence
  Synthetic oligonucleotide: BID-2038
gcaggucggugcugaggguc

SEQ ID NO: 42313 - RNA, 20 nt, Artificial Sequence
  Synthetic oligonucleotide: BID-2049
uccacguggccuggggauuc

SEQ ID NO: 42314 - RNA, 20 nt, Artificial Sequence
  Synthetic oligonucleotide: BID-2100
ugaagcccucagccaccaag

SEQ ID NO: 42315 - RNA, 20 nt, Artificial Sequence
  Synthetic oligonucleotide: BID-1990
ggggcgccauaaggaggaag

SEQ ID NO: 42316 - RNA, 20 nt, Artificial Sequence
  Synthetic oligonucleotide: BID-2097
gaguggcugaaugaccccag

SEQ ID NO: 42317 - RNA, 20 nt, Artificial Sequence
  Synthetic oligonucleotide: BID-2228
ccggggcaggcggcaggcag

SEQ ID NO: 42318 - RNA, 20 nt, Artificial Sequence
  Synthetic oligonucleotide: BID-2
caacaaauacgaaugugcag

SEQ ID NO: 42319 - RNA, 20 nt, Artificial Sequence
  Synthetic oligonucleotide: BID-2051
cacguggccuggggauucag

SEQ ID NO: 42320 - RNA, 20 nt, Artificial Sequence
  Synthetic oligonucleotide: BID-2086
cugacaaagcgcggucagag

SEQ ID NO: 42321 - RNA, 20 nt, Artificial Sequence
  Synthetic oligonucleotide: BID-2082
accugccggcuccucccgag

SEQ ID NO: 42322 - RNA, 20 nt, Artificial Sequence
  Synthetic oligonucleotide: BID-18
auggcucggugggcagcgag

SEQ ID NO: 42323 - RNA, 20 nt, Artificial Sequence
  Synthetic oligonucleotide: BID-2156
auugccagugcucuaaggag

SEQ ID NO: 42324 - RNA, 20 nt, Artificial Sequence
  Synthetic oligonucleotide: BID-2016
cgcggugggagccagaggag

SEQ ID NO: 42325 - RNA, 20 nt, Artificial Sequence
  Synthetic oligonucleotide: BID-2070
ggccgaggccagccccggag

SEQ ID NO: 42326 - RNA, 20 nt, Artificial Sequence
  Synthetic oligonucleotide: BID-2199
aggagggcgcccgggcggag

SEQ ID NO: 42327 - RNA, 20 nt, Artificial Sequence
  Synthetic oligonucleotide: BID-2239
cucggcgcguaccccgggag

SEQ ID NO: 42328 - RNA, 20 nt, Artificial Sequence
  Synthetic oligonucleotide: BID-2054
ggccuggggauucaggggag

SEQ ID NO: 42329 - RNA, 20 nt, Artificial Sequence
  Synthetic oligonucleotide: BID-2063
ggggugcggggcgcggggag

SEQ ID NO: 42330 - RNA, 20 nt, Artificial Sequence
  Synthetic oligonucleotide: BID-2067
cggggcgcggggagggggag

SEQ ID NO: 42331 - RNA, 20 nt, Artificial Sequence
  Synthetic oligonucleotide: BID-2187
aauccccaggccacguggag

SEQ ID NO: 42332 - RNA, 20 nt, Artificial Sequence
  Synthetic oligonucleotide: BID-2094
gcugcugggaaacuguugag

SEQ ID NO: 42333 - RNA, 20 nt, Artificial Sequence
  Synthetic oligonucleotide: BID-2186
cccugaauccccaggccacg

SEQ ID NO: 42334 - RNA, 20 nt, Artificial Sequence
  Synthetic oligonucleotide: BID-2045
uuuguuguguccucuccacg

SEQ ID NO: 42335 - RNA, 20 nt, Artificial Sequence
  Synthetic oligonucleotide: BID-2210
cccuccucuggcucccaccg

SEQ ID NO: 42336 - RNA, 20 nt, Artificial Sequence
  Synthetic oligonucleotide: BID-2010
gcccgcccugggcccgaccg

SEQ ID NO: 42337 - RNA, 20 nt, Artificial Sequence
  Synthetic oligonucleotide: BID-2071
cccggagaggagaaaacccg

SEQ ID NO: 42338 - RNA, 20 nt, Artificial Sequence
  Synthetic oligonucleotide: BID-1996
cggacgcgcccgcgcccccg

SEQ ID NO: 42339 - RNA, 20 nt, Artificial Sequence
  Synthetic oligonucleotide: BID-2178
ccugcacccggccaggcccg

SEQ ID NO: 42340 - RNA, 20 nt, Artificial Sequence
  Synthetic oligonucleotide: BID-2003
gugcacccgcgccccucccg

SEQ ID NO: 42341 - RNA, 20 nt, Artificial Sequence
  Synthetic oligonucleotide: BID-2242
cacucaccacccuccagccg

SEQ ID NO: 42342 - RNA, 20 nt, Artificial Sequence
  Synthetic oligonucleotide: BID-2222
gggcccugagcuccacgccg

SEQ ID NO: 42343 - RNA, 20 nt, Artificial Sequence
  Synthetic oligonucleotide: BID-2250
gcgcgggcgcguccgggccg

SEQ ID NO: 42344 - RNA, 20 nt, Artificial Sequence
  Synthetic oligonucleotide: BID-3625
gggcgggccggggcgggccg

SEQ ID NO: 42345 - RNA, 20 nt, Artificial Sequence
  Synthetic oligonucleotide: BID-2068
gcggggagggggaggggccg

SEQ ID NO: 42346 - RNA, 20 nt, Artificial Sequence
  Synthetic oligonucleotide: BID-2188
caaagccuuccccgccuccg

SEQ ID NO: 42347 - RNA, 20 nt, Artificial Sequence
  Synthetic oligonucleotide: BID-2154
guuucccagcagcagcagcg

SEQ ID NO: 42348 - RNA, 20 nt, Artificial Sequence
  Synthetic oligonucleotide: BID-9
ugauggcucggugggcagcg

SEQ ID NO: 42349 - RNA, 20 nt, Artificial Sequence
  Synthetic oligonucleotide: BID-2244
cucaccacccuccagccgcg

SEQ ID NO: 42350 - RNA, 20 nt, Artificial Sequence
  Synthetic oligonucleotide: BID-1112
gggccgaaggaggaagcgcg

SEQ ID NO: 42351 - RNA, 20 nt, Artificial Sequence
  Synthetic oligonucleotide: BID-1987
gccgaaggaggaagcgcgcg

SEQ ID NO: 42352 - RNA, 20 nt, Artificial Sequence
  Synthetic oligonucleotide: BID-2060
ggggaggggugcggggcgcg

SEQ ID NO: 42353 - RNA, 20 nt, Artificial Sequence
  Synthetic oligonucleotide: BID-2020
gagccagaggaggggaggcg

SEQ ID NO: 42354 - RNA, 20 nt, Artificial Sequence
  Synthetic oligonucleotide: BID-2005
gccugccgccugccccggcg

SEQ ID NO: 42355 - RNA, 20 nt, Artificial Sequence
  Synthetic oligonucleotide: BID-2031
cccgggcgcccuccucggcg

SEQ ID NO: 42356 - RNA, 20 nt, Artificial Sequence
  Synthetic oligonucleotide: BID-3626
ggccggggcgggcccgggcg

SEQ ID NO: 42357 - RNA, 20 nt, Artificial Sequence
  Synthetic oligonucleotide: BID-2058
caggggaggggugcggggcg

SEQ ID NO: 42358 - RNA, 20 nt, Artificial Sequence
  Synthetic oligonucleotide: BID-2171
gaaagaccacggugugggcg

SEQ ID NO: 42359 - RNA, 20 nt, Artificial Sequence
  Synthetic oligonucleotide: BID-2057
ggauucaggggaggggugcg

SEQ ID NO: 42360 - RNA, 20 nt, Artificial Sequence
  Synthetic oligonucleotide: BID-3627
cgggcguggggggccgaagg

SEQ ID NO: 42361 - RNA, 20 nt, Artificial Sequence
  Synthetic oligonucleotide: BID-2224
gagcuccacgccggggcagg

SEQ ID NO: 42362 - RNA, 20 nt, Artificial Sequence
  Synthetic oligonucleotide: BID-2014
accgcggugggagccagagg

SEQ ID NO: 42363 - RNA, 20 nt, Artificial Sequence
  Synthetic oligonucleotide: BID-2192
accugccggccgcgccgagg

SEQ ID NO: 42364 - RNA, 20 nt, Artificial Sequence
  Synthetic oligonucleotide: BID-2189
agccuuccccgccuccgagg

SEQ ID NO: 42365 - RNA, 20 nt, Artificial Sequence
  Synthetic oligonucleotide: BID-2018
gggagccagaggaggggagg

SEQ ID NO: 42366 - RNA, 20 nt, Artificial Sequence
  Synthetic oligonucleotide: BID-2201
gcgcccgggcggaggggagg

SEQ ID NO: 42367 - RNA, 20 nt, Artificial Sequence
  Synthetic oligonucleotide: BID-2064
gggugcggggcgcggggagg

SEQ ID NO: 42368 - RNA, 20 nt, Artificial Sequence
  Synthetic oligonucleotide: BID-2011
cgcccugggcccgaccgcgg

SEQ ID NO: 42369 - RNA, 20 nt, Artificial Sequence
  Synthetic oligonucleotide: BID-2021
agccagaggaggggaggcgg

SEQ ID NO: 42370 - RNA, 20 nt, Artificial Sequence
  Synthetic oligonucleotide: BID-2197
cgaggagggcgcccgggcgg

SEQ ID NO: 42371 - RNA, 20 nt, Artificial Sequence
  Synthetic oligonucleotide: BID-2218
gucgggcccagggcgggcgg

SEQ ID NO: 42372 - RNA, 20 nt, Artificial Sequence
  Synthetic oligonucleotide: BID-8
cuggggucaugauggcucgg

SEQ ID NO: 42373 - RNA, 20 nt, Artificial Sequence
  Synthetic oligonucleotide: BID-2215
caccgcggucgggcccaggg

SEQ ID NO: 42374 - RNA, 20 nt, Artificial Sequence
  Synthetic oligonucleotide: BID-2000
gcgcccccgcggcuggaggg

SEQ ID NO: 42375 - RNA, 20 nt, Artificial Sequence
  Synthetic oligonucleotide: BID-2196
cgccgaggagggcgcccggg

SEQ ID NO: 42376 - RNA, 20 nt, Artificial Sequence
  Synthetic oligonucleotide: BID-2022
gccagaggaggggaggcggg

SEQ ID NO: 42377 - RNA, 20 nt, Artificial Sequence
  Synthetic oligonucleotide: BID-2217
gcggucgggcccagggcggg

SEQ ID NO: 42378 - RNA, 20 nt, Artificial Sequence
  Synthetic oligonucleotide: BID-2052
guggccuggggauucagggg

SEQ ID NO: 42379 - RNA, 20 nt, Artificial Sequence
  Synthetic oligonucleotide: BID-2017
ggugggagccagaggagggg

SEQ ID NO: 42380 - RNA, 20 nt, Artificial Sequence
  Synthetic oligonucleotide: BID-2200
agggcgcccgggcggagggg

SEQ ID NO: 42381 - RNA, 20 nt, Artificial Sequence
  Synthetic oligonucleotide: BID-3628
cgggccggggcgggccgggg

SEQ ID NO: 42382 - RNA, 20 nt, Artificial Sequence
  Synthetic oligonucleotide: BID-2061
gaggggugcggggcgcgggg

SEQ ID NO: 42383 - RNA, 20 nt, Artificial Sequence
  Synthetic oligonucleotide: BID-2065
ugcggggcgcggggaggggg

SEQ ID NO: 42384 - RNA, 20 nt, Artificial Sequence
  Synthetic oligonucleotide: BID-3629
ggggcgggcccgggcguggg

SEQ ID NO: 42385 - RNA, 20 nt, Artificial Sequence
  Synthetic oligonucleotide: BID-2169
uggaaagaccacgguguggg

SEQ ID NO: 42386 - RNA, 20 nt, Artificial Sequence
  Synthetic oligonucleotide: BID-25
cgaggggccgggccggcugg

SEQ ID NO: 42387 - RNA, 20 nt, Artificial Sequence
  Synthetic oligonucleotide: BID-1998
gcccgcgcccccgcggcugg

SEQ ID NO: 42388 - RNA, 20 nt, Artificial Sequence
  Synthetic oligonucleotide: BID-16
ggauucuguaagugggcugg

SEQ ID NO: 42389 - RNA, 20 nt, Artificial Sequence
  Synthetic oligonucleotide: BID-3630
cggggcgggcccgggcgugg

SEQ ID NO: 42390 - RNA, 20 nt, Artificial Sequence
  Synthetic oligonucleotide: BID-2146
uugccagcccagccacuugg

SEQ ID NO: 42391 - RNA, 20 nt, Artificial Sequence
  Synthetic oligonucleotide: BID-2024
caggccucagcagcgaccug

SEQ ID NO: 42392 - RNA, 20 nt, Artificial Sequence
  Synthetic oligonucleotide: BID-2153
agcucucccaggguccccug

SEQ ID NO: 42393 - RNA, 20 nt, Artificial Sequence
  Synthetic oligonucleotide: BID-2048
uguccucuccacguggccug

SEQ ID NO: 42394 - RNA, 20 nt, Artificial Sequence
  Synthetic oligonucleotide: BID-2233
caggcaggggucacgggcug

SEQ ID NO: 42395 - RNA, 20 nt, Artificial Sequence
  Synthetic oligonucleotide: BID-17
cggauucuguaagugggcug

SEQ ID NO: 42396 - RNA, 20 nt, Artificial Sequence
  Synthetic oligonucleotide: BID-2147
gcccagccacuugguggcug

SEQ ID NO: 42397 - RNA, 20 nt, Artificial Sequence
  Synthetic oligonucleotide: BID-2164
gaggagccggcaggugucug

SEQ ID NO: 42398 - RNA, 20 nt, Artificial Sequence
  Synthetic oligonucleotide: BID-2131
gcugggggcugggccuucug

SEQ ID NO: 42399 - RNA, 20 nt, Artificial Sequence
  Synthetic oligonucleotide: BID-12
ccggcuggaggagcacagug

SEQ ID NO: 42400 - RNA, 20 nt, Artificial Sequence
  Synthetic oligonucleotide: BID-3631
ccggggcgggcccgggcgug

SEQ ID NO: 42401 - RNA, 20 nt, Artificial Sequence
  Synthetic oligonucleotide: BID-2167
gugcuggaaagaccacggug

SEQ ID NO: 42402 - RNA, 20 nt, Artificial Sequence
  Synthetic oligonucleotide: BID-2055
ggggauucaggggaggggug

SEQ ID NO: 42403 - RNA, 20 nt, Artificial Sequence
  Synthetic oligonucleotide: BID-2091
agagcacuggcaaugaugug

SEQ ID NO: 42404 - RNA, 20 nt, Artificial Sequence
  Synthetic oligonucleotide: BID-2139
uucaccugcaggcaggguug

SEQ ID NO: 42405 - RNA, 20 nt, Artificial Sequence
  Synthetic oligonucleotide: BID-2145
cccuugccagcccagccacu

SEQ ID NO: 42406 - RNA, 20 nt, Artificial Sequence
  Synthetic oligonucleotide: BID-2099
gaaugaccccaggggacccu

SEQ ID NO: 42407 - RNA, 20 nt, Artificial Sequence
  Synthetic oligonucleotide: BID-2152
gagcucucccaggguccccu

SEQ ID NO: 42408 - RNA, 20 nt, Artificial Sequence
  Synthetic oligonucleotide: BID-2009
cagggcccgccgcccgcccu

SEQ ID NO: 42409 - RNA, 20 nt, Artificial Sequence
  Synthetic oligonucleotide: BID-2184
cuccucuccggggcuggccu

SEQ ID NO: 42410 - RNA, 20 nt, Artificial Sequence
  Synthetic oligonucleotide: BID-2047
guguccucuccacguggccu

SEQ ID NO: 42411 - RNA, 20 nt, Artificial Sequence
  Synthetic oligonucleotide: BID-1994
gcgccugggagacgcugccu

SEQ ID NO: 42412 - RNA, 20 nt, Artificial Sequence
  Synthetic oligonucleotide: BID-2030
cuccgcccgggcgcccuccu

SEQ ID NO: 42413 - RNA, 20 nt, Artificial Sequence
  Synthetic oligonucleotide: BID-2159
ugucagcccugagcuccgcu

SEQ ID NO: 42414 - RNA, 20 nt, Artificial Sequence
  Synthetic oligonucleotide: BID-2232
gcaggcaggggucacgggcu

SEQ ID NO: 42415 - RNA, 20 nt, Artificial Sequence
  Synthetic oligonucleotide: BID-30
cuguaagugggcugggggcu

SEQ ID NO: 42416 - RNA, 20 nt, Artificial Sequence
  Synthetic oligonucleotide: BID-2234
aggggucacgggcuggggcu

SEQ ID NO: 42417 - RNA, 20 nt, Artificial Sequence
  Synthetic oligonucleotide: BID-2102
cccucagccaccaaguggcu

SEQ ID NO: 42418 - RNA, 20 nt, Artificial Sequence
  Synthetic oligonucleotide: BID-3632
gccggggcgggcccgggcgu

SEQ ID NO: 42419 - RNA, 20 nt, Artificial Sequence
  Synthetic oligonucleotide: BID-2034
ccucggcgcggccggcaggu

SEQ ID NO: 42420 - RNA, 20 nt, Artificial Sequence
  Synthetic oligonucleotide: BID-2137
ccuucaccugcaggcagggu

SEQ ID NO: 42421 - RNA, 20 nt, Artificial Sequence
  Synthetic oligonucleotide: BID-2037
ggcaggucggugcugagggu

SEQ ID NO: 42422 - RNA, 20 nt, Artificial Sequence
  Synthetic oligonucleotide: BID-2168
ugcuggaaagaccacggugu

SEQ ID NO: 42423 - RNA, 20 nt, Artificial Sequence
  Synthetic oligonucleotide: BID-2255
gccccgcgcgcuuccuccuu

SEQ ID NO: 42424 - RNA, 20 nt, Artificial Sequence
  Synthetic oligonucleotide: BID-2138
cuucaccugcaggcaggguu

SEQ ID NO: 42425 - RNA, 17 nt, Artificial Sequence
  Synthetic oligonucleotide: BID-1064
gggcaagaggggcagaa

SEQ ID NO: 42426 - RNA, 17 nt, Artificial Sequence
  Synthetic oligonucleotide: BID-1103
ggauaaggcuccaggaa

SEQ ID NO: 42427 - RNA, 17 nt, Artificial Sequence
  Synthetic oligonucleotide: BID-746
cugaaacagucgcguaa

SEQ ID NO: 42428 - RNA, 17 nt, Artificial Sequence
  Synthetic oligonucleotide: BID-749
agucgcguaagggguaa

SEQ ID NO: 42429 - RNA, 17 nt, Artificial Sequence
  Synthetic oligonucleotide: BID-960
cugagcuggggucuuaa

SEQ ID NO: 42430 - RNA, 17 nt, Artificial Sequence
  Synthetic oligonucleotide: BID-991
ucguggcugggguuuaa

SEQ ID NO: 42431 - RNA, 17 nt, Artificial Sequence
  Synthetic oligonucleotide: BID-734
auucucugcaacccaca

SEQ ID NO: 42432 - RNA, 17 nt, Artificial Sequence
  Synthetic oligonucleotide: BID-727
aauaaacaacaagcaca

SEQ ID NO: 42433 - RNA, 17 nt, Artificial Sequence
  Synthetic oligonucleotide: BID-998
cucccaggacgggcaca

SEQ ID NO: 42434 - RNA, 17 nt, Artificial Sequence
  Synthetic oligonucleotide: BID-840
agguccucacggaacca

SEQ ID NO: 42435 - RNA, 17 nt, Artificial Sequence
  Synthetic oligonucleotide: BID-978
ccucugccugcggccca

SEQ ID NO: 42436 - RNA, 17 nt, Artificial Sequence
  Synthetic oligonucleotide: BID-980
ucugccccucuugccca

SEQ ID NO: 42437 - RNA, 17 nt, Artificial Sequence
  Synthetic oligonucleotide: BID-1083
cucggucaucacuccca

SEQ ID NO: 42438 - RNA, 17 nt, Artificial Sequence
  Synthetic oligonucleotide: BID-1074
aggcagaggcuuggcca

SEQ ID NO: 42439 - RNA, 17 nt, Artificial Sequence
  Synthetic oligonucleotide: BID-970
agguagacagagcucca

SEQ ID NO: 42440 - RNA, 17 nt, Artificial Sequence
  Synthetic oligonucleotide: BID-993
gcugggguuuaaaggca

SEQ ID NO: 42441 - RNA, 17 nt, Artificial Sequence
  Synthetic oligonucleotide: BID-1067
gaggggcagaaggggca

SEQ ID NO: 42442 - RNA, 17 nt, Artificial Sequence
  Synthetic oligonucleotide: BID-1086
acucccaggggacugca

SEQ ID NO: 42443 - RNA, 17 nt, Artificial Sequence
  Synthetic oligonucleotide: BID-838
gucauucuagguccuca

SEQ ID NO: 42444 - RNA, 17 nt, Artificial Sequence
  Synthetic oligonucleotide: BID-1079
cuuaagaccccagcuca

SEQ ID NO: 42445 - RNA, 17 nt, Artificial Sequence
  Synthetic oligonucleotide: BID-1061
ucccucccugggcaaga

SEQ ID NO: 42446 - RNA, 17 nt, Artificial Sequence
  Synthetic oligonucleotide: BID-965
gguguggggagcgcaga

SEQ ID NO: 42447 - RNA, 17 nt, Artificial Sequence
  Synthetic oligonucleotide: BID-1063
ugggcaagaggggcaga

SEQ ID NO: 42448 - RNA, 17 nt, Artificial Sequence
  Synthetic oligonucleotide: BID-1094
ccuccuguggguggaga

SEQ ID NO: 42449 - RNA, 17 nt, Artificial Sequence
  Synthetic oligonucleotide: BID-1106
ggggugcaagccugaga

SEQ ID NO: 42450 - RNA, 17 nt, Artificial Sequence
  Synthetic oligonucleotide: BID-944
cacaggaggcuuugaga

SEQ ID NO: 42451 - RNA, 17 nt, Artificial Sequence
  Synthetic oligonucleotide: BID-1088
acugcagggccccagga

SEQ ID NO: 42452 - RNA, 17 nt, Artificial Sequence
  Synthetic oligonucleotide: BID-995
gcagggaucucccagga

SEQ ID NO: 42453 - RNA, 17 nt, Artificial Sequence
  Synthetic oligonucleotide: BID-1102
uggauaaggcuccagga

SEQ ID NO: 42454 - RNA, 17 nt, Artificial Sequence
  Synthetic oligonucleotide: BID-982
ccccucuugcccaggga

SEQ ID NO: 42455 - RNA, 17 nt, Artificial Sequence
  Synthetic oligonucleotide: BID-1098
gugagagcgaggacuga

SEQ ID NO: 42456 - RNA, 17 nt, Artificial Sequence
  Synthetic oligonucleotide: BID-730
agcacagggacugguga

SEQ ID NO: 42457 - RNA, 17 nt, Artificial Sequence
  Synthetic oligonucleotide: BID-1100
gacugaggguguggaua

SEQ ID NO: 42458 - RNA, 17 nt, Artificial Sequence
  Synthetic oligonucleotide: BID-745
ucugaaacagucgcgua

SEQ ID NO: 42459 - RNA, 17 nt, Artificial Sequence
  Synthetic oligonucleotide: BID-748
cagucgcguaaggggua

SEQ ID NO: 42460 - RNA, 17 nt, Artificial Sequence
  Synthetic oligonucleotide: BID-959
ccugagcuggggucuua

SEQ ID NO: 42461 - RNA, 17 nt, Artificial Sequence
  Synthetic oligonucleotide: BID-942
auuccaucuccacccac

SEQ ID NO: 42462 - RNA, 17 nt, Artificial Sequence
  Synthetic oligonucleotide: BID-726
gaauaaacaacaagcac

SEQ ID NO: 42463 - RNA, 17 nt, Artificial Sequence
  Synthetic oligonucleotide: BID-997
ucucccaggacgggcac

SEQ ID NO: 42464 - RNA, 17 nt, Artificial Sequence
  Synthetic oligonucleotide: BID-996
cagggaucucccaggac

SEQ ID NO: 42465 - RNA, 17 nt, Artificial Sequence
  Synthetic oligonucleotide: BID-728
acaacaagcacagggac

SEQ ID NO: 42466 - RNA, 17 nt, Artificial Sequence
  Synthetic oligonucleotide: BID-851
gauaaugcugggacuac

SEQ ID NO: 42467 - RNA, 17 nt, Artificial Sequence
  Synthetic oligonucleotide: BID-825
gcagcgcagugagaacc

SEQ ID NO: 42468 - RNA, 17 nt, Artificial Sequence
  Synthetic oligonucleotide: BID-839
uagguccucacggaacc

SEQ ID NO: 42469 - RNA, 17 nt, Artificial Sequence
  Synthetic oligonucleotide: BID-1068
ggcagggacgcacaccc

SEQ ID NO: 42470 - RNA, 17 nt, Artificial Sequence
  Synthetic oligonucleotide: BID-975
ugccgggaggacgaccc

SEQ ID NO: 42471 - RNA, 17 nt, Artificial Sequence
  Synthetic oligonucleotide: BID-3633
gcggcuugcggggaccc

SEQ ID NO: 42472 - RNA, 17 nt, Artificial Sequence
  Synthetic oligonucleotide: BID-735
cccacuuuccaaacccc

SEQ ID NO: 42473 - RNA, 17 nt, Artificial Sequence
  Synthetic oligonucleotide: BID-1087
ggggacugcagggcccc

SEQ ID NO: 42474 - RNA, 17 nt, Artificial Sequence
  Synthetic oligonucleotide: BID-831
aaacauucagaaucccc

SEQ ID NO: 42475 - RNA, 17 nt, Artificial Sequence
  Synthetic oligonucleotide: BID-757
gccggcgcgggcucccc

SEQ ID NO: 42476 - RNA, 17 nt, Artificial Sequence
  Synthetic oligonucleotide: BID-954
ggggcccugcagucccc

SEQ ID NO: 42477 - RNA, 17 nt, Artificial Sequence
  Synthetic oligonucleotide: BID-1090
ggcacacauucaggccc

SEQ ID NO: 42478 - RNA, 17 nt, Artificial Sequence
  Synthetic oligonucleotide: BID-977
gccucugccugcggccc

SEQ ID NO: 42479 - RNA, 17 nt, Artificial Sequence
  Synthetic oligonucleotide: BID-979
uucugccccucuugccc

SEQ ID NO: 42480 - RNA, 17 nt, Artificial Sequence
  Synthetic oligonucleotide: BID-1082
ucucggucaucacuccc

SEQ ID NO: 42481 - RNA, 17 nt, Artificial Sequence
  Synthetic oligonucleotide: BID-1058
auuuccucuucccuccc

SEQ ID NO: 42482 - RNA, 17 nt, Artificial Sequence
  Synthetic oligonucleotide: BID-1076
ucccggcagugccuccc

SEQ ID NO: 42483 - RNA, 17 nt, Artificial Sequence
  Synthetic oligonucleotide: BID-756
cgccggcgcgggcuccc

SEQ ID NO: 42484 - RNA, 17 nt, Artificial Sequence
  Synthetic oligonucleotide: BID-994
aaaggcagggaucuccc

SEQ ID NO: 42485 - RNA, 17 nt, Artificial Sequence
  Synthetic oligonucleotide: BID-751
gguaaggguggaaagcc

SEQ ID NO: 42486 - RNA, 17 nt, Artificial Sequence
  Synthetic oligonucleotide: BID-737
cuguuccagaaacagcc

SEQ ID NO: 42487 - RNA, 17 nt, Artificial Sequence
  Synthetic oligonucleotide: BID-1073
caggcagaggcuuggcc

SEQ ID NO: 42488 - RNA, 17 nt, Artificial Sequence
  Synthetic oligonucleotide: BID-973
uccagggaggcacugcc

SEQ ID NO: 42489 - RNA, 17 nt, Artificial Sequence
  Synthetic oligonucleotide: BID-1075
ggccagggucguccucc

SEQ ID NO: 42490 - RNA, 17 nt, Artificial Sequence
  Synthetic oligonucleotide: BID-969
gagguagacagagcucc

SEQ ID NO: 42491 - RNA, 17 nt, Artificial Sequence
  Synthetic oligonucleotide: BID-1101
gguguggauaaggcucc

SEQ ID NO: 42492 - RNA, 17 nt, Artificial Sequence
  Synthetic oligonucleotide: BID-949
gauggggggagcucucc

SEQ ID NO: 42493 - RNA, 17 nt, Artificial Sequence
  Synthetic oligonucleotide: BID-1056
gcucccugugcccgucc

SEQ ID NO: 42494 - RNA, 17 nt, Artificial Sequence
  Synthetic oligonucleotide: BID-951
cugaaugugugccgucc

SEQ ID NO: 42495 - RNA, 17 nt, Artificial Sequence
  Synthetic oligonucleotide: BID-935
ggcuugcacccccuucc

SEQ ID NO: 42496 - RNA, 17 nt, Artificial Sequence
  Synthetic oligonucleotide: BID-824
ggagcggggcggggagc

SEQ ID NO: 42497 - RNA, 17 nt, Artificial Sequence
  Synthetic oligonucleotide: BID-819
gcgcggggcuguggagc

SEQ ID NO: 42498 - RNA, 17 nt, Artificial Sequence
  Synthetic oligonucleotide: BID-956
gaccagauucccugagc

SEQ ID NO: 42499 - RNA, 17 nt, Artificial Sequence
  Synthetic oligonucleotide: BID-827
acuuacuccagcgccgc

SEQ ID NO: 42500 - RNA, 17 nt, Artificial Sequence
  Synthetic oligonucleotide: BID-1070
cgcacacccugggccgc

SEQ ID NO: 42501 - RNA, 17 nt, Artificial Sequence
  Synthetic oligonucleotide: BID-753
gcuccacagccccgcgc

SEQ ID NO: 42502 - RNA, 17 nt, Artificial Sequence
  Synthetic oligonucleotide: BID-813
acccggggagcccgcgc

SEQ ID NO: 42503 - RNA, 17 nt, Artificial Sequence
  Synthetic oligonucleotide: BID-755
cagccccgcgccggcgc

SEQ ID NO: 42504 - RNA, 17 nt, Artificial Sequence
  Synthetic oligonucleotide: BID-815
ggagcccgcgccggcgc

SEQ ID NO: 42505 - RNA, 17 nt, Artificial Sequence
  Synthetic oligonucleotide: BID-742
aauuaucccagcggcgc

SEQ ID NO: 42506 - RNA, 17 nt, Artificial Sequence
  Synthetic oligonucleotide: BID-992
ggcugggguuuaaaggc

SEQ ID NO: 42507 - RNA, 17 nt, Artificial Sequence
  Synthetic oligonucleotide: BID-867
cucuggaggucucaggc

SEQ ID NO: 42508 - RNA, 17 nt, Artificial Sequence
  Synthetic oligonucleotide: BID-1066
agaggggcagaaggggc

SEQ ID NO: 42509 - RNA, 17 nt, Artificial Sequence
  Synthetic oligonucleotide: BID-732
agggacuggugaggggc

SEQ ID NO: 42510 - RNA, 17 nt, Artificial Sequence
  Synthetic oligonucleotide: BID-822
gggcuguggagcggggc

SEQ ID NO: 42511 - RNA, 17 nt, Artificial Sequence
  Synthetic oligonucleotide: BID-988
ggucagcaguucguggc

SEQ ID NO: 42512 - RNA, 17 nt, Artificial Sequence
  Synthetic oligonucleotide: BID-985
gagggaagaggaaaugc

SEQ ID NO: 42513 - RNA, 17 nt, Artificial Sequence
  Synthetic oligonucleotide: BID-849
uaacauauagauaaugc

SEQ ID NO: 42514 - RNA, 17 nt, Artificial Sequence
  Synthetic oligonucleotide: BID-972
cuccagggaggcacugc

SEQ ID NO: 42515 - RNA, 17 nt, Artificial Sequence
  Synthetic oligonucleotide: BID-1085
cacucccaggggacugc

SEQ ID NO: 42516 - RNA, 17 nt, Artificial Sequence
  Synthetic oligonucleotide: BID-752
gguucucacugcgcugc

SEQ ID NO: 42517 - RNA, 17 nt, Artificial Sequence
  Synthetic oligonucleotide: BID-847
guggguugcagagaauc

SEQ ID NO: 42518 - RNA, 17 nt, Artificial Sequence
  Synthetic oligonucleotide: BID-1080
ccccagcucagggaauc

SEQ ID NO: 42519 - RNA, 17 nt, Artificial Sequence
  Synthetic oligonucleotide: BID-967
agggauccucuggcauc

SEQ ID NO: 42520 - RNA, 17 nt, Artificial Sequence
  Synthetic oligonucleotide: BID-864
gggggggucuccaccuc

SEQ ID NO: 42521 - RNA, 17 nt, Artificial Sequence
  Synthetic oligonucleotide: BID-966
agcgcagagggauccuc

SEQ ID NO: 42522 - RNA, 17 nt, Artificial Sequence
  Synthetic oligonucleotide: BID-1078
ccuuaagaccccagcuc

SEQ ID NO: 42523 - RNA, 17 nt, Artificial Sequence
  Synthetic oligonucleotide: BID-1108
agaagguggaagagcuc

SEQ ID NO: 42524 - RNA, 17 nt, Artificial Sequence
  Synthetic oligonucleotide: BID-866
ccaccucuggaggucuc

SEQ ID NO: 42525 - RNA, 17 nt, Artificial Sequence
  Synthetic oligonucleotide: BID-829
aauuccuaaugauucuc

SEQ ID NO: 42526 - RNA, 17 nt, Artificial Sequence
  Synthetic oligonucleotide: BID-934
agcucuuccaccuucuc

SEQ ID NO: 42527 - RNA, 17 nt, Artificial Sequence
  Synthetic oligonucleotide: BID-833
cuguuucuggaacaguc

SEQ ID NO: 42528 - RNA, 17 nt, Artificial Sequence
  Synthetic oligonucleotide: BID-1089
caggacggcacacauuc

SEQ ID NO: 42529 - RNA, 17 nt, Artificial Sequence
  Synthetic oligonucleotide: BID-832
aauccccaggcuguuuc

SEQ ID NO: 42530 - RNA, 17 nt, Artificial Sequence
  Synthetic oligonucleotide: BID-843
accagggguuuggaaag

SEQ ID NO: 42531 - RNA, 17 nt, Artificial Sequence
  Synthetic oligonucleotide: BID-1060
uucccucccugggcaag

SEQ ID NO: 42532 - RNA, 17 nt, Artificial Sequence
  Synthetic oligonucleotide: BID-1065
ggcaagaggggcagaag

SEQ ID NO: 42533 - RNA, 17 nt, Artificial Sequence
  Synthetic oligonucleotide: BID-1104
gauaaggcuccaggaag

SEQ ID NO: 42534 - RNA, 17 nt, Artificial Sequence
  Synthetic oligonucleotide: BID-983
uugcccagggagggaag

SEQ ID NO: 42535 - RNA, 17 nt, Artificial Sequence
  Synthetic oligonucleotide: BID-743
agcggcgcuggaguaag

SEQ ID NO: 42536 - RNA, 17 nt, Artificial Sequence
  Synthetic oligonucleotide: BID-747
ugaaacagucgcguaag

SEQ ID NO: 42537 - RNA, 17 nt, Artificial Sequence
  Synthetic oligonucleotide: BID-841
gguccucacggaaccag

SEQ ID NO: 42538 - RNA, 17 nt, Artificial Sequence
  Synthetic oligonucleotide: BID-741
auuaggaauuaucccag

SEQ ID NO: 42539 - RNA, 17 nt, Artificial Sequence
  Synthetic oligonucleotide: BID-1084
ucggucaucacucccag

SEQ ID NO: 42540 - RNA, 17 nt, Artificial Sequence
  Synthetic oligonucleotide: BID-1077
ucaacuccugaugccag

SEQ ID NO: 42541 - RNA, 17 nt, Artificial Sequence
  Synthetic oligonucleotide: BID-721
cagccugagaccuccag

SEQ ID NO: 42542 - RNA, 17 nt, Artificial Sequence
  Synthetic oligonucleotide: BID-964
ggguguggggagcgcag

SEQ ID NO: 42543 - RNA, 17 nt, Artificial Sequence
  Synthetic oligonucleotide: BID-1071
cccugggccgcaggcag

SEQ ID NO: 42544 - RNA, 17 nt, Artificial Sequence
  Synthetic oligonucleotide: BID-940
cugugggggagcugcag

SEQ ID NO: 42545 - RNA, 17 nt, Artificial Sequence
  Synthetic oligonucleotide: BID-1062
cccucccugggcaagag

SEQ ID NO: 42546 - RNA, 17 nt, Artificial Sequence
  Synthetic oligonucleotide: BID-818
ggcgcggggcuguggag

SEQ ID NO: 42547 - RNA, 17 nt, Artificial Sequence
  Synthetic oligonucleotide: BID-731
gcacagggacuggugag

SEQ ID NO: 42548 - RNA, 17 nt, Artificial Sequence
  Synthetic oligonucleotide: BID-852
ucuuuuucaguuuuuag

SEQ ID NO: 42549 - RNA, 17 nt, Artificial Sequence
  Synthetic oligonucleotide: BID-3634
cggcuugcggggacccg

SEQ ID NO: 42550 - RNA, 17 nt, Artificial Sequence
  Synthetic oligonucleotide: BID-1096
cccccacagugagagcg

SEQ ID NO: 42551 - RNA, 17 nt, Artificial Sequence
  Synthetic oligonucleotide: BID-820
cgcggggcuguggagcg

SEQ ID NO: 42552 - RNA, 17 nt, Artificial Sequence
  Synthetic oligonucleotide: BID-816
gagcccgcgccggcgcg

SEQ ID NO: 42553 - RNA, 17 nt, Artificial Sequence
  Synthetic oligonucleotide: BID-754
acagccccgcgccggcg

SEQ ID NO: 42554 - RNA, 17 nt, Artificial Sequence
  Synthetic oligonucleotide: BID-814
gggagcccgcgccggcg

SEQ ID NO: 42555 - RNA, 17 nt, Artificial Sequence
  Synthetic oligonucleotide: BID-823
ggcuguggagcggggcg

SEQ ID NO: 42556 - RNA, 17 nt, Artificial Sequence
  Synthetic oligonucleotide: BID-986
agggaagaggaaaugcg

SEQ ID NO: 42557 - RNA, 17 nt, Artificial Sequence
  Synthetic oligonucleotide: BID-987
gcggggucagcaguucg

SEQ ID NO: 42558 - RNA, 17 nt, Artificial Sequence
  Synthetic oligonucleotide: BID-1107
gugcaagccugagaagg

SEQ ID NO: 42559 - RNA, 17 nt, Artificial Sequence
  Synthetic oligonucleotide: BID-1105
auaaggcuccaggaagg

SEQ ID NO: 42560 - RNA, 17 nt, Artificial Sequence
  Synthetic oligonucleotide: BID-943
ccaucuccacccacagg

SEQ ID NO: 42561 - RNA, 17 nt, Artificial Sequence
  Synthetic oligonucleotide: BID-722
ccugagaccuccagagg

SEQ ID NO: 42562 - RNA, 17 nt, Artificial Sequence
  Synthetic oligonucleotide: BID-854
ucaguuuuuaguggagg

SEQ ID NO: 42563 - RNA, 17 nt, Artificial Sequence
  Synthetic oligonucleotide: BID-750
cgcguaagggguaaggg

SEQ ID NO: 42564 - RNA, 17 nt, Artificial Sequence
  Synthetic oligonucleotide: BID-981
gccccucuugcccaggg

SEQ ID NO: 42565 - RNA, 17 nt, Artificial Sequence
  Synthetic oligonucleotide: BID-971
uagacagagcuccaggg

SEQ ID NO: 42566 - RNA, 17 nt, Artificial Sequence
  Synthetic oligonucleotide: BID-974
agggaggcacugccggg

SEQ ID NO: 42567 - RNA, 17 nt, Artificial Sequence
  Synthetic oligonucleotide: BID-821
ggggcuguggagcgggg

SEQ ID NO: 42568 - RNA, 17 nt, Artificial Sequence
  Synthetic oligonucleotide: BID-863
uggaggugguggggggg

SEQ ID NO: 42569 - RNA, 17 nt, Artificial Sequence
  Synthetic oligonucleotide: BID-862
guggagguggugggggg

SEQ ID NO: 42570 - RNA, 17 nt, Artificial Sequence
  Synthetic oligonucleotide: BID-861
aguggaggugguggggg

SEQ ID NO: 42571 - RNA, 17 nt, Artificial Sequence
  Synthetic oligonucleotide: BID-836
ucuggaacagucugggg

SEQ ID NO: 42572 - RNA, 17 nt, Artificial Sequence
  Synthetic oligonucleotide: BID-860
uaguggagguggugggg

SEQ ID NO: 42573 - RNA, 17 nt, Artificial Sequence
  Synthetic oligonucleotide: BID-948
ggaggcuuugagauggg

SEQ ID NO: 42574 - RNA, 17 nt, Artificial Sequence
  Synthetic oligonucleotide: BID-1110
gguggaagagcucuggg

SEQ ID NO: 42575 - RNA, 17 nt, Artificial Sequence
  Synthetic oligonucleotide: BID-859
uuaguggaggugguggg

SEQ ID NO: 42576 - RNA, 17 nt, Artificial Sequence
  Synthetic oligonucleotide: BID-1093
ucaaagccuccuguggg

SEQ ID NO: 42577 - RNA, 17 nt, Artificial Sequence
  Synthetic oligonucleotide: BID-947
aggaggcuuugagaugg

SEQ ID NO: 42578 - RNA, 17 nt, Artificial Sequence
  Synthetic oligonucleotide: BID-865
ggggucuccaccucugg

SEQ ID NO: 42579 - RNA, 17 nt, Artificial Sequence
  Synthetic oligonucleotide: BID-853
uuuucaguuuuuagugg

SEQ ID NO: 42580 - RNA, 17 nt, Artificial Sequence
  Synthetic oligonucleotide: BID-855
guuuuuaguggaggugg

SEQ ID NO: 42581 - RNA, 17 nt, Artificial Sequence
  Synthetic oligonucleotide: BID-858
uuuaguggagguggugg

SEQ ID NO: 42582 - RNA, 17 nt, Artificial Sequence
  Synthetic oligonucleotide: BID-939
ccucgcucucacugugg

SEQ ID NO: 42583 - RNA, 17 nt, Artificial Sequence
  Synthetic oligonucleotide: BID-984
ggagggaagaggaaaug

SEQ ID NO: 42584 - RNA, 17 nt, Artificial Sequence
  Synthetic oligonucleotide: BID-1095
uggguggagauggaaug

SEQ ID NO: 42585 - RNA, 17 nt, Artificial Sequence
  Synthetic oligonucleotide: BID-845
aagugggugaagccaug

SEQ ID NO: 42586 - RNA, 17 nt, Artificial Sequence
  Synthetic oligonucleotide: BID-999
cgggcacagggagcaug

SEQ ID NO: 42587 - RNA, 17 nt, Artificial Sequence
  Synthetic oligonucleotide: BID-946
caggaggcuuugagaug

SEQ ID NO: 42588 - RNA, 17 nt, Artificial Sequence
  Synthetic oligonucleotide: BID-941
gggagcugcagaggaug

SEQ ID NO: 42589 - RNA, 17 nt, Artificial Sequence
  Synthetic oligonucleotide: BID-936
aguccucgcucucacug

SEQ ID NO: 42590 - RNA, 17 nt, Artificial Sequence
  Synthetic oligonucleotide: BID-1097
agugagagcgaggacug

SEQ ID NO: 42591 - RNA, 17 nt, Artificial Sequence
  Synthetic oligonucleotide: BID-739
guuccagaaacagccug

SEQ ID NO: 42592 - RNA, 17 nt, Artificial Sequence
  Synthetic oligonucleotide: BID-976
ggccaagccucugccug

SEQ ID NO: 42593 - RNA, 17 nt, Artificial Sequence
  Synthetic oligonucleotide: BID-1091
caucucaaagccuccug

SEQ ID NO: 42594 - RNA, 17 nt, Artificial Sequence
  Synthetic oligonucleotide: BID-953
gaaugugugccguccug

SEQ ID NO: 42595 - RNA, 17 nt, Artificial Sequence
  Synthetic oligonucleotide: BID-958
ccagauucccugagcug

SEQ ID NO: 42596 - RNA, 17 nt, Artificial Sequence
  Synthetic oligonucleotide: BID-817
gcgccggcgcggggcug

SEQ ID NO: 42597 - RNA, 17 nt, Artificial Sequence
  Synthetic oligonucleotide: BID-990
ucagcaguucguggcug

SEQ ID NO: 42598 - RNA, 17 nt, Artificial Sequence
  Synthetic oligonucleotide: BID-835
guuucuggaacagucug

SEQ ID NO: 42599 - RNA, 17 nt, Artificial Sequence
  Synthetic oligonucleotide: BID-736
aaaccccugguuccgug

SEQ ID NO: 42600 - RNA, 17 nt, Artificial Sequence
  Synthetic oligonucleotide: BID-961
cuggggucuuaagggug

SEQ ID NO: 42601 - RNA, 17 nt, Artificial Sequence
  Synthetic oligonucleotide: BID-1099
agcgaggacugagggug

SEQ ID NO: 42602 - RNA, 17 nt, Artificial Sequence
  Synthetic oligonucleotide: BID-725
aagaaauuaguugggug

SEQ ID NO: 42603 - RNA, 17 nt, Artificial Sequence
  Synthetic oligonucleotide: BID-729
aagcacagggacuggug

SEQ ID NO: 42604 - RNA, 17 nt, Artificial Sequence
  Synthetic oligonucleotide: BID-857
uuuuaguggagguggug

SEQ ID NO: 42605 - RNA, 17 nt, Artificial Sequence
  Synthetic oligonucleotide: BID-938
uccucgcucucacugug

SEQ ID NO: 42606 - RNA, 17 nt, Artificial Sequence
  Synthetic oligonucleotide: BID-963
ggggucuuaagggugug

SEQ ID NO: 42607 - RNA, 17 nt, Artificial Sequence
  Synthetic oligonucleotide: BID-968
ucuggcaucaggaguug

SEQ ID NO: 42608 - RNA, 17 nt, Artificial Sequence
  Synthetic oligonucleotide: BID-945
acaggaggcuuugagau

SEQ ID NO: 42609 - RNA, 17 nt, Artificial Sequence
  Synthetic oligonucleotide: BID-1069
gcagggacgcacacccu

SEQ ID NO: 42610 - RNA, 17 nt, Artificial Sequence
  Synthetic oligonucleotide: BID-955
gggcccugcaguccccu

SEQ ID NO: 42611 - RNA, 17 nt, Artificial Sequence
  Synthetic oligonucleotide: BID-1059
uuuccucuucccucccu

SEQ ID NO: 42612 - RNA, 17 nt, Artificial Sequence
  Synthetic oligonucleotide: BID-738
uguuccagaaacagccu

SEQ ID NO: 42613 - RNA, 17 nt, Artificial Sequence
  Synthetic oligonucleotide: BID-950
auggggggagcucuccu

SEQ ID NO: 42614 - RNA, 17 nt, Artificial Sequence
  Synthetic oligonucleotide: BID-1057
cucccugugcccguccu

SEQ ID NO: 42615 - RNA, 17 nt, Artificial Sequence
  Synthetic oligonucleotide: BID-952
ugaaugugugccguccu

SEQ ID NO: 42616 - RNA, 17 nt, Artificial Sequence
  Synthetic oligonucleotide: BID-957
accagauucccugagcu

SEQ ID NO: 42617 - RNA, 17 nt, Artificial Sequence
  Synthetic oligonucleotide: BID-828
cuuacuccagcgccgcu

SEQ ID NO: 42618 - RNA, 17 nt, Artificial Sequence
  Synthetic oligonucleotide: BID-1072
ggccgcaggcagaggcu

SEQ ID NO: 42619 - RNA, 17 nt, Artificial Sequence
  Synthetic oligonucleotide: BID-733
gggacuggugaggggcu

SEQ ID NO: 42620 - RNA, 17 nt, Artificial Sequence
  Synthetic oligonucleotide: BID-989
gucagcaguucguggcu

SEQ ID NO: 42621 - RNA, 17 nt, Artificial Sequence
  Synthetic oligonucleotide: BID-850
aacauauagauaaugcu

SEQ ID NO: 42622 - RNA, 17 nt, Artificial Sequence
  Synthetic oligonucleotide: BID-1109
gaagguggaagagcucu

SEQ ID NO: 42623 - RNA, 17 nt, Artificial Sequence
  Synthetic oligonucleotide: BID-830
auuccuaaugauucucu

SEQ ID NO: 42624 - RNA, 17 nt, Artificial Sequence
  Synthetic oligonucleotide: BID-834
uguuucuggaacagucu

SEQ ID NO: 42625 - RNA, 17 nt, Artificial Sequence
  Synthetic oligonucleotide: BID-1081
cucagggaaucuggucu

SEQ ID NO: 42626 - RNA, 17 nt, Artificial Sequence
  Synthetic oligonucleotide: BID-837
ucugggguggucauucu

SEQ ID NO: 42627 - RNA, 17 nt, Artificial Sequence
  Synthetic oligonucleotide: BID-844
ccagggguuuggaaagu

SEQ ID NO: 42628 - RNA, 17 nt, Artificial Sequence
  Synthetic oligonucleotide: BID-744
aguggccaacuuaaagu

SEQ ID NO: 42629 - RNA, 17 nt, Artificial Sequence
  Synthetic oligonucleotide: BID-826
gucguccaacuuuaagu

SEQ ID NO: 42630 - RNA, 17 nt, Artificial Sequence
  Synthetic oligonucleotide: BID-723
cugaaaaagaaauuagu

SEQ ID NO: 42631 - RNA, 17 nt, Artificial Sequence
  Synthetic oligonucleotide: BID-1111
guggaagagcucugggu

SEQ ID NO: 42632 - RNA, 17 nt, Artificial Sequence
  Synthetic oligonucleotide: BID-856
uuuuuaguggagguggu

SEQ ID NO: 42633 - RNA, 17 nt, Artificial Sequence
  Synthetic oligonucleotide: BID-846
agugggugaagccaugu

SEQ ID NO: 42634 - RNA, 17 nt, Artificial Sequence
  Synthetic oligonucleotide: BID-937
guccucgcucucacugu

SEQ ID NO: 42635 - RNA, 17 nt, Artificial Sequence
  Synthetic oligonucleotide: BID-1092
aucucaaagccuccugu

SEQ ID NO: 42636 - RNA, 17 nt, Artificial Sequence
  Synthetic oligonucleotide: BID-962
uggggucuuaagggugu

SEQ ID NO: 42637 - RNA, 17 nt, Artificial Sequence
  Synthetic oligonucleotide: BID-740
uuucccagagaaucauu

SEQ ID NO: 42638 - RNA, 17 nt, Artificial Sequence
  Synthetic oligonucleotide: BID-848
uuuauucuuuaauuauu

SEQ ID NO: 42639 - RNA, 17 nt, Artificial Sequence
  Synthetic oligonucleotide: BID-724
ugaaaaagaaauuaguu

SEQ ID NO: 42640 - RNA, 17 nt, Artificial Sequence
  Synthetic oligonucleotide: BID-842
ucacggaaccagggguu

SEQ ID NO: 42641 - RNA, 20 nt, Artificial Sequence
  Synthetic oligonucleotide: BID-1008
ccugggcaagaggggcagaa

SEQ ID NO: 42642 - RNA, 20 nt, Artificial Sequence
  Synthetic oligonucleotide: BID-1047
uguggauaaggcuccaggaa

SEQ ID NO: 42643 - RNA, 20 nt, Artificial Sequence
  Synthetic oligonucleotide: BID-709
ugucugaaacagucgcguaa

SEQ ID NO: 42644 - RNA, 20 nt, Artificial Sequence
  Synthetic oligonucleotide: BID-712
aacagucgcguaagggguaa

SEQ ID NO: 42645 - RNA, 20 nt, Artificial Sequence
  Synthetic oligonucleotide: BID-894
ucccugagcuggggucuuaa

SEQ ID NO: 42646 - RNA, 20 nt, Artificial Sequence
  Synthetic oligonucleotide: BID-925
aguucguggcugggguuuaa

SEQ ID NO: 42647 - RNA, 20 nt, Artificial Sequence
  Synthetic oligonucleotide: BID-697
cagauucucugcaacccaca

SEQ ID NO: 42648 - RNA, 20 nt, Artificial Sequence
  Synthetic oligonucleotide: BID-690
aagaauaaacaacaagcaca

SEQ ID NO: 42649 - RNA, 20 nt, Artificial Sequence
  Synthetic oligonucleotide: BID-932
gaucucccaggacgggcaca

SEQ ID NO: 42650 - RNA, 20 nt, Artificial Sequence
  Synthetic oligonucleotide: BID-785
ucuagguccucacggaacca

SEQ ID NO: 42651 - RNA, 20 nt, Artificial Sequence
  Synthetic oligonucleotide: BID-912
aagccucugccugcggccca

SEQ ID NO: 42652 - RNA, 20 nt, Artificial Sequence
  Synthetic oligonucleotide: BID-914
ccuucugccccucuugccca

SEQ ID NO: 42653 - RNA, 20 nt, Artificial Sequence
  Synthetic oligonucleotide: BID-1027
ggucucggucaucacuccca

SEQ ID NO: 42654 - RNA, 20 nt, Artificial Sequence
  Synthetic oligonucleotide: BID-1018
cgcaggcagaggcuuggcca

SEQ ID NO: 42655 - RNA, 20 nt, Artificial Sequence
  Synthetic oligonucleotide: BID-904
uugagguagacagagcucca

SEQ ID NO: 42656 - RNA, 20 nt, Artificial Sequence
  Synthetic oligonucleotide: BID-927
guggcugggguuuaaaggca

SEQ ID NO: 42657 - RNA, 20 nt, Artificial Sequence
  Synthetic oligonucleotide: BID-1011
caagaggggcagaaggggca

SEQ ID NO: 42658 - RNA, 20 nt, Artificial Sequence
  Synthetic oligonucleotide: BID-1030
aucacucccaggggacugca

SEQ ID NO: 42659 - RNA, 20 nt, Artificial Sequence
  Synthetic oligonucleotide: BID-783
guggucauucuagguccuca

SEQ ID NO: 42660 - RNA, 20 nt, Artificial Sequence
  Synthetic oligonucleotide: BID-1023
acccuuaagaccccagcuca

SEQ ID NO: 42661 - RNA, 20 nt, Artificial Sequence
  Synthetic oligonucleotide: BID-1005
ucuucccucccugggcaaga

SEQ ID NO: 42662 - RNA, 20 nt, Artificial Sequence
  Synthetic oligonucleotide: BID-899
aaggguguggggagcgcaga

SEQ ID NO: 42663 - RNA, 20 nt, Artificial Sequence
  Synthetic oligonucleotide: BID-1007
cccugggcaagaggggcaga

SEQ ID NO: 42664 - RNA, 20 nt, Artificial Sequence
  Synthetic oligonucleotide: BID-1038
aagccuccuguggguggaga

SEQ ID NO: 42665 - RNA, 20 nt, Artificial Sequence
  Synthetic oligonucleotide: BID-1050
aagggggugcaagccugaga

SEQ ID NO: 42666 - RNA, 20 nt, Artificial Sequence
  Synthetic oligonucleotide: BID-878
acccacaggaggcuuugaga

SEQ ID NO: 42667 - RNA, 20 nt, Artificial Sequence
  Synthetic oligonucleotide: BID-1032
gggacugcagggccccagga

SEQ ID NO: 42668 - RNA, 20 nt, Artificial Sequence
  Synthetic oligonucleotide: BID-929
aaggcagggaucucccagga

SEQ ID NO: 42669 - RNA, 20 nt, Artificial Sequence
  Synthetic oligonucleotide: BID-1046
guguggauaaggcuccagga

SEQ ID NO: 42670 - RNA, 20 nt, Artificial Sequence
  Synthetic oligonucleotide: BID-916
cugccccucuugcccaggga

SEQ ID NO: 42671 - RNA, 20 nt, Artificial Sequence
  Synthetic oligonucleotide: BID-1042
acagugagagcgaggacuga

SEQ ID NO: 42672 - RNA, 20 nt, Artificial Sequence
  Synthetic oligonucleotide: BID-693
acaagcacagggacugguga

SEQ ID NO: 42673 - RNA, 20 nt, Artificial Sequence
  Synthetic oligonucleotide: BID-1044
gaggacugaggguguggaua

SEQ ID NO: 42674 - RNA, 20 nt, Artificial Sequence
  Synthetic oligonucleotide: BID-708
cugucugaaacagucgcgua

SEQ ID NO: 42675 - RNA, 20 nt, Artificial Sequence
  Synthetic oligonucleotide: BID-711
aaacagucgcguaaggggua

SEQ ID NO: 42676 - RNA, 20 nt, Artificial Sequence
  Synthetic oligonucleotide: BID-893
uucccugagcuggggucuua

SEQ ID NO: 42677 - RNA, 20 nt, Artificial Sequence
  Synthetic oligonucleotide: BID-876
cacauuccaucuccacccac

SEQ ID NO: 42678 - RNA, 20 nt, Artificial Sequence
  Synthetic oligonucleotide: BID-689
aaagaauaaacaacaagcac

SEQ ID NO: 42679 - RNA, 20 nt, Artificial Sequence
  Synthetic oligonucleotide: BID-931
ggaucucccaggacgggcac

SEQ ID NO: 42680 - RNA, 20 nt, Artificial Sequence
  Synthetic oligonucleotide: BID-930
aggcagggaucucccaggac

SEQ ID NO: 42681 - RNA, 20 nt, Artificial Sequence
  Synthetic oligonucleotide: BID-691
uaaacaacaagcacagggac

SEQ ID NO: 42682 - RNA, 20 nt, Artificial Sequence
  Synthetic oligonucleotide: BID-796
auagauaaugcugggacuac

SEQ ID NO: 42683 - RNA, 20 nt, Artificial Sequence
  Synthetic oligonucleotide: BID-770
ccggcagcgcagugagaacc

SEQ ID NO: 42684 - RNA, 20 nt, Artificial Sequence
  Synthetic oligonucleotide: BID-784
uucuagguccucacggaacc

SEQ ID NO: 42685 - RNA, 20 nt, Artificial Sequence
  Synthetic oligonucleotide: BID-1012
aggggcagggacgcacaccc

SEQ ID NO: 42686 - RNA, 20 nt, Artificial Sequence
  Synthetic oligonucleotide: BID-909
cacugccgggaggacgaccc

SEQ ID NO: 42687 - RNA, 20 nt, Artificial Sequence
  Synthetic oligonucleotide: BID-698
ucacccacuuuccaaacccc

SEQ ID NO: 42688 - RNA, 20 nt, Artificial Sequence
  Synthetic oligonucleotide: BID-1031
ccaggggacugcagggcccc

SEQ ID NO: 42689 - RNA, 20 nt, Artificial Sequence
  Synthetic oligonucleotide: BID-776
gggaaacauucagaaucccc

SEQ ID NO: 42690 - RNA, 20 nt, Artificial Sequence
  Synthetic oligonucleotide: BID-720
cgcgccggcgcgggcucccc

SEQ ID NO: 42691 - RNA, 20 nt, Artificial Sequence
  Synthetic oligonucleotide: BID-888
ccuggggcccugcagucccc

SEQ ID NO: 42692 - RNA, 20 nt, Artificial Sequence
  Synthetic oligonucleotide: BID-1034
gacggcacacauucaggccc

SEQ ID NO: 42693 - RNA, 20 nt, Artificial Sequence
  Synthetic oligonucleotide: BID-911
caagccucugccugcggccc

SEQ ID NO: 42694 - RNA, 20 nt, Artificial Sequence
  Synthetic oligonucleotide: BID-913
cccuucugccccucuugccc

SEQ ID NO: 42695 - RNA, 20 nt, Artificial Sequence
  Synthetic oligonucleotide: BID-1026
uggucucggucaucacuccc

SEQ ID NO: 42696 - RNA, 20 nt, Artificial Sequence
  Synthetic oligonucleotide: BID-1002
cgcauuuccucuucccuccc

SEQ ID NO: 42697 - RNA, 20 nt, Artificial Sequence
  Synthetic oligonucleotide: BID-1020
uccucccggcagugccuccc

SEQ ID NO: 42698 - RNA, 20 nt, Artificial Sequence
  Synthetic oligonucleotide: BID-719
ccgcgccggcgcgggcuccc

SEQ ID NO: 42699 - RNA, 20 nt, Artificial Sequence
  Synthetic oligonucleotide: BID-928
uuuaaaggcagggaucuccc

SEQ ID NO: 42700 - RNA, 20 nt, Artificial Sequence
  Synthetic oligonucleotide: BID-714
agggguaaggguggaaagcc

SEQ ID NO: 42701 - RNA, 20 nt, Artificial Sequence
  Synthetic oligonucleotide: BID-700
agacuguuccagaaacagcc

SEQ ID NO: 42702 - RNA, 20 nt, Artificial Sequence
  Synthetic oligonucleotide: BID-1017
ccgcaggcagaggcuuggcc

SEQ ID NO: 42703 - RNA, 20 nt, Artificial Sequence
  Synthetic oligonucleotide: BID-907
agcuccagggaggcacugcc

SEQ ID NO: 42704 - RNA, 20 nt, Artificial Sequence
  Synthetic oligonucleotide: BID-1019
cuuggccagggucguccucc

SEQ ID NO: 42705 - RNA, 20 nt, Artificial Sequence
  Synthetic oligonucleotide: BID-903
guugagguagacagagcucc

SEQ ID NO: 42706 - RNA, 20 nt, Artificial Sequence
  Synthetic oligonucleotide: BID-1045
gaggguguggauaaggcucc

SEQ ID NO: 42707 - RNA, 20 nt, Artificial Sequence
  Synthetic oligonucleotide: BID-883
ugagauggggggagcucucc

SEQ ID NO: 42708 - RNA, 20 nt, Artificial Sequence
  Synthetic oligonucleotide: BID-1000
caugcucccugugcccgucc

SEQ ID NO: 42709 - RNA, 20 nt, Artificial Sequence
  Synthetic oligonucleotide: BID-885
ggccugaaugugugccgucc

SEQ ID NO: 42710 - RNA, 20 nt, Artificial Sequence
  Synthetic oligonucleotide: BID-869
ucaggcuugcacccccuucc

SEQ ID NO: 42711 - RNA, 20 nt, Artificial Sequence
  Synthetic oligonucleotide: BID-769
uguggagcggggcggggagc

SEQ ID NO: 42712 - RNA, 20 nt, Artificial Sequence
  Synthetic oligonucleotide: BID-764
ccggcgcggggcuguggagc

SEQ ID NO: 42713 - RNA, 20 nt, Artificial Sequence
  Synthetic oligonucleotide: BID-890
cgagaccagauucccugagc

SEQ ID NO: 42714 - RNA, 20 nt, Artificial Sequence
  Synthetic oligonucleotide: BID-772
gccacuuacuccagcgccgc

SEQ ID NO: 42715 - RNA, 20 nt, Artificial Sequence
  Synthetic oligonucleotide: BID-1014
ggacgcacacccugggccgc

SEQ ID NO: 42716 - RNA, 20 nt, Artificial Sequence
  Synthetic oligonucleotide: BID-716
cccgcuccacagccccgcgc

SEQ ID NO: 42717 - RNA, 20 nt, Artificial Sequence
  Synthetic oligonucleotide: BID-758
gggacccggggagcccgcgc

SEQ ID NO: 42718 - RNA, 20 nt, Artificial Sequence
  Synthetic oligonucleotide: BID-718
ccacagccccgcgccggcgc

SEQ ID NO: 42719 - RNA, 20 nt, Artificial Sequence
  Synthetic oligonucleotide: BID-760
cggggagcccgcgccggcgc

SEQ ID NO: 42720 - RNA, 20 nt, Artificial Sequence
  Synthetic oligonucleotide: BID-705
aggaauuaucccagcggcgc

SEQ ID NO: 42721 - RNA, 20 nt, Artificial Sequence
  Synthetic oligonucleotide: BID-926
cguggcugggguuuaaaggc

SEQ ID NO: 42722 - RNA, 20 nt, Artificial Sequence
  Synthetic oligonucleotide: BID-812
caccucuggaggucucaggc

SEQ ID NO: 42723 - RNA, 20 nt, Artificial Sequence
  Synthetic oligonucleotide: BID-1010
gcaagaggggcagaaggggc

SEQ ID NO: 42724 - RNA, 20 nt, Artificial Sequence
  Synthetic oligonucleotide: BID-695
cacagggacuggugaggggc

SEQ ID NO: 42725 - RNA, 20 nt, Artificial Sequence
  Synthetic oligonucleotide: BID-767
gcggggcuguggagcggggc

SEQ ID NO: 42726 - RNA, 20 nt, Artificial Sequence
  Synthetic oligonucleotide: BID-922
cggggucagcaguucguggc

SEQ ID NO: 42727 - RNA, 20 nt, Artificial Sequence
  Synthetic oligonucleotide: BID-919
agggagggaagaggaaaugc

SEQ ID NO: 42728 - RNA, 20 nt, Artificial Sequence
  Synthetic oligonucleotide: BID-794
guuuaacauauagauaaugc

SEQ ID NO: 42729 - RNA, 20 nt, Artificial Sequence
  Synthetic oligonucleotide: BID-906
gagcuccagggaggcacugc

SEQ ID NO: 42730 - RNA, 20 nt, Artificial Sequence
  Synthetic oligonucleotide: BID-1029
caucacucccaggggacugc

SEQ ID NO: 42731 - RNA, 20 nt, Artificial Sequence
  Synthetic oligonucleotide: BID-715
ccugguucucacugcgcugc

SEQ ID NO: 42732 - RNA, 20 nt, Artificial Sequence
  Synthetic oligonucleotide: BID-792
cauguggguugcagagaauc

SEQ ID NO: 42733 - RNA, 20 nt, Artificial Sequence
  Synthetic oligonucleotide: BID-1024
agaccccagcucagggaauc

SEQ ID NO: 42734 - RNA, 20 nt, Artificial Sequence
  Synthetic oligonucleotide: BID-901
cagagggauccucuggcauc

SEQ ID NO: 42735 - RNA, 20 nt, Artificial Sequence
  Synthetic oligonucleotide: BID-809
ggggggggggucuccaccuc

SEQ ID NO: 42736 - RNA, 20 nt, Artificial Sequence
  Synthetic oligonucleotide: BID-900
gggagcgcagagggauccuc

SEQ ID NO: 42737 - RNA, 20 nt, Artificial Sequence
  Synthetic oligonucleotide: BID-1022
cacccuuaagaccccagcuc

SEQ ID NO: 42738 - RNA, 20 nt, Artificial Sequence
  Synthetic oligonucleotide: BID-1052
cugagaagguggaagagcuc

SEQ ID NO: 42739 - RNA, 20 nt, Artificial Sequence
  Synthetic oligonucleotide: BID-811
ucuccaccucuggaggucuc

SEQ ID NO: 42740 - RNA, 20 nt, Artificial Sequence
  Synthetic oligonucleotide: BID-774
gauaauuccuaaugauucuc

SEQ ID NO: 42741 - RNA, 20 nt, Artificial Sequence
  Synthetic oligonucleotide: BID-868
cagagcucuuccaccuucuc

SEQ ID NO: 42742 - RNA, 20 nt, Artificial Sequence
  Synthetic oligonucleotide: BID-778
aggcuguuucuggaacaguc

SEQ ID NO: 42743 - RNA, 20 nt, Artificial Sequence
  Synthetic oligonucleotide: BID-1033
ccccaggacggcacacauuc

SEQ ID NO: 42744 - RNA, 20 nt, Artificial Sequence
  Synthetic oligonucleotide: BID-777
cagaauccccaggcuguuuc

SEQ ID NO: 42745 - RNA, 20 nt, Artificial Sequence
  Synthetic oligonucleotide: BID-788
ggaaccagggguuuggaaag

SEQ ID NO: 42746 - RNA, 20 nt, Artificial Sequence
  Synthetic oligonucleotide: BID-1004
cucuucccucccugggcaag

SEQ ID NO: 42747 - RNA, 20 nt, Artificial Sequence
  Synthetic oligonucleotide: BID-1009
cugggcaagaggggcagaag

SEQ ID NO: 42748 - RNA, 20 nt, Artificial Sequence
  Synthetic oligonucleotide: BID-1048
guggauaaggcuccaggaag

SEQ ID NO: 42749 - RNA, 20 nt, Artificial Sequence
  Synthetic oligonucleotide: BID-917
cucuugcccagggagggaag

SEQ ID NO: 42750 - RNA, 20 nt, Artificial Sequence
  Synthetic oligonucleotide: BID-706
cccagcggcgcuggaguaag

SEQ ID NO: 42751 - RNA, 20 nt, Artificial Sequence
  Synthetic oligonucleotide: BID-710
gucugaaacagucgcguaag

SEQ ID NO: 42752 - RNA, 20 nt, Artificial Sequence
  Synthetic oligonucleotide: BID-786
cuagguccucacggaaccag

SEQ ID NO: 42753 - RNA, 20 nt, Artificial Sequence
  Synthetic oligonucleotide: BID-704
aucauuaggaauuaucccag

SEQ ID NO: 42754 - RNA, 20 nt, Artificial Sequence
  Synthetic oligonucleotide: BID-1028
gucucggucaucacucccag

SEQ ID NO: 42755 - RNA, 20 nt, Artificial Sequence
  Synthetic oligonucleotide: BID-1021
accucaacuccugaugccag

SEQ ID NO: 42756 - RNA, 20 nt, Artificial Sequence
  Synthetic oligonucleotide: BID-684
gaccagccugagaccuccag

SEQ ID NO: 42757 - RNA, 20 nt, Artificial Sequence
  Synthetic oligonucleotide: BID-898
uaaggguguggggagcgcag

SEQ ID NO: 42758 - RNA, 20 nt, Artificial Sequence
  Synthetic oligonucleotide: BID-1015
acacccugggccgcaggcag

SEQ ID NO: 42759 - RNA, 20 nt, Artificial Sequence
  Synthetic oligonucleotide: BID-874
ucacugugggggagcugcag

SEQ ID NO: 42760 - RNA, 20 nt, Artificial Sequence
  Synthetic oligonucleotide: BID-1006
cuucccucccugggcaagag

SEQ ID NO: 42761 - RNA, 20 nt, Artificial Sequence
  Synthetic oligonucleotide: BID-763
gccggcgcggggcuguggag

SEQ ID NO: 42762 - RNA, 20 nt, Artificial Sequence
  Synthetic oligonucleotide: BID-694
caagcacagggacuggugag

SEQ ID NO: 42763 - RNA, 20 nt, Artificial Sequence
  Synthetic oligonucleotide: BID-797
auuucuuuuucaguuuuuag

SEQ ID NO: 42764 - RNA, 20 nt, Artificial Sequence
  Synthetic oligonucleotide: BID-1040
gcucccccacagugagagcg

SEQ ID NO: 42765 - RNA, 20 nt, Artificial Sequence
  Synthetic oligonucleotide: BID-765
cggcgcggggcuguggagcg

SEQ ID NO: 42766 - RNA, 20 nt, Artificial Sequence
  Synthetic oligonucleotide: BID-761
ggggagcccgcgccggcgcg

SEQ ID NO: 42767 - RNA, 20 nt, Artificial Sequence
  Synthetic oligonucleotide: BID-717
uccacagccccgcgccggcg

SEQ ID NO: 42768 - RNA, 20 nt, Artificial Sequence
  Synthetic oligonucleotide: BID-759
ccggggagcccgcgccggcg

SEQ ID NO: 42769 - RNA, 20 nt, Artificial Sequence
  Synthetic oligonucleotide: BID-768
cggggcuguggagcggggcg

SEQ ID NO: 42770 - RNA, 20 nt, Artificial Sequence
  Synthetic oligonucleotide: BID-920
gggagggaagaggaaaugcg

SEQ ID NO: 42771 - RNA, 20 nt, Artificial Sequence
  Synthetic oligonucleotide: BID-921
aaugcggggucagcaguucg

SEQ ID NO: 42772 - RNA, 20 nt, Artificial Sequence
  Synthetic oligonucleotide: BID-1051
ggggugcaagccugagaagg

SEQ ID NO: 42773 - RNA, 20 nt, Artificial Sequence
  Synthetic oligonucleotide: BID-1049
uggauaaggcuccaggaagg

SEQ ID NO: 42774 - RNA, 20 nt, Artificial Sequence
  Synthetic oligonucleotide: BID-877
auuccaucuccacccacagg

SEQ ID NO: 42775 - RNA, 20 nt, Artificial Sequence
  Synthetic oligonucleotide: BID-685
cagccugagaccuccagagg

SEQ ID NO: 42776 - RNA, 20 nt, Artificial Sequence
  Synthetic oligonucleotide: BID-799
uuuucaguuuuuaguggagg

SEQ ID NO: 42777 - RNA, 20 nt, Artificial Sequence
  Synthetic oligonucleotide: BID-713
agucgcguaagggguaaggg

SEQ ID NO: 42778 - RNA, 20 nt, Artificial Sequence
  Synthetic oligonucleotide: BID-915
ucugccccucuugcccaggg

SEQ ID NO: 42779 - RNA, 20 nt, Artificial Sequence
  Synthetic oligonucleotide: BID-905
agguagacagagcuccaggg

SEQ ID NO: 42780 - RNA, 20 nt, Artificial Sequence
  Synthetic oligonucleotide: BID-908
uccagggaggcacugccggg

SEQ ID NO: 42781 - RNA, 20 nt, Artificial Sequence
  Synthetic oligonucleotide: BID-766
cgcggggcuguggagcgggg

SEQ ID NO: 42782 - RNA, 20 nt, Artificial Sequence
  Synthetic oligonucleotide: BID-808
uaguggaggugguggggggg

SEQ ID NO: 42783 - RNA, 20 nt, Artificial Sequence
  Synthetic oligonucleotide: BID-807
uuaguggagguggugggggg

SEQ ID NO: 42784 - RNA, 20 nt, Artificial Sequence
  Synthetic oligonucleotide: BID-806
uuuaguggaggugguggggg

SEQ ID NO: 42785 - RNA, 20 nt, Artificial Sequence
  Synthetic oligonucleotide: BID-781
guuucuggaacagucugggg

SEQ ID NO: 42786 - RNA, 20 nt, Artificial Sequence
  Synthetic oligonucleotide: BID-805
uuuuaguggagguggugggg

SEQ ID NO: 42787 - RNA, 20 nt, Artificial Sequence
  Synthetic oligonucleotide: BID-882
acaggaggcuuugagauggg

SEQ ID NO: 42788 - RNA, 20 nt, Artificial Sequence
  Synthetic oligonucleotide: BID-1054
gaagguggaagagcucuggg

SEQ ID NO: 42789 - RNA, 20 nt, Artificial Sequence
  Synthetic oligonucleotide: BID-804
uuuuuaguggaggugguggg

SEQ ID NO: 42790 - RNA, 20 nt, Artificial Sequence
  Synthetic oligonucleotide: BID-1037
aucucaaagccuccuguggg

SEQ ID NO: 42791 - RNA, 20 nt, Artificial Sequence
  Synthetic oligonucleotide: BID-881
cacaggaggcuuugagaugg

SEQ ID NO: 42792 - RNA, 20 nt, Artificial Sequence
  Synthetic oligonucleotide: BID-810
gggggggucuccaccucugg

SEQ ID NO: 42793 - RNA, 20 nt, Artificial Sequence
  Synthetic oligonucleotide: BID-798
ucuuuuucaguuuuuagugg

SEQ ID NO: 42794 - RNA, 20 nt, Artificial Sequence
  Synthetic oligonucleotide: BID-800
ucaguuuuuaguggaggugg

SEQ ID NO: 42795 - RNA, 20 nt, Artificial Sequence
  Synthetic oligonucleotide: BID-803
guuuuuaguggagguggugg

SEQ ID NO: 42796 - RNA, 20 nt, Artificial Sequence
  Synthetic oligonucleotide: BID-873
aguccucgcucucacugugg

SEQ ID NO: 42797 - RNA, 20 nt, Artificial Sequence
  Synthetic oligonucleotide: BID-918
cagggagggaagaggaaaug

SEQ ID NO: 42798 - RNA, 20 nt, Artificial Sequence
  Synthetic oligonucleotide: BID-1039
cuguggguggagauggaaug

SEQ ID NO: 42799 - RNA, 20 nt, Artificial Sequence
  Synthetic oligonucleotide: BID-790
ggaaagugggugaagccaug

SEQ ID NO: 42800 - RNA, 20 nt, Artificial Sequence
  Synthetic oligonucleotide: BID-933
ggacgggcacagggagcaug

SEQ ID NO: 42801 - RNA, 20 nt, Artificial Sequence
  Synthetic oligonucleotide: BID-880
ccacaggaggcuuugagaug

SEQ ID NO: 42802 - RNA, 20 nt, Artificial Sequence
  Synthetic oligonucleotide: BID-875
ugggggagcugcagaggaug

SEQ ID NO: 42803 - RNA, 20 nt, Artificial Sequence
  Synthetic oligonucleotide: BID-870
cucaguccucgcucucacug

SEQ ID NO: 42804 - RNA, 20 nt, Artificial Sequence
  Synthetic oligonucleotide: BID-1041
cacagugagagcgaggacug

SEQ ID NO: 42805 - RNA, 20 nt, Artificial Sequence
  Synthetic oligonucleotide: BID-702
acuguuccagaaacagccug

SEQ ID NO: 42806 - RNA, 20 nt, Artificial Sequence
  Synthetic oligonucleotide: BID-910
ccuggccaagccucugccug

SEQ ID NO: 42807 - RNA, 20 nt, Artificial Sequence
  Synthetic oligonucleotide: BID-1035
ccccaucucaaagccuccug

SEQ ID NO: 42808 - RNA, 20 nt, Artificial Sequence
  Synthetic oligonucleotide: BID-887
ccugaaugugugccguccug

SEQ ID NO: 42809 - RNA, 20 nt, Artificial Sequence
  Synthetic oligonucleotide: BID-892
agaccagauucccugagcug

SEQ ID NO: 42810 - RNA, 20 nt, Artificial Sequence
  Synthetic oligonucleotide: BID-762
cccgcgccggcgcggggcug

SEQ ID NO: 42811 - RNA, 20 nt, Artificial Sequence
  Synthetic oligonucleotide: BID-924
gggucagcaguucguggcug

SEQ ID NO: 42812 - RNA, 20 nt, Artificial Sequence
  Synthetic oligonucleotide: BID-780
gcuguuucuggaacagucug

SEQ ID NO: 42813 - RNA, 20 nt, Artificial Sequence
  Synthetic oligonucleotide: BID-699
uccaaaccccugguuccgug

SEQ ID NO: 42814 - RNA, 20 nt, Artificial Sequence
  Synthetic oligonucleotide: BID-895
gagcuggggucuuaagggug

SEQ ID NO: 42815 - RNA, 20 nt, Artificial Sequence
  Synthetic oligonucleotide: BID-1043
gagagcgaggacugagggug

SEQ ID NO: 42816 - RNA, 20 nt, Artificial Sequence
  Synthetic oligonucleotide: BID-688
aaaaagaaauuaguugggug

SEQ ID NO: 42817 - RNA, 20 nt, Artificial Sequence
  Synthetic oligonucleotide: BID-692
aacaagcacagggacuggug

SEQ ID NO: 42818 - RNA, 20 nt, Artificial Sequence
  Synthetic oligonucleotide: BID-802
aguuuuuaguggagguggug

SEQ ID NO: 42819 - RNA, 20 nt, Artificial Sequence
  Synthetic oligonucleotide: BID-872
caguccucgcucucacugug

SEQ ID NO: 42820 - RNA, 20 nt, Artificial Sequence
  Synthetic oligonucleotide: BID-897
gcuggggucuuaagggugug

SEQ ID NO: 42821 - RNA, 20 nt, Artificial Sequence
  Synthetic oligonucleotide: BID-902
uccucuggcaucaggaguug

SEQ ID NO: 42822 - RNA, 20 nt, Artificial Sequence
  Synthetic oligonucleotide: BID-879
cccacaggaggcuuugagau

SEQ ID NO: 42823 - RNA, 20 nt, Artificial Sequence
  Synthetic oligonucleotide: BID-1013
ggggcagggacgcacacccu

SEQ ID NO: 42824 - RNA, 20 nt, Artificial Sequence
  Synthetic oligonucleotide: BID-889
cuggggcccugcaguccccu

SEQ ID NO: 42825 - RNA, 20 nt, Artificial Sequence
  Synthetic oligonucleotide: BID-1003
gcauuuccucuucccucccu

SEQ ID NO: 42826 - RNA, 20 nt, Artificial Sequence
  Synthetic oligonucleotide: BID-701
gacuguuccagaaacagccu

SEQ ID NO: 42827 - RNA, 20 nt, Artificial Sequence
  Synthetic oligonucleotide: BID-884
gagauggggggagcucuccu

SEQ ID NO: 42828 - RNA, 20 nt, Artificial Sequence
  Synthetic oligonucleotide: BID-1001
augcucccugugcccguccu

SEQ ID NO: 42829 - RNA, 20 nt, Artificial Sequence
  Synthetic oligonucleotide: BID-886
gccugaaugugugccguccu

SEQ ID NO: 42830 - RNA, 20 nt, Artificial Sequence
  Synthetic oligonucleotide: BID-891
gagaccagauucccugagcu

SEQ ID NO: 42831 - RNA, 20 nt, Artificial Sequence
  Synthetic oligonucleotide: BID-773
ccacuuacuccagcgccgcu

SEQ ID NO: 42832 - RNA, 20 nt, Artificial Sequence
  Synthetic oligonucleotide: BID-1016
cugggccgcaggcagaggcu

SEQ ID NO: 42833 - RNA, 20 nt, Artificial Sequence
  Synthetic oligonucleotide: BID-696
acagggacuggugaggggcu

SEQ ID NO: 42834 - RNA, 20 nt, Artificial Sequence
  Synthetic oligonucleotide: BID-923
ggggucagcaguucguggcu

SEQ ID NO: 42835 - RNA, 20 nt, Artificial Sequence
  Synthetic oligonucleotide: BID-795
uuuaacauauagauaaugcu

SEQ ID NO: 42836 - RNA, 20 nt, Artificial Sequence
  Synthetic oligonucleotide: BID-1053
ugagaagguggaagagcucu

SEQ ID NO: 42837 - RNA, 20 nt, Artificial Sequence
  Synthetic oligonucleotide: BID-775
auaauuccuaaugauucucu

SEQ ID NO: 42838 - RNA, 20 nt, Artificial Sequence
  Synthetic oligonucleotide: BID-779
ggcuguuucuggaacagucu

SEQ ID NO: 42839 - RNA, 20 nt, Artificial Sequence
  Synthetic oligonucleotide: BID-1025
cagcucagggaaucuggucu

SEQ ID NO: 42840 - RNA, 20 nt, Artificial Sequence
  Synthetic oligonucleotide: BID-782
cagucugggguggucauucu

SEQ ID NO: 42841 - RNA, 20 nt, Artificial Sequence
  Synthetic oligonucleotide: BID-789
gaaccagggguuuggaaagu

SEQ ID NO: 42842 - RNA, 20 nt, Artificial Sequence
  Synthetic oligonucleotide: BID-707
guaaguggccaacuuaaagu

SEQ ID NO: 42843 - RNA, 20 nt, Artificial Sequence
  Synthetic oligonucleotide: BID-771
agugucguccaacuuuaagu

SEQ ID NO: 42844 - RNA, 20 nt, Artificial Sequence
  Synthetic oligonucleotide: BID-686
aaacugaaaaagaaauuagu

SEQ ID NO: 42845 - RNA, 20 nt, Artificial Sequence
  Synthetic oligonucleotide: BID-1055
aagguggaagagcucugggu

SEQ ID NO: 42846 - RNA, 20 nt, Artificial Sequence
  Synthetic oligonucleotide: BID-801
caguuuuuaguggagguggu

SEQ ID NO: 42847 - RNA, 20 nt, Artificial Sequence
  Synthetic oligonucleotide: BID-791
gaaagugggugaagccaugu

SEQ ID NO: 42848 - RNA, 20 nt, Artificial Sequence
  Synthetic oligonucleotide: BID-871
ucaguccucgcucucacugu

SEQ ID NO: 42849 - RNA, 20 nt, Artificial Sequence
  Synthetic oligonucleotide: BID-1036
cccaucucaaagccuccugu

SEQ ID NO: 42850 - RNA, 20 nt, Artificial Sequence
  Synthetic oligonucleotide: BID-896
agcuggggucuuaagggugu

SEQ ID NO: 42851 - RNA, 20 nt, Artificial Sequence
  Synthetic oligonucleotide: BID-703
auguuucccagagaaucauu

SEQ ID NO: 42852 - RNA, 20 nt, Artificial Sequence
  Synthetic oligonucleotide: BID-793
uuguuuauucuuuaauuauu

SEQ ID NO: 42853 - RNA, 20 nt, Artificial Sequence
  Synthetic oligonucleotide: BID-687
aacugaaaaagaaauuaguu

SEQ ID NO: 42854 - RNA, 20 nt, Artificial Sequence
  Synthetic oligonucleotide: BID-787
uccucacggaaccagggguu

SEQ ID NO: 42855 - RNA, 21 nt, Artificial Sequence
  Synthetic oligonucleotide: BID-2590
cugcacauucguauuuguuga

SEQ ID NO: 42856 - RNA, 22 nt, Artificial Sequence
  Synthetic oligonucleotide: BID-2591
gcugcacauucguauuuguuga

SEQ ID NO: 42857 - RNA, 23 nt, Artificial Sequence
  Synthetic oligonucleotide: BID-2592
cgcugcacauucguauuuguuga

SEQ ID NO: 42858 - RNA, 24 nt, Artificial Sequence
  Synthetic oligonucleotide: BID-2593
ccgcugcacauucguauuuguuga

SEQ ID NO: 42859 - RNA, 21 nt, Artificial Sequence
  Synthetic oligonucleotide: BID-3635
cugagggcuucagagcucucc

SEQ ID NO: 42860 - RNA, 22 nt, Artificial Sequence
  Synthetic oligonucleotide: BID-3636
gcugagggcuucagagcucucc

SEQ ID NO: 42861 - RNA, 23 nt, Artificial Sequence
  Synthetic oligonucleotide: BID-3637
ggcugagggcuucagagcucucc

SEQ ID NO: 42862 - RNA, 24 nt, Artificial Sequence
  Synthetic oligonucleotide: BID-3638
uggcugagggcuucagagcucucc

SEQ ID NO: 42863 - RNA, 21 nt, Artificial Sequence
  Synthetic oligonucleotide: BID-3639
acgccggggcaggcggcaggc

SEQ ID NO: 42864 - RNA, 22 nt, Artificial Sequence
  Synthetic oligonucleotide: BID-3640
cacgccggggcaggcggcaggc

SEQ ID NO: 42865 - RNA, 23 nt, Artificial Sequence
  Synthetic oligonucleotide: BID-3641
ccacgccggggcaggcggcaggc

SEQ ID NO: 42866 - RNA, 24 nt, Artificial Sequence
  Synthetic oligonucleotide: BID-3642
uccacgccggggcaggcggcaggc

SEQ ID NO: 42867 - RNA, 18 nt, Artificial Sequence
  Synthetic oligonucleotide: BID-3643
ggauuccgauccgccggc

SEQ ID NO: 42868 - RNA, 19 nt, Artificial Sequence
  Synthetic oligonucleotide: BID-3644
gggauuccgauccgccggc

SEQ ID NO: 42869 - RNA, 20 nt, Artificial Sequence
  Synthetic oligonucleotide: BID-1402
ggggauuccgauccgccggc

SEQ ID NO: 42870 - RNA, 21 nt, Artificial Sequence
  Synthetic oligonucleotide: BID-3645
cggggauuccgauccgccggc

SEQ ID NO: 42871 - RNA, 22 nt, Artificial Sequence
  Synthetic oligonucleotide: BID-3646
gcggggauuccgauccgccggc

SEQ ID NO: 42872 - RNA, 23 nt, Artificial Sequence
  Synthetic oligonucleotide: BID-3647
ggcggggauuccgauccgccggc

SEQ ID NO: 42873 - RNA, 24 nt, Artificial Sequence
  Synthetic oligonucleotide: BID-3648
gggcggggauuccgauccgccggc

SEQ ID NO: 42874 - RNA, 18 nt, Artificial Sequence
  Synthetic oligonucleotide: BID-3649
gcguaccccgggaggggc

SEQ ID NO: 42875 - RNA, 19 nt, Artificial Sequence
  Synthetic oligonucleotide: BID-3650
cgcguaccccgggaggggc

SEQ ID NO: 42876 - RNA, 20 nt, Artificial Sequence
  Synthetic oligonucleotide: BID-1448
gcgcguaccccgggaggggc

SEQ ID NO: 42877 - RNA, 21 nt, Artificial Sequence
  Synthetic oligonucleotide: BID-3651
ggcgcguaccccgggaggggc

SEQ ID NO: 42878 - RNA, 22 nt, Artificial Sequence
  Synthetic oligonucleotide: BID-3652
cggcgcguaccccgggaggggc

SEQ ID NO: 42879 - RNA, 23 nt, Artificial Sequence
  Synthetic oligonucleotide: BID-3653
ucggcgcguaccccgggaggggc

SEQ ID NO: 42880 - RNA, 24 nt, Artificial Sequence
  Synthetic oligonucleotide: BID-3654
cucggcgcguaccccgggaggggc

SEQ ID NO: 42881 - RNA, 18 nt, Artificial Sequence
  Synthetic oligonucleotide: BID-2556
gcugcacauucguauuug

SEQ ID NO: 42882 - RNA, 19 nt, Artificial Sequence
  Synthetic oligonucleotide: BID-2557
cgcugcacauucguauuug

SEQ ID NO: 42883 - RNA, 20 nt, Artificial Sequence
  Synthetic oligonucleotide: BID-553
ccgcugcacauucguauuug

SEQ ID NO: 42884 - RNA, 21 nt, Artificial Sequence
  Synthetic oligonucleotide: BID-2627
accgcugcacauucguauuug

SEQ ID NO: 42885 - RNA, 22 nt, Artificial Sequence
  Synthetic oligonucleotide: BID-2628
caccgcugcacauucguauuug

SEQ ID NO: 42886 - RNA, 23 nt, Artificial Sequence
  Synthetic oligonucleotide: BID-2629
gcaccgcugcacauucguauuug

SEQ ID NO: 42887 - RNA, 24 nt, Artificial Sequence
  Synthetic oligonucleotide: BID-2630
agcaccgcugcacauucguauuug

SEQ ID NO: 42888 - RNA, 18 nt, Artificial Sequence
  Synthetic oligonucleotide: BID-3655
gggcgccauaaggaggaa

SEQ ID NO: 42889 - RNA, 19 nt, Artificial Sequence
  Synthetic oligonucleotide: BID-3656
ggggcgccauaaggaggaa

SEQ ID NO: 42890 - RNA, 20 nt, Artificial Sequence
  Synthetic oligonucleotide: BID-1117
cggggcgccauaaggaggaa

SEQ ID NO: 42891 - RNA, 21 nt, Artificial Sequence
  Synthetic oligonucleotide: BID-3657
gcggggcgccauaaggaggaa

SEQ ID NO: 42892 - RNA, 22 nt, Artificial Sequence
  Synthetic oligonucleotide: BID-3658
cgcggggcgccauaaggaggaa

SEQ ID NO: 42893 - RNA, 23 nt, Artificial Sequence
  Synthetic oligonucleotide: BID-3659
gcgcggggcgccauaaggaggaa

SEQ ID NO: 42894 - RNA, 24 nt, Artificial Sequence
  Synthetic oligonucleotide: BID-3660
cgcgcggggcgccauaaggaggaa

SEQ ID NO: 42895 - RNA, 18 nt, Artificial Sequence
  Synthetic oligonucleotide: BID-3661
gugcacccgcgccccucc

SEQ ID NO: 42896 - RNA, 19 nt, Artificial Sequence
  Synthetic oligonucleotide: BID-3662
agugcacccgcgccccucc

SEQ ID NO: 42897 - RNA, 20 nt, Artificial Sequence
  Synthetic oligonucleotide: BID-2001
gagugcacccgcgccccucc

SEQ ID NO: 42898 - RNA, 21 nt, Artificial Sequence
  Synthetic oligonucleotide: BID-3663
ugagugcacccgcgccccucc

SEQ ID NO: 42899 - RNA, 22 nt, Artificial Sequence
  Synthetic oligonucleotide: BID-3664
gugagugcacccgcgccccucc

SEQ ID NO: 42900 - RNA, 23 nt, Artificial Sequence
  Synthetic oligonucleotide: BID-3665
ggugagugcacccgcgccccucc

SEQ ID NO: 42901 - RNA, 24 nt, Artificial Sequence
  Synthetic oligonucleotide: BID-3666
uggugagugcacccgcgccccucc

SEQ ID NO: 42902 - RNA, 18 nt, Artificial Sequence
  Synthetic oligonucleotide: BID-2566
acgaaugugcagcggugc

SEQ ID NO: 42903 - RNA, 19 nt, Artificial Sequence
  Synthetic oligonucleotide: BID-2567
uacgaaugugcagcggugc

SEQ ID NO: 42904 - RNA, 20 nt, Artificial Sequence
  Synthetic oligonucleotide: BID-1
auacgaaugugcagcggugc

SEQ ID NO: 42905 - RNA, 21 nt, Artificial Sequence
  Synthetic oligonucleotide: BID-2659
aauacgaaugugcagcggugc

SEQ ID NO: 42906 - RNA, 22 nt, Artificial Sequence
  Synthetic oligonucleotide: BID-2660
aaauacgaaugugcagcggugc

SEQ ID NO: 42907 - RNA, 23 nt, Artificial Sequence
  Synthetic oligonucleotide: BID-2661
caaauacgaaugugcagcggugc

SEQ ID NO: 42908 - RNA, 24 nt, Artificial Sequence
  Synthetic oligonucleotide: BID-2662
acaaauacgaaugugcagcggugc

SEQ ID NO: 42909 - RNA, 18 nt, Artificial Sequence
  Synthetic oligonucleotide: BID-3667
ugcaggccacccuugccg

SEQ ID NO: 42910 - RNA, 19 nt, Artificial Sequence
  Synthetic oligonucleotide: BID-3668
gugcaggccacccuugccg

SEQ ID NO: 42911 - RNA, 20 nt, Artificial Sequence
  Synthetic oligonucleotide: BID-1192
ggugcaggccacccuugccg

SEQ ID NO: 42912 - RNA, 21 nt, Artificial Sequence
  Synthetic oligonucleotide: BID-3669
gggugcaggccacccuugccg

SEQ ID NO: 42913 - RNA, 22 nt, Artificial Sequence
  Synthetic oligonucleotide: BID-3670
cgggugcaggccacccuugccg

SEQ ID NO: 42914 - RNA, 23 nt, Artificial Sequence
  Synthetic oligonucleotide: BID-3671
ccgggugcaggccacccuugccg

SEQ ID NO: 42915 - RNA, 24 nt, Artificial Sequence
  Synthetic oligonucleotide: BID-3672
gccgggugcaggccacccuugccg

SEQ ID NO: 42916 - RNA, 21 nt, Artificial Sequence
  Synthetic oligonucleotide: BID-3673
ggaccggccuucaccugcagg

SEQ ID NO: 42917 - RNA, 22 nt, Artificial Sequence
  Synthetic oligonucleotide: BID-3674
uggaccggccuucaccugcagg

SEQ ID NO: 42918 - RNA, 23 nt, Artificial Sequence
  Synthetic oligonucleotide: BID-3675
cuggaccggccuucaccugcagg

SEQ ID NO: 42919 - RNA, 24 nt, Artificial Sequence
  Synthetic oligonucleotide: BID-3676
gcuggaccggccuucaccugcagg

SEQ ID NO: 42920 - RNA, 18 nt, Artificial Sequence
  Synthetic oligonucleotide: BID-3677
gcaggucggugcugaggg

SEQ ID NO: 42921 - RNA, 19 nt, Artificial Sequence
  Synthetic oligonucleotide: BID-3678
ggcaggucggugcugaggg

SEQ ID NO: 42922 - RNA, 20 nt, Artificial Sequence
  Synthetic oligonucleotide: BID-1154
cggcaggucggugcugaggg

SEQ ID NO: 42923 - RNA, 21 nt, Artificial Sequence
  Synthetic oligonucleotide: BID-3679
ccggcaggucggugcugaggg

SEQ ID NO: 42924 - RNA, 22 nt, Artificial Sequence
  Synthetic oligonucleotide: BID-3680
gccggcaggucggugcugaggg

SEQ ID NO: 42925 - RNA, 23 nt, Artificial Sequence
  Synthetic oligonucleotide: BID-3681
ggccggcaggucggugcugaggg

SEQ ID NO: 42926 - RNA, 24 nt, Artificial Sequence
  Synthetic oligonucleotide: BID-3682
cggccggcaggucggugcugaggg

SEQ ID NO: 42927 - RNA, 18 nt, Artificial Sequence
  Synthetic oligonucleotide: BID-3683
gaaaacccgcgggccugg

SEQ ID NO: 42928 - RNA, 19 nt, Artificial Sequence
  Synthetic oligonucleotide: BID-3684
agaaaacccgcgggccugg

SEQ ID NO: 42929 - RNA, 20 nt, Artificial Sequence
  Synthetic oligonucleotide: BID-1191
gagaaaacccgcgggccugg

SEQ ID NO: 42930 - RNA, 21 nt, Artificial Sequence
  Synthetic oligonucleotide: BID-3685
ggagaaaacccgcgggccugg

SEQ ID NO: 42931 - RNA, 22 nt, Artificial Sequence
  Synthetic oligonucleotide: BID-3686
aggagaaaacccgcgggccugg

SEQ ID NO: 42932 - RNA, 23 nt, Artificial Sequence
  Synthetic oligonucleotide: BID-3687
gaggagaaaacccgcgggccugg

SEQ ID NO: 42933 - RNA, 24 nt, Artificial Sequence
  Synthetic oligonucleotide: BID-3688
agaggagaaaacccgcgggccugg

SEQ ID NO: 42934 - RNA, 18 nt, Artificial Sequence
  Synthetic oligonucleotide: BID-3689
ugggaaacuguugagugg

SEQ ID NO: 42935 - RNA, 19 nt, Artificial Sequence
  Synthetic oligonucleotide: BID-3690
cugggaaacuguugagugg

SEQ ID NO: 42936 - RNA, 20 nt, Artificial Sequence
  Synthetic oligonucleotide: BID-1208
gcugggaaacuguugagugg

SEQ ID NO: 42937 - RNA, 21 nt, Artificial Sequence
  Synthetic oligonucleotide: BID-3691
ugcugggaaacuguugagugg

SEQ ID NO: 42938 - RNA, 22 nt, Artificial Sequence
  Synthetic oligonucleotide: BID-3692
cugcugggaaacuguugagugg

SEQ ID NO: 42939 - RNA, 23 nt, Artificial Sequence
  Synthetic oligonucleotide: BID-3693
gcugcugggaaacuguugagugg

SEQ ID NO: 42940 - RNA, 24 nt, Artificial Sequence
  Synthetic oligonucleotide: BID-3694
ugcugcugggaaacuguugagugg

SEQ ID NO: 42941 - RNA, 21 nt, Artificial Sequence
  Synthetic oligonucleotide: BID-3695
gcugcugcugcugggaaacug

SEQ ID NO: 42942 - RNA, 22 nt, Artificial Sequence
  Synthetic oligonucleotide: BID-3696
cgcugcugcugcugggaaacug

SEQ ID NO: 42943 - RNA, 23 nt, Artificial Sequence
  Synthetic oligonucleotide: BID-3697
ucgcugcugcugcugggaaacug

SEQ ID NO: 42944 - RNA, 24 nt, Artificial Sequence
  Synthetic oligonucleotide: BID-3698
cucgcugcugcugcugggaaacug

SEQ ID NO: 42945 - RNA, 21 nt, Artificial Sequence
  Synthetic oligonucleotide: BID-3699
aggccacccuugccggcggau

SEQ ID NO: 42946 - RNA, 22 nt, Artificial Sequence
  Synthetic oligonucleotide: BID-3700
caggccacccuugccggcggau

SEQ ID NO: 42947 - RNA, 23 nt, Artificial Sequence
  Synthetic oligonucleotide: BID-3701
gcaggccacccuugccggcggau

SEQ ID NO: 42948 - RNA, 24 nt, Artificial Sequence
  Synthetic oligonucleotide: BID-3702
ugcaggccacccuugccggcggau

SEQ ID NO: 42949 - RNA, 21 nt, Artificial Sequence
  Synthetic oligonucleotide: BID-3703
uguguccucuccacguggccu

SEQ ID NO: 42950 - RNA, 22 nt, Artificial Sequence
  Synthetic oligonucleotide: BID-3704
uuguguccucuccacguggccu

SEQ ID NO: 42951 - RNA, 23 nt, Artificial Sequence
  Synthetic oligonucleotide: BID-3705
guuguguccucuccacguggccu

SEQ ID NO: 42952 - RNA, 24 nt, Artificial Sequence
  Synthetic oligonucleotide: BID-3706
uguuguguccucuccacguggccu

SEQ ID NO: 42953 - RNA, 21 nt, Artificial Sequence
  Synthetic oligonucleotide: BID-3707
cgcggccggcaggucggugcu

SEQ ID NO: 42954 - RNA, 22 nt, Artificial Sequence
  Synthetic oligonucleotide: BID-3708
gcgcggccggcaggucggugcu

SEQ ID NO: 42955 - RNA, 23 nt, Artificial Sequence
  Synthetic oligonucleotide: BID-3709
ggcgcggccggcaggucggugcu

SEQ ID NO: 42956 - RNA, 24 nt, Artificial Sequence
  Synthetic oligonucleotide: BID-3710
cggcgcggccggcaggucggugcu

SEQ ID NO: 42957 - RNA, 18 nt, Artificial Sequence
  Synthetic oligonucleotide: BID-3711
gagcacuggcaaugaugu

SEQ ID NO: 42958 - RNA, 19 nt, Artificial Sequence
  Synthetic oligonucleotide: BID-3712
agagcacuggcaaugaugu

SEQ ID NO: 42959 - RNA, 20 nt, Artificial Sequence
  Synthetic oligonucleotide: BID-1203
uagagcacuggcaaugaugu

SEQ ID NO: 42960 - RNA, 21 nt, Artificial Sequence
  Synthetic oligonucleotide: BID-3713
uuagagcacuggcaaugaugu

SEQ ID NO: 42961 - RNA, 22 nt, Artificial Sequence
  Synthetic oligonucleotide: BID-3714
cuuagagcacuggcaaugaugu

SEQ ID NO: 42962 - RNA, 23 nt, Artificial Sequence
  Synthetic oligonucleotide: BID-3715
ccuuagagcacuggcaaugaugu

SEQ ID NO: 42963 - RNA, 24 nt, Artificial Sequence
  Synthetic oligonucleotide: BID-3716
uccuuagagcacuggcaaugaugu

SEQ ID NO: 42964 - RNA, 18 nt, Artificial Sequence
  Synthetic oligonucleotide: BID-2584
uucguauuuguugaauga

SEQ ID NO: 42965 - RNA, 19 nt, Artificial Sequence
  Synthetic oligonucleotide: BID-2585
auucguauuuguugaauga

SEQ ID NO: 42966 - RNA, 20 nt, Artificial Sequence
  Synthetic oligonucleotide: BID-555
cauucguauuuguugaauga

SEQ ID NO: 42967 - RNA, 21 nt, Artificial Sequence
  Synthetic oligonucleotide: BID-2586
acauucguauuuguugaauga

SEQ ID NO: 42968 - RNA, 22 nt, Artificial Sequence
  Synthetic oligonucleotide: BID-2587
cacauucguauuuguugaauga

SEQ ID NO: 42969 - RNA, 23 nt, Artificial Sequence
  Synthetic oligonucleotide: BID-2588
gcacauucguauuuguugaauga

SEQ ID NO: 42970 - RNA, 24 nt, Artificial Sequence
  Synthetic oligonucleotide: BID-2589
ugcacauucguauuuguugaauga

SEQ ID NO: 42971 - RNA, 18 nt, Artificial Sequence
  Synthetic oligonucleotide: BID-2550
cacauucguauuuguuga

SEQ ID NO: 42972 - RNA, 19 nt, Artificial Sequence
  Synthetic oligonucleotide: BID-2551
gcacauucguauuuguuga

SEQ ID NO: 42973 - RNA, 20 nt, Artificial Sequence
  Synthetic oligonucleotide: BID-554
ugcacauucguauuuguuga

SEQ ID NO: 42974 - RNA, 18 nt, Artificial Sequence
  Synthetic oligonucleotide: BID-2594
cagcccccagcccacuua

SEQ ID NO: 42975 - RNA, 19 nt, Artificial Sequence
  Synthetic oligonucleotide: BID-2595
ccagcccccagcccacuua

SEQ ID NO: 42976 - RNA, 20 nt, Artificial Sequence
  Synthetic oligonucleotide: BID-551
cccagcccccagcccacuua

SEQ ID NO: 42977 - RNA, 21 nt, Artificial Sequence
  Synthetic oligonucleotide: BID-2596
gcccagcccccagcccacuua

SEQ ID NO: 42978 - RNA, 22 nt, Artificial Sequence
  Synthetic oligonucleotide: BID-2597
ggcccagcccccagcccacuua

SEQ ID NO: 42979 - RNA, 23 nt, Artificial Sequence
  Synthetic oligonucleotide: BID-2598
aggcccagcccccagcccacuua

SEQ ID NO: 42980 - RNA, 24 nt, Artificial Sequence
  Synthetic oligonucleotide: BID-2599
aaggcccagcccccagcccacuua

SEQ ID NO: 42981 - RNA, 18 nt, Artificial Sequence
  Synthetic oligonucleotide: BID-3717
agcucucccagggucccc

SEQ ID NO: 42982 - RNA, 19 nt, Artificial Sequence
  Synthetic oligonucleotide: BID-3718
gagcucucccagggucccc

SEQ ID NO: 42983 - RNA, 20 nt, Artificial Sequence
  Synthetic oligonucleotide: BID-2151
agagcucucccagggucccc

SEQ ID NO: 42984 - RNA, 21 nt, Artificial Sequence
  Synthetic oligonucleotide: BID-3719
cagagcucucccagggucccc

SEQ ID NO: 42985 - RNA, 22 nt, Artificial Sequence
  Synthetic oligonucleotide: BID-3720
ucagagcucucccagggucccc

SEQ ID NO: 42986 - RNA, 23 nt, Artificial Sequence
  Synthetic oligonucleotide: BID-3721
uucagagcucucccagggucccc

SEQ ID NO: 42987 - RNA, 24 nt, Artificial Sequence
  Synthetic oligonucleotide: BID-3722
cuucagagcucucccagggucccc

SEQ ID NO: 42988 - RNA, 18 nt, Artificial Sequence
  Synthetic oligonucleotide: BID-3723
cugcacccggccaggccc

SEQ ID NO: 42989 - RNA, 19 nt, Artificial Sequence
  Synthetic oligonucleotide: BID-3724
ccugcacccggccaggccc

SEQ ID NO: 42990 - RNA, 20 nt, Artificial Sequence
  Synthetic oligonucleotide: BID-1403
gccugcacccggccaggccc

SEQ ID NO: 42991 - RNA, 21 nt, Artificial Sequence
  Synthetic oligonucleotide: BID-3725
ggccugcacccggccaggccc

SEQ ID NO: 42992 - RNA, 22 nt, Artificial Sequence
  Synthetic oligonucleotide: BID-3726
uggccugcacccggccaggccc

SEQ ID NO: 42993 - RNA, 23 nt, Artificial Sequence
  Synthetic oligonucleotide: BID-3727
guggccugcacccggccaggccc

SEQ ID NO: 42994 - RNA, 24 nt, Artificial Sequence
  Synthetic oligonucleotide: BID-3728
gguggccugcacccggccaggccc

SEQ ID NO: 42995 - RNA, 18 nt, Artificial Sequence
  Synthetic oligonucleotide: BID-3729
gcgccccgcaccccuccc

SEQ ID NO: 42996 - RNA, 19 nt, Artificial Sequence
  Synthetic oligonucleotide: BID-3730
cgcgccccgcaccccuccc

SEQ ID NO: 42997 - RNA, 20 nt, Artificial Sequence
  Synthetic oligonucleotide: BID-1406
ccgcgccccgcaccccuccc

SEQ ID NO: 42998 - RNA, 21 nt, Artificial Sequence
  Synthetic oligonucleotide: BID-3731
cccgcgccccgcaccccuccc

SEQ ID NO: 42999 - RNA, 22 nt, Artificial Sequence
  Synthetic oligonucleotide: BID-3732
ccccgcgccccgcaccccuccc

SEQ ID NO: 43000 - RNA, 23 nt, Artificial Sequence
  Synthetic oligonucleotide: BID-3733
uccccgcgccccgcaccccuccc

SEQ ID NO: 43001 - RNA, 24 nt, Artificial Sequence
  Synthetic oligonucleotide: BID-3734
cuccccgcgccccgcaccccuccc

SEQ ID NO: 43002 - RNA, 18 nt, Artificial Sequence
  Synthetic oligonucleotide: BID-3735
agggcuucagagcucucc

SEQ ID NO: 43003 - RNA, 19 nt, Artificial Sequence
  Synthetic oligonucleotide: BID-3736
gagggcuucagagcucucc

SEQ ID NO: 43004 - RNA, 20 nt, Artificial Sequence
  Synthetic oligonucleotide: BID-1381
ugagggcuucagagcucucc

SEQ ID NO: 43005 - RNA, 18 nt, Artificial Sequence
  Synthetic oligonucleotide: BID-3737
uuucccagcagcagcagc

SEQ ID NO: 43006 - RNA, 19 nt, Artificial Sequence
  Synthetic oligonucleotide: BID-3738
guuucccagcagcagcagc

SEQ ID NO: 43007 - RNA, 20 nt, Artificial Sequence
  Synthetic oligonucleotide: BID-1385
aguuucccagcagcagcagc

SEQ ID NO: 43008 - RNA, 21 nt, Artificial Sequence
  Synthetic oligonucleotide: BID-3739
caguuucccagcagcagcagc

SEQ ID NO: 43009 - RNA, 22 nt, Artificial Sequence
  Synthetic oligonucleotide: BID-3740
acaguuucccagcagcagcagc

SEQ ID NO: 43010 - RNA, 23 nt, Artificial Sequence
  Synthetic oligonucleotide: BID-3741
aacaguuucccagcagcagcagc

SEQ ID NO: 43011 - RNA, 24 nt, Artificial Sequence
  Synthetic oligonucleotide: BID-3742
caacaguuucccagcagcagcagc

SEQ ID NO: 43012 - RNA, 18 nt, Artificial Sequence
  Synthetic oligonucleotide: BID-3743
ccggggcaggcggcaggc

SEQ ID NO: 43013 - RNA, 19 nt, Artificial Sequence
  Synthetic oligonucleotide: BID-3744
gccggggcaggcggcaggc

SEQ ID NO: 43014 - RNA, 20 nt, Artificial Sequence
  Synthetic oligonucleotide: BID-2226
cgccggggcaggcggcaggc

SEQ ID NO: 43015 - RNA, 18 nt, Artificial Sequence
  Synthetic oligonucleotide: BID-3745
aaagaccacggugugggc

SEQ ID NO: 43016 - RNA, 19 nt, Artificial Sequence
  Synthetic oligonucleotide: BID-3746
gaaagaccacggugugggc

SEQ ID NO: 43017 - RNA, 20 nt, Artificial Sequence
  Synthetic oligonucleotide: BID-2170
ggaaagaccacggugugggc

SEQ ID NO: 43018 - RNA, 21 nt, Artificial Sequence
  Synthetic oligonucleotide: BID-3747
uggaaagaccacggugugggc

SEQ ID NO: 43019 - RNA, 22 nt, Artificial Sequence
  Synthetic oligonucleotide: BID-3748
cuggaaagaccacggugugggc

SEQ ID NO: 43020 - RNA, 23 nt, Artificial Sequence
  Synthetic oligonucleotide: BID-3749
gcuggaaagaccacggugugggc

SEQ ID NO: 43021 - RNA, 24 nt, Artificial Sequence
  Synthetic oligonucleotide: BID-3750
ugcuggaaagaccacggugugggc

SEQ ID NO: 43022 - RNA, 18 nt, Artificial Sequence
  Synthetic oligonucleotide: BID-3751
ccaaguggcugggcuggc

SEQ ID NO: 43023 - RNA, 19 nt, Artificial Sequence
  Synthetic oligonucleotide: BID-3752
accaaguggcugggcuggc

SEQ ID NO: 43024 - RNA, 20 nt, Artificial Sequence
  Synthetic oligonucleotide: BID-1218
caccaaguggcugggcuggc

SEQ ID NO: 43025 - RNA, 21 nt, Artificial Sequence
  Synthetic oligonucleotide: BID-3753
ccaccaaguggcugggcuggc

SEQ ID NO: 43026 - RNA, 22 nt, Artificial Sequence
  Synthetic oligonucleotide: BID-3754
gccaccaaguggcugggcuggc

SEQ ID NO: 43027 - RNA, 23 nt, Artificial Sequence
  Synthetic oligonucleotide: BID-3755
agccaccaaguggcugggcuggc

SEQ ID NO: 43028 - RNA, 24 nt, Artificial Sequence
  Synthetic oligonucleotide: BID-3756
cagccaccaaguggcugggcuggc

SEQ ID NO: 43029 - RNA, 18 nt, Artificial Sequence
  Synthetic oligonucleotide: BID-3757
gccagaggaggggaggcg

SEQ ID NO: 43030 - RNA, 19 nt, Artificial Sequence
  Synthetic oligonucleotide: BID-3758
agccagaggaggggaggcg

SEQ ID NO: 43031 - RNA, 20 nt, Artificial Sequence
  Synthetic oligonucleotide: BID-2020
gagccagaggaggggaggcg

SEQ ID NO: 43032 - RNA, 21 nt, Artificial Sequence
  Synthetic oligonucleotide: BID-3759
ggagccagaggaggggaggcg

SEQ ID NO: 43033 - RNA, 22 nt, Artificial Sequence
  Synthetic oligonucleotide: BID-3760
gggagccagaggaggggaggcg

SEQ ID NO: 43034 - RNA, 23 nt, Artificial Sequence
  Synthetic oligonucleotide: BID-3761
ugggagccagaggaggggaggcg

SEQ ID NO: 43035 - RNA, 24 nt, Artificial Sequence
  Synthetic oligonucleotide: BID-3762
gugggagccagaggaggggaggcg

SEQ ID NO: 43036 - RNA, 18 nt, Artificial Sequence
  Synthetic oligonucleotide: BID-3763
ccggccuucaccugcagg

SEQ ID NO: 43037 - RNA, 19 nt, Artificial Sequence
  Synthetic oligonucleotide: BID-3764
accggccuucaccugcagg

SEQ ID NO: 43038 - RNA, 20 nt, Artificial Sequence
  Synthetic oligonucleotide: BID-1238
gaccggccuucaccugcagg

SEQ ID NO: 43039 - RNA, 18 nt, Artificial Sequence
  Synthetic oligonucleotide: BID-3765
ucagcagcgaccugaggg

SEQ ID NO: 43040 - RNA, 19 nt, Artificial Sequence
  Synthetic oligonucleotide: BID-3766
cucagcagcgaccugaggg

SEQ ID NO: 43041 - RNA, 20 nt, Artificial Sequence
  Synthetic oligonucleotide: BID-1150
ccucagcagcgaccugaggg

SEQ ID NO: 43042 - RNA, 21 nt, Artificial Sequence
  Synthetic oligonucleotide: BID-3767
gccucagcagcgaccugaggg

SEQ ID NO: 43043 - RNA, 22 nt, Artificial Sequence
  Synthetic oligonucleotide: BID-3768
ggccucagcagcgaccugaggg

SEQ ID NO: 43044 - RNA, 23 nt, Artificial Sequence
  Synthetic oligonucleotide: BID-3769
aggccucagcagcgaccugaggg

SEQ ID NO: 43045 - RNA, 24 nt, Artificial Sequence
  Synthetic oligonucleotide: BID-3770
caggccucagcagcgaccugaggg

SEQ ID NO: 43046 - RNA, 18 nt, Artificial Sequence
  Synthetic oligonucleotide: BID-3771
ggccuggggauucagggg

SEQ ID NO: 43047 - RNA, 19 nt, Artificial Sequence
  Synthetic oligonucleotide: BID-3772
uggccuggggauucagggg

SEQ ID NO: 43048 - RNA, 20 nt, Artificial Sequence
  Synthetic oligonucleotide: BID-2052
guggccuggggauucagggg

SEQ ID NO: 43049 - RNA, 21 nt, Artificial Sequence
  Synthetic oligonucleotide: BID-3773
cguggccuggggauucagggg

SEQ ID NO: 43050 - RNA, 22 nt, Artificial Sequence
  Synthetic oligonucleotide: BID-3774
acguggccuggggauucagggg

SEQ ID NO: 43051 - RNA, 23 nt, Artificial Sequence
  Synthetic oligonucleotide: BID-3775
cacguggccuggggauucagggg

SEQ ID NO: 43052 - RNA, 24 nt, Artificial Sequence
  Synthetic oligonucleotide: BID-3776
ccacguggccuggggauucagggg

SEQ ID NO: 43053 - RNA, 18 nt, Artificial Sequence
  Synthetic oligonucleotide: BID-3777
gcugcugcugggaaacug

SEQ ID NO: 43054 - RNA, 19 nt, Artificial Sequence
  Synthetic oligonucleotide: BID-3778
ugcugcugcugggaaacug

SEQ ID NO: 43055 - RNA, 20 nt, Artificial Sequence
  Synthetic oligonucleotide: BID-1207
cugcugcugcugggaaacug

SEQ ID NO: 43056 - RNA, 18 nt, Artificial Sequence
  Synthetic oligonucleotide: BID-3779
cccgcgcccccgcggcug

SEQ ID NO: 43057 - RNA, 19 nt, Artificial Sequence
  Synthetic oligonucleotide: BID-3780
gcccgcgcccccgcggcug

SEQ ID NO: 43058 - RNA, 20 nt, Artificial Sequence
  Synthetic oligonucleotide: BID-1124
cgcccgcgcccccgcggcug

SEQ ID NO: 43059 - RNA, 21 nt, Artificial Sequence
  Synthetic oligonucleotide: BID-3781
gcgcccgcgcccccgcggcug

SEQ ID NO: 43060 - RNA, 22 nt, Artificial Sequence
  Synthetic oligonucleotide: BID-3782
cgcgcccgcgcccccgcggcug

SEQ ID NO: 43061 - RNA, 23 nt, Artificial Sequence
  Synthetic oligonucleotide: BID-3783
acgcgcccgcgcccccgcggcug

SEQ ID NO: 43062 - RNA, 24 nt, Artificial Sequence
  Synthetic oligonucleotide: BID-3784
gacgcgcccgcgcccccgcggcug

SEQ ID NO: 43063 - RNA, 18 nt, Artificial Sequence
  Synthetic oligonucleotide: BID-3785
ccccgcggcuggagggug

SEQ ID NO: 43064 - RNA, 19 nt, Artificial Sequence
  Synthetic oligonucleotide: BID-3786
cccccgcggcuggagggug

SEQ ID NO: 43065 - RNA, 20 nt, Artificial Sequence
  Synthetic oligonucleotide: BID-1125
gcccccgcggcuggagggug

SEQ ID NO: 43066 - RNA, 21 nt, Artificial Sequence
  Synthetic oligonucleotide: BID-3787
cgcccccgcggcuggagggug

SEQ ID NO: 43067 - RNA, 22 nt, Artificial Sequence
  Synthetic oligonucleotide: BID-3788
gcgcccccgcggcuggagggug

SEQ ID NO: 43068 - RNA, 23 nt, Artificial Sequence
  Synthetic oligonucleotide: BID-3789
cgcgcccccgcggcuggagggug

SEQ ID NO: 43069 - RNA, 24 nt, Artificial Sequence
  Synthetic oligonucleotide: BID-3790
ccgcgcccccgcggcuggagggug

SEQ ID NO: 43070 - RNA, 18 nt, Artificial Sequence
  Synthetic oligonucleotide: BID-2685
uucauucauucaacaaau

SEQ ID NO: 43071 - RNA, 19 nt, Artificial Sequence
  Synthetic oligonucleotide: BID-2686
auucauucauucaacaaau

SEQ ID NO: 43072 - RNA, 20 nt, Artificial Sequence
  Synthetic oligonucleotide: BID-360
cauucauucauucaacaaau

SEQ ID NO: 43073 - RNA, 21 nt, Artificial Sequence
  Synthetic oligonucleotide: BID-2687
ucauucauucauucaacaaau

SEQ ID NO: 43074 - RNA, 22 nt, Artificial Sequence
  Synthetic oligonucleotide: BID-2688
uucauucauucauucaacaaau

SEQ ID NO: 43075 - RNA, 23 nt, Artificial Sequence
  Synthetic oligonucleotide: BID-2689
guucauucauucauucaacaaau

SEQ ID NO: 43076 - RNA, 24 nt, Artificial Sequence
  Synthetic oligonucleotide: BID-2690
gguucauucauucauucaacaaau

SEQ ID NO: 43077 - RNA, 18 nt, Artificial Sequence
  Synthetic oligonucleotide: BID-3791
ccacccuugccggcggau

SEQ ID NO: 43078 - RNA, 19 nt, Artificial Sequence
  Synthetic oligonucleotide: BID-3792
gccacccuugccggcggau

SEQ ID NO: 43079 - RNA, 20 nt, Artificial Sequence
  Synthetic oligonucleotide: BID-2079
ggccacccuugccggcggau

SEQ ID NO: 43080 - RNA, 18 nt, Artificial Sequence
  Synthetic oligonucleotide: BID-3793
guccucuccacguggccu

SEQ ID NO: 43081 - RNA, 19 nt, Artificial Sequence
  Synthetic oligonucleotide: BID-3794
uguccucuccacguggccu

SEQ ID NO: 43082 - RNA, 20 nt, Artificial Sequence
  Synthetic oligonucleotide: BID-2047
guguccucuccacguggccu

SEQ ID NO: 43083 - RNA, 18 nt, Artificial Sequence
  Synthetic oligonucleotide: BID-3795
ggccggcaggucggugcu

SEQ ID NO: 43084 - RNA, 19 nt, Artificial Sequence
  Synthetic oligonucleotide: BID-3796
cggccggcaggucggugcu

SEQ ID NO: 43085 - RNA, 20 nt, Artificial Sequence
  Synthetic oligonucleotide: BID-1153
gcggccggcaggucggugcu

SEQ ID NO: 43086 - RNA, 18 nt, Artificial Sequence
  Synthetic oligonucleotide: BID-2578
cggcuggaggagcacagu

SEQ ID NO: 43087 - RNA, 19 nt, Artificial Sequence
  Synthetic oligonucleotide: BID-2579
ccggcuggaggagcacagu

SEQ ID NO: 43088 - RNA, 20 nt, Artificial Sequence
  Synthetic oligonucleotide: BID-372
gccggcuggaggagcacagu

SEQ ID NO: 43089 - RNA, 21 nt, Artificial Sequence
  Synthetic oligonucleotide: BID-2695
ggccggcuggaggagcacagu

SEQ ID NO: 43090 - RNA, 22 nt, Artificial Sequence
  Synthetic oligonucleotide: BID-2696
gggccggcuggaggagcacagu

SEQ ID NO: 43091 - RNA, 23 nt, Artificial Sequence
  Synthetic oligonucleotide: BID-2697
cgggccggcuggaggagcacagu

SEQ ID NO: 43092 - RNA, 24 nt, Artificial Sequence
  Synthetic oligonucleotide: BID-2698
ccgggccggcuggaggagcacagu

SEQ ID NO: 43093 - RNA, 18 nt, Artificial Sequence
  Synthetic oligonucleotide: BID-2741
ccggccccucgcugccca

SEQ ID NO: 43094 - RNA, 19 nt, Artificial Sequence
  Synthetic oligonucleotide: BID-2742
cccggccccucgcugccca

SEQ ID NO: 43095 - RNA, 20 nt, Artificial Sequence
  Synthetic oligonucleotide: BID-552
gcccggccccucgcugccca

SEQ ID NO: 43096 - RNA, 21 nt, Artificial Sequence
  Synthetic oligonucleotide: BID-2743
ggcccggccccucgcugccca

SEQ ID NO: 43097 - RNA, 22 nt, Artificial Sequence
  Synthetic oligonucleotide: BID-2744
cggcccggccccucgcugccca

SEQ ID NO: 43098 - RNA, 23 nt, Artificial Sequence
  Synthetic oligonucleotide: BID-2745
ccggcccggccccucgcugccca

SEQ ID NO: 43099 - RNA, 24 nt, Artificial Sequence
  Synthetic oligonucleotide: BID-2746
gccggcccggccccucgcugccca

SEQ ID NO: 43100 - RNA, 18 nt, Artificial Sequence
  Synthetic oligonucleotide: BID-3797
aguuucccagcagcagca

SEQ ID NO: 43101 - RNA, 19 nt, Artificial Sequence
  Synthetic oligonucleotide: BID-3798
caguuucccagcagcagca

SEQ ID NO: 43102 - RNA, 20 nt, Artificial Sequence
  Synthetic oligonucleotide: BID-1384
acaguuucccagcagcagca

SEQ ID NO: 43103 - RNA, 21 nt, Artificial Sequence
  Synthetic oligonucleotide: BID-3799
aacaguuucccagcagcagca

SEQ ID NO: 43104 - RNA, 22 nt, Artificial Sequence
  Synthetic oligonucleotide: BID-3800
caacaguuucccagcagcagca

SEQ ID NO: 43105 - RNA, 23 nt, Artificial Sequence
  Synthetic oligonucleotide: BID-3801
ucaacaguuucccagcagcagca

SEQ ID NO: 43106 - RNA, 24 nt, Artificial Sequence
  Synthetic oligonucleotide: BID-3802
cucaacaguuucccagcagcagca

SEQ ID NO: 43107 - RNA, 18 nt, Artificial Sequence
  Synthetic oligonucleotide: BID-3803
uugccagugcucuaagga

SEQ ID NO: 43108 - RNA, 19 nt, Artificial Sequence
  Synthetic oligonucleotide: BID-3804
auugccagugcucuaagga

SEQ ID NO: 43109 - RNA, 20 nt, Artificial Sequence
  Synthetic oligonucleotide: BID-1388
cauugccagugcucuaagga

SEQ ID NO: 43110 - RNA, 21 nt, Artificial Sequence
  Synthetic oligonucleotide: BID-3805
ucauugccagugcucuaagga

SEQ ID NO: 43111 - RNA, 22 nt, Artificial Sequence
  Synthetic oligonucleotide: BID-3806
aucauugccagugcucuaagga

SEQ ID NO: 43112 - RNA, 23 nt, Artificial Sequence
  Synthetic oligonucleotide: BID-3807
caucauugccagugcucuaagga

SEQ ID NO: 43113 - RNA, 24 nt, Artificial Sequence
  Synthetic oligonucleotide: BID-3808
acaucauugccagugcucuaagga

SEQ ID NO: 43114 - RNA, 18 nt, Artificial Sequence
  Synthetic oligonucleotide: BID-3809
ggagggcgcccgggcgga

SEQ ID NO: 43115 - RNA, 19 nt, Artificial Sequence
  Synthetic oligonucleotide: BID-3810
aggagggcgcccgggcgga

SEQ ID NO: 43116 - RNA, 20 nt, Artificial Sequence
  Synthetic oligonucleotide: BID-2198
gaggagggcgcccgggcgga

SEQ ID NO: 43117 - RNA, 21 nt, Artificial Sequence
  Synthetic oligonucleotide: BID-3811
cgaggagggcgcccgggcgga

SEQ ID NO: 43118 - RNA, 22 nt, Artificial Sequence
  Synthetic oligonucleotide: BID-3812
ccgaggagggcgcccgggcgga

SEQ ID NO: 43119 - RNA, 23 nt, Artificial Sequence
  Synthetic oligonucleotide: BID-3813
gccgaggagggcgcccgggcgga

SEQ ID NO: 43120 - RNA, 24 nt, Artificial Sequence
  Synthetic oligonucleotide: BID-3814
cgccgaggagggcgcccgggcgga

SEQ ID NO: 43121 - RNA, 18 nt, Artificial Sequence
  Synthetic oligonucleotide: BID-3815
auccccaggccacgugga

SEQ ID NO: 43122 - RNA, 19 nt, Artificial Sequence
  Synthetic oligonucleotide: BID-3816
aauccccaggccacgugga

SEQ ID NO: 43123 - RNA, 20 nt, Artificial Sequence
  Synthetic oligonucleotide: BID-1410
gaauccccaggccacgugga

SEQ ID NO: 43124 - RNA, 21 nt, Artificial Sequence
  Synthetic oligonucleotide: BID-3817
ugaauccccaggccacgugga

SEQ ID NO: 43125 - RNA, 22 nt, Artificial Sequence
  Synthetic oligonucleotide: BID-3818
cugaauccccaggccacgugga

SEQ ID NO: 43126 - RNA, 23 nt, Artificial Sequence
  Synthetic oligonucleotide: BID-3819
ccugaauccccaggccacgugga

SEQ ID NO: 43127 - RNA, 24 nt, Artificial Sequence
  Synthetic oligonucleotide: BID-3820
cccugaauccccaggccacgugga

SEQ ID NO: 43128 - RNA, 18 nt, Artificial Sequence
  Synthetic oligonucleotide: BID-2790
uauuuguugaaugaauga

SEQ ID NO: 43129 - RNA, 19 nt, Artificial Sequence
  Synthetic oligonucleotide: BID-2791
guauuuguugaaugaauga

SEQ ID NO: 43130 - RNA, 20 nt, Artificial Sequence
  Synthetic oligonucleotide: BID-556
cguauuuguugaaugaauga

SEQ ID NO: 43131 - RNA, 21 nt, Artificial Sequence
  Synthetic oligonucleotide: BID-2792
ucguauuuguugaaugaauga

SEQ ID NO: 43132 - RNA, 22 nt, Artificial Sequence
  Synthetic oligonucleotide: BID-2793
uucguauuuguugaaugaauga

SEQ ID NO: 43133 - RNA, 23 nt, Artificial Sequence
  Synthetic oligonucleotide: BID-2794
auucguauuuguugaaugaauga

SEQ ID NO: 43134 - RNA, 24 nt, Artificial Sequence
  Synthetic oligonucleotide: BID-2795
cauucguauuuguugaaugaauga

SEQ ID NO: 43135 - RNA, 18 nt, Artificial Sequence
  Synthetic oligonucleotide: BID-3821
aucauugccagugcucua

SEQ ID NO: 43136 - RNA, 19 nt, Artificial Sequence
  Synthetic oligonucleotide: BID-3822
caucauugccagugcucua

SEQ ID NO: 43137 - RNA, 20 nt, Artificial Sequence
  Synthetic oligonucleotide: BID-2155
acaucauugccagugcucua

SEQ ID NO: 43138 - RNA, 21 nt, Artificial Sequence
  Synthetic oligonucleotide: BID-3823
cacaucauugccagugcucua

SEQ ID NO: 43139 - RNA, 22 nt, Artificial Sequence
  Synthetic oligonucleotide: BID-3824
gcacaucauugccagugcucua

SEQ ID NO: 43140 - RNA, 23 nt, Artificial Sequence
  Synthetic oligonucleotide: BID-3825
cgcacaucauugccagugcucua

SEQ ID NO: 43141 - RNA, 24 nt, Artificial Sequence
  Synthetic oligonucleotide: BID-3826
ccgcacaucauugccagugcucua

SEQ ID NO: 43142 - RNA, 18 nt, Artificial Sequence
  Synthetic oligonucleotide: BID-3827
ccugaauccccaggccac

SEQ ID NO: 43143 - RNA, 19 nt, Artificial Sequence
  Synthetic oligonucleotide: BID-3828
cccugaauccccaggccac

SEQ ID NO: 43144 - RNA, 20 nt, Artificial Sequence
  Synthetic oligonucleotide: BID-1407
ccccugaauccccaggccac

SEQ ID NO: 43145 - RNA, 21 nt, Artificial Sequence
  Synthetic oligonucleotide: BID-3829
uccccugaauccccaggccac

SEQ ID NO: 43146 - RNA, 22 nt, Artificial Sequence
  Synthetic oligonucleotide: BID-3830
cuccccugaauccccaggccac

SEQ ID NO: 43147 - RNA, 23 nt, Artificial Sequence
  Synthetic oligonucleotide: BID-3831
ccuccccugaauccccaggccac

SEQ ID NO: 43148 - RNA, 24 nt, Artificial Sequence
  Synthetic oligonucleotide: BID-3832
cccuccccugaauccccaggccac

SEQ ID NO: 43149 - RNA, 18 nt, Artificial Sequence
  Synthetic oligonucleotide: BID-3833
uggggcucggcgcguacc

SEQ ID NO: 43150 - RNA, 19 nt, Artificial Sequence
  Synthetic oligonucleotide: BID-3834
cuggggcucggcgcguacc

SEQ ID NO: 43151 - RNA, 20 nt, Artificial Sequence
  Synthetic oligonucleotide: BID-1443
gcuggggcucggcgcguacc

SEQ ID NO: 43152 - RNA, 21 nt, Artificial Sequence
  Synthetic oligonucleotide: BID-3835
ggcuggggcucggcgcguacc

SEQ ID NO: 43153 - RNA, 22 nt, Artificial Sequence
  Synthetic oligonucleotide: BID-3836
gggcuggggcucggcgcguacc

SEQ ID NO: 43154 - RNA, 23 nt, Artificial Sequence
  Synthetic oligonucleotide: BID-3837
cgggcuggggcucggcgcguacc

SEQ ID NO: 43155 - RNA, 24 nt, Artificial Sequence
  Synthetic oligonucleotide: BID-3838
acgggcuggggcucggcgcguacc

SEQ ID NO: 43156 - RNA, 18 nt, Artificial Sequence
  Synthetic oligonucleotide: BID-3839
ggggcucggcgcguaccc

SEQ ID NO: 43157 - RNA, 19 nt, Artificial Sequence
  Synthetic oligonucleotide: BID-3840
uggggcucggcgcguaccc

SEQ ID NO: 43158 - RNA, 20 nt, Artificial Sequence
  Synthetic oligonucleotide: BID-2235
cuggggcucggcgcguaccc

SEQ ID NO: 43159 - RNA, 21 nt, Artificial Sequence
  Synthetic oligonucleotide: BID-3841
gcuggggcucggcgcguaccc

SEQ ID NO: 43160 - RNA, 22 nt, Artificial Sequence
  Synthetic oligonucleotide: BID-3842
ggcuggggcucggcgcguaccc

SEQ ID NO: 43161 - RNA, 23 nt, Artificial Sequence
  Synthetic oligonucleotide: BID-3843
gggcuggggcucggcgcguaccc

SEQ ID NO: 43162 - RNA, 24 nt, Artificial Sequence
  Synthetic oligonucleotide: BID-3844
cgggcuggggcucggcgcguaccc

SEQ ID NO: 43163 - RNA, 18 nt, Artificial Sequence
  Synthetic oligonucleotide: BID-3845
gggcucggcgcguacccc

SEQ ID NO: 43164 - RNA, 19 nt, Artificial Sequence
  Synthetic oligonucleotide: BID-3846
ggggcucggcgcguacccc

SEQ ID NO: 43165 - RNA, 20 nt, Artificial Sequence
  Synthetic oligonucleotide: BID-2236
uggggcucggcgcguacccc

SEQ ID NO: 43166 - RNA, 21 nt, Artificial Sequence
  Synthetic oligonucleotide: BID-3847
cuggggcucggcgcguacccc

SEQ ID NO: 43167 - RNA, 22 nt, Artificial Sequence
  Synthetic oligonucleotide: BID-3848
gcuggggcucggcgcguacccc

SEQ ID NO: 43168 - RNA, 23 nt, Artificial Sequence
  Synthetic oligonucleotide: BID-3849
ggcuggggcucggcgcguacccc

SEQ ID NO: 43169 - RNA, 24 nt, Artificial Sequence
  Synthetic oligonucleotide: BID-3850
gggcuggggcucggcgcguacccc

SEQ ID NO: 43170 - RNA, 18 nt, Artificial Sequence
  Synthetic oligonucleotide: BID-3851
gagcucucccaggguccc

SEQ ID NO: 43171 - RNA, 19 nt, Artificial Sequence
  Synthetic oligonucleotide: BID-3852
agagcucucccaggguccc

SEQ ID NO: 43172 - RNA, 20 nt, Artificial Sequence
  Synthetic oligonucleotide: BID-1382
cagagcucucccaggguccc

SEQ ID NO: 43173 - RNA, 21 nt, Artificial Sequence
  Synthetic oligonucleotide: BID-3853
ucagagcucucccaggguccc

SEQ ID NO: 43174 - RNA, 22 nt, Artificial Sequence
  Synthetic oligonucleotide: BID-3854
uucagagcucucccaggguccc

SEQ ID NO: 43175 - RNA, 23 nt, Artificial Sequence
  Synthetic oligonucleotide: BID-3855
cuucagagcucucccaggguccc

SEQ ID NO: 43176 - RNA, 24 nt, Artificial Sequence
  Synthetic oligonucleotide: BID-3856
gcuucagagcucucccaggguccc

SEQ ID NO: 43177 - RNA, 18 nt, Artificial Sequence
  Synthetic oligonucleotide: BID-3857
acucaccacccuccagcc

SEQ ID NO: 43178 - RNA, 19 nt, Artificial Sequence
  Synthetic oligonucleotide: BID-3858
cacucaccacccuccagcc

SEQ ID NO: 43179 - RNA, 20 nt, Artificial Sequence
  Synthetic oligonucleotide: BID-1449
gcacucaccacccuccagcc

SEQ ID NO: 43180 - RNA, 21 nt, Artificial Sequence
  Synthetic oligonucleotide: BID-3859
ugcacucaccacccuccagcc

SEQ ID NO: 43181 - RNA, 22 nt, Artificial Sequence
  Synthetic oligonucleotide: BID-3860
gugcacucaccacccuccagcc

SEQ ID NO: 43182 - RNA, 23 nt, Artificial Sequence
  Synthetic oligonucleotide: BID-3861
ggugcacucaccacccuccagcc

SEQ ID NO: 43183 - RNA, 24 nt, Artificial Sequence
  Synthetic oligonucleotide: BID-3862
gggugcacucaccacccuccagcc

SEQ ID NO: 43184 - RNA, 18 nt, Artificial Sequence
  Synthetic oligonucleotide: BID-3863
gaccgcgcuuugucagcc

SEQ ID NO: 43185 - RNA, 19 nt, Artificial Sequence
  Synthetic oligonucleotide: BID-3864
ugaccgcgcuuugucagcc

SEQ ID NO: 43186 - RNA, 20 nt, Artificial Sequence
  Synthetic oligonucleotide: BID-1390
cugaccgcgcuuugucagcc

SEQ ID NO: 43187 - RNA, 21 nt, Artificial Sequence
  Synthetic oligonucleotide: BID-3865
ucugaccgcgcuuugucagcc

SEQ ID NO: 43188 - RNA, 22 nt, Artificial Sequence
  Synthetic oligonucleotide: BID-3866
cucugaccgcgcuuugucagcc

SEQ ID NO: 43189 - RNA, 23 nt, Artificial Sequence
  Synthetic oligonucleotide: BID-3867
gcucugaccgcgcuuugucagcc

SEQ ID NO: 43190 - RNA, 24 nt, Artificial Sequence
  Synthetic oligonucleotide: BID-3868
cgcucugaccgcgcuuugucagcc

SEQ ID NO: 43191 - RNA, 18 nt, Artificial Sequence
  Synthetic oligonucleotide: BID-3869
cgaccugccggccgcgcc

SEQ ID NO: 43192 - RNA, 19 nt, Artificial Sequence
  Synthetic oligonucleotide: BID-3870
ccgaccugccggccgcgcc

SEQ ID NO: 43193 - RNA, 20 nt, Artificial Sequence
  Synthetic oligonucleotide: BID-1414
accgaccugccggccgcgcc

SEQ ID NO: 43194 - RNA, 21 nt, Artificial Sequence
  Synthetic oligonucleotide: BID-3871
caccgaccugccggccgcgcc

SEQ ID NO: 43195 - RNA, 22 nt, Artificial Sequence
  Synthetic oligonucleotide: BID-3872
gcaccgaccugccggccgcgcc

SEQ ID NO: 43196 - RNA, 23 nt, Artificial Sequence
  Synthetic oligonucleotide: BID-3873
agcaccgaccugccggccgcgcc

SEQ ID NO: 43197 - RNA, 24 nt, Artificial Sequence
  Synthetic oligonucleotide: BID-3874
cagcaccgaccugccggccgcgcc

SEQ ID NO: 43198 - RNA, 18 nt, Artificial Sequence
  Synthetic oligonucleotide: BID-3875
caggucgcugcugaggcc

SEQ ID NO: 43199 - RNA, 19 nt, Artificial Sequence
  Synthetic oligonucleotide: BID-3876
ucaggucgcugcugaggcc

SEQ ID NO: 43200 - RNA, 20 nt, Artificial Sequence
  Synthetic oligonucleotide: BID-2206
cucaggucgcugcugaggcc

SEQ ID NO: 43201 - RNA, 21 nt, Artificial Sequence
  Synthetic oligonucleotide: BID-3877
ccucaggucgcugcugaggcc

SEQ ID NO: 43202 - RNA, 22 nt, Artificial Sequence
  Synthetic oligonucleotide: BID-3878
cccucaggucgcugcugaggcc

SEQ ID NO: 43203 - RNA, 23 nt, Artificial Sequence
  Synthetic oligonucleotide: BID-3879
gcccucaggucgcugcugaggcc

SEQ ID NO: 43204 - RNA, 24 nt, Artificial Sequence
  Synthetic oligonucleotide: BID-3880
ggcccucaggucgcugcugaggcc

SEQ ID NO: 43205 - RNA, 18 nt, Artificial Sequence
  Synthetic oligonucleotide: BID-3881
cagggcgggcggcgggcc

SEQ ID NO: 43206 - RNA, 19 nt, Artificial Sequence
  Synthetic oligonucleotide: BID-3882
ccagggcgggcggcgggcc

SEQ ID NO: 43207 - RNA, 20 nt, Artificial Sequence
  Synthetic oligonucleotide: BID-1435
cccagggcgggcggcgggcc

SEQ ID NO: 43208 - RNA, 21 nt, Artificial Sequence
  Synthetic oligonucleotide: BID-3883
gcccagggcgggcggcgggcc

SEQ ID NO: 43209 - RNA, 22 nt, Artificial Sequence
  Synthetic oligonucleotide: BID-3884
ggcccagggcgggcggcgggcc

SEQ ID NO: 43210 - RNA, 23 nt, Artificial Sequence
  Synthetic oligonucleotide: BID-3885
gggcccagggcgggcggcgggcc

SEQ ID NO: 43211 - RNA, 24 nt, Artificial Sequence
  Synthetic oligonucleotide: BID-3886
cgggcccagggcgggcggcgggcc

SEQ ID NO: 43212 - RNA, 18 nt, Artificial Sequence
  Synthetic oligonucleotide: BID-3887
ucccaccgcggucgggcc

SEQ ID NO: 43213 - RNA, 19 nt, Artificial Sequence
  Synthetic oligonucleotide: BID-3888
cucccaccgcggucgggcc

SEQ ID NO: 43214 - RNA, 20 nt, Artificial Sequence
  Synthetic oligonucleotide: BID-1432
gcucccaccgcggucgggcc

SEQ ID NO: 43215 - RNA, 21 nt, Artificial Sequence
  Synthetic oligonucleotide: BID-3889
ggcucccaccgcggucgggcc

SEQ ID NO: 43216 - RNA, 22 nt, Artificial Sequence
  Synthetic oligonucleotide: BID-3890
uggcucccaccgcggucgggcc

SEQ ID NO: 43217 - RNA, 23 nt, Artificial Sequence
  Synthetic oligonucleotide: BID-3891
cuggcucccaccgcggucgggcc

SEQ ID NO: 43218 - RNA, 24 nt, Artificial Sequence
  Synthetic oligonucleotide: BID-3892
ucuggcucccaccgcggucgggcc

SEQ ID NO: 43219 - RNA, 18 nt, Artificial Sequence
  Synthetic oligonucleotide: BID-3893
uccuucggccccccacgc

SEQ ID NO: 43220 - RNA, 19 nt, Artificial Sequence
  Synthetic oligonucleotide: BID-3894
cuccuucggccccccacgc

SEQ ID NO: 43221 - RNA, 20 nt, Artificial Sequence
  Synthetic oligonucleotide: BID-3895
ccuccuucggccccccacgc

SEQ ID NO: 43222 - RNA, 21 nt, Artificial Sequence
  Synthetic oligonucleotide: BID-3896
uccuccuucggccccccacgc

SEQ ID NO: 43223 - RNA, 22 nt, Artificial Sequence
  Synthetic oligonucleotide: BID-3897
uuccuccuucggccccccacgc

SEQ ID NO: 43224 - RNA, 23 nt, Artificial Sequence
  Synthetic oligonucleotide: BID-3898
cuuccuccuucggccccccacgc

SEQ ID NO: 43225 - RNA, 24 nt, Artificial Sequence
  Synthetic oligonucleotide: BID-3899
gcuuccuccuucggccccccacgc

SEQ ID NO: 43226 - RNA, 18 nt, Artificial Sequence
  Synthetic oligonucleotide: BID-3900
gggcccugagcuccacgc

SEQ ID NO: 43227 - RNA, 19 nt, Artificial Sequence
  Synthetic oligonucleotide: BID-3901
cgggcccugagcuccacgc

SEQ ID NO: 43228 - RNA, 20 nt, Artificial Sequence
  Synthetic oligonucleotide: BID-2220
gcgggcccugagcuccacgc

SEQ ID NO: 43229 - RNA, 21 nt, Artificial Sequence
  Synthetic oligonucleotide: BID-3902
ggcgggcccugagcuccacgc

SEQ ID NO: 43230 - RNA, 22 nt, Artificial Sequence
  Synthetic oligonucleotide: BID-3903
cggcgggcccugagcuccacgc

SEQ ID NO: 43231 - RNA, 23 nt, Artificial Sequence
  Synthetic oligonucleotide: BID-3904
gcggcgggcccugagcuccacgc

SEQ ID NO: 43232 - RNA, 24 nt, Artificial Sequence
  Synthetic oligonucleotide: BID-3905
ggcggcgggcccugagcuccacgc

SEQ ID NO: 43233 - RNA, 18 nt, Artificial Sequence
  Synthetic oligonucleotide: BID-3906
ucaccacccuccagccgc

SEQ ID NO: 43234 - RNA, 19 nt, Artificial Sequence
  Synthetic oligonucleotide: BID-3907
cucaccacccuccagccgc

SEQ ID NO: 43235 - RNA, 20 nt, Artificial Sequence
  Synthetic oligonucleotide: BID-2243
acucaccacccuccagccgc

SEQ ID NO: 43236 - RNA, 21 nt, Artificial Sequence
  Synthetic oligonucleotide: BID-3908
cacucaccacccuccagccgc

SEQ ID NO: 43237 - RNA, 22 nt, Artificial Sequence
  Synthetic oligonucleotide: BID-3909
gcacucaccacccuccagccgc

SEQ ID NO: 43238 - RNA, 23 nt, Artificial Sequence
  Synthetic oligonucleotide: BID-3910
ugcacucaccacccuccagccgc

SEQ ID NO: 43239 - RNA, 24 nt, Artificial Sequence
  Synthetic oligonucleotide: BID-3911
gugcacucaccacccuccagccgc

SEQ ID NO: 43240 - RNA, 18 nt, Artificial Sequence
  Synthetic oligonucleotide: BID-3912
gucagcccugagcuccgc

SEQ ID NO: 43241 - RNA, 19 nt, Artificial Sequence
  Synthetic oligonucleotide: BID-3913
ugucagcccugagcuccgc

SEQ ID NO: 43242 - RNA, 20 nt, Artificial Sequence
  Synthetic oligonucleotide: BID-1391
uugucagcccugagcuccgc

SEQ ID NO: 43243 - RNA, 21 nt, Artificial Sequence
  Synthetic oligonucleotide: BID-3914
uuugucagcccugagcuccgc

SEQ ID NO: 43244 - RNA, 22 nt, Artificial Sequence
  Synthetic oligonucleotide: BID-3915
cuuugucagcccugagcuccgc

SEQ ID NO: 43245 - RNA, 23 nt, Artificial Sequence
  Synthetic oligonucleotide: BID-3916
gcuuugucagcccugagcuccgc

SEQ ID NO: 43246 - RNA, 24 nt, Artificial Sequence
  Synthetic oligonucleotide: BID-3917
cgcuuugucagcccugagcuccgc

SEQ ID NO: 43247 - RNA, 18 nt, Artificial Sequence
  Synthetic oligonucleotide: BID-3918
gcagcgucucccaggcgc

SEQ ID NO: 43248 - RNA, 19 nt, Artificial Sequence
  Synthetic oligonucleotide: BID-3919
ggcagcgucucccaggcgc

SEQ ID NO: 43249 - RNA, 20 nt, Artificial Sequence
  Synthetic oligonucleotide: BID-1455
aggcagcgucucccaggcgc

SEQ ID NO: 43250 - RNA, 21 nt, Artificial Sequence
  Synthetic oligonucleotide: BID-3920
gaggcagcgucucccaggcgc

SEQ ID NO: 43251 - RNA, 22 nt, Artificial Sequence
  Synthetic oligonucleotide: BID-3921
cgaggcagcgucucccaggcgc

SEQ ID NO: 43252 - RNA, 23 nt, Artificial Sequence
  Synthetic oligonucleotide: BID-3922
ccgaggcagcgucucccaggcgc

SEQ ID NO: 43253 - RNA, 24 nt, Artificial Sequence
  Synthetic oligonucleotide: BID-3923
gccgaggcagcgucucccaggcgc

SEQ ID NO: 43254 - RNA, 18 nt, Artificial Sequence
  Synthetic oligonucleotide: BID-3924
ccgcgccgaggagggcgc

SEQ ID NO: 43255 - RNA, 19 nt, Artificial Sequence
  Synthetic oligonucleotide: BID-3925
gccgcgccgaggagggcgc

SEQ ID NO: 43256 - RNA, 20 nt, Artificial Sequence
  Synthetic oligonucleotide: BID-1417
ggccgcgccgaggagggcgc

SEQ ID NO: 43257 - RNA, 21 nt, Artificial Sequence
  Synthetic oligonucleotide: BID-3926
cggccgcgccgaggagggcgc

SEQ ID NO: 43258 - RNA, 22 nt, Artificial Sequence
  Synthetic oligonucleotide: BID-3927
ccggccgcgccgaggagggcgc

SEQ ID NO: 43259 - RNA, 23 nt, Artificial Sequence
  Synthetic oligonucleotide: BID-3928
gccggccgcgccgaggagggcgc

SEQ ID NO: 43260 - RNA, 24 nt, Artificial Sequence
  Synthetic oligonucleotide: BID-3929
ugccggccgcgccgaggagggcgc

SEQ ID NO: 43261 - RNA, 18 nt, Artificial Sequence
  Synthetic oligonucleotide: BID-3930
cccgggcggaggggaggc

SEQ ID NO: 43262 - RNA, 19 nt, Artificial Sequence
  Synthetic oligonucleotide: BID-3931
gcccgggcggaggggaggc

SEQ ID NO: 43263 - RNA, 20 nt, Artificial Sequence
  Synthetic oligonucleotide: BID-2202
cgcccgggcggaggggaggc

SEQ ID NO: 43264 - RNA, 21 nt, Artificial Sequence
  Synthetic oligonucleotide: BID-3932
gcgcccgggcggaggggaggc

SEQ ID NO: 43265 - RNA, 22 nt, Artificial Sequence
  Synthetic oligonucleotide: BID-3933
ggcgcccgggcggaggggaggc

SEQ ID NO: 43266 - RNA, 23 nt, Artificial Sequence
  Synthetic oligonucleotide: BID-3934
gggcgcccgggcggaggggaggc

SEQ ID NO: 43267 - RNA, 24 nt, Artificial Sequence
  Synthetic oligonucleotide: BID-3935
agggcgcccgggcggaggggaggc

SEQ ID NO: 43268 - RNA, 18 nt, Artificial Sequence
  Synthetic oligonucleotide: BID-3936
ucaggucgcugcugaggc

SEQ ID NO: 43269 - RNA, 19 nt, Artificial Sequence
  Synthetic oligonucleotide: BID-3937
cucaggucgcugcugaggc

SEQ ID NO: 43270 - RNA, 20 nt, Artificial Sequence
  Synthetic oligonucleotide: BID-1429
ccucaggucgcugcugaggc

SEQ ID NO: 43271 - RNA, 21 nt, Artificial Sequence
  Synthetic oligonucleotide: BID-3938
cccucaggucgcugcugaggc

SEQ ID NO: 43272 - RNA, 22 nt, Artificial Sequence
  Synthetic oligonucleotide: BID-3939
gcccucaggucgcugcugaggc

SEQ ID NO: 43273 - RNA, 23 nt, Artificial Sequence
  Synthetic oligonucleotide: BID-3940
ggcccucaggucgcugcugaggc

SEQ ID NO: 43274 - RNA, 24 nt, Artificial Sequence
  Synthetic oligonucleotide: BID-3941
cggcccucaggucgcugcugaggc

SEQ ID NO: 43275 - RNA, 18 nt, Artificial Sequence
  Synthetic oligonucleotide: BID-3942
caggcaggggucacgggc

SEQ ID NO: 43276 - RNA, 19 nt, Artificial Sequence
  Synthetic oligonucleotide: BID-3943
gcaggcaggggucacgggc

SEQ ID NO: 43277 - RNA, 20 nt, Artificial Sequence
  Synthetic oligonucleotide: BID-2231
ggcaggcaggggucacgggc

SEQ ID NO: 43278 - RNA, 21 nt, Artificial Sequence
  Synthetic oligonucleotide: BID-3944
cggcaggcaggggucacgggc

SEQ ID NO: 43279 - RNA, 22 nt, Artificial Sequence
  Synthetic oligonucleotide: BID-3945
gcggcaggcaggggucacgggc

SEQ ID NO: 43280 - RNA, 23 nt, Artificial Sequence
  Synthetic oligonucleotide: BID-3946
ggcggcaggcaggggucacgggc

SEQ ID NO: 43281 - RNA, 24 nt, Artificial Sequence
  Synthetic oligonucleotide: BID-3947
aggcggcaggcaggggucacgggc

SEQ ID NO: 43282 - RNA, 18 nt, Artificial Sequence
  Synthetic oligonucleotide: BID-3948
cccuccagccgcgggggc

SEQ ID NO: 43283 - RNA, 19 nt, Artificial Sequence
  Synthetic oligonucleotide: BID-3949
acccuccagccgcgggggc

SEQ ID NO: 43284 - RNA, 20 nt, Artificial Sequence
  Synthetic oligonucleotide: BID-1452
cacccuccagccgcgggggc

SEQ ID NO: 43285 - RNA, 21 nt, Artificial Sequence
  Synthetic oligonucleotide: BID-3950
ccacccuccagccgcgggggc

SEQ ID NO: 43286 - RNA, 22 nt, Artificial Sequence
  Synthetic oligonucleotide: BID-3951
accacccuccagccgcgggggc

SEQ ID NO: 43287 - RNA, 23 nt, Artificial Sequence
  Synthetic oligonucleotide: BID-3952
caccacccuccagccgcgggggc

SEQ ID NO: 43288 - RNA, 24 nt, Artificial Sequence
  Synthetic oligonucleotide: BID-3953
ucaccacccuccagccgcgggggc

SEQ ID NO: 43289 - RNA, 18 nt, Artificial Sequence
  Synthetic oligonucleotide: BID-3954
ggcaggugucugcggugc

SEQ ID NO: 43290 - RNA, 19 nt, Artificial Sequence
  Synthetic oligonucleotide: BID-3955
cggcaggugucugcggugc

SEQ ID NO: 43291 - RNA, 20 nt, Artificial Sequence
  Synthetic oligonucleotide: BID-2165
ccggcaggugucugcggugc

SEQ ID NO: 43292 - RNA, 21 nt, Artificial Sequence
  Synthetic oligonucleotide: BID-3956
gccggcaggugucugcggugc

SEQ ID NO: 43293 - RNA, 22 nt, Artificial Sequence
  Synthetic oligonucleotide: BID-3957
agccggcaggugucugcggugc

SEQ ID NO: 43294 - RNA, 23 nt, Artificial Sequence
  Synthetic oligonucleotide: BID-3958
gagccggcaggugucugcggugc

SEQ ID NO: 43295 - RNA, 24 nt, Artificial Sequence
  Synthetic oligonucleotide: BID-3959
ggagccggcaggugucugcggugc

SEQ ID NO: 43296 - RNA, 18 nt, Artificial Sequence
  Synthetic oligonucleotide: BID-3960
cagcccugagcuccgcuc

SEQ ID NO: 43297 - RNA, 19 nt, Artificial Sequence
  Synthetic oligonucleotide: BID-3961
ucagcccugagcuccgcuc

SEQ ID NO: 43298 - RNA, 20 nt, Artificial Sequence
  Synthetic oligonucleotide: BID-2160
gucagcccugagcuccgcuc

SEQ ID NO: 43299 - RNA, 21 nt, Artificial Sequence
  Synthetic oligonucleotide: BID-3962
ugucagcccugagcuccgcuc

SEQ ID NO: 43300 - RNA, 22 nt, Artificial Sequence
  Synthetic oligonucleotide: BID-3963
uugucagcccugagcuccgcuc

SEQ ID NO: 43301 - RNA, 23 nt, Artificial Sequence
  Synthetic oligonucleotide: BID-3964
uuugucagcccugagcuccgcuc

SEQ ID NO: 43302 - RNA, 24 nt, Artificial Sequence
  Synthetic oligonucleotide: BID-3965
cuuugucagcccugagcuccgcuc

SEQ ID NO: 43303 - RNA, 18 nt, Artificial Sequence
  Synthetic oligonucleotide: BID-3966
cgcggguuuucuccucuc

SEQ ID NO: 43304 - RNA, 19 nt, Artificial Sequence
  Synthetic oligonucleotide: BID-3967
ccgcggguuuucuccucuc

SEQ ID NO: 43305 - RNA, 20 nt, Artificial Sequence
  Synthetic oligonucleotide: BID-2180
cccgcggguuuucuccucuc

SEQ ID NO: 43306 - RNA, 21 nt, Artificial Sequence
  Synthetic oligonucleotide: BID-3968
gcccgcggguuuucuccucuc

SEQ ID NO: 43307 - RNA, 22 nt, Artificial Sequence
  Synthetic oligonucleotide: BID-3969
ggcccgcggguuuucuccucuc

SEQ ID NO: 43308 - RNA, 23 nt, Artificial Sequence
  Synthetic oligonucleotide: BID-3970
aggcccgcggguuuucuccucuc

SEQ ID NO: 43309 - RNA, 24 nt, Artificial Sequence
  Synthetic oligonucleotide: BID-3971
caggcccgcggguuuucuccucuc

SEQ ID NO: 43310 - RNA, 18 nt, Artificial Sequence
  Synthetic oligonucleotide: BID-3972
aggcggcaggcagggguc

SEQ ID NO: 43311 - RNA, 19 nt, Artificial Sequence
  Synthetic oligonucleotide: BID-3973
caggcggcaggcagggguc

SEQ ID NO: 43312 - RNA, 20 nt, Artificial Sequence
  Synthetic oligonucleotide: BID-1440
gcaggcggcaggcagggguc

SEQ ID NO: 43313 - RNA, 21 nt, Artificial Sequence
  Synthetic oligonucleotide: BID-3974
ggcaggcggcaggcagggguc

SEQ ID NO: 43314 - RNA, 22 nt, Artificial Sequence
  Synthetic oligonucleotide: BID-3975
gggcaggcggcaggcagggguc

SEQ ID NO: 43315 - RNA, 23 nt, Artificial Sequence
  Synthetic oligonucleotide: BID-3976
ggggcaggcggcaggcagggguc

SEQ ID NO: 43316 - RNA, 24 nt, Artificial Sequence
  Synthetic oligonucleotide: BID-3977
cggggcaggcggcaggcagggguc

SEQ ID NO: 43317 - RNA, 18 nt, Artificial Sequence
  Synthetic oligonucleotide: BID-3978
ccccaacccugccugcag

SEQ ID NO: 43318 - RNA, 19 nt, Artificial Sequence
  Synthetic oligonucleotide: BID-3979
gccccaacccugccugcag

SEQ ID NO: 43319 - RNA, 20 nt, Artificial Sequence
  Synthetic oligonucleotide: BID-1370
ugccccaacccugccugcag

SEQ ID NO: 43320 - RNA, 18 nt, Artificial Sequence
  Synthetic oligonucleotide: BID-3980
ccugccggccgcgccgag

SEQ ID NO: 43321 - RNA, 19 nt, Artificial Sequence
  Synthetic oligonucleotide: BID-3981
accugccggccgcgccgag

SEQ ID NO: 43322 - RNA, 20 nt, Artificial Sequence
  Synthetic oligonucleotide: BID-1416
gaccugccggccgcgccgag

SEQ ID NO: 43323 - RNA, 21 nt, Artificial Sequence
  Synthetic oligonucleotide: BID-3982
cgaccugccggccgcgccgag

SEQ ID NO: 43324 - RNA, 22 nt, Artificial Sequence
  Synthetic oligonucleotide: BID-3983
ccgaccugccggccgcgccgag

SEQ ID NO: 43325 - RNA, 23 nt, Artificial Sequence
  Synthetic oligonucleotide: BID-3984
accgaccugccggccgcgccgag

SEQ ID NO: 43326 - RNA, 24 nt, Artificial Sequence
  Synthetic oligonucleotide: BID-3985
caccgaccugccggccgcgccgag

SEQ ID NO: 43327 - RNA, 18 nt, Artificial Sequence
  Synthetic oligonucleotide: BID-3986
gccuuccccgccuccgag

SEQ ID NO: 43328 - RNA, 19 nt, Artificial Sequence
  Synthetic oligonucleotide: BID-3987
agccuuccccgccuccgag

SEQ ID NO: 43329 - RNA, 20 nt, Artificial Sequence
  Synthetic oligonucleotide: BID-1412
aagccuuccccgccuccgag

SEQ ID NO: 43330 - RNA, 21 nt, Artificial Sequence
  Synthetic oligonucleotide: BID-3988
aaagccuuccccgccuccgag

SEQ ID NO: 43331 - RNA, 22 nt, Artificial Sequence
  Synthetic oligonucleotide: BID-3989
caaagccuuccccgccuccgag

SEQ ID NO: 43332 - RNA, 23 nt, Artificial Sequence
  Synthetic oligonucleotide: BID-3990
acaaagccuuccccgccuccgag

SEQ ID NO: 43333 - RNA, 24 nt, Artificial Sequence
  Synthetic oligonucleotide: BID-3991
aacaaagccuuccccgccuccgag

SEQ ID NO: 43334 - RNA, 18 nt, Artificial Sequence
  Synthetic oligonucleotide: BID-3992
gagggcgcccgggcggag

SEQ ID NO: 43335 - RNA, 19 nt, Artificial Sequence
  Synthetic oligonucleotide: BID-3993
ggagggcgcccgggcggag

SEQ ID NO: 43336 - RNA, 20 nt, Artificial Sequence
  Synthetic oligonucleotide: BID-2199
aggagggcgcccgggcggag

SEQ ID NO: 43337 - RNA, 21 nt, Artificial Sequence
  Synthetic oligonucleotide: BID-3994
gaggagggcgcccgggcggag

SEQ ID NO: 43338 - RNA, 22 nt, Artificial Sequence
  Synthetic oligonucleotide: BID-3995
cgaggagggcgcccgggcggag

SEQ ID NO: 43339 - RNA, 23 nt, Artificial Sequence
  Synthetic oligonucleotide: BID-3996
ccgaggagggcgcccgggcggag

SEQ ID NO: 43340 - RNA, 24 nt, Artificial Sequence
  Synthetic oligonucleotide: BID-3997
gccgaggagggcgcccgggcggag

SEQ ID NO: 43341 - RNA, 18 nt, Artificial Sequence
  Synthetic oligonucleotide: BID-3998
cgcccgggcggaggggag

SEQ ID NO: 43342 - RNA, 19 nt, Artificial Sequence
  Synthetic oligonucleotide: BID-3999
gcgcccgggcggaggggag

SEQ ID NO: 43343 - RNA, 20 nt, Artificial Sequence
  Synthetic oligonucleotide: BID-1424
ggcgcccgggcggaggggag

SEQ ID NO: 43344 - RNA, 21 nt, Artificial Sequence
  Synthetic oligonucleotide: BID-4000
gggcgcccgggcggaggggag

SEQ ID NO: 43345 - RNA, 22 nt, Artificial Sequence
  Synthetic oligonucleotide: BID-4001
agggcgcccgggcggaggggag

SEQ ID NO: 43346 - RNA, 23 nt, Artificial Sequence
  Synthetic oligonucleotide: BID-4002
gagggcgcccgggcggaggggag

SEQ ID NO: 43347 - RNA, 24 nt, Artificial Sequence
  Synthetic oligonucleotide: BID-4003
ggagggcgcccgggcggaggggag

SEQ ID NO: 43348 - RNA, 18 nt, Artificial Sequence
  Synthetic oligonucleotide: BID-4004
cugaauccccaggccacg

SEQ ID NO: 43349 - RNA, 19 nt, Artificial Sequence
  Synthetic oligonucleotide: BID-4005
ccugaauccccaggccacg

SEQ ID NO: 43350 - RNA, 20 nt, Artificial Sequence
  Synthetic oligonucleotide: BID-2186
cccugaauccccaggccacg

SEQ ID NO: 43351 - RNA, 21 nt, Artificial Sequence
  Synthetic oligonucleotide: BID-4006
ccccugaauccccaggccacg

SEQ ID NO: 43352 - RNA, 22 nt, Artificial Sequence
  Synthetic oligonucleotide: BID-4007
uccccugaauccccaggccacg

SEQ ID NO: 43353 - RNA, 23 nt, Artificial Sequence
  Synthetic oligonucleotide: BID-4008
cuccccugaauccccaggccacg

SEQ ID NO: 43354 - RNA, 24 nt, Artificial Sequence
  Synthetic oligonucleotide: BID-4009
ccuccccugaauccccaggccacg

SEQ ID NO: 43355 - RNA, 18 nt, Artificial Sequence
  Synthetic oligonucleotide: BID-4010
cgggcccugagcuccacg

SEQ ID NO: 43356 - RNA, 19 nt, Artificial Sequence
  Synthetic oligonucleotide: BID-4011
gcgggcccugagcuccacg

SEQ ID NO: 43357 - RNA, 20 nt, Artificial Sequence
  Synthetic oligonucleotide: BID-1436
ggcgggcccugagcuccacg

SEQ ID NO: 43358 - RNA, 21 nt, Artificial Sequence
  Synthetic oligonucleotide: BID-4012
cggcgggcccugagcuccacg

SEQ ID NO: 43359 - RNA, 22 nt, Artificial Sequence
  Synthetic oligonucleotide: BID-4013
gcggcgggcccugagcuccacg

SEQ ID NO: 43360 - RNA, 23 nt, Artificial Sequence
  Synthetic oligonucleotide: BID-4014
ggcggcgggcccugagcuccacg

SEQ ID NO: 43361 - RNA, 24 nt, Artificial Sequence
  Synthetic oligonucleotide: BID-4015
gggcggcgggcccugagcuccacg

SEQ ID NO: 43362 - RNA, 18 nt, Artificial Sequence
  Synthetic oligonucleotide: BID-4016
cucaccacccuccagccg

SEQ ID NO: 43363 - RNA, 19 nt, Artificial Sequence
  Synthetic oligonucleotide: BID-4017
acucaccacccuccagccg

SEQ ID NO: 43364 - RNA, 20 nt, Artificial Sequence
  Synthetic oligonucleotide: BID-2242
cacucaccacccuccagccg

SEQ ID NO: 43365 - RNA, 21 nt, Artificial Sequence
  Synthetic oligonucleotide: BID-4018
gcacucaccacccuccagccg

SEQ ID NO: 43366 - RNA, 22 nt, Artificial Sequence
  Synthetic oligonucleotide: BID-4019
ugcacucaccacccuccagccg

SEQ ID NO: 43367 - RNA, 23 nt, Artificial Sequence
  Synthetic oligonucleotide: BID-4020
gugcacucaccacccuccagccg

SEQ ID NO: 43368 - RNA, 24 nt, Artificial Sequence
  Synthetic oligonucleotide: BID-4021
ggugcacucaccacccuccagccg

SEQ ID NO: 43369 - RNA, 18 nt, Artificial Sequence
  Synthetic oligonucleotide: BID-4022
ugaaggccgguccagccg

SEQ ID NO: 43370 - RNA, 19 nt, Artificial Sequence
  Synthetic oligonucleotide: BID-4023
gugaaggccgguccagccg

SEQ ID NO: 43371 - RNA, 20 nt, Artificial Sequence
  Synthetic oligonucleotide: BID-1371
ggugaaggccgguccagccg

SEQ ID NO: 43372 - RNA, 21 nt, Artificial Sequence
  Synthetic oligonucleotide: BID-4024
aggugaaggccgguccagccg

SEQ ID NO: 43373 - RNA, 22 nt, Artificial Sequence
  Synthetic oligonucleotide: BID-4025
caggugaaggccgguccagccg

SEQ ID NO: 43374 - RNA, 23 nt, Artificial Sequence
  Synthetic oligonucleotide: BID-4026
gcaggugaaggccgguccagccg

SEQ ID NO: 43375 - RNA, 24 nt, Artificial Sequence
  Synthetic oligonucleotide: BID-4027
ugcaggugaaggccgguccagccg

SEQ ID NO: 43376 - RNA, 18 nt, Artificial Sequence
  Synthetic oligonucleotide: BID-4028
gaccugccggccgcgccg

SEQ ID NO: 43377 - RNA, 19 nt, Artificial Sequence
  Synthetic oligonucleotide: BID-4029
cgaccugccggccgcgccg

SEQ ID NO: 43378 - RNA, 20 nt, Artificial Sequence
  Synthetic oligonucleotide: BID-2191
ccgaccugccggccgcgccg

SEQ ID NO: 43379 - RNA, 21 nt, Artificial Sequence
  Synthetic oligonucleotide: BID-4030
accgaccugccggccgcgccg

SEQ ID NO: 43380 - RNA, 22 nt, Artificial Sequence
  Synthetic oligonucleotide: BID-4031
caccgaccugccggccgcgccg

SEQ ID NO: 43381 - RNA, 23 nt, Artificial Sequence
  Synthetic oligonucleotide: BID-4032
gcaccgaccugccggccgcgccg

SEQ ID NO: 43382 - RNA, 24 nt, Artificial Sequence
  Synthetic oligonucleotide: BID-4033
agcaccgaccugccggccgcgccg

SEQ ID NO: 43383 - RNA, 18 nt, Artificial Sequence
  Synthetic oligonucleotide: BID-4034
accgaccugccggccgcg

SEQ ID NO: 43384 - RNA, 19 nt, Artificial Sequence
  Synthetic oligonucleotide: BID-4035
caccgaccugccggccgcg

SEQ ID NO: 43385 - RNA, 20 nt, Artificial Sequence
  Synthetic oligonucleotide: BID-1413
gcaccgaccugccggccgcg

SEQ ID NO: 43386 - RNA, 21 nt, Artificial Sequence
  Synthetic oligonucleotide: BID-4036
agcaccgaccugccggccgcg

SEQ ID NO: 43387 - RNA, 22 nt, Artificial Sequence
  Synthetic oligonucleotide: BID-4037
cagcaccgaccugccggccgcg

SEQ ID NO: 43388 - RNA, 23 nt, Artificial Sequence
  Synthetic oligonucleotide: BID-4038
ucagcaccgaccugccggccgcg

SEQ ID NO: 43389 - RNA, 24 nt, Artificial Sequence
  Synthetic oligonucleotide: BID-4039
cucagcaccgaccugccggccgcg

SEQ ID NO: 43390 - RNA, 18 nt, Artificial Sequence
  Synthetic oligonucleotide: BID-4040
gaggagggcgcccgggcg

SEQ ID NO: 43391 - RNA, 19 nt, Artificial Sequence
  Synthetic oligonucleotide: BID-4041
cgaggagggcgcccgggcg

SEQ ID NO: 43392 - RNA, 20 nt, Artificial Sequence
  Synthetic oligonucleotide: BID-1420
ccgaggagggcgcccgggcg

SEQ ID NO: 43393 - RNA, 21 nt, Artificial Sequence
  Synthetic oligonucleotide: BID-4042
gccgaggagggcgcccgggcg

SEQ ID NO: 43394 - RNA, 22 nt, Artificial Sequence
  Synthetic oligonucleotide: BID-4043
cgccgaggagggcgcccgggcg

SEQ ID NO: 43395 - RNA, 23 nt, Artificial Sequence
  Synthetic oligonucleotide: BID-4044
gcgccgaggagggcgcccgggcg

SEQ ID NO: 43396 - RNA, 24 nt, Artificial Sequence
  Synthetic oligonucleotide: BID-4045
cgcgccgaggagggcgcccgggcg

SEQ ID NO: 43397 - RNA, 18 nt, Artificial Sequence
  Synthetic oligonucleotide: BID-4046
ucgggcccagggcgggcg

SEQ ID NO: 43398 - RNA, 19 nt, Artificial Sequence
  Synthetic oligonucleotide: BID-4047
gucgggcccagggcgggcg

SEQ ID NO: 43399 - RNA, 20 nt, Artificial Sequence
  Synthetic oligonucleotide: BID-1434
ggucgggcccagggcgggcg

SEQ ID NO: 43400 - RNA, 21 nt, Artificial Sequence
  Synthetic oligonucleotide: BID-4048
cggucgggcccagggcgggcg

SEQ ID NO: 43401 - RNA, 22 nt, Artificial Sequence
  Synthetic oligonucleotide: BID-4049
gcggucgggcccagggcgggcg

SEQ ID NO: 43402 - RNA, 23 nt, Artificial Sequence
  Synthetic oligonucleotide: BID-4050
cgcggucgggcccagggcgggcg

SEQ ID NO: 43403 - RNA, 24 nt, Artificial Sequence
  Synthetic oligonucleotide: BID-4051
ccgcggucgggcccagggcgggcg

SEQ ID NO: 43404 - RNA, 18 nt, Artificial Sequence
  Synthetic oligonucleotide: BID-4052
accgcggucgggcccagg

SEQ ID NO: 43405 - RNA, 19 nt, Artificial Sequence
  Synthetic oligonucleotide: BID-4053
caccgcggucgggcccagg

SEQ ID NO: 43406 - RNA, 20 nt, Artificial Sequence
  Synthetic oligonucleotide: BID-1433
ccaccgcggucgggcccagg

SEQ ID NO: 43407 - RNA, 21 nt, Artificial Sequence
  Synthetic oligonucleotide: BID-4054
cccaccgcggucgggcccagg

SEQ ID NO: 43408 - RNA, 22 nt, Artificial Sequence
  Synthetic oligonucleotide: BID-4055
ucccaccgcggucgggcccagg

SEQ ID NO: 43409 - RNA, 23 nt, Artificial Sequence
  Synthetic oligonucleotide: BID-4056
cucccaccgcggucgggcccagg

SEQ ID NO: 43410 - RNA, 24 nt, Artificial Sequence
  Synthetic oligonucleotide: BID-4057
gcucccaccgcggucgggcccagg

SEQ ID NO: 43411 - RNA, 18 nt, Artificial Sequence
  Synthetic oligonucleotide: BID-4058
gccggggcaggcggcagg

SEQ ID NO: 43412 - RNA, 19 nt, Artificial Sequence
  Synthetic oligonucleotide: BID-4059
cgccggggcaggcggcagg

SEQ ID NO: 43413 - RNA, 20 nt, Artificial Sequence
  Synthetic oligonucleotide: BID-1438
acgccggggcaggcggcagg

SEQ ID NO: 43414 - RNA, 21 nt, Artificial Sequence
  Synthetic oligonucleotide: BID-4060
cacgccggggcaggcggcagg

SEQ ID NO: 43415 - RNA, 22 nt, Artificial Sequence
  Synthetic oligonucleotide: BID-4061
ccacgccggggcaggcggcagg

SEQ ID NO: 43416 - RNA, 23 nt, Artificial Sequence
  Synthetic oligonucleotide: BID-4062
uccacgccggggcaggcggcagg

SEQ ID NO: 43417 - RNA, 24 nt, Artificial Sequence
  Synthetic oligonucleotide: BID-4063
cuccacgccggggcaggcggcagg

SEQ ID NO: 43418 - RNA, 18 nt, Artificial Sequence
  Synthetic oligonucleotide: BID-4064
gcccgggcggaggggagg

SEQ ID NO: 43419 - RNA, 19 nt, Artificial Sequence
  Synthetic oligonucleotide: BID-4065
cgcccgggcggaggggagg

SEQ ID NO: 43420 - RNA, 20 nt, Artificial Sequence
  Synthetic oligonucleotide: BID-2201
gcgcccgggcggaggggagg

SEQ ID NO: 43421 - RNA, 21 nt, Artificial Sequence
  Synthetic oligonucleotide: BID-4066
ggcgcccgggcggaggggagg

SEQ ID NO: 43422 - RNA, 22 nt, Artificial Sequence
  Synthetic oligonucleotide: BID-4067
gggcgcccgggcggaggggagg

SEQ ID NO: 43423 - RNA, 23 nt, Artificial Sequence
  Synthetic oligonucleotide: BID-4068
agggcgcccgggcggaggggagg

SEQ ID NO: 43424 - RNA, 24 nt, Artificial Sequence
  Synthetic oligonucleotide: BID-4069
gagggcgcccgggcggaggggagg

SEQ ID NO: 43425 - RNA, 18 nt, Artificial Sequence
  Synthetic oligonucleotide: BID-4070
gcucggcgcguaccccgg

SEQ ID NO: 43426 - RNA, 19 nt, Artificial Sequence
  Synthetic oligonucleotide: BID-4071
ggcucggcgcguaccccgg

SEQ ID NO: 43427 - RNA, 20 nt, Artificial Sequence
  Synthetic oligonucleotide: BID-1446
gggcucggcgcguaccccgg

SEQ ID NO: 43428 - RNA, 21 nt, Artificial Sequence
  Synthetic oligonucleotide: BID-4072
ggggcucggcgcguaccccgg

SEQ ID NO: 43429 - RNA, 22 nt, Artificial Sequence
  Synthetic oligonucleotide: BID-4073
uggggcucggcgcguaccccgg

SEQ ID NO: 43430 - RNA, 23 nt, Artificial Sequence
  Synthetic oligonucleotide: BID-4074
cuggggcucggcgcguaccccgg

SEQ ID NO: 43431 - RNA, 24 nt, Artificial Sequence
  Synthetic oligonucleotide: BID-4075
gcuggggcucggcgcguaccccgg

SEQ ID NO: 43432 - RNA, 18 nt, Artificial Sequence
  Synthetic oligonucleotide: BID-4076
gccgaggagggcgcccgg

SEQ ID NO: 43433 - RNA, 19 nt, Artificial Sequence
  Synthetic oligonucleotide: BID-4077
cgccgaggagggcgcccgg

SEQ ID NO: 43434 - RNA, 20 nt, Artificial Sequence
  Synthetic oligonucleotide: BID-1418
gcgccgaggagggcgcccgg

SEQ ID NO: 43435 - RNA, 21 nt, Artificial Sequence
  Synthetic oligonucleotide: BID-4078
cgcgccgaggagggcgcccgg

SEQ ID NO: 43436 - RNA, 22 nt, Artificial Sequence
  Synthetic oligonucleotide: BID-4079
ccgcgccgaggagggcgcccgg

SEQ ID NO: 43437 - RNA, 23 nt, Artificial Sequence
  Synthetic oligonucleotide: BID-4080
gccgcgccgaggagggcgcccgg

SEQ ID NO: 43438 - RNA, 24 nt, Artificial Sequence
  Synthetic oligonucleotide: BID-4081
ggccgcgccgaggagggcgcccgg

SEQ ID NO: 43439 - RNA, 18 nt, Artificial Sequence
  Synthetic oligonucleotide: BID-4082
cagugcucuaaggagcgg

SEQ ID NO: 43440 - RNA, 19 nt, Artificial Sequence
  Synthetic oligonucleotide: BID-4083
ccagugcucuaaggagcgg

SEQ ID NO: 43441 - RNA, 20 nt, Artificial Sequence
  Synthetic oligonucleotide: BID-1389
gccagugcucuaaggagcgg

SEQ ID NO: 43442 - RNA, 21 nt, Artificial Sequence
  Synthetic oligonucleotide: BID-4084
ugccagugcucuaaggagcgg

SEQ ID NO: 43443 - RNA, 22 nt, Artificial Sequence
  Synthetic oligonucleotide: BID-4085
uugccagugcucuaaggagcgg

SEQ ID NO: 43444 - RNA, 23 nt, Artificial Sequence
  Synthetic oligonucleotide: BID-4086
auugccagugcucuaaggagcgg

SEQ ID NO: 43445 - RNA, 24 nt, Artificial Sequence
  Synthetic oligonucleotide: BID-4087
cauugccagugcucuaaggagcgg

SEQ ID NO: 43446 - RNA, 18 nt, Artificial Sequence
  Synthetic oligonucleotide: BID-4088
cucuggcucccaccgcgg

SEQ ID NO: 43447 - RNA, 19 nt, Artificial Sequence
  Synthetic oligonucleotide: BID-4089
ccucuggcucccaccgcgg

SEQ ID NO: 43448 - RNA, 20 nt, Artificial Sequence
  Synthetic oligonucleotide: BID-1431
uccucuggcucccaccgcgg

SEQ ID NO: 43449 - RNA, 21 nt, Artificial Sequence
  Synthetic oligonucleotide: BID-4090
cuccucuggcucccaccgcgg

SEQ ID NO: 43450 - RNA, 22 nt, Artificial Sequence
  Synthetic oligonucleotide: BID-4091
ccuccucuggcucccaccgcgg

SEQ ID NO: 43451 - RNA, 23 nt, Artificial Sequence
  Synthetic oligonucleotide: BID-4092
cccuccucuggcucccaccgcgg

SEQ ID NO: 43452 - RNA, 24 nt, Artificial Sequence
  Synthetic oligonucleotide: BID-4093
ccccuccucuggcucccaccgcgg

SEQ ID NO: 43453 - RNA, 18 nt, Artificial Sequence
  Synthetic oligonucleotide: BID-4094
cgggcggaggggaggcgg

SEQ ID NO: 43454 - RNA, 19 nt, Artificial Sequence
  Synthetic oligonucleotide: BID-4095
ccgggcggaggggaggcgg

SEQ ID NO: 43455 - RNA, 20 nt, Artificial Sequence
  Synthetic oligonucleotide: BID-1427
cccgggcggaggggaggcgg

SEQ ID NO: 43456 - RNA, 21 nt, Artificial Sequence
  Synthetic oligonucleotide: BID-4096
gcccgggcggaggggaggcgg

SEQ ID NO: 43457 - RNA, 22 nt, Artificial Sequence
  Synthetic oligonucleotide: BID-4097
cgcccgggcggaggggaggcgg

SEQ ID NO: 43458 - RNA, 23 nt, Artificial Sequence
  Synthetic oligonucleotide: BID-4098
gcgcccgggcggaggggaggcgg

SEQ ID NO: 43459 - RNA, 24 nt, Artificial Sequence
  Synthetic oligonucleotide: BID-4099
ggcgcccgggcggaggggaggcgg

SEQ ID NO: 43460 - RNA, 18 nt, Artificial Sequence
  Synthetic oligonucleotide: BID-4100
aggagggcgcccgggcgg

SEQ ID NO: 43461 - RNA, 19 nt, Artificial Sequence
  Synthetic oligonucleotide: BID-4101
gaggagggcgcccgggcgg

SEQ ID NO: 43462 - RNA, 20 nt, Artificial Sequence
  Synthetic oligonucleotide: BID-2197
cgaggagggcgcccgggcgg

SEQ ID NO: 43463 - RNA, 21 nt, Artificial Sequence
  Synthetic oligonucleotide: BID-4102
ccgaggagggcgcccgggcgg

SEQ ID NO: 43464 - RNA, 22 nt, Artificial Sequence
  Synthetic oligonucleotide: BID-4103
gccgaggagggcgcccgggcgg

SEQ ID NO: 43465 - RNA, 23 nt, Artificial Sequence
  Synthetic oligonucleotide: BID-4104
cgccgaggagggcgcccgggcgg

SEQ ID NO: 43466 - RNA, 24 nt, Artificial Sequence
  Synthetic oligonucleotide: BID-4105
gcgccgaggagggcgcccgggcgg

SEQ ID NO: 43467 - RNA, 18 nt, Artificial Sequence
  Synthetic oligonucleotide: BID-4106
gcccugagcuccgcucgg

SEQ ID NO: 43468 - RNA, 19 nt, Artificial Sequence
  Synthetic oligonucleotide: BID-4107
agcccugagcuccgcucgg

SEQ ID NO: 43469 - RNA, 20 nt, Artificial Sequence
  Synthetic oligonucleotide: BID-1394
cagcccugagcuccgcucgg

SEQ ID NO: 43470 - RNA, 21 nt, Artificial Sequence
  Synthetic oligonucleotide: BID-4108
ucagcccugagcuccgcucgg

SEQ ID NO: 43471 - RNA, 22 nt, Artificial Sequence
  Synthetic oligonucleotide: BID-4109
gucagcccugagcuccgcucgg

SEQ ID NO: 43472 - RNA, 23 nt, Artificial Sequence
  Synthetic oligonucleotide: BID-4110
ugucagcccugagcuccgcucgg

SEQ ID NO: 43473 - RNA, 24 nt, Artificial Sequence
  Synthetic oligonucleotide: BID-4111
uugucagcccugagcuccgcucgg

SEQ ID NO: 43474 - RNA, 18 nt, Artificial Sequence
  Synthetic oligonucleotide: BID-4112
gcaggcaggggucacggg

SEQ ID NO: 43475 - RNA, 19 nt, Artificial Sequence
  Synthetic oligonucleotide: BID-4113
ggcaggcaggggucacggg

SEQ ID NO: 43476 - RNA, 20 nt, Artificial Sequence
  Synthetic oligonucleotide: BID-1441
cggcaggcaggggucacggg

SEQ ID NO: 43477 - RNA, 21 nt, Artificial Sequence
  Synthetic oligonucleotide: BID-4114
gcggcaggcaggggucacggg

SEQ ID NO: 43478 - RNA, 22 nt, Artificial Sequence
  Synthetic oligonucleotide: BID-4115
ggcggcaggcaggggucacggg

SEQ ID NO: 43479 - RNA, 23 nt, Artificial Sequence
  Synthetic oligonucleotide: BID-4116
aggcggcaggcaggggucacggg

SEQ ID NO: 43480 - RNA, 24 nt, Artificial Sequence
  Synthetic oligonucleotide: BID-4117
caggcggcaggcaggggucacggg

SEQ ID NO: 43481 - RNA, 18 nt, Artificial Sequence
  Synthetic oligonucleotide: BID-4118
cucggcgcguaccccggg

SEQ ID NO: 43482 - RNA, 19 nt, Artificial Sequence
  Synthetic oligonucleotide: BID-4119
gcucggcgcguaccccggg

SEQ ID NO: 43483 - RNA, 20 nt, Artificial Sequence
  Synthetic oligonucleotide: BID-2237
ggcucggcgcguaccccggg

SEQ ID NO: 43484 - RNA, 21 nt, Artificial Sequence
  Synthetic oligonucleotide: BID-4120
gggcucggcgcguaccccggg

SEQ ID NO: 43485 - RNA, 22 nt, Artificial Sequence
  Synthetic oligonucleotide: BID-4121
ggggcucggcgcguaccccggg

SEQ ID NO: 43486 - RNA, 23 nt, Artificial Sequence
  Synthetic oligonucleotide: BID-4122
uggggcucggcgcguaccccggg

SEQ ID NO: 43487 - RNA, 24 nt, Artificial Sequence
  Synthetic oligonucleotide: BID-4123
cuggggcucggcgcguaccccggg

SEQ ID NO: 43488 - RNA, 18 nt, Artificial Sequence
  Synthetic oligonucleotide: BID-4124
ccgaggagggcgcccggg

SEQ ID NO: 43489 - RNA, 19 nt, Artificial Sequence
  Synthetic oligonucleotide: BID-4125
gccgaggagggcgcccggg

SEQ ID NO: 43490 - RNA, 20 nt, Artificial Sequence
  Synthetic oligonucleotide: BID-2196
cgccgaggagggcgcccggg

SEQ ID NO: 43491 - RNA, 21 nt, Artificial Sequence
  Synthetic oligonucleotide: BID-4126
gcgccgaggagggcgcccggg

SEQ ID NO: 43492 - RNA, 22 nt, Artificial Sequence
  Synthetic oligonucleotide: BID-4127
cgcgccgaggagggcgcccggg

SEQ ID NO: 43493 - RNA, 23 nt, Artificial Sequence
  Synthetic oligonucleotide: BID-4128
ccgcgccgaggagggcgcccggg

SEQ ID NO: 43494 - RNA, 24 nt, Artificial Sequence
  Synthetic oligonucleotide: BID-4129
gccgcgccgaggagggcgcccggg

SEQ ID NO: 43495 - RNA, 18 nt, Artificial Sequence
  Synthetic oligonucleotide: BID-4130
ggcgcgggcgcguccggg

SEQ ID NO: 43496 - RNA, 19 nt, Artificial Sequence
  Synthetic oligonucleotide: BID-4131
gggcgcgggcgcguccggg

SEQ ID NO: 43497 - RNA, 20 nt, Artificial Sequence
  Synthetic oligonucleotide: BID-1454
ggggcgcgggcgcguccggg

SEQ ID NO: 43498 - RNA, 21 nt, Artificial Sequence
  Synthetic oligonucleotide: BID-4132
gggggcgcgggcgcguccggg

SEQ ID NO: 43499 - RNA, 22 nt, Artificial Sequence
  Synthetic oligonucleotide: BID-4133
cgggggcgcgggcgcguccggg

SEQ ID NO: 43500 - RNA, 23 nt, Artificial Sequence
  Synthetic oligonucleotide: BID-4134
gcgggggcgcgggcgcguccggg

SEQ ID NO: 43501 - RNA, 24 nt, Artificial Sequence
  Synthetic oligonucleotide: BID-4135
cgcgggggcgcgggcgcguccggg

SEQ ID NO: 43502 - RNA, 18 nt, Artificial Sequence
  Synthetic oligonucleotide: BID-4136
cccugagcuccgcucggg

SEQ ID NO: 43503 - RNA, 19 nt, Artificial Sequence
  Synthetic oligonucleotide: BID-4137
gcccugagcuccgcucggg

SEQ ID NO: 43504 - RNA, 20 nt, Artificial Sequence
  Synthetic oligonucleotide: BID-2161
agcccugagcuccgcucggg

SEQ ID NO: 43505 - RNA, 21 nt, Artificial Sequence
  Synthetic oligonucleotide: BID-4138
cagcccugagcuccgcucggg

SEQ ID NO: 43506 - RNA, 22 nt, Artificial Sequence
  Synthetic oligonucleotide: BID-4139
ucagcccugagcuccgcucggg

SEQ ID NO: 43507 - RNA, 23 nt, Artificial Sequence
  Synthetic oligonucleotide: BID-4140
gucagcccugagcuccgcucggg

SEQ ID NO: 43508 - RNA, 24 nt, Artificial Sequence
  Synthetic oligonucleotide: BID-4141
ugucagcccugagcuccgcucggg

SEQ ID NO: 43509 - RNA, 18 nt, Artificial Sequence
  Synthetic oligonucleotide: BID-4142
gaaagaccacgguguggg

SEQ ID NO: 43510 - RNA, 19 nt, Artificial Sequence
  Synthetic oligonucleotide: BID-4143
ggaaagaccacgguguggg

SEQ ID NO: 43511 - RNA, 20 nt, Artificial Sequence
  Synthetic oligonucleotide: BID-2169
uggaaagaccacgguguggg

SEQ ID NO: 43512 - RNA, 21 nt, Artificial Sequence
  Synthetic oligonucleotide: BID-4144
cuggaaagaccacgguguggg

SEQ ID NO: 43513 - RNA, 22 nt, Artificial Sequence
  Synthetic oligonucleotide: BID-4145
gcuggaaagaccacgguguggg

SEQ ID NO: 43514 - RNA, 23 nt, Artificial Sequence
  Synthetic oligonucleotide: BID-4146
ugcuggaaagaccacgguguggg

SEQ ID NO: 43515 - RNA, 24 nt, Artificial Sequence
  Synthetic oligonucleotide: BID-4147
gugcuggaaagaccacgguguggg

SEQ ID NO: 43516 - RNA, 18 nt, Artificial Sequence
  Synthetic oligonucleotide: BID-4148
agcccagccacuuggugg

SEQ ID NO: 43517 - RNA, 19 nt, Artificial Sequence
  Synthetic oligonucleotide: BID-4149
cagcccagccacuuggugg

SEQ ID NO: 43518 - RNA, 20 nt, Artificial Sequence
  Synthetic oligonucleotide: BID-1378
ccagcccagccacuuggugg

SEQ ID NO: 43519 - RNA, 21 nt, Artificial Sequence
  Synthetic oligonucleotide: BID-4150
gccagcccagccacuuggugg

SEQ ID NO: 43520 - RNA, 22 nt, Artificial Sequence
  Synthetic oligonucleotide: BID-4151
ugccagcccagccacuuggugg

SEQ ID NO: 43521 - RNA, 23 nt, Artificial Sequence
  Synthetic oligonucleotide: BID-4152
uugccagcccagccacuuggugg

SEQ ID NO: 43522 - RNA, 24 nt, Artificial Sequence
  Synthetic oligonucleotide: BID-4153
cuugccagcccagccacuuggugg

SEQ ID NO: 43523 - RNA, 18 nt, Artificial Sequence
  Synthetic oligonucleotide: BID-4154
ggaaagaccacggugugg

SEQ ID NO: 43524 - RNA, 19 nt, Artificial Sequence
  Synthetic oligonucleotide: BID-4155
uggaaagaccacggugugg

SEQ ID NO: 43525 - RNA, 20 nt, Artificial Sequence
  Synthetic oligonucleotide: BID-1399
cuggaaagaccacggugugg

SEQ ID NO: 43526 - RNA, 21 nt, Artificial Sequence
  Synthetic oligonucleotide: BID-4156
gcuggaaagaccacggugugg

SEQ ID NO: 43527 - RNA, 22 nt, Artificial Sequence
  Synthetic oligonucleotide: BID-4157
ugcuggaaagaccacggugugg

SEQ ID NO: 43528 - RNA, 23 nt, Artificial Sequence
  Synthetic oligonucleotide: BID-4158
gugcuggaaagaccacggugugg

SEQ ID NO: 43529 - RNA, 24 nt, Artificial Sequence
  Synthetic oligonucleotide: BID-4159
ggugcuggaaagaccacggugugg

SEQ ID NO: 43530 - RNA, 18 nt, Artificial Sequence
  Synthetic oligonucleotide: BID-4160
ccggcccucaggucgcug

SEQ ID NO: 43531 - RNA, 19 nt, Artificial Sequence
  Synthetic oligonucleotide: BID-4161
cccggcccucaggucgcug

SEQ ID NO: 43532 - RNA, 20 nt, Artificial Sequence
  Synthetic oligonucleotide: BID-1428
acccggcccucaggucgcug

SEQ ID NO: 43533 - RNA, 21 nt, Artificial Sequence
  Synthetic oligonucleotide: BID-4162
gacccggcccucaggucgcug

SEQ ID NO: 43534 - RNA, 22 nt, Artificial Sequence
  Synthetic oligonucleotide: BID-4163
agacccggcccucaggucgcug

SEQ ID NO: 43535 - RNA, 23 nt, Artificial Sequence
  Synthetic oligonucleotide: BID-4164
gagacccggcccucaggucgcug

SEQ ID NO: 43536 - RNA, 24 nt, Artificial Sequence
  Synthetic oligonucleotide: BID-4165
agagacccggcccucaggucgcug

SEQ ID NO: 43537 - RNA, 18 nt, Artificial Sequence
  Synthetic oligonucleotide: BID-4166
gaauccccaggccacgug

SEQ ID NO: 43538 - RNA, 19 nt, Artificial Sequence
  Synthetic oligonucleotide: BID-4167
ugaauccccaggccacgug

SEQ ID NO: 43539 - RNA, 20 nt, Artificial Sequence
  Synthetic oligonucleotide: BID-1409
cugaauccccaggccacgug

SEQ ID NO: 43540 - RNA, 21 nt, Artificial Sequence
  Synthetic oligonucleotide: BID-4168
ccugaauccccaggccacgug

SEQ ID NO: 43541 - RNA, 22 nt, Artificial Sequence
  Synthetic oligonucleotide: BID-4169
cccugaauccccaggccacgug

SEQ ID NO: 43542 - RNA, 23 nt, Artificial Sequence
  Synthetic oligonucleotide: BID-4170
ccccugaauccccaggccacgug

SEQ ID NO: 43543 - RNA, 24 nt, Artificial Sequence
  Synthetic oligonucleotide: BID-4171
uccccugaauccccaggccacgug

SEQ ID NO: 43544 - RNA, 18 nt, Artificial Sequence
  Synthetic oligonucleotide: BID-4172
cggcaggugucugcggug

SEQ ID NO: 43545 - RNA, 19 nt, Artificial Sequence
  Synthetic oligonucleotide: BID-4173
ccggcaggugucugcggug

SEQ ID NO: 43546 - RNA, 20 nt, Artificial Sequence
  Synthetic oligonucleotide: BID-1396
gccggcaggugucugcggug

SEQ ID NO: 43547 - RNA, 21 nt, Artificial Sequence
  Synthetic oligonucleotide: BID-4174
agccggcaggugucugcggug

SEQ ID NO: 43548 - RNA, 22 nt, Artificial Sequence
  Synthetic oligonucleotide: BID-4175
gagccggcaggugucugcggug

SEQ ID NO: 43549 - RNA, 23 nt, Artificial Sequence
  Synthetic oligonucleotide: BID-4176
ggagccggcaggugucugcggug

SEQ ID NO: 43550 - RNA, 24 nt, Artificial Sequence
  Synthetic oligonucleotide: BID-4177
aggagccggcaggugucugcggug

SEQ ID NO: 43551 - RNA, 18 nt, Artificial Sequence
  Synthetic oligonucleotide: BID-4178
acaaagccuuccccgccu

SEQ ID NO: 43552 - RNA, 19 nt, Artificial Sequence
  Synthetic oligonucleotide: BID-4179
aacaaagccuuccccgccu

SEQ ID NO: 43553 - RNA, 20 nt, Artificial Sequence
  Synthetic oligonucleotide: BID-1411
caacaaagccuuccccgccu

SEQ ID NO: 43554 - RNA, 21 nt, Artificial Sequence
  Synthetic oligonucleotide: BID-4180
acaacaaagccuuccccgccu

SEQ ID NO: 43555 - RNA, 22 nt, Artificial Sequence
  Synthetic oligonucleotide: BID-4181
cacaacaaagccuuccccgccu

SEQ ID NO: 43556 - RNA, 23 nt, Artificial Sequence
  Synthetic oligonucleotide: BID-4182
acacaacaaagccuuccccgccu

SEQ ID NO: 43557 - RNA, 24 nt, Artificial Sequence
  Synthetic oligonucleotide: BID-4183
gacacaacaaagccuuccccgccu

SEQ ID NO: 43558 - RNA, 18 nt, Artificial Sequence
  Synthetic oligonucleotide: BID-4184
ucagcccugagcuccgcu

SEQ ID NO: 43559 - RNA, 19 nt, Artificial Sequence
  Synthetic oligonucleotide: BID-4185
gucagcccugagcuccgcu

SEQ ID NO: 43560 - RNA, 20 nt, Artificial Sequence
  Synthetic oligonucleotide: BID-2159
ugucagcccugagcuccgcu

SEQ ID NO: 43561 - RNA, 21 nt, Artificial Sequence
  Synthetic oligonucleotide: BID-4186
uugucagcccugagcuccgcu

SEQ ID NO: 43562 - RNA, 22 nt, Artificial Sequence
  Synthetic oligonucleotide: BID-4187
uuugucagcccugagcuccgcu

SEQ ID NO: 43563 - RNA, 23 nt, Artificial Sequence
  Synthetic oligonucleotide: BID-4188
cuuugucagcccugagcuccgcu

SEQ ID NO: 43564 - RNA, 24 nt, Artificial Sequence
  Synthetic oligonucleotide: BID-4189
gcuuugucagcccugagcuccgcu

SEQ ID NO: 43565 - RNA, 18 nt, Artificial Sequence
  Synthetic oligonucleotide: BID-4190
cccagccacuugguggcu

SEQ ID NO: 43566 - RNA, 19 nt, Artificial Sequence
  Synthetic oligonucleotide: BID-4191
gcccagccacuugguggcu

SEQ ID NO: 43567 - RNA, 20 nt, Artificial Sequence
  Synthetic oligonucleotide: BID-1379
agcccagccacuugguggcu

SEQ ID NO: 43568 - RNA, 21 nt, Artificial Sequence
  Synthetic oligonucleotide: BID-4192
cagcccagccacuugguggcu

SEQ ID NO: 43569 - RNA, 22 nt, Artificial Sequence
  Synthetic oligonucleotide: BID-4193
ccagcccagccacuugguggcu

SEQ ID NO: 43570 - RNA, 23 nt, Artificial Sequence
  Synthetic oligonucleotide: BID-4194
gccagcccagccacuugguggcu

SEQ ID NO: 43571 - RNA, 24 nt, Artificial Sequence
  Synthetic oligonucleotide: BID-4195
ugccagcccagccacuugguggcu

SEQ ID NO: 43572 - RNA, 18 nt, Artificial Sequence
  Synthetic oligonucleotide: BID-4196
ccgcggguuuucuccucu

SEQ ID NO: 43573 - RNA, 19 nt, Artificial Sequence
  Synthetic oligonucleotide: BID-4197
cccgcggguuuucuccucu

SEQ ID NO: 43574 - RNA, 20 nt, Artificial Sequence
  Synthetic oligonucleotide: BID-1404
gcccgcggguuuucuccucu

SEQ ID NO: 43575 - RNA, 21 nt, Artificial Sequence
  Synthetic oligonucleotide: BID-4198
ggcccgcggguuuucuccucu

SEQ ID NO: 43576 - RNA, 22 nt, Artificial Sequence
  Synthetic oligonucleotide: BID-4199
aggcccgcggguuuucuccucu

SEQ ID NO: 43577 - RNA, 23 nt, Artificial Sequence
  Synthetic oligonucleotide: BID-4200
caggcccgcggguuuucuccucu

SEQ ID NO: 43578 - RNA, 24 nt, Artificial Sequence
  Synthetic oligonucleotide: BID-4201
ccaggcccgcggguuuucuccucu

SEQ ID NO: 43579 - RNA, 18 nt, Artificial Sequence
  Synthetic oligonucleotide: BID-4202
caucauugccagugcucu

SEQ ID NO: 43580 - RNA, 19 nt, Artificial Sequence
  Synthetic oligonucleotide: BID-4203
acaucauugccagugcucu

SEQ ID NO: 43581 - RNA, 20 nt, Artificial Sequence
  Synthetic oligonucleotide: BID-1386
cacaucauugccagugcucu

SEQ ID NO: 43582 - RNA, 21 nt, Artificial Sequence
  Synthetic oligonucleotide: BID-4204
gcacaucauugccagugcucu

SEQ ID NO: 43583 - RNA, 22 nt, Artificial Sequence
  Synthetic oligonucleotide: BID-4205
cgcacaucauugccagugcucu

SEQ ID NO: 43584 - RNA, 23 nt, Artificial Sequence
  Synthetic oligonucleotide: BID-4206
ccgcacaucauugccagugcucu

SEQ ID NO: 43585 - RNA, 24 nt, Artificial Sequence
  Synthetic oligonucleotide: BID-4207
uccgcacaucauugccagugcucu

SEQ ID NO: 43586 - RNA, 18 nt, Artificial Sequence
  Synthetic oligonucleotide: BID-4208
gcgggggcgcgggcgcgu

SEQ ID NO: 43587 - RNA, 19 nt, Artificial Sequence
  Synthetic oligonucleotide: BID-4209
cgcgggggcgcgggcgcgu

SEQ ID NO: 43588 - RNA, 20 nt, Artificial Sequence
  Synthetic oligonucleotide: BID-1453
ccgcgggggcgcgggcgcgu

SEQ ID NO: 43589 - RNA, 21 nt, Artificial Sequence
  Synthetic oligonucleotide: BID-4210
gccgcgggggcgcgggcgcgu

SEQ ID NO: 43590 - RNA, 22 nt, Artificial Sequence
  Synthetic oligonucleotide: BID-4211
agccgcgggggcgcgggcgcgu

SEQ ID NO: 43591 - RNA, 23 nt, Artificial Sequence
  Synthetic oligonucleotide: BID-4212
cagccgcgggggcgcgggcgcgu

SEQ ID NO: 43592 - RNA, 24 nt, Artificial Sequence
  Synthetic oligonucleotide: BID-4213
ccagccgcgggggcgcgggcgcgu

SEQ ID NO: 43593 - RNA, 18 nt, Artificial Sequence
  Synthetic oligonucleotide: BID-4214
ugcuggaaagaccacggu

SEQ ID NO: 43594 - RNA, 19 nt, Artificial Sequence
  Synthetic oligonucleotide: BID-4215
gugcuggaaagaccacggu

SEQ ID NO: 43595 - RNA, 20 nt, Artificial Sequence
  Synthetic oligonucleotide: BID-1398
ggugcuggaaagaccacggu

SEQ ID NO: 43596 - RNA, 21 nt, Artificial Sequence
  Synthetic oligonucleotide: BID-4216
cggugcuggaaagaccacggu

SEQ ID NO: 43597 - RNA, 22 nt, Artificial Sequence
  Synthetic oligonucleotide: BID-4217
gcggugcuggaaagaccacggu

SEQ ID NO: 43598 - RNA, 23 nt, Artificial Sequence
  Synthetic oligonucleotide: BID-4218
ugcggugcuggaaagaccacggu

SEQ ID NO: 43599 - RNA, 24 nt, Artificial Sequence
  Synthetic oligonucleotide: BID-4219
cugcggugcuggaaagaccacggu

SEQ ID NO: 43600 - RNA, 18 nt, Artificial Sequence
  Synthetic oligonucleotide: BID-4220
cuugguggcugagggcuu

SEQ ID NO: 43601 - RNA, 19 nt, Artificial Sequence
  Synthetic oligonucleotide: BID-4221
acuugguggcugagggcuu

SEQ ID NO: 43602 - RNA, 20 nt, Artificial Sequence
  Synthetic oligonucleotide: BID-1380
cacuugguggcugagggcuu

SEQ ID NO: 43603 - RNA, 21 nt, Artificial Sequence
  Synthetic oligonucleotide: BID-4222
ccacuugguggcugagggcuu

SEQ ID NO: 43604 - RNA, 22 nt, Artificial Sequence
  Synthetic oligonucleotide: BID-4223
gccacuugguggcugagggcuu

SEQ ID NO: 43605 - RNA, 23 nt, Artificial Sequence
  Synthetic oligonucleotide: BID-4224
agccacuugguggcugagggcuu

SEQ ID NO: 43606 - RNA, 24 nt, Artificial Sequence
  Synthetic oligonucleotide: BID-4225
cagccacuugguggcugagggcuu

SEQ ID NO: 43607 - RNA, 18 nt, Artificial Sequence
  Synthetic oligonucleotide: BID-3075
acagugcggauucuguaa

SEQ ID NO: 43608 - RNA, 19 nt, Artificial Sequence
  Synthetic oligonucleotide: BID-3076
cacagugcggauucuguaa

SEQ ID NO: 43609 - RNA, 20 nt, Artificial Sequence
  Synthetic oligonucleotide: BID-373
gcacagugcggauucuguaa

SEQ ID NO: 43610 - RNA, 21 nt, Artificial Sequence
  Synthetic oligonucleotide: BID-3077
agcacagugcggauucuguaa

SEQ ID NO: 43611 - RNA, 22 nt, Artificial Sequence
  Synthetic oligonucleotide: BID-3078
gagcacagugcggauucuguaa

SEQ ID NO: 43612 - RNA, 23 nt, Artificial Sequence
  Synthetic oligonucleotide: BID-3079
ggagcacagugcggauucuguaa

SEQ ID NO: 43613 - RNA, 24 nt, Artificial Sequence
  Synthetic oligonucleotide: BID-3080
aggagcacagugcggauucuguaa

SEQ ID NO: 43614 - RNA, 18 nt, Artificial Sequence
  Synthetic oligonucleotide: BID-4226
aguggcugaaugacccca

SEQ ID NO: 43615 - RNA, 19 nt, Artificial Sequence
  Synthetic oligonucleotide: BID-4227
gaguggcugaaugacccca

SEQ ID NO: 43616 - RNA, 20 nt, Artificial Sequence
  Synthetic oligonucleotide: BID-2096
ugaguggcugaaugacccca

SEQ ID NO: 43617 - RNA, 21 nt, Artificial Sequence
  Synthetic oligonucleotide: BID-4228
uugaguggcugaaugacccca

SEQ ID NO: 43618 - RNA, 22 nt, Artificial Sequence
  Synthetic oligonucleotide: BID-4229
guugaguggcugaaugacccca

SEQ ID NO: 43619 - RNA, 23 nt, Artificial Sequence
  Synthetic oligonucleotide: BID-4230
uguugaguggcugaaugacccca

SEQ ID NO: 43620 - RNA, 24 nt, Artificial Sequence
  Synthetic oligonucleotide: BID-4231
cuguugaguggcugaaugacccca

SEQ ID NO: 43621 - RNA, 18 nt, Artificial Sequence
  Synthetic oligonucleotide: BID-4232
cgaccgcggugggagcca

SEQ ID NO: 43622 - RNA, 19 nt, Artificial Sequence
  Synthetic oligonucleotide: BID-4233
ccgaccgcggugggagcca

SEQ ID NO: 43623 - RNA, 20 nt, Artificial Sequence
  Synthetic oligonucleotide: BID-1137
cccgaccgcggugggagcca

SEQ ID NO: 43624 - RNA, 21 nt, Artificial Sequence
  Synthetic oligonucleotide: BID-4234
gcccgaccgcggugggagcca

SEQ ID NO: 43625 - RNA, 22 nt, Artificial Sequence
  Synthetic oligonucleotide: BID-4235
ggcccgaccgcggugggagcca

SEQ ID NO: 43626 - RNA, 23 nt, Artificial Sequence
  Synthetic oligonucleotide: BID-4236
gggcccgaccgcggugggagcca

SEQ ID NO: 43627 - RNA, 24 nt, Artificial Sequence
  Synthetic oligonucleotide: BID-4237
ugggcccgaccgcggugggagcca

SEQ ID NO: 43628 - RNA, 18 nt, Artificial Sequence
  Synthetic oligonucleotide: BID-3111
augauggcucggugggca

SEQ ID NO: 43629 - RNA, 19 nt, Artificial Sequence
  Synthetic oligonucleotide: BID-3112
caugauggcucggugggca

SEQ ID NO: 43630 - RNA, 20 nt, Artificial Sequence
  Synthetic oligonucleotide: BID-364
ucaugauggcucggugggca

SEQ ID NO: 43631 - RNA, 21 nt, Artificial Sequence
  Synthetic oligonucleotide: BID-3113
gucaugauggcucggugggca

SEQ ID NO: 43632 - RNA, 22 nt, Artificial Sequence
  Synthetic oligonucleotide: BID-3114
ggucaugauggcucggugggca

SEQ ID NO: 43633 - RNA, 23 nt, Artificial Sequence
  Synthetic oligonucleotide: BID-3115
gggucaugauggcucggugggca

SEQ ID NO: 43634 - RNA, 24 nt, Artificial Sequence
  Synthetic oligonucleotide: BID-3116
ggggucaugauggcucggugggca

SEQ ID NO: 43635 - RNA, 18 nt, Artificial Sequence
  Synthetic oligonucleotide: BID-4238
acguggccuggggauuca

SEQ ID NO: 43636 - RNA, 19 nt, Artificial Sequence
  Synthetic oligonucleotide: BID-4239
cacguggccuggggauuca

SEQ ID NO: 43637 - RNA, 20 nt, Artificial Sequence
  Synthetic oligonucleotide: BID-2050
ccacguggccuggggauuca

SEQ ID NO: 43638 - RNA, 21 nt, Artificial Sequence
  Synthetic oligonucleotide: BID-4240
uccacguggccuggggauuca

SEQ ID NO: 43639 - RNA, 22 nt, Artificial Sequence
  Synthetic oligonucleotide: BID-4241
cuccacguggccuggggauuca

SEQ ID NO: 43640 - RNA, 23 nt, Artificial Sequence
  Synthetic oligonucleotide: BID-4242
ucuccacguggccuggggauuca

SEQ ID NO: 43641 - RNA, 24 nt, Artificial Sequence
  Synthetic oligonucleotide: BID-4243
cucuccacguggccuggggauuca

SEQ ID NO: 43642 - RNA, 18 nt, Artificial Sequence
  Synthetic oligonucleotide: BID-4244
ccugccggcuccucccga

SEQ ID NO: 43643 - RNA, 19 nt, Artificial Sequence
  Synthetic oligonucleotide: BID-4245
accugccggcuccucccga

SEQ ID NO: 43644 - RNA, 20 nt, Artificial Sequence
  Synthetic oligonucleotide: BID-1196
caccugccggcuccucccga

SEQ ID NO: 43645 - RNA, 21 nt, Artificial Sequence
  Synthetic oligonucleotide: BID-4246
acaccugccggcuccucccga

SEQ ID NO: 43646 - RNA, 22 nt, Artificial Sequence
  Synthetic oligonucleotide: BID-4247
gacaccugccggcuccucccga

SEQ ID NO: 43647 - RNA, 23 nt, Artificial Sequence
  Synthetic oligonucleotide: BID-4248
agacaccugccggcuccucccga

SEQ ID NO: 43648 - RNA, 24 nt, Artificial Sequence
  Synthetic oligonucleotide: BID-4249
cagacaccugccggcuccucccga

SEQ ID NO: 43649 - RNA, 18 nt, Artificial Sequence
  Synthetic oligonucleotide: BID-4250
ccgggcguggggggccga

SEQ ID NO: 43650 - RNA, 19 nt, Artificial Sequence
  Synthetic oligonucleotide: BID-4251
cccgggcguggggggccga

SEQ ID NO: 43651 - RNA, 20 nt, Artificial Sequence
  Synthetic oligonucleotide: BID-3617
gcccgggcguggggggccga

SEQ ID NO: 43652 - RNA, 21 nt, Artificial Sequence
  Synthetic oligonucleotide: BID-4252
ggcccgggcguggggggccga

SEQ ID NO: 43653 - RNA, 22 nt, Artificial Sequence
  Synthetic oligonucleotide: BID-4253
gggcccgggcguggggggccga

SEQ ID NO: 43654 - RNA, 23 nt, Artificial Sequence
  Synthetic oligonucleotide: BID-4254
cgggcccgggcguggggggccga

SEQ ID NO: 43655 - RNA, 24 nt, Artificial Sequence
  Synthetic oligonucleotide: BID-4255
gcgggcccgggcguggggggccga

SEQ ID NO: 43656 - RNA, 18 nt, Artificial Sequence
  Synthetic oligonucleotide: BID-4256
gcggugggagccagagga

SEQ ID NO: 43657 - RNA, 19 nt, Artificial Sequence
  Synthetic oligonucleotide: BID-4257
cgcggugggagccagagga

SEQ ID NO: 43658 - RNA, 20 nt, Artificial Sequence
  Synthetic oligonucleotide: BID-2015
ccgcggugggagccagagga

SEQ ID NO: 43659 - RNA, 21 nt, Artificial Sequence
  Synthetic oligonucleotide: BID-4258
accgcggugggagccagagga

SEQ ID NO: 43660 - RNA, 22 nt, Artificial Sequence
  Synthetic oligonucleotide: BID-4259
gaccgcggugggagccagagga

SEQ ID NO: 43661 - RNA, 23 nt, Artificial Sequence
  Synthetic oligonucleotide: BID-4260
cgaccgcggugggagccagagga

SEQ ID NO: 43662 - RNA, 24 nt, Artificial Sequence
  Synthetic oligonucleotide: BID-4261
ccgaccgcggugggagccagagga

SEQ ID NO: 43663 - RNA, 18 nt, Artificial Sequence
  Synthetic oligonucleotide: BID-4262
gccgaggccagccccgga

SEQ ID NO: 43664 - RNA, 19 nt, Artificial Sequence
  Synthetic oligonucleotide: BID-4263
ggccgaggccagccccgga

SEQ ID NO: 43665 - RNA, 20 nt, Artificial Sequence
  Synthetic oligonucleotide: BID-1187
gggccgaggccagccccgga

SEQ ID NO: 43666 - RNA, 21 nt, Artificial Sequence
  Synthetic oligonucleotide: BID-4264
ggggccgaggccagccccgga

SEQ ID NO: 43667 - RNA, 22 nt, Artificial Sequence
  Synthetic oligonucleotide: BID-4265
aggggccgaggccagccccgga

SEQ ID NO: 43668 - RNA, 23 nt, Artificial Sequence
  Synthetic oligonucleotide: BID-4266
gaggggccgaggccagccccgga

SEQ ID NO: 43669 - RNA, 24 nt, Artificial Sequence
  Synthetic oligonucleotide: BID-4267
ggaggggccgaggccagccccgga

SEQ ID NO: 43670 - RNA, 18 nt, Artificial Sequence
  Synthetic oligonucleotide: BID-4268
gccacccuugccggcgga

SEQ ID NO: 43671 - RNA, 19 nt, Artificial Sequence
  Synthetic oligonucleotide: BID-4269
ggccacccuugccggcgga

SEQ ID NO: 43672 - RNA, 20 nt, Artificial Sequence
  Synthetic oligonucleotide: BID-1193
aggccacccuugccggcgga

SEQ ID NO: 43673 - RNA, 21 nt, Artificial Sequence
  Synthetic oligonucleotide: BID-4270
caggccacccuugccggcgga

SEQ ID NO: 43674 - RNA, 22 nt, Artificial Sequence
  Synthetic oligonucleotide: BID-4271
gcaggccacccuugccggcgga

SEQ ID NO: 43675 - RNA, 23 nt, Artificial Sequence
  Synthetic oligonucleotide: BID-4272
ugcaggccacccuugccggcgga

SEQ ID NO: 43676 - RNA, 24 nt, Artificial Sequence
  Synthetic oligonucleotide: BID-4273
gugcaggccacccuugccggcgga

SEQ ID NO: 43677 - RNA, 18 nt, Artificial Sequence
  Synthetic oligonucleotide: BID-4274
gggugcggggcgcgggga

SEQ ID NO: 43678 - RNA, 19 nt, Artificial Sequence
  Synthetic oligonucleotide: BID-4275
ggggugcggggcgcgggga

SEQ ID NO: 43679 - RNA, 20 nt, Artificial Sequence
  Synthetic oligonucleotide: BID-2062
aggggugcggggcgcgggga

SEQ ID NO: 43680 - RNA, 21 nt, Artificial Sequence
  Synthetic oligonucleotide: BID-4276
gaggggugcggggcgcgggga

SEQ ID NO: 43681 - RNA, 22 nt, Artificial Sequence
  Synthetic oligonucleotide: BID-4277
ggaggggugcggggcgcgggga

SEQ ID NO: 43682 - RNA, 23 nt, Artificial Sequence
  Synthetic oligonucleotide: BID-4278
gggaggggugcggggcgcgggga

SEQ ID NO: 43683 - RNA, 24 nt, Artificial Sequence
  Synthetic oligonucleotide: BID-4279
ggggaggggugcggggcgcgggga

SEQ ID NO: 43684 - RNA, 18 nt, Artificial Sequence
  Synthetic oligonucleotide: BID-4280
agcgcgcggggcgccaua

SEQ ID NO: 43685 - RNA, 19 nt, Artificial Sequence
  Synthetic oligonucleotide: BID-4281
aagcgcgcggggcgccaua

SEQ ID NO: 43686 - RNA, 20 nt, Artificial Sequence
  Synthetic oligonucleotide: BID-1988
gaagcgcgcggggcgccaua

SEQ ID NO: 43687 - RNA, 21 nt, Artificial Sequence
  Synthetic oligonucleotide: BID-4282
ggaagcgcgcggggcgccaua

SEQ ID NO: 43688 - RNA, 22 nt, Artificial Sequence
  Synthetic oligonucleotide: BID-4283
aggaagcgcgcggggcgccaua

SEQ ID NO: 43689 - RNA, 23 nt, Artificial Sequence
  Synthetic oligonucleotide: BID-4284
gaggaagcgcgcggggcgccaua

SEQ ID NO: 43690 - RNA, 24 nt, Artificial Sequence
  Synthetic oligonucleotide: BID-4285
ggaggaagcgcgcggggcgccaua

SEQ ID NO: 43691 - RNA, 18 nt, Artificial Sequence
  Synthetic oligonucleotide: BID-4286
ggucagagcggccgcuua

SEQ ID NO: 43692 - RNA, 19 nt, Artificial Sequence
  Synthetic oligonucleotide: BID-4287
cggucagagcggccgcuua

SEQ ID NO: 43693 - RNA, 20 nt, Artificial Sequence
  Synthetic oligonucleotide: BID-1200
gcggucagagcggccgcuua

SEQ ID NO: 43694 - RNA, 21 nt, Artificial Sequence
  Synthetic oligonucleotide: BID-4288
cgcggucagagcggccgcuua

SEQ ID NO: 43695 - RNA, 22 nt, Artificial Sequence
  Synthetic oligonucleotide: BID-4289
gcgcggucagagcggccgcuua

SEQ ID NO: 43696 - RNA, 23 nt, Artificial Sequence
  Synthetic oligonucleotide: BID-4290
agcgcggucagagcggccgcuua

SEQ ID NO: 43697 - RNA, 24 nt, Artificial Sequence
  Synthetic oligonucleotide: BID-4291
aagcgcggucagagcggccgcuua

SEQ ID NO: 43698 - RNA, 18 nt, Artificial Sequence
  Synthetic oligonucleotide: BID-4292
ccaggccucagcagcgac

SEQ ID NO: 43699 - RNA, 19 nt, Artificial Sequence
  Synthetic oligonucleotide: BID-4293
cccaggccucagcagcgac

SEQ ID NO: 43700 - RNA, 20 nt, Artificial Sequence
  Synthetic oligonucleotide: BID-1148
ccccaggccucagcagcgac

SEQ ID NO: 43701 - RNA, 21 nt, Artificial Sequence
  Synthetic oligonucleotide: BID-4294
gccccaggccucagcagcgac

SEQ ID NO: 43702 - RNA, 22 nt, Artificial Sequence
  Synthetic oligonucleotide: BID-4295
agccccaggccucagcagcgac

SEQ ID NO: 43703 - RNA, 23 nt, Artificial Sequence
  Synthetic oligonucleotide: BID-4296
gagccccaggccucagcagcgac

SEQ ID NO: 43704 - RNA, 24 nt, Artificial Sequence
  Synthetic oligonucleotide: BID-4297
agagccccaggccucagcagcgac

SEQ ID NO: 43705 - RNA, 18 nt, Artificial Sequence
  Synthetic oligonucleotide: BID-4298
gucagagcggccgcuuac

SEQ ID NO: 43706 - RNA, 19 nt, Artificial Sequence
  Synthetic oligonucleotide: BID-4299
ggucagagcggccgcuuac

SEQ ID NO: 43707 - RNA, 20 nt, Artificial Sequence
  Synthetic oligonucleotide: BID-2087
cggucagagcggccgcuuac

SEQ ID NO: 43708 - RNA, 21 nt, Artificial Sequence
  Synthetic oligonucleotide: BID-4300
gcggucagagcggccgcuuac

SEQ ID NO: 43709 - RNA, 22 nt, Artificial Sequence
  Synthetic oligonucleotide: BID-4301
cgcggucagagcggccgcuuac

SEQ ID NO: 43710 - RNA, 23 nt, Artificial Sequence
  Synthetic oligonucleotide: BID-4302
gcgcggucagagcggccgcuuac

SEQ ID NO: 43711 - RNA, 24 nt, Artificial Sequence
  Synthetic oligonucleotide: BID-4303
agcgcggucagagcggccgcuuac

SEQ ID NO: 43712 - RNA, 18 nt, Artificial Sequence
  Synthetic oligonucleotide: BID-4304
gaaugaccccaggggacc

SEQ ID NO: 43713 - RNA, 19 nt, Artificial Sequence
  Synthetic oligonucleotide: BID-4305
ugaaugaccccaggggacc

SEQ ID NO: 43714 - RNA, 20 nt, Artificial Sequence
  Synthetic oligonucleotide: BID-1212
cugaaugaccccaggggacc

SEQ ID NO: 43715 - RNA, 21 nt, Artificial Sequence
  Synthetic oligonucleotide: BID-4306
gcugaaugaccccaggggacc

SEQ ID NO: 43716 - RNA, 22 nt, Artificial Sequence
  Synthetic oligonucleotide: BID-4307
ggcugaaugaccccaggggacc

SEQ ID NO: 43717 - RNA, 23 nt, Artificial Sequence
  Synthetic oligonucleotide: BID-4308
uggcugaaugaccccaggggacc

SEQ ID NO: 43718 - RNA, 24 nt, Artificial Sequence
  Synthetic oligonucleotide: BID-4309
guggcugaaugaccccaggggacc

SEQ ID NO: 43719 - RNA, 18 nt, Artificial Sequence
  Synthetic oligonucleotide: BID-4310
ccggagaggagaaaaccc

SEQ ID NO: 43720 - RNA, 19 nt, Artificial Sequence
  Synthetic oligonucleotide: BID-4311
cccggagaggagaaaaccc

SEQ ID NO: 43721 - RNA, 20 nt, Artificial Sequence
  Synthetic oligonucleotide: BID-1190
ccccggagaggagaaaaccc

SEQ ID NO: 43722 - RNA, 21 nt, Artificial Sequence
  Synthetic oligonucleotide: BID-4312
gccccggagaggagaaaaccc

SEQ ID NO: 43723 - RNA, 22 nt, Artificial Sequence
  Synthetic oligonucleotide: BID-4313
agccccggagaggagaaaaccc

SEQ ID NO: 43724 - RNA, 23 nt, Artificial Sequence
  Synthetic oligonucleotide: BID-4314
cagccccggagaggagaaaaccc

SEQ ID NO: 43725 - RNA, 24 nt, Artificial Sequence
  Synthetic oligonucleotide: BID-4315
ccagccccggagaggagaaaaccc

SEQ ID NO: 43726 - RNA, 18 nt, Artificial Sequence
  Synthetic oligonucleotide: BID-4316
aaugaccccaggggaccc

SEQ ID NO: 43727 - RNA, 19 nt, Artificial Sequence
  Synthetic oligonucleotide: BID-4317
gaaugaccccaggggaccc

SEQ ID NO: 43728 - RNA, 20 nt, Artificial Sequence
  Synthetic oligonucleotide: BID-2098
ugaaugaccccaggggaccc

SEQ ID NO: 43729 - RNA, 21 nt, Artificial Sequence
  Synthetic oligonucleotide: BID-4318
cugaaugaccccaggggaccc

SEQ ID NO: 43730 - RNA, 22 nt, Artificial Sequence
  Synthetic oligonucleotide: BID-4319
gcugaaugaccccaggggaccc

SEQ ID NO: 43731 - RNA, 23 nt, Artificial Sequence
  Synthetic oligonucleotide: BID-4320
ggcugaaugaccccaggggaccc

SEQ ID NO: 43732 - RNA, 24 nt, Artificial Sequence
  Synthetic oligonucleotide: BID-4321
uggcugaaugaccccaggggaccc

SEQ ID NO: 43733 - RNA, 18 nt, Artificial Sequence
  Synthetic oligonucleotide: BID-4322
ugaguggcugaaugaccc

SEQ ID NO: 43734 - RNA, 19 nt, Artificial Sequence
  Synthetic oligonucleotide: BID-4323
uugaguggcugaaugaccc

SEQ ID NO: 43735 - RNA, 20 nt, Artificial Sequence
  Synthetic oligonucleotide: BID-1209
guugaguggcugaaugaccc

SEQ ID NO: 43736 - RNA, 21 nt, Artificial Sequence
  Synthetic oligonucleotide: BID-4324
uguugaguggcugaaugaccc

SEQ ID NO: 43737 - RNA, 22 nt, Artificial Sequence
  Synthetic oligonucleotide: BID-4325
cuguugaguggcugaaugaccc

SEQ ID NO: 43738 - RNA, 23 nt, Artificial Sequence
  Synthetic oligonucleotide: BID-4326
acuguugaguggcugaaugaccc

SEQ ID NO: 43739 - RNA, 24 nt, Artificial Sequence
  Synthetic oligonucleotide: BID-4327
aacuguugaguggcugaaugaccc

SEQ ID NO: 43740 - RNA, 18 nt, Artificial Sequence
  Synthetic oligonucleotide: BID-4328
gaguggcugaaugacccc

SEQ ID NO: 43741 - RNA, 19 nt, Artificial Sequence
  Synthetic oligonucleotide: BID-4329
ugaguggcugaaugacccc

SEQ ID NO: 43742 - RNA, 20 nt, Artificial Sequence
  Synthetic oligonucleotide: BID-2095
uugaguggcugaaugacccc

SEQ ID NO: 43743 - RNA, 21 nt, Artificial Sequence
  Synthetic oligonucleotide: BID-4330
guugaguggcugaaugacccc

SEQ ID NO: 43744 - RNA, 22 nt, Artificial Sequence
  Synthetic oligonucleotide: BID-4331
uguugaguggcugaaugacccc

SEQ ID NO: 43745 - RNA, 23 nt, Artificial Sequence
  Synthetic oligonucleotide: BID-4332
cuguugaguggcugaaugacccc

SEQ ID NO: 43746 - RNA, 24 nt, Artificial Sequence
  Synthetic oligonucleotide: BID-4333
acuguugaguggcugaaugacccc

SEQ ID NO: 43747 - RNA, 18 nt, Artificial Sequence
  Synthetic oligonucleotide: BID-4334
aggggccgaggccagccc

SEQ ID NO: 43748 - RNA, 19 nt, Artificial Sequence
  Synthetic oligonucleotide: BID-4335
gaggggccgaggccagccc

SEQ ID NO: 43749 - RNA, 20 nt, Artificial Sequence
  Synthetic oligonucleotide: BID-2069
ggaggggccgaggccagccc

SEQ ID NO: 43750 - RNA, 21 nt, Artificial Sequence
  Synthetic oligonucleotide: BID-4336
gggaggggccgaggccagccc

SEQ ID NO: 43751 - RNA, 22 nt, Artificial Sequence
  Synthetic oligonucleotide: BID-4337
ggggaggggccgaggccagccc

SEQ ID NO: 43752 - RNA, 23 nt, Artificial Sequence
  Synthetic oligonucleotide: BID-4338
gggggaggggccgaggccagccc

SEQ ID NO: 43753 - RNA, 24 nt, Artificial Sequence
  Synthetic oligonucleotide: BID-4339
agggggaggggccgaggccagccc

SEQ ID NO: 43754 - RNA, 18 nt, Artificial Sequence
  Synthetic oligonucleotide: BID-4340
gaggggccgaggccagcc

SEQ ID NO: 43755 - RNA, 19 nt, Artificial Sequence
  Synthetic oligonucleotide: BID-4341
ggaggggccgaggccagcc

SEQ ID NO: 43756 - RNA, 20 nt, Artificial Sequence
  Synthetic oligonucleotide: BID-1184
gggaggggccgaggccagcc

SEQ ID NO: 43757 - RNA, 21 nt, Artificial Sequence
  Synthetic oligonucleotide: BID-4342
ggggaggggccgaggccagcc

SEQ ID NO: 43758 - RNA, 22 nt, Artificial Sequence
  Synthetic oligonucleotide: BID-4343
gggggaggggccgaggccagcc

SEQ ID NO: 43759 - RNA, 23 nt, Artificial Sequence
  Synthetic oligonucleotide: BID-4344
agggggaggggccgaggccagcc

SEQ ID NO: 43760 - RNA, 24 nt, Artificial Sequence
  Synthetic oligonucleotide: BID-4345
gagggggaggggccgaggccagcc

SEQ ID NO: 43761 - RNA, 18 nt, Artificial Sequence
  Synthetic oligonucleotide: BID-4346
cagggcccgccgcccgcc

SEQ ID NO: 43762 - RNA, 19 nt, Artificial Sequence
  Synthetic oligonucleotide: BID-4347
ucagggcccgccgcccgcc

SEQ ID NO: 43763 - RNA, 20 nt, Artificial Sequence
  Synthetic oligonucleotide: BID-1132
cucagggcccgccgcccgcc

SEQ ID NO: 43764 - RNA, 21 nt, Artificial Sequence
  Synthetic oligonucleotide: BID-4348
gcucagggcccgccgcccgcc

SEQ ID NO: 43765 - RNA, 22 nt, Artificial Sequence
  Synthetic oligonucleotide: BID-4349
agcucagggcccgccgcccgcc

SEQ ID NO: 43766 - RNA, 23 nt, Artificial Sequence
  Synthetic oligonucleotide: BID-4350
gagcucagggcccgccgcccgcc

SEQ ID NO: 43767 - RNA, 24 nt, Artificial Sequence
  Synthetic oligonucleotide: BID-4351
ggagcucagggcccgccgcccgcc

SEQ ID NO: 43768 - RNA, 18 nt, Artificial Sequence
  Synthetic oligonucleotide: BID-4352
cugagggucggguccgcc

SEQ ID NO: 43769 - RNA, 19 nt, Artificial Sequence
  Synthetic oligonucleotide: BID-4353
gcugagggucggguccgcc

SEQ ID NO: 43770 - RNA, 20 nt, Artificial Sequence
  Synthetic oligonucleotide: BID-1155
ugcugagggucggguccgcc

SEQ ID NO: 43771 - RNA, 21 nt, Artificial Sequence
  Synthetic oligonucleotide: BID-4354
gugcugagggucggguccgcc

SEQ ID NO: 43772 - RNA, 22 nt, Artificial Sequence
  Synthetic oligonucleotide: BID-4355
ggugcugagggucggguccgcc

SEQ ID NO: 43773 - RNA, 23 nt, Artificial Sequence
  Synthetic oligonucleotide: BID-4356
cggugcugagggucggguccgcc

SEQ ID NO: 43774 - RNA, 24 nt, Artificial Sequence
  Synthetic oligonucleotide: BID-4357
ucggugcugagggucggguccgcc

SEQ ID NO: 43775 - RNA, 18 nt, Artificial Sequence
  Synthetic oligonucleotide: BID-4358
cgaccguguccgcgcgcc

SEQ ID NO: 43776 - RNA, 19 nt, Artificial Sequence
  Synthetic oligonucleotide: BID-4359
ucgaccguguccgcgcgcc

SEQ ID NO: 43777 - RNA, 20 nt, Artificial Sequence
  Synthetic oligonucleotide: BID-1992
gucgaccguguccgcgcgcc

SEQ ID NO: 43778 - RNA, 21 nt, Artificial Sequence
  Synthetic oligonucleotide: BID-4360
agucgaccguguccgcgcgcc

SEQ ID NO: 43779 - RNA, 22 nt, Artificial Sequence
  Synthetic oligonucleotide: BID-4361
uagucgaccguguccgcgcgcc

SEQ ID NO: 43780 - RNA, 23 nt, Artificial Sequence
  Synthetic oligonucleotide: BID-4362
guagucgaccguguccgcgcgcc

SEQ ID NO: 43781 - RNA, 24 nt, Artificial Sequence
  Synthetic oligonucleotide: BID-4363
gguagucgaccguguccgcgcgcc

SEQ ID NO: 43782 - RNA, 18 nt, Artificial Sequence
  Synthetic oligonucleotide: BID-4364
uguccucuccacguggcc

SEQ ID NO: 43783 - RNA, 19 nt, Artificial Sequence
  Synthetic oligonucleotide: BID-4365
guguccucuccacguggcc

SEQ ID NO: 43784 - RNA, 20 nt, Artificial Sequence
  Synthetic oligonucleotide: BID-2046
uguguccucuccacguggcc

SEQ ID NO: 43785 - RNA, 21 nt, Artificial Sequence
  Synthetic oligonucleotide: BID-4366
uuguguccucuccacguggcc

SEQ ID NO: 43786 - RNA, 22 nt, Artificial Sequence
  Synthetic oligonucleotide: BID-4367
guuguguccucuccacguggcc

SEQ ID NO: 43787 - RNA, 23 nt, Artificial Sequence
  Synthetic oligonucleotide: BID-4368
uguuguguccucuccacguggcc

SEQ ID NO: 43788 - RNA, 24 nt, Artificial Sequence
  Synthetic oligonucleotide: BID-4369
uuguuguguccucuccacguggcc

SEQ ID NO: 43789 - RNA, 18 nt, Artificial Sequence
  Synthetic oligonucleotide: BID-3239
gauggcucggugggcagc

SEQ ID NO: 43790 - RNA, 19 nt, Artificial Sequence
  Synthetic oligonucleotide: BID-3240
ugauggcucggugggcagc

SEQ ID NO: 43791 - RNA, 20 nt, Artificial Sequence
  Synthetic oligonucleotide: BID-365
augauggcucggugggcagc

SEQ ID NO: 43792 - RNA, 21 nt, Artificial Sequence
  Synthetic oligonucleotide: BID-3241
caugauggcucggugggcagc

SEQ ID NO: 43793 - RNA, 22 nt, Artificial Sequence
  Synthetic oligonucleotide: BID-3242
ucaugauggcucggugggcagc

SEQ ID NO: 43794 - RNA, 23 nt, Artificial Sequence
  Synthetic oligonucleotide: BID-3243
gucaugauggcucggugggcagc

SEQ ID NO: 43795 - RNA, 24 nt, Artificial Sequence
  Synthetic oligonucleotide: BID-3244
ggucaugauggcucggugggcagc

SEQ ID NO: 43796 - RNA, 18 nt, Artificial Sequence
  Synthetic oligonucleotide: BID-4370
cccgaccgcggugggagc

SEQ ID NO: 43797 - RNA, 19 nt, Artificial Sequence
  Synthetic oligonucleotide: BID-4371
gcccgaccgcggugggagc

SEQ ID NO: 43798 - RNA, 20 nt, Artificial Sequence
  Synthetic oligonucleotide: BID-1136
ggcccgaccgcggugggagc

SEQ ID NO: 43799 - RNA, 21 nt, Artificial Sequence
  Synthetic oligonucleotide: BID-4372
gggcccgaccgcggugggagc

SEQ ID NO: 43800 - RNA, 22 nt, Artificial Sequence
  Synthetic oligonucleotide: BID-4373
ugggcccgaccgcggugggagc

SEQ ID NO: 43801 - RNA, 23 nt, Artificial Sequence
  Synthetic oligonucleotide: BID-4374
cugggcccgaccgcggugggagc

SEQ ID NO: 43802 - RNA, 24 nt, Artificial Sequence
  Synthetic oligonucleotide: BID-4375
ccugggcccgaccgcggugggagc

SEQ ID NO: 43803 - RNA, 18 nt, Artificial Sequence
  Synthetic oligonucleotide: BID-4376
cucccgccuccccuccgc

SEQ ID NO: 43804 - RNA, 19 nt, Artificial Sequence
  Synthetic oligonucleotide: BID-4377
ucucccgccuccccuccgc

SEQ ID NO: 43805 - RNA, 20 nt, Artificial Sequence
  Synthetic oligonucleotide: BID-1151
cucucccgccuccccuccgc

SEQ ID NO: 43806 - RNA, 21 nt, Artificial Sequence
  Synthetic oligonucleotide: BID-4378
ucucucccgccuccccuccgc

SEQ ID NO: 43807 - RNA, 22 nt, Artificial Sequence
  Synthetic oligonucleotide: BID-4379
gucucucccgccuccccuccgc

SEQ ID NO: 43808 - RNA, 23 nt, Artificial Sequence
  Synthetic oligonucleotide: BID-4380
ggucucucccgccuccccuccgc

SEQ ID NO: 43809 - RNA, 24 nt, Artificial Sequence
  Synthetic oligonucleotide: BID-4381
gggucucucccgccuccccuccgc

SEQ ID NO: 43810 - RNA, 18 nt, Artificial Sequence
  Synthetic oligonucleotide: BID-4382
ggccgaaggaggaagcgc

SEQ ID NO: 43811 - RNA, 19 nt, Artificial Sequence
  Synthetic oligonucleotide: BID-4383
gggccgaaggaggaagcgc

SEQ ID NO: 43812 - RNA, 20 nt, Artificial Sequence
  Synthetic oligonucleotide: BID-4384
ggggccgaaggaggaagcgc

SEQ ID NO: 43813 - RNA, 21 nt, Artificial Sequence
  Synthetic oligonucleotide: BID-4385
gggggccgaaggaggaagcgc

SEQ ID NO: 43814 - RNA, 22 nt, Artificial Sequence
  Synthetic oligonucleotide: BID-4386
ggggggccgaaggaggaagcgc

SEQ ID NO: 43815 - RNA, 23 nt, Artificial Sequence
  Synthetic oligonucleotide: BID-4387
uggggggccgaaggaggaagcgc

SEQ ID NO: 43816 - RNA, 24 nt, Artificial Sequence
  Synthetic oligonucleotide: BID-4388
guggggggccgaaggaggaagcgc

SEQ ID NO: 43817 - RNA, 18 nt, Artificial Sequence
  Synthetic oligonucleotide: BID-4389
ucgaccguguccgcgcgc

SEQ ID NO: 43818 - RNA, 19 nt, Artificial Sequence
  Synthetic oligonucleotide: BID-4390
gucgaccguguccgcgcgc

SEQ ID NO: 43819 - RNA, 20 nt, Artificial Sequence
  Synthetic oligonucleotide: BID-1118
agucgaccguguccgcgcgc

SEQ ID NO: 43820 - RNA, 21 nt, Artificial Sequence
  Synthetic oligonucleotide: BID-4391
uagucgaccguguccgcgcgc

SEQ ID NO: 43821 - RNA, 22 nt, Artificial Sequence
  Synthetic oligonucleotide: BID-4392
guagucgaccguguccgcgcgc

SEQ ID NO: 43822 - RNA, 23 nt, Artificial Sequence
  Synthetic oligonucleotide: BID-4393
gguagucgaccguguccgcgcgc

SEQ ID NO: 43823 - RNA, 24 nt, Artificial Sequence
  Synthetic oligonucleotide: BID-4394
ggguagucgaccguguccgcgcgc

SEQ ID NO: 43824 - RNA, 18 nt, Artificial Sequence
  Synthetic oligonucleotide: BID-4395
gggaggggugcggggcgc

SEQ ID NO: 43825 - RNA, 19 nt, Artificial Sequence
  Synthetic oligonucleotide: BID-4396
ggggaggggugcggggcgc

SEQ ID NO: 43826 - RNA, 20 nt, Artificial Sequence
  Synthetic oligonucleotide: BID-2059
aggggaggggugcggggcgc

SEQ ID NO: 43827 - RNA, 21 nt, Artificial Sequence
  Synthetic oligonucleotide: BID-4397
caggggaggggugcggggcgc

SEQ ID NO: 43828 - RNA, 22 nt, Artificial Sequence
  Synthetic oligonucleotide: BID-4398
ucaggggaggggugcggggcgc

SEQ ID NO: 43829 - RNA, 23 nt, Artificial Sequence
  Synthetic oligonucleotide: BID-4399
uucaggggaggggugcggggcgc

SEQ ID NO: 43830 - RNA, 24 nt, Artificial Sequence
  Synthetic oligonucleotide: BID-4400
auucaggggaggggugcggggcgc

SEQ ID NO: 43831 - RNA, 18 nt, Artificial Sequence
  Synthetic oligonucleotide: BID-4401
cggguccgccucggaggc

SEQ ID NO: 43832 - RNA, 19 nt, Artificial Sequence
  Synthetic oligonucleotide: BID-4402
ucggguccgccucggaggc

SEQ ID NO: 43833 - RNA, 20 nt, Artificial Sequence
  Synthetic oligonucleotide: BID-2042
gucggguccgccucggaggc

SEQ ID NO: 43834 - RNA, 21 nt, Artificial Sequence
  Synthetic oligonucleotide: BID-4403
ggucggguccgccucggaggc

SEQ ID NO: 43835 - RNA, 22 nt, Artificial Sequence
  Synthetic oligonucleotide: BID-4404
gggucggguccgccucggaggc

SEQ ID NO: 43836 - RNA, 23 nt, Artificial Sequence
  Synthetic oligonucleotide: BID-4405
agggucggguccgccucggaggc

SEQ ID NO: 43837 - RNA, 24 nt, Artificial Sequence
  Synthetic oligonucleotide: BID-4406
gagggucggguccgccucggaggc

SEQ ID NO: 43838 - RNA, 18 nt, Artificial Sequence
  Synthetic oligonucleotide: BID-4407
agccagaggaggggaggc

SEQ ID NO: 43839 - RNA, 19 nt, Artificial Sequence
  Synthetic oligonucleotide: BID-4408
gagccagaggaggggaggc

SEQ ID NO: 43840 - RNA, 20 nt, Artificial Sequence
  Synthetic oligonucleotide: BID-2019
ggagccagaggaggggaggc

SEQ ID NO: 43841 - RNA, 21 nt, Artificial Sequence
  Synthetic oligonucleotide: BID-4409
gggagccagaggaggggaggc

SEQ ID NO: 43842 - RNA, 22 nt, Artificial Sequence
  Synthetic oligonucleotide: BID-4410
ugggagccagaggaggggaggc

SEQ ID NO: 43843 - RNA, 23 nt, Artificial Sequence
  Synthetic oligonucleotide: BID-4411
gugggagccagaggaggggaggc

SEQ ID NO: 43844 - RNA, 24 nt, Artificial Sequence
  Synthetic oligonucleotide: BID-4412
ggugggagccagaggaggggaggc

SEQ ID NO: 43845 - RNA, 18 nt, Artificial Sequence
  Synthetic oligonucleotide: BID-4413
ccugccgccugccccggc

SEQ ID NO: 43846 - RNA, 19 nt, Artificial Sequence
  Synthetic oligonucleotide: BID-4414
gccugccgccugccccggc

SEQ ID NO: 43847 - RNA, 20 nt, Artificial Sequence
  Synthetic oligonucleotide: BID-1129
ugccugccgccugccccggc

SEQ ID NO: 43848 - RNA, 21 nt, Artificial Sequence
  Synthetic oligonucleotide: BID-4415
cugccugccgccugccccggc

SEQ ID NO: 43849 - RNA, 22 nt, Artificial Sequence
  Synthetic oligonucleotide: BID-4416
ccugccugccgccugccccggc

SEQ ID NO: 43850 - RNA, 23 nt, Artificial Sequence
  Synthetic oligonucleotide: BID-4417
cccugccugccgccugccccggc

SEQ ID NO: 43851 - RNA, 24 nt, Artificial Sequence
  Synthetic oligonucleotide: BID-4418
ccccugccugccgccugccccggc

SEQ ID NO: 43852 - RNA, 18 nt, Artificial Sequence
  Synthetic oligonucleotide: BID-3263
gcgaggggccgggccggc

SEQ ID NO: 43853 - RNA, 19 nt, Artificial Sequence
  Synthetic oligonucleotide: BID-3264
agcgaggggccgggccggc

SEQ ID NO: 43854 - RNA, 20 nt, Artificial Sequence
  Synthetic oligonucleotide: BID-23
cagcgaggggccgggccggc

SEQ ID NO: 43855 - RNA, 21 nt, Artificial Sequence
  Synthetic oligonucleotide: BID-3265
gcagcgaggggccgggccggc

SEQ ID NO: 43856 - RNA, 22 nt, Artificial Sequence
  Synthetic oligonucleotide: BID-3266
ggcagcgaggggccgggccggc

SEQ ID NO: 43857 - RNA, 23 nt, Artificial Sequence
  Synthetic oligonucleotide: BID-3267
gggcagcgaggggccgggccggc

SEQ ID NO: 43858 - RNA, 24 nt, Artificial Sequence
  Synthetic oligonucleotide: BID-3268
ugggcagcgaggggccgggccggc

SEQ ID NO: 43859 - RNA, 18 nt, Artificial Sequence
  Synthetic oligonucleotide: BID-4419
cgcccgcgcccccgcggc

SEQ ID NO: 43860 - RNA, 19 nt, Artificial Sequence
  Synthetic oligonucleotide: BID-4420
gcgcccgcgcccccgcggc

SEQ ID NO: 43861 - RNA, 20 nt, Artificial Sequence
  Synthetic oligonucleotide: BID-1997
cgcgcccgcgcccccgcggc

SEQ ID NO: 43862 - RNA, 21 nt, Artificial Sequence
  Synthetic oligonucleotide: BID-4421
acgcgcccgcgcccccgcggc

SEQ ID NO: 43863 - RNA, 22 nt, Artificial Sequence
  Synthetic oligonucleotide: BID-4422
gacgcgcccgcgcccccgcggc

SEQ ID NO: 43864 - RNA, 23 nt, Artificial Sequence
  Synthetic oligonucleotide: BID-4423
ggacgcgcccgcgcccccgcggc

SEQ ID NO: 43865 - RNA, 24 nt, Artificial Sequence
  Synthetic oligonucleotide: BID-4424
cggacgcgcccgcgcccccgcggc

SEQ ID NO: 43866 - RNA, 18 nt, Artificial Sequence
  Synthetic oligonucleotide: BID-4425
gggagacgcugccucggc

SEQ ID NO: 43867 - RNA, 19 nt, Artificial Sequence
  Synthetic oligonucleotide: BID-4426
ugggagacgcugccucggc

SEQ ID NO: 43868 - RNA, 20 nt, Artificial Sequence
  Synthetic oligonucleotide: BID-1121
cugggagacgcugccucggc

SEQ ID NO: 43869 - RNA, 21 nt, Artificial Sequence
  Synthetic oligonucleotide: BID-4427
ccugggagacgcugccucggc

SEQ ID NO: 43870 - RNA, 22 nt, Artificial Sequence
  Synthetic oligonucleotide: BID-4428
gccugggagacgcugccucggc

SEQ ID NO: 43871 - RNA, 23 nt, Artificial Sequence
  Synthetic oligonucleotide: BID-4429
cgccugggagacgcugccucggc

SEQ ID NO: 43872 - RNA, 24 nt, Artificial Sequence
  Synthetic oligonucleotide: BID-4430
gcgccugggagacgcugccucggc

SEQ ID NO: 43873 - RNA, 18 nt, Artificial Sequence
  Synthetic oligonucleotide: BID-4431
gccggggcgggcccgggc

SEQ ID NO: 43874 - RNA, 19 nt, Artificial Sequence
  Synthetic oligonucleotide: BID-4432
ggccggggcgggcccgggc

SEQ ID NO: 43875 - RNA, 20 nt, Artificial Sequence
  Synthetic oligonucleotide: BID-4433
gggccggggcgggcccgggc

SEQ ID NO: 43876 - RNA, 21 nt, Artificial Sequence
  Synthetic oligonucleotide: BID-4434
cgggccggggcgggcccgggc

SEQ ID NO: 43877 - RNA, 22 nt, Artificial Sequence
  Synthetic oligonucleotide: BID-4435
gcgggccggggcgggcccgggc

SEQ ID NO: 43878 - RNA, 23 nt, Artificial Sequence
  Synthetic oligonucleotide: BID-4436
ggcgggccggggcgggcccgggc

SEQ ID NO: 43879 - RNA, 24 nt, Artificial Sequence
  Synthetic oligonucleotide: BID-4437
gggcgggccggggcgggcccgggc

SEQ ID NO: 43880 - RNA, 18 nt, Artificial Sequence
  Synthetic oligonucleotide: BID-4438
gggcgggccggggcgggc

SEQ ID NO: 43881 - RNA, 19 nt, Artificial Sequence
  Synthetic oligonucleotide: BID-4439
ggggcgggccggggcgggc

SEQ ID NO: 43882 - RNA, 20 nt, Artificial Sequence
  Synthetic oligonucleotide: BID-4440
cggggcgggccggggcgggc

SEQ ID NO: 43883 - RNA, 21 nt, Artificial Sequence
  Synthetic oligonucleotide: BID-4441
ccggggcgggccggggcgggc

SEQ ID NO: 43884 - RNA, 22 nt, Artificial Sequence
  Synthetic oligonucleotide: BID-4442
gccggggcgggccggggcgggc

SEQ ID NO: 43885 - RNA, 23 nt, Artificial Sequence
  Synthetic oligonucleotide: BID-4443
ggccggggcgggccggggcgggc

SEQ ID NO: 43886 - RNA, 24 nt, Artificial Sequence
  Synthetic oligonucleotide: BID-4444
gggccggggcgggccggggcgggc

SEQ ID NO: 43887 - RNA, 20 nt, Artificial Sequence
  Synthetic oligonucleotide: BID-3623
gggggcgggccggggcgggc

SEQ ID NO: 43888 - RNA, 18 nt, Artificial Sequence
  Synthetic oligonucleotide: BID-4445
aggggaggggugcggggc

SEQ ID NO: 43889 - RNA, 19 nt, Artificial Sequence
  Synthetic oligonucleotide: BID-4446
caggggaggggugcggggc

SEQ ID NO: 43890 - RNA, 20 nt, Artificial Sequence
  Synthetic oligonucleotide: BID-1172
ucaggggaggggugcggggc

SEQ ID NO: 43891 - RNA, 21 nt, Artificial Sequence
  Synthetic oligonucleotide: BID-4447
uucaggggaggggugcggggc

SEQ ID NO: 43892 - RNA, 22 nt, Artificial Sequence
  Synthetic oligonucleotide: BID-4448
auucaggggaggggugcggggc

SEQ ID NO: 43893 - RNA, 23 nt, Artificial Sequence
  Synthetic oligonucleotide: BID-4449
gauucaggggaggggugcggggc

SEQ ID NO: 43894 - RNA, 24 nt, Artificial Sequence
  Synthetic oligonucleotide: BID-4450
ggauucaggggaggggugcggggc

SEQ ID NO: 43895 - RNA, 18 nt, Artificial Sequence
  Synthetic oligonucleotide: BID-3275
cggauucuguaagugggc

SEQ ID NO: 43896 - RNA, 19 nt, Artificial Sequence
  Synthetic oligonucleotide: BID-3276
gcggauucuguaagugggc

SEQ ID NO: 43897 - RNA, 20 nt, Artificial Sequence
  Synthetic oligonucleotide: BID-6
ugcggauucuguaagugggc

SEQ ID NO: 43898 - RNA, 21 nt, Artificial Sequence
  Synthetic oligonucleotide: BID-3277
gugcggauucuguaagugggc

SEQ ID NO: 43899 - RNA, 22 nt, Artificial Sequence
  Synthetic oligonucleotide: BID-3278
agugcggauucuguaagugggc

SEQ ID NO: 43900 - RNA, 23 nt, Artificial Sequence
  Synthetic oligonucleotide: BID-3279
cagugcggauucuguaagugggc

SEQ ID NO: 43901 - RNA, 24 nt, Artificial Sequence
  Synthetic oligonucleotide: BID-3280
acagugcggauucuguaagugggc

SEQ ID NO: 43902 - RNA, 18 nt, Artificial Sequence
  Synthetic oligonucleotide: BID-4451
guguccucuccacguggc

SEQ ID NO: 43903 - RNA, 19 nt, Artificial Sequence
  Synthetic oligonucleotide: BID-4452
uguguccucuccacguggc

SEQ ID NO: 43904 - RNA, 20 nt, Artificial Sequence
  Synthetic oligonucleotide: BID-1161
uuguguccucuccacguggc

SEQ ID NO: 43905 - RNA, 21 nt, Artificial Sequence
  Synthetic oligonucleotide: BID-4453
guuguguccucuccacguggc

SEQ ID NO: 43906 - RNA, 22 nt, Artificial Sequence
  Synthetic oligonucleotide: BID-4454
uguuguguccucuccacguggc

SEQ ID NO: 43907 - RNA, 23 nt, Artificial Sequence
  Synthetic oligonucleotide: BID-4455
uuguuguguccucuccacguggc

SEQ ID NO: 43908 - RNA, 24 nt, Artificial Sequence
  Synthetic oligonucleotide: BID-4456
uuuguuguguccucuccacguggc

SEQ ID NO: 43909 - RNA, 18 nt, Artificial Sequence
  Synthetic oligonucleotide: BID-4457
gauccucgcugcugcugc

SEQ ID NO: 43910 - RNA, 19 nt, Artificial Sequence
  Synthetic oligonucleotide: BID-4458
ggauccucgcugcugcugc

SEQ ID NO: 43911 - RNA, 20 nt, Artificial Sequence
  Synthetic oligonucleotide: BID-2092
cggauccucgcugcugcugc

SEQ ID NO: 43912 - RNA, 21 nt, Artificial Sequence
  Synthetic oligonucleotide: BID-4459
gcggauccucgcugcugcugc

SEQ ID NO: 43913 - RNA, 22 nt, Artificial Sequence
  Synthetic oligonucleotide: BID-4460
ugcggauccucgcugcugcugc

SEQ ID NO: 43914 - RNA, 23 nt, Artificial Sequence
  Synthetic oligonucleotide: BID-4461
gugcggauccucgcugcugcugc

SEQ ID NO: 43915 - RNA, 24 nt, Artificial Sequence
  Synthetic oligonucleotide: BID-4462
ugugcggauccucgcugcugcugc

SEQ ID NO: 43916 - RNA, 18 nt, Artificial Sequence
  Synthetic oligonucleotide: BID-4463
agugcacccgcgccccuc

SEQ ID NO: 43917 - RNA, 19 nt, Artificial Sequence
  Synthetic oligonucleotide: BID-4464
gagugcacccgcgccccuc

SEQ ID NO: 43918 - RNA, 20 nt, Artificial Sequence
  Synthetic oligonucleotide: BID-1126
ugagugcacccgcgccccuc

SEQ ID NO: 43919 - RNA, 21 nt, Artificial Sequence
  Synthetic oligonucleotide: BID-4465
gugagugcacccgcgccccuc

SEQ ID NO: 43920 - RNA, 22 nt, Artificial Sequence
  Synthetic oligonucleotide: BID-4466
ggugagugcacccgcgccccuc

SEQ ID NO: 43921 - RNA, 23 nt, Artificial Sequence
  Synthetic oligonucleotide: BID-4467
uggugagugcacccgcgccccuc

SEQ ID NO: 43922 - RNA, 24 nt, Artificial Sequence
  Synthetic oligonucleotide: BID-4468
guggugagugcacccgcgccccuc

SEQ ID NO: 43923 - RNA, 18 nt, Artificial Sequence
  Synthetic oligonucleotide: BID-4469
gacaccugccggcuccuc

SEQ ID NO: 43924 - RNA, 19 nt, Artificial Sequence
  Synthetic oligonucleotide: BID-4470
agacaccugccggcuccuc

SEQ ID NO: 43925 - RNA, 20 nt, Artificial Sequence
  Synthetic oligonucleotide: BID-1195
cagacaccugccggcuccuc

SEQ ID NO: 43926 - RNA, 21 nt, Artificial Sequence
  Synthetic oligonucleotide: BID-4471
gcagacaccugccggcuccuc

SEQ ID NO: 43927 - RNA, 22 nt, Artificial Sequence
  Synthetic oligonucleotide: BID-4472
cgcagacaccugccggcuccuc

SEQ ID NO: 43928 - RNA, 23 nt, Artificial Sequence
  Synthetic oligonucleotide: BID-4473
ccgcagacaccugccggcuccuc

SEQ ID NO: 43929 - RNA, 24 nt, Artificial Sequence
  Synthetic oligonucleotide: BID-4474
accgcagacaccugccggcuccuc

SEQ ID NO: 43930 - RNA, 18 nt, Artificial Sequence
  Synthetic oligonucleotide: BID-4475
cacguggccuggggauuc

SEQ ID NO: 43931 - RNA, 19 nt, Artificial Sequence
  Synthetic oligonucleotide: BID-4476
ccacguggccuggggauuc

SEQ ID NO: 43932 - RNA, 20 nt, Artificial Sequence
  Synthetic oligonucleotide: BID-2049
uccacguggccuggggauuc

SEQ ID NO: 43933 - RNA, 21 nt, Artificial Sequence
  Synthetic oligonucleotide: BID-4477
cuccacguggccuggggauuc

SEQ ID NO: 43934 - RNA, 22 nt, Artificial Sequence
  Synthetic oligonucleotide: BID-4478
ucuccacguggccuggggauuc

SEQ ID NO: 43935 - RNA, 23 nt, Artificial Sequence
  Synthetic oligonucleotide: BID-4479
cucuccacguggccuggggauuc

SEQ ID NO: 43936 - RNA, 24 nt, Artificial Sequence
  Synthetic oligonucleotide: BID-4480
ccucuccacguggccuggggauuc

SEQ ID NO: 43937 - RNA, 18 nt, Artificial Sequence
  Synthetic oligonucleotide: BID-4481
gggcguggggggccgaag

SEQ ID NO: 43938 - RNA, 19 nt, Artificial Sequence
  Synthetic oligonucleotide: BID-4482
cgggcguggggggccgaag

SEQ ID NO: 43939 - RNA, 20 nt, Artificial Sequence
  Synthetic oligonucleotide: BID-4483
ccgggcguggggggccgaag

SEQ ID NO: 43940 - RNA, 21 nt, Artificial Sequence
  Synthetic oligonucleotide: BID-4484
cccgggcguggggggccgaag

SEQ ID NO: 43941 - RNA, 22 nt, Artificial Sequence
  Synthetic oligonucleotide: BID-4485
gcccgggcguggggggccgaag

SEQ ID NO: 43942 - RNA, 23 nt, Artificial Sequence
  Synthetic oligonucleotide: BID-4486
ggcccgggcguggggggccgaag

SEQ ID NO: 43943 - RNA, 24 nt, Artificial Sequence
  Synthetic oligonucleotide: BID-4487
gggcccgggcguggggggccgaag

SEQ ID NO: 43944 - RNA, 18 nt, Artificial Sequence
  Synthetic oligonucleotide: BID-4488
cgcgcggggcgccauaag

SEQ ID NO: 43945 - RNA, 19 nt, Artificial Sequence
  Synthetic oligonucleotide: BID-4489
gcgcgcggggcgccauaag

SEQ ID NO: 43946 - RNA, 20 nt, Artificial Sequence
  Synthetic oligonucleotide: BID-1115
agcgcgcggggcgccauaag

SEQ ID NO: 43947 - RNA, 21 nt, Artificial Sequence
  Synthetic oligonucleotide: BID-4490
aagcgcgcggggcgccauaag

SEQ ID NO: 43948 - RNA, 22 nt, Artificial Sequence
  Synthetic oligonucleotide: BID-4491
gaagcgcgcggggcgccauaag

SEQ ID NO: 43949 - RNA, 23 nt, Artificial Sequence
  Synthetic oligonucleotide: BID-4492
ggaagcgcgcggggcgccauaag

SEQ ID NO: 43950 - RNA, 24 nt, Artificial Sequence
  Synthetic oligonucleotide: BID-4493
aggaagcgcgcggggcgccauaag

SEQ ID NO: 43951 - RNA, 18 nt, Artificial Sequence
  Synthetic oligonucleotide: BID-4494
gaccgcggugggagccag

SEQ ID NO: 43952 - RNA, 19 nt, Artificial Sequence
  Synthetic oligonucleotide: BID-4495
cgaccgcggugggagccag

SEQ ID NO: 43953 - RNA, 20 nt, Artificial Sequence
  Synthetic oligonucleotide: BID-2013
ccgaccgcggugggagccag

SEQ ID NO: 43954 - RNA, 21 nt, Artificial Sequence
  Synthetic oligonucleotide: BID-4496
cccgaccgcggugggagccag

SEQ ID NO: 43955 - RNA, 22 nt, Artificial Sequence
  Synthetic oligonucleotide: BID-4497
gcccgaccgcggugggagccag

SEQ ID NO: 43956 - RNA, 23 nt, Artificial Sequence
  Synthetic oligonucleotide: BID-4498
ggcccgaccgcggugggagccag

SEQ ID NO: 43957 - RNA, 24 nt, Artificial Sequence
  Synthetic oligonucleotide: BID-4499
gggcccgaccgcggugggagccag

SEQ ID NO: 43958 - RNA, 18 nt, Artificial Sequence
  Synthetic oligonucleotide: BID-4500
cguggccuggggauucag

SEQ ID NO: 43959 - RNA, 19 nt, Artificial Sequence
  Synthetic oligonucleotide: BID-4501
acguggccuggggauucag

SEQ ID NO: 43960 - RNA, 20 nt, Artificial Sequence
  Synthetic oligonucleotide: BID-2051
cacguggccuggggauucag

SEQ ID NO: 43961 - RNA, 21 nt, Artificial Sequence
  Synthetic oligonucleotide: BID-4502
ccacguggccuggggauucag

SEQ ID NO: 43962 - RNA, 22 nt, Artificial Sequence
  Synthetic oligonucleotide: BID-4503
uccacguggccuggggauucag

SEQ ID NO: 43963 - RNA, 23 nt, Artificial Sequence
  Synthetic oligonucleotide: BID-4504
cuccacguggccuggggauucag

SEQ ID NO: 43964 - RNA, 24 nt, Artificial Sequence
  Synthetic oligonucleotide: BID-4505
ucuccacguggccuggggauucag

SEQ ID NO: 43965 - RNA, 18 nt, Artificial Sequence
  Synthetic oligonucleotide: BID-4506
ccgcggugggagccagag

SEQ ID NO: 43966 - RNA, 19 nt, Artificial Sequence
  Synthetic oligonucleotide: BID-4507
accgcggugggagccagag

SEQ ID NO: 43967 - RNA, 20 nt, Artificial Sequence
  Synthetic oligonucleotide: BID-1139
gaccgcggugggagccagag

SEQ ID NO: 43968 - RNA, 21 nt, Artificial Sequence
  Synthetic oligonucleotide: BID-4508
cgaccgcggugggagccagag

SEQ ID NO: 43969 - RNA, 22 nt, Artificial Sequence
  Synthetic oligonucleotide: BID-4509
ccgaccgcggugggagccagag

SEQ ID NO: 43970 - RNA, 23 nt, Artificial Sequence
  Synthetic oligonucleotide: BID-4510
cccgaccgcggugggagccagag

SEQ ID NO: 43971 - RNA, 24 nt, Artificial Sequence
  Synthetic oligonucleotide: BID-4511
gcccgaccgcggugggagccagag

SEQ ID NO: 43972 - RNA, 18 nt, Artificial Sequence
  Synthetic oligonucleotide: BID-4512
gaggccagccccggagag

SEQ ID NO: 43973 - RNA, 19 nt, Artificial Sequence
  Synthetic oligonucleotide: BID-4513
cgaggccagccccggagag

SEQ ID NO: 43974 - RNA, 20 nt, Artificial Sequence
  Synthetic oligonucleotide: BID-1189
ccgaggccagccccggagag

SEQ ID NO: 43975 - RNA, 21 nt, Artificial Sequence
  Synthetic oligonucleotide: BID-4514
gccgaggccagccccggagag

SEQ ID NO: 43976 - RNA, 22 nt, Artificial Sequence
  Synthetic oligonucleotide: BID-4515
ggccgaggccagccccggagag

SEQ ID NO: 43977 - RNA, 23 nt, Artificial Sequence
  Synthetic oligonucleotide: BID-4516
gggccgaggccagccccggagag

SEQ ID NO: 43978 - RNA, 24 nt, Artificial Sequence
  Synthetic oligonucleotide: BID-4517
ggggccgaggccagccccggagag

SEQ ID NO: 43979 - RNA, 18 nt, Artificial Sequence
  Synthetic oligonucleotide: BID-4518
cugccggcuccucccgag

SEQ ID NO: 43980 - RNA, 19 nt, Artificial Sequence
  Synthetic oligonucleotide: BID-4519
ccugccggcuccucccgag

SEQ ID NO: 43981 - RNA, 20 nt, Artificial Sequence
  Synthetic oligonucleotide: BID-2082
accugccggcuccucccgag

SEQ ID NO: 43982 - RNA, 21 nt, Artificial Sequence
  Synthetic oligonucleotide: BID-4520
caccugccggcuccucccgag

SEQ ID NO: 43983 - RNA, 22 nt, Artificial Sequence
  Synthetic oligonucleotide: BID-4521
acaccugccggcuccucccgag

SEQ ID NO: 43984 - RNA, 23 nt, Artificial Sequence
  Synthetic oligonucleotide: BID-4522
gacaccugccggcuccucccgag

SEQ ID NO: 43985 - RNA, 24 nt, Artificial Sequence
  Synthetic oligonucleotide: BID-4523
agacaccugccggcuccucccgag

SEQ ID NO: 43986 - RNA, 18 nt, Artificial Sequence
  Synthetic oligonucleotide: BID-4524
cggugggagccagaggag

SEQ ID NO: 43987 - RNA, 19 nt, Artificial Sequence
  Synthetic oligonucleotide: BID-4525
gcggugggagccagaggag

SEQ ID NO: 43988 - RNA, 20 nt, Artificial Sequence
  Synthetic oligonucleotide: BID-2016
cgcggugggagccagaggag

SEQ ID NO: 43989 - RNA, 21 nt, Artificial Sequence
  Synthetic oligonucleotide: BID-4526
ccgcggugggagccagaggag

SEQ ID NO: 43990 - RNA, 22 nt, Artificial Sequence
  Synthetic oligonucleotide: BID-4527
accgcggugggagccagaggag

SEQ ID NO: 43991 - RNA, 23 nt, Artificial Sequence
  Synthetic oligonucleotide: BID-4528
gaccgcggugggagccagaggag

SEQ ID NO: 43992 - RNA, 24 nt, Artificial Sequence
  Synthetic oligonucleotide: BID-4529
cgaccgcggugggagccagaggag

SEQ ID NO: 43993 - RNA, 18 nt, Artificial Sequence
  Synthetic oligonucleotide: BID-4530
ccgaggccagccccggag

SEQ ID NO: 43994 - RNA, 19 nt, Artificial Sequence
  Synthetic oligonucleotide: BID-4531
gccgaggccagccccggag

SEQ ID NO: 43995 - RNA, 20 nt, Artificial Sequence
  Synthetic oligonucleotide: BID-2070
ggccgaggccagccccggag

SEQ ID NO: 43996 - RNA, 21 nt, Artificial Sequence
  Synthetic oligonucleotide: BID-4532
gggccgaggccagccccggag

SEQ ID NO: 43997 - RNA, 22 nt, Artificial Sequence
  Synthetic oligonucleotide: BID-4533
ggggccgaggccagccccggag

SEQ ID NO: 43998 - RNA, 23 nt, Artificial Sequence
  Synthetic oligonucleotide: BID-4534
aggggccgaggccagccccggag

SEQ ID NO: 43999 - RNA, 24 nt, Artificial Sequence
  Synthetic oligonucleotide: BID-4535
gaggggccgaggccagccccggag

SEQ ID NO: 44000 - RNA, 18 nt, Artificial Sequence
  Synthetic oligonucleotide: BID-4536
gucggguccgccucggag

SEQ ID NO: 44001 - RNA, 19 nt, Artificial Sequence
  Synthetic oligonucleotide: BID-4537
ggucggguccgccucggag

SEQ ID NO: 44002 - RNA, 20 nt, Artificial Sequence
  Synthetic oligonucleotide: BID-1157
gggucggguccgccucggag

SEQ ID NO: 44003 - RNA, 21 nt, Artificial Sequence
  Synthetic oligonucleotide: BID-4538
agggucggguccgccucggag

SEQ ID NO: 44004 - RNA, 22 nt, Artificial Sequence
  Synthetic oligonucleotide: BID-4539
gagggucggguccgccucggag

SEQ ID NO: 44005 - RNA, 23 nt, Artificial Sequence
  Synthetic oligonucleotide: BID-4540
ugagggucggguccgccucggag

SEQ ID NO: 44006 - RNA, 24 nt, Artificial Sequence
  Synthetic oligonucleotide: BID-4541
cugagggucggguccgccucggag

SEQ ID NO: 44007 - RNA, 18 nt, Artificial Sequence
  Synthetic oligonucleotide: BID-4542
ggagccagaggaggggag

SEQ ID NO: 44008 - RNA, 19 nt, Artificial Sequence
  Synthetic oligonucleotide: BID-4543
gggagccagaggaggggag

SEQ ID NO: 44009 - RNA, 20 nt, Artificial Sequence
  Synthetic oligonucleotide: BID-1143
ugggagccagaggaggggag

SEQ ID NO: 44010 - RNA, 21 nt, Artificial Sequence
  Synthetic oligonucleotide: BID-4544
gugggagccagaggaggggag

SEQ ID NO: 44011 - RNA, 22 nt, Artificial Sequence
  Synthetic oligonucleotide: BID-4545
ggugggagccagaggaggggag

SEQ ID NO: 44012 - RNA, 23 nt, Artificial Sequence
  Synthetic oligonucleotide: BID-4546
cggugggagccagaggaggggag

SEQ ID NO: 44013 - RNA, 24 nt, Artificial Sequence
  Synthetic oligonucleotide: BID-4547
gcggugggagccagaggaggggag

SEQ ID NO: 44014 - RNA, 18 nt, Artificial Sequence
  Synthetic oligonucleotide: BID-4548
ggugcggggcgcggggag

SEQ ID NO: 44015 - RNA, 19 nt, Artificial Sequence
  Synthetic oligonucleotide: BID-4549
gggugcggggcgcggggag

SEQ ID NO: 44016 - RNA, 20 nt, Artificial Sequence
  Synthetic oligonucleotide: BID-2063
ggggugcggggcgcggggag

SEQ ID NO: 44017 - RNA, 21 nt, Artificial Sequence
  Synthetic oligonucleotide: BID-4550
aggggugcggggcgcggggag

SEQ ID NO: 44018 - RNA, 22 nt, Artificial Sequence
  Synthetic oligonucleotide: BID-4551
gaggggugcggggcgcggggag

SEQ ID NO: 44019 - RNA, 23 nt, Artificial Sequence
  Synthetic oligonucleotide: BID-4552
ggaggggugcggggcgcggggag

SEQ ID NO: 44020 - RNA, 24 nt, Artificial Sequence
  Synthetic oligonucleotide: BID-4553
gggaggggugcggggcgcggggag

SEQ ID NO: 44021 - RNA, 18 nt, Artificial Sequence
  Synthetic oligonucleotide: BID-4554
gggccgaggccagccccg

SEQ ID NO: 44022 - RNA, 19 nt, Artificial Sequence
  Synthetic oligonucleotide: BID-4555
ggggccgaggccagccccg

SEQ ID NO: 44023 - RNA, 20 nt, Artificial Sequence
  Synthetic oligonucleotide: BID-1186
aggggccgaggccagccccg

SEQ ID NO: 44024 - RNA, 21 nt, Artificial Sequence
  Synthetic oligonucleotide: BID-4556
gaggggccgaggccagccccg

SEQ ID NO: 44025 - RNA, 22 nt, Artificial Sequence
  Synthetic oligonucleotide: BID-4557
ggaggggccgaggccagccccg

SEQ ID NO: 44026 - RNA, 23 nt, Artificial Sequence
  Synthetic oligonucleotide: BID-4558
gggaggggccgaggccagccccg

SEQ ID NO: 44027 - RNA, 24 nt, Artificial Sequence
  Synthetic oligonucleotide: BID-4559
ggggaggggccgaggccagccccg

SEQ ID NO: 44028 - RNA, 18 nt, Artificial Sequence
  Synthetic oligonucleotide: BID-4560
cccgggcguggggggccg

SEQ ID NO: 44029 - RNA, 19 nt, Artificial Sequence
  Synthetic oligonucleotide: BID-4561
gcccgggcguggggggccg

SEQ ID NO: 44030 - RNA, 20 nt, Artificial Sequence
  Synthetic oligonucleotide: BID-4562
ggcccgggcguggggggccg

SEQ ID NO: 44031 - RNA, 21 nt, Artificial Sequence
  Synthetic oligonucleotide: BID-4563
gggcccgggcguggggggccg

SEQ ID NO: 44032 - RNA, 22 nt, Artificial Sequence
  Synthetic oligonucleotide: BID-4564
cgggcccgggcguggggggccg

SEQ ID NO: 44033 - RNA, 23 nt, Artificial Sequence
  Synthetic oligonucleotide: BID-4565
gcgggcccgggcguggggggccg

SEQ ID NO: 44034 - RNA, 24 nt, Artificial Sequence
  Synthetic oligonucleotide: BID-4566
ggcgggcccgggcguggggggccg

SEQ ID NO: 44035 - RNA, 18 nt, Artificial Sequence
  Synthetic oligonucleotide: BID-3357
auggcucggugggcagcg

SEQ ID NO: 44036 - RNA, 19 nt, Artificial Sequence
  Synthetic oligonucleotide: BID-3358
gauggcucggugggcagcg

SEQ ID NO: 44037 - RNA, 20 nt, Artificial Sequence
  Synthetic oligonucleotide: BID-9
ugauggcucggugggcagcg

SEQ ID NO: 44038 - RNA, 21 nt, Artificial Sequence
  Synthetic oligonucleotide: BID-3359
augauggcucggugggcagcg

SEQ ID NO: 44039 - RNA, 22 nt, Artificial Sequence
  Synthetic oligonucleotide: BID-3360
caugauggcucggugggcagcg

SEQ ID NO: 44040 - RNA, 23 nt, Artificial Sequence
  Synthetic oligonucleotide: BID-3361
ucaugauggcucggugggcagcg

SEQ ID NO: 44041 - RNA, 24 nt, Artificial Sequence
  Synthetic oligonucleotide: BID-3362
gucaugauggcucggugggcagcg

SEQ ID NO: 44042 - RNA, 18 nt, Artificial Sequence
  Synthetic oligonucleotide: BID-4567
ccccucccgggguacgcg

SEQ ID NO: 44043 - RNA, 19 nt, Artificial Sequence
  Synthetic oligonucleotide: BID-4568
gccccucccgggguacgcg

SEQ ID NO: 44044 - RNA, 20 nt, Artificial Sequence
  Synthetic oligonucleotide: BID-1128
cgccccucccgggguacgcg

SEQ ID NO: 44045 - RNA, 21 nt, Artificial Sequence
  Synthetic oligonucleotide: BID-4569
gcgccccucccgggguacgcg

SEQ ID NO: 44046 - RNA, 22 nt, Artificial Sequence
  Synthetic oligonucleotide: BID-4570
cgcgccccucccgggguacgcg

SEQ ID NO: 44047 - RNA, 23 nt, Artificial Sequence
  Synthetic oligonucleotide: BID-4571
ccgcgccccucccgggguacgcg

SEQ ID NO: 44048 - RNA, 24 nt, Artificial Sequence
  Synthetic oligonucleotide: BID-4572
cccgcgccccucccgggguacgcg

SEQ ID NO: 44049 - RNA, 18 nt, Artificial Sequence
  Synthetic oligonucleotide: BID-4573
gcccugggcccgaccgcg

SEQ ID NO: 44050 - RNA, 19 nt, Artificial Sequence
  Synthetic oligonucleotide: BID-4574
cgcccugggcccgaccgcg

SEQ ID NO: 44051 - RNA, 20 nt, Artificial Sequence
  Synthetic oligonucleotide: BID-1133
ccgcccugggcccgaccgcg

SEQ ID NO: 44052 - RNA, 21 nt, Artificial Sequence
  Synthetic oligonucleotide: BID-4575
cccgcccugggcccgaccgcg

SEQ ID NO: 44053 - RNA, 22 nt, Artificial Sequence
  Synthetic oligonucleotide: BID-4576
gcccgcccugggcccgaccgcg

SEQ ID NO: 44054 - RNA, 23 nt, Artificial Sequence
  Synthetic oligonucleotide: BID-4577
cgcccgcccugggcccgaccgcg

SEQ ID NO: 44055 - RNA, 24 nt, Artificial Sequence
  Synthetic oligonucleotide: BID-4578
ccgcccgcccugggcccgaccgcg

SEQ ID NO: 44056 - RNA, 18 nt, Artificial Sequence
  Synthetic oligonucleotide: BID-4579
gccgaaggaggaagcgcg

SEQ ID NO: 44057 - RNA, 19 nt, Artificial Sequence
  Synthetic oligonucleotide: BID-4580
ggccgaaggaggaagcgcg

SEQ ID NO: 44058 - RNA, 20 nt, Artificial Sequence
  Synthetic oligonucleotide: BID-1112
gggccgaaggaggaagcgcg

SEQ ID NO: 44059 - RNA, 21 nt, Artificial Sequence
  Synthetic oligonucleotide: BID-4581
ggggccgaaggaggaagcgcg

SEQ ID NO: 44060 - RNA, 22 nt, Artificial Sequence
  Synthetic oligonucleotide: BID-4582
gggggccgaaggaggaagcgcg

SEQ ID NO: 44061 - RNA, 23 nt, Artificial Sequence
  Synthetic oligonucleotide: BID-4583
ggggggccgaaggaggaagcgcg

SEQ ID NO: 44062 - RNA, 24 nt, Artificial Sequence
  Synthetic oligonucleotide: BID-4584
uggggggccgaaggaggaagcgcg

SEQ ID NO: 44063 - RNA, 18 nt, Artificial Sequence
  Synthetic oligonucleotide: BID-4585
ggaggggugcggggcgcg

SEQ ID NO: 44064 - RNA, 19 nt, Artificial Sequence
  Synthetic oligonucleotide: BID-4586
gggaggggugcggggcgcg

SEQ ID NO: 44065 - RNA, 20 nt, Artificial Sequence
  Synthetic oligonucleotide: BID-2060
ggggaggggugcggggcgcg

SEQ ID NO: 44066 - RNA, 21 nt, Artificial Sequence
  Synthetic oligonucleotide: BID-4587
aggggaggggugcggggcgcg

SEQ ID NO: 44067 - RNA, 22 nt, Artificial Sequence
  Synthetic oligonucleotide: BID-4588
caggggaggggugcggggcgcg

SEQ ID NO: 44068 - RNA, 23 nt, Artificial Sequence
  Synthetic oligonucleotide: BID-4589
ucaggggaggggugcggggcgcg

SEQ ID NO: 44069 - RNA, 24 nt, Artificial Sequence
  Synthetic oligonucleotide: BID-4590
uucaggggaggggugcggggcgcg

SEQ ID NO: 44070 - RNA, 18 nt, Artificial Sequence
  Synthetic oligonucleotide: BID-4591
ggguccgccucggaggcg

SEQ ID NO: 44071 - RNA, 19 nt, Artificial Sequence
  Synthetic oligonucleotide: BID-4592
cggguccgccucggaggcg

SEQ ID NO: 44072 - RNA, 20 nt, Artificial Sequence
  Synthetic oligonucleotide: BID-2043
ucggguccgccucggaggcg

SEQ ID NO: 44073 - RNA, 21 nt, Artificial Sequence
  Synthetic oligonucleotide: BID-4593
gucggguccgccucggaggcg

SEQ ID NO: 44074 - RNA, 22 nt, Artificial Sequence
  Synthetic oligonucleotide: BID-4594
ggucggguccgccucggaggcg

SEQ ID NO: 44075 - RNA, 23 nt, Artificial Sequence
  Synthetic oligonucleotide: BID-4595
gggucggguccgccucggaggcg

SEQ ID NO: 44076 - RNA, 24 nt, Artificial Sequence
  Synthetic oligonucleotide: BID-4596
agggucggguccgccucggaggcg

SEQ ID NO: 44077 - RNA, 18 nt, Artificial Sequence
  Synthetic oligonucleotide: BID-4597
cugccgccugccccggcg

SEQ ID NO: 44078 - RNA, 19 nt, Artificial Sequence
  Synthetic oligonucleotide: BID-4598
ccugccgccugccccggcg

SEQ ID NO: 44079 - RNA, 20 nt, Artificial Sequence
  Synthetic oligonucleotide: BID-2005
gccugccgccugccccggcg

SEQ ID NO: 44080 - RNA, 21 nt, Artificial Sequence
  Synthetic oligonucleotide: BID-4599
ugccugccgccugccccggcg

SEQ ID NO: 44081 - RNA, 22 nt, Artificial Sequence
  Synthetic oligonucleotide: BID-4600
cugccugccgccugccccggcg

SEQ ID NO: 44082 - RNA, 23 nt, Artificial Sequence
  Synthetic oligonucleotide: BID-4601
ccugccugccgccugccccggcg

SEQ ID NO: 44083 - RNA, 24 nt, Artificial Sequence
  Synthetic oligonucleotide: BID-4602
cccugccugccgccugccccggcg

SEQ ID NO: 44084 - RNA, 18 nt, Artificial Sequence
  Synthetic oligonucleotide: BID-4603
ccggggcgggcccgggcg

SEQ ID NO: 44085 - RNA, 19 nt, Artificial Sequence
  Synthetic oligonucleotide: BID-4604
gccggggcgggcccgggcg

SEQ ID NO: 44086 - RNA, 20 nt, Artificial Sequence
  Synthetic oligonucleotide: BID-3626
ggccggggcgggcccgggcg

SEQ ID NO: 44087 - RNA, 21 nt, Artificial Sequence
  Synthetic oligonucleotide: BID-4605
gggccggggcgggcccgggcg

SEQ ID NO: 44088 - RNA, 22 nt, Artificial Sequence
  Synthetic oligonucleotide: BID-4606
cgggccggggcgggcccgggcg

SEQ ID NO: 44089 - RNA, 23 nt, Artificial Sequence
  Synthetic oligonucleotide: BID-4607
gcgggccggggcgggcccgggcg

SEQ ID NO: 44090 - RNA, 24 nt, Artificial Sequence
  Synthetic oligonucleotide: BID-4608
ggcgggccggggcgggcccgggcg

SEQ ID NO: 44091 - RNA, 18 nt, Artificial Sequence
  Synthetic oligonucleotide: BID-4609
ggggaggggugcggggcg

SEQ ID NO: 44092 - RNA, 19 nt, Artificial Sequence
  Synthetic oligonucleotide: BID-4610
aggggaggggugcggggcg

SEQ ID NO: 44093 - RNA, 20 nt, Artificial Sequence
  Synthetic oligonucleotide: BID-2058
caggggaggggugcggggcg

SEQ ID NO: 44094 - RNA, 21 nt, Artificial Sequence
  Synthetic oligonucleotide: BID-4611
ucaggggaggggugcggggcg

SEQ ID NO: 44095 - RNA, 22 nt, Artificial Sequence
  Synthetic oligonucleotide: BID-4612
uucaggggaggggugcggggcg

SEQ ID NO: 44096 - RNA, 23 nt, Artificial Sequence
  Synthetic oligonucleotide: BID-4613
auucaggggaggggugcggggcg

SEQ ID NO: 44097 - RNA, 24 nt, Artificial Sequence
  Synthetic oligonucleotide: BID-4614
gauucaggggaggggugcggggcg

SEQ ID NO: 44098 - RNA, 18 nt, Artificial Sequence
  Synthetic oligonucleotide: BID-3363
uggggucaugauggcucg

SEQ ID NO: 44099 - RNA, 19 nt, Artificial Sequence
  Synthetic oligonucleotide: BID-3364
cuggggucaugauggcucg

SEQ ID NO: 44100 - RNA, 20 nt, Artificial Sequence
  Synthetic oligonucleotide: BID-363
gcuggggucaugauggcucg

SEQ ID NO: 44101 - RNA, 21 nt, Artificial Sequence
  Synthetic oligonucleotide: BID-3365
ugcuggggucaugauggcucg

SEQ ID NO: 44102 - RNA, 22 nt, Artificial Sequence
  Synthetic oligonucleotide: BID-3366
gugcuggggucaugauggcucg

SEQ ID NO: 44103 - RNA, 23 nt, Artificial Sequence
  Synthetic oligonucleotide: BID-3367
ggugcuggggucaugauggcucg

SEQ ID NO: 44104 - RNA, 24 nt, Artificial Sequence
  Synthetic oligonucleotide: BID-3368
cggugcuggggucaugauggcucg

SEQ ID NO: 44105 - RNA, 18 nt, Artificial Sequence
  Synthetic oligonucleotide: BID-4615
ggcguggggggccgaagg

SEQ ID NO: 44106 - RNA, 19 nt, Artificial Sequence
  Synthetic oligonucleotide: BID-4616
gggcguggggggccgaagg

SEQ ID NO: 44107 - RNA, 20 nt, Artificial Sequence
  Synthetic oligonucleotide: BID-3627
cgggcguggggggccgaagg

SEQ ID NO: 44108 - RNA, 21 nt, Artificial Sequence
  Synthetic oligonucleotide: BID-4617
ccgggcguggggggccgaagg

SEQ ID NO: 44109 - RNA, 22 nt, Artificial Sequence
  Synthetic oligonucleotide: BID-4618
cccgggcguggggggccgaagg

SEQ ID NO: 44110 - RNA, 23 nt, Artificial Sequence
  Synthetic oligonucleotide: BID-4619
gcccgggcguggggggccgaagg

SEQ ID NO: 44111 - RNA, 24 nt, Artificial Sequence
  Synthetic oligonucleotide: BID-4620
ggcccgggcguggggggccgaagg

SEQ ID NO: 44112 - RNA, 18 nt, Artificial Sequence
  Synthetic oligonucleotide: BID-4621
gcgcggggcgccauaagg

SEQ ID NO: 44113 - RNA, 19 nt, Artificial Sequence
  Synthetic oligonucleotide: BID-4622
cgcgcggggcgccauaagg

SEQ ID NO: 44114 - RNA, 20 nt, Artificial Sequence
  Synthetic oligonucleotide: BID-1989
gcgcgcggggcgccauaagg

SEQ ID NO: 44115 - RNA, 21 nt, Artificial Sequence
  Synthetic oligonucleotide: BID-4623
agcgcgcggggcgccauaagg

SEQ ID NO: 44116 - RNA, 22 nt, Artificial Sequence
  Synthetic oligonucleotide: BID-4624
aagcgcgcggggcgccauaagg

SEQ ID NO: 44117 - RNA, 23 nt, Artificial Sequence
  Synthetic oligonucleotide: BID-4625
gaagcgcgcggggcgccauaagg

SEQ ID NO: 44118 - RNA, 24 nt, Artificial Sequence
  Synthetic oligonucleotide: BID-4626
ggaagcgcgcggggcgccauaagg

SEQ ID NO: 44119 - RNA, 18 nt, Artificial Sequence
  Synthetic oligonucleotide: BID-4627
cgcggugggagccagagg

SEQ ID NO: 44120 - RNA, 19 nt, Artificial Sequence
  Synthetic oligonucleotide: BID-4628
ccgcggugggagccagagg

SEQ ID NO: 44121 - RNA, 20 nt, Artificial Sequence
  Synthetic oligonucleotide: BID-2014
accgcggugggagccagagg

SEQ ID NO: 44122 - RNA, 21 nt, Artificial Sequence
  Synthetic oligonucleotide: BID-4629
gaccgcggugggagccagagg

SEQ ID NO: 44123 - RNA, 22 nt, Artificial Sequence
  Synthetic oligonucleotide: BID-4630
cgaccgcggugggagccagagg

SEQ ID NO: 44124 - RNA, 23 nt, Artificial Sequence
  Synthetic oligonucleotide: BID-4631
ccgaccgcggugggagccagagg

SEQ ID NO: 44125 - RNA, 24 nt, Artificial Sequence
  Synthetic oligonucleotide: BID-4632
cccgaccgcggugggagccagagg

SEQ ID NO: 44126 - RNA, 18 nt, Artificial Sequence
  Synthetic oligonucleotide: BID-4633
ucggguccgccucggagg

SEQ ID NO: 44127 - RNA, 19 nt, Artificial Sequence
  Synthetic oligonucleotide: BID-4634
gucggguccgccucggagg

SEQ ID NO: 44128 - RNA, 20 nt, Artificial Sequence
  Synthetic oligonucleotide: BID-2041
ggucggguccgccucggagg

SEQ ID NO: 44129 - RNA, 21 nt, Artificial Sequence
  Synthetic oligonucleotide: BID-4635
gggucggguccgccucggagg

SEQ ID NO: 44130 - RNA, 22 nt, Artificial Sequence
  Synthetic oligonucleotide: BID-4636
agggucggguccgccucggagg

SEQ ID NO: 44131 - RNA, 23 nt, Artificial Sequence
  Synthetic oligonucleotide: BID-4637
gagggucggguccgccucggagg

SEQ ID NO: 44132 - RNA, 24 nt, Artificial Sequence
  Synthetic oligonucleotide: BID-4638
ugagggucggguccgccucggagg

SEQ ID NO: 44133 - RNA, 18 nt, Artificial Sequence
  Synthetic oligonucleotide: BID-4639
gagccagaggaggggagg

SEQ ID NO: 44134 - RNA, 19 nt, Artificial Sequence
  Synthetic oligonucleotide: BID-4640
ggagccagaggaggggagg

SEQ ID NO: 44135 - RNA, 20 nt, Artificial Sequence
  Synthetic oligonucleotide: BID-2018
gggagccagaggaggggagg

SEQ ID NO: 44136 - RNA, 21 nt, Artificial Sequence
  Synthetic oligonucleotide: BID-4641
ugggagccagaggaggggagg

SEQ ID NO: 44137 - RNA, 22 nt, Artificial Sequence
  Synthetic oligonucleotide: BID-4642
gugggagccagaggaggggagg

SEQ ID NO: 44138 - RNA, 23 nt, Artificial Sequence
  Synthetic oligonucleotide: BID-4643
ggugggagccagaggaggggagg

SEQ ID NO: 44139 - RNA, 24 nt, Artificial Sequence
  Synthetic oligonucleotide: BID-4644
cggugggagccagaggaggggagg

SEQ ID NO: 44140 - RNA, 18 nt, Artificial Sequence
  Synthetic oligonucleotide: BID-4645
gugcggggcgcggggagg

SEQ ID NO: 44141 - RNA, 19 nt, Artificial Sequence
  Synthetic oligonucleotide: BID-4646
ggugcggggcgcggggagg

SEQ ID NO: 44142 - RNA, 20 nt, Artificial Sequence
  Synthetic oligonucleotide: BID-2064
gggugcggggcgcggggagg

SEQ ID NO: 44143 - RNA, 21 nt, Artificial Sequence
  Synthetic oligonucleotide: BID-4647
ggggugcggggcgcggggagg

SEQ ID NO: 44144 - RNA, 22 nt, Artificial Sequence
  Synthetic oligonucleotide: BID-4648
aggggugcggggcgcggggagg

SEQ ID NO: 44145 - RNA, 23 nt, Artificial Sequence
  Synthetic oligonucleotide: BID-4649
gaggggugcggggcgcggggagg

SEQ ID NO: 44146 - RNA, 24 nt, Artificial Sequence
  Synthetic oligonucleotide: BID-4650
ggaggggugcggggcgcggggagg

SEQ ID NO: 44147 - RNA, 18 nt, Artificial Sequence
  Synthetic oligonucleotide: BID-3387
agcgaggggccgggccgg

SEQ ID NO: 44148 - RNA, 19 nt, Artificial Sequence
  Synthetic oligonucleotide: BID-3388
cagcgaggggccgggccgg

SEQ ID NO: 44149 - RNA, 20 nt, Artificial Sequence
  Synthetic oligonucleotide: BID-368
gcagcgaggggccgggccgg

SEQ ID NO: 44150 - RNA, 21 nt, Artificial Sequence
  Synthetic oligonucleotide: BID-3389
ggcagcgaggggccgggccgg

SEQ ID NO: 44151 - RNA, 22 nt, Artificial Sequence
  Synthetic oligonucleotide: BID-3390
gggcagcgaggggccgggccgg

SEQ ID NO: 44152 - RNA, 23 nt, Artificial Sequence
  Synthetic oligonucleotide: BID-3391
ugggcagcgaggggccgggccgg

SEQ ID NO: 44153 - RNA, 24 nt, Artificial Sequence
  Synthetic oligonucleotide: BID-3392
gugggcagcgaggggccgggccgg

SEQ ID NO: 44154 - RNA, 18 nt, Artificial Sequence
  Synthetic oligonucleotide: BID-4651
cccugggcccgaccgcgg

SEQ ID NO: 44155 - RNA, 19 nt, Artificial Sequence
  Synthetic oligonucleotide: BID-4652
gcccugggcccgaccgcgg

SEQ ID NO: 44156 - RNA, 20 nt, Artificial Sequence
  Synthetic oligonucleotide: BID-2011
cgcccugggcccgaccgcgg

SEQ ID NO: 44157 - RNA, 21 nt, Artificial Sequence
  Synthetic oligonucleotide: BID-4653
ccgcccugggcccgaccgcgg

SEQ ID NO: 44158 - RNA, 22 nt, Artificial Sequence
  Synthetic oligonucleotide: BID-4654
cccgcccugggcccgaccgcgg

SEQ ID NO: 44159 - RNA, 23 nt, Artificial Sequence
  Synthetic oligonucleotide: BID-4655
gcccgcccugggcccgaccgcgg

SEQ ID NO: 44160 - RNA, 24 nt, Artificial Sequence
  Synthetic oligonucleotide: BID-4656
cgcccgcccugggcccgaccgcgg

SEQ ID NO: 44161 - RNA, 18 nt, Artificial Sequence
  Synthetic oligonucleotide: BID-4657
gcgcccgcgcccccgcgg

SEQ ID NO: 44162 - RNA, 19 nt, Artificial Sequence
  Synthetic oligonucleotide: BID-4658
cgcgcccgcgcccccgcgg

SEQ ID NO: 44163 - RNA, 20 nt, Artificial Sequence
  Synthetic oligonucleotide: BID-1122
acgcgcccgcgcccccgcgg

SEQ ID NO: 44164 - RNA, 21 nt, Artificial Sequence
  Synthetic oligonucleotide: BID-4659
gacgcgcccgcgcccccgcgg

SEQ ID NO: 44165 - RNA, 22 nt, Artificial Sequence
  Synthetic oligonucleotide: BID-4660
ggacgcgcccgcgcccccgcgg

SEQ ID NO: 44166 - RNA, 23 nt, Artificial Sequence
  Synthetic oligonucleotide: BID-4661
cggacgcgcccgcgcccccgcgg

SEQ ID NO: 44167 - RNA, 24 nt, Artificial Sequence
  Synthetic oligonucleotide: BID-4662
ccggacgcgcccgcgcccccgcgg

SEQ ID NO: 44168 - RNA, 18 nt, Artificial Sequence
  Synthetic oligonucleotide: BID-4663
gggcugggccuucugcgg

SEQ ID NO: 44169 - RNA, 19 nt, Artificial Sequence
  Synthetic oligonucleotide: BID-4664
ggggcugggccuucugcgg

SEQ ID NO: 44170 - RNA, 20 nt, Artificial Sequence
  Synthetic oligonucleotide: BID-1237
gggggcugggccuucugcgg

SEQ ID NO: 44171 - RNA, 21 nt, Artificial Sequence
  Synthetic oligonucleotide: BID-4665
ugggggcugggccuucugcgg

SEQ ID NO: 44172 - RNA, 22 nt, Artificial Sequence
  Synthetic oligonucleotide: BID-4666
cugggggcugggccuucugcgg

SEQ ID NO: 44173 - RNA, 23 nt, Artificial Sequence
  Synthetic oligonucleotide: BID-4667
gcugggggcugggccuucugcgg

SEQ ID NO: 44174 - RNA, 24 nt, Artificial Sequence
  Synthetic oligonucleotide: BID-4668
ggcugggggcugggccuucugcgg

SEQ ID NO: 44175 - RNA, 18 nt, Artificial Sequence
  Synthetic oligonucleotide: BID-4669
cuucaccugcaggcaggg

SEQ ID NO: 44176 - RNA, 19 nt, Artificial Sequence
  Synthetic oligonucleotide: BID-4670
ccuucaccugcaggcaggg

SEQ ID NO: 44177 - RNA, 20 nt, Artificial Sequence
  Synthetic oligonucleotide: BID-1239
gccuucaccugcaggcaggg

SEQ ID NO: 44178 - RNA, 21 nt, Artificial Sequence
  Synthetic oligonucleotide: BID-4671
ggccuucaccugcaggcaggg

SEQ ID NO: 44179 - RNA, 22 nt, Artificial Sequence
  Synthetic oligonucleotide: BID-4672
cggccuucaccugcaggcaggg

SEQ ID NO: 44180 - RNA, 23 nt, Artificial Sequence
  Synthetic oligonucleotide: BID-4673
ccggccuucaccugcaggcaggg

SEQ ID NO: 44181 - RNA, 24 nt, Artificial Sequence
  Synthetic oligonucleotide: BID-4674
accggccuucaccugcaggcaggg

SEQ ID NO: 44182 - RNA, 18 nt, Artificial Sequence
  Synthetic oligonucleotide: BID-4675
uggccuggggauucaggg

SEQ ID NO: 44183 - RNA, 19 nt, Artificial Sequence
  Synthetic oligonucleotide: BID-4676
guggccuggggauucaggg

SEQ ID NO: 44184 - RNA, 20 nt, Artificial Sequence
  Synthetic oligonucleotide: BID-1168
cguggccuggggauucaggg

SEQ ID NO: 44185 - RNA, 21 nt, Artificial Sequence
  Synthetic oligonucleotide: BID-4677
acguggccuggggauucaggg

SEQ ID NO: 44186 - RNA, 22 nt, Artificial Sequence
  Synthetic oligonucleotide: BID-4678
cacguggccuggggauucaggg

SEQ ID NO: 44187 - RNA, 23 nt, Artificial Sequence
  Synthetic oligonucleotide: BID-4679
ccacguggccuggggauucaggg

SEQ ID NO: 44188 - RNA, 24 nt, Artificial Sequence
  Synthetic oligonucleotide: BID-4680
uccacguggccuggggauucaggg

SEQ ID NO: 44189 - RNA, 18 nt, Artificial Sequence
  Synthetic oligonucleotide: BID-4681
gggccggggcgggccggg

SEQ ID NO: 44190 - RNA, 19 nt, Artificial Sequence
  Synthetic oligonucleotide: BID-4682
cgggccggggcgggccggg

SEQ ID NO: 44191 - RNA, 20 nt, Artificial Sequence
  Synthetic oligonucleotide: BID-4683
gcgggccggggcgggccggg

SEQ ID NO: 44192 - RNA, 21 nt, Artificial Sequence
  Synthetic oligonucleotide: BID-4684
ggcgggccggggcgggccggg

SEQ ID NO: 44193 - RNA, 22 nt, Artificial Sequence
  Synthetic oligonucleotide: BID-4685
gggcgggccggggcgggccggg

SEQ ID NO: 44194 - RNA, 23 nt, Artificial Sequence
  Synthetic oligonucleotide: BID-4686
ggggcgggccggggcgggccggg

SEQ ID NO: 44195 - RNA, 24 nt, Artificial Sequence
  Synthetic oligonucleotide: BID-4687
gggggcgggccggggcgggccggg

SEQ ID NO: 44196 - RNA, 18 nt, Artificial Sequence
  Synthetic oligonucleotide: BID-4688
aggggugcggggcgcggg

SEQ ID NO: 44197 - RNA, 19 nt, Artificial Sequence
  Synthetic oligonucleotide: BID-4689
gaggggugcggggcgcggg

SEQ ID NO: 44198 - RNA, 20 nt, Artificial Sequence
  Synthetic oligonucleotide: BID-1176
ggaggggugcggggcgcggg

SEQ ID NO: 44199 - RNA, 21 nt, Artificial Sequence
  Synthetic oligonucleotide: BID-4690
gggaggggugcggggcgcggg

SEQ ID NO: 44200 - RNA, 22 nt, Artificial Sequence
  Synthetic oligonucleotide: BID-4691
ggggaggggugcggggcgcggg

SEQ ID NO: 44201 - RNA, 23 nt, Artificial Sequence
  Synthetic oligonucleotide: BID-4692
aggggaggggugcggggcgcggg

SEQ ID NO: 44202 - RNA, 24 nt, Artificial Sequence
  Synthetic oligonucleotide: BID-4693
caggggaggggugcggggcgcggg

SEQ ID NO: 44203 - RNA, 18 nt, Artificial Sequence
  Synthetic oligonucleotide: BID-4694
ggggcgggccggggcggg

SEQ ID NO: 44204 - RNA, 19 nt, Artificial Sequence
  Synthetic oligonucleotide: BID-4695
gggggcgggccggggcggg

SEQ ID NO: 44205 - RNA, 20 nt, Artificial Sequence
  Synthetic oligonucleotide: BID-4696
cgggggcgggccggggcggg

SEQ ID NO: 44206 - RNA, 18 nt, Artificial Sequence
  Synthetic oligonucleotide: BID-3399
ucggugggcagcgagggg

SEQ ID NO: 44207 - RNA, 19 nt, Artificial Sequence
  Synthetic oligonucleotide: BID-3400
cucggugggcagcgagggg

SEQ ID NO: 44208 - RNA, 20 nt, Artificial Sequence
  Synthetic oligonucleotide: BID-367
gcucggugggcagcgagggg

SEQ ID NO: 44209 - RNA, 21 nt, Artificial Sequence
  Synthetic oligonucleotide: BID-3401
ggcucggugggcagcgagggg

SEQ ID NO: 44210 - RNA, 22 nt, Artificial Sequence
  Synthetic oligonucleotide: BID-3402
uggcucggugggcagcgagggg

SEQ ID NO: 44211 - RNA, 23 nt, Artificial Sequence
  Synthetic oligonucleotide: BID-3403
auggcucggugggcagcgagggg

SEQ ID NO: 44212 - RNA, 24 nt, Artificial Sequence
  Synthetic oligonucleotide: BID-3404
gauggcucggugggcagcgagggg

SEQ ID NO: 44213 - RNA, 18 nt, Artificial Sequence
  Synthetic oligonucleotide: BID-4697
gcggggcgcggggagggg

SEQ ID NO: 44214 - RNA, 19 nt, Artificial Sequence
  Synthetic oligonucleotide: BID-4698
ugcggggcgcggggagggg

SEQ ID NO: 44215 - RNA, 20 nt, Artificial Sequence
  Synthetic oligonucleotide: BID-1181
gugcggggcgcggggagggg

SEQ ID NO: 44216 - RNA, 21 nt, Artificial Sequence
  Synthetic oligonucleotide: BID-4699
ggugcggggcgcggggagggg

SEQ ID NO: 44217 - RNA, 22 nt, Artificial Sequence
  Synthetic oligonucleotide: BID-4700
gggugcggggcgcggggagggg

SEQ ID NO: 44218 - RNA, 23 nt, Artificial Sequence
  Synthetic oligonucleotide: BID-4701
ggggugcggggcgcggggagggg

SEQ ID NO: 44219 - RNA, 24 nt, Artificial Sequence
  Synthetic oligonucleotide: BID-4702
aggggugcggggcgcggggagggg

SEQ ID NO: 44220 - RNA, 18 nt, Artificial Sequence
  Synthetic oligonucleotide: BID-4703
cgcggggagggggagggg

SEQ ID NO: 44221 - RNA, 19 nt, Artificial Sequence
  Synthetic oligonucleotide: BID-4704
gcgcggggagggggagggg

SEQ ID NO: 44222 - RNA, 20 nt, Artificial Sequence
  Synthetic oligonucleotide: BID-1183
ggcgcggggagggggagggg

SEQ ID NO: 44223 - RNA, 21 nt, Artificial Sequence
  Synthetic oligonucleotide: BID-4705
gggcgcggggagggggagggg

SEQ ID NO: 44224 - RNA, 22 nt, Artificial Sequence
  Synthetic oligonucleotide: BID-4706
ggggcgcggggagggggagggg

SEQ ID NO: 44225 - RNA, 23 nt, Artificial Sequence
  Synthetic oligonucleotide: BID-4707
cggggcgcggggagggggagggg

SEQ ID NO: 44226 - RNA, 24 nt, Artificial Sequence
  Synthetic oligonucleotide: BID-4708
gcggggcgcggggagggggagggg

SEQ ID NO: 44227 - RNA, 18 nt, Artificial Sequence
  Synthetic oligonucleotide: BID-4709
ggggugcggggcgcgggg

SEQ ID NO: 44228 - RNA, 19 nt, Artificial Sequence
  Synthetic oligonucleotide: BID-4710
aggggugcggggcgcgggg

SEQ ID NO: 44229 - RNA, 20 nt, Artificial Sequence
  Synthetic oligonucleotide: BID-2061
gaggggugcggggcgcgggg

SEQ ID NO: 44230 - RNA, 21 nt, Artificial Sequence
  Synthetic oligonucleotide: BID-4711
ggaggggugcggggcgcgggg

SEQ ID NO: 44231 - RNA, 22 nt, Artificial Sequence
  Synthetic oligonucleotide: BID-4712
gggaggggugcggggcgcgggg

SEQ ID NO: 44232 - RNA, 23 nt, Artificial Sequence
  Synthetic oligonucleotide: BID-4713
ggggaggggugcggggcgcgggg

SEQ ID NO: 44233 - RNA, 24 nt, Artificial Sequence
  Synthetic oligonucleotide: BID-4714
aggggaggggugcggggcgcgggg

SEQ ID NO: 44234 - RNA, 18 nt, Artificial Sequence
  Synthetic oligonucleotide: BID-4715
cggggcgcggggaggggg

SEQ ID NO: 44235 - RNA, 19 nt, Artificial Sequence
  Synthetic oligonucleotide: BID-4716
gcggggcgcggggaggggg

SEQ ID NO: 44236 - RNA, 20 nt, Artificial Sequence
  Synthetic oligonucleotide: BID-2065
ugcggggcgcggggaggggg

SEQ ID NO: 44237 - RNA, 21 nt, Artificial Sequence
  Synthetic oligonucleotide: BID-4717
gugcggggcgcggggaggggg

SEQ ID NO: 44238 - RNA, 22 nt, Artificial Sequence
  Synthetic oligonucleotide: BID-4718
ggugcggggcgcggggaggggg

SEQ ID NO: 44239 - RNA, 23 nt, Artificial Sequence
  Synthetic oligonucleotide: BID-4719
gggugcggggcgcggggaggggg

SEQ ID NO: 44240 - RNA, 24 nt, Artificial Sequence
  Synthetic oligonucleotide: BID-4720
ggggugcggggcgcggggaggggg

SEQ ID NO: 44241 - RNA, 18 nt, Artificial Sequence
  Synthetic oligonucleotide: BID-4721
gggcccgggcgugggggg

SEQ ID NO: 44242 - RNA, 19 nt, Artificial Sequence
  Synthetic oligonucleotide: BID-4722
cgggcccgggcgugggggg

SEQ ID NO: 44243 - RNA, 20 nt, Artificial Sequence
  Synthetic oligonucleotide: BID-4723
gcgggcccgggcgugggggg

SEQ ID NO: 44244 - RNA, 21 nt, Artificial Sequence
  Synthetic oligonucleotide: BID-4724
ggcgggcccgggcgugggggg

SEQ ID NO: 44245 - RNA, 22 nt, Artificial Sequence
  Synthetic oligonucleotide: BID-4725
gggcgggcccgggcgugggggg

SEQ ID NO: 44246 - RNA, 23 nt, Artificial Sequence
  Synthetic oligonucleotide: BID-4726
ggggcgggcccgggcgugggggg

SEQ ID NO: 44247 - RNA, 24 nt, Artificial Sequence
  Synthetic oligonucleotide: BID-4727
cggggcgggcccgggcgugggggg

SEQ ID NO: 44248 - RNA, 18 nt, Artificial Sequence
  Synthetic oligonucleotide: BID-3412
cuguaagugggcuggggg

SEQ ID NO: 44249 - RNA, 19 nt, Artificial Sequence
  Synthetic oligonucleotide: BID-3413
ucuguaagugggcuggggg

SEQ ID NO: 44250 - RNA, 20 nt, Artificial Sequence
  Synthetic oligonucleotide: BID-377
uucuguaagugggcuggggg

SEQ ID NO: 44251 - RNA, 21 nt, Artificial Sequence
  Synthetic oligonucleotide: BID-3414
auucuguaagugggcuggggg

SEQ ID NO: 44252 - RNA, 22 nt, Artificial Sequence
  Synthetic oligonucleotide: BID-3415
gauucuguaagugggcuggggg

SEQ ID NO: 44253 - RNA, 23 nt, Artificial Sequence
  Synthetic oligonucleotide: BID-3416
ggauucuguaagugggcuggggg

SEQ ID NO: 44254 - RNA, 24 nt, Artificial Sequence
  Synthetic oligonucleotide: BID-3417
cggauucuguaagugggcuggggg

SEQ ID NO: 44255 - RNA, 18 nt, Artificial Sequence
  Synthetic oligonucleotide: BID-3418
gcggauucuguaaguggg

SEQ ID NO: 44256 - RNA, 19 nt, Artificial Sequence
  Synthetic oligonucleotide: BID-3419
ugcggauucuguaaguggg

SEQ ID NO: 44257 - RNA, 20 nt, Artificial Sequence
  Synthetic oligonucleotide: BID-374
gugcggauucuguaaguggg

SEQ ID NO: 44258 - RNA, 21 nt, Artificial Sequence
  Synthetic oligonucleotide: BID-3420
agugcggauucuguaaguggg

SEQ ID NO: 44259 - RNA, 22 nt, Artificial Sequence
  Synthetic oligonucleotide: BID-3421
cagugcggauucuguaaguggg

SEQ ID NO: 44260 - RNA, 23 nt, Artificial Sequence
  Synthetic oligonucleotide: BID-3422
acagugcggauucuguaaguggg

SEQ ID NO: 44261 - RNA, 24 nt, Artificial Sequence
  Synthetic oligonucleotide: BID-3423
cacagugcggauucuguaaguggg

SEQ ID NO: 44262 - RNA, 18 nt, Artificial Sequence
  Synthetic oligonucleotide: BID-4728
gaccccaggggacccugg

SEQ ID NO: 44263 - RNA, 19 nt, Artificial Sequence
  Synthetic oligonucleotide: BID-4729
ugaccccaggggacccugg

SEQ ID NO: 44264 - RNA, 20 nt, Artificial Sequence
  Synthetic oligonucleotide: BID-1215
augaccccaggggacccugg

SEQ ID NO: 44265 - RNA, 21 nt, Artificial Sequence
  Synthetic oligonucleotide: BID-4730
aaugaccccaggggacccugg

SEQ ID NO: 44266 - RNA, 22 nt, Artificial Sequence
  Synthetic oligonucleotide: BID-4731
gaaugaccccaggggacccugg

SEQ ID NO: 44267 - RNA, 23 nt, Artificial Sequence
  Synthetic oligonucleotide: BID-4732
ugaaugaccccaggggacccugg

SEQ ID NO: 44268 - RNA, 24 nt, Artificial Sequence
  Synthetic oligonucleotide: BID-4733
cugaaugaccccaggggacccugg

SEQ ID NO: 44269 - RNA, 18 nt, Artificial Sequence
  Synthetic oligonucleotide: BID-3424
aggggccgggccggcugg

SEQ ID NO: 44270 - RNA, 19 nt, Artificial Sequence
  Synthetic oligonucleotide: BID-3425
gaggggccgggccggcugg

SEQ ID NO: 44271 - RNA, 20 nt, Artificial Sequence
  Synthetic oligonucleotide: BID-25
cgaggggccgggccggcugg

SEQ ID NO: 44272 - RNA, 21 nt, Artificial Sequence
  Synthetic oligonucleotide: BID-3426
gcgaggggccgggccggcugg

SEQ ID NO: 44273 - RNA, 22 nt, Artificial Sequence
  Synthetic oligonucleotide: BID-3427
agcgaggggccgggccggcugg

SEQ ID NO: 44274 - RNA, 23 nt, Artificial Sequence
  Synthetic oligonucleotide: BID-3428
cagcgaggggccgggccggcugg

SEQ ID NO: 44275 - RNA, 24 nt, Artificial Sequence
  Synthetic oligonucleotide: BID-3429
gcagcgaggggccgggccggcugg

SEQ ID NO: 44276 - RNA, 18 nt, Artificial Sequence
  Synthetic oligonucleotide: BID-4734
cccucagccaccaagugg

SEQ ID NO: 44277 - RNA, 19 nt, Artificial Sequence
  Synthetic oligonucleotide: BID-4735
gcccucagccaccaagugg

SEQ ID NO: 44278 - RNA, 20 nt, Artificial Sequence
  Synthetic oligonucleotide: BID-1217
agcccucagccaccaagugg

SEQ ID NO: 44279 - RNA, 21 nt, Artificial Sequence
  Synthetic oligonucleotide: BID-4736
aagcccucagccaccaagugg

SEQ ID NO: 44280 - RNA, 22 nt, Artificial Sequence
  Synthetic oligonucleotide: BID-4737
gaagcccucagccaccaagugg

SEQ ID NO: 44281 - RNA, 23 nt, Artificial Sequence
  Synthetic oligonucleotide: BID-4738
ugaagcccucagccaccaagugg

SEQ ID NO: 44282 - RNA, 24 nt, Artificial Sequence
  Synthetic oligonucleotide: BID-4739
cugaagcccucagccaccaagugg

SEQ ID NO: 44283 - RNA, 18 nt, Artificial Sequence
  Synthetic oligonucleotide: BID-3448
gaggggccgggccggcug

SEQ ID NO: 44284 - RNA, 19 nt, Artificial Sequence
  Synthetic oligonucleotide: BID-3449
cgaggggccgggccggcug

SEQ ID NO: 44285 - RNA, 20 nt, Artificial Sequence
  Synthetic oligonucleotide: BID-370
gcgaggggccgggccggcug

SEQ ID NO: 44286 - RNA, 21 nt, Artificial Sequence
  Synthetic oligonucleotide: BID-3450
agcgaggggccgggccggcug

SEQ ID NO: 44287 - RNA, 22 nt, Artificial Sequence
  Synthetic oligonucleotide: BID-3451
cagcgaggggccgggccggcug

SEQ ID NO: 44288 - RNA, 23 nt, Artificial Sequence
  Synthetic oligonucleotide: BID-3452
gcagcgaggggccgggccggcug

SEQ ID NO: 44289 - RNA, 24 nt, Artificial Sequence
  Synthetic oligonucleotide: BID-3453
ggcagcgaggggccgggccggcug

SEQ ID NO: 44290 - RNA, 18 nt, Artificial Sequence
  Synthetic oligonucleotide: BID-4740
ggauccucgcugcugcug

SEQ ID NO: 44291 - RNA, 19 nt, Artificial Sequence
  Synthetic oligonucleotide: BID-4741
cggauccucgcugcugcug

SEQ ID NO: 44292 - RNA, 20 nt, Artificial Sequence
  Synthetic oligonucleotide: BID-1204
gcggauccucgcugcugcug

SEQ ID NO: 44293 - RNA, 21 nt, Artificial Sequence
  Synthetic oligonucleotide: BID-4742
ugcggauccucgcugcugcug

SEQ ID NO: 44294 - RNA, 22 nt, Artificial Sequence
  Synthetic oligonucleotide: BID-4743
gugcggauccucgcugcugcug

SEQ ID NO: 44295 - RNA, 23 nt, Artificial Sequence
  Synthetic oligonucleotide: BID-4744
ugugcggauccucgcugcugcug

SEQ ID NO: 44296 - RNA, 24 nt, Artificial Sequence
  Synthetic oligonucleotide: BID-4745
augugcggauccucgcugcugcug

SEQ ID NO: 44297 - RNA, 18 nt, Artificial Sequence
  Synthetic oligonucleotide: BID-4746
ggggcgggcccgggcgug

SEQ ID NO: 44298 - RNA, 19 nt, Artificial Sequence
  Synthetic oligonucleotide: BID-4747
cggggcgggcccgggcgug

SEQ ID NO: 44299 - RNA, 20 nt, Artificial Sequence
  Synthetic oligonucleotide: BID-3631
ccggggcgggcccgggcgug

SEQ ID NO: 44300 - RNA, 21 nt, Artificial Sequence
  Synthetic oligonucleotide: BID-4748
gccggggcgggcccgggcgug

SEQ ID NO: 44301 - RNA, 22 nt, Artificial Sequence
  Synthetic oligonucleotide: BID-4749
ggccggggcgggcccgggcgug

SEQ ID NO: 44302 - RNA, 23 nt, Artificial Sequence
  Synthetic oligonucleotide: BID-4750
gggccggggcgggcccgggcgug

SEQ ID NO: 44303 - RNA, 24 nt, Artificial Sequence
  Synthetic oligonucleotide: BID-4751
cgggccggggcgggcccgggcgug

SEQ ID NO: 44304 - RNA, 18 nt, Artificial Sequence
  Synthetic oligonucleotide: BID-3460
uacgaaugugcagcggug

SEQ ID NO: 44305 - RNA, 19 nt, Artificial Sequence
  Synthetic oligonucleotide: BID-3461
auacgaaugugcagcggug

SEQ ID NO: 44306 - RNA, 20 nt, Artificial Sequence
  Synthetic oligonucleotide: BID-361
aauacgaaugugcagcggug

SEQ ID NO: 44307 - RNA, 21 nt, Artificial Sequence
  Synthetic oligonucleotide: BID-3462
aaauacgaaugugcagcggug

SEQ ID NO: 44308 - RNA, 22 nt, Artificial Sequence
  Synthetic oligonucleotide: BID-3463
caaauacgaaugugcagcggug

SEQ ID NO: 44309 - RNA, 23 nt, Artificial Sequence
  Synthetic oligonucleotide: BID-3464
acaaauacgaaugugcagcggug

SEQ ID NO: 44310 - RNA, 24 nt, Artificial Sequence
  Synthetic oligonucleotide: BID-3465
aacaaauacgaaugugcagcggug

SEQ ID NO: 44311 - RNA, 18 nt, Artificial Sequence
  Synthetic oligonucleotide: BID-4752
gcggccggcaggucggug

SEQ ID NO: 44312 - RNA, 19 nt, Artificial Sequence
  Synthetic oligonucleotide: BID-4753
cgcggccggcaggucggug

SEQ ID NO: 44313 - RNA, 20 nt, Artificial Sequence
  Synthetic oligonucleotide: BID-1152
gcgcggccggcaggucggug

SEQ ID NO: 44314 - RNA, 21 nt, Artificial Sequence
  Synthetic oligonucleotide: BID-4754
ggcgcggccggcaggucggug

SEQ ID NO: 44315 - RNA, 22 nt, Artificial Sequence
  Synthetic oligonucleotide: BID-4755
cggcgcggccggcaggucggug

SEQ ID NO: 44316 - RNA, 23 nt, Artificial Sequence
  Synthetic oligonucleotide: BID-4756
ucggcgcggccggcaggucggug

SEQ ID NO: 44317 - RNA, 24 nt, Artificial Sequence
  Synthetic oligonucleotide: BID-4757
cucggcgcggccggcaggucggug

SEQ ID NO: 44318 - RNA, 18 nt, Artificial Sequence
  Synthetic oligonucleotide: BID-4758
ggauucaggggaggggug

SEQ ID NO: 44319 - RNA, 19 nt, Artificial Sequence
  Synthetic oligonucleotide: BID-4759
gggauucaggggaggggug

SEQ ID NO: 44320 - RNA, 20 nt, Artificial Sequence
  Synthetic oligonucleotide: BID-2055
ggggauucaggggaggggug

SEQ ID NO: 44321 - RNA, 21 nt, Artificial Sequence
  Synthetic oligonucleotide: BID-4760
uggggauucaggggaggggug

SEQ ID NO: 44322 - RNA, 22 nt, Artificial Sequence
  Synthetic oligonucleotide: BID-4761
cuggggauucaggggaggggug

SEQ ID NO: 44323 - RNA, 23 nt, Artificial Sequence
  Synthetic oligonucleotide: BID-4762
ccuggggauucaggggaggggug

SEQ ID NO: 44324 - RNA, 24 nt, Artificial Sequence
  Synthetic oligonucleotide: BID-4763
gccuggggauucaggggaggggug

SEQ ID NO: 44325 - RNA, 18 nt, Artificial Sequence
  Synthetic oligonucleotide: BID-4764
aagcgcgcggggcgccau

SEQ ID NO: 44326 - RNA, 19 nt, Artificial Sequence
  Synthetic oligonucleotide: BID-4765
gaagcgcgcggggcgccau

SEQ ID NO: 44327 - RNA, 20 nt, Artificial Sequence
  Synthetic oligonucleotide: BID-1113
ggaagcgcgcggggcgccau

SEQ ID NO: 44328 - RNA, 21 nt, Artificial Sequence
  Synthetic oligonucleotide: BID-4766
aggaagcgcgcggggcgccau

SEQ ID NO: 44329 - RNA, 22 nt, Artificial Sequence
  Synthetic oligonucleotide: BID-4767
gaggaagcgcgcggggcgccau

SEQ ID NO: 44330 - RNA, 23 nt, Artificial Sequence
  Synthetic oligonucleotide: BID-4768
ggaggaagcgcgcggggcgccau

SEQ ID NO: 44331 - RNA, 24 nt, Artificial Sequence
  Synthetic oligonucleotide: BID-4769
aggaggaagcgcgcggggcgccau

SEQ ID NO: 44332 - RNA, 18 nt, Artificial Sequence
  Synthetic oligonucleotide: BID-4770
aggccucagcagcgaccu

SEQ ID NO: 44333 - RNA, 19 nt, Artificial Sequence
  Synthetic oligonucleotide: BID-4771
caggccucagcagcgaccu

SEQ ID NO: 44334 - RNA, 20 nt, Artificial Sequence
  Synthetic oligonucleotide: BID-1149
ccaggccucagcagcgaccu

SEQ ID NO: 44335 - RNA, 21 nt, Artificial Sequence
  Synthetic oligonucleotide: BID-4772
cccaggccucagcagcgaccu

SEQ ID NO: 44336 - RNA, 22 nt, Artificial Sequence
  Synthetic oligonucleotide: BID-4773
ccccaggccucagcagcgaccu

SEQ ID NO: 44337 - RNA, 23 nt, Artificial Sequence
  Synthetic oligonucleotide: BID-4774
gccccaggccucagcagcgaccu

SEQ ID NO: 44338 - RNA, 24 nt, Artificial Sequence
  Synthetic oligonucleotide: BID-4775
agccccaggccucagcagcgaccu

SEQ ID NO: 44339 - RNA, 18 nt, Artificial Sequence
  Synthetic oligonucleotide: BID-4776
augaccccaggggacccu

SEQ ID NO: 44340 - RNA, 19 nt, Artificial Sequence
  Synthetic oligonucleotide: BID-4777
aaugaccccaggggacccu

SEQ ID NO: 44341 - RNA, 20 nt, Artificial Sequence
  Synthetic oligonucleotide: BID-2099
gaaugaccccaggggacccu

SEQ ID NO: 44342 - RNA, 21 nt, Artificial Sequence
  Synthetic oligonucleotide: BID-4778
ugaaugaccccaggggacccu

SEQ ID NO: 44343 - RNA, 22 nt, Artificial Sequence
  Synthetic oligonucleotide: BID-4779
cugaaugaccccaggggacccu

SEQ ID NO: 44344 - RNA, 23 nt, Artificial Sequence
  Synthetic oligonucleotide: BID-4780
gcugaaugaccccaggggacccu

SEQ ID NO: 44345 - RNA, 24 nt, Artificial Sequence
  Synthetic oligonucleotide: BID-4781
ggcugaaugaccccaggggacccu

SEQ ID NO: 44346 - RNA, 18 nt, Artificial Sequence
  Synthetic oligonucleotide: BID-4782
ugagggucggguccgccu

SEQ ID NO: 44347 - RNA, 19 nt, Artificial Sequence
  Synthetic oligonucleotide: BID-4783
cugagggucggguccgccu

SEQ ID NO: 44348 - RNA, 20 nt, Artificial Sequence
  Synthetic oligonucleotide: BID-2039
gcugagggucggguccgccu

SEQ ID NO: 44349 - RNA, 21 nt, Artificial Sequence
  Synthetic oligonucleotide: BID-4784
ugcugagggucggguccgccu

SEQ ID NO: 44350 - RNA, 22 nt, Artificial Sequence
  Synthetic oligonucleotide: BID-4785
gugcugagggucggguccgccu

SEQ ID NO: 44351 - RNA, 23 nt, Artificial Sequence
  Synthetic oligonucleotide: BID-4786
ggugcugagggucggguccgccu

SEQ ID NO: 44352 - RNA, 24 nt, Artificial Sequence
  Synthetic oligonucleotide: BID-4787
cggugcugagggucggguccgccu

SEQ ID NO: 44353 - RNA, 18 nt, Artificial Sequence
  Synthetic oligonucleotide: BID-4788
gaccguguccgcgcgccu

SEQ ID NO: 44354 - RNA, 19 nt, Artificial Sequence
  Synthetic oligonucleotide: BID-4789
cgaccguguccgcgcgccu

SEQ ID NO: 44355 - RNA, 20 nt, Artificial Sequence
  Synthetic oligonucleotide: BID-1993
ucgaccguguccgcgcgccu

SEQ ID NO: 44356 - RNA, 21 nt, Artificial Sequence
  Synthetic oligonucleotide: BID-4790
gucgaccguguccgcgcgccu

SEQ ID NO: 44357 - RNA, 22 nt, Artificial Sequence
  Synthetic oligonucleotide: BID-4791
agucgaccguguccgcgcgccu

SEQ ID NO: 44358 - RNA, 23 nt, Artificial Sequence
  Synthetic oligonucleotide: BID-4792
uagucgaccguguccgcgcgccu

SEQ ID NO: 44359 - RNA, 24 nt, Artificial Sequence
  Synthetic oligonucleotide: BID-4793
guagucgaccguguccgcgcgccu

SEQ ID NO: 44360 - RNA, 18 nt, Artificial Sequence
  Synthetic oligonucleotide: BID-4794
uggggcucgcccgcuccu

SEQ ID NO: 44361 - RNA, 19 nt, Artificial Sequence
  Synthetic oligonucleotide: BID-4795
cuggggcucgcccgcuccu

SEQ ID NO: 44362 - RNA, 20 nt, Artificial Sequence
  Synthetic oligonucleotide: BID-1202
acuggggcucgcccgcuccu

SEQ ID NO: 44363 - RNA, 21 nt, Artificial Sequence
  Synthetic oligonucleotide: BID-4796
uacuggggcucgcccgcuccu

SEQ ID NO: 44364 - RNA, 22 nt, Artificial Sequence
  Synthetic oligonucleotide: BID-4797
uuacuggggcucgcccgcuccu

SEQ ID NO: 44365 - RNA, 23 nt, Artificial Sequence
  Synthetic oligonucleotide: BID-4798
cuuacuggggcucgcccgcuccu

SEQ ID NO: 44366 - RNA, 24 nt, Artificial Sequence
  Synthetic oligonucleotide: BID-4799
gcuuacuggggcucgcccgcuccu

SEQ ID NO: 44367 - RNA, 18 nt, Artificial Sequence
  Synthetic oligonucleotide: BID-4800
ggggacccugggagagcu

SEQ ID NO: 44368 - RNA, 19 nt, Artificial Sequence
  Synthetic oligonucleotide: BID-4801
aggggacccugggagagcu

SEQ ID NO: 44369 - RNA, 20 nt, Artificial Sequence
  Synthetic oligonucleotide: BID-1216
caggggacccugggagagcu

SEQ ID NO: 44370 - RNA, 21 nt, Artificial Sequence
  Synthetic oligonucleotide: BID-4802
ccaggggacccugggagagcu

SEQ ID NO: 44371 - RNA, 22 nt, Artificial Sequence
  Synthetic oligonucleotide: BID-4803
cccaggggacccugggagagcu

SEQ ID NO: 44372 - RNA, 23 nt, Artificial Sequence
  Synthetic oligonucleotide: BID-4804
ccccaggggacccugggagagcu

SEQ ID NO: 44373 - RNA, 24 nt, Artificial Sequence
  Synthetic oligonucleotide: BID-4805
accccaggggacccugggagagcu

SEQ ID NO: 44374 - RNA, 18 nt, Artificial Sequence
  Synthetic oligonucleotide: BID-4806
cuccucccgagcggagcu

SEQ ID NO: 44375 - RNA, 19 nt, Artificial Sequence
  Synthetic oligonucleotide: BID-4807
gcuccucccgagcggagcu

SEQ ID NO: 44376 - RNA, 20 nt, Artificial Sequence
  Synthetic oligonucleotide: BID-1198
ggcuccucccgagcggagcu

SEQ ID NO: 44377 - RNA, 21 nt, Artificial Sequence
  Synthetic oligonucleotide: BID-4808
cggcuccucccgagcggagcu

SEQ ID NO: 44378 - RNA, 22 nt, Artificial Sequence
  Synthetic oligonucleotide: BID-4809
ccggcuccucccgagcggagcu

SEQ ID NO: 44379 - RNA, 23 nt, Artificial Sequence
  Synthetic oligonucleotide: BID-4810
gccggcuccucccgagcggagcu

SEQ ID NO: 44380 - RNA, 24 nt, Artificial Sequence
  Synthetic oligonucleotide: BID-4811
ugccggcuccucccgagcggagcu

SEQ ID NO: 44381 - RNA, 18 nt, Artificial Sequence
  Synthetic oligonucleotide: BID-4812
cugccccggcguggagcu

SEQ ID NO: 44382 - RNA, 19 nt, Artificial Sequence
  Synthetic oligonucleotide: BID-4813
ccugccccggcguggagcu

SEQ ID NO: 44383 - RNA, 20 nt, Artificial Sequence
  Synthetic oligonucleotide: BID-1131
gccugccccggcguggagcu

SEQ ID NO: 44384 - RNA, 21 nt, Artificial Sequence
  Synthetic oligonucleotide: BID-4814
cgccugccccggcguggagcu

SEQ ID NO: 44385 - RNA, 22 nt, Artificial Sequence
  Synthetic oligonucleotide: BID-4815
ccgccugccccggcguggagcu

SEQ ID NO: 44386 - RNA, 23 nt, Artificial Sequence
  Synthetic oligonucleotide: BID-4816
gccgccugccccggcguggagcu

SEQ ID NO: 44387 - RNA, 24 nt, Artificial Sequence
  Synthetic oligonucleotide: BID-4817
ugccgccugccccggcguggagcu

SEQ ID NO: 44388 - RNA, 18 nt, Artificial Sequence
  Synthetic oligonucleotide: BID-3520
ggauucuguaagugggcu

SEQ ID NO: 44389 - RNA, 19 nt, Artificial Sequence
  Synthetic oligonucleotide: BID-3521
cggauucuguaagugggcu

SEQ ID NO: 44390 - RNA, 20 nt, Artificial Sequence
  Synthetic oligonucleotide: BID-5
gcggauucuguaagugggcu

SEQ ID NO: 44391 - RNA, 21 nt, Artificial Sequence
  Synthetic oligonucleotide: BID-3522
ugcggauucuguaagugggcu

SEQ ID NO: 44392 - RNA, 22 nt, Artificial Sequence
  Synthetic oligonucleotide: BID-3523
gugcggauucuguaagugggcu

SEQ ID NO: 44393 - RNA, 23 nt, Artificial Sequence
  Synthetic oligonucleotide: BID-3524
agugcggauucuguaagugggcu

SEQ ID NO: 44394 - RNA, 24 nt, Artificial Sequence
  Synthetic oligonucleotide: BID-3525
cagugcggauucuguaagugggcu

SEQ ID NO: 44395 - RNA, 18 nt, Artificial Sequence
  Synthetic oligonucleotide: BID-4818
auccucgcugcugcugcu

SEQ ID NO: 44396 - RNA, 19 nt, Artificial Sequence
  Synthetic oligonucleotide: BID-4819
gauccucgcugcugcugcu

SEQ ID NO: 44397 - RNA, 20 nt, Artificial Sequence
  Synthetic oligonucleotide: BID-2093
ggauccucgcugcugcugcu

SEQ ID NO: 44398 - RNA, 21 nt, Artificial Sequence
  Synthetic oligonucleotide: BID-4820
cggauccucgcugcugcugcu

SEQ ID NO: 44399 - RNA, 22 nt, Artificial Sequence
  Synthetic oligonucleotide: BID-4821
gcggauccucgcugcugcugcu

SEQ ID NO: 44400 - RNA, 23 nt, Artificial Sequence
  Synthetic oligonucleotide: BID-4822
ugcggauccucgcugcugcugcu

SEQ ID NO: 44401 - RNA, 24 nt, Artificial Sequence
  Synthetic oligonucleotide: BID-4823
gugcggauccucgcugcugcugcu

SEQ ID NO: 44402 - RNA, 18 nt, Artificial Sequence
  Synthetic oligonucleotide: BID-4824
cggggcgggcccgggcgu

SEQ ID NO: 44403 - RNA, 19 nt, Artificial Sequence
  Synthetic oligonucleotide: BID-4825
ccggggcgggcccgggcgu

SEQ ID NO: 44404 - RNA, 20 nt, Artificial Sequence
  Synthetic oligonucleotide: BID-3632
gccggggcgggcccgggcgu

SEQ ID NO: 44405 - RNA, 21 nt, Artificial Sequence
  Synthetic oligonucleotide: BID-4826
ggccggggcgggcccgggcgu

SEQ ID NO: 44406 - RNA, 22 nt, Artificial Sequence
  Synthetic oligonucleotide: BID-4827
gggccggggcgggcccgggcgu

SEQ ID NO: 44407 - RNA, 23 nt, Artificial Sequence
  Synthetic oligonucleotide: BID-4828
cgggccggggcgggcccgggcgu

SEQ ID NO: 44408 - RNA, 24 nt, Artificial Sequence
  Synthetic oligonucleotide: BID-4829
gcgggccggggcgggcccgggcgu

SEQ ID NO: 44409 - RNA, 18 nt, Artificial Sequence
  Synthetic oligonucleotide: BID-4830
ccugggcccgaccgcggu

SEQ ID NO: 44410 - RNA, 19 nt, Artificial Sequence
  Synthetic oligonucleotide: BID-4831
cccugggcccgaccgcggu

SEQ ID NO: 44411 - RNA, 20 nt, Artificial Sequence
  Synthetic oligonucleotide: BID-2012
gcccugggcccgaccgcggu

SEQ ID NO: 44412 - RNA, 21 nt, Artificial Sequence
  Synthetic oligonucleotide: BID-4832
cgcccugggcccgaccgcggu

SEQ ID NO: 44413 - RNA, 22 nt, Artificial Sequence
  Synthetic oligonucleotide: BID-4833
ccgcccugggcccgaccgcggu

SEQ ID NO: 44414 - RNA, 23 nt, Artificial Sequence
  Synthetic oligonucleotide: BID-4834
cccgcccugggcccgaccgcggu

SEQ ID NO: 44415 - RNA, 24 nt, Artificial Sequence
  Synthetic oligonucleotide: BID-4835
gcccgcccugggcccgaccgcggu

SEQ ID NO: 44416 - RNA, 18 nt, Artificial Sequence
  Synthetic oligonucleotide: BID-4836
gggcugacaaagcgcggu

SEQ ID NO: 44417 - RNA, 19 nt, Artificial Sequence
  Synthetic oligonucleotide: BID-4837
agggcugacaaagcgcggu

SEQ ID NO: 44418 - RNA, 20 nt, Artificial Sequence
  Synthetic oligonucleotide: BID-1199
cagggcugacaaagcgcggu

SEQ ID NO: 44419 - RNA, 21 nt, Artificial Sequence
  Synthetic oligonucleotide: BID-4838
ucagggcugacaaagcgcggu

SEQ ID NO: 44420 - RNA, 22 nt, Artificial Sequence
  Synthetic oligonucleotide: BID-4839
cucagggcugacaaagcgcggu

SEQ ID NO: 44421 - RNA, 23 nt, Artificial Sequence
  Synthetic oligonucleotide: BID-4840
gcucagggcugacaaagcgcggu

SEQ ID NO: 44422 - RNA, 24 nt, Artificial Sequence
  Synthetic oligonucleotide: BID-4841
agcucagggcugacaaagcgcggu

SEQ ID NO: 44423 - RNA, 18 nt, Artificial Sequence
  Synthetic oligonucleotide: BID-4842
uucaccugcaggcagggu

SEQ ID NO: 44424 - RNA, 19 nt, Artificial Sequence
  Synthetic oligonucleotide: BID-4843
cuucaccugcaggcagggu

SEQ ID NO: 44425 - RNA, 20 nt, Artificial Sequence
  Synthetic oligonucleotide: BID-2137
ccuucaccugcaggcagggu

SEQ ID NO: 44426 - RNA, 21 nt, Artificial Sequence
  Synthetic oligonucleotide: BID-4844
gccuucaccugcaggcagggu

SEQ ID NO: 44427 - RNA, 22 nt, Artificial Sequence
  Synthetic oligonucleotide: BID-4845
ggccuucaccugcaggcagggu

SEQ ID NO: 44428 - RNA, 23 nt, Artificial Sequence
  Synthetic oligonucleotide: BID-4846
cggccuucaccugcaggcagggu

SEQ ID NO: 44429 - RNA, 24 nt, Artificial Sequence
  Synthetic oligonucleotide: BID-4847
ccggccuucaccugcaggcagggu

SEQ ID NO: 44430 - RNA, 18 nt, Artificial Sequence
  Synthetic oligonucleotide: BID-4848
gggauucaggggaggggu

SEQ ID NO: 44431 - RNA, 19 nt, Artificial Sequence
  Synthetic oligonucleotide: BID-4849
ggggauucaggggaggggu

SEQ ID NO: 44432 - RNA, 20 nt, Artificial Sequence
  Synthetic oligonucleotide: BID-1170
uggggauucaggggaggggu

SEQ ID NO: 44433 - RNA, 21 nt, Artificial Sequence
  Synthetic oligonucleotide: BID-4850
cuggggauucaggggaggggu

SEQ ID NO: 44434 - RNA, 22 nt, Artificial Sequence
  Synthetic oligonucleotide: BID-4851
ccuggggauucaggggaggggu

SEQ ID NO: 44435 - RNA, 23 nt, Artificial Sequence
  Synthetic oligonucleotide: BID-4852
gccuggggauucaggggaggggu

SEQ ID NO: 44436 - RNA, 24 nt, Artificial Sequence
  Synthetic oligonucleotide: BID-4853
ggccuggggauucaggggaggggu

SEQ ID NO: 44437 - RNA, 18 nt, Artificial Sequence
  Synthetic oligonucleotide: BID-4854
ggaggggaggcggggggu

SEQ ID NO: 44438 - RNA, 19 nt, Artificial Sequence
  Synthetic oligonucleotide: BID-4855
aggaggggaggcggggggu

SEQ ID NO: 44439 - RNA, 20 nt, Artificial Sequence
  Synthetic oligonucleotide: BID-1147
gaggaggggaggcggggggu

SEQ ID NO: 44440 - RNA, 21 nt, Artificial Sequence
  Synthetic oligonucleotide: BID-4856
agaggaggggaggcggggggu

SEQ ID NO: 44441 - RNA, 22 nt, Artificial Sequence
  Synthetic oligonucleotide: BID-4857
cagaggaggggaggcggggggu

SEQ ID NO: 44442 - RNA, 23 nt, Artificial Sequence
  Synthetic oligonucleotide: BID-4858
ccagaggaggggaggcggggggu

SEQ ID NO: 44443 - RNA, 24 nt, Artificial Sequence
  Synthetic oligonucleotide: BID-4859
gccagaggaggggaggcggggggu

SEQ ID NO: 44444 - RNA, 18 nt, Artificial Sequence
  Synthetic oligonucleotide: BID-4860
ccacguggccuggggauu

SEQ ID NO: 44445 - RNA, 19 nt, Artificial Sequence
  Synthetic oligonucleotide: BID-4861
uccacguggccuggggauu

SEQ ID NO: 44446 - RNA, 20 nt, Artificial Sequence
  Synthetic oligonucleotide: BID-1164
cuccacguggccuggggauu

SEQ ID NO: 44447 - RNA, 21 nt, Artificial Sequence
  Synthetic oligonucleotide: BID-4862
ucuccacguggccuggggauu

SEQ ID NO: 44448 - RNA, 22 nt, Artificial Sequence
  Synthetic oligonucleotide: BID-4863
cucuccacguggccuggggauu

SEQ ID NO: 44449 - RNA, 23 nt, Artificial Sequence
  Synthetic oligonucleotide: BID-4864
ccucuccacguggccuggggauu

SEQ ID NO: 44450 - RNA, 24 nt, Artificial Sequence
  Synthetic oligonucleotide: BID-4865
uccucuccacguggccuggggauu

SEQ ID NO: 44451 - RNA, 18 nt, Artificial Sequence
  Synthetic oligonucleotide: BID-4866
uggauaaggcuccaggaa

SEQ ID NO: 44452 - RNA, 19 nt, Artificial Sequence
  Synthetic oligonucleotide: BID-4867
guggauaaggcuccaggaa

SEQ ID NO: 44453 - RNA, 20 nt, Artificial Sequence
  Synthetic oligonucleotide: BID-1047
uguggauaaggcuccaggaa

SEQ ID NO: 44454 - RNA, 21 nt, Artificial Sequence
  Synthetic oligonucleotide: BID-4868
guguggauaaggcuccaggaa

SEQ ID NO: 44455 - RNA, 22 nt, Artificial Sequence
  Synthetic oligonucleotide: BID-4869
gguguggauaaggcuccaggaa

SEQ ID NO: 44456 - RNA, 23 nt, Artificial Sequence
  Synthetic oligonucleotide: BID-4870
ggguguggauaaggcuccaggaa

SEQ ID NO: 44457 - RNA, 24 nt, Artificial Sequence
  Synthetic oligonucleotide: BID-4871
aggguguggauaaggcuccaggaa

SEQ ID NO: 44458 - RNA, 18 nt, Artificial Sequence
  Synthetic oligonucleotide: BID-4872
gauucugaauguuuccca

SEQ ID NO: 44459 - RNA, 19 nt, Artificial Sequence
  Synthetic oligonucleotide: BID-4873
ggauucugaauguuuccca

SEQ ID NO: 44460 - RNA, 20 nt, Artificial Sequence
  Synthetic oligonucleotide: BID-1564
gggauucugaauguuuccca

SEQ ID NO: 44461 - RNA, 21 nt, Artificial Sequence
  Synthetic oligonucleotide: BID-4874
ggggauucugaauguuuccca

SEQ ID NO: 44462 - RNA, 22 nt, Artificial Sequence
  Synthetic oligonucleotide: BID-4875
uggggauucugaauguuuccca

SEQ ID NO: 44463 - RNA, 23 nt, Artificial Sequence
  Synthetic oligonucleotide: BID-4876
cuggggauucugaauguuuccca

SEQ ID NO: 44464 - RNA, 24 nt, Artificial Sequence
  Synthetic oligonucleotide: BID-4877
ccuggggauucugaauguuuccca

SEQ ID NO: 44465 - RNA, 18 nt, Artificial Sequence
  Synthetic oligonucleotide: BID-4878
ccucaacuccugaugcca

SEQ ID NO: 44466 - RNA, 19 nt, Artificial Sequence
  Synthetic oligonucleotide: BID-4879
accucaacuccugaugcca

SEQ ID NO: 44467 - RNA, 20 nt, Artificial Sequence
  Synthetic oligonucleotide: BID-1875
uaccucaacuccugaugcca

SEQ ID NO: 44468 - RNA, 21 nt, Artificial Sequence
  Synthetic oligonucleotide: BID-4880
cuaccucaacuccugaugcca

SEQ ID NO: 44469 - RNA, 22 nt, Artificial Sequence
  Synthetic oligonucleotide: BID-4881
ucuaccucaacuccugaugcca

SEQ ID NO: 44470 - RNA, 23 nt, Artificial Sequence
  Synthetic oligonucleotide: BID-4882
gucuaccucaacuccugaugcca

SEQ ID NO: 44471 - RNA, 24 nt, Artificial Sequence
  Synthetic oligonucleotide: BID-4883
ugucuaccucaacuccugaugcca

SEQ ID NO: 44472 - RNA, 18 nt, Artificial Sequence
  Synthetic oligonucleotide: BID-4884
ccuuaagaccccagcuca

SEQ ID NO: 44473 - RNA, 19 nt, Artificial Sequence
  Synthetic oligonucleotide: BID-4885
cccuuaagaccccagcuca

SEQ ID NO: 44474 - RNA, 20 nt, Artificial Sequence
  Synthetic oligonucleotide: BID-1023
acccuuaagaccccagcuca

SEQ ID NO: 44475 - RNA, 21 nt, Artificial Sequence
  Synthetic oligonucleotide: BID-4886
cacccuuaagaccccagcuca

SEQ ID NO: 44476 - RNA, 22 nt, Artificial Sequence
  Synthetic oligonucleotide: BID-4887
acacccuuaagaccccagcuca

SEQ ID NO: 44477 - RNA, 23 nt, Artificial Sequence
  Synthetic oligonucleotide: BID-4888
cacacccuuaagaccccagcuca

SEQ ID NO: 44478 - RNA, 24 nt, Artificial Sequence
  Synthetic oligonucleotide: BID-4889
ccacacccuuaagaccccagcuca

SEQ ID NO: 44479 - RNA, 18 nt, Artificial Sequence
  Synthetic oligonucleotide: BID-4890
gccuccuguggguggaga

SEQ ID NO: 44480 - RNA, 19 nt, Artificial Sequence
  Synthetic oligonucleotide: BID-4891
agccuccuguggguggaga

SEQ ID NO: 44481 - RNA, 20 nt, Artificial Sequence
  Synthetic oligonucleotide: BID-1038
aagccuccuguggguggaga

SEQ ID NO: 44482 - RNA, 21 nt, Artificial Sequence
  Synthetic oligonucleotide: BID-4892
aaagccuccuguggguggaga

SEQ ID NO: 44483 - RNA, 22 nt, Artificial Sequence
  Synthetic oligonucleotide: BID-4893
caaagccuccuguggguggaga

SEQ ID NO: 44484 - RNA, 23 nt, Artificial Sequence
  Synthetic oligonucleotide: BID-4894
ucaaagccuccuguggguggaga

SEQ ID NO: 44485 - RNA, 24 nt, Artificial Sequence
  Synthetic oligonucleotide: BID-4895
cucaaagccuccuguggguggaga

SEQ ID NO: 44486 - RNA, 18 nt, Artificial Sequence
  Synthetic oligonucleotide: BID-4896
gucugaaacagucgcgua

SEQ ID NO: 44487 - RNA, 19 nt, Artificial Sequence
  Synthetic oligonucleotide: BID-4897
ugucugaaacagucgcgua

SEQ ID NO: 44488 - RNA, 20 nt, Artificial Sequence
  Synthetic oligonucleotide: BID-708
cugucugaaacagucgcgua

SEQ ID NO: 44489 - RNA, 21 nt, Artificial Sequence
  Synthetic oligonucleotide: BID-4898
acugucugaaacagucgcgua

SEQ ID NO: 44490 - RNA, 22 nt, Artificial Sequence
  Synthetic oligonucleotide: BID-4899
cacugucugaaacagucgcgua

SEQ ID NO: 44491 - RNA, 23 nt, Artificial Sequence
  Synthetic oligonucleotide: BID-4900
acacugucugaaacagucgcgua

SEQ ID NO: 44492 - RNA, 24 nt, Artificial Sequence
  Synthetic oligonucleotide: BID-4901
gacacugucugaaacagucgcgua

SEQ ID NO: 44493 - RNA, 18 nt, Artificial Sequence
  Synthetic oligonucleotide: BID-4902
uugauauccaaauaauua

SEQ ID NO: 44494 - RNA, 19 nt, Artificial Sequence
  Synthetic oligonucleotide: BID-4903
guugauauccaaauaauua

SEQ ID NO: 44495 - RNA, 20 nt, Artificial Sequence
  Synthetic oligonucleotide: BID-1548
aguugauauccaaauaauua

SEQ ID NO: 44496 - RNA, 21 nt, Artificial Sequence
  Synthetic oligonucleotide: BID-4904
gaguugauauccaaauaauua

SEQ ID NO: 44497 - RNA, 22 nt, Artificial Sequence
  Synthetic oligonucleotide: BID-4905
agaguugauauccaaauaauua

SEQ ID NO: 44498 - RNA, 23 nt, Artificial Sequence
  Synthetic oligonucleotide: BID-4906
cagaguugauauccaaauaauua

SEQ ID NO: 44499 - RNA, 24 nt, Artificial Sequence
  Synthetic oligonucleotide: BID-4907
ucagaguugauauccaaauaauua

SEQ ID NO: 44500 - RNA, 18 nt, Artificial Sequence
  Synthetic oligonucleotide: BID-4908
ccugguuccgugaggacc

SEQ ID NO: 44501 - RNA, 19 nt, Artificial Sequence
  Synthetic oligonucleotide: BID-4909
cccugguuccgugaggacc

SEQ ID NO: 44502 - RNA, 20 nt, Artificial Sequence
  Synthetic oligonucleotide: BID-1557
ccccugguuccgugaggacc

SEQ ID NO: 44503 - RNA, 21 nt, Artificial Sequence
  Synthetic oligonucleotide: BID-4910
accccugguuccgugaggacc

SEQ ID NO: 44504 - RNA, 22 nt, Artificial Sequence
  Synthetic oligonucleotide: BID-4911
aaccccugguuccgugaggacc

SEQ ID NO: 44505 - RNA, 23 nt, Artificial Sequence
  Synthetic oligonucleotide: BID-4912
aaaccccugguuccgugaggacc

SEQ ID NO: 44506 - RNA, 24 nt, Artificial Sequence
  Synthetic oligonucleotide: BID-4913
caaaccccugguuccgugaggacc

SEQ ID NO: 44507 - RNA, 18 nt, Artificial Sequence
  Synthetic oligonucleotide: BID-4914
cgcgccggcgcgggcucc

SEQ ID NO: 44508 - RNA, 19 nt, Artificial Sequence
  Synthetic oligonucleotide: BID-4915
ccgcgccggcgcgggcucc

SEQ ID NO: 44509 - RNA, 20 nt, Artificial Sequence
  Synthetic oligonucleotide: BID-1577
cccgcgccggcgcgggcucc

SEQ ID NO: 44510 - RNA, 21 nt, Artificial Sequence
  Synthetic oligonucleotide: BID-4916
ccccgcgccggcgcgggcucc

SEQ ID NO: 44511 - RNA, 22 nt, Artificial Sequence
  Synthetic oligonucleotide: BID-4917
gccccgcgccggcgcgggcucc

SEQ ID NO: 44512 - RNA, 23 nt, Artificial Sequence
  Synthetic oligonucleotide: BID-4918
agccccgcgccggcgcgggcucc

SEQ ID NO: 44513 - RNA, 24 nt, Artificial Sequence
  Synthetic oligonucleotide: BID-4919
cagccccgcgccggcgcgggcucc

SEQ ID NO: 44514 - RNA, 18 nt, Artificial Sequence
  Synthetic oligonucleotide: BID-4920
gaauuaucccagcggcgc

SEQ ID NO: 44515 - RNA, 19 nt, Artificial Sequence
  Synthetic oligonucleotide: BID-4921
ggaauuaucccagcggcgc

SEQ ID NO: 44516 - RNA, 20 nt, Artificial Sequence
  Synthetic oligonucleotide: BID-705
aggaauuaucccagcggcgc

SEQ ID NO: 44517 - RNA, 21 nt, Artificial Sequence
  Synthetic oligonucleotide: BID-4922
uaggaauuaucccagcggcgc

SEQ ID NO: 44518 - RNA, 22 nt, Artificial Sequence
  Synthetic oligonucleotide: BID-4923
uuaggaauuaucccagcggcgc

SEQ ID NO: 44519 - RNA, 23 nt, Artificial Sequence
  Synthetic oligonucleotide: BID-4924
auuaggaauuaucccagcggcgc

SEQ ID NO: 44520 - RNA, 24 nt, Artificial Sequence
  Synthetic oligonucleotide: BID-4925
cauuaggaauuaucccagcggcgc

SEQ ID NO: 44521 - RNA, 18 nt, Artificial Sequence
  Synthetic oligonucleotide: BID-4926
cgcaggcagaggcuuggc

SEQ ID NO: 44522 - RNA, 19 nt, Artificial Sequence
  Synthetic oligonucleotide: BID-4927
ccgcaggcagaggcuuggc

SEQ ID NO: 44523 - RNA, 20 nt, Artificial Sequence
  Synthetic oligonucleotide: BID-1871
gccgcaggcagaggcuuggc

SEQ ID NO: 44524 - RNA, 21 nt, Artificial Sequence
  Synthetic oligonucleotide: BID-4928
ggccgcaggcagaggcuuggc

SEQ ID NO: 44525 - RNA, 22 nt, Artificial Sequence
  Synthetic oligonucleotide: BID-4929
gggccgcaggcagaggcuuggc

SEQ ID NO: 44526 - RNA, 23 nt, Artificial Sequence
  Synthetic oligonucleotide: BID-4930
ugggccgcaggcagaggcuuggc

SEQ ID NO: 44527 - RNA, 24 nt, Artificial Sequence
  Synthetic oligonucleotide: BID-4931
cugggccgcaggcagaggcuuggc

SEQ ID NO: 44528 - RNA, 18 nt, Artificial Sequence
  Synthetic oligonucleotide: BID-4932
aacugaaaaagaaauuag

SEQ ID NO: 44529 - RNA, 19 nt, Artificial Sequence
  Synthetic oligonucleotide: BID-4933
aaacugaaaaagaaauuag

SEQ ID NO: 44530 - RNA, 20 nt, Artificial Sequence
  Synthetic oligonucleotide: BID-1546
aaaacugaaaaagaaauuag

SEQ ID NO: 44531 - RNA, 21 nt, Artificial Sequence
  Synthetic oligonucleotide: BID-4934
aaaaacugaaaaagaaauuag

SEQ ID NO: 44532 - RNA, 22 nt, Artificial Sequence
  Synthetic oligonucleotide: BID-4935
uaaaaacugaaaaagaaauuag

SEQ ID NO: 44533 - RNA, 23 nt, Artificial Sequence
  Synthetic oligonucleotide: BID-4936
cuaaaaacugaaaaagaaauuag

SEQ ID NO: 44534 - RNA, 24 nt, Artificial Sequence
  Synthetic oligonucleotide: BID-4937
acuaaaaacugaaaaagaaauuag

SEQ ID NO: 44535 - RNA, 18 nt, Artificial Sequence
  Synthetic oligonucleotide: BID-4938
aagguggaagagcucugg

SEQ ID NO: 44536 - RNA, 19 nt, Artificial Sequence
  Synthetic oligonucleotide: BID-4939
gaagguggaagagcucugg

SEQ ID NO: 44537 - RNA, 20 nt, Artificial Sequence
  Synthetic oligonucleotide: BID-1912
agaagguggaagagcucugg

SEQ ID NO: 44538 - RNA, 21 nt, Artificial Sequence
  Synthetic oligonucleotide: BID-4940
gagaagguggaagagcucugg

SEQ ID NO: 44539 - RNA, 22 nt, Artificial Sequence
  Synthetic oligonucleotide: BID-4941
ugagaagguggaagagcucugg

SEQ ID NO: 44540 - RNA, 23 nt, Artificial Sequence
  Synthetic oligonucleotide: BID-4942
cugagaagguggaagagcucugg

SEQ ID NO: 44541 - RNA, 24 nt, Artificial Sequence
  Synthetic oligonucleotide: BID-4943
ccugagaagguggaagagcucugg

SEQ ID NO: 44542 - RNA, 18 nt, Artificial Sequence
  Synthetic oligonucleotide: BID-4944
uaaacugauguuuuaaau

SEQ ID NO: 44543 - RNA, 19 nt, Artificial Sequence
  Synthetic oligonucleotide: BID-4945
uuaaacugauguuuuaaau

SEQ ID NO: 44544 - RNA, 20 nt, Artificial Sequence
  Synthetic oligonucleotide: BID-1547
guuaaacugauguuuuaaau

SEQ ID NO: 44545 - RNA, 21 nt, Artificial Sequence
  Synthetic oligonucleotide: BID-4946
uguuaaacugauguuuuaaau

SEQ ID NO: 44546 - RNA, 22 nt, Artificial Sequence
  Synthetic oligonucleotide: BID-4947
auguuaaacugauguuuuaaau

SEQ ID NO: 44547 - RNA, 23 nt, Artificial Sequence
  Synthetic oligonucleotide: BID-4948
uauguuaaacugauguuuuaaau

SEQ ID NO: 44548 - RNA, 24 nt, Artificial Sequence
  Synthetic oligonucleotide: BID-4949
auauguuaaacugauguuuuaaau

SEQ ID NO: 44549 - RNA, 18 nt, Artificial Sequence
  Synthetic oligonucleotide: BID-4950
acagugagagcgaggacu

SEQ ID NO: 44550 - RNA, 19 nt, Artificial Sequence
  Synthetic oligonucleotide: BID-4951
cacagugagagcgaggacu

SEQ ID NO: 44551 - RNA, 20 nt, Artificial Sequence
  Synthetic oligonucleotide: BID-1899
ccacagugagagcgaggacu

SEQ ID NO: 44552 - RNA, 21 nt, Artificial Sequence
  Synthetic oligonucleotide: BID-4952
cccacagugagagcgaggacu

SEQ ID NO: 44553 - RNA, 22 nt, Artificial Sequence
  Synthetic oligonucleotide: BID-4953
ccccacagugagagcgaggacu

SEQ ID NO: 44554 - RNA, 23 nt, Artificial Sequence
  Synthetic oligonucleotide: BID-4954
cccccacagugagagcgaggacu

SEQ ID NO: 44555 - RNA, 24 nt, Artificial Sequence
  Synthetic oligonucleotide: BID-4955
ucccccacagugagagcgaggacu

SEQ ID NO: 44556 - RNA, 18 nt, Artificial Sequence
  Synthetic oligonucleotide: BID-4956
cuguuccagaaacagccu

SEQ ID NO: 44557 - RNA, 19 nt, Artificial Sequence
  Synthetic oligonucleotide: BID-4957
acuguuccagaaacagccu

SEQ ID NO: 44558 - RNA, 20 nt, Artificial Sequence
  Synthetic oligonucleotide: BID-701
gacuguuccagaaacagccu

SEQ ID NO: 44559 - RNA, 21 nt, Artificial Sequence
  Synthetic oligonucleotide: BID-4958
agacuguuccagaaacagccu

SEQ ID NO: 44560 - RNA, 22 nt, Artificial Sequence
  Synthetic oligonucleotide: BID-4959
cagacuguuccagaaacagccu

SEQ ID NO: 44561 - RNA, 23 nt, Artificial Sequence
  Synthetic oligonucleotide: BID-4960
ccagacuguuccagaaacagccu

SEQ ID NO: 44562 - RNA, 24 nt, Artificial Sequence
  Synthetic oligonucleotide: BID-4961
cccagacuguuccagaaacagccu

SEQ ID NO: 44563 - RNA, 18 nt, Artificial Sequence
  Synthetic oligonucleotide: BID-4962
cccaucucaaagccuccu

SEQ ID NO: 44564 - RNA, 19 nt, Artificial Sequence
  Synthetic oligonucleotide: BID-4963
ccccaucucaaagccuccu

SEQ ID NO: 44565 - RNA, 20 nt, Artificial Sequence
  Synthetic oligonucleotide: BID-1887
cccccaucucaaagccuccu

SEQ ID NO: 44566 - RNA, 21 nt, Artificial Sequence
  Synthetic oligonucleotide: BID-4964
ccccccaucucaaagccuccu

SEQ ID NO: 44567 - RNA, 22 nt, Artificial Sequence
  Synthetic oligonucleotide: BID-4965
uccccccaucucaaagccuccu

SEQ ID NO: 44568 - RNA, 23 nt, Artificial Sequence
  Synthetic oligonucleotide: BID-4966
cuccccccaucucaaagccuccu

SEQ ID NO: 44569 - RNA, 24 nt, Artificial Sequence
  Synthetic oligonucleotide: BID-4967
gcuccccccaucucaaagccuccu

SEQ ID NO: 44570 - RNA, 18 nt, Artificial Sequence
  Synthetic oligonucleotide: BID-4968
ugagaagguggaagagcu

SEQ ID NO: 44571 - RNA, 19 nt, Artificial Sequence
  Synthetic oligonucleotide: BID-4969
cugagaagguggaagagcu

SEQ ID NO: 44572 - RNA, 20 nt, Artificial Sequence
  Synthetic oligonucleotide: BID-1911
ccugagaagguggaagagcu

SEQ ID NO: 44573 - RNA, 21 nt, Artificial Sequence
  Synthetic oligonucleotide: BID-4970
gccugagaagguggaagagcu

SEQ ID NO: 44574 - RNA, 22 nt, Artificial Sequence
  Synthetic oligonucleotide: BID-4971
agccugagaagguggaagagcu

SEQ ID NO: 44575 - RNA, 23 nt, Artificial Sequence
  Synthetic oligonucleotide: BID-4972
aagccugagaagguggaagagcu

SEQ ID NO: 44576 - RNA, 24 nt, Artificial Sequence
  Synthetic oligonucleotide: BID-4973
caagccugagaagguggaagagcu

SEQ ID NO: 44577 - RNA, 18 nt, Artificial Sequence
  Synthetic oligonucleotide: BID-4974
agagcgaggacugagggu

SEQ ID NO: 44578 - RNA, 19 nt, Artificial Sequence
  Synthetic oligonucleotide: BID-4975
gagagcgaggacugagggu

SEQ ID NO: 44579 - RNA, 20 nt, Artificial Sequence
  Synthetic oligonucleotide: BID-1900
ugagagcgaggacugagggu

SEQ ID NO: 44580 - RNA, 21 nt, Artificial Sequence
  Synthetic oligonucleotide: BID-4976
gugagagcgaggacugagggu

SEQ ID NO: 44581 - RNA, 22 nt, Artificial Sequence
  Synthetic oligonucleotide: BID-4977
agugagagcgaggacugagggu

SEQ ID NO: 44582 - RNA, 23 nt, Artificial Sequence
  Synthetic oligonucleotide: BID-4978
cagugagagcgaggacugagggu

SEQ ID NO: 44583 - RNA, 24 nt, Artificial Sequence
  Synthetic oligonucleotide: BID-4979
acagugagagcgaggacugagggu

SEQ ID NO: 44584 - RNA, 18 nt, Artificial Sequence
  Synthetic oligonucleotide: BID-4980
aacagucgcguaaggggu

SEQ ID NO: 44585 - RNA, 19 nt, Artificial Sequence
  Synthetic oligonucleotide: BID-4981
aaacagucgcguaaggggu

SEQ ID NO: 44586 - RNA, 20 nt, Artificial Sequence
  Synthetic oligonucleotide: BID-1573
gaaacagucgcguaaggggu

SEQ ID NO: 44587 - RNA, 21 nt, Artificial Sequence
  Synthetic oligonucleotide: BID-4982
ugaaacagucgcguaaggggu

SEQ ID NO: 44588 - RNA, 22 nt, Artificial Sequence
  Synthetic oligonucleotide: BID-4983
cugaaacagucgcguaaggggu

SEQ ID NO: 44589 - RNA, 23 nt, Artificial Sequence
  Synthetic oligonucleotide: BID-4984
ucugaaacagucgcguaaggggu

SEQ ID NO: 44590 - RNA, 24 nt, Artificial Sequence
  Synthetic oligonucleotide: BID-4985
gucugaaacagucgcguaaggggu

SEQ ID NO: 44591 - RNA, 18 nt, Artificial Sequence
  Synthetic oligonucleotide: BID-4986
guuucccagagaaucauu

SEQ ID NO: 44592 - RNA, 19 nt, Artificial Sequence
  Synthetic oligonucleotide: BID-4987
uguuucccagagaaucauu

SEQ ID NO: 44593 - RNA, 20 nt, Artificial Sequence
  Synthetic oligonucleotide: BID-703
auguuucccagagaaucauu

SEQ ID NO: 44594 - RNA, 21 nt, Artificial Sequence
  Synthetic oligonucleotide: BID-4988
aauguuucccagagaaucauu

SEQ ID NO: 44595 - RNA, 22 nt, Artificial Sequence
  Synthetic oligonucleotide: BID-4989
gaauguuucccagagaaucauu

SEQ ID NO: 44596 - RNA, 23 nt, Artificial Sequence
  Synthetic oligonucleotide: BID-4990
ugaauguuucccagagaaucauu

SEQ ID NO: 44597 - RNA, 24 nt, Artificial Sequence
  Synthetic oligonucleotide: BID-4991
cugaauguuucccagagaaucauu

SEQ ID NO: 44598 - RNA, 18 nt, Artificial Sequence
  Synthetic oligonucleotide: BID-4992
agaaacagccuggggauu

SEQ ID NO: 44599 - RNA, 19 nt, Artificial Sequence
  Synthetic oligonucleotide: BID-4993
cagaaacagccuggggauu

SEQ ID NO: 44600 - RNA, 20 nt, Artificial Sequence
  Synthetic oligonucleotide: BID-1562
ccagaaacagccuggggauu

SEQ ID NO: 44601 - RNA, 21 nt, Artificial Sequence
  Synthetic oligonucleotide: BID-4994
uccagaaacagccuggggauu

SEQ ID NO: 44602 - RNA, 22 nt, Artificial Sequence
  Synthetic oligonucleotide: BID-4995
uuccagaaacagccuggggauu

SEQ ID NO: 44603 - RNA, 23 nt, Artificial Sequence
  Synthetic oligonucleotide: BID-4996
guuccagaaacagccuggggauu

SEQ ID NO: 44604 - RNA, 24 nt, Artificial Sequence
  Synthetic oligonucleotide: BID-4997
uguuccagaaacagccuggggauu

SEQ ID NO: 44605 - RNA, 18 nt, Artificial Sequence
  Synthetic oligonucleotide: BID-4998
gaaccagggguuuggaaa

SEQ ID NO: 44606 - RNA, 19 nt, Artificial Sequence
  Synthetic oligonucleotide: BID-4999
ggaaccagggguuuggaaa

SEQ ID NO: 44607 - RNA, 20 nt, Artificial Sequence
  Synthetic oligonucleotide: BID-1642
cggaaccagggguuuggaaa

SEQ ID NO: 44608 - RNA, 21 nt, Artificial Sequence
  Synthetic oligonucleotide: BID-5000
acggaaccagggguuuggaaa

SEQ ID NO: 44609 - RNA, 22 nt, Artificial Sequence
  Synthetic oligonucleotide: BID-5001
cacggaaccagggguuuggaaa

SEQ ID NO: 44610 - RNA, 23 nt, Artificial Sequence
  Synthetic oligonucleotide: BID-5002
ucacggaaccagggguuuggaaa

SEQ ID NO: 44611 - RNA, 24 nt, Artificial Sequence
  Synthetic oligonucleotide: BID-5003
cucacggaaccagggguuuggaaa

SEQ ID NO: 44612 - RNA, 18 nt, Artificial Sequence
  Synthetic oligonucleotide: BID-5004
cacugugggggagcugca

SEQ ID NO: 44613 - RNA, 19 nt, Artificial Sequence
  Synthetic oligonucleotide: BID-5005
ucacugugggggagcugca

SEQ ID NO: 44614 - RNA, 20 nt, Artificial Sequence
  Synthetic oligonucleotide: BID-1719
cucacugugggggagcugca

SEQ ID NO: 44615 - RNA, 21 nt, Artificial Sequence
  Synthetic oligonucleotide: BID-5006
ucucacugugggggagcugca

SEQ ID NO: 44616 - RNA, 22 nt, Artificial Sequence
  Synthetic oligonucleotide: BID-5007
cucucacugugggggagcugca

SEQ ID NO: 44617 - RNA, 23 nt, Artificial Sequence
  Synthetic oligonucleotide: BID-5008
gcucucacugugggggagcugca

SEQ ID NO: 44618 - RNA, 24 nt, Artificial Sequence
  Synthetic oligonucleotide: BID-5009
cgcucucacugugggggagcugca

SEQ ID NO: 44619 - RNA, 18 nt, Artificial Sequence
  Synthetic oligonucleotide: BID-5010
gaagccauguggguugca

SEQ ID NO: 44620 - RNA, 19 nt, Artificial Sequence
  Synthetic oligonucleotide: BID-5011
ugaagccauguggguugca

SEQ ID NO: 44621 - RNA, 20 nt, Artificial Sequence
  Synthetic oligonucleotide: BID-1646
gugaagccauguggguugca

SEQ ID NO: 44622 - RNA, 21 nt, Artificial Sequence
  Synthetic oligonucleotide: BID-5012
ggugaagccauguggguugca

SEQ ID NO: 44623 - RNA, 22 nt, Artificial Sequence
  Synthetic oligonucleotide: BID-5013
gggugaagccauguggguugca

SEQ ID NO: 44624 - RNA, 23 nt, Artificial Sequence
  Synthetic oligonucleotide: BID-5014
ugggugaagccauguggguugca

SEQ ID NO: 44625 - RNA, 24 nt, Artificial Sequence
  Synthetic oligonucleotide: BID-5015
gugggugaagccauguggguugca

SEQ ID NO: 44626 - RNA, 18 nt, Artificial Sequence
  Synthetic oligonucleotide: BID-5016
cuagguccucacggaacc

SEQ ID NO: 44627 - RNA, 19 nt, Artificial Sequence
  Synthetic oligonucleotide: BID-5017
ucuagguccucacggaacc

SEQ ID NO: 44628 - RNA, 20 nt, Artificial Sequence
  Synthetic oligonucleotide: BID-784
uucuagguccucacggaacc

SEQ ID NO: 44629 - RNA, 21 nt, Artificial Sequence
  Synthetic oligonucleotide: BID-5018
auucuagguccucacggaacc

SEQ ID NO: 44630 - RNA, 22 nt, Artificial Sequence
  Synthetic oligonucleotide: BID-5019
cauucuagguccucacggaacc

SEQ ID NO: 44631 - RNA, 23 nt, Artificial Sequence
  Synthetic oligonucleotide: BID-5020
ucauucuagguccucacggaacc

SEQ ID NO: 44632 - RNA, 24 nt, Artificial Sequence
  Synthetic oligonucleotide: BID-5021
gucauucuagguccucacggaacc

SEQ ID NO: 44633 - RNA, 18 nt, Artificial Sequence
  Synthetic oligonucleotide: BID-5022
aagccucugccugcggcc

SEQ ID NO: 44634 - RNA, 19 nt, Artificial Sequence
  Synthetic oligonucleotide: BID-5023
caagccucugccugcggcc

SEQ ID NO: 44635 - RNA, 20 nt, Artificial Sequence
  Synthetic oligonucleotide: BID-1759
ccaagccucugccugcggcc

SEQ ID NO: 44636 - RNA, 21 nt, Artificial Sequence
  Synthetic oligonucleotide: BID-5024
gccaagccucugccugcggcc

SEQ ID NO: 44637 - RNA, 22 nt, Artificial Sequence
  Synthetic oligonucleotide: BID-5025
ggccaagccucugccugcggcc

SEQ ID NO: 44638 - RNA, 23 nt, Artificial Sequence
  Synthetic oligonucleotide: BID-5026
uggccaagccucugccugcggcc

SEQ ID NO: 44639 - RNA, 24 nt, Artificial Sequence
  Synthetic oligonucleotide: BID-5027
cuggccaagccucugccugcggcc

SEQ ID NO: 44640 - RNA, 18 nt, Artificial Sequence
  Synthetic oligonucleotide: BID-5028
agaccagauucccugagc

SEQ ID NO: 44641 - RNA, 19 nt, Artificial Sequence
  Synthetic oligonucleotide: BID-5029
gagaccagauucccugagc

SEQ ID NO: 44642 - RNA, 20 nt, Artificial Sequence
  Synthetic oligonucleotide: BID-890
cgagaccagauucccugagc

SEQ ID NO: 44643 - RNA, 21 nt, Artificial Sequence
  Synthetic oligonucleotide: BID-5030
ccgagaccagauucccugagc

SEQ ID NO: 44644 - RNA, 22 nt, Artificial Sequence
  Synthetic oligonucleotide: BID-5031
accgagaccagauucccugagc

SEQ ID NO: 44645 - RNA, 23 nt, Artificial Sequence
  Synthetic oligonucleotide: BID-5032
gaccgagaccagauucccugagc

SEQ ID NO: 44646 - RNA, 24 nt, Artificial Sequence
  Synthetic oligonucleotide: BID-5033
ugaccgagaccagauucccugagc

SEQ ID NO: 44647 - RNA, 18 nt, Artificial Sequence
  Synthetic oligonucleotide: BID-5034
cacuuacuccagcgccgc

SEQ ID NO: 44648 - RNA, 19 nt, Artificial Sequence
  Synthetic oligonucleotide: BID-5035
ccacuuacuccagcgccgc

SEQ ID NO: 44649 - RNA, 20 nt, Artificial Sequence
  Synthetic oligonucleotide: BID-772
gccacuuacuccagcgccgc

SEQ ID NO: 44650 - RNA, 21 nt, Artificial Sequence
  Synthetic oligonucleotide: BID-5036
ggccacuuacuccagcgccgc

SEQ ID NO: 44651 - RNA, 22 nt, Artificial Sequence
  Synthetic oligonucleotide: BID-5037
uggccacuuacuccagcgccgc

SEQ ID NO: 44652 - RNA, 23 nt, Artificial Sequence
  Synthetic oligonucleotide: BID-5038
uuggccacuuacuccagcgccgc

SEQ ID NO: 44653 - RNA, 24 nt, Artificial Sequence
  Synthetic oligonucleotide: BID-5039
guuggccacuuacuccagcgccgc

SEQ ID NO: 44654 - RNA, 18 nt, Artificial Sequence
  Synthetic oligonucleotide: BID-5040
uggcugggguuuaaaggc

SEQ ID NO: 44655 - RNA, 19 nt, Artificial Sequence
  Synthetic oligonucleotide: BID-5041
guggcugggguuuaaaggc

SEQ ID NO: 44656 - RNA, 20 nt, Artificial Sequence
  Synthetic oligonucleotide: BID-926
cguggcugggguuuaaaggc

SEQ ID NO: 44657 - RNA, 21 nt, Artificial Sequence
  Synthetic oligonucleotide: BID-5042
ucguggcugggguuuaaaggc

SEQ ID NO: 44658 - RNA, 22 nt, Artificial Sequence
  Synthetic oligonucleotide: BID-5043
uucguggcugggguuuaaaggc

SEQ ID NO: 44659 - RNA, 23 nt, Artificial Sequence
  Synthetic oligonucleotide: BID-5044
guucguggcugggguuuaaaggc

SEQ ID NO: 44660 - RNA, 24 nt, Artificial Sequence
  Synthetic oligonucleotide: BID-5045
aguucguggcugggguuuaaaggc

SEQ ID NO: 44661 - RNA, 18 nt, Artificial Sequence
  Synthetic oligonucleotide: BID-5046
gggggagcucuccugggc

SEQ ID NO: 44662 - RNA, 19 nt, Artificial Sequence
  Synthetic oligonucleotide: BID-5047
ggggggagcucuccugggc

SEQ ID NO: 44663 - RNA, 20 nt, Artificial Sequence
  Synthetic oligonucleotide: BID-1730
uggggggagcucuccugggc

SEQ ID NO: 44664 - RNA, 21 nt, Artificial Sequence
  Synthetic oligonucleotide: BID-5048
auggggggagcucuccugggc

SEQ ID NO: 44665 - RNA, 22 nt, Artificial Sequence
  Synthetic oligonucleotide: BID-5049
gauggggggagcucuccugggc

SEQ ID NO: 44666 - RNA, 23 nt, Artificial Sequence
  Synthetic oligonucleotide: BID-5050
agauggggggagcucuccugggc

SEQ ID NO: 44667 - RNA, 24 nt, Artificial Sequence
  Synthetic oligonucleotide: BID-5051
gagauggggggagcucuccugggc

SEQ ID NO: 44668 - RNA, 18 nt, Artificial Sequence
  Synthetic oligonucleotide: BID-5052
gggucagcaguucguggc

SEQ ID NO: 44669 - RNA, 19 nt, Artificial Sequence
  Synthetic oligonucleotide: BID-5053
ggggucagcaguucguggc

SEQ ID NO: 44670 - RNA, 20 nt, Artificial Sequence
  Synthetic oligonucleotide: BID-922
cggggucagcaguucguggc

SEQ ID NO: 44671 - RNA, 21 nt, Artificial Sequence
  Synthetic oligonucleotide: BID-5054
gcggggucagcaguucguggc

SEQ ID NO: 44672 - RNA, 22 nt, Artificial Sequence
  Synthetic oligonucleotide: BID-5055
ugcggggucagcaguucguggc

SEQ ID NO: 44673 - RNA, 23 nt, Artificial Sequence
  Synthetic oligonucleotide: BID-5056
augcggggucagcaguucguggc

SEQ ID NO: 44674 - RNA, 24 nt, Artificial Sequence
  Synthetic oligonucleotide: BID-5057
aaugcggggucagcaguucguggc

SEQ ID NO: 44675 - RNA, 18 nt, Artificial Sequence
  Synthetic oligonucleotide: BID-5058
gagggauccucuggcauc

SEQ ID NO: 44676 - RNA, 19 nt, Artificial Sequence
  Synthetic oligonucleotide: BID-5059
agagggauccucuggcauc

SEQ ID NO: 44677 - RNA, 20 nt, Artificial Sequence
  Synthetic oligonucleotide: BID-901
cagagggauccucuggcauc

SEQ ID NO: 44678 - RNA, 21 nt, Artificial Sequence
  Synthetic oligonucleotide: BID-5060
gcagagggauccucuggcauc

SEQ ID NO: 44679 - RNA, 22 nt, Artificial Sequence
  Synthetic oligonucleotide: BID-5061
cgcagagggauccucuggcauc

SEQ ID NO: 44680 - RNA, 23 nt, Artificial Sequence
  Synthetic oligonucleotide: BID-5062
gcgcagagggauccucuggcauc

SEQ ID NO: 44681 - RNA, 24 nt, Artificial Sequence
  Synthetic oligonucleotide: BID-5063
agcgcagagggauccucuggcauc

SEQ ID NO: 44682 - RNA, 18 nt, Artificial Sequence
  Synthetic oligonucleotide: BID-5064
gcuguuucuggaacaguc

SEQ ID NO: 44683 - RNA, 19 nt, Artificial Sequence
  Synthetic oligonucleotide: BID-5065
ggcuguuucuggaacaguc

SEQ ID NO: 44684 - RNA, 20 nt, Artificial Sequence
  Synthetic oligonucleotide: BID-778
aggcuguuucuggaacaguc

SEQ ID NO: 44685 - RNA, 21 nt, Artificial Sequence
  Synthetic oligonucleotide: BID-5066
caggcuguuucuggaacaguc

SEQ ID NO: 44686 - RNA, 22 nt, Artificial Sequence
  Synthetic oligonucleotide: BID-5067
ccaggcuguuucuggaacaguc

SEQ ID NO: 44687 - RNA, 23 nt, Artificial Sequence
  Synthetic oligonucleotide: BID-5068
cccaggcuguuucuggaacaguc

SEQ ID NO: 44688 - RNA, 24 nt, Artificial Sequence
  Synthetic oligonucleotide: BID-5069
ccccaggcuguuucuggaacaguc

SEQ ID NO: 44689 - RNA, 18 nt, Artificial Sequence
  Synthetic oligonucleotide: BID-5070
aggguguggggagcgcag

SEQ ID NO: 44690 - RNA, 19 nt, Artificial Sequence
  Synthetic oligonucleotide: BID-5071
aaggguguggggagcgcag

SEQ ID NO: 44691 - RNA, 20 nt, Artificial Sequence
  Synthetic oligonucleotide: BID-898
uaaggguguggggagcgcag

SEQ ID NO: 44692 - RNA, 21 nt, Artificial Sequence
  Synthetic oligonucleotide: BID-5072
uuaaggguguggggagcgcag

SEQ ID NO: 44693 - RNA, 22 nt, Artificial Sequence
  Synthetic oligonucleotide: BID-5073
cuuaaggguguggggagcgcag

SEQ ID NO: 44694 - RNA, 23 nt, Artificial Sequence
  Synthetic oligonucleotide: BID-5074
ucuuaaggguguggggagcgcag

SEQ ID NO: 44695 - RNA, 24 nt, Artificial Sequence
  Synthetic oligonucleotide: BID-5075
gucuuaaggguguggggagcgcag

SEQ ID NO: 44696 - RNA, 18 nt, Artificial Sequence
  Synthetic oligonucleotide: BID-5076
uaguggaggugguggggg

SEQ ID NO: 44697 - RNA, 19 nt, Artificial Sequence
  Synthetic oligonucleotide: BID-5077
uuaguggaggugguggggg

SEQ ID NO: 44698 - RNA, 20 nt, Artificial Sequence
  Synthetic oligonucleotide: BID-806
uuuaguggaggugguggggg

SEQ ID NO: 44699 - RNA, 21 nt, Artificial Sequence
  Synthetic oligonucleotide: BID-5078
uuuuaguggaggugguggggg

SEQ ID NO: 44700 - RNA, 22 nt, Artificial Sequence
  Synthetic oligonucleotide: BID-5079
uuuuuaguggaggugguggggg

SEQ ID NO: 44701 - RNA, 23 nt, Artificial Sequence
  Synthetic oligonucleotide: BID-5080
guuuuuaguggaggugguggggg

SEQ ID NO: 44702 - RNA, 24 nt, Artificial Sequence
  Synthetic oligonucleotide: BID-5081
aguuuuuaguggaggugguggggg

SEQ ID NO: 44703 - RNA, 18 nt, Artificial Sequence
  Synthetic oligonucleotide: BID-5082
gggagggaagaggaaaug

SEQ ID NO: 44704 - RNA, 19 nt, Artificial Sequence
  Synthetic oligonucleotide: BID-5083
agggagggaagaggaaaug

SEQ ID NO: 44705 - RNA, 20 nt, Artificial Sequence
  Synthetic oligonucleotide: BID-918
cagggagggaagaggaaaug

SEQ ID NO: 44706 - RNA, 21 nt, Artificial Sequence
  Synthetic oligonucleotide: BID-5084
ccagggagggaagaggaaaug

SEQ ID NO: 44707 - RNA, 22 nt, Artificial Sequence
  Synthetic oligonucleotide: BID-5085
cccagggagggaagaggaaaug

SEQ ID NO: 44708 - RNA, 23 nt, Artificial Sequence
  Synthetic oligonucleotide: BID-5086
gcccagggagggaagaggaaaug

SEQ ID NO: 44709 - RNA, 24 nt, Artificial Sequence
  Synthetic oligonucleotide: BID-5087
ugcccagggagggaagaggaaaug

SEQ ID NO: 44710 - RNA, 18 nt, Artificial Sequence
  Synthetic oligonucleotide: BID-5088
gaaagugggugaagccau

SEQ ID NO: 44711 - RNA, 19 nt, Artificial Sequence
  Synthetic oligonucleotide: BID-5089
ggaaagugggugaagccau

SEQ ID NO: 44712 - RNA, 20 nt, Artificial Sequence
  Synthetic oligonucleotide: BID-1644
uggaaagugggugaagccau

SEQ ID NO: 44713 - RNA, 21 nt, Artificial Sequence
  Synthetic oligonucleotide: BID-5090
uuggaaagugggugaagccau

SEQ ID NO: 44714 - RNA, 22 nt, Artificial Sequence
  Synthetic oligonucleotide: BID-5091
uuuggaaagugggugaagccau

SEQ ID NO: 44715 - RNA, 23 nt, Artificial Sequence
  Synthetic oligonucleotide: BID-5092
guuuggaaagugggugaagccau

SEQ ID NO: 44716 - RNA, 24 nt, Artificial Sequence
  Synthetic oligonucleotide: BID-5093
gguuuggaaagugggugaagccau

SEQ ID NO: 44717 - RNA, 18 nt, Artificial Sequence
  Synthetic oligonucleotide: BID-5094
uguuuauucuuuaauuau

SEQ ID NO: 44718 - RNA, 19 nt, Artificial Sequence
  Synthetic oligonucleotide: BID-5095
uuguuuauucuuuaauuau

SEQ ID NO: 44719 - RNA, 20 nt, Artificial Sequence
  Synthetic oligonucleotide: BID-1647
guuguuuauucuuuaauuau

SEQ ID NO: 44720 - RNA, 21 nt, Artificial Sequence
  Synthetic oligonucleotide: BID-5096
uguuguuuauucuuuaauuau

SEQ ID NO: 44721 - RNA, 22 nt, Artificial Sequence
  Synthetic oligonucleotide: BID-5097
uuguuguuuauucuuuaauuau

SEQ ID NO: 44722 - RNA, 23 nt, Artificial Sequence
  Synthetic oligonucleotide: BID-5098
cuuguuguuuauucuuuaauuau

SEQ ID NO: 44723 - RNA, 24 nt, Artificial Sequence
  Synthetic oligonucleotide: BID-5099
gcuuguuguuuauucuuuaauuau

SEQ ID NO: 44724 - RNA, 18 nt, Artificial Sequence
  Synthetic oligonucleotide: BID-5100
ggggcccugcaguccccu

SEQ ID NO: 44725 - RNA, 19 nt, Artificial Sequence
  Synthetic oligonucleotide: BID-5101
uggggcccugcaguccccu

SEQ ID NO: 44726 - RNA, 20 nt, Artificial Sequence
  Synthetic oligonucleotide: BID-889
cuggggcccugcaguccccu

SEQ ID NO: 44727 - RNA, 21 nt, Artificial Sequence
  Synthetic oligonucleotide: BID-5102
ccuggggcccugcaguccccu

SEQ ID NO: 44728 - RNA, 22 nt, Artificial Sequence
  Synthetic oligonucleotide: BID-5103
uccuggggcccugcaguccccu

SEQ ID NO: 44729 - RNA, 23 nt, Artificial Sequence
  Synthetic oligonucleotide: BID-5104
guccuggggcccugcaguccccu

SEQ ID NO: 44730 - RNA, 24 nt, Artificial Sequence
  Synthetic oligonucleotide: BID-5105
cguccuggggcccugcaguccccu

SEQ ID NO: 44731 - RNA, 18 nt, Artificial Sequence
  Synthetic oligonucleotide: BID-5106
gauucucugggaaacauu

SEQ ID NO: 44732 - RNA, 19 nt, Artificial Sequence
  Synthetic oligonucleotide: BID-5107
ugauucucugggaaacauu

SEQ ID NO: 44733 - RNA, 20 nt, Artificial Sequence
  Synthetic oligonucleotide: BID-1631
augauucucugggaaacauu

SEQ ID NO: 44734 - RNA, 21 nt, Artificial Sequence
  Synthetic oligonucleotide: BID-5108
aaugauucucugggaaacauu

SEQ ID NO: 44735 - RNA, 22 nt, Artificial Sequence
  Synthetic oligonucleotide: BID-5109
uaaugauucucugggaaacauu

SEQ ID NO: 44736 - RNA, 23 nt, Artificial Sequence
  Synthetic oligonucleotide: BID-5110
cuaaugauucucugggaaacauu

SEQ ID NO: 44737 - RNA, 24 nt, Artificial Sequence
  Synthetic oligonucleotide: BID-5111
ccuaaugauucucugggaaacauu

SEQ ID NO: 44738 - RNA, 18 nt, Artificial Sequence
  Synthetic oligonucleotide: BID-5112
ucccugagcuggggucuu

SEQ ID NO: 44739 - RNA, 19 nt, Artificial Sequence
  Synthetic oligonucleotide: BID-5113
uucccugagcuggggucuu

SEQ ID NO: 44740 - RNA, 20 nt, Artificial Sequence
  Synthetic oligonucleotide: BID-1740
auucccugagcuggggucuu

SEQ ID NO: 44741 - RNA, 21 nt, Artificial Sequence
  Synthetic oligonucleotide: BID-5114
gauucccugagcuggggucuu

SEQ ID NO: 44742 - RNA, 22 nt, Artificial Sequence
  Synthetic oligonucleotide: BID-5115
agauucccugagcuggggucuu

SEQ ID NO: 44743 - RNA, 23 nt, Artificial Sequence
  Synthetic oligonucleotide: BID-5116
cagauucccugagcuggggucuu

SEQ ID NO: 44744 - RNA, 24 nt, Artificial Sequence
  Synthetic oligonucleotide: BID-5117
ccagauucccugagcuggggucuu

SEQ ID NO: 44745 - RNA, 18 nt, Artificial Sequence
  Synthetic oligonucleotide: BID-5118
caccaccuccacuaaaaa

SEQ ID NO: 44746 - RNA, 19 nt, Artificial Sequence
  Synthetic oligonucleotide: BID-5119
ccaccaccuccacuaaaaa

SEQ ID NO: 44747 - RNA, 20 nt, Artificial Sequence
  Synthetic oligonucleotide: BID-1544
cccaccaccuccacuaaaaa

SEQ ID NO: 44748 - RNA, 21 nt, Artificial Sequence
  Synthetic oligonucleotide: BID-5120
ccccaccaccuccacuaaaaa

SEQ ID NO: 44749 - RNA, 22 nt, Artificial Sequence
  Synthetic oligonucleotide: BID-5121
cccccaccaccuccacuaaaaa

SEQ ID NO: 44750 - RNA, 23 nt, Artificial Sequence
  Synthetic oligonucleotide: BID-5122
ccccccaccaccuccacuaaaaa

SEQ ID NO: 44751 - RNA, 24 nt, Artificial Sequence
  Synthetic oligonucleotide: BID-5123
cccccccaccaccuccacuaaaaa

SEQ ID NO: 44752 - RNA, 18 nt, Artificial Sequence
  Synthetic oligonucleotide: BID-5124
cuccacuaaaaacugaaa

SEQ ID NO: 44753 - RNA, 19 nt, Artificial Sequence
  Synthetic oligonucleotide: BID-5125
ccuccacuaaaaacugaaa

SEQ ID NO: 44754 - RNA, 20 nt, Artificial Sequence
  Synthetic oligonucleotide: BID-1545
accuccacuaaaaacugaaa

SEQ ID NO: 44755 - RNA, 21 nt, Artificial Sequence
  Synthetic oligonucleotide: BID-5126
caccuccacuaaaaacugaaa

SEQ ID NO: 44756 - RNA, 22 nt, Artificial Sequence
  Synthetic oligonucleotide: BID-5127
ccaccuccacuaaaaacugaaa

SEQ ID NO: 44757 - RNA, 23 nt, Artificial Sequence
  Synthetic oligonucleotide: BID-5128
accaccuccacuaaaaacugaaa

SEQ ID NO: 44758 - RNA, 24 nt, Artificial Sequence
  Synthetic oligonucleotide: BID-5129
caccaccuccacuaaaaacugaaa

SEQ ID NO: 44759 - RNA, 18 nt, Artificial Sequence
  Synthetic oligonucleotide: BID-5130
ucuucccucccugggcaa

SEQ ID NO: 44760 - RNA, 19 nt, Artificial Sequence
  Synthetic oligonucleotide: BID-5131
cucuucccucccugggcaa

SEQ ID NO: 44761 - RNA, 20 nt, Artificial Sequence
  Synthetic oligonucleotide: BID-1862
ccucuucccucccugggcaa

SEQ ID NO: 44762 - RNA, 21 nt, Artificial Sequence
  Synthetic oligonucleotide: BID-5132
uccucuucccucccugggcaa

SEQ ID NO: 44763 - RNA, 22 nt, Artificial Sequence
  Synthetic oligonucleotide: BID-5133
uuccucuucccucccugggcaa

SEQ ID NO: 44764 - RNA, 23 nt, Artificial Sequence
  Synthetic oligonucleotide: BID-5134
uuuccucuucccucccugggcaa

SEQ ID NO: 44765 - RNA, 24 nt, Artificial Sequence
  Synthetic oligonucleotide: BID-5135
auuuccucuucccucccugggcaa

SEQ ID NO: 44766 - RNA, 18 nt, Artificial Sequence
  Synthetic oligonucleotide: BID-5136
cucugcagcucccccaca

SEQ ID NO: 44767 - RNA, 19 nt, Artificial Sequence
  Synthetic oligonucleotide: BID-5137
ccucugcagcucccccaca

SEQ ID NO: 44768 - RNA, 20 nt, Artificial Sequence
  Synthetic oligonucleotide: BID-1894
uccucugcagcucccccaca

SEQ ID NO: 44769 - RNA, 21 nt, Artificial Sequence
  Synthetic oligonucleotide: BID-5138
auccucugcagcucccccaca

SEQ ID NO: 44770 - RNA, 22 nt, Artificial Sequence
  Synthetic oligonucleotide: BID-5139
cauccucugcagcucccccaca

SEQ ID NO: 44771 - RNA, 23 nt, Artificial Sequence
  Synthetic oligonucleotide: BID-5140
gcauccucugcagcucccccaca

SEQ ID NO: 44772 - RNA, 24 nt, Artificial Sequence
  Synthetic oligonucleotide: BID-5141
cgcauccucugcagcucccccaca

SEQ ID NO: 44773 - RNA, 18 nt, Artificial Sequence
  Synthetic oligonucleotide: BID-5142
ucucggucaucacuccca

SEQ ID NO: 44774 - RNA, 19 nt, Artificial Sequence
  Synthetic oligonucleotide: BID-5143
gucucggucaucacuccca

SEQ ID NO: 44775 - RNA, 20 nt, Artificial Sequence
  Synthetic oligonucleotide: BID-1027
ggucucggucaucacuccca

SEQ ID NO: 44776 - RNA, 21 nt, Artificial Sequence
  Synthetic oligonucleotide: BID-5144
uggucucggucaucacuccca

SEQ ID NO: 44777 - RNA, 22 nt, Artificial Sequence
  Synthetic oligonucleotide: BID-5145
cuggucucggucaucacuccca

SEQ ID NO: 44778 - RNA, 23 nt, Artificial Sequence
  Synthetic oligonucleotide: BID-5146
ucuggucucggucaucacuccca

SEQ ID NO: 44779 - RNA, 24 nt, Artificial Sequence
  Synthetic oligonucleotide: BID-5147
aucuggucucggucaucacuccca

SEQ ID NO: 44780 - RNA, 18 nt, Artificial Sequence
  Synthetic oligonucleotide: BID-5148
aagaauaaacaacaagca

SEQ ID NO: 44781 - RNA, 19 nt, Artificial Sequence
  Synthetic oligonucleotide: BID-5149
aaagaauaaacaacaagca

SEQ ID NO: 44782 - RNA, 20 nt, Artificial Sequence
  Synthetic oligonucleotide: BID-1549
uaaagaauaaacaacaagca

SEQ ID NO: 44783 - RNA, 21 nt, Artificial Sequence
  Synthetic oligonucleotide: BID-5150
uuaaagaauaaacaacaagca

SEQ ID NO: 44784 - RNA, 22 nt, Artificial Sequence
  Synthetic oligonucleotide: BID-5151
auuaaagaauaaacaacaagca

SEQ ID NO: 44785 - RNA, 23 nt, Artificial Sequence
  Synthetic oligonucleotide: BID-5152
aauuaaagaauaaacaacaagca

SEQ ID NO: 44786 - RNA, 24 nt, Artificial Sequence
  Synthetic oligonucleotide: BID-5153
uaauuaaagaauaaacaacaagca

SEQ ID NO: 44787 - RNA, 18 nt, Artificial Sequence
  Synthetic oligonucleotide: BID-5154
cugggcaagaggggcaga

SEQ ID NO: 44788 - RNA, 19 nt, Artificial Sequence
  Synthetic oligonucleotide: BID-5155
ccugggcaagaggggcaga

SEQ ID NO: 44789 - RNA, 20 nt, Artificial Sequence
  Synthetic oligonucleotide: BID-1007
cccugggcaagaggggcaga

SEQ ID NO: 44790 - RNA, 21 nt, Artificial Sequence
  Synthetic oligonucleotide: BID-5156
ucccugggcaagaggggcaga

SEQ ID NO: 44791 - RNA, 22 nt, Artificial Sequence
  Synthetic oligonucleotide: BID-5157
cucccugggcaagaggggcaga

SEQ ID NO: 44792 - RNA, 23 nt, Artificial Sequence
  Synthetic oligonucleotide: BID-5158
ccucccugggcaagaggggcaga

SEQ ID NO: 44793 - RNA, 24 nt, Artificial Sequence
  Synthetic oligonucleotide: BID-5159
cccucccugggcaagaggggcaga

SEQ ID NO: 44794 - RNA, 18 nt, Artificial Sequence
  Synthetic oligonucleotide: BID-5160
agcucccccacagugaga

SEQ ID NO: 44795 - RNA, 19 nt, Artificial Sequence
  Synthetic oligonucleotide: BID-5161
cagcucccccacagugaga

SEQ ID NO: 44796 - RNA, 20 nt, Artificial Sequence
  Synthetic oligonucleotide: BID-1896
gcagcucccccacagugaga

SEQ ID NO: 44797 - RNA, 21 nt, Artificial Sequence
  Synthetic oligonucleotide: BID-5162
ugcagcucccccacagugaga

SEQ ID NO: 44798 - RNA, 22 nt, Artificial Sequence
  Synthetic oligonucleotide: BID-5163
cugcagcucccccacagugaga

SEQ ID NO: 44799 - RNA, 23 nt, Artificial Sequence
  Synthetic oligonucleotide: BID-5164
ucugcagcucccccacagugaga

SEQ ID NO: 44800 - RNA, 24 nt, Artificial Sequence
  Synthetic oligonucleotide: BID-5165
cucugcagcucccccacagugaga

SEQ ID NO: 44801 - RNA, 18 nt, Artificial Sequence
  Synthetic oligonucleotide: BID-5166
guggauaaggcuccagga

SEQ ID NO: 44802 - RNA, 19 nt, Artificial Sequence
  Synthetic oligonucleotide: BID-5167
uguggauaaggcuccagga

SEQ ID NO: 44803 - RNA, 20 nt, Artificial Sequence
  Synthetic oligonucleotide: BID-1046
guguggauaaggcuccagga

SEQ ID NO: 44804 - RNA, 21 nt, Artificial Sequence
  Synthetic oligonucleotide: BID-5168
gguguggauaaggcuccagga

SEQ ID NO: 44805 - RNA, 22 nt, Artificial Sequence
  Synthetic oligonucleotide: BID-5169
ggguguggauaaggcuccagga

SEQ ID NO: 44806 - RNA, 23 nt, Artificial Sequence
  Synthetic oligonucleotide: BID-5170
aggguguggauaaggcuccagga

SEQ ID NO: 44807 - RNA, 24 nt, Artificial Sequence
  Synthetic oligonucleotide: BID-5171
gaggguguggauaaggcuccagga

SEQ ID NO: 44808 - RNA, 18 nt, Artificial Sequence
  Synthetic oligonucleotide: BID-5172
ccacagugagagcgagga

SEQ ID NO: 44809 - RNA, 19 nt, Artificial Sequence
  Synthetic oligonucleotide: BID-5173
cccacagugagagcgagga

SEQ ID NO: 44810 - RNA, 20 nt, Artificial Sequence
  Synthetic oligonucleotide: BID-1898
ccccacagugagagcgagga

SEQ ID NO: 44811 - RNA, 21 nt, Artificial Sequence
  Synthetic oligonucleotide: BID-5174
cccccacagugagagcgagga

SEQ ID NO: 44812 - RNA, 22 nt, Artificial Sequence
  Synthetic oligonucleotide: BID-5175
ucccccacagugagagcgagga

SEQ ID NO: 44813 - RNA, 23 nt, Artificial Sequence
  Synthetic oligonucleotide: BID-5176
cucccccacagugagagcgagga

SEQ ID NO: 44814 - RNA, 24 nt, Artificial Sequence
  Synthetic oligonucleotide: BID-5177
gcucccccacagugagagcgagga

SEQ ID NO: 44815 - RNA, 18 nt, Artificial Sequence
  Synthetic oligonucleotide: BID-5178
agaauaaacaacaagcac

SEQ ID NO: 44816 - RNA, 19 nt, Artificial Sequence
  Synthetic oligonucleotide: BID-5179
aagaauaaacaacaagcac

SEQ ID NO: 44817 - RNA, 20 nt, Artificial Sequence
  Synthetic oligonucleotide: BID-689
aaagaauaaacaacaagcac

SEQ ID NO: 44818 - RNA, 21 nt, Artificial Sequence
  Synthetic oligonucleotide: BID-5180
uaaagaauaaacaacaagcac

SEQ ID NO: 44819 - RNA, 22 nt, Artificial Sequence
  Synthetic oligonucleotide: BID-5181
uuaaagaauaaacaacaagcac

SEQ ID NO: 44820 - RNA, 23 nt, Artificial Sequence
  Synthetic oligonucleotide: BID-5182
auuaaagaauaaacaacaagcac

SEQ ID NO: 44821 - RNA, 24 nt, Artificial Sequence
  Synthetic oligonucleotide: BID-5183
aauuaaagaauaaacaacaagcac

SEQ ID NO: 44822 - RNA, 18 nt, Artificial Sequence
  Synthetic oligonucleotide: BID-5184
ggggcagggacgcacacc

SEQ ID NO: 44823 - RNA, 19 nt, Artificial Sequence
  Synthetic oligonucleotide: BID-5185
aggggcagggacgcacacc

SEQ ID NO: 44824 - RNA, 20 nt, Artificial Sequence
  Synthetic oligonucleotide: BID-1869
aaggggcagggacgcacacc

SEQ ID NO: 44825 - RNA, 21 nt, Artificial Sequence
  Synthetic oligonucleotide: BID-5186
gaaggggcagggacgcacacc

SEQ ID NO: 44826 - RNA, 22 nt, Artificial Sequence
  Synthetic oligonucleotide: BID-5187
agaaggggcagggacgcacacc

SEQ ID NO: 44827 - RNA, 23 nt, Artificial Sequence
  Synthetic oligonucleotide: BID-5188
cagaaggggcagggacgcacacc

SEQ ID NO: 44828 - RNA, 24 nt, Artificial Sequence
  Synthetic oligonucleotide: BID-5189
gcagaaggggcagggacgcacacc

SEQ ID NO: 44829 - RNA, 18 nt, Artificial Sequence
  Synthetic oligonucleotide: BID-5190
cggcacacauucaggccc

SEQ ID NO: 44830 - RNA, 19 nt, Artificial Sequence
  Synthetic oligonucleotide: BID-5191
acggcacacauucaggccc

SEQ ID NO: 44831 - RNA, 20 nt, Artificial Sequence
  Synthetic oligonucleotide: BID-1034
gacggcacacauucaggccc

SEQ ID NO: 44832 - RNA, 21 nt, Artificial Sequence
  Synthetic oligonucleotide: BID-5192
ggacggcacacauucaggccc

SEQ ID NO: 44833 - RNA, 22 nt, Artificial Sequence
  Synthetic oligonucleotide: BID-5193
aggacggcacacauucaggccc

SEQ ID NO: 44834 - RNA, 23 nt, Artificial Sequence
  Synthetic oligonucleotide: BID-5194
caggacggcacacauucaggccc

SEQ ID NO: 44835 - RNA, 24 nt, Artificial Sequence
  Synthetic oligonucleotide: BID-5195
ccaggacggcacacauucaggccc

SEQ ID NO: 44836 - RNA, 18 nt, Artificial Sequence
  Synthetic oligonucleotide: BID-5196
caggggacugcagggccc

SEQ ID NO: 44837 - RNA, 19 nt, Artificial Sequence
  Synthetic oligonucleotide: BID-5197
ccaggggacugcagggccc

SEQ ID NO: 44838 - RNA, 20 nt, Artificial Sequence
  Synthetic oligonucleotide: BID-1883
cccaggggacugcagggccc

SEQ ID NO: 44839 - RNA, 21 nt, Artificial Sequence
  Synthetic oligonucleotide: BID-5198
ucccaggggacugcagggccc

SEQ ID NO: 44840 - RNA, 22 nt, Artificial Sequence
  Synthetic oligonucleotide: BID-5199
cucccaggggacugcagggccc

SEQ ID NO: 44841 - RNA, 23 nt, Artificial Sequence
  Synthetic oligonucleotide: BID-5200
acucccaggggacugcagggccc

SEQ ID NO: 44842 - RNA, 24 nt, Artificial Sequence
  Synthetic oligonucleotide: BID-5201
cacucccaggggacugcagggccc

SEQ ID NO: 44843 - RNA, 18 nt, Artificial Sequence
  Synthetic oligonucleotide: BID-5202
gucucggucaucacuccc

SEQ ID NO: 44844 - RNA, 19 nt, Artificial Sequence
  Synthetic oligonucleotide: BID-5203
ggucucggucaucacuccc

SEQ ID NO: 44845 - RNA, 20 nt, Artificial Sequence
  Synthetic oligonucleotide: BID-1026
uggucucggucaucacuccc

SEQ ID NO: 44846 - RNA, 21 nt, Artificial Sequence
  Synthetic oligonucleotide: BID-5204
cuggucucggucaucacuccc

SEQ ID NO: 44847 - RNA, 22 nt, Artificial Sequence
  Synthetic oligonucleotide: BID-5205
ucuggucucggucaucacuccc

SEQ ID NO: 44848 - RNA, 23 nt, Artificial Sequence
  Synthetic oligonucleotide: BID-5206
aucuggucucggucaucacuccc

SEQ ID NO: 44849 - RNA, 24 nt, Artificial Sequence
  Synthetic oligonucleotide: BID-5207
aaucuggucucggucaucacuccc

SEQ ID NO: 44850 - RNA, 18 nt, Artificial Sequence
  Synthetic oligonucleotide: BID-5208
cucccggcagugccuccc

SEQ ID NO: 44851 - RNA, 19 nt, Artificial Sequence
  Synthetic oligonucleotide: BID-5209
ccucccggcagugccuccc

SEQ ID NO: 44852 - RNA, 20 nt, Artificial Sequence
  Synthetic oligonucleotide: BID-1020
uccucccggcagugccuccc

SEQ ID NO: 44853 - RNA, 21 nt, Artificial Sequence
  Synthetic oligonucleotide: BID-5210
guccucccggcagugccuccc

SEQ ID NO: 44854 - RNA, 22 nt, Artificial Sequence
  Synthetic oligonucleotide: BID-5211
cguccucccggcagugccuccc

SEQ ID NO: 44855 - RNA, 23 nt, Artificial Sequence
  Synthetic oligonucleotide: BID-5212
ucguccucccggcagugccuccc

SEQ ID NO: 44856 - RNA, 24 nt, Artificial Sequence
  Synthetic oligonucleotide: BID-5213
gucguccucccggcagugccuccc

SEQ ID NO: 44857 - RNA, 18 nt, Artificial Sequence
  Synthetic oligonucleotide: BID-5214
acuguuccagaaacagcc

SEQ ID NO: 44858 - RNA, 19 nt, Artificial Sequence
  Synthetic oligonucleotide: BID-5215
gacuguuccagaaacagcc

SEQ ID NO: 44859 - RNA, 20 nt, Artificial Sequence
  Synthetic oligonucleotide: BID-700
agacuguuccagaaacagcc

SEQ ID NO: 44860 - RNA, 21 nt, Artificial Sequence
  Synthetic oligonucleotide: BID-5216
cagacuguuccagaaacagcc

SEQ ID NO: 44861 - RNA, 22 nt, Artificial Sequence
  Synthetic oligonucleotide: BID-5217
ccagacuguuccagaaacagcc

SEQ ID NO: 44862 - RNA, 23 nt, Artificial Sequence
  Synthetic oligonucleotide: BID-5218
cccagacuguuccagaaacagcc

SEQ ID NO: 44863 - RNA, 24 nt, Artificial Sequence
  Synthetic oligonucleotide: BID-5219
ccccagacuguuccagaaacagcc

SEQ ID NO: 44864 - RNA, 18 nt, Artificial Sequence
  Synthetic oligonucleotide: BID-5220
ugccuuuaaaccccagcc

SEQ ID NO: 44865 - RNA, 19 nt, Artificial Sequence
  Synthetic oligonucleotide: BID-5221
cugccuuuaaaccccagcc

SEQ ID NO: 44866 - RNA, 20 nt, Artificial Sequence
  Synthetic oligonucleotide: BID-1859
ccugccuuuaaaccccagcc

SEQ ID NO: 44867 - RNA, 21 nt, Artificial Sequence
  Synthetic oligonucleotide: BID-5222
cccugccuuuaaaccccagcc

SEQ ID NO: 44868 - RNA, 22 nt, Artificial Sequence
  Synthetic oligonucleotide: BID-5223
ucccugccuuuaaaccccagcc

SEQ ID NO: 44869 - RNA, 23 nt, Artificial Sequence
  Synthetic oligonucleotide: BID-5224
aucccugccuuuaaaccccagcc

SEQ ID NO: 44870 - RNA, 24 nt, Artificial Sequence
  Synthetic oligonucleotide: BID-5225
gaucccugccuuuaaaccccagcc

SEQ ID NO: 44871 - RNA, 18 nt, Artificial Sequence
  Synthetic oligonucleotide: BID-5226
acggcacacauucaggcc

SEQ ID NO: 44872 - RNA, 19 nt, Artificial Sequence
  Synthetic oligonucleotide: BID-5227
gacggcacacauucaggcc

SEQ ID NO: 44873 - RNA, 20 nt, Artificial Sequence
  Synthetic oligonucleotide: BID-1884
ggacggcacacauucaggcc

SEQ ID NO: 44874 - RNA, 21 nt, Artificial Sequence
  Synthetic oligonucleotide: BID-5228
aggacggcacacauucaggcc

SEQ ID NO: 44875 - RNA, 22 nt, Artificial Sequence
  Synthetic oligonucleotide: BID-5229
caggacggcacacauucaggcc

SEQ ID NO: 44876 - RNA, 23 nt, Artificial Sequence
  Synthetic oligonucleotide: BID-5230
ccaggacggcacacauucaggcc

SEQ ID NO: 44877 - RNA, 24 nt, Artificial Sequence
  Synthetic oligonucleotide: BID-5231
cccaggacggcacacauucaggcc

SEQ ID NO: 44878 - RNA, 18 nt, Artificial Sequence
  Synthetic oligonucleotide: BID-5232
ggucucggucaucacucc

SEQ ID NO: 44879 - RNA, 19 nt, Artificial Sequence
  Synthetic oligonucleotide: BID-5233
uggucucggucaucacucc

SEQ ID NO: 44880 - RNA, 20 nt, Artificial Sequence
  Synthetic oligonucleotide: BID-1879
cuggucucggucaucacucc

SEQ ID NO: 44881 - RNA, 21 nt, Artificial Sequence
  Synthetic oligonucleotide: BID-5234
ucuggucucggucaucacucc

SEQ ID NO: 44882 - RNA, 22 nt, Artificial Sequence
  Synthetic oligonucleotide: BID-5235
aucuggucucggucaucacucc

SEQ ID NO: 44883 - RNA, 23 nt, Artificial Sequence
  Synthetic oligonucleotide: BID-5236
aaucuggucucggucaucacucc

SEQ ID NO: 44884 - RNA, 24 nt, Artificial Sequence
  Synthetic oligonucleotide: BID-5237
gaaucuggucucggucaucacucc

SEQ ID NO: 44885 - RNA, 18 nt, Artificial Sequence
  Synthetic oligonucleotide: BID-5238
gcauuuccucuucccucc

SEQ ID NO: 44886 - RNA, 19 nt, Artificial Sequence
  Synthetic oligonucleotide: BID-5239
cgcauuuccucuucccucc

SEQ ID NO: 44887 - RNA, 20 nt, Artificial Sequence
  Synthetic oligonucleotide: BID-1860
ccgcauuuccucuucccucc

SEQ ID NO: 44888 - RNA, 21 nt, Artificial Sequence
  Synthetic oligonucleotide: BID-5240
cccgcauuuccucuucccucc

SEQ ID NO: 44889 - RNA, 22 nt, Artificial Sequence
  Synthetic oligonucleotide: BID-5241
ccccgcauuuccucuucccucc

SEQ ID NO: 44890 - RNA, 23 nt, Artificial Sequence
  Synthetic oligonucleotide: BID-5242
accccgcauuuccucuucccucc

SEQ ID NO: 44891 - RNA, 24 nt, Artificial Sequence
  Synthetic oligonucleotide: BID-5243
gaccccgcauuuccucuucccucc

SEQ ID NO: 44892 - RNA, 18 nt, Artificial Sequence
  Synthetic oligonucleotide: BID-5244
ccucccggcagugccucc

SEQ ID NO: 44893 - RNA, 19 nt, Artificial Sequence
  Synthetic oligonucleotide: BID-5245
uccucccggcagugccucc

SEQ ID NO: 44894 - RNA, 20 nt, Artificial Sequence
  Synthetic oligonucleotide: BID-1872
guccucccggcagugccucc

SEQ ID NO: 44895 - RNA, 21 nt, Artificial Sequence
  Synthetic oligonucleotide: BID-5246
cguccucccggcagugccucc

SEQ ID NO: 44896 - RNA, 22 nt, Artificial Sequence
  Synthetic oligonucleotide: BID-5247
ucguccucccggcagugccucc

SEQ ID NO: 44897 - RNA, 23 nt, Artificial Sequence
  Synthetic oligonucleotide: BID-5248
gucguccucccggcagugccucc

SEQ ID NO: 44898 - RNA, 24 nt, Artificial Sequence
  Synthetic oligonucleotide: BID-5249
ggucguccucccggcagugccucc

SEQ ID NO: 44899 - RNA, 18 nt, Artificial Sequence
  Synthetic oligonucleotide: BID-5250
ggguguggauaaggcucc

SEQ ID NO: 44900 - RNA, 19 nt, Artificial Sequence
  Synthetic oligonucleotide: BID-5251
aggguguggauaaggcucc

SEQ ID NO: 44901 - RNA, 20 nt, Artificial Sequence
  Synthetic oligonucleotide: BID-1045
gaggguguggauaaggcucc

SEQ ID NO: 44902 - RNA, 21 nt, Artificial Sequence
  Synthetic oligonucleotide: BID-5252
ugaggguguggauaaggcucc

SEQ ID NO: 44903 - RNA, 22 nt, Artificial Sequence
  Synthetic oligonucleotide: BID-5253
cugaggguguggauaaggcucc

SEQ ID NO: 44904 - RNA, 23 nt, Artificial Sequence
  Synthetic oligonucleotide: BID-5254
acugaggguguggauaaggcucc

SEQ ID NO: 44905 - RNA, 24 nt, Artificial Sequence
  Synthetic oligonucleotide: BID-5255
gacugaggguguggauaaggcucc

SEQ ID NO: 44906 - RNA, 18 nt, Artificial Sequence
  Synthetic oligonucleotide: BID-5256
ugcucccugugcccgucc

SEQ ID NO: 44907 - RNA, 19 nt, Artificial Sequence
  Synthetic oligonucleotide: BID-5257
augcucccugugcccgucc

SEQ ID NO: 44908 - RNA, 20 nt, Artificial Sequence
  Synthetic oligonucleotide: BID-1000
caugcucccugugcccgucc

SEQ ID NO: 44909 - RNA, 21 nt, Artificial Sequence
  Synthetic oligonucleotide: BID-5258
ucaugcucccugugcccgucc

SEQ ID NO: 44910 - RNA, 22 nt, Artificial Sequence
  Synthetic oligonucleotide: BID-5259
cucaugcucccugugcccgucc

SEQ ID NO: 44911 - RNA, 23 nt, Artificial Sequence
  Synthetic oligonucleotide: BID-5260
ccucaugcucccugugcccgucc

SEQ ID NO: 44912 - RNA, 24 nt, Artificial Sequence
  Synthetic oligonucleotide: BID-5261
uccucaugcucccugugcccgucc

SEQ ID NO: 44913 - RNA, 18 nt, Artificial Sequence
  Synthetic oligonucleotide: BID-5262
uuccaaaccccugguucc

SEQ ID NO: 44914 - RNA, 19 nt, Artificial Sequence
  Synthetic oligonucleotide: BID-5263
uuuccaaaccccugguucc

SEQ ID NO: 44915 - RNA, 20 nt, Artificial Sequence
  Synthetic oligonucleotide: BID-1555
cuuuccaaaccccugguucc

SEQ ID NO: 44916 - RNA, 21 nt, Artificial Sequence
  Synthetic oligonucleotide: BID-5264
acuuuccaaaccccugguucc

SEQ ID NO: 44917 - RNA, 22 nt, Artificial Sequence
  Synthetic oligonucleotide: BID-5265
cacuuuccaaaccccugguucc

SEQ ID NO: 44918 - RNA, 23 nt, Artificial Sequence
  Synthetic oligonucleotide: BID-5266
ccacuuuccaaaccccugguucc

SEQ ID NO: 44919 - RNA, 24 nt, Artificial Sequence
  Synthetic oligonucleotide: BID-5267
cccacuuuccaaaccccugguucc

SEQ ID NO: 44920 - RNA, 18 nt, Artificial Sequence
  Synthetic oligonucleotide: BID-5268
gggauucugaauguuucc

SEQ ID NO: 44921 - RNA, 19 nt, Artificial Sequence
  Synthetic oligonucleotide: BID-5269
ggggauucugaauguuucc

SEQ ID NO: 44922 - RNA, 20 nt, Artificial Sequence
  Synthetic oligonucleotide: BID-1563
uggggauucugaauguuucc

SEQ ID NO: 44923 - RNA, 21 nt, Artificial Sequence
  Synthetic oligonucleotide: BID-5270
cuggggauucugaauguuucc

SEQ ID NO: 44924 - RNA, 22 nt, Artificial Sequence
  Synthetic oligonucleotide: BID-5271
ccuggggauucugaauguuucc

SEQ ID NO: 44925 - RNA, 23 nt, Artificial Sequence
  Synthetic oligonucleotide: BID-5272
gccuggggauucugaauguuucc

SEQ ID NO: 44926 - RNA, 24 nt, Artificial Sequence
  Synthetic oligonucleotide: BID-5273
agccuggggauucugaauguuucc

SEQ ID NO: 44927 - RNA, 18 nt, Artificial Sequence
  Synthetic oligonucleotide: BID-5274
caggaagggggugcaagc

SEQ ID NO: 44928 - RNA, 19 nt, Artificial Sequence
  Synthetic oligonucleotide: BID-5275
ccaggaagggggugcaagc

SEQ ID NO: 44929 - RNA, 20 nt, Artificial Sequence
  Synthetic oligonucleotide: BID-1906
uccaggaagggggugcaagc

SEQ ID NO: 44930 - RNA, 21 nt, Artificial Sequence
  Synthetic oligonucleotide: BID-5276
cuccaggaagggggugcaagc

SEQ ID NO: 44931 - RNA, 22 nt, Artificial Sequence
  Synthetic oligonucleotide: BID-5277
gcuccaggaagggggugcaagc

SEQ ID NO: 44932 - RNA, 23 nt, Artificial Sequence
  Synthetic oligonucleotide: BID-5278
ggcuccaggaagggggugcaagc

SEQ ID NO: 44933 - RNA, 24 nt, Artificial Sequence
  Synthetic oligonucleotide: BID-5279
aggcuccaggaagggggugcaagc

SEQ ID NO: 44934 - RNA, 18 nt, Artificial Sequence
  Synthetic oligonucleotide: BID-5280
gacuguuccagaaacagc

SEQ ID NO: 44935 - RNA, 19 nt, Artificial Sequence
  Synthetic oligonucleotide: BID-5281
agacuguuccagaaacagc

SEQ ID NO: 44936 - RNA, 20 nt, Artificial Sequence
  Synthetic oligonucleotide: BID-1559
cagacuguuccagaaacagc

SEQ ID NO: 44937 - RNA, 21 nt, Artificial Sequence
  Synthetic oligonucleotide: BID-5282
ccagacuguuccagaaacagc

SEQ ID NO: 44938 - RNA, 22 nt, Artificial Sequence
  Synthetic oligonucleotide: BID-5283
cccagacuguuccagaaacagc

SEQ ID NO: 44939 - RNA, 23 nt, Artificial Sequence
  Synthetic oligonucleotide: BID-5284
ccccagacuguuccagaaacagc

SEQ ID NO: 44940 - RNA, 24 nt, Artificial Sequence
  Synthetic oligonucleotide: BID-5285
accccagacuguuccagaaacagc

SEQ ID NO: 44941 - RNA, 18 nt, Artificial Sequence
  Synthetic oligonucleotide: BID-5286
cucccccacagugagagc

SEQ ID NO: 44942 - RNA, 19 nt, Artificial Sequence
  Synthetic oligonucleotide: BID-5287
gcucccccacagugagagc

SEQ ID NO: 44943 - RNA, 20 nt, Artificial Sequence
  Synthetic oligonucleotide: BID-1897
agcucccccacagugagagc

SEQ ID NO: 44944 - RNA, 21 nt, Artificial Sequence
  Synthetic oligonucleotide: BID-5288
cagcucccccacagugagagc

SEQ ID NO: 44945 - RNA, 22 nt, Artificial Sequence
  Synthetic oligonucleotide: BID-5289
gcagcucccccacagugagagc

SEQ ID NO: 44946 - RNA, 23 nt, Artificial Sequence
  Synthetic oligonucleotide: BID-5290
ugcagcucccccacagugagagc

SEQ ID NO: 44947 - RNA, 24 nt, Artificial Sequence
  Synthetic oligonucleotide: BID-5291
cugcagcucccccacagugagagc

SEQ ID NO: 44948 - RNA, 18 nt, Artificial Sequence
  Synthetic oligonucleotide: BID-5292
ccacagccccgcgccggc

SEQ ID NO: 44949 - RNA, 19 nt, Artificial Sequence
  Synthetic oligonucleotide: BID-5293
uccacagccccgcgccggc

SEQ ID NO: 44950 - RNA, 20 nt, Artificial Sequence
  Synthetic oligonucleotide: BID-1576
cuccacagccccgcgccggc

SEQ ID NO: 44951 - RNA, 21 nt, Artificial Sequence
  Synthetic oligonucleotide: BID-5294
gcuccacagccccgcgccggc

SEQ ID NO: 44952 - RNA, 22 nt, Artificial Sequence
  Synthetic oligonucleotide: BID-5295
cgcuccacagccccgcgccggc

SEQ ID NO: 44953 - RNA, 23 nt, Artificial Sequence
  Synthetic oligonucleotide: BID-5296
ccgcuccacagccccgcgccggc

SEQ ID NO: 44954 - RNA, 24 nt, Artificial Sequence
  Synthetic oligonucleotide: BID-5297
cccgcuccacagccccgcgccggc

SEQ ID NO: 44955 - RNA, 18 nt, Artificial Sequence
  Synthetic oligonucleotide: BID-5298
aagaggggcagaaggggc

SEQ ID NO: 44956 - RNA, 19 nt, Artificial Sequence
  Synthetic oligonucleotide: BID-5299
caagaggggcagaaggggc

SEQ ID NO: 44957 - RNA, 20 nt, Artificial Sequence
  Synthetic oligonucleotide: BID-1010
gcaagaggggcagaaggggc

SEQ ID NO: 44958 - RNA, 21 nt, Artificial Sequence
  Synthetic oligonucleotide: BID-5300
ggcaagaggggcagaaggggc

SEQ ID NO: 44959 - RNA, 22 nt, Artificial Sequence
  Synthetic oligonucleotide: BID-5301
gggcaagaggggcagaaggggc

SEQ ID NO: 44960 - RNA, 23 nt, Artificial Sequence
  Synthetic oligonucleotide: BID-5302
ugggcaagaggggcagaaggggc

SEQ ID NO: 44961 - RNA, 24 nt, Artificial Sequence
  Synthetic oligonucleotide: BID-5303
cugggcaagaggggcagaaggggc

SEQ ID NO: 44962 - RNA, 18 nt, Artificial Sequence
  Synthetic oligonucleotide: BID-5304
ccucuucccucccugggc

SEQ ID NO: 44963 - RNA, 19 nt, Artificial Sequence
  Synthetic oligonucleotide: BID-5305
uccucuucccucccugggc

SEQ ID NO: 44964 - RNA, 20 nt, Artificial Sequence
  Synthetic oligonucleotide: BID-1861
uuccucuucccucccugggc

SEQ ID NO: 44965 - RNA, 21 nt, Artificial Sequence
  Synthetic oligonucleotide: BID-5306
uuuccucuucccucccugggc

SEQ ID NO: 44966 - RNA, 22 nt, Artificial Sequence
  Synthetic oligonucleotide: BID-5307
auuuccucuucccucccugggc

SEQ ID NO: 44967 - RNA, 23 nt, Artificial Sequence
  Synthetic oligonucleotide: BID-5308
cauuuccucuucccucccugggc

SEQ ID NO: 44968 - RNA, 24 nt, Artificial Sequence
  Synthetic oligonucleotide: BID-5309
gcauuuccucuucccucccugggc

SEQ ID NO: 44969 - RNA, 18 nt, Artificial Sequence
  Synthetic oligonucleotide: BID-5310
uaccucaacuccugaugc

SEQ ID NO: 44970 - RNA, 19 nt, Artificial Sequence
  Synthetic oligonucleotide: BID-5311
cuaccucaacuccugaugc

SEQ ID NO: 44971 - RNA, 20 nt, Artificial Sequence
  Synthetic oligonucleotide: BID-1874
ucuaccucaacuccugaugc

SEQ ID NO: 44972 - RNA, 21 nt, Artificial Sequence
  Synthetic oligonucleotide: BID-5312
gucuaccucaacuccugaugc

SEQ ID NO: 44973 - RNA, 22 nt, Artificial Sequence
  Synthetic oligonucleotide: BID-5313
ugucuaccucaacuccugaugc

SEQ ID NO: 44974 - RNA, 23 nt, Artificial Sequence
  Synthetic oligonucleotide: BID-5314
cugucuaccucaacuccugaugc

SEQ ID NO: 44975 - RNA, 24 nt, Artificial Sequence
  Synthetic oligonucleotide: BID-5315
ucugucuaccucaacuccugaugc

SEQ ID NO: 44976 - RNA, 18 nt, Artificial Sequence
  Synthetic oligonucleotide: BID-5316
cccuuaagaccccagcuc

SEQ ID NO: 44977 - RNA, 19 nt, Artificial Sequence
  Synthetic oligonucleotide: BID-5317
acccuuaagaccccagcuc

SEQ ID NO: 44978 - RNA, 20 nt, Artificial Sequence
  Synthetic oligonucleotide: BID-1022
cacccuuaagaccccagcuc

SEQ ID NO: 44979 - RNA, 21 nt, Artificial Sequence
  Synthetic oligonucleotide: BID-5318
acacccuuaagaccccagcuc

SEQ ID NO: 44980 - RNA, 22 nt, Artificial Sequence
  Synthetic oligonucleotide: BID-5319
cacacccuuaagaccccagcuc

SEQ ID NO: 44981 - RNA, 23 nt, Artificial Sequence
  Synthetic oligonucleotide: BID-5320
ccacacccuuaagaccccagcuc

SEQ ID NO: 44982 - RNA, 24 nt, Artificial Sequence
  Synthetic oligonucleotide: BID-5321
cccacacccuuaagaccccagcuc

SEQ ID NO: 44983 - RNA, 18 nt, Artificial Sequence
  Synthetic oligonucleotide: BID-5322
aggguguggauaaggcuc

SEQ ID NO: 44984 - RNA, 19 nt, Artificial Sequence
  Synthetic oligonucleotide: BID-5323
gaggguguggauaaggcuc

SEQ ID NO: 44985 - RNA, 20 nt, Artificial Sequence
  Synthetic oligonucleotide: BID-1901
ugaggguguggauaaggcuc

SEQ ID NO: 44986 - RNA, 21 nt, Artificial Sequence
  Synthetic oligonucleotide: BID-5324
cugaggguguggauaaggcuc

SEQ ID NO: 44987 - RNA, 22 nt, Artificial Sequence
  Synthetic oligonucleotide: BID-5325
acugaggguguggauaaggcuc

SEQ ID NO: 44988 - RNA, 23 nt, Artificial Sequence
  Synthetic oligonucleotide: BID-5326
gacugaggguguggauaaggcuc

SEQ ID NO: 44989 - RNA, 24 nt, Artificial Sequence
  Synthetic oligonucleotide: BID-5327
ggacugaggguguggauaaggcuc

SEQ ID NO: 44990 - RNA, 18 nt, Artificial Sequence
  Synthetic oligonucleotide: BID-5328
augcucccugugcccguc

SEQ ID NO: 44991 - RNA, 19 nt, Artificial Sequence
  Synthetic oligonucleotide: BID-5329
caugcucccugugcccguc

SEQ ID NO: 44992 - RNA, 20 nt, Artificial Sequence
  Synthetic oligonucleotide: BID-1856
ucaugcucccugugcccguc

SEQ ID NO: 44993 - RNA, 21 nt, Artificial Sequence
  Synthetic oligonucleotide: BID-5330
cucaugcucccugugcccguc

SEQ ID NO: 44994 - RNA, 22 nt, Artificial Sequence
  Synthetic oligonucleotide: BID-5331
ccucaugcucccugugcccguc

SEQ ID NO: 44995 - RNA, 23 nt, Artificial Sequence
  Synthetic oligonucleotide: BID-5332
uccucaugcucccugugcccguc

SEQ ID NO: 44996 - RNA, 24 nt, Artificial Sequence
  Synthetic oligonucleotide: BID-5333
uuccucaugcucccugugcccguc

SEQ ID NO: 44997 - RNA, 18 nt, Artificial Sequence
  Synthetic oligonucleotide: BID-5334
gaccaccccagacuguuc

SEQ ID NO: 44998 - RNA, 19 nt, Artificial Sequence
  Synthetic oligonucleotide: BID-5335
ugaccaccccagacuguuc

SEQ ID NO: 44999 - RNA, 20 nt, Artificial Sequence
  Synthetic oligonucleotide: BID-1558
augaccaccccagacuguuc

SEQ ID NO: 45000 - RNA, 21 nt, Artificial Sequence
  Synthetic oligonucleotide: BID-5336
aaugaccaccccagacuguuc

SEQ ID NO: 45001 - RNA, 22 nt, Artificial Sequence
  Synthetic oligonucleotide: BID-5337
gaaugaccaccccagacuguuc

SEQ ID NO: 45002 - RNA, 23 nt, Artificial Sequence
  Synthetic oligonucleotide: BID-5338
agaaugaccaccccagacuguuc

SEQ ID NO: 45003 - RNA, 24 nt, Artificial Sequence
  Synthetic oligonucleotide: BID-5339
uagaaugaccaccccagacuguuc

SEQ ID NO: 45004 - RNA, 18 nt, Artificial Sequence
  Synthetic oligonucleotide: BID-5340
uaaguggccaacuuaaag

SEQ ID NO: 45005 - RNA, 19 nt, Artificial Sequence
  Synthetic oligonucleotide: BID-5341
guaaguggccaacuuaaag

SEQ ID NO: 45006 - RNA, 20 nt, Artificial Sequence
  Synthetic oligonucleotide: BID-1569
aguaaguggccaacuuaaag

SEQ ID NO: 45007 - RNA, 21 nt, Artificial Sequence
  Synthetic oligonucleotide: BID-5342
gaguaaguggccaacuuaaag

SEQ ID NO: 45008 - RNA, 22 nt, Artificial Sequence
  Synthetic oligonucleotide: BID-5343
ggaguaaguggccaacuuaaag

SEQ ID NO: 45009 - RNA, 23 nt, Artificial Sequence
  Synthetic oligonucleotide: BID-5344
uggaguaaguggccaacuuaaag

SEQ ID NO: 45010 - RNA, 24 nt, Artificial Sequence
  Synthetic oligonucleotide: BID-5345
cuggaguaaguggccaacuuaaag

SEQ ID NO: 45011 - RNA, 18 nt, Artificial Sequence
  Synthetic oligonucleotide: BID-5346
cuucccucccugggcaag

SEQ ID NO: 45012 - RNA, 19 nt, Artificial Sequence
  Synthetic oligonucleotide: BID-5347
ucuucccucccugggcaag

SEQ ID NO: 45013 - RNA, 20 nt, Artificial Sequence
  Synthetic oligonucleotide: BID-1004
cucuucccucccugggcaag

SEQ ID NO: 45014 - RNA, 21 nt, Artificial Sequence
  Synthetic oligonucleotide: BID-5348
ccucuucccucccugggcaag

SEQ ID NO: 45015 - RNA, 22 nt, Artificial Sequence
  Synthetic oligonucleotide: BID-5349
uccucuucccucccugggcaag

SEQ ID NO: 45016 - RNA, 23 nt, Artificial Sequence
  Synthetic oligonucleotide: BID-5350
uuccucuucccucccugggcaag

SEQ ID NO: 45017 - RNA, 24 nt, Artificial Sequence
  Synthetic oligonucleotide: BID-5351
uuuccucuucccucccugggcaag

SEQ ID NO: 45018 - RNA, 18 nt, Artificial Sequence
  Synthetic oligonucleotide: BID-5352
gggugcaagccugagaag

SEQ ID NO: 45019 - RNA, 19 nt, Artificial Sequence
  Synthetic oligonucleotide: BID-5353
ggggugcaagccugagaag

SEQ ID NO: 45020 - RNA, 20 nt, Artificial Sequence
  Synthetic oligonucleotide: BID-1908
gggggugcaagccugagaag

SEQ ID NO: 45021 - RNA, 21 nt, Artificial Sequence
  Synthetic oligonucleotide: BID-5354
agggggugcaagccugagaag

SEQ ID NO: 45022 - RNA, 22 nt, Artificial Sequence
  Synthetic oligonucleotide: BID-5355
aagggggugcaagccugagaag

SEQ ID NO: 45023 - RNA, 23 nt, Artificial Sequence
  Synthetic oligonucleotide: BID-5356
gaagggggugcaagccugagaag

SEQ ID NO: 45024 - RNA, 24 nt, Artificial Sequence
  Synthetic oligonucleotide: BID-5357
ggaagggggugcaagccugagaag

SEQ ID NO: 45025 - RNA, 18 nt, Artificial Sequence
  Synthetic oligonucleotide: BID-5358
gcacacauucaggcccag

SEQ ID NO: 45026 - RNA, 19 nt, Artificial Sequence
  Synthetic oligonucleotide: BID-5359
ggcacacauucaggcccag

SEQ ID NO: 45027 - RNA, 20 nt, Artificial Sequence
  Synthetic oligonucleotide: BID-1886
cggcacacauucaggcccag

SEQ ID NO: 45028 - RNA, 21 nt, Artificial Sequence
  Synthetic oligonucleotide: BID-5360
acggcacacauucaggcccag

SEQ ID NO: 45029 - RNA, 22 nt, Artificial Sequence
  Synthetic oligonucleotide: BID-5361
gacggcacacauucaggcccag

SEQ ID NO: 45030 - RNA, 23 nt, Artificial Sequence
  Synthetic oligonucleotide: BID-5362
ggacggcacacauucaggcccag

SEQ ID NO: 45031 - RNA, 24 nt, Artificial Sequence
  Synthetic oligonucleotide: BID-5363
aggacggcacacauucaggcccag

SEQ ID NO: 45032 - RNA, 18 nt, Artificial Sequence
  Synthetic oligonucleotide: BID-5364
ccugggcaagaggggcag

SEQ ID NO: 45033 - RNA, 19 nt, Artificial Sequence
  Synthetic oligonucleotide: BID-5365
cccugggcaagaggggcag

SEQ ID NO: 45034 - RNA, 20 nt, Artificial Sequence
  Synthetic oligonucleotide: BID-1865
ucccugggcaagaggggcag

SEQ ID NO: 45035 - RNA, 21 nt, Artificial Sequence
  Synthetic oligonucleotide: BID-5366
cucccugggcaagaggggcag

SEQ ID NO: 45036 - RNA, 22 nt, Artificial Sequence
  Synthetic oligonucleotide: BID-5367
ccucccugggcaagaggggcag

SEQ ID NO: 45037 - RNA, 23 nt, Artificial Sequence
  Synthetic oligonucleotide: BID-5368
cccucccugggcaagaggggcag

SEQ ID NO: 45038 - RNA, 24 nt, Artificial Sequence
  Synthetic oligonucleotide: BID-5369
ucccucccugggcaagaggggcag

SEQ ID NO: 45039 - RNA, 18 nt, Artificial Sequence
  Synthetic oligonucleotide: BID-5370
agccugagaccuccagag

SEQ ID NO: 45040 - RNA, 19 nt, Artificial Sequence
  Synthetic oligonucleotide: BID-5371
cagccugagaccuccagag

SEQ ID NO: 45041 - RNA, 20 nt, Artificial Sequence
  Synthetic oligonucleotide: BID-1542
ccagccugagaccuccagag

SEQ ID NO: 45042 - RNA, 18 nt, Artificial Sequence
  Synthetic oligonucleotide: BID-5372
agccuccuguggguggag

SEQ ID NO: 45043 - RNA, 19 nt, Artificial Sequence
  Synthetic oligonucleotide: BID-5373
aagccuccuguggguggag

SEQ ID NO: 45044 - RNA, 20 nt, Artificial Sequence
  Synthetic oligonucleotide: BID-1890
aaagccuccuguggguggag

SEQ ID NO: 45045 - RNA, 21 nt, Artificial Sequence
  Synthetic oligonucleotide: BID-5374
caaagccuccuguggguggag

SEQ ID NO: 45046 - RNA, 22 nt, Artificial Sequence
  Synthetic oligonucleotide: BID-5375
ucaaagccuccuguggguggag

SEQ ID NO: 45047 - RNA, 23 nt, Artificial Sequence
  Synthetic oligonucleotide: BID-5376
cucaaagccuccuguggguggag

SEQ ID NO: 45048 - RNA, 24 nt, Artificial Sequence
  Synthetic oligonucleotide: BID-5377
ucucaaagccuccuguggguggag

SEQ ID NO: 45049 - RNA, 18 nt, Artificial Sequence
  Synthetic oligonucleotide: BID-5378
ggaauuaucccagcggcg

SEQ ID NO: 45050 - RNA, 19 nt, Artificial Sequence
  Synthetic oligonucleotide: BID-5379
aggaauuaucccagcggcg

SEQ ID NO: 45051 - RNA, 20 nt, Artificial Sequence
  Synthetic oligonucleotide: BID-1567
uaggaauuaucccagcggcg

SEQ ID NO: 45052 - RNA, 21 nt, Artificial Sequence
  Synthetic oligonucleotide: BID-5380
uuaggaauuaucccagcggcg

SEQ ID NO: 45053 - RNA, 22 nt, Artificial Sequence
  Synthetic oligonucleotide: BID-5381
auuaggaauuaucccagcggcg

SEQ ID NO: 45054 - RNA, 23 nt, Artificial Sequence
  Synthetic oligonucleotide: BID-5382
cauuaggaauuaucccagcggcg

SEQ ID NO: 45055 - RNA, 24 nt, Artificial Sequence
  Synthetic oligonucleotide: BID-5383
ucauuaggaauuaucccagcggcg

SEQ ID NO: 45056 - RNA, 18 nt, Artificial Sequence
  Synthetic oligonucleotide: BID-5384
ggugcaagccugagaagg

SEQ ID NO: 45057 - RNA, 19 nt, Artificial Sequence
  Synthetic oligonucleotide: BID-5385
gggugcaagccugagaagg

SEQ ID NO: 45058 - RNA, 20 nt, Artificial Sequence
  Synthetic oligonucleotide: BID-1051
ggggugcaagccugagaagg

SEQ ID NO: 45059 - RNA, 21 nt, Artificial Sequence
  Synthetic oligonucleotide: BID-5386
gggggugcaagccugagaagg

SEQ ID NO: 45060 - RNA, 22 nt, Artificial Sequence
  Synthetic oligonucleotide: BID-5387
agggggugcaagccugagaagg

SEQ ID NO: 45061 - RNA, 23 nt, Artificial Sequence
  Synthetic oligonucleotide: BID-5388
aagggggugcaagccugagaagg

SEQ ID NO: 45062 - RNA, 24 nt, Artificial Sequence
  Synthetic oligonucleotide: BID-5389
gaagggggugcaagccugagaagg

SEQ ID NO: 45063 - RNA, 18 nt, Artificial Sequence
  Synthetic oligonucleotide: BID-5390
gucgcguaagggguaagg

SEQ ID NO: 45064 - RNA, 19 nt, Artificial Sequence
  Synthetic oligonucleotide: BID-5391
agucgcguaagggguaagg

SEQ ID NO: 45065 - RNA, 20 nt, Artificial Sequence
  Synthetic oligonucleotide: BID-1574
cagucgcguaagggguaagg

SEQ ID NO: 45066 - RNA, 21 nt, Artificial Sequence
  Synthetic oligonucleotide: BID-5392
acagucgcguaagggguaagg

SEQ ID NO: 45067 - RNA, 22 nt, Artificial Sequence
  Synthetic oligonucleotide: BID-5393
aacagucgcguaagggguaagg

SEQ ID NO: 45068 - RNA, 23 nt, Artificial Sequence
  Synthetic oligonucleotide: BID-5394
aaacagucgcguaagggguaagg

SEQ ID NO: 45069 - RNA, 24 nt, Artificial Sequence
  Synthetic oligonucleotide: BID-5395
gaaacagucgcguaagggguaagg

SEQ ID NO: 45070 - RNA, 18 nt, Artificial Sequence
  Synthetic oligonucleotide: BID-5396
uguggauaaggcuccagg

SEQ ID NO: 45071 - RNA, 19 nt, Artificial Sequence
  Synthetic oligonucleotide: BID-5397
guguggauaaggcuccagg

SEQ ID NO: 45072 - RNA, 20 nt, Artificial Sequence
  Synthetic oligonucleotide: BID-1903
gguguggauaaggcuccagg

SEQ ID NO: 45073 - RNA, 21 nt, Artificial Sequence
  Synthetic oligonucleotide: BID-5398
ggguguggauaaggcuccagg

SEQ ID NO: 45074 - RNA, 22 nt, Artificial Sequence
  Synthetic oligonucleotide: BID-5399
aggguguggauaaggcuccagg

SEQ ID NO: 45075 - RNA, 23 nt, Artificial Sequence
  Synthetic oligonucleotide: BID-5400
gaggguguggauaaggcuccagg

SEQ ID NO: 45076 - RNA, 24 nt, Artificial Sequence
  Synthetic oligonucleotide: BID-5401
ugaggguguggauaaggcuccagg

SEQ ID NO: 45077 - RNA, 18 nt, Artificial Sequence
  Synthetic oligonucleotide: BID-5402
cacacccugggccgcagg

SEQ ID NO: 45078 - RNA, 19 nt, Artificial Sequence
  Synthetic oligonucleotide: BID-5403
gcacacccugggccgcagg

SEQ ID NO: 45079 - RNA, 20 nt, Artificial Sequence
  Synthetic oligonucleotide: BID-1870
cgcacacccugggccgcagg

SEQ ID NO: 45080 - RNA, 21 nt, Artificial Sequence
  Synthetic oligonucleotide: BID-5404
acgcacacccugggccgcagg

SEQ ID NO: 45081 - RNA, 22 nt, Artificial Sequence
  Synthetic oligonucleotide: BID-5405
gacgcacacccugggccgcagg

SEQ ID NO: 45082 - RNA, 23 nt, Artificial Sequence
  Synthetic oligonucleotide: BID-5406
ggacgcacacccugggccgcagg

SEQ ID NO: 45083 - RNA, 24 nt, Artificial Sequence
  Synthetic oligonucleotide: BID-5407
gggacgcacacccugggccgcagg

SEQ ID NO: 45084 - RNA, 18 nt, Artificial Sequence
  Synthetic oligonucleotide: BID-5408
gccugagaccuccagagg

SEQ ID NO: 45085 - RNA, 19 nt, Artificial Sequence
  Synthetic oligonucleotide: BID-5409
agccugagaccuccagagg

SEQ ID NO: 45086 - RNA, 20 nt, Artificial Sequence
  Synthetic oligonucleotide: BID-685
cagccugagaccuccagagg

SEQ ID NO: 45087 - RNA, 21 nt, Artificial Sequence
  Synthetic oligonucleotide: BID-5410
ccagccugagaccuccagagg

SEQ ID NO: 45088 - RNA, 22 nt, Artificial Sequence
  Synthetic oligonucleotide: BID-5411
accagccugagaccuccagagg

SEQ ID NO: 45089 - RNA, 23 nt, Artificial Sequence
  Synthetic oligonucleotide: BID-5412
gaccagccugagaccuccagagg

SEQ ID NO: 45090 - RNA, 24 nt, Artificial Sequence
  Synthetic oligonucleotide: BID-5413
agaccagccugagaccuccagagg

SEQ ID NO: 45091 - RNA, 18 nt, Artificial Sequence
  Synthetic oligonucleotide: BID-5414
ucgcguaagggguaaggg

SEQ ID NO: 45092 - RNA, 19 nt, Artificial Sequence
  Synthetic oligonucleotide: BID-5415
gucgcguaagggguaaggg

SEQ ID NO: 45093 - RNA, 20 nt, Artificial Sequence
  Synthetic oligonucleotide: BID-713
agucgcguaagggguaaggg

SEQ ID NO: 45094 - RNA, 21 nt, Artificial Sequence
  Synthetic oligonucleotide: BID-5416
cagucgcguaagggguaaggg

SEQ ID NO: 45095 - RNA, 22 nt, Artificial Sequence
  Synthetic oligonucleotide: BID-5417
acagucgcguaagggguaaggg

SEQ ID NO: 45096 - RNA, 23 nt, Artificial Sequence
  Synthetic oligonucleotide: BID-5418
aacagucgcguaagggguaaggg

SEQ ID NO: 45097 - RNA, 24 nt, Artificial Sequence
  Synthetic oligonucleotide: BID-5419
aaacagucgcguaagggguaaggg

SEQ ID NO: 45098 - RNA, 18 nt, Artificial Sequence
  Synthetic oligonucleotide: BID-5420
caagaggggcagaagggg

SEQ ID NO: 45099 - RNA, 19 nt, Artificial Sequence
  Synthetic oligonucleotide: BID-5421
gcaagaggggcagaagggg

SEQ ID NO: 45100 - RNA, 20 nt, Artificial Sequence
  Synthetic oligonucleotide: BID-1867
ggcaagaggggcagaagggg

SEQ ID NO: 45101 - RNA, 21 nt, Artificial Sequence
  Synthetic oligonucleotide: BID-5422
gggcaagaggggcagaagggg

SEQ ID NO: 45102 - RNA, 22 nt, Artificial Sequence
  Synthetic oligonucleotide: BID-5423
ugggcaagaggggcagaagggg

SEQ ID NO: 45103 - RNA, 23 nt, Artificial Sequence
  Synthetic oligonucleotide: BID-5424
cugggcaagaggggcagaagggg

SEQ ID NO: 45104 - RNA, 24 nt, Artificial Sequence
  Synthetic oligonucleotide: BID-5425
ccugggcaagaggggcagaagggg

SEQ ID NO: 45105 - RNA, 18 nt, Artificial Sequence
  Synthetic oligonucleotide: BID-5426
cucccugggcaagagggg

SEQ ID NO: 45106 - RNA, 19 nt, Artificial Sequence
  Synthetic oligonucleotide: BID-5427
ccucccugggcaagagggg

SEQ ID NO: 45107 - RNA, 20 nt, Artificial Sequence
  Synthetic oligonucleotide: BID-1864
cccucccugggcaagagggg

SEQ ID NO: 45108 - RNA, 21 nt, Artificial Sequence
  Synthetic oligonucleotide: BID-5428
ucccucccugggcaagagggg

SEQ ID NO: 45109 - RNA, 22 nt, Artificial Sequence
  Synthetic oligonucleotide: BID-5429
uucccucccugggcaagagggg

SEQ ID NO: 45110 - RNA, 23 nt, Artificial Sequence
  Synthetic oligonucleotide: BID-5430
cuucccucccugggcaagagggg

SEQ ID NO: 45111 - RNA, 24 nt, Artificial Sequence
  Synthetic oligonucleotide: BID-5431
ucuucccucccugggcaagagggg

SEQ ID NO: 45112 - RNA, 18 nt, Artificial Sequence
  Synthetic oligonucleotide: BID-5432
acagggacuggugagggg

SEQ ID NO: 45113 - RNA, 19 nt, Artificial Sequence
  Synthetic oligonucleotide: BID-5433
cacagggacuggugagggg

SEQ ID NO: 45114 - RNA, 20 nt, Artificial Sequence
  Synthetic oligonucleotide: BID-1554
gcacagggacuggugagggg

SEQ ID NO: 45115 - RNA, 21 nt, Artificial Sequence
  Synthetic oligonucleotide: BID-5434
agcacagggacuggugagggg

SEQ ID NO: 45116 - RNA, 22 nt, Artificial Sequence
  Synthetic oligonucleotide: BID-5435
aagcacagggacuggugagggg

SEQ ID NO: 45117 - RNA, 23 nt, Artificial Sequence
  Synthetic oligonucleotide: BID-5436
caagcacagggacuggugagggg

SEQ ID NO: 45118 - RNA, 24 nt, Artificial Sequence
  Synthetic oligonucleotide: BID-5437
acaagcacagggacuggugagggg

SEQ ID NO: 45119 - RNA, 18 nt, Artificial Sequence
  Synthetic oligonucleotide: BID-5438
cucaaagccuccuguggg

SEQ ID NO: 45120 - RNA, 19 nt, Artificial Sequence
  Synthetic oligonucleotide: BID-5439
ucucaaagccuccuguggg

SEQ ID NO: 45121 - RNA, 20 nt, Artificial Sequence
  Synthetic oligonucleotide: BID-1037
aucucaaagccuccuguggg

SEQ ID NO: 45122 - RNA, 21 nt, Artificial Sequence
  Synthetic oligonucleotide: BID-5440
caucucaaagccuccuguggg

SEQ ID NO: 45123 - RNA, 22 nt, Artificial Sequence
  Synthetic oligonucleotide: BID-5441
ccaucucaaagccuccuguggg

SEQ ID NO: 45124 - RNA, 23 nt, Artificial Sequence
  Synthetic oligonucleotide: BID-5442
cccaucucaaagccuccuguggg

SEQ ID NO: 45125 - RNA, 24 nt, Artificial Sequence
  Synthetic oligonucleotide: BID-5443
ccccaucucaaagccuccuguggg

SEQ ID NO: 45126 - RNA, 18 nt, Artificial Sequence
  Synthetic oligonucleotide: BID-5444
gcaagccugagaaggugg

SEQ ID NO: 45127 - RNA, 19 nt, Artificial Sequence
  Synthetic oligonucleotide: BID-5445
ugcaagccugagaaggugg

SEQ ID NO: 45128 - RNA, 20 nt, Artificial Sequence
  Synthetic oligonucleotide: BID-1910
gugcaagccugagaaggugg

SEQ ID NO: 45129 - RNA, 21 nt, Artificial Sequence
  Synthetic oligonucleotide: BID-5446
ggugcaagccugagaaggugg

SEQ ID NO: 45130 - RNA, 22 nt, Artificial Sequence
  Synthetic oligonucleotide: BID-5447
gggugcaagccugagaaggugg

SEQ ID NO: 45131 - RNA, 23 nt, Artificial Sequence
  Synthetic oligonucleotide: BID-5448
ggggugcaagccugagaaggugg

SEQ ID NO: 45132 - RNA, 24 nt, Artificial Sequence
  Synthetic oligonucleotide: BID-5449
gggggugcaagccugagaaggugg

SEQ ID NO: 45133 - RNA, 18 nt, Artificial Sequence
  Synthetic oligonucleotide: BID-5450
ucucaaagccuccugugg

SEQ ID NO: 45134 - RNA, 19 nt, Artificial Sequence
  Synthetic oligonucleotide: BID-5451
aucucaaagccuccugugg

SEQ ID NO: 45135 - RNA, 20 nt, Artificial Sequence
  Synthetic oligonucleotide: BID-1888
caucucaaagccuccugugg

SEQ ID NO: 45136 - RNA, 21 nt, Artificial Sequence
  Synthetic oligonucleotide: BID-5452
ccaucucaaagccuccugugg

SEQ ID NO: 45137 - RNA, 22 nt, Artificial Sequence
  Synthetic oligonucleotide: BID-5453
cccaucucaaagccuccugugg

SEQ ID NO: 45138 - RNA, 23 nt, Artificial Sequence
  Synthetic oligonucleotide: BID-5454
ccccaucucaaagccuccugugg

SEQ ID NO: 45139 - RNA, 24 nt, Artificial Sequence
  Synthetic oligonucleotide: BID-5455
cccccaucucaaagccuccugugg

SEQ ID NO: 45140 - RNA, 18 nt, Artificial Sequence
  Synthetic oligonucleotide: BID-5456
guggguggagauggaaug

SEQ ID NO: 45141 - RNA, 19 nt, Artificial Sequence
  Synthetic oligonucleotide: BID-5457
uguggguggagauggaaug

SEQ ID NO: 45142 - RNA, 20 nt, Artificial Sequence
  Synthetic oligonucleotide: BID-1039
cuguggguggagauggaaug

SEQ ID NO: 45143 - RNA, 21 nt, Artificial Sequence
  Synthetic oligonucleotide: BID-5458
ccuguggguggagauggaaug

SEQ ID NO: 45144 - RNA, 22 nt, Artificial Sequence
  Synthetic oligonucleotide: BID-5459
uccuguggguggagauggaaug

SEQ ID NO: 45145 - RNA, 23 nt, Artificial Sequence
  Synthetic oligonucleotide: BID-5460
cuccuguggguggagauggaaug

SEQ ID NO: 45146 - RNA, 24 nt, Artificial Sequence
  Synthetic oligonucleotide: BID-5461
ccuccuguggguggagauggaaug

SEQ ID NO: 45147 - RNA, 18 nt, Artificial Sequence
  Synthetic oligonucleotide: BID-5462
caacaagcacagggacug

SEQ ID NO: 45148 - RNA, 19 nt, Artificial Sequence
  Synthetic oligonucleotide: BID-5463
acaacaagcacagggacug

SEQ ID NO: 45149 - RNA, 20 nt, Artificial Sequence
  Synthetic oligonucleotide: BID-1551
aacaacaagcacagggacug

SEQ ID NO: 45150 - RNA, 21 nt, Artificial Sequence
  Synthetic oligonucleotide: BID-5464
aaacaacaagcacagggacug

SEQ ID NO: 45151 - RNA, 22 nt, Artificial Sequence
  Synthetic oligonucleotide: BID-5465
uaaacaacaagcacagggacug

SEQ ID NO: 45152 - RNA, 23 nt, Artificial Sequence
  Synthetic oligonucleotide: BID-5466
auaaacaacaagcacagggacug

SEQ ID NO: 45153 - RNA, 24 nt, Artificial Sequence
  Synthetic oligonucleotide: BID-5467
aauaaacaacaagcacagggacug

SEQ ID NO: 45154 - RNA, 18 nt, Artificial Sequence
  Synthetic oligonucleotide: BID-5468
aucacucccaggggacug

SEQ ID NO: 45155 - RNA, 19 nt, Artificial Sequence
  Synthetic oligonucleotide: BID-5469
caucacucccaggggacug

SEQ ID NO: 45156 - RNA, 20 nt, Artificial Sequence
  Synthetic oligonucleotide: BID-1882
ucaucacucccaggggacug

SEQ ID NO: 45157 - RNA, 21 nt, Artificial Sequence
  Synthetic oligonucleotide: BID-5470
gucaucacucccaggggacug

SEQ ID NO: 45158 - RNA, 22 nt, Artificial Sequence
  Synthetic oligonucleotide: BID-5471
ggucaucacucccaggggacug

SEQ ID NO: 45159 - RNA, 23 nt, Artificial Sequence
  Synthetic oligonucleotide: BID-5472
cggucaucacucccaggggacug

SEQ ID NO: 45160 - RNA, 24 nt, Artificial Sequence
  Synthetic oligonucleotide: BID-5473
ucggucaucacucccaggggacug

SEQ ID NO: 45161 - RNA, 18 nt, Artificial Sequence
  Synthetic oligonucleotide: BID-5474
caagcacagggacuggug

SEQ ID NO: 45162 - RNA, 19 nt, Artificial Sequence
  Synthetic oligonucleotide: BID-5475
acaagcacagggacuggug

SEQ ID NO: 45163 - RNA, 20 nt, Artificial Sequence
  Synthetic oligonucleotide: BID-692
aacaagcacagggacuggug

SEQ ID NO: 45164 - RNA, 21 nt, Artificial Sequence
  Synthetic oligonucleotide: BID-5476
caacaagcacagggacuggug

SEQ ID NO: 45165 - RNA, 22 nt, Artificial Sequence
  Synthetic oligonucleotide: BID-5477
acaacaagcacagggacuggug

SEQ ID NO: 45166 - RNA, 23 nt, Artificial Sequence
  Synthetic oligonucleotide: BID-5478
aacaacaagcacagggacuggug

SEQ ID NO: 45167 - RNA, 24 nt, Artificial Sequence
  Synthetic oligonucleotide: BID-5479
aaacaacaagcacagggacuggug

SEQ ID NO: 45168 - RNA, 18 nt, Artificial Sequence
  Synthetic oligonucleotide: BID-5480
uguggguggagauggaau

SEQ ID NO: 45169 - RNA, 19 nt, Artificial Sequence
  Synthetic oligonucleotide: BID-5481
cuguggguggagauggaau

SEQ ID NO: 45170 - RNA, 20 nt, Artificial Sequence
  Synthetic oligonucleotide: BID-1892
ccuguggguggagauggaau

SEQ ID NO: 45171 - RNA, 21 nt, Artificial Sequence
  Synthetic oligonucleotide: BID-5482
uccuguggguggagauggaau

SEQ ID NO: 45172 - RNA, 22 nt, Artificial Sequence
  Synthetic oligonucleotide: BID-5483
cuccuguggguggagauggaau

SEQ ID NO: 45173 - RNA, 23 nt, Artificial Sequence
  Synthetic oligonucleotide: BID-5484
ccuccuguggguggagauggaau

SEQ ID NO: 45174 - RNA, 24 nt, Artificial Sequence
  Synthetic oligonucleotide: BID-5485
gccuccuguggguggagauggaau

SEQ ID NO: 45175 - RNA, 18 nt, Artificial Sequence
  Synthetic oligonucleotide: BID-5486
uguuucccagagaaucau

SEQ ID NO: 45176 - RNA, 19 nt, Artificial Sequence
  Synthetic oligonucleotide: BID-5487
auguuucccagagaaucau

SEQ ID NO: 45177 - RNA, 20 nt, Artificial Sequence
  Synthetic oligonucleotide: BID-1565
aauguuucccagagaaucau

SEQ ID NO: 45178 - RNA, 21 nt, Artificial Sequence
  Synthetic oligonucleotide: BID-5488
gaauguuucccagagaaucau

SEQ ID NO: 45179 - RNA, 22 nt, Artificial Sequence
  Synthetic oligonucleotide: BID-5489
ugaauguuucccagagaaucau

SEQ ID NO: 45180 - RNA, 23 nt, Artificial Sequence
  Synthetic oligonucleotide: BID-5490
cugaauguuucccagagaaucau

SEQ ID NO: 45181 - RNA, 24 nt, Artificial Sequence
  Synthetic oligonucleotide: BID-5491
ucugaauguuucccagagaaucau

SEQ ID NO: 45182 - RNA, 18 nt, Artificial Sequence
  Synthetic oligonucleotide: BID-5492
ggaagggggugcaagccu

SEQ ID NO: 45183 - RNA, 19 nt, Artificial Sequence
  Synthetic oligonucleotide: BID-5493
aggaagggggugcaagccu

SEQ ID NO: 45184 - RNA, 20 nt, Artificial Sequence
  Synthetic oligonucleotide: BID-1907
caggaagggggugcaagccu

SEQ ID NO: 45185 - RNA, 21 nt, Artificial Sequence
  Synthetic oligonucleotide: BID-5494
ccaggaagggggugcaagccu

SEQ ID NO: 45186 - RNA, 22 nt, Artificial Sequence
  Synthetic oligonucleotide: BID-5495
uccaggaagggggugcaagccu

SEQ ID NO: 45187 - RNA, 23 nt, Artificial Sequence
  Synthetic oligonucleotide: BID-5496
cuccaggaagggggugcaagccu

SEQ ID NO: 45188 - RNA, 24 nt, Artificial Sequence
  Synthetic oligonucleotide: BID-5497
gcuccaggaagggggugcaagccu

SEQ ID NO: 45189 - RNA, 18 nt, Artificial Sequence
  Synthetic oligonucleotide: BID-5498
gcucccugugcccguccu

SEQ ID NO: 45190 - RNA, 19 nt, Artificial Sequence
  Synthetic oligonucleotide: BID-5499
ugcucccugugcccguccu

SEQ ID NO: 45191 - RNA, 20 nt, Artificial Sequence
  Synthetic oligonucleotide: BID-1001
augcucccugugcccguccu

SEQ ID NO: 45192 - RNA, 21 nt, Artificial Sequence
  Synthetic oligonucleotide: BID-5500
caugcucccugugcccguccu

SEQ ID NO: 45193 - RNA, 22 nt, Artificial Sequence
  Synthetic oligonucleotide: BID-5501
ucaugcucccugugcccguccu

SEQ ID NO: 45194 - RNA, 23 nt, Artificial Sequence
  Synthetic oligonucleotide: BID-5502
cucaugcucccugugcccguccu

SEQ ID NO: 45195 - RNA, 24 nt, Artificial Sequence
  Synthetic oligonucleotide: BID-5503
ccucaugcucccugugcccguccu

SEQ ID NO: 45196 - RNA, 18 nt, Artificial Sequence
  Synthetic oligonucleotide: BID-5504
acccuuaagaccccagcu

SEQ ID NO: 45197 - RNA, 19 nt, Artificial Sequence
  Synthetic oligonucleotide: BID-5505
cacccuuaagaccccagcu

SEQ ID NO: 45198 - RNA, 20 nt, Artificial Sequence
  Synthetic oligonucleotide: BID-1876
acacccuuaagaccccagcu

SEQ ID NO: 45199 - RNA, 21 nt, Artificial Sequence
  Synthetic oligonucleotide: BID-5506
cacacccuuaagaccccagcu

SEQ ID NO: 45200 - RNA, 22 nt, Artificial Sequence
  Synthetic oligonucleotide: BID-5507
ccacacccuuaagaccccagcu

SEQ ID NO: 45201 - RNA, 23 nt, Artificial Sequence
  Synthetic oligonucleotide: BID-5508
cccacacccuuaagaccccagcu

SEQ ID NO: 45202 - RNA, 24 nt, Artificial Sequence
  Synthetic oligonucleotide: BID-5509
ccccacacccuuaagaccccagcu

SEQ ID NO: 45203 - RNA, 18 nt, Artificial Sequence
  Synthetic oligonucleotide: BID-5510
cugcagcucccccacagu

SEQ ID NO: 45204 - RNA, 19 nt, Artificial Sequence
  Synthetic oligonucleotide: BID-5511
ucugcagcucccccacagu

SEQ ID NO: 45205 - RNA, 20 nt, Artificial Sequence
  Synthetic oligonucleotide: BID-1895
cucugcagcucccccacagu

SEQ ID NO: 45206 - RNA, 21 nt, Artificial Sequence
  Synthetic oligonucleotide: BID-5512
ccucugcagcucccccacagu

SEQ ID NO: 45207 - RNA, 22 nt, Artificial Sequence
  Synthetic oligonucleotide: BID-5513
uccucugcagcucccccacagu

SEQ ID NO: 45208 - RNA, 23 nt, Artificial Sequence
  Synthetic oligonucleotide: BID-5514
auccucugcagcucccccacagu

SEQ ID NO: 45209 - RNA, 24 nt, Artificial Sequence
  Synthetic oligonucleotide: BID-5515
cauccucugcagcucccccacagu

SEQ ID NO: 45210 - RNA, 18 nt, Artificial Sequence
  Synthetic oligonucleotide: BID-5516
ccaaaccccugguuccgu

SEQ ID NO: 45211 - RNA, 19 nt, Artificial Sequence
  Synthetic oligonucleotide: BID-5517
uccaaaccccugguuccgu

SEQ ID NO: 45212 - RNA, 20 nt, Artificial Sequence
  Synthetic oligonucleotide: BID-1556
uuccaaaccccugguuccgu

SEQ ID NO: 45213 - RNA, 21 nt, Artificial Sequence
  Synthetic oligonucleotide: BID-5518
uuuccaaaccccugguuccgu

SEQ ID NO: 45214 - RNA, 22 nt, Artificial Sequence
  Synthetic oligonucleotide: BID-5519
cuuuccaaaccccugguuccgu

SEQ ID NO: 45215 - RNA, 23 nt, Artificial Sequence
  Synthetic oligonucleotide: BID-5520
acuuuccaaaccccugguuccgu

SEQ ID NO: 45216 - RNA, 24 nt, Artificial Sequence
  Synthetic oligonucleotide: BID-5521
cacuuuccaaaccccugguuccgu

SEQ ID NO: 45217 - RNA, 18 nt, Artificial Sequence
  Synthetic oligonucleotide: BID-5522
ugucugaaacagucgcgu

SEQ ID NO: 45218 - RNA, 19 nt, Artificial Sequence
  Synthetic oligonucleotide: BID-5523
cugucugaaacagucgcgu

SEQ ID NO: 45219 - RNA, 20 nt, Artificial Sequence
  Synthetic oligonucleotide: BID-1571
acugucugaaacagucgcgu

SEQ ID NO: 45220 - RNA, 21 nt, Artificial Sequence
  Synthetic oligonucleotide: BID-5524
cacugucugaaacagucgcgu

SEQ ID NO: 45221 - RNA, 22 nt, Artificial Sequence
  Synthetic oligonucleotide: BID-5525
acacugucugaaacagucgcgu

SEQ ID NO: 45222 - RNA, 23 nt, Artificial Sequence
  Synthetic oligonucleotide: BID-5526
gacacugucugaaacagucgcgu

SEQ ID NO: 45223 - RNA, 24 nt, Artificial Sequence
  Synthetic oligonucleotide: BID-5527
cgacacugucugaaacagucgcgu

SEQ ID NO: 45224 - RNA, 18 nt, Artificial Sequence
  Synthetic oligonucleotide: BID-5528
acaagcacagggacuggu

SEQ ID NO: 45225 - RNA, 19 nt, Artificial Sequence
  Synthetic oligonucleotide: BID-5529
aacaagcacagggacuggu

SEQ ID NO: 45226 - RNA, 20 nt, Artificial Sequence
  Synthetic oligonucleotide: BID-1552
caacaagcacagggacuggu

SEQ ID NO: 45227 - RNA, 21 nt, Artificial Sequence
  Synthetic oligonucleotide: BID-5530
acaacaagcacagggacuggu

SEQ ID NO: 45228 - RNA, 22 nt, Artificial Sequence
  Synthetic oligonucleotide: BID-5531
aacaacaagcacagggacuggu

SEQ ID NO: 45229 - RNA, 23 nt, Artificial Sequence
  Synthetic oligonucleotide: BID-5532
aaacaacaagcacagggacuggu

SEQ ID NO: 45230 - RNA, 24 nt, Artificial Sequence
  Synthetic oligonucleotide: BID-5533
uaaacaacaagcacagggacuggu

SEQ ID NO: 45231 - RNA, 18 nt, Artificial Sequence
  Synthetic oligonucleotide: BID-5534
aaaguuggacgacacugu

SEQ ID NO: 45232 - RNA, 19 nt, Artificial Sequence
  Synthetic oligonucleotide: BID-5535
uaaaguuggacgacacugu

SEQ ID NO: 45233 - RNA, 20 nt, Artificial Sequence
  Synthetic oligonucleotide: BID-1570
uuaaaguuggacgacacugu

SEQ ID NO: 45234 - RNA, 21 nt, Artificial Sequence
  Synthetic oligonucleotide: BID-5536
cuuaaaguuggacgacacugu

SEQ ID NO: 45235 - RNA, 22 nt, Artificial Sequence
  Synthetic oligonucleotide: BID-5537
acuuaaaguuggacgacacugu

SEQ ID NO: 45236 - RNA, 23 nt, Artificial Sequence
  Synthetic oligonucleotide: BID-5538
aacuuaaaguuggacgacacugu

SEQ ID NO: 45237 - RNA, 24 nt, Artificial Sequence
  Synthetic oligonucleotide: BID-5539
caacuuaaaguuggacgacacugu

SEQ ID NO: 45238 - RNA, 18 nt, Artificial Sequence
  Synthetic oligonucleotide: BID-5540
ucuugcccagggagggaa

SEQ ID NO: 45239 - RNA, 19 nt, Artificial Sequence
  Synthetic oligonucleotide: BID-5541
cucuugcccagggagggaa

SEQ ID NO: 45240 - RNA, 20 nt, Artificial Sequence
  Synthetic oligonucleotide: BID-1767
ccucuugcccagggagggaa

SEQ ID NO: 45241 - RNA, 21 nt, Artificial Sequence
  Synthetic oligonucleotide: BID-5542
cccucuugcccagggagggaa

SEQ ID NO: 45242 - RNA, 22 nt, Artificial Sequence
  Synthetic oligonucleotide: BID-5543
ccccucuugcccagggagggaa

SEQ ID NO: 45243 - RNA, 23 nt, Artificial Sequence
  Synthetic oligonucleotide: BID-5544
gccccucuugcccagggagggaa

SEQ ID NO: 45244 - RNA, 24 nt, Artificial Sequence
  Synthetic oligonucleotide: BID-5545
ugccccucuugcccagggagggaa

SEQ ID NO: 45245 - RNA, 18 nt, Artificial Sequence
  Synthetic oligonucleotide: BID-5546
ucucccaggacgggcaca

SEQ ID NO: 45246 - RNA, 19 nt, Artificial Sequence
  Synthetic oligonucleotide: BID-5547
aucucccaggacgggcaca

SEQ ID NO: 45247 - RNA, 20 nt, Artificial Sequence
  Synthetic oligonucleotide: BID-932
gaucucccaggacgggcaca

SEQ ID NO: 45248 - RNA, 21 nt, Artificial Sequence
  Synthetic oligonucleotide: BID-5548
ggaucucccaggacgggcaca

SEQ ID NO: 45249 - RNA, 22 nt, Artificial Sequence
  Synthetic oligonucleotide: BID-5549
gggaucucccaggacgggcaca

SEQ ID NO: 45250 - RNA, 23 nt, Artificial Sequence
  Synthetic oligonucleotide: BID-5550
agggaucucccaggacgggcaca

SEQ ID NO: 45251 - RNA, 24 nt, Artificial Sequence
  Synthetic oligonucleotide: BID-5551
cagggaucucccaggacgggcaca

SEQ ID NO: 45252 - RNA, 18 nt, Artificial Sequence
  Synthetic oligonucleotide: BID-5552
acauuccaucuccaccca

SEQ ID NO: 45253 - RNA, 19 nt, Artificial Sequence
  Synthetic oligonucleotide: BID-5553
cacauuccaucuccaccca

SEQ ID NO: 45254 - RNA, 20 nt, Artificial Sequence
  Synthetic oligonucleotide: BID-1720
ccacauuccaucuccaccca

SEQ ID NO: 45255 - RNA, 21 nt, Artificial Sequence
  Synthetic oligonucleotide: BID-5554
uccacauuccaucuccaccca

SEQ ID NO: 45256 - RNA, 22 nt, Artificial Sequence
  Synthetic oligonucleotide: BID-5555
uuccacauuccaucuccaccca

SEQ ID NO: 45257 - RNA, 23 nt, Artificial Sequence
  Synthetic oligonucleotide: BID-5556
uuuccacauuccaucuccaccca

SEQ ID NO: 45258 - RNA, 24 nt, Artificial Sequence
  Synthetic oligonucleotide: BID-5557
uuuuccacauuccaucuccaccca

SEQ ID NO: 45259 - RNA, 18 nt, Artificial Sequence
  Synthetic oligonucleotide: BID-5558
uucugccccucuugccca

SEQ ID NO: 45260 - RNA, 19 nt, Artificial Sequence
  Synthetic oligonucleotide: BID-5559
cuucugccccucuugccca

SEQ ID NO: 45261 - RNA, 20 nt, Artificial Sequence
  Synthetic oligonucleotide: BID-914
ccuucugccccucuugccca

SEQ ID NO: 45262 - RNA, 21 nt, Artificial Sequence
  Synthetic oligonucleotide: BID-5560
cccuucugccccucuugccca

SEQ ID NO: 45263 - RNA, 22 nt, Artificial Sequence
  Synthetic oligonucleotide: BID-5561
ccccuucugccccucuugccca

SEQ ID NO: 45264 - RNA, 23 nt, Artificial Sequence
  Synthetic oligonucleotide: BID-5562
gccccuucugccccucuugccca

SEQ ID NO: 45265 - RNA, 24 nt, Artificial Sequence
  Synthetic oligonucleotide: BID-5563
ugccccuucugccccucuugccca

SEQ ID NO: 45266 - RNA, 18 nt, Artificial Sequence
  Synthetic oligonucleotide: BID-5564
gagguagacagagcucca

SEQ ID NO: 45267 - RNA, 19 nt, Artificial Sequence
  Synthetic oligonucleotide: BID-5565
ugagguagacagagcucca

SEQ ID NO: 45268 - RNA, 20 nt, Artificial Sequence
  Synthetic oligonucleotide: BID-904
uugagguagacagagcucca

SEQ ID NO: 45269 - RNA, 21 nt, Artificial Sequence
  Synthetic oligonucleotide: BID-5566
guugagguagacagagcucca

SEQ ID NO: 45270 - RNA, 22 nt, Artificial Sequence
  Synthetic oligonucleotide: BID-5567
aguugagguagacagagcucca

SEQ ID NO: 45271 - RNA, 23 nt, Artificial Sequence
  Synthetic oligonucleotide: BID-5568
gaguugagguagacagagcucca

SEQ ID NO: 45272 - RNA, 24 nt, Artificial Sequence
  Synthetic oligonucleotide: BID-5569
ggaguugagguagacagagcucca

SEQ ID NO: 45273 - RNA, 18 nt, Artificial Sequence
  Synthetic oligonucleotide: BID-5570
cggggagccggcagcgca

SEQ ID NO: 45274 - RNA, 19 nt, Artificial Sequence
  Synthetic oligonucleotide: BID-5571
gcggggagccggcagcgca

SEQ ID NO: 45275 - RNA, 20 nt, Artificial Sequence
  Synthetic oligonucleotide: BID-1624
ggcggggagccggcagcgca

SEQ ID NO: 45276 - RNA, 21 nt, Artificial Sequence
  Synthetic oligonucleotide: BID-5572
gggcggggagccggcagcgca

SEQ ID NO: 45277 - RNA, 22 nt, Artificial Sequence
  Synthetic oligonucleotide: BID-5573
ggggcggggagccggcagcgca

SEQ ID NO: 45278 - RNA, 23 nt, Artificial Sequence
  Synthetic oligonucleotide: BID-5574
cggggcggggagccggcagcgca

SEQ ID NO: 45279 - RNA, 24 nt, Artificial Sequence
  Synthetic oligonucleotide: BID-5575
gcggggcggggagccggcagcgca

SEQ ID NO: 45280 - RNA, 18 nt, Artificial Sequence
  Synthetic oligonucleotide: BID-5576
aaggguguggggagcgca

SEQ ID NO: 45281 - RNA, 19 nt, Artificial Sequence
  Synthetic oligonucleotide: BID-5577
uaaggguguggggagcgca

SEQ ID NO: 45282 - RNA, 20 nt, Artificial Sequence
  Synthetic oligonucleotide: BID-1746
uuaaggguguggggagcgca

SEQ ID NO: 45283 - RNA, 21 nt, Artificial Sequence
  Synthetic oligonucleotide: BID-5578
cuuaaggguguggggagcgca

SEQ ID NO: 45284 - RNA, 22 nt, Artificial Sequence
  Synthetic oligonucleotide: BID-5579
ucuuaaggguguggggagcgca

SEQ ID NO: 45285 - RNA, 23 nt, Artificial Sequence
  Synthetic oligonucleotide: BID-5580
gucuuaaggguguggggagcgca

SEQ ID NO: 45286 - RNA, 24 nt, Artificial Sequence
  Synthetic oligonucleotide: BID-5581
ggucuuaaggguguggggagcgca

SEQ ID NO: 45287 - RNA, 18 nt, Artificial Sequence
  Synthetic oligonucleotide: BID-5582
gaucucccaggacgggca

SEQ ID NO: 45288 - RNA, 19 nt, Artificial Sequence
  Synthetic oligonucleotide: BID-5583
ggaucucccaggacgggca

SEQ ID NO: 45289 - RNA, 20 nt, Artificial Sequence
  Synthetic oligonucleotide: BID-1777
gggaucucccaggacgggca

SEQ ID NO: 45290 - RNA, 21 nt, Artificial Sequence
  Synthetic oligonucleotide: BID-5584
agggaucucccaggacgggca

SEQ ID NO: 45291 - RNA, 22 nt, Artificial Sequence
  Synthetic oligonucleotide: BID-5585
cagggaucucccaggacgggca

SEQ ID NO: 45292 - RNA, 23 nt, Artificial Sequence
  Synthetic oligonucleotide: BID-5586
gcagggaucucccaggacgggca

SEQ ID NO: 45293 - RNA, 24 nt, Artificial Sequence
  Synthetic oligonucleotide: BID-5587
ggcagggaucucccaggacgggca

SEQ ID NO: 45294 - RNA, 18 nt, Artificial Sequence
  Synthetic oligonucleotide: BID-5588
ggucauucuagguccuca

SEQ ID NO: 45295 - RNA, 19 nt, Artificial Sequence
  Synthetic oligonucleotide: BID-5589
uggucauucuagguccuca

SEQ ID NO: 45296 - RNA, 20 nt, Artificial Sequence
  Synthetic oligonucleotide: BID-783
guggucauucuagguccuca

SEQ ID NO: 45297 - RNA, 21 nt, Artificial Sequence
  Synthetic oligonucleotide: BID-5590
gguggucauucuagguccuca

SEQ ID NO: 45298 - RNA, 22 nt, Artificial Sequence
  Synthetic oligonucleotide: BID-5591
ggguggucauucuagguccuca

SEQ ID NO: 45299 - RNA, 23 nt, Artificial Sequence
  Synthetic oligonucleotide: BID-5592
gggguggucauucuagguccuca

SEQ ID NO: 45300 - RNA, 24 nt, Artificial Sequence
  Synthetic oligonucleotide: BID-5593
ugggguggucauucuagguccuca

SEQ ID NO: 45301 - RNA, 18 nt, Artificial Sequence
  Synthetic oligonucleotide: BID-5594
ccacaggaggcuuugaga

SEQ ID NO: 45302 - RNA, 19 nt, Artificial Sequence
  Synthetic oligonucleotide: BID-5595
cccacaggaggcuuugaga

SEQ ID NO: 45303 - RNA, 20 nt, Artificial Sequence
  Synthetic oligonucleotide: BID-878
acccacaggaggcuuugaga

SEQ ID NO: 45304 - RNA, 21 nt, Artificial Sequence
  Synthetic oligonucleotide: BID-5596
cacccacaggaggcuuugaga

SEQ ID NO: 45305 - RNA, 22 nt, Artificial Sequence
  Synthetic oligonucleotide: BID-5597
ccacccacaggaggcuuugaga

SEQ ID NO: 45306 - RNA, 23 nt, Artificial Sequence
  Synthetic oligonucleotide: BID-5598
uccacccacaggaggcuuugaga

SEQ ID NO: 45307 - RNA, 24 nt, Artificial Sequence
  Synthetic oligonucleotide: BID-5599
cuccacccacaggaggcuuugaga

SEQ ID NO: 45308 - RNA, 18 nt, Artificial Sequence
  Synthetic oligonucleotide: BID-5600
aucaggaguugagguaga

SEQ ID NO: 45309 - RNA, 19 nt, Artificial Sequence
  Synthetic oligonucleotide: BID-5601
caucaggaguugagguaga

SEQ ID NO: 45310 - RNA, 20 nt, Artificial Sequence
  Synthetic oligonucleotide: BID-1751
gcaucaggaguugagguaga

SEQ ID NO: 45311 - RNA, 21 nt, Artificial Sequence
  Synthetic oligonucleotide: BID-5602
ggcaucaggaguugagguaga

SEQ ID NO: 45312 - RNA, 22 nt, Artificial Sequence
  Synthetic oligonucleotide: BID-5603
uggcaucaggaguugagguaga

SEQ ID NO: 45313 - RNA, 23 nt, Artificial Sequence
  Synthetic oligonucleotide: BID-5604
cuggcaucaggaguugagguaga

SEQ ID NO: 45314 - RNA, 24 nt, Artificial Sequence
  Synthetic oligonucleotide: BID-5605
ucuggcaucaggaguugagguaga

SEQ ID NO: 45315 - RNA, 18 nt, Artificial Sequence
  Synthetic oligonucleotide: BID-5606
gccccucuugcccaggga

SEQ ID NO: 45316 - RNA, 19 nt, Artificial Sequence
  Synthetic oligonucleotide: BID-5607
ugccccucuugcccaggga

SEQ ID NO: 45317 - RNA, 20 nt, Artificial Sequence
  Synthetic oligonucleotide: BID-916
cugccccucuugcccaggga

SEQ ID NO: 45318 - RNA, 21 nt, Artificial Sequence
  Synthetic oligonucleotide: BID-5608
ucugccccucuugcccaggga

SEQ ID NO: 45319 - RNA, 22 nt, Artificial Sequence
  Synthetic oligonucleotide: BID-5609
uucugccccucuugcccaggga

SEQ ID NO: 45320 - RNA, 23 nt, Artificial Sequence
  Synthetic oligonucleotide: BID-5610
cuucugccccucuugcccaggga

SEQ ID NO: 45321 - RNA, 24 nt, Artificial Sequence
  Synthetic oligonucleotide: BID-5611
ccuucugccccucuugcccaggga

SEQ ID NO: 45322 - RNA, 18 nt, Artificial Sequence
  Synthetic oligonucleotide: BID-5612
ccggcgcggggcugugga

SEQ ID NO: 45323 - RNA, 19 nt, Artificial Sequence
  Synthetic oligonucleotide: BID-5613
gccggcgcggggcugugga

SEQ ID NO: 45324 - RNA, 20 nt, Artificial Sequence
  Synthetic oligonucleotide: BID-1618
cgccggcgcggggcugugga

SEQ ID NO: 45325 - RNA, 21 nt, Artificial Sequence
  Synthetic oligonucleotide: BID-5614
gcgccggcgcggggcugugga

SEQ ID NO: 45326 - RNA, 22 nt, Artificial Sequence
  Synthetic oligonucleotide: BID-5615
cgcgccggcgcggggcugugga

SEQ ID NO: 45327 - RNA, 23 nt, Artificial Sequence
  Synthetic oligonucleotide: BID-5616
ccgcgccggcgcggggcugugga

SEQ ID NO: 45328 - RNA, 24 nt, Artificial Sequence
  Synthetic oligonucleotide: BID-5617
cccgcgccggcgcggggcugugga

SEQ ID NO: 45329 - RNA, 18 nt, Artificial Sequence
  Synthetic oligonucleotide: BID-5618
guccccugggagugauga

SEQ ID NO: 45330 - RNA, 19 nt, Artificial Sequence
  Synthetic oligonucleotide: BID-5619
aguccccugggagugauga

SEQ ID NO: 45331 - RNA, 20 nt, Artificial Sequence
  Synthetic oligonucleotide: BID-1736
caguccccugggagugauga

SEQ ID NO: 45332 - RNA, 21 nt, Artificial Sequence
  Synthetic oligonucleotide: BID-5620
gcaguccccugggagugauga

SEQ ID NO: 45333 - RNA, 22 nt, Artificial Sequence
  Synthetic oligonucleotide: BID-5621
ugcaguccccugggagugauga

SEQ ID NO: 45334 - RNA, 23 nt, Artificial Sequence
  Synthetic oligonucleotide: BID-5622
cugcaguccccugggagugauga

SEQ ID NO: 45335 - RNA, 24 nt, Artificial Sequence
  Synthetic oligonucleotide: BID-5623
ccugcaguccccugggagugauga

SEQ ID NO: 45336 - RNA, 18 nt, Artificial Sequence
  Synthetic oligonucleotide: BID-5624
uuucuuuuucaguuuuua

SEQ ID NO: 45337 - RNA, 19 nt, Artificial Sequence
  Synthetic oligonucleotide: BID-5625
auuucuuuuucaguuuuua

SEQ ID NO: 45338 - RNA, 20 nt, Artificial Sequence
  Synthetic oligonucleotide: BID-1650
aauuucuuuuucaguuuuua

SEQ ID NO: 45339 - RNA, 21 nt, Artificial Sequence
  Synthetic oligonucleotide: BID-5626
uaauuucuuuuucaguuuuua

SEQ ID NO: 45340 - RNA, 22 nt, Artificial Sequence
  Synthetic oligonucleotide: BID-5627
cuaauuucuuuuucaguuuuua

SEQ ID NO: 45341 - RNA, 23 nt, Artificial Sequence
  Synthetic oligonucleotide: BID-5628
acuaauuucuuuuucaguuuuua

SEQ ID NO: 45342 - RNA, 24 nt, Artificial Sequence
  Synthetic oligonucleotide: BID-5629
aacuaauuucuuuuucaguuuuua

SEQ ID NO: 45343 - RNA, 18 nt, Artificial Sequence
  Synthetic oligonucleotide: BID-5630
ucuagguccucacggaac

SEQ ID NO: 45344 - RNA, 19 nt, Artificial Sequence
  Synthetic oligonucleotide: BID-5631
uucuagguccucacggaac

SEQ ID NO: 45345 - RNA, 20 nt, Artificial Sequence
  Synthetic oligonucleotide: BID-1638
auucuagguccucacggaac

SEQ ID NO: 45346 - RNA, 21 nt, Artificial Sequence
  Synthetic oligonucleotide: BID-5632
cauucuagguccucacggaac

SEQ ID NO: 45347 - RNA, 22 nt, Artificial Sequence
  Synthetic oligonucleotide: BID-5633
ucauucuagguccucacggaac

SEQ ID NO: 45348 - RNA, 23 nt, Artificial Sequence
  Synthetic oligonucleotide: BID-5634
gucauucuagguccucacggaac

SEQ ID NO: 45349 - RNA, 24 nt, Artificial Sequence
  Synthetic oligonucleotide: BID-5635
ggucauucuagguccucacggaac

SEQ ID NO: 45350 - RNA, 18 nt, Artificial Sequence
  Synthetic oligonucleotide: BID-5636
cauuccaucuccacccac

SEQ ID NO: 45351 - RNA, 19 nt, Artificial Sequence
  Synthetic oligonucleotide: BID-5637
acauuccaucuccacccac

SEQ ID NO: 45352 - RNA, 20 nt, Artificial Sequence
  Synthetic oligonucleotide: BID-876
cacauuccaucuccacccac

SEQ ID NO: 45353 - RNA, 21 nt, Artificial Sequence
  Synthetic oligonucleotide: BID-5638
ccacauuccaucuccacccac

SEQ ID NO: 45354 - RNA, 22 nt, Artificial Sequence
  Synthetic oligonucleotide: BID-5639
uccacauuccaucuccacccac

SEQ ID NO: 45355 - RNA, 23 nt, Artificial Sequence
  Synthetic oligonucleotide: BID-5640
uuccacauuccaucuccacccac

SEQ ID NO: 45356 - RNA, 24 nt, Artificial Sequence
  Synthetic oligonucleotide: BID-5641
uuuccacauuccaucuccacccac

SEQ ID NO: 45357 - RNA, 18 nt, Artificial Sequence
  Synthetic oligonucleotide: BID-5642
aucucccaggacgggcac

SEQ ID NO: 45358 - RNA, 19 nt, Artificial Sequence
  Synthetic oligonucleotide: BID-5643
gaucucccaggacgggcac

SEQ ID NO: 45359 - RNA, 20 nt, Artificial Sequence
  Synthetic oligonucleotide: BID-931
ggaucucccaggacgggcac

SEQ ID NO: 45360 - RNA, 21 nt, Artificial Sequence
  Synthetic oligonucleotide: BID-5644
gggaucucccaggacgggcac

SEQ ID NO: 45361 - RNA, 22 nt, Artificial Sequence
  Synthetic oligonucleotide: BID-5645
agggaucucccaggacgggcac

SEQ ID NO: 45362 - RNA, 23 nt, Artificial Sequence
  Synthetic oligonucleotide: BID-5646
cagggaucucccaggacgggcac

SEQ ID NO: 45363 - RNA, 24 nt, Artificial Sequence
  Synthetic oligonucleotide: BID-5647
gcagggaucucccaggacgggcac

SEQ ID NO: 45364 - RNA, 18 nt, Artificial Sequence
  Synthetic oligonucleotide: BID-5648
ggagcagauggacccacc

SEQ ID NO: 45365 - RNA, 19 nt, Artificial Sequence
  Synthetic oligonucleotide: BID-5649
aggagcagauggacccacc

SEQ ID NO: 45366 - RNA, 20 nt, Artificial Sequence
  Synthetic oligonucleotide: BID-1710
gaggagcagauggacccacc

SEQ ID NO: 45367 - RNA, 18 nt, Artificial Sequence
  Synthetic oligonucleotide: BID-5650
uggggcccugcagucccc

SEQ ID NO: 45368 - RNA, 19 nt, Artificial Sequence
  Synthetic oligonucleotide: BID-5651
cuggggcccugcagucccc

SEQ ID NO: 45369 - RNA, 20 nt, Artificial Sequence
  Synthetic oligonucleotide: BID-888
ccuggggcccugcagucccc

SEQ ID NO: 45370 - RNA, 21 nt, Artificial Sequence
  Synthetic oligonucleotide: BID-5652
uccuggggcccugcagucccc

SEQ ID NO: 45371 - RNA, 22 nt, Artificial Sequence
  Synthetic oligonucleotide: BID-5653
guccuggggcccugcagucccc

SEQ ID NO: 45372 - RNA, 23 nt, Artificial Sequence
  Synthetic oligonucleotide: BID-5654
cguccuggggcccugcagucccc

SEQ ID NO: 45373 - RNA, 24 nt, Artificial Sequence
  Synthetic oligonucleotide: BID-5655
ccguccuggggcccugcagucccc

SEQ ID NO: 45374 - RNA, 18 nt, Artificial Sequence
  Synthetic oligonucleotide: BID-5656
cuucugccccucuugccc

SEQ ID NO: 45375 - RNA, 19 nt, Artificial Sequence
  Synthetic oligonucleotide: BID-5657
ccuucugccccucuugccc

SEQ ID NO: 45376 - RNA, 20 nt, Artificial Sequence
  Synthetic oligonucleotide: BID-913
cccuucugccccucuugccc

SEQ ID NO: 45377 - RNA, 21 nt, Artificial Sequence
  Synthetic oligonucleotide: BID-5658
ccccuucugccccucuugccc

SEQ ID NO: 45378 - RNA, 22 nt, Artificial Sequence
  Synthetic oligonucleotide: BID-5659
gccccuucugccccucuugccc

SEQ ID NO: 45379 - RNA, 23 nt, Artificial Sequence
  Synthetic oligonucleotide: BID-5660
ugccccuucugccccucuugccc

SEQ ID NO: 45380 - RNA, 24 nt, Artificial Sequence
  Synthetic oligonucleotide: BID-5661
cugccccuucugccccucuugccc

SEQ ID NO: 45381 - RNA, 18 nt, Artificial Sequence
  Synthetic oligonucleotide: BID-5662
cuggggcccugcaguccc

SEQ ID NO: 45382 - RNA, 19 nt, Artificial Sequence
  Synthetic oligonucleotide: BID-5663
ccuggggcccugcaguccc

SEQ ID NO: 45383 - RNA, 20 nt, Artificial Sequence
  Synthetic oligonucleotide: BID-1733
uccuggggcccugcaguccc

SEQ ID NO: 45384 - RNA, 21 nt, Artificial Sequence
  Synthetic oligonucleotide: BID-5664
guccuggggcccugcaguccc

SEQ ID NO: 45385 - RNA, 22 nt, Artificial Sequence
  Synthetic oligonucleotide: BID-5665
cguccuggggcccugcaguccc

SEQ ID NO: 45386 - RNA, 23 nt, Artificial Sequence
  Synthetic oligonucleotide: BID-5666
ccguccuggggcccugcaguccc

SEQ ID NO: 45387 - RNA, 24 nt, Artificial Sequence
  Synthetic oligonucleotide: BID-5667
gccguccuggggcccugcaguccc

SEQ ID NO: 45388 - RNA, 18 nt, Artificial Sequence
  Synthetic oligonucleotide: BID-5668
cuccagggaggcacugcc

SEQ ID NO: 45389 - RNA, 19 nt, Artificial Sequence
  Synthetic oligonucleotide: BID-5669
gcuccagggaggcacugcc

SEQ ID NO: 45390 - RNA, 20 nt, Artificial Sequence
  Synthetic oligonucleotide: BID-907
agcuccagggaggcacugcc

SEQ ID NO: 45391 - RNA, 21 nt, Artificial Sequence
  Synthetic oligonucleotide: BID-5670
gagcuccagggaggcacugcc

SEQ ID NO: 45392 - RNA, 22 nt, Artificial Sequence
  Synthetic oligonucleotide: BID-5671
agagcuccagggaggcacugcc

SEQ ID NO: 45393 - RNA, 23 nt, Artificial Sequence
  Synthetic oligonucleotide: BID-5672
cagagcuccagggaggcacugcc

SEQ ID NO: 45394 - RNA, 24 nt, Artificial Sequence
  Synthetic oligonucleotide: BID-5673
acagagcuccagggaggcacugcc

SEQ ID NO: 45395 - RNA, 18 nt, Artificial Sequence
  Synthetic oligonucleotide: BID-5674
ccuucugccccucuugcc

SEQ ID NO: 45396 - RNA, 19 nt, Artificial Sequence
  Synthetic oligonucleotide: BID-5675
cccuucugccccucuugcc

SEQ ID NO: 45397 - RNA, 20 nt, Artificial Sequence
  Synthetic oligonucleotide: BID-1760
ccccuucugccccucuugcc

SEQ ID NO: 45398 - RNA, 21 nt, Artificial Sequence
  Synthetic oligonucleotide: BID-5676
gccccuucugccccucuugcc

SEQ ID NO: 45399 - RNA, 22 nt, Artificial Sequence
  Synthetic oligonucleotide: BID-5677
ugccccuucugccccucuugcc

SEQ ID NO: 45400 - RNA, 23 nt, Artificial Sequence
  Synthetic oligonucleotide: BID-5678
cugccccuucugccccucuugcc

SEQ ID NO: 45401 - RNA, 24 nt, Artificial Sequence
  Synthetic oligonucleotide: BID-5679
ccugccccuucugccccucuugcc

SEQ ID NO: 45402 - RNA, 18 nt, Artificial Sequence
  Synthetic oligonucleotide: BID-5680
ugagguagacagagcucc

SEQ ID NO: 45403 - RNA, 19 nt, Artificial Sequence
  Synthetic oligonucleotide: BID-5681
uugagguagacagagcucc

SEQ ID NO: 45404 - RNA, 20 nt, Artificial Sequence
  Synthetic oligonucleotide: BID-903
guugagguagacagagcucc

SEQ ID NO: 45405 - RNA, 21 nt, Artificial Sequence
  Synthetic oligonucleotide: BID-5682
aguugagguagacagagcucc

SEQ ID NO: 45406 - RNA, 22 nt, Artificial Sequence
  Synthetic oligonucleotide: BID-5683
gaguugagguagacagagcucc

SEQ ID NO: 45407 - RNA, 23 nt, Artificial Sequence
  Synthetic oligonucleotide: BID-5684
ggaguugagguagacagagcucc

SEQ ID NO: 45408 - RNA, 24 nt, Artificial Sequence
  Synthetic oligonucleotide: BID-5685
aggaguugagguagacagagcucc

SEQ ID NO: 45409 - RNA, 18 nt, Artificial Sequence
  Synthetic oligonucleotide: BID-5686
uuaaaggcagggaucucc

SEQ ID NO: 45410 - RNA, 19 nt, Artificial Sequence
  Synthetic oligonucleotide: BID-5687
uuuaaaggcagggaucucc

SEQ ID NO: 45411 - RNA, 20 nt, Artificial Sequence
  Synthetic oligonucleotide: BID-1775
guuuaaaggcagggaucucc

SEQ ID NO: 45412 - RNA, 21 nt, Artificial Sequence
  Synthetic oligonucleotide: BID-5688
gguuuaaaggcagggaucucc

SEQ ID NO: 45413 - RNA, 22 nt, Artificial Sequence
  Synthetic oligonucleotide: BID-5689
ggguuuaaaggcagggaucucc

SEQ ID NO: 45414 - RNA, 23 nt, Artificial Sequence
  Synthetic oligonucleotide: BID-5690
gggguuuaaaggcagggaucucc

SEQ ID NO: 45415 - RNA, 24 nt, Artificial Sequence
  Synthetic oligonucleotide: BID-5691
ugggguuuaaaggcagggaucucc

SEQ ID NO: 45416 - RNA, 18 nt, Artificial Sequence
  Synthetic oligonucleotide: BID-5692
ccugaaugugugccgucc

SEQ ID NO: 45417 - RNA, 19 nt, Artificial Sequence
  Synthetic oligonucleotide: BID-5693
gccugaaugugugccgucc

SEQ ID NO: 45418 - RNA, 20 nt, Artificial Sequence
  Synthetic oligonucleotide: BID-885
ggccugaaugugugccgucc

SEQ ID NO: 45419 - RNA, 21 nt, Artificial Sequence
  Synthetic oligonucleotide: BID-5694
gggccugaaugugugccgucc

SEQ ID NO: 45420 - RNA, 22 nt, Artificial Sequence
  Synthetic oligonucleotide: BID-5695
ugggccugaaugugugccgucc

SEQ ID NO: 45421 - RNA, 23 nt, Artificial Sequence
  Synthetic oligonucleotide: BID-5696
cugggccugaaugugugccgucc

SEQ ID NO: 45422 - RNA, 24 nt, Artificial Sequence
  Synthetic oligonucleotide: BID-5697
ccugggccugaaugugugccgucc

SEQ ID NO: 45423 - RNA, 18 nt, Artificial Sequence
  Synthetic oligonucleotide: BID-5698
ugaccgagaccagauucc

SEQ ID NO: 45424 - RNA, 19 nt, Artificial Sequence
  Synthetic oligonucleotide: BID-5699
augaccgagaccagauucc

SEQ ID NO: 45425 - RNA, 20 nt, Artificial Sequence
  Synthetic oligonucleotide: BID-1737
gaugaccgagaccagauucc

SEQ ID NO: 45426 - RNA, 21 nt, Artificial Sequence
  Synthetic oligonucleotide: BID-5700
ugaugaccgagaccagauucc

SEQ ID NO: 45427 - RNA, 22 nt, Artificial Sequence
  Synthetic oligonucleotide: BID-5701
gugaugaccgagaccagauucc

SEQ ID NO: 45428 - RNA, 23 nt, Artificial Sequence
  Synthetic oligonucleotide: BID-5702
agugaugaccgagaccagauucc

SEQ ID NO: 45429 - RNA, 24 nt, Artificial Sequence
  Synthetic oligonucleotide: BID-5703
gagugaugaccgagaccagauucc

SEQ ID NO: 45430 - RNA, 18 nt, Artificial Sequence
  Synthetic oligonucleotide: BID-5704
aggcuugcacccccuucc

SEQ ID NO: 45431 - RNA, 19 nt, Artificial Sequence
  Synthetic oligonucleotide: BID-5705
caggcuugcacccccuucc

SEQ ID NO: 45432 - RNA, 20 nt, Artificial Sequence
  Synthetic oligonucleotide: BID-869
ucaggcuugcacccccuucc

SEQ ID NO: 45433 - RNA, 21 nt, Artificial Sequence
  Synthetic oligonucleotide: BID-5706
cucaggcuugcacccccuucc

SEQ ID NO: 45434 - RNA, 22 nt, Artificial Sequence
  Synthetic oligonucleotide: BID-5707
ucucaggcuugcacccccuucc

SEQ ID NO: 45435 - RNA, 23 nt, Artificial Sequence
  Synthetic oligonucleotide: BID-5708
uucucaggcuugcacccccuucc

SEQ ID NO: 45436 - RNA, 24 nt, Artificial Sequence
  Synthetic oligonucleotide: BID-5709
cuucucaggcuugcacccccuucc

SEQ ID NO: 45437 - RNA, 18 nt, Artificial Sequence
  Synthetic oligonucleotide: BID-5710
aggacgggcacagggagc

SEQ ID NO: 45438 - RNA, 19 nt, Artificial Sequence
  Synthetic oligonucleotide: BID-5711
caggacgggcacagggagc

SEQ ID NO: 45439 - RNA, 20 nt, Artificial Sequence
  Synthetic oligonucleotide: BID-1780
ccaggacgggcacagggagc

SEQ ID NO: 45440 - RNA, 21 nt, Artificial Sequence
  Synthetic oligonucleotide: BID-5712
cccaggacgggcacagggagc

SEQ ID NO: 45441 - RNA, 22 nt, Artificial Sequence
  Synthetic oligonucleotide: BID-5713
ucccaggacgggcacagggagc

SEQ ID NO: 45442 - RNA, 23 nt, Artificial Sequence
  Synthetic oligonucleotide: BID-5714
cucccaggacgggcacagggagc

SEQ ID NO: 45443 - RNA, 24 nt, Artificial Sequence
  Synthetic oligonucleotide: BID-5715
ucucccaggacgggcacagggagc

SEQ ID NO: 45444 - RNA, 18 nt, Artificial Sequence
  Synthetic oligonucleotide: BID-5716
cggggagcccgcgccggc

SEQ ID NO: 45445 - RNA, 19 nt, Artificial Sequence
  Synthetic oligonucleotide: BID-5717
ccggggagcccgcgccggc

SEQ ID NO: 45446 - RNA, 20 nt, Artificial Sequence
  Synthetic oligonucleotide: BID-1614
cccggggagcccgcgccggc

SEQ ID NO: 45447 - RNA, 21 nt, Artificial Sequence
  Synthetic oligonucleotide: BID-5718
acccggggagcccgcgccggc

SEQ ID NO: 45448 - RNA, 22 nt, Artificial Sequence
  Synthetic oligonucleotide: BID-5719
gacccggggagcccgcgccggc

SEQ ID NO: 45449 - RNA, 23 nt, Artificial Sequence
  Synthetic oligonucleotide: BID-5720
ggacccggggagcccgcgccggc

SEQ ID NO: 45450 - RNA, 24 nt, Artificial Sequence
  Synthetic oligonucleotide: BID-5721
gggacccggggagcccgcgccggc

SEQ ID NO: 45451 - RNA, 18 nt, Artificial Sequence
  Synthetic oligonucleotide: BID-5722
ggggcuguggagcggggc

SEQ ID NO: 45452 - RNA, 19 nt, Artificial Sequence
  Synthetic oligonucleotide: BID-5723
cggggcuguggagcggggc

SEQ ID NO: 45453 - RNA, 20 nt, Artificial Sequence
  Synthetic oligonucleotide: BID-767
gcggggcuguggagcggggc

SEQ ID NO: 45454 - RNA, 21 nt, Artificial Sequence
  Synthetic oligonucleotide: BID-5724
cgcggggcuguggagcggggc

SEQ ID NO: 45455 - RNA, 22 nt, Artificial Sequence
  Synthetic oligonucleotide: BID-5725
gcgcggggcuguggagcggggc

SEQ ID NO: 45456 - RNA, 23 nt, Artificial Sequence
  Synthetic oligonucleotide: BID-5726
ggcgcggggcuguggagcggggc

SEQ ID NO: 45457 - RNA, 24 nt, Artificial Sequence
  Synthetic oligonucleotide: BID-5727
cggcgcggggcuguggagcggggc

SEQ ID NO: 45458 - RNA, 18 nt, Artificial Sequence
  Synthetic oligonucleotide: BID-5728
uuaacauauagauaaugc

SEQ ID NO: 45459 - RNA, 19 nt, Artificial Sequence
  Synthetic oligonucleotide: BID-5729
uuuaacauauagauaaugc

SEQ ID NO: 45460 - RNA, 20 nt, Artificial Sequence
  Synthetic oligonucleotide: BID-794
guuuaacauauagauaaugc

SEQ ID NO: 45461 - RNA, 21 nt, Artificial Sequence
  Synthetic oligonucleotide: BID-5730
aguuuaacauauagauaaugc

SEQ ID NO: 45462 - RNA, 22 nt, Artificial Sequence
  Synthetic oligonucleotide: BID-5731
caguuuaacauauagauaaugc

SEQ ID NO: 45463 - RNA, 23 nt, Artificial Sequence
  Synthetic oligonucleotide: BID-5732
ucaguuuaacauauagauaaugc

SEQ ID NO: 45464 - RNA, 24 nt, Artificial Sequence
  Synthetic oligonucleotide: BID-5733
aucaguuuaacauauagauaaugc

SEQ ID NO: 45465 - RNA, 18 nt, Artificial Sequence
  Synthetic oligonucleotide: BID-5734
gcuccagggaggcacugc

SEQ ID NO: 45466 - RNA, 19 nt, Artificial Sequence
  Synthetic oligonucleotide: BID-5735
agcuccagggaggcacugc

SEQ ID NO: 45467 - RNA, 20 nt, Artificial Sequence
  Synthetic oligonucleotide: BID-906
gagcuccagggaggcacugc

SEQ ID NO: 45468 - RNA, 21 nt, Artificial Sequence
  Synthetic oligonucleotide: BID-5736
agagcuccagggaggcacugc

SEQ ID NO: 45469 - RNA, 22 nt, Artificial Sequence
  Synthetic oligonucleotide: BID-5737
cagagcuccagggaggcacugc

SEQ ID NO: 45470 - RNA, 23 nt, Artificial Sequence
  Synthetic oligonucleotide: BID-5738
acagagcuccagggaggcacugc

SEQ ID NO: 45471 - RNA, 24 nt, Artificial Sequence
  Synthetic oligonucleotide: BID-5739
gacagagcuccagggaggcacugc

SEQ ID NO: 45472 - RNA, 18 nt, Artificial Sequence
  Synthetic oligonucleotide: BID-5740
ggggggggucuccaccuc

SEQ ID NO: 45473 - RNA, 19 nt, Artificial Sequence
  Synthetic oligonucleotide: BID-5741
gggggggggucuccaccuc

SEQ ID NO: 45474 - RNA, 20 nt, Artificial Sequence
  Synthetic oligonucleotide: BID-809
ggggggggggucuccaccuc

SEQ ID NO: 45475 - RNA, 21 nt, Artificial Sequence
  Synthetic oligonucleotide: BID-5742
uggggggggggucuccaccuc

SEQ ID NO: 45476 - RNA, 22 nt, Artificial Sequence
  Synthetic oligonucleotide: BID-5743
guggggggggggucuccaccuc

SEQ ID NO: 45477 - RNA, 23 nt, Artificial Sequence
  Synthetic oligonucleotide: BID-5744
gguggggggggggucuccaccuc

SEQ ID NO: 45478 - RNA, 24 nt, Artificial Sequence
  Synthetic oligonucleotide: BID-5745
ugguggggggggggucuccaccuc

SEQ ID NO: 45479 - RNA, 18 nt, Artificial Sequence
  Synthetic oligonucleotide: BID-5746
uggucauucuagguccuc

SEQ ID NO: 45480 - RNA, 19 nt, Artificial Sequence
  Synthetic oligonucleotide: BID-5747
guggucauucuagguccuc

SEQ ID NO: 45481 - RNA, 20 nt, Artificial Sequence
  Synthetic oligonucleotide: BID-1636
gguggucauucuagguccuc

SEQ ID NO: 45482 - RNA, 21 nt, Artificial Sequence
  Synthetic oligonucleotide: BID-5748
ggguggucauucuagguccuc

SEQ ID NO: 45483 - RNA, 22 nt, Artificial Sequence
  Synthetic oligonucleotide: BID-5749
gggguggucauucuagguccuc

SEQ ID NO: 45484 - RNA, 23 nt, Artificial Sequence
  Synthetic oligonucleotide: BID-5750
ugggguggucauucuagguccuc

SEQ ID NO: 45485 - RNA, 24 nt, Artificial Sequence
  Synthetic oligonucleotide: BID-5751
cugggguggucauucuagguccuc

SEQ ID NO: 45486 - RNA, 18 nt, Artificial Sequence
  Synthetic oligonucleotide: BID-5752
uugagguagacagagcuc

SEQ ID NO: 45487 - RNA, 19 nt, Artificial Sequence
  Synthetic oligonucleotide: BID-5753
guugagguagacagagcuc

SEQ ID NO: 45488 - RNA, 20 nt, Artificial Sequence
  Synthetic oligonucleotide: BID-1752
aguugagguagacagagcuc

SEQ ID NO: 45489 - RNA, 21 nt, Artificial Sequence
  Synthetic oligonucleotide: BID-5754
gaguugagguagacagagcuc

SEQ ID NO: 45490 - RNA, 22 nt, Artificial Sequence
  Synthetic oligonucleotide: BID-5755
ggaguugagguagacagagcuc

SEQ ID NO: 45491 - RNA, 23 nt, Artificial Sequence
  Synthetic oligonucleotide: BID-5756
aggaguugagguagacagagcuc

SEQ ID NO: 45492 - RNA, 24 nt, Artificial Sequence
  Synthetic oligonucleotide: BID-5757
caggaguugagguagacagagcuc

SEQ ID NO: 45493 - RNA, 18 nt, Artificial Sequence
  Synthetic oligonucleotide: BID-5758
gagauggggggagcucuc

SEQ ID NO: 45494 - RNA, 19 nt, Artificial Sequence
  Synthetic oligonucleotide: BID-5759
ugagauggggggagcucuc

SEQ ID NO: 45495 - RNA, 20 nt, Artificial Sequence
  Synthetic oligonucleotide: BID-1729
uugagauggggggagcucuc

SEQ ID NO: 45496 - RNA, 21 nt, Artificial Sequence
  Synthetic oligonucleotide: BID-5760
uuugagauggggggagcucuc

SEQ ID NO: 45497 - RNA, 22 nt, Artificial Sequence
  Synthetic oligonucleotide: BID-5761
cuuugagauggggggagcucuc

SEQ ID NO: 45498 - RNA, 23 nt, Artificial Sequence
  Synthetic oligonucleotide: BID-5762
gcuuugagauggggggagcucuc

SEQ ID NO: 45499 - RNA, 24 nt, Artificial Sequence
  Synthetic oligonucleotide: BID-5763
ggcuuugagauggggggagcucuc

SEQ ID NO: 45500 - RNA, 18 nt, Artificial Sequence
  Synthetic oligonucleotide: BID-5764
uaauuccuaaugauucuc

SEQ ID NO: 45501 - RNA, 19 nt, Artificial Sequence
  Synthetic oligonucleotide: BID-5765
auaauuccuaaugauucuc

SEQ ID NO: 45502 - RNA, 20 nt, Artificial Sequence
  Synthetic oligonucleotide: BID-774
gauaauuccuaaugauucuc

SEQ ID NO: 45503 - RNA, 21 nt, Artificial Sequence
  Synthetic oligonucleotide: BID-5766
ggauaauuccuaaugauucuc

SEQ ID NO: 45504 - RNA, 22 nt, Artificial Sequence
  Synthetic oligonucleotide: BID-5767
gggauaauuccuaaugauucuc

SEQ ID NO: 45505 - RNA, 23 nt, Artificial Sequence
  Synthetic oligonucleotide: BID-5768
ugggauaauuccuaaugauucuc

SEQ ID NO: 45506 - RNA, 24 nt, Artificial Sequence
  Synthetic oligonucleotide: BID-5769
cugggauaauuccuaaugauucuc

SEQ ID NO: 45507 - RNA, 18 nt, Artificial Sequence
  Synthetic oligonucleotide: BID-5770
gccugaaugugugccguc

SEQ ID NO: 45508 - RNA, 19 nt, Artificial Sequence
  Synthetic oligonucleotide: BID-5771
ggccugaaugugugccguc

SEQ ID NO: 45509 - RNA, 20 nt, Artificial Sequence
  Synthetic oligonucleotide: BID-1731
gggccugaaugugugccguc

SEQ ID NO: 45510 - RNA, 21 nt, Artificial Sequence
  Synthetic oligonucleotide: BID-5772
ugggccugaaugugugccguc

SEQ ID NO: 45511 - RNA, 22 nt, Artificial Sequence
  Synthetic oligonucleotide: BID-5773
cugggccugaaugugugccguc

SEQ ID NO: 45512 - RNA, 23 nt, Artificial Sequence
  Synthetic oligonucleotide: BID-5774
ccugggccugaaugugugccguc

SEQ ID NO: 45513 - RNA, 24 nt, Artificial Sequence
  Synthetic oligonucleotide: BID-5775
uccugggccugaaugugugccguc

SEQ ID NO: 45514 - RNA, 18 nt, Artificial Sequence
  Synthetic oligonucleotide: BID-5776
caggcuugcacccccuuc

SEQ ID NO: 45515 - RNA, 19 nt, Artificial Sequence
  Synthetic oligonucleotide: BID-5777
ucaggcuugcacccccuuc

SEQ ID NO: 45516 - RNA, 20 nt, Artificial Sequence
  Synthetic oligonucleotide: BID-1711
cucaggcuugcacccccuuc

SEQ ID NO: 45517 - RNA, 21 nt, Artificial Sequence
  Synthetic oligonucleotide: BID-5778
ucucaggcuugcacccccuuc

SEQ ID NO: 45518 - RNA, 22 nt, Artificial Sequence
  Synthetic oligonucleotide: BID-5779
uucucaggcuugcacccccuuc

SEQ ID NO: 45519 - RNA, 23 nt, Artificial Sequence
  Synthetic oligonucleotide: BID-5780
cuucucaggcuugcacccccuuc

SEQ ID NO: 45520 - RNA, 24 nt, Artificial Sequence
  Synthetic oligonucleotide: BID-5781
ccuucucaggcuugcacccccuuc

SEQ ID NO: 45521 - RNA, 18 nt, Artificial Sequence
  Synthetic oligonucleotide: BID-5782
gaauccccaggcuguuuc

SEQ ID NO: 45522 - RNA, 19 nt, Artificial Sequence
  Synthetic oligonucleotide: BID-5783
agaauccccaggcuguuuc

SEQ ID NO: 45523 - RNA, 20 nt, Artificial Sequence
  Synthetic oligonucleotide: BID-777
cagaauccccaggcuguuuc

SEQ ID NO: 45524 - RNA, 21 nt, Artificial Sequence
  Synthetic oligonucleotide: BID-5784
ucagaauccccaggcuguuuc

SEQ ID NO: 45525 - RNA, 22 nt, Artificial Sequence
  Synthetic oligonucleotide: BID-5785
uucagaauccccaggcuguuuc

SEQ ID NO: 45526 - RNA, 23 nt, Artificial Sequence
  Synthetic oligonucleotide: BID-5786
auucagaauccccaggcuguuuc

SEQ ID NO: 45527 - RNA, 24 nt, Artificial Sequence
  Synthetic oligonucleotide: BID-5787
cauucagaauccccaggcuguuuc

SEQ ID NO: 45528 - RNA, 18 nt, Artificial Sequence
  Synthetic oligonucleotide: BID-5788
cuugcccagggagggaag

SEQ ID NO: 45529 - RNA, 19 nt, Artificial Sequence
  Synthetic oligonucleotide: BID-5789
ucuugcccagggagggaag

SEQ ID NO: 45530 - RNA, 20 nt, Artificial Sequence
  Synthetic oligonucleotide: BID-917
cucuugcccagggagggaag

SEQ ID NO: 45531 - RNA, 21 nt, Artificial Sequence
  Synthetic oligonucleotide: BID-5790
ccucuugcccagggagggaag

SEQ ID NO: 45532 - RNA, 22 nt, Artificial Sequence
  Synthetic oligonucleotide: BID-5791
cccucuugcccagggagggaag

SEQ ID NO: 45533 - RNA, 23 nt, Artificial Sequence
  Synthetic oligonucleotide: BID-5792
ccccucuugcccagggagggaag

SEQ ID NO: 45534 - RNA, 24 nt, Artificial Sequence
  Synthetic oligonucleotide: BID-5793
gccccucuugcccagggagggaag

SEQ ID NO: 45535 - RNA, 18 nt, Artificial Sequence
  Synthetic oligonucleotide: BID-5794
auccucuggcaucaggag

SEQ ID NO: 45536 - RNA, 19 nt, Artificial Sequence
  Synthetic oligonucleotide: BID-5795
gauccucuggcaucaggag

SEQ ID NO: 45537 - RNA, 20 nt, Artificial Sequence
  Synthetic oligonucleotide: BID-1750
ggauccucuggcaucaggag

SEQ ID NO: 45538 - RNA, 21 nt, Artificial Sequence
  Synthetic oligonucleotide: BID-5796
gggauccucuggcaucaggag

SEQ ID NO: 45539 - RNA, 22 nt, Artificial Sequence
  Synthetic oligonucleotide: BID-5797
agggauccucuggcaucaggag

SEQ ID NO: 45540 - RNA, 23 nt, Artificial Sequence
  Synthetic oligonucleotide: BID-5798
gagggauccucuggcaucaggag

SEQ ID NO: 45541 - RNA, 24 nt, Artificial Sequence
  Synthetic oligonucleotide: BID-5799
agagggauccucuggcaucaggag

SEQ ID NO: 45542 - RNA, 18 nt, Artificial Sequence
  Synthetic oligonucleotide: BID-5800
cggcgcggggcuguggag

SEQ ID NO: 45543 - RNA, 19 nt, Artificial Sequence
  Synthetic oligonucleotide: BID-5801
ccggcgcggggcuguggag

SEQ ID NO: 45544 - RNA, 20 nt, Artificial Sequence
  Synthetic oligonucleotide: BID-763
gccggcgcggggcuguggag

SEQ ID NO: 45545 - RNA, 21 nt, Artificial Sequence
  Synthetic oligonucleotide: BID-5802
cgccggcgcggggcuguggag

SEQ ID NO: 45546 - RNA, 22 nt, Artificial Sequence
  Synthetic oligonucleotide: BID-5803
gcgccggcgcggggcuguggag

SEQ ID NO: 45547 - RNA, 23 nt, Artificial Sequence
  Synthetic oligonucleotide: BID-5804
cgcgccggcgcggggcuguggag

SEQ ID NO: 45548 - RNA, 24 nt, Artificial Sequence
  Synthetic oligonucleotide: BID-5805
ccgcgccggcgcggggcuguggag

SEQ ID NO: 45549 - RNA, 18 nt, Artificial Sequence
  Synthetic oligonucleotide: BID-5806
gagaccagauucccugag

SEQ ID NO: 45550 - RNA, 19 nt, Artificial Sequence
  Synthetic oligonucleotide: BID-5807
cgagaccagauucccugag

SEQ ID NO: 45551 - RNA, 20 nt, Artificial Sequence
  Synthetic oligonucleotide: BID-1738
ccgagaccagauucccugag

SEQ ID NO: 45552 - RNA, 21 nt, Artificial Sequence
  Synthetic oligonucleotide: BID-5808
accgagaccagauucccugag

SEQ ID NO: 45553 - RNA, 22 nt, Artificial Sequence
  Synthetic oligonucleotide: BID-5809
gaccgagaccagauucccugag

SEQ ID NO: 45554 - RNA, 23 nt, Artificial Sequence
  Synthetic oligonucleotide: BID-5810
ugaccgagaccagauucccugag

SEQ ID NO: 45555 - RNA, 24 nt, Artificial Sequence
  Synthetic oligonucleotide: BID-5811
augaccgagaccagauucccugag

SEQ ID NO: 45556 - RNA, 18 nt, Artificial Sequence
  Synthetic oligonucleotide: BID-5812
cccacaggaggcuuugag

SEQ ID NO: 45557 - RNA, 19 nt, Artificial Sequence
  Synthetic oligonucleotide: BID-5813
acccacaggaggcuuugag

SEQ ID NO: 45558 - RNA, 20 nt, Artificial Sequence
  Synthetic oligonucleotide: BID-1723
cacccacaggaggcuuugag

SEQ ID NO: 45559 - RNA, 21 nt, Artificial Sequence
  Synthetic oligonucleotide: BID-5814
ccacccacaggaggcuuugag

SEQ ID NO: 45560 - RNA, 22 nt, Artificial Sequence
  Synthetic oligonucleotide: BID-5815
uccacccacaggaggcuuugag

SEQ ID NO: 45561 - RNA, 23 nt, Artificial Sequence
  Synthetic oligonucleotide: BID-5816
cuccacccacaggaggcuuugag

SEQ ID NO: 45562 - RNA, 24 nt, Artificial Sequence
  Synthetic oligonucleotide: BID-5817
ucuccacccacaggaggcuuugag

SEQ ID NO: 45563 - RNA, 18 nt, Artificial Sequence
  Synthetic oligonucleotide: BID-5818
uucuuuuucaguuuuuag

SEQ ID NO: 45564 - RNA, 19 nt, Artificial Sequence
  Synthetic oligonucleotide: BID-5819
uuucuuuuucaguuuuuag

SEQ ID NO: 45565 - RNA, 20 nt, Artificial Sequence
  Synthetic oligonucleotide: BID-797
auuucuuuuucaguuuuuag

SEQ ID NO: 45566 - RNA, 21 nt, Artificial Sequence
  Synthetic oligonucleotide: BID-5820
aauuucuuuuucaguuuuuag

SEQ ID NO: 45567 - RNA, 22 nt, Artificial Sequence
  Synthetic oligonucleotide: BID-5821
uaauuucuuuuucaguuuuuag

SEQ ID NO: 45568 - RNA, 23 nt, Artificial Sequence
  Synthetic oligonucleotide: BID-5822
cuaauuucuuuuucaguuuuuag

SEQ ID NO: 45569 - RNA, 24 nt, Artificial Sequence
  Synthetic oligonucleotide: BID-5823
acuaauuucuuuuucaguuuuuag

SEQ ID NO: 45570 - RNA, 18 nt, Artificial Sequence
  Synthetic oligonucleotide: BID-5824
ccacuuacuccagcgccg

SEQ ID NO: 45571 - RNA, 19 nt, Artificial Sequence
  Synthetic oligonucleotide: BID-5825
gccacuuacuccagcgccg

SEQ ID NO: 45572 - RNA, 20 nt, Artificial Sequence
  Synthetic oligonucleotide: BID-1626
ggccacuuacuccagcgccg

SEQ ID NO: 45573 - RNA, 21 nt, Artificial Sequence
  Synthetic oligonucleotide: BID-5826
uggccacuuacuccagcgccg

SEQ ID NO: 45574 - RNA, 22 nt, Artificial Sequence
  Synthetic oligonucleotide: BID-5827
uuggccacuuacuccagcgccg

SEQ ID NO: 45575 - RNA, 23 nt, Artificial Sequence
  Synthetic oligonucleotide: BID-5828
guuggccacuuacuccagcgccg

SEQ ID NO: 45576 - RNA, 24 nt, Artificial Sequence
  Synthetic oligonucleotide: BID-5829
aguuggccacuuacuccagcgccg

SEQ ID NO: 45577 - RNA, 18 nt, Artificial Sequence
  Synthetic oligonucleotide: BID-5830
uuaaggguguggggagcg

SEQ ID NO: 45578 - RNA, 19 nt, Artificial Sequence
  Synthetic oligonucleotide: BID-5831
cuuaaggguguggggagcg

SEQ ID NO: 45579 - RNA, 20 nt, Artificial Sequence
  Synthetic oligonucleotide: BID-1745
ucuuaaggguguggggagcg

SEQ ID NO: 45580 - RNA, 21 nt, Artificial Sequence
  Synthetic oligonucleotide: BID-5832
gucuuaaggguguggggagcg

SEQ ID NO: 45581 - RNA, 22 nt, Artificial Sequence
  Synthetic oligonucleotide: BID-5833
ggucuuaaggguguggggagcg

SEQ ID NO: 45582 - RNA, 23 nt, Artificial Sequence
  Synthetic oligonucleotide: BID-5834
gggucuuaaggguguggggagcg

SEQ ID NO: 45583 - RNA, 24 nt, Artificial Sequence
  Synthetic oligonucleotide: BID-5835
ggggucuuaaggguguggggagcg

SEQ ID NO: 45584 - RNA, 18 nt, Artificial Sequence
  Synthetic oligonucleotide: BID-5836
ggggagcccgcgccggcg

SEQ ID NO: 45585 - RNA, 19 nt, Artificial Sequence
  Synthetic oligonucleotide: BID-5837
cggggagcccgcgccggcg

SEQ ID NO: 45586 - RNA, 20 nt, Artificial Sequence
  Synthetic oligonucleotide: BID-759
ccggggagcccgcgccggcg

SEQ ID NO: 45587 - RNA, 21 nt, Artificial Sequence
  Synthetic oligonucleotide: BID-5838
cccggggagcccgcgccggcg

SEQ ID NO: 45588 - RNA, 22 nt, Artificial Sequence
  Synthetic oligonucleotide: BID-5839
acccggggagcccgcgccggcg

SEQ ID NO: 45589 - RNA, 23 nt, Artificial Sequence
  Synthetic oligonucleotide: BID-5840
gacccggggagcccgcgccggcg

SEQ ID NO: 45590 - RNA, 24 nt, Artificial Sequence
  Synthetic oligonucleotide: BID-5841
ggacccggggagcccgcgccggcg

SEQ ID NO: 45591 - RNA, 18 nt, Artificial Sequence
  Synthetic oligonucleotide: BID-5842
gggcuguggagcggggcg

SEQ ID NO: 45592 - RNA, 19 nt, Artificial Sequence
  Synthetic oligonucleotide: BID-5843
ggggcuguggagcggggcg

SEQ ID NO: 45593 - RNA, 20 nt, Artificial Sequence
  Synthetic oligonucleotide: BID-768
cggggcuguggagcggggcg

SEQ ID NO: 45594 - RNA, 21 nt, Artificial Sequence
  Synthetic oligonucleotide: BID-5844
gcggggcuguggagcggggcg

SEQ ID NO: 45595 - RNA, 22 nt, Artificial Sequence
  Synthetic oligonucleotide: BID-5845
cgcggggcuguggagcggggcg

SEQ ID NO: 45596 - RNA, 23 nt, Artificial Sequence
  Synthetic oligonucleotide: BID-5846
gcgcggggcuguggagcggggcg

SEQ ID NO: 45597 - RNA, 24 nt, Artificial Sequence
  Synthetic oligonucleotide: BID-5847
ggcgcggggcuguggagcggggcg

SEQ ID NO: 45598 - RNA, 18 nt, Artificial Sequence
  Synthetic oligonucleotide: BID-5848
guggcugggguuuaaagg

SEQ ID NO: 45599 - RNA, 19 nt, Artificial Sequence
  Synthetic oligonucleotide: BID-5849
cguggcugggguuuaaagg

SEQ ID NO: 45600 - RNA, 20 nt, Artificial Sequence
  Synthetic oligonucleotide: BID-1773
ucguggcugggguuuaaagg

SEQ ID NO: 45601 - RNA, 21 nt, Artificial Sequence
  Synthetic oligonucleotide: BID-5850
uucguggcugggguuuaaagg

SEQ ID NO: 45602 - RNA, 22 nt, Artificial Sequence
  Synthetic oligonucleotide: BID-5851
guucguggcugggguuuaaagg

SEQ ID NO: 45603 - RNA, 23 nt, Artificial Sequence
  Synthetic oligonucleotide: BID-5852
aguucguggcugggguuuaaagg

SEQ ID NO: 45604 - RNA, 24 nt, Artificial Sequence
  Synthetic oligonucleotide: BID-5853
caguucguggcugggguuuaaagg

SEQ ID NO: 45605 - RNA, 18 nt, Artificial Sequence
  Synthetic oligonucleotide: BID-5854
cugccccucuugcccagg

SEQ ID NO: 45606 - RNA, 19 nt, Artificial Sequence
  Synthetic oligonucleotide: BID-5855
ucugccccucuugcccagg

SEQ ID NO: 45607 - RNA, 20 nt, Artificial Sequence
  Synthetic oligonucleotide: BID-1763
uucugccccucuugcccagg

SEQ ID NO: 45608 - RNA, 21 nt, Artificial Sequence
  Synthetic oligonucleotide: BID-5856
cuucugccccucuugcccagg

SEQ ID NO: 45609 - RNA, 22 nt, Artificial Sequence
  Synthetic oligonucleotide: BID-5857
ccuucugccccucuugcccagg

SEQ ID NO: 45610 - RNA, 23 nt, Artificial Sequence
  Synthetic oligonucleotide: BID-5858
cccuucugccccucuugcccagg

SEQ ID NO: 45611 - RNA, 24 nt, Artificial Sequence
  Synthetic oligonucleotide: BID-5859
ccccuucugccccucuugcccagg

SEQ ID NO: 45612 - RNA, 18 nt, Artificial Sequence
  Synthetic oligonucleotide: BID-5860
aggcagggaucucccagg

SEQ ID NO: 45613 - RNA, 19 nt, Artificial Sequence
  Synthetic oligonucleotide: BID-5861
aaggcagggaucucccagg

SEQ ID NO: 45614 - RNA, 20 nt, Artificial Sequence
  Synthetic oligonucleotide: BID-1776
aaaggcagggaucucccagg

SEQ ID NO: 45615 - RNA, 21 nt, Artificial Sequence
  Synthetic oligonucleotide: BID-5862
uaaaggcagggaucucccagg

SEQ ID NO: 45616 - RNA, 22 nt, Artificial Sequence
  Synthetic oligonucleotide: BID-5863
uuaaaggcagggaucucccagg

SEQ ID NO: 45617 - RNA, 23 nt, Artificial Sequence
  Synthetic oligonucleotide: BID-5864
uuuaaaggcagggaucucccagg

SEQ ID NO: 45618 - RNA, 24 nt, Artificial Sequence
  Synthetic oligonucleotide: BID-5865
guuuaaaggcagggaucucccagg

SEQ ID NO: 45619 - RNA, 18 nt, Artificial Sequence
  Synthetic oligonucleotide: BID-5866
ccagggaggcacugccgg

SEQ ID NO: 45620 - RNA, 19 nt, Artificial Sequence
  Synthetic oligonucleotide: BID-5867
uccagggaggcacugccgg

SEQ ID NO: 45621 - RNA, 20 nt, Artificial Sequence
  Synthetic oligonucleotide: BID-1758
cuccagggaggcacugccgg

SEQ ID NO: 45622 - RNA, 21 nt, Artificial Sequence
  Synthetic oligonucleotide: BID-5868
gcuccagggaggcacugccgg

SEQ ID NO: 45623 - RNA, 22 nt, Artificial Sequence
  Synthetic oligonucleotide: BID-5869
agcuccagggaggcacugccgg

SEQ ID NO: 45624 - RNA, 23 nt, Artificial Sequence
  Synthetic oligonucleotide: BID-5870
gagcuccagggaggcacugccgg

SEQ ID NO: 45625 - RNA, 24 nt, Artificial Sequence
  Synthetic oligonucleotide: BID-5871
agagcuccagggaggcacugccgg

SEQ ID NO: 45626 - RNA, 18 nt, Artificial Sequence
  Synthetic oligonucleotide: BID-5872
ugccccucuugcccaggg

SEQ ID NO: 45627 - RNA, 19 nt, Artificial Sequence
  Synthetic oligonucleotide: BID-5873
cugccccucuugcccaggg

SEQ ID NO: 45628 - RNA, 20 nt, Artificial Sequence
  Synthetic oligonucleotide: BID-915
ucugccccucuugcccaggg

SEQ ID NO: 45629 - RNA, 21 nt, Artificial Sequence
  Synthetic oligonucleotide: BID-5874
uucugccccucuugcccaggg

SEQ ID NO: 45630 - RNA, 22 nt, Artificial Sequence
  Synthetic oligonucleotide: BID-5875
cuucugccccucuugcccaggg

SEQ ID NO: 45631 - RNA, 23 nt, Artificial Sequence
  Synthetic oligonucleotide: BID-5876
ccuucugccccucuugcccaggg

SEQ ID NO: 45632 - RNA, 24 nt, Artificial Sequence
  Synthetic oligonucleotide: BID-5877
cccuucugccccucuugcccaggg

SEQ ID NO: 45633 - RNA, 18 nt, Artificial Sequence
  Synthetic oligonucleotide: BID-5878
ccucuugcccagggaggg

SEQ ID NO: 45634 - RNA, 19 nt, Artificial Sequence
  Synthetic oligonucleotide: BID-5879
cccucuugcccagggaggg

SEQ ID NO: 45635 - RNA, 20 nt, Artificial Sequence
  Synthetic oligonucleotide: BID-1766
ccccucuugcccagggaggg

SEQ ID NO: 45636 - RNA, 21 nt, Artificial Sequence
  Synthetic oligonucleotide: BID-5880
gccccucuugcccagggaggg

SEQ ID NO: 45637 - RNA, 22 nt, Artificial Sequence
  Synthetic oligonucleotide: BID-5881
ugccccucuugcccagggaggg

SEQ ID NO: 45638 - RNA, 23 nt, Artificial Sequence
  Synthetic oligonucleotide: BID-5882
cugccccucuugcccagggaggg

SEQ ID NO: 45639 - RNA, 24 nt, Artificial Sequence
  Synthetic oligonucleotide: BID-5883
ucugccccucuugcccagggaggg

SEQ ID NO: 45640 - RNA, 18 nt, Artificial Sequence
  Synthetic oligonucleotide: BID-5884
gcggggcuguggagcggg

SEQ ID NO: 45641 - RNA, 19 nt, Artificial Sequence
  Synthetic oligonucleotide: BID-5885
cgcggggcuguggagcggg

SEQ ID NO: 45642 - RNA, 20 nt, Artificial Sequence
  Synthetic oligonucleotide: BID-1620
gcgcggggcuguggagcggg

SEQ ID NO: 45643 - RNA, 21 nt, Artificial Sequence
  Synthetic oligonucleotide: BID-5886
ggcgcggggcuguggagcggg

SEQ ID NO: 45644 - RNA, 22 nt, Artificial Sequence
  Synthetic oligonucleotide: BID-5887
cggcgcggggcuguggagcggg

SEQ ID NO: 45645 - RNA, 23 nt, Artificial Sequence
  Synthetic oligonucleotide: BID-5888
ccggcgcggggcuguggagcggg

SEQ ID NO: 45646 - RNA, 24 nt, Artificial Sequence
  Synthetic oligonucleotide: BID-5889
gccggcgcggggcuguggagcggg

SEQ ID NO: 45647 - RNA, 18 nt, Artificial Sequence
  Synthetic oligonucleotide: BID-5890
cggggcuguggagcgggg

SEQ ID NO: 45648 - RNA, 19 nt, Artificial Sequence
  Synthetic oligonucleotide: BID-5891
gcggggcuguggagcgggg

SEQ ID NO: 45649 - RNA, 20 nt, Artificial Sequence
  Synthetic oligonucleotide: BID-766
cgcggggcuguggagcgggg

SEQ ID NO: 45650 - RNA, 21 nt, Artificial Sequence
  Synthetic oligonucleotide: BID-5892
gcgcggggcuguggagcgggg

SEQ ID NO: 45651 - RNA, 22 nt, Artificial Sequence
  Synthetic oligonucleotide: BID-5893
ggcgcggggcuguggagcgggg

SEQ ID NO: 45652 - RNA, 23 nt, Artificial Sequence
  Synthetic oligonucleotide: BID-5894
cggcgcggggcuguggagcgggg

SEQ ID NO: 45653 - RNA, 24 nt, Artificial Sequence
  Synthetic oligonucleotide: BID-5895
ccggcgcggggcuguggagcgggg

SEQ ID NO: 45654 - RNA, 18 nt, Artificial Sequence
  Synthetic oligonucleotide: BID-5896
uuaguggagguggugggg

SEQ ID NO: 45655 - RNA, 19 nt, Artificial Sequence
  Synthetic oligonucleotide: BID-5897
uuuaguggagguggugggg

SEQ ID NO: 45656 - RNA, 20 nt, Artificial Sequence
  Synthetic oligonucleotide: BID-805
uuuuaguggagguggugggg

SEQ ID NO: 45657 - RNA, 21 nt, Artificial Sequence
  Synthetic oligonucleotide: BID-5898
uuuuuaguggagguggugggg

SEQ ID NO: 45658 - RNA, 22 nt, Artificial Sequence
  Synthetic oligonucleotide: BID-5899
guuuuuaguggagguggugggg

SEQ ID NO: 45659 - RNA, 23 nt, Artificial Sequence
  Synthetic oligonucleotide: BID-5900
aguuuuuaguggagguggugggg

SEQ ID NO: 45660 - RNA, 24 nt, Artificial Sequence
  Synthetic oligonucleotide: BID-5901
caguuuuuaguggagguggugggg

SEQ ID NO: 45661 - RNA, 18 nt, Artificial Sequence
  Synthetic oligonucleotide: BID-5902
aggaggcuuugagauggg

SEQ ID NO: 45662 - RNA, 19 nt, Artificial Sequence
  Synthetic oligonucleotide: BID-5903
caggaggcuuugagauggg

SEQ ID NO: 45663 - RNA, 20 nt, Artificial Sequence
  Synthetic oligonucleotide: BID-882
acaggaggcuuugagauggg

SEQ ID NO: 45664 - RNA, 21 nt, Artificial Sequence
  Synthetic oligonucleotide: BID-5904
cacaggaggcuuugagauggg

SEQ ID NO: 45665 - RNA, 22 nt, Artificial Sequence
  Synthetic oligonucleotide: BID-5905
ccacaggaggcuuugagauggg

SEQ ID NO: 45666 - RNA, 23 nt, Artificial Sequence
  Synthetic oligonucleotide: BID-5906
cccacaggaggcuuugagauggg

SEQ ID NO: 45667 - RNA, 24 nt, Artificial Sequence
  Synthetic oligonucleotide: BID-5907
acccacaggaggcuuugagauggg

SEQ ID NO: 45668 - RNA, 18 nt, Artificial Sequence
  Synthetic oligonucleotide: BID-5908
uuuaguggaggugguggg

SEQ ID NO: 45669 - RNA, 19 nt, Artificial Sequence
  Synthetic oligonucleotide: BID-5909
uuuuaguggaggugguggg

SEQ ID NO: 45670 - RNA, 20 nt, Artificial Sequence
  Synthetic oligonucleotide: BID-804
uuuuuaguggaggugguggg

SEQ ID NO: 45671 - RNA, 21 nt, Artificial Sequence
  Synthetic oligonucleotide: BID-5910
guuuuuaguggaggugguggg

SEQ ID NO: 45672 - RNA, 22 nt, Artificial Sequence
  Synthetic oligonucleotide: BID-5911
aguuuuuaguggaggugguggg

SEQ ID NO: 45673 - RNA, 23 nt, Artificial Sequence
  Synthetic oligonucleotide: BID-5912
caguuuuuaguggaggugguggg

SEQ ID NO: 45674 - RNA, 24 nt, Artificial Sequence
  Synthetic oligonucleotide: BID-5913
ucaguuuuuaguggaggugguggg

SEQ ID NO: 45675 - RNA, 18 nt, Artificial Sequence
  Synthetic oligonucleotide: BID-5914
caggaggcuuugagaugg

SEQ ID NO: 45676 - RNA, 19 nt, Artificial Sequence
  Synthetic oligonucleotide: BID-5915
acaggaggcuuugagaugg

SEQ ID NO: 45677 - RNA, 20 nt, Artificial Sequence
  Synthetic oligonucleotide: BID-881
cacaggaggcuuugagaugg

SEQ ID NO: 45678 - RNA, 21 nt, Artificial Sequence
  Synthetic oligonucleotide: BID-5916
ccacaggaggcuuugagaugg

SEQ ID NO: 45679 - RNA, 22 nt, Artificial Sequence
  Synthetic oligonucleotide: BID-5917
cccacaggaggcuuugagaugg

SEQ ID NO: 45680 - RNA, 23 nt, Artificial Sequence
  Synthetic oligonucleotide: BID-5918
acccacaggaggcuuugagaugg

SEQ ID NO: 45681 - RNA, 24 nt, Artificial Sequence
  Synthetic oligonucleotide: BID-5919
cacccacaggaggcuuugagaugg

SEQ ID NO: 45682 - RNA, 18 nt, Artificial Sequence
  Synthetic oligonucleotide: BID-5920
cagggguuuggaaagugg

SEQ ID NO: 45683 - RNA, 19 nt, Artificial Sequence
  Synthetic oligonucleotide: BID-5921
ccagggguuuggaaagugg

SEQ ID NO: 45684 - RNA, 20 nt, Artificial Sequence
  Synthetic oligonucleotide: BID-1643
accagggguuuggaaagugg

SEQ ID NO: 45685 - RNA, 21 nt, Artificial Sequence
  Synthetic oligonucleotide: BID-5922
aaccagggguuuggaaagugg

SEQ ID NO: 45686 - RNA, 22 nt, Artificial Sequence
  Synthetic oligonucleotide: BID-5923
gaaccagggguuuggaaagugg

SEQ ID NO: 45687 - RNA, 23 nt, Artificial Sequence
  Synthetic oligonucleotide: BID-5924
ggaaccagggguuuggaaagugg

SEQ ID NO: 45688 - RNA, 24 nt, Artificial Sequence
  Synthetic oligonucleotide: BID-5925
cggaaccagggguuuggaaagugg

SEQ ID NO: 45689 - RNA, 18 nt, Artificial Sequence
  Synthetic oligonucleotide: BID-5926
ggggucagcaguucgugg

SEQ ID NO: 45690 - RNA, 19 nt, Artificial Sequence
  Synthetic oligonucleotide: BID-5927
cggggucagcaguucgugg

SEQ ID NO: 45691 - RNA, 20 nt, Artificial Sequence
  Synthetic oligonucleotide: BID-1771
gcggggucagcaguucgugg

SEQ ID NO: 45692 - RNA, 21 nt, Artificial Sequence
  Synthetic oligonucleotide: BID-5928
ugcggggucagcaguucgugg

SEQ ID NO: 45693 - RNA, 22 nt, Artificial Sequence
  Synthetic oligonucleotide: BID-5929
augcggggucagcaguucgugg

SEQ ID NO: 45694 - RNA, 23 nt, Artificial Sequence
  Synthetic oligonucleotide: BID-5930
aaugcggggucagcaguucgugg

SEQ ID NO: 45695 - RNA, 24 nt, Artificial Sequence
  Synthetic oligonucleotide: BID-5931
aaaugcggggucagcaguucgugg

SEQ ID NO: 45696 - RNA, 18 nt, Artificial Sequence
  Synthetic oligonucleotide: BID-5932
aguuuuuaguggaggugg

SEQ ID NO: 45697 - RNA, 19 nt, Artificial Sequence
  Synthetic oligonucleotide: BID-5933
caguuuuuaguggaggugg

SEQ ID NO: 45698 - RNA, 20 nt, Artificial Sequence
  Synthetic oligonucleotide: BID-800
ucaguuuuuaguggaggugg

SEQ ID NO: 45699 - RNA, 21 nt, Artificial Sequence
  Synthetic oligonucleotide: BID-5934
uucaguuuuuaguggaggugg

SEQ ID NO: 45700 - RNA, 22 nt, Artificial Sequence
  Synthetic oligonucleotide: BID-5935
uuucaguuuuuaguggaggugg

SEQ ID NO: 45701 - RNA, 23 nt, Artificial Sequence
  Synthetic oligonucleotide: BID-5936
uuuucaguuuuuaguggaggugg

SEQ ID NO: 45702 - RNA, 24 nt, Artificial Sequence
  Synthetic oligonucleotide: BID-5937
uuuuucaguuuuuaguggaggugg

SEQ ID NO: 45703 - RNA, 18 nt, Artificial Sequence
  Synthetic oligonucleotide: BID-5938
uuuuaguggagguggugg

SEQ ID NO: 45704 - RNA, 19 nt, Artificial Sequence
  Synthetic oligonucleotide: BID-5939
uuuuuaguggagguggugg

SEQ ID NO: 45705 - RNA, 20 nt, Artificial Sequence
  Synthetic oligonucleotide: BID-803
guuuuuaguggagguggugg

SEQ ID NO: 45706 - RNA, 21 nt, Artificial Sequence
  Synthetic oligonucleotide: BID-5940
aguuuuuaguggagguggugg

SEQ ID NO: 45707 - RNA, 22 nt, Artificial Sequence
  Synthetic oligonucleotide: BID-5941
caguuuuuaguggagguggugg

SEQ ID NO: 45708 - RNA, 23 nt, Artificial Sequence
  Synthetic oligonucleotide: BID-5942
ucaguuuuuaguggagguggugg

SEQ ID NO: 45709 - RNA, 24 nt, Artificial Sequence
  Synthetic oligonucleotide: BID-5943
uucaguuuuuaguggagguggugg

SEQ ID NO: 45710 - RNA, 18 nt, Artificial Sequence
  Synthetic oligonucleotide: BID-5944
uccucgcucucacugugg

SEQ ID NO: 45711 - RNA, 19 nt, Artificial Sequence
  Synthetic oligonucleotide: BID-5945
guccucgcucucacugugg

SEQ ID NO: 45712 - RNA, 20 nt, Artificial Sequence
  Synthetic oligonucleotide: BID-873
aguccucgcucucacugugg

SEQ ID NO: 45713 - RNA, 21 nt, Artificial Sequence
  Synthetic oligonucleotide: BID-5946
caguccucgcucucacugugg

SEQ ID NO: 45714 - RNA, 22 nt, Artificial Sequence
  Synthetic oligonucleotide: BID-5947
ucaguccucgcucucacugugg

SEQ ID NO: 45715 - RNA, 23 nt, Artificial Sequence
  Synthetic oligonucleotide: BID-5948
cucaguccucgcucucacugugg

SEQ ID NO: 45716 - RNA, 24 nt, Artificial Sequence
  Synthetic oligonucleotide: BID-5949
ccucaguccucgcucucacugugg

SEQ ID NO: 45717 - RNA, 18 nt, Artificial Sequence
  Synthetic oligonucleotide: BID-5950
uuuaacauauagauaaug

SEQ ID NO: 45718 - RNA, 19 nt, Artificial Sequence
  Synthetic oligonucleotide: BID-5951
guuuaacauauagauaaug

SEQ ID NO: 45719 - RNA, 20 nt, Artificial Sequence
  Synthetic oligonucleotide: BID-1648
aguuuaacauauagauaaug

SEQ ID NO: 45720 - RNA, 21 nt, Artificial Sequence
  Synthetic oligonucleotide: BID-5952
caguuuaacauauagauaaug

SEQ ID NO: 45721 - RNA, 22 nt, Artificial Sequence
  Synthetic oligonucleotide: BID-5953
ucaguuuaacauauagauaaug

SEQ ID NO: 45722 - RNA, 23 nt, Artificial Sequence
  Synthetic oligonucleotide: BID-5954
aucaguuuaacauauagauaaug

SEQ ID NO: 45723 - RNA, 24 nt, Artificial Sequence
  Synthetic oligonucleotide: BID-5955
caucaguuuaacauauagauaaug

SEQ ID NO: 45724 - RNA, 18 nt, Artificial Sequence
  Synthetic oligonucleotide: BID-5956
acgggcacagggagcaug

SEQ ID NO: 45725 - RNA, 19 nt, Artificial Sequence
  Synthetic oligonucleotide: BID-5957
gacgggcacagggagcaug

SEQ ID NO: 45726 - RNA, 20 nt, Artificial Sequence
  Synthetic oligonucleotide: BID-933
ggacgggcacagggagcaug

SEQ ID NO: 45727 - RNA, 21 nt, Artificial Sequence
  Synthetic oligonucleotide: BID-5958
aggacgggcacagggagcaug

SEQ ID NO: 45728 - RNA, 22 nt, Artificial Sequence
  Synthetic oligonucleotide: BID-5959
caggacgggcacagggagcaug

SEQ ID NO: 45729 - RNA, 23 nt, Artificial Sequence
  Synthetic oligonucleotide: BID-5960
ccaggacgggcacagggagcaug

SEQ ID NO: 45730 - RNA, 24 nt, Artificial Sequence
  Synthetic oligonucleotide: BID-5961
cccaggacgggcacagggagcaug

SEQ ID NO: 45731 - RNA, 18 nt, Artificial Sequence
  Synthetic oligonucleotide: BID-5962
acaggaggcuuugagaug

SEQ ID NO: 45732 - RNA, 19 nt, Artificial Sequence
  Synthetic oligonucleotide: BID-5963
cacaggaggcuuugagaug

SEQ ID NO: 45733 - RNA, 20 nt, Artificial Sequence
  Synthetic oligonucleotide: BID-880
ccacaggaggcuuugagaug

SEQ ID NO: 45734 - RNA, 21 nt, Artificial Sequence
  Synthetic oligonucleotide: BID-5964
cccacaggaggcuuugagaug

SEQ ID NO: 45735 - RNA, 22 nt, Artificial Sequence
  Synthetic oligonucleotide: BID-5965
acccacaggaggcuuugagaug

SEQ ID NO: 45736 - RNA, 23 nt, Artificial Sequence
  Synthetic oligonucleotide: BID-5966
cacccacaggaggcuuugagaug

SEQ ID NO: 45737 - RNA, 24 nt, Artificial Sequence
  Synthetic oligonucleotide: BID-5967
ccacccacaggaggcuuugagaug

SEQ ID NO: 45738 - RNA, 18 nt, Artificial Sequence
  Synthetic oligonucleotide: BID-5968
agcuccagggaggcacug

SEQ ID NO: 45739 - RNA, 19 nt, Artificial Sequence
  Synthetic oligonucleotide: BID-5969
gagcuccagggaggcacug

SEQ ID NO: 45740 - RNA, 20 nt, Artificial Sequence
  Synthetic oligonucleotide: BID-1755
agagcuccagggaggcacug

SEQ ID NO: 45741 - RNA, 21 nt, Artificial Sequence
  Synthetic oligonucleotide: BID-5970
cagagcuccagggaggcacug

SEQ ID NO: 45742 - RNA, 22 nt, Artificial Sequence
  Synthetic oligonucleotide: BID-5971
acagagcuccagggaggcacug

SEQ ID NO: 45743 - RNA, 23 nt, Artificial Sequence
  Synthetic oligonucleotide: BID-5972
gacagagcuccagggaggcacug

SEQ ID NO: 45744 - RNA, 24 nt, Artificial Sequence
  Synthetic oligonucleotide: BID-5973
agacagagcuccagggaggcacug

SEQ ID NO: 45745 - RNA, 18 nt, Artificial Sequence
  Synthetic oligonucleotide: BID-5974
caguccucgcucucacug

SEQ ID NO: 45746 - RNA, 19 nt, Artificial Sequence
  Synthetic oligonucleotide: BID-5975
ucaguccucgcucucacug

SEQ ID NO: 45747 - RNA, 20 nt, Artificial Sequence
  Synthetic oligonucleotide: BID-870
cucaguccucgcucucacug

SEQ ID NO: 45748 - RNA, 21 nt, Artificial Sequence
  Synthetic oligonucleotide: BID-5976
ccucaguccucgcucucacug

SEQ ID NO: 45749 - RNA, 22 nt, Artificial Sequence
  Synthetic oligonucleotide: BID-5977
cccucaguccucgcucucacug

SEQ ID NO: 45750 - RNA, 23 nt, Artificial Sequence
  Synthetic oligonucleotide: BID-5978
acccucaguccucgcucucacug

SEQ ID NO: 45751 - RNA, 24 nt, Artificial Sequence
  Synthetic oligonucleotide: BID-5979
cacccucaguccucgcucucacug

SEQ ID NO: 45752 - RNA, 18 nt, Artificial Sequence
  Synthetic oligonucleotide: BID-5980
cucacugugggggagcug

SEQ ID NO: 45753 - RNA, 19 nt, Artificial Sequence
  Synthetic oligonucleotide: BID-5981
ucucacugugggggagcug

SEQ ID NO: 45754 - RNA, 20 nt, Artificial Sequence
  Synthetic oligonucleotide: BID-1718
cucucacugugggggagcug

SEQ ID NO: 45755 - RNA, 21 nt, Artificial Sequence
  Synthetic oligonucleotide: BID-5982
gcucucacugugggggagcug

SEQ ID NO: 45756 - RNA, 22 nt, Artificial Sequence
  Synthetic oligonucleotide: BID-5983
cgcucucacugugggggagcug

SEQ ID NO: 45757 - RNA, 23 nt, Artificial Sequence
  Synthetic oligonucleotide: BID-5984
ucgcucucacugugggggagcug

SEQ ID NO: 45758 - RNA, 24 nt, Artificial Sequence
  Synthetic oligonucleotide: BID-5985
cucgcucucacugugggggagcug

SEQ ID NO: 45759 - RNA, 18 nt, Artificial Sequence
  Synthetic oligonucleotide: BID-5986
cgcgccggcgcggggcug

SEQ ID NO: 45760 - RNA, 19 nt, Artificial Sequence
  Synthetic oligonucleotide: BID-5987
ccgcgccggcgcggggcug

SEQ ID NO: 45761 - RNA, 20 nt, Artificial Sequence
  Synthetic oligonucleotide: BID-762
cccgcgccggcgcggggcug

SEQ ID NO: 45762 - RNA, 21 nt, Artificial Sequence
  Synthetic oligonucleotide: BID-5988
gcccgcgccggcgcggggcug

SEQ ID NO: 45763 - RNA, 22 nt, Artificial Sequence
  Synthetic oligonucleotide: BID-5989
agcccgcgccggcgcggggcug

SEQ ID NO: 45764 - RNA, 23 nt, Artificial Sequence
  Synthetic oligonucleotide: BID-5990
gagcccgcgccggcgcggggcug

SEQ ID NO: 45765 - RNA, 24 nt, Artificial Sequence
  Synthetic oligonucleotide: BID-5991
ggagcccgcgccggcgcggggcug

SEQ ID NO: 45766 - RNA, 18 nt, Artificial Sequence
  Synthetic oligonucleotide: BID-5992
caguuuuuaguggaggug

SEQ ID NO: 45767 - RNA, 19 nt, Artificial Sequence
  Synthetic oligonucleotide: BID-5993
ucaguuuuuaguggaggug

SEQ ID NO: 45768 - RNA, 20 nt, Artificial Sequence
  Synthetic oligonucleotide: BID-1652
uucaguuuuuaguggaggug

SEQ ID NO: 45769 - RNA, 21 nt, Artificial Sequence
  Synthetic oligonucleotide: BID-5994
uuucaguuuuuaguggaggug

SEQ ID NO: 45770 - RNA, 22 nt, Artificial Sequence
  Synthetic oligonucleotide: BID-5995
uuuucaguuuuuaguggaggug

SEQ ID NO: 45771 - RNA, 23 nt, Artificial Sequence
  Synthetic oligonucleotide: BID-5996
uuuuucaguuuuuaguggaggug

SEQ ID NO: 45772 - RNA, 24 nt, Artificial Sequence
  Synthetic oligonucleotide: BID-5997
cuuuuucaguuuuuaguggaggug

SEQ ID NO: 45773 - RNA, 18 nt, Artificial Sequence
  Synthetic oligonucleotide: BID-5998
gcuggggucuuaagggug

SEQ ID NO: 45774 - RNA, 19 nt, Artificial Sequence
  Synthetic oligonucleotide: BID-5999
agcuggggucuuaagggug

SEQ ID NO: 45775 - RNA, 20 nt, Artificial Sequence
  Synthetic oligonucleotide: BID-895
gagcuggggucuuaagggug

SEQ ID NO: 45776 - RNA, 21 nt, Artificial Sequence
  Synthetic oligonucleotide: BID-6000
ugagcuggggucuuaagggug

SEQ ID NO: 45777 - RNA, 22 nt, Artificial Sequence
  Synthetic oligonucleotide: BID-6001
cugagcuggggucuuaagggug

SEQ ID NO: 45778 - RNA, 23 nt, Artificial Sequence
  Synthetic oligonucleotide: BID-6002
ccugagcuggggucuuaagggug

SEQ ID NO: 45779 - RNA, 24 nt, Artificial Sequence
  Synthetic oligonucleotide: BID-6003
cccugagcuggggucuuaagggug

SEQ ID NO: 45780 - RNA, 18 nt, Artificial Sequence
  Synthetic oligonucleotide: BID-6004
uuuuuaguggagguggug

SEQ ID NO: 45781 - RNA, 19 nt, Artificial Sequence
  Synthetic oligonucleotide: BID-6005
guuuuuaguggagguggug

SEQ ID NO: 45782 - RNA, 20 nt, Artificial Sequence
  Synthetic oligonucleotide: BID-802
aguuuuuaguggagguggug

SEQ ID NO: 45783 - RNA, 21 nt, Artificial Sequence
  Synthetic oligonucleotide: BID-6006
caguuuuuaguggagguggug

SEQ ID NO: 45784 - RNA, 22 nt, Artificial Sequence
  Synthetic oligonucleotide: BID-6007
ucaguuuuuaguggagguggug

SEQ ID NO: 45785 - RNA, 23 nt, Artificial Sequence
  Synthetic oligonucleotide: BID-6008
uucaguuuuuaguggagguggug

SEQ ID NO: 45786 - RNA, 24 nt, Artificial Sequence
  Synthetic oligonucleotide: BID-6009
uuucaguuuuuaguggagguggug

SEQ ID NO: 45787 - RNA, 18 nt, Artificial Sequence
  Synthetic oligonucleotide: BID-6010
guccucgcucucacugug

SEQ ID NO: 45788 - RNA, 19 nt, Artificial Sequence
  Synthetic oligonucleotide: BID-6011
aguccucgcucucacugug

SEQ ID NO: 45789 - RNA, 20 nt, Artificial Sequence
  Synthetic oligonucleotide: BID-872
caguccucgcucucacugug

SEQ ID NO: 45790 - RNA, 21 nt, Artificial Sequence
  Synthetic oligonucleotide: BID-6012
ucaguccucgcucucacugug

SEQ ID NO: 45791 - RNA, 22 nt, Artificial Sequence
  Synthetic oligonucleotide: BID-6013
cucaguccucgcucucacugug

SEQ ID NO: 45792 - RNA, 23 nt, Artificial Sequence
  Synthetic oligonucleotide: BID-6014
ccucaguccucgcucucacugug

SEQ ID NO: 45793 - RNA, 24 nt, Artificial Sequence
  Synthetic oligonucleotide: BID-6015
cccucaguccucgcucucacugug

SEQ ID NO: 45794 - RNA, 18 nt, Artificial Sequence
  Synthetic oligonucleotide: BID-6016
uggggucuuaagggugug

SEQ ID NO: 45795 - RNA, 19 nt, Artificial Sequence
  Synthetic oligonucleotide: BID-6017
cuggggucuuaagggugug

SEQ ID NO: 45796 - RNA, 20 nt, Artificial Sequence
  Synthetic oligonucleotide: BID-897
gcuggggucuuaagggugug

SEQ ID NO: 45797 - RNA, 21 nt, Artificial Sequence
  Synthetic oligonucleotide: BID-6018
agcuggggucuuaagggugug

SEQ ID NO: 45798 - RNA, 22 nt, Artificial Sequence
  Synthetic oligonucleotide: BID-6019
gagcuggggucuuaagggugug

SEQ ID NO: 45799 - RNA, 23 nt, Artificial Sequence
  Synthetic oligonucleotide: BID-6020
ugagcuggggucuuaagggugug

SEQ ID NO: 45800 - RNA, 24 nt, Artificial Sequence
  Synthetic oligonucleotide: BID-6021
cugagcuggggucuuaagggugug

SEQ ID NO: 45801 - RNA, 18 nt, Artificial Sequence
  Synthetic oligonucleotide: BID-6022
gugaagccauguggguug

SEQ ID NO: 45802 - RNA, 19 nt, Artificial Sequence
  Synthetic oligonucleotide: BID-6023
ggugaagccauguggguug

SEQ ID NO: 45803 - RNA, 20 nt, Artificial Sequence
  Synthetic oligonucleotide: BID-1645
gggugaagccauguggguug

SEQ ID NO: 45804 - RNA, 21 nt, Artificial Sequence
  Synthetic oligonucleotide: BID-6024
ugggugaagccauguggguug

SEQ ID NO: 45805 - RNA, 22 nt, Artificial Sequence
  Synthetic oligonucleotide: BID-6025
gugggugaagccauguggguug

SEQ ID NO: 45806 - RNA, 23 nt, Artificial Sequence
  Synthetic oligonucleotide: BID-6026
agugggugaagccauguggguug

SEQ ID NO: 45807 - RNA, 24 nt, Artificial Sequence
  Synthetic oligonucleotide: BID-6027
aagugggugaagccauguggguug

SEQ ID NO: 45808 - RNA, 18 nt, Artificial Sequence
  Synthetic oligonucleotide: BID-6028
agggagggaagaggaaau

SEQ ID NO: 45809 - RNA, 19 nt, Artificial Sequence
  Synthetic oligonucleotide: BID-6029
cagggagggaagaggaaau

SEQ ID NO: 45810 - RNA, 20 nt, Artificial Sequence
  Synthetic oligonucleotide: BID-1769
ccagggagggaagaggaaau

SEQ ID NO: 45811 - RNA, 21 nt, Artificial Sequence
  Synthetic oligonucleotide: BID-6030
cccagggagggaagaggaaau

SEQ ID NO: 45812 - RNA, 22 nt, Artificial Sequence
  Synthetic oligonucleotide: BID-6031
gcccagggagggaagaggaaau

SEQ ID NO: 45813 - RNA, 23 nt, Artificial Sequence
  Synthetic oligonucleotide: BID-6032
ugcccagggagggaagaggaaau

SEQ ID NO: 45814 - RNA, 24 nt, Artificial Sequence
  Synthetic oligonucleotide: BID-6033
uugcccagggagggaagaggaaau

SEQ ID NO: 45815 - RNA, 18 nt, Artificial Sequence
  Synthetic oligonucleotide: BID-6034
gacgggcacagggagcau

SEQ ID NO: 45816 - RNA, 19 nt, Artificial Sequence
  Synthetic oligonucleotide: BID-6035
ggacgggcacagggagcau

SEQ ID NO: 45817 - RNA, 20 nt, Artificial Sequence
  Synthetic oligonucleotide: BID-1781
aggacgggcacagggagcau

SEQ ID NO: 45818 - RNA, 21 nt, Artificial Sequence
  Synthetic oligonucleotide: BID-6036
caggacgggcacagggagcau

SEQ ID NO: 45819 - RNA, 22 nt, Artificial Sequence
  Synthetic oligonucleotide: BID-6037
ccaggacgggcacagggagcau

SEQ ID NO: 45820 - RNA, 23 nt, Artificial Sequence
  Synthetic oligonucleotide: BID-6038
cccaggacgggcacagggagcau

SEQ ID NO: 45821 - RNA, 24 nt, Artificial Sequence
  Synthetic oligonucleotide: BID-6039
ucccaggacgggcacagggagcau

SEQ ID NO: 45822 - RNA, 18 nt, Artificial Sequence
  Synthetic oligonucleotide: BID-6040
agagggauccucuggcau

SEQ ID NO: 45823 - RNA, 19 nt, Artificial Sequence
  Synthetic oligonucleotide: BID-6041
cagagggauccucuggcau

SEQ ID NO: 45824 - RNA, 20 nt, Artificial Sequence
  Synthetic oligonucleotide: BID-1748
gcagagggauccucuggcau

SEQ ID NO: 45825 - RNA, 21 nt, Artificial Sequence
  Synthetic oligonucleotide: BID-6042
cgcagagggauccucuggcau

SEQ ID NO: 45826 - RNA, 22 nt, Artificial Sequence
  Synthetic oligonucleotide: BID-6043
gcgcagagggauccucuggcau

SEQ ID NO: 45827 - RNA, 23 nt, Artificial Sequence
  Synthetic oligonucleotide: BID-6044
agcgcagagggauccucuggcau

SEQ ID NO: 45828 - RNA, 24 nt, Artificial Sequence
  Synthetic oligonucleotide: BID-6045
gagcgcagagggauccucuggcau

SEQ ID NO: 45829 - RNA, 18 nt, Artificial Sequence
  Synthetic oligonucleotide: BID-6046
cacaggaggcuuugagau

SEQ ID NO: 45830 - RNA, 19 nt, Artificial Sequence
  Synthetic oligonucleotide: BID-6047
ccacaggaggcuuugagau

SEQ ID NO: 45831 - RNA, 20 nt, Artificial Sequence
  Synthetic oligonucleotide: BID-879
cccacaggaggcuuugagau

SEQ ID NO: 45832 - RNA, 21 nt, Artificial Sequence
  Synthetic oligonucleotide: BID-6048
acccacaggaggcuuugagau

SEQ ID NO: 45833 - RNA, 22 nt, Artificial Sequence
  Synthetic oligonucleotide: BID-6049
cacccacaggaggcuuugagau

SEQ ID NO: 45834 - RNA, 23 nt, Artificial Sequence
  Synthetic oligonucleotide: BID-6050
ccacccacaggaggcuuugagau

SEQ ID NO: 45835 - RNA, 24 nt, Artificial Sequence
  Synthetic oligonucleotide: BID-6051
uccacccacaggaggcuuugagau

SEQ ID NO: 45836 - RNA, 18 nt, Artificial Sequence
  Synthetic oligonucleotide: BID-6052
ucaguccucgcucucacu

SEQ ID NO: 45837 - RNA, 19 nt, Artificial Sequence
  Synthetic oligonucleotide: BID-6053
cucaguccucgcucucacu

SEQ ID NO: 45838 - RNA, 20 nt, Artificial Sequence
  Synthetic oligonucleotide: BID-1713
ccucaguccucgcucucacu

SEQ ID NO: 45839 - RNA, 21 nt, Artificial Sequence
  Synthetic oligonucleotide: BID-6054
cccucaguccucgcucucacu

SEQ ID NO: 45840 - RNA, 22 nt, Artificial Sequence
  Synthetic oligonucleotide: BID-6055
acccucaguccucgcucucacu

SEQ ID NO: 45841 - RNA, 23 nt, Artificial Sequence
  Synthetic oligonucleotide: BID-6056
cacccucaguccucgcucucacu

SEQ ID NO: 45842 - RNA, 24 nt, Artificial Sequence
  Synthetic oligonucleotide: BID-6057
acacccucaguccucgcucucacu

SEQ ID NO: 45843 - RNA, 18 nt, Artificial Sequence
  Synthetic oligonucleotide: BID-6058
gggggggggucuccaccu

SEQ ID NO: 45844 - RNA, 19 nt, Artificial Sequence
  Synthetic oligonucleotide: BID-6059
ggggggggggucuccaccu

SEQ ID NO: 45845 - RNA, 20 nt, Artificial Sequence
  Synthetic oligonucleotide: BID-1660
uggggggggggucuccaccu

SEQ ID NO: 45846 - RNA, 21 nt, Artificial Sequence
  Synthetic oligonucleotide: BID-6060
guggggggggggucuccaccu

SEQ ID NO: 45847 - RNA, 22 nt, Artificial Sequence
  Synthetic oligonucleotide: BID-6061
gguggggggggggucuccaccu

SEQ ID NO: 45848 - RNA, 23 nt, Artificial Sequence
  Synthetic oligonucleotide: BID-6062
ugguggggggggggucuccaccu

SEQ ID NO: 45849 - RNA, 24 nt, Artificial Sequence
  Synthetic oligonucleotide: BID-6063
gugguggggggggggucuccaccu

SEQ ID NO: 45850 - RNA, 18 nt, Artificial Sequence
  Synthetic oligonucleotide: BID-6064
cuccacccacaggaggcu

SEQ ID NO: 45851 - RNA, 19 nt, Artificial Sequence
  Synthetic oligonucleotide: BID-6065
ucuccacccacaggaggcu

SEQ ID NO: 45852 - RNA, 20 nt, Artificial Sequence
  Synthetic oligonucleotide: BID-1722
aucuccacccacaggaggcu

SEQ ID NO: 45853 - RNA, 21 nt, Artificial Sequence
  Synthetic oligonucleotide: BID-6066
caucuccacccacaggaggcu

SEQ ID NO: 45854 - RNA, 22 nt, Artificial Sequence
  Synthetic oligonucleotide: BID-6067
ccaucuccacccacaggaggcu

SEQ ID NO: 45855 - RNA, 23 nt, Artificial Sequence
  Synthetic oligonucleotide: BID-6068
uccaucuccacccacaggaggcu

SEQ ID NO: 45856 - RNA, 24 nt, Artificial Sequence
  Synthetic oligonucleotide: BID-6069
uuccaucuccacccacaggaggcu

SEQ ID NO: 45857 - RNA, 18 nt, Artificial Sequence
  Synthetic oligonucleotide: BID-6070
ccgcgccggcgcggggcu

SEQ ID NO: 45858 - RNA, 19 nt, Artificial Sequence
  Synthetic oligonucleotide: BID-6071
cccgcgccggcgcggggcu

SEQ ID NO: 45859 - RNA, 20 nt, Artificial Sequence
  Synthetic oligonucleotide: BID-1616
gcccgcgccggcgcggggcu

SEQ ID NO: 45860 - RNA, 21 nt, Artificial Sequence
  Synthetic oligonucleotide: BID-6072
agcccgcgccggcgcggggcu

SEQ ID NO: 45861 - RNA, 22 nt, Artificial Sequence
  Synthetic oligonucleotide: BID-6073
gagcccgcgccggcgcggggcu

SEQ ID NO: 45862 - RNA, 23 nt, Artificial Sequence
  Synthetic oligonucleotide: BID-6074
ggagcccgcgccggcgcggggcu

SEQ ID NO: 45863 - RNA, 24 nt, Artificial Sequence
  Synthetic oligonucleotide: BID-6075
gggagcccgcgccggcgcggggcu

SEQ ID NO: 45864 - RNA, 18 nt, Artificial Sequence
  Synthetic oligonucleotide: BID-6076
aauuccuaaugauucucu

SEQ ID NO: 45865 - RNA, 19 nt, Artificial Sequence
  Synthetic oligonucleotide: BID-6077
uaauuccuaaugauucucu

SEQ ID NO: 45866 - RNA, 20 nt, Artificial Sequence
  Synthetic oligonucleotide: BID-775
auaauuccuaaugauucucu

SEQ ID NO: 45867 - RNA, 21 nt, Artificial Sequence
  Synthetic oligonucleotide: BID-6078
gauaauuccuaaugauucucu

SEQ ID NO: 45868 - RNA, 22 nt, Artificial Sequence
  Synthetic oligonucleotide: BID-6079
ggauaauuccuaaugauucucu

SEQ ID NO: 45869 - RNA, 23 nt, Artificial Sequence
  Synthetic oligonucleotide: BID-6080
gggauaauuccuaaugauucucu

SEQ ID NO: 45870 - RNA, 24 nt, Artificial Sequence
  Synthetic oligonucleotide: BID-6081
ugggauaauuccuaaugauucucu

SEQ ID NO: 45871 - RNA, 18 nt, Artificial Sequence
  Synthetic oligonucleotide: BID-6082
auaauuccuaaugauucu

SEQ ID NO: 45872 - RNA, 19 nt, Artificial Sequence
  Synthetic oligonucleotide: BID-6083
gauaauuccuaaugauucu

SEQ ID NO: 45873 - RNA, 20 nt, Artificial Sequence
  Synthetic oligonucleotide: BID-1628
ggauaauuccuaaugauucu

SEQ ID NO: 45874 - RNA, 21 nt, Artificial Sequence
  Synthetic oligonucleotide: BID-6084
gggauaauuccuaaugauucu

SEQ ID NO: 45875 - RNA, 22 nt, Artificial Sequence
  Synthetic oligonucleotide: BID-6085
ugggauaauuccuaaugauucu

SEQ ID NO: 45876 - RNA, 23 nt, Artificial Sequence
  Synthetic oligonucleotide: BID-6086
cugggauaauuccuaaugauucu

SEQ ID NO: 45877 - RNA, 24 nt, Artificial Sequence
  Synthetic oligonucleotide: BID-6087
gcugggauaauuccuaaugauucu

SEQ ID NO: 45878 - RNA, 18 nt, Artificial Sequence
  Synthetic oligonucleotide: BID-6088
ggcuguuucuggaacagu

SEQ ID NO: 45879 - RNA, 19 nt, Artificial Sequence
  Synthetic oligonucleotide: BID-6089
aggcuguuucuggaacagu

SEQ ID NO: 45880 - RNA, 20 nt, Artificial Sequence
  Synthetic oligonucleotide: BID-1634
caggcuguuucuggaacagu

SEQ ID NO: 45881 - RNA, 21 nt, Artificial Sequence
  Synthetic oligonucleotide: BID-6090
ccaggcuguuucuggaacagu

SEQ ID NO: 45882 - RNA, 22 nt, Artificial Sequence
  Synthetic oligonucleotide: BID-6091
cccaggcuguuucuggaacagu

SEQ ID NO: 45883 - RNA, 23 nt, Artificial Sequence
  Synthetic oligonucleotide: BID-6092
ccccaggcuguuucuggaacagu

SEQ ID NO: 45884 - RNA, 24 nt, Artificial Sequence
  Synthetic oligonucleotide: BID-6093
uccccaggcuguuucuggaacagu

SEQ ID NO: 45885 - RNA, 18 nt, Artificial Sequence
  Synthetic oligonucleotide: BID-6094
gggagccggcagcgcagu

SEQ ID NO: 45886 - RNA, 19 nt, Artificial Sequence
  Synthetic oligonucleotide: BID-6095
ggggagccggcagcgcagu

SEQ ID NO: 45887 - RNA, 20 nt, Artificial Sequence
  Synthetic oligonucleotide: BID-1625
cggggagccggcagcgcagu

SEQ ID NO: 45888 - RNA, 21 nt, Artificial Sequence
  Synthetic oligonucleotide: BID-6096
gcggggagccggcagcgcagu

SEQ ID NO: 45889 - RNA, 22 nt, Artificial Sequence
  Synthetic oligonucleotide: BID-6097
ggcggggagccggcagcgcagu

SEQ ID NO: 45890 - RNA, 23 nt, Artificial Sequence
  Synthetic oligonucleotide: BID-6098
gggcggggagccggcagcgcagu

SEQ ID NO: 45891 - RNA, 24 nt, Artificial Sequence
  Synthetic oligonucleotide: BID-6099
ggggcggggagccggcagcgcagu

SEQ ID NO: 45892 - RNA, 18 nt, Artificial Sequence
  Synthetic oligonucleotide: BID-6100
agcuggggucuuaagggu

SEQ ID NO: 45893 - RNA, 19 nt, Artificial Sequence
  Synthetic oligonucleotide: BID-6101
gagcuggggucuuaagggu

SEQ ID NO: 45894 - RNA, 20 nt, Artificial Sequence
  Synthetic oligonucleotide: BID-1741
ugagcuggggucuuaagggu

SEQ ID NO: 45895 - RNA, 21 nt, Artificial Sequence
  Synthetic oligonucleotide: BID-6102
cugagcuggggucuuaagggu

SEQ ID NO: 45896 - RNA, 22 nt, Artificial Sequence
  Synthetic oligonucleotide: BID-6103
ccugagcuggggucuuaagggu

SEQ ID NO: 45897 - RNA, 23 nt, Artificial Sequence
  Synthetic oligonucleotide: BID-6104
cccugagcuggggucuuaagggu

SEQ ID NO: 45898 - RNA, 24 nt, Artificial Sequence
  Synthetic oligonucleotide: BID-6105
ucccugagcuggggucuuaagggu

SEQ ID NO: 45899 - RNA, 18 nt, Artificial Sequence
  Synthetic oligonucleotide: BID-6106
ccucacggaaccaggggu

SEQ ID NO: 45900 - RNA, 19 nt, Artificial Sequence
  Synthetic oligonucleotide: BID-6107
uccucacggaaccaggggu

SEQ ID NO: 45901 - RNA, 20 nt, Artificial Sequence
  Synthetic oligonucleotide: BID-1640
guccucacggaaccaggggu

SEQ ID NO: 45902 - RNA, 21 nt, Artificial Sequence
  Synthetic oligonucleotide: BID-6108
gguccucacggaaccaggggu

SEQ ID NO: 45903 - RNA, 22 nt, Artificial Sequence
  Synthetic oligonucleotide: BID-6109
agguccucacggaaccaggggu

SEQ ID NO: 45904 - RNA, 23 nt, Artificial Sequence
  Synthetic oligonucleotide: BID-6110
uagguccucacggaaccaggggu

SEQ ID NO: 45905 - RNA, 24 nt, Artificial Sequence
  Synthetic oligonucleotide: BID-6111
cuagguccucacggaaccaggggu

SEQ ID NO: 45906 - RNA, 18 nt, Artificial Sequence
  Synthetic oligonucleotide: BID-6112
guuuuuaguggagguggu

SEQ ID NO: 45907 - RNA, 19 nt, Artificial Sequence
  Synthetic oligonucleotide: BID-6113
aguuuuuaguggagguggu

SEQ ID NO: 45908 - RNA, 20 nt, Artificial Sequence
  Synthetic oligonucleotide: BID-801
caguuuuuaguggagguggu

SEQ ID NO: 45909 - RNA, 21 nt, Artificial Sequence
  Synthetic oligonucleotide: BID-6114
ucaguuuuuaguggagguggu

SEQ ID NO: 45910 - RNA, 22 nt, Artificial Sequence
  Synthetic oligonucleotide: BID-6115
uucaguuuuuaguggagguggu

SEQ ID NO: 45911 - RNA, 23 nt, Artificial Sequence
  Synthetic oligonucleotide: BID-6116
uuucaguuuuuaguggagguggu

SEQ ID NO: 45912 - RNA, 24 nt, Artificial Sequence
  Synthetic oligonucleotide: BID-6117
uuuucaguuuuuaguggagguggu

SEQ ID NO: 45913 - RNA, 18 nt, Artificial Sequence
  Synthetic oligonucleotide: BID-6118
aguccucgcucucacugu

SEQ ID NO: 45914 - RNA, 19 nt, Artificial Sequence
  Synthetic oligonucleotide: BID-6119
caguccucgcucucacugu

SEQ ID NO: 45915 - RNA, 20 nt, Artificial Sequence
  Synthetic oligonucleotide: BID-871
ucaguccucgcucucacugu

SEQ ID NO: 45916 - RNA, 21 nt, Artificial Sequence
  Synthetic oligonucleotide: BID-6120
cucaguccucgcucucacugu

SEQ ID NO: 45917 - RNA, 22 nt, Artificial Sequence
  Synthetic oligonucleotide: BID-6121
ccucaguccucgcucucacugu

SEQ ID NO: 45918 - RNA, 23 nt, Artificial Sequence
  Synthetic oligonucleotide: BID-6122
cccucaguccucgcucucacugu

SEQ ID NO: 45919 - RNA, 24 nt, Artificial Sequence
  Synthetic oligonucleotide: BID-6123
acccucaguccucgcucucacugu

SEQ ID NO: 45920 - RNA, 18 nt, Artificial Sequence
  Synthetic oligonucleotide: BID-6124
cuggggucuuaagggugu

SEQ ID NO: 45921 - RNA, 19 nt, Artificial Sequence
  Synthetic oligonucleotide: BID-6125
gcuggggucuuaagggugu

SEQ ID NO: 45922 - RNA, 20 nt, Artificial Sequence
  Synthetic oligonucleotide: BID-896
agcuggggucuuaagggugu

SEQ ID NO: 45923 - RNA, 21 nt, Artificial Sequence
  Synthetic oligonucleotide: BID-6126
gagcuggggucuuaagggugu

SEQ ID NO: 45924 - RNA, 22 nt, Artificial Sequence
  Synthetic oligonucleotide: BID-6127
ugagcuggggucuuaagggugu

SEQ ID NO: 45925 - RNA, 23 nt, Artificial Sequence
  Synthetic oligonucleotide: BID-6128
cugagcuggggucuuaagggugu

SEQ ID NO: 45926 - RNA, 24 nt, Artificial Sequence
  Synthetic oligonucleotide: BID-6129
ccugagcuggggucuuaagggugu

SEQ ID NO: 45927 - RNA, 18 nt, Artificial Sequence
  Synthetic oligonucleotide: BID-6130
cucacggaaccagggguu

SEQ ID NO: 45928 - RNA, 19 nt, Artificial Sequence
  Synthetic oligonucleotide: BID-6131
ccucacggaaccagggguu

SEQ ID NO: 45929 - RNA, 20 nt, Artificial Sequence
  Synthetic oligonucleotide: BID-787
uccucacggaaccagggguu

SEQ ID NO: 45930 - RNA, 21 nt, Artificial Sequence
  Synthetic oligonucleotide: BID-6132
guccucacggaaccagggguu

SEQ ID NO: 45931 - RNA, 22 nt, Artificial Sequence
  Synthetic oligonucleotide: BID-6133
gguccucacggaaccagggguu

SEQ ID NO: 45932 - RNA, 23 nt, Artificial Sequence
  Synthetic oligonucleotide: BID-6134
agguccucacggaaccagggguu

SEQ ID NO: 45933 - RNA, 24 nt, Artificial Sequence
  Synthetic oligonucleotide: BID-6135
uagguccucacggaaccagggguu

SEQ ID NO: 45934 - RNA, 18 nt, Artificial Sequence
  Synthetic oligonucleotide: BID-6136
agaauccccaggcuguuu

SEQ ID NO: 45935 - RNA, 19 nt, Artificial Sequence
  Synthetic oligonucleotide: BID-6137
cagaauccccaggcuguuu

SEQ ID NO: 45936 - RNA, 20 nt, Artificial Sequence
  Synthetic oligonucleotide: BID-1632
ucagaauccccaggcuguuu

SEQ ID NO: 45937 - RNA, 21 nt, Artificial Sequence
  Synthetic oligonucleotide: BID-6138
uucagaauccccaggcuguuu

SEQ ID NO: 45938 - RNA, 22 nt, Artificial Sequence
  Synthetic oligonucleotide: BID-6139
auucagaauccccaggcuguuu

SEQ ID NO: 45939 - RNA, 23 nt, Artificial Sequence
  Synthetic oligonucleotide: BID-6140
cauucagaauccccaggcuguuu

SEQ ID NO: 45940 - RNA, 24 nt, Artificial Sequence
  Synthetic oligonucleotide: BID-6141
acauucagaauccccaggcuguuu

SEQ ID NO: 45941 - RNA, 17 nt, Artificial Sequence
  Synthetic oligonucleotide: BID-6142
guaagcggccgcucuga

SEQ ID NO: 45942 - RNA, 17 nt, Artificial Sequence
  Synthetic oligonucleotide: BID-6143
ccuccuuauggcgcccc

SEQ ID NO: 45943 - RNA, 17 nt, Artificial Sequence
  Synthetic oligonucleotide: BID-6144
caaagcgcggucagagc

SEQ ID NO: 45944 - RNA, 17 nt, Artificial Sequence
  Synthetic oligonucleotide: BID-682
cggcuggaggagcacag

SEQ ID NO: 45945 - RNA, 17 nt, Artificial Sequence
  Synthetic oligonucleotide: BID-6145
uccgccucggaggcggg

SEQ ID NO: 45946 - RNA, 17 nt, Artificial Sequence
  Synthetic oligonucleotide: BID-2441
aaagaccacgguguggg

SEQ ID NO: 45947 - RNA, 17 nt, Artificial Sequence
  Synthetic oligonucleotide: BID-6146
cgcggacacggucgacu

SEQ ID NO: 45948 - RNA, 20 nt, Artificial Sequence
  Synthetic oligonucleotide: BID-6147
ccaguaagcggccgcucuga

SEQ ID NO: 45949 - RNA, 20 nt, Artificial Sequence
  Synthetic oligonucleotide: BID-6148
cuuccuccuuauggcgcccc

SEQ ID NO: 45950 - RNA, 20 nt, Artificial Sequence
  Synthetic oligonucleotide: BID-6149
ugacaaagcgcggucagagc

SEQ ID NO: 45951 - RNA, 20 nt, Artificial Sequence
  Synthetic oligonucleotide: BID-680
ggccggcuggaggagcacag

SEQ ID NO: 45952 - RNA, 20 nt, Artificial Sequence
  Synthetic oligonucleotide: BID-6150
ggguccgccucggaggcggg

SEQ ID NO: 45953 - RNA, 20 nt, Artificial Sequence
  Synthetic oligonucleotide: BID-2169
uggaaagaccacgguguggg

SEQ ID NO: 45954 - RNA, 20 nt, Artificial Sequence
  Synthetic oligonucleotide: BID-6151
gcgcgcggacacggucgacu

SEQ ID NO: 45955 - RNA, 20 nt, Artificial Sequence
  Synthetic oligonucleotide: BID-1379
agcccagccacuugguggcu

SEQ ID NO: 45956 - RNA, 17 nt, Artificial Sequence
  Synthetic oligonucleotide: BID-2317
guccucuccacguggcc

SEQ ID NO: 45957 - RNA, 17 nt, Artificial Sequence
  Synthetic oligonucleotide: BID-1465
ccagccacuugguggcu

SEQ ID NO: 45958 - RNA, 20 nt, Artificial Sequence
  Synthetic oligonucleotide: BID-2046
uguguccucuccacguggcc

SEQ ID NO: 45959 - RNA, 17 nt, Artificial Sequence
  Synthetic oligonucleotide: BID-1983
aauuauuuggauaucaa

SEQ ID NO: 45960 - RNA, 17 nt, Artificial Sequence
  Synthetic oligonucleotide: BID-6152
cggcagcgcagugagaa

SEQ ID NO: 45961 - RNA, 17 nt, Artificial Sequence
  Synthetic oligonucleotide: BID-6153
uuccaucuccacccaca

SEQ ID NO: 45962 - RNA, 17 nt, Artificial Sequence
  Synthetic oligonucleotide: BID-6154
agauucucugcaaccca

SEQ ID NO: 45963 - RNA, 17 nt, Artificial Sequence
  Synthetic oligonucleotide: BID-737
cuguuccagaaacagcc

SEQ ID NO: 45964 - RNA, 17 nt, Artificial Sequence
  Synthetic oligonucleotide: BID-6155
cagccccucaccagucc

SEQ ID NO: 45965 - RNA, 17 nt, Artificial Sequence
  Synthetic oligonucleotide: BID-1982
gccgcugggauaauucc

SEQ ID NO: 45966 - RNA, 17 nt, Artificial Sequence
  Synthetic oligonucleotide: BID-6156
cacccugggccgcaggc

SEQ ID NO: 45967 - RNA, 17 nt, Artificial Sequence
  Synthetic oligonucleotide: BID-6157
agagcucuuccaccuuc

SEQ ID NO: 45968 - RNA, 17 nt, Artificial Sequence
  Synthetic oligonucleotide: BID-1985
ugggagugaugaccgag

SEQ ID NO: 45969 - RNA, 17 nt, Artificial Sequence
  Synthetic oligonucleotide: BID-1978
gacuggugaggggcugg

SEQ ID NO: 45970 - RNA, 20 nt, Artificial Sequence
  Synthetic oligonucleotide: BID-1981
uuuaauuauuuggauaucaa

SEQ ID NO: 45971 - RNA, 20 nt, Artificial Sequence
  Synthetic oligonucleotide: BID-6158
agccggcagcgcagugagaa

SEQ ID NO: 45972 - RNA, 20 nt, Artificial Sequence
  Synthetic oligonucleotide: BID-6159
acauuccaucuccacccaca

SEQ ID NO: 45973 - RNA, 20 nt, Artificial Sequence
  Synthetic oligonucleotide: BID-6160
gccagauucucugcaaccca

SEQ ID NO: 45974 - RNA, 20 nt, Artificial Sequence
  Synthetic oligonucleotide: BID-700
agacuguuccagaaacagcc

SEQ ID NO: 45975 - RNA, 20 nt, Artificial Sequence
  Synthetic oligonucleotide: BID-6161
gcccagccccucaccagucc

SEQ ID NO: 45976 - RNA, 20 nt, Artificial Sequence
  Synthetic oligonucleotide: BID-1980
agcgccgcugggauaauucc

SEQ ID NO: 45977 - RNA, 20 nt, Artificial Sequence
  Synthetic oligonucleotide: BID-6162
gcacacccugggccgcaggc

SEQ ID NO: 45978 - RNA, 20 nt, Artificial Sequence
  Synthetic oligonucleotide: BID-6163
cccagagcucuuccaccuuc

SEQ ID NO: 45979 - RNA, 20 nt, Artificial Sequence
  Synthetic oligonucleotide: BID-1984
cccugggagugaugaccgag

SEQ ID NO: 45980 - RNA, 20 nt, Artificial Sequence
  Synthetic oligonucleotide: BID-1976
agggacuggugaggggcugg

SEQ ID NO: 45981 - RNA, 17 nt, Artificial Sequence
  Synthetic oligonucleotide: CTLA4-73
ccgcucccauaaagcca

SEQ ID NO: 45982 - RNA, 17 nt, Artificial Sequence
  Synthetic oligonucleotide: CTLA4-109
guagagucccgugucca

SEQ ID NO: 45983 - RNA, 17 nt, Artificial Sequence
  Synthetic oligonucleotide: CTLA4-95
ugcggcaaccuacauga

SEQ ID NO: 45984 - RNA, 17 nt, Artificial Sequence
  Synthetic oligonucleotide: CTLA4-192
ccuaugcccagguagua

SEQ ID NO: 45985 - RNA, 17 nt, Artificial Sequence
  Synthetic oligonucleotide: CTLA4-1371
cccaccgccauacuacc

SEQ ID NO: 45986 - RNA, 17 nt, Artificial Sequence
  Synthetic oligonucleotide: CTLA4-193
uuccguugccuaugccc

SEQ ID NO: 45987 - RNA, 17 nt, Artificial Sequence
  Synthetic oligonucleotide: CTLA4-92
ggugacagugcuucggc

SEQ ID NO: 45988 - RNA, 17 nt, Artificial Sequence
  Synthetic oligonucleotide: CTLA4-144
uuaugggagcgguguuc

SEQ ID NO: 45989 - RNA, 17 nt, Artificial Sequence
  Synthetic oligonucleotide: CTLA4-83
caugcuagcaaugcacg

SEQ ID NO: 45990 - RNA, 17 nt, Artificial Sequence
  Synthetic oligonucleotide: CTLA4-97
cggcaaccuacaugaug

SEQ ID NO: 45991 - RNA, 17 nt, Artificial Sequence
  Synthetic oligonucleotide: CTLA4-111
ucaguccuuggauagug

SEQ ID NO: 45992 - RNA, 17 nt, Artificial Sequence
  Synthetic oligonucleotide: CTLA4-1372
ccauacuaccugggcau

SEQ ID NO: 45993 - RNA, 17 nt, Artificial Sequence
  Synthetic oligonucleotide: CTLA4-96
gcggcaaccuacaugau

SEQ ID NO: 45994 - RNA, 17 nt, Artificial Sequence
  Synthetic oligonucleotide: CTLA4-142
gcaagccauggcuuuau

SEQ ID NO: 45995 - RNA, 17 nt, Artificial Sequence
  Synthetic oligonucleotide: CTLA4-1373
ccaccgccauacuaccu

SEQ ID NO: 45996 - RNA, 17 nt, Artificial Sequence
  Synthetic oligonucleotide: CTLA4-1374
ccagguaguauggcggu

SEQ ID NO: 45997 - RNA, 17 nt, Artificial Sequence
  Synthetic oligonucleotide: CTLA4-91
uccgggugacagugcuu

SEQ ID NO: 45998 - RNA, 20 nt, Artificial Sequence
  Synthetic oligonucleotide: CTLA4-145
uacuaccugggcauaggcaa

SEQ ID NO: 45999 - RNA, 20 nt, Artificial Sequence
  Synthetic oligonucleotide: CTLA4-4
ccuuggauuucagcggcaca

SEQ ID NO: 46000 - RNA, 20 nt, Artificial Sequence
  Synthetic oligonucleotide: CTLA4-1
acaccgcucccauaaagcca

SEQ ID NO: 46001 - RNA, 20 nt, Artificial Sequence
  Synthetic oligonucleotide: CTLA4-67
ccuugugccgcugaaaucca

SEQ ID NO: 46002 - RNA, 20 nt, Artificial Sequence
  Synthetic oligonucleotide: CTLA4-56
ggccacgugcauugcuagca

SEQ ID NO: 46003 - RNA, 20 nt, Artificial Sequence
  Synthetic oligonucleotide: CTLA4-23
cugugcggcaaccuacauga

SEQ ID NO: 46004 - RNA, 20 nt, Artificial Sequence
  Synthetic oligonucleotide: CTLA4-169
uugccuaugcccagguagua

SEQ ID NO: 46005 - RNA, 20 nt, Artificial Sequence
  Synthetic oligonucleotide: CTLA4-27
cuagaugauuccaucugcac

SEQ ID NO: 46006 - RNA, 20 nt, Artificial Sequence
  Synthetic oligonucleotide: CTLA4-59
cacucaccuuugcagaagac

SEQ ID NO: 46007 - RNA, 20 nt, Artificial Sequence
  Synthetic oligonucleotide: CTLA4-13
ggcccagccugcugugguac

SEQ ID NO: 46008 - RNA, 20 nt, Artificial Sequence
  Synthetic oligonucleotide: CTLA4-1375
guacccaccgccauacuacc

SEQ ID NO: 46009 - RNA, 20 nt, Artificial Sequence
  Synthetic oligonucleotide: CTLA4-170
ggguuccguugccuaugccc

SEQ ID NO: 46010 - RNA, 20 nt, Artificial Sequence
  Synthetic oligonucleotide: CTLA4-20
ccgggugacagugcuucggc

SEQ ID NO: 46011 - RNA, 20 nt, Artificial Sequence
  Synthetic oligonucleotide: CTLA4-72
gcuuuaugggagcgguguuc

SEQ ID NO: 46012 - RNA, 20 nt, Artificial Sequence
  Synthetic oligonucleotide: CTLA4-71
aagccauggcuuuaugggag

SEQ ID NO: 46013 - RNA, 20 nt, Artificial Sequence
  Synthetic oligonucleotide: CTLA4-11
uuccaugcuagcaaugcacg

SEQ ID NO: 46014 - RNA, 20 nt, Artificial Sequence
  Synthetic oligonucleotide: CTLA4-1376
ccuaugcccagguaguaugg

SEQ ID NO: 46015 - RNA, 20 nt, Artificial Sequence
  Synthetic oligonucleotide: CTLA4-25
gugcggcaaccuacaugaug

SEQ ID NO: 46016 - RNA, 20 nt, Artificial Sequence
  Synthetic oligonucleotide: CTLA4-39
cccucaguccuuggauagug

SEQ ID NO: 46017 - RNA, 20 nt, Artificial Sequence
  Synthetic oligonucleotide: CTLA4-1377
ccgccauacuaccugggcau

SEQ ID NO: 46018 - RNA, 20 nt, Artificial Sequence
  Synthetic oligonucleotide: CTLA4-24
ugugcggcaaccuacaugau

SEQ ID NO: 46019 - RNA, 20 nt, Artificial Sequence
  Synthetic oligonucleotide: CTLA4-1378
uacccaccgccauacuaccu

SEQ ID NO: 46020 - RNA, 20 nt, Artificial Sequence
  Synthetic oligonucleotide: CTLA4-2
cauaaagccauggcuugccu

SEQ ID NO: 46021 - RNA, 20 nt, Artificial Sequence
  Synthetic oligonucleotide: CTLA4-1379
ugcccagguaguauggcggu

SEQ ID NO: 46022 - RNA, 20 nt, Artificial Sequence
  Synthetic oligonucleotide: CTLA4-45
caacucauuccccaucaugu

SEQ ID NO: 46023 - RNA, 20 nt, Artificial Sequence
  Synthetic oligonucleotide: CTLA4-19
agguccgggugacagugcuu

SEQ ID NO: 46024 - RNA, 17 nt, Artificial Sequence
  Synthetic oligonucleotide: CTLA4-130
agcauggaaaagccaaa

SEQ ID NO: 46025 - RNA, 17 nt, Artificial Sequence
  Synthetic oligonucleotide: CTLA4-196
gugucaacucagugaaa

SEQ ID NO: 46026 - RNA, 17 nt, Artificial Sequence
  Synthetic oligonucleotide: CTLA4-129
uagcauggaaaagccaa

SEQ ID NO: 46027 - RNA, 17 nt, Artificial Sequence
  Synthetic oligonucleotide: CTLA4-157
uaccugggcauaggcaa

SEQ ID NO: 46028 - RNA, 17 nt, Artificial Sequence
  Synthetic oligonucleotide: CTLA4-80
aucccugucuucugcaa

SEQ ID NO: 46029 - RNA, 17 nt, Artificial Sequence
  Synthetic oligonucleotide: CTLA4-76
uggauuucagcggcaca

SEQ ID NO: 46030 - RNA, 17 nt, Artificial Sequence
  Synthetic oligonucleotide: CTLA4-132
caccuuugcagaagaca

SEQ ID NO: 46031 - RNA, 17 nt, Artificial Sequence
  Synthetic oligonucleotide: CTLA4-105
acugagggccauggaca

SEQ ID NO: 46032 - RNA, 17 nt, Artificial Sequence
  Synthetic oligonucleotide: CTLA4-140
aaauccaaggcaagcca

SEQ ID NO: 46033 - RNA, 17 nt, Artificial Sequence
  Synthetic oligonucleotide: CTLA4-104
ccaaggacugagggcca

SEQ ID NO: 46034 - RNA, 17 nt, Artificial Sequence
  Synthetic oligonucleotide: CTLA4-139
ugugccgcugaaaucca

SEQ ID NO: 46035 - RNA, 17 nt, Artificial Sequence
  Synthetic oligonucleotide: CTLA4-101
gugaaccucacuaucca

SEQ ID NO: 46036 - RNA, 17 nt, Artificial Sequence
  Synthetic oligonucleotide: CTLA4-128
cacgugcauugcuagca

SEQ ID NO: 46037 - RNA, 17 nt, Artificial Sequence
  Synthetic oligonucleotide: CTLA4-107
gggacucuacaucugca

SEQ ID NO: 46038 - RNA, 17 nt, Artificial Sequence
  Synthetic oligonucleotide: CTLA4-98
agaugauuccaucugca

SEQ ID NO: 46039 - RNA, 17 nt, Artificial Sequence
  Synthetic oligonucleotide: CTLA4-135
aaaaacaggagagugca

SEQ ID NO: 46040 - RNA, 17 nt, Artificial Sequence
  Synthetic oligonucleotide: CTLA4-82
cuuuuggagcaugaaga

SEQ ID NO: 46041 - RNA, 17 nt, Artificial Sequence
  Synthetic oligonucleotide: CTLA4-114
ggaggugcccgugcaga

SEQ ID NO: 46042 - RNA, 17 nt, Artificial Sequence
  Synthetic oligonucleotide: CTLA4-116
gauggaaucaucuagga

SEQ ID NO: 46043 - RNA, 17 nt, Artificial Sequence
  Synthetic oligonucleotide: CTLA4-103
cacuauccaaggacuga

SEQ ID NO: 46044 - RNA, 17 nt, Artificial Sequence
  Synthetic oligonucleotide: CTLA4-141
ggcaagccauggcuuua

SEQ ID NO: 46045 - RNA, 17 nt, Artificial Sequence
  Synthetic oligonucleotide: CTLA4-133
ugaagagaagaaaaaac

SEQ ID NO: 46046 - RNA, 17 nt, Artificial Sequence
  Synthetic oligonucleotide: CTLA4-106
cugagggccauggacac

SEQ ID NO: 46047 - RNA, 17 nt, Artificial Sequence
  Synthetic oligonucleotide: CTLA4-112
guucacuugauuuccac

SEQ ID NO: 46048 - RNA, 17 nt, Artificial Sequence
  Synthetic oligonucleotide: CTLA4-99
gaugauuccaucugcac

SEQ ID NO: 46049 - RNA, 17 nt, Artificial Sequence
  Synthetic oligonucleotide: CTLA4-131
ucaccuuugcagaagac

SEQ ID NO: 46050 - RNA, 17 nt, Artificial Sequence
  Synthetic oligonucleotide: CTLA4-85
ccagccugcugugguac

SEQ ID NO: 46051 - RNA, 17 nt, Artificial Sequence
  Synthetic oligonucleotide: CTLA4-77
caaggcucagcugaacc

SEQ ID NO: 46052 - RNA, 17 nt, Artificial Sequence
  Synthetic oligonucleotide: CTLA4-118
cacagacuucagucacc

SEQ ID NO: 46053 - RNA, 17 nt, Artificial Sequence
  Synthetic oligonucleotide: CTLA4-119
gccgaagcacugucacc

SEQ ID NO: 46054 - RNA, 17 nt, Artificial Sequence
  Synthetic oligonucleotide: CTLA4-79
accuggcuaccaggacc

SEQ ID NO: 46055 - RNA, 17 nt, Artificial Sequence
  Synthetic oligonucleotide: CTLA4-78
agcugaaccuggcuacc

SEQ ID NO: 46056 - RNA, 17 nt, Artificial Sequence
  Synthetic oligonucleotide: CTLA4-93
ucggcaggcugacagcc

SEQ ID NO: 46057 - RNA, 17 nt, Artificial Sequence
  Synthetic oligonucleotide: CTLA4-138
gccagguccugguagcc

SEQ ID NO: 46058 - RNA, 17 nt, Artificial Sequence
  Synthetic oligonucleotide: CTLA4-136
caggagagugcagggcc

SEQ ID NO: 46059 - RNA, 17 nt, Artificial Sequence
  Synthetic oligonucleotide: CTLA4-121
accucaguggcuuugcc

SEQ ID NO: 46060 - RNA, 17 nt, Artificial Sequence
  Synthetic oligonucleotide: CTLA4-87
ugugaguaugcaucucc

SEQ ID NO: 46061 - RNA, 17 nt, Artificial Sequence
  Synthetic oligonucleotide: CTLA4-137
agugcagggccaggucc

SEQ ID NO: 46062 - RNA, 17 nt, Artificial Sequence
  Synthetic oligonucleotide: CTLA4-90
caaagccacugaggucc

SEQ ID NO: 46063 - RNA, 17 nt, Artificial Sequence
  Synthetic oligonucleotide: CTLA4-122
auacucacacacaaagc

SEQ ID NO: 46064 - RNA, 17 nt, Artificial Sequence
  Synthetic oligonucleotide: CTLA4-125
cuggccaguaccacagc

SEQ ID NO: 46065 - RNA, 17 nt, Artificial Sequence
  Synthetic oligonucleotide: CTLA4-126
ccaguaccacagcaggc

SEQ ID NO: 46066 - RNA, 17 nt, Artificial Sequence
  Synthetic oligonucleotide: CTLA4-124
ggcgaugccucggcugc

SEQ ID NO: 46067 - RNA, 17 nt, Artificial Sequence
  Synthetic oligonucleotide: CTLA4-134
aaaaaacaggagagugc

SEQ ID NO: 46068 - RNA, 17 nt, Artificial Sequence
  Synthetic oligonucleotide: CTLA4-195
caccaauuacauaaauc

SEQ ID NO: 46069 - RNA, 17 nt, Artificial Sequence
  Synthetic oligonucleotide: CTLA4-89
gcaaagccacugagguc

SEQ ID NO: 46070 - RNA, 17 nt, Artificial Sequence
  Synthetic oligonucleotide: CTLA4-100
ugcacgggcaccuccag

SEQ ID NO: 46071 - RNA, 17 nt, Artificial Sequence
  Synthetic oligonucleotide: CTLA4-120
ugucacccggaccucag

SEQ ID NO: 46072 - RNA, 17 nt, Artificial Sequence
  Synthetic oligonucleotide: CTLA4-75
cuugccuuggauuucag

SEQ ID NO: 46073 - RNA, 17 nt, Artificial Sequence
  Synthetic oligonucleotide: CTLA4-143
ccauggcuuuaugggag

SEQ ID NO: 46074 - RNA, 17 nt, Artificial Sequence
  Synthetic oligonucleotide: CTLA4-86
guacuggccagcagccg

SEQ ID NO: 46075 - RNA, 17 nt, Artificial Sequence
  Synthetic oligonucleotide: CTLA4-108
acucuacaucugcaagg

SEQ ID NO: 46076 - RNA, 17 nt, Artificial Sequence
  Synthetic oligonucleotide: CTLA4-1380
cccagguaguauggcgg

SEQ ID NO: 46077 - RNA, 17 nt, Artificial Sequence
  Synthetic oligonucleotide: CTLA4-1381
augcccagguaguaugg

SEQ ID NO: 46078 - RNA, 17 nt, Artificial Sequence
  Synthetic oligonucleotide: CTLA4-113
cacuugauuuccacugg

SEQ ID NO: 46079 - RNA, 17 nt, Artificial Sequence
  Synthetic oligonucleotide: CTLA4-88
uccaggcaaagccacug

SEQ ID NO: 46080 - RNA, 17 nt, Artificial Sequence
  Synthetic oligonucleotide: CTLA4-102
ucacuauccaaggacug

SEQ ID NO: 46081 - RNA, 17 nt, Artificial Sequence
  Synthetic oligonucleotide: CTLA4-84
cguggcccagccugcug

SEQ ID NO: 46082 - RNA, 17 nt, Artificial Sequence
  Synthetic oligonucleotide: CTLA4-94
ggugacugaagucugug

SEQ ID NO: 46083 - RNA, 17 nt, Artificial Sequence
  Synthetic oligonucleotide: CTLA4-158
acccagauuuauguaau

SEQ ID NO: 46084 - RNA, 17 nt, Artificial Sequence
  Synthetic oligonucleotide: CTLA4-123
caaagcuggcgaugccu

SEQ ID NO: 46085 - RNA, 17 nt, Artificial Sequence
  Synthetic oligonucleotide: CTLA4-74
aaagccauggcuugccu

SEQ ID NO: 46086 - RNA, 17 nt, Artificial Sequence
  Synthetic oligonucleotide: CTLA4-110
ccauggcccucaguccu

SEQ ID NO: 46087 - RNA, 17 nt, Artificial Sequence
  Synthetic oligonucleotide: CTLA4-127
caguaccacagcaggcu

SEQ ID NO: 46088 - RNA, 17 nt, Artificial Sequence
  Synthetic oligonucleotide: CTLA4-194
accaauuacauaaaucu

SEQ ID NO: 46089 - RNA, 17 nt, Artificial Sequence
  Synthetic oligonucleotide: CTLA4-115
ugcagauggaaucaucu

SEQ ID NO: 46090 - RNA, 17 nt, Artificial Sequence
  Synthetic oligonucleotide: CTLA4-117
cucauuccccaucaugu

SEQ ID NO: 46091 - RNA, 17 nt, Artificial Sequence
  Synthetic oligonucleotide: CTLA4-81
aaggugagugagacuuu

SEQ ID NO: 46092 - RNA, 20 nt, Artificial Sequence
  Synthetic oligonucleotide: CTLA4-58
gcuagcauggaaaagccaaa

SEQ ID NO: 46093 - RNA, 20 nt, Artificial Sequence
  Synthetic oligonucleotide: CTLA4-57
ugcuagcauggaaaagccaa

SEQ ID NO: 46094 - RNA, 20 nt, Artificial Sequence
  Synthetic oligonucleotide: CTLA4-8
uucaucccugucuucugcaa

SEQ ID NO: 46095 - RNA, 20 nt, Artificial Sequence
  Synthetic oligonucleotide: CTLA4-60
acucaccuuugcagaagaca

SEQ ID NO: 46096 - RNA, 20 nt, Artificial Sequence
  Synthetic oligonucleotide: CTLA4-33
aggacugagggccauggaca

SEQ ID NO: 46097 - RNA, 20 nt, Artificial Sequence
  Synthetic oligonucleotide: CTLA4-68
cugaaauccaaggcaagcca

SEQ ID NO: 46098 - RNA, 20 nt, Artificial Sequence
  Synthetic oligonucleotide: CTLA4-32
uauccaaggacugagggcca

SEQ ID NO: 46099 - RNA, 20 nt, Artificial Sequence
  Synthetic oligonucleotide: CTLA4-29
caagugaaccucacuaucca

SEQ ID NO: 46100 - RNA, 20 nt, Artificial Sequence
  Synthetic oligonucleotide: CTLA4-37
gauguagagucccgugucca

SEQ ID NO: 46101 - RNA, 20 nt, Artificial Sequence
  Synthetic oligonucleotide: CTLA4-35
cacgggacucuacaucugca

SEQ ID NO: 46102 - RNA, 20 nt, Artificial Sequence
  Synthetic oligonucleotide: CTLA4-26
ccuagaugauuccaucugca

SEQ ID NO: 46103 - RNA, 20 nt, Artificial Sequence
  Synthetic oligonucleotide: CTLA4-63
agaaaaaacaggagagugca

SEQ ID NO: 46104 - RNA, 20 nt, Artificial Sequence
  Synthetic oligonucleotide: CTLA4-10
agacuuuuggagcaugaaga

SEQ ID NO: 46105 - RNA, 20 nt, Artificial Sequence
  Synthetic oligonucleotide: CTLA4-42
acuggaggugcccgugcaga

SEQ ID NO: 46106 - RNA, 20 nt, Artificial Sequence
  Synthetic oligonucleotide: CTLA4-44
gcagauggaaucaucuagga

SEQ ID NO: 46107 - RNA, 20 nt, Artificial Sequence
  Synthetic oligonucleotide: CTLA4-31
ccucacuauccaaggacuga

SEQ ID NO: 46108 - RNA, 20 nt, Artificial Sequence
  Synthetic oligonucleotide: CTLA4-69
caaggcaagccauggcuuua

SEQ ID NO: 46109 - RNA, 20 nt, Artificial Sequence
  Synthetic oligonucleotide: CTLA4-61
ggaugaagagaagaaaaaac

SEQ ID NO: 46110 - RNA, 20 nt, Artificial Sequence
  Synthetic oligonucleotide: CTLA4-34
ggacugagggccauggacac

SEQ ID NO: 46111 - RNA, 20 nt, Artificial Sequence
  Synthetic oligonucleotide: CTLA4-40
gagguucacuugauuuccac

SEQ ID NO: 46112 - RNA, 20 nt, Artificial Sequence
  Synthetic oligonucleotide: CTLA4-5
gcacaaggcucagcugaacc

SEQ ID NO: 46113 - RNA, 20 nt, Artificial Sequence
  Synthetic oligonucleotide: CTLA4-46
ccgcacagacuucagucacc

SEQ ID NO: 46114 - RNA, 20 nt, Artificial Sequence
  Synthetic oligonucleotide: CTLA4-47
ccugccgaagcacugucacc

SEQ ID NO: 46115 - RNA, 20 nt, Artificial Sequence
  Synthetic oligonucleotide: CTLA4-7
ugaaccuggcuaccaggacc

SEQ ID NO: 46116 - RNA, 20 nt, Artificial Sequence
  Synthetic oligonucleotide: CTLA4-6
cucagcugaaccuggcuacc

SEQ ID NO: 46117 - RNA, 20 nt, Artificial Sequence
  Synthetic oligonucleotide: CTLA4-21
gcuucggcaggcugacagcc

SEQ ID NO: 46118 - RNA, 20 nt, Artificial Sequence
  Synthetic oligonucleotide: CTLA4-66
agggccagguccugguagcc

SEQ ID NO: 46119 - RNA, 20 nt, Artificial Sequence
  Synthetic oligonucleotide: CTLA4-64
aaacaggagagugcagggcc

SEQ ID NO: 46120 - RNA, 20 nt, Artificial Sequence
  Synthetic oligonucleotide: CTLA4-49
cggaccucaguggcuuugcc

SEQ ID NO: 46121 - RNA, 20 nt, Artificial Sequence
  Synthetic oligonucleotide: CTLA4-15
gugugugaguaugcaucucc

SEQ ID NO: 46122 - RNA, 20 nt, Artificial Sequence
  Synthetic oligonucleotide: CTLA4-65
gagagugcagggccaggucc

SEQ ID NO: 46123 - RNA, 20 nt, Artificial Sequence
  Synthetic oligonucleotide: CTLA4-18
aggcaaagccacugaggucc

SEQ ID NO: 46124 - RNA, 20 nt, Artificial Sequence
  Synthetic oligonucleotide: CTLA4-50
ugcauacucacacacaaagc

SEQ ID NO: 46125 - RNA, 20 nt, Artificial Sequence
  Synthetic oligonucleotide: CTLA4-53
cugcuggccaguaccacagc

SEQ ID NO: 46126 - RNA, 20 nt, Artificial Sequence
  Synthetic oligonucleotide: CTLA4-54
uggccaguaccacagcaggc

SEQ ID NO: 46127 - RNA, 20 nt, Artificial Sequence
  Synthetic oligonucleotide: CTLA4-52
gcuggcgaugccucggcugc

SEQ ID NO: 46128 - RNA, 20 nt, Artificial Sequence
  Synthetic oligonucleotide: CTLA4-62
aagaaaaaacaggagagugc

SEQ ID NO: 46129 - RNA, 20 nt, Artificial Sequence
  Synthetic oligonucleotide: CTLA4-172
gcucaccaauuacauaaauc

SEQ ID NO: 46130 - RNA, 20 nt, Artificial Sequence
  Synthetic oligonucleotide: CTLA4-17
caggcaaagccacugagguc

SEQ ID NO: 46131 - RNA, 20 nt, Artificial Sequence
  Synthetic oligonucleotide: CTLA4-28
aucugcacgggcaccuccag

SEQ ID NO: 46132 - RNA, 20 nt, Artificial Sequence
  Synthetic oligonucleotide: CTLA4-48
cacugucacccggaccucag

SEQ ID NO: 46133 - RNA, 20 nt, Artificial Sequence
  Synthetic oligonucleotide: CTLA4-3
uggcuugccuuggauuucag

SEQ ID NO: 46134 - RNA, 20 nt, Artificial Sequence
  Synthetic oligonucleotide: CTLA4-14
gugguacuggccagcagccg

SEQ ID NO: 46135 - RNA, 20 nt, Artificial Sequence
  Synthetic oligonucleotide: CTLA4-36
gggacucuacaucugcaagg

SEQ ID NO: 46136 - RNA, 20 nt, Artificial Sequence
  Synthetic oligonucleotide: CTLA4-1382
augcccagguaguauggcgg

SEQ ID NO: 46137 - RNA, 20 nt, Artificial Sequence
  Synthetic oligonucleotide: CTLA4-41
guucacuugauuuccacugg

SEQ ID NO: 46138 - RNA, 20 nt, Artificial Sequence
  Synthetic oligonucleotide: CTLA4-16
aucuccaggcaaagccacug

SEQ ID NO: 46139 - RNA, 20 nt, Artificial Sequence
  Synthetic oligonucleotide: CTLA4-30
accucacuauccaaggacug

SEQ ID NO: 46140 - RNA, 20 nt, Artificial Sequence
  Synthetic oligonucleotide: CTLA4-12
gcacguggcccagccugcug

SEQ ID NO: 46141 - RNA, 20 nt, Artificial Sequence
  Synthetic oligonucleotide: CTLA4-22
ccaggugacugaagucugug

SEQ ID NO: 46142 - RNA, 20 nt, Artificial Sequence
  Synthetic oligonucleotide: CTLA4-146
ggaacccagauuuauguaau

SEQ ID NO: 46143 - RNA, 20 nt, Artificial Sequence
  Synthetic oligonucleotide: CTLA4-70
aaggcaagccauggcuuuau

SEQ ID NO: 46144 - RNA, 20 nt, Artificial Sequence
  Synthetic oligonucleotide: CTLA4-51
acacaaagcuggcgaugccu

SEQ ID NO: 46145 - RNA, 20 nt, Artificial Sequence
  Synthetic oligonucleotide: CTLA4-38
uguccauggcccucaguccu

SEQ ID NO: 46146 - RNA, 20 nt, Artificial Sequence
  Synthetic oligonucleotide: CTLA4-55
ggccaguaccacagcaggcu

SEQ ID NO: 46147 - RNA, 20 nt, Artificial Sequence
  Synthetic oligonucleotide: CTLA4-171
cucaccaauuacauaaaucu

SEQ ID NO: 46148 - RNA, 20 nt, Artificial Sequence
  Synthetic oligonucleotide: CTLA4-43
ccgugcagauggaaucaucu

SEQ ID NO: 46149 - RNA, 20 nt, Artificial Sequence
  Synthetic oligonucleotide: CTLA4-9
gcaaaggugagugagacuuu

SEQ ID NO: 46150 - RNA, 17 nt, Artificial Sequence
  Synthetic oligonucleotide: CTLA4-163
uguuucuuugagcaaaa

SEQ ID NO: 46151 - RNA, 17 nt, Artificial Sequence
  Synthetic oligonucleotide: CTLA4-215
gacucucuucuucauaa

SEQ ID NO: 46152 - RNA, 17 nt, Artificial Sequence
  Synthetic oligonucleotide: CTLA4-167
gaagcccucuuacaaca

SEQ ID NO: 46153 - RNA, 17 nt, Artificial Sequence
  Synthetic oligonucleotide: CTLA4-198
aagucagaaucugggca

SEQ ID NO: 46154 - RNA, 17 nt, Artificial Sequence
  Synthetic oligonucleotide: CTLA4-203
ccgaacuaacugcugca

SEQ ID NO: 46155 - RNA, 17 nt, Artificial Sequence
  Synthetic oligonucleotide: CTLA4-205
agaccccuguuguaaga

SEQ ID NO: 46156 - RNA, 17 nt, Artificial Sequence
  Synthetic oligonucleotide: CTLA4-165
ggugaguguggugcuga

SEQ ID NO: 46157 - RNA, 17 nt, Artificial Sequence
  Synthetic oligonucleotide: CTLA4-214
aaugguuucucaauuga

SEQ ID NO: 46158 - RNA, 17 nt, Artificial Sequence
  Synthetic oligonucleotide: CTLA4-212
uugaugggaauaaaaua

SEQ ID NO: 46159 - RNA, 17 nt, Artificial Sequence
  Synthetic oligonucleotide: CTLA4-166
agaagcccucuuacaac

SEQ ID NO: 46160 - RNA, 17 nt, Artificial Sequence
  Synthetic oligonucleotide: CTLA4-200
aggaggaagucagaauc

SEQ ID NO: 46161 - RNA, 17 nt, Artificial Sequence
  Synthetic oligonucleotide: CTLA4-159
auucugacuuccuccuc

SEQ ID NO: 46162 - RNA, 17 nt, Artificial Sequence
  Synthetic oligonucleotide: CTLA4-211
aauugcuuuucacauuc

SEQ ID NO: 46163 - RNA, 17 nt, Artificial Sequence
  Synthetic oligonucleotide: CTLA4-161
cuugcagcaguuaguuc

SEQ ID NO: 46164 - RNA, 17 nt, Artificial Sequence
  Synthetic oligonucleotide: CTLA4-197
gaaucugggcacgguuc

SEQ ID NO: 46165 - RNA, 17 nt, Artificial Sequence
  Synthetic oligonucleotide: CTLA4-206
uagaccccuguuguaag

SEQ ID NO: 46166 - RNA, 17 nt, Artificial Sequence
  Synthetic oligonucleotide: CTLA4-168
aagcccucuuacaacag

SEQ ID NO: 46167 - RNA, 17 nt, Artificial Sequence
  Synthetic oligonucleotide: CTLA4-202
cugcugcaaggauccag

SEQ ID NO: 46168 - RNA, 17 nt, Artificial Sequence
  Synthetic oligonucleotide: CTLA4-162
uugcagcaguuaguucg

SEQ ID NO: 46169 - RNA, 17 nt, Artificial Sequence
  Synthetic oligonucleotide: CTLA4-201
cugcaaggauccagagg

SEQ ID NO: 46170 - RNA, 17 nt, Artificial Sequence
  Synthetic oligonucleotide: CTLA4-207
cauucuggcucuguugg

SEQ ID NO: 46171 - RNA, 17 nt, Artificial Sequence
  Synthetic oligonucleotide: CTLA4-164
gagcaaaauggugagug

SEQ ID NO: 46172 - RNA, 17 nt, Artificial Sequence
  Synthetic oligonucleotide: CTLA4-204
ucaaagaaacagcugug

SEQ ID NO: 46173 - RNA, 17 nt, Artificial Sequence
  Synthetic oligonucleotide: CTLA4-208
acauucuggcucuguug

SEQ ID NO: 46174 - RNA, 17 nt, Artificial Sequence
  Synthetic oligonucleotide: CTLA4-213
augguuucucaauugau

SEQ ID NO: 46175 - RNA, 17 nt, Artificial Sequence
  Synthetic oligonucleotide: CTLA4-199
ggaggaagucagaaucu

SEQ ID NO: 46176 - RNA, 17 nt, Artificial Sequence
  Synthetic oligonucleotide: CTLA4-210
ucacauucuggcucugu

SEQ ID NO: 46177 - RNA, 17 nt, Artificial Sequence
  Synthetic oligonucleotide: CTLA4-160
ccuugcagcaguuaguu

SEQ ID NO: 46178 - RNA, 17 nt, Artificial Sequence
  Synthetic oligonucleotide: CTLA4-209
cacauucuggcucuguu

SEQ ID NO: 46179 - RNA, 20 nt, Artificial Sequence
  Synthetic oligonucleotide: CTLA4-151
agcuguuucuuugagcaaaa

SEQ ID NO: 46180 - RNA, 20 nt, Artificial Sequence
  Synthetic oligonucleotide: CTLA4-191
auggacucucuucuucauaa

SEQ ID NO: 46181 - RNA, 20 nt, Artificial Sequence
  Synthetic oligonucleotide: CTLA4-155
aaagaagcccucuuacaaca

SEQ ID NO: 46182 - RNA, 20 nt, Artificial Sequence
  Synthetic oligonucleotide: CTLA4-174
aggaagucagaaucugggca

SEQ ID NO: 46183 - RNA, 20 nt, Artificial Sequence
  Synthetic oligonucleotide: CTLA4-179
accccgaacuaacugcugca

SEQ ID NO: 46184 - RNA, 20 nt, Artificial Sequence
  Synthetic oligonucleotide: CTLA4-181
cauagaccccuguuguaaga

SEQ ID NO: 46185 - RNA, 20 nt, Artificial Sequence
  Synthetic oligonucleotide: CTLA4-153
aauggugaguguggugcuga

SEQ ID NO: 46186 - RNA, 20 nt, Artificial Sequence
  Synthetic oligonucleotide: CTLA4-190
cauaaugguuucucaauuga

SEQ ID NO: 46187 - RNA, 20 nt, Artificial Sequence
  Synthetic oligonucleotide: CTLA4-188
caauugaugggaauaaaaua

SEQ ID NO: 46188 - RNA, 20 nt, Artificial Sequence
  Synthetic oligonucleotide: CTLA4-154
aaaagaagcccucuuacaac

SEQ ID NO: 46189 - RNA, 20 nt, Artificial Sequence
  Synthetic oligonucleotide: CTLA4-176
cagaggaggaagucagaauc

SEQ ID NO: 46190 - RNA, 20 nt, Artificial Sequence
  Synthetic oligonucleotide: CTLA4-147
cagauucugacuuccuccuc

SEQ ID NO: 46191 - RNA, 20 nt, Artificial Sequence
  Synthetic oligonucleotide: CTLA4-187
ugaaauugcuuuucacauuc

SEQ ID NO: 46192 - RNA, 20 nt, Artificial Sequence
  Synthetic oligonucleotide: CTLA4-149
auccuugcagcaguuaguuc

SEQ ID NO: 46193 - RNA, 20 nt, Artificial Sequence
  Synthetic oligonucleotide: CTLA4-173
ucagaaucugggcacgguuc

SEQ ID NO: 46194 - RNA, 20 nt, Artificial Sequence
  Synthetic oligonucleotide: CTLA4-182
acauagaccccuguuguaag

SEQ ID NO: 46195 - RNA, 20 nt, Artificial Sequence
  Synthetic oligonucleotide: CTLA4-156
aagaagcccucuuacaacag

SEQ ID NO: 46196 - RNA, 20 nt, Artificial Sequence
  Synthetic oligonucleotide: CTLA4-178
uaacugcugcaaggauccag

SEQ ID NO: 46197 - RNA, 20 nt, Artificial Sequence
  Synthetic oligonucleotide: CTLA4-150
uccuugcagcaguuaguucg

SEQ ID NO: 46198 - RNA, 20 nt, Artificial Sequence
  Synthetic oligonucleotide: CTLA4-177
cugcugcaaggauccagagg

SEQ ID NO: 46199 - RNA, 20 nt, Artificial Sequence
  Synthetic oligonucleotide: CTLA4-183
ucacauucuggcucuguugg

SEQ ID NO: 46200 - RNA, 20 nt, Artificial Sequence
  Synthetic oligonucleotide: CTLA4-152
uuugagcaaaauggugagug

SEQ ID NO: 46201 - RNA, 20 nt, Artificial Sequence
  Synthetic oligonucleotide: CTLA4-180
ugcucaaagaaacagcugug

SEQ ID NO: 46202 - RNA, 20 nt, Artificial Sequence
  Synthetic oligonucleotide: CTLA4-184
uucacauucuggcucuguug

SEQ ID NO: 46203 - RNA, 20 nt, Artificial Sequence
  Synthetic oligonucleotide: CTLA4-189
auaaugguuucucaauugau

SEQ ID NO: 46204 - RNA, 20 nt, Artificial Sequence
  Synthetic oligonucleotide: CTLA4-175
agaggaggaagucagaaucu

SEQ ID NO: 46205 - RNA, 20 nt, Artificial Sequence
  Synthetic oligonucleotide: CTLA4-186
uuuucacauucuggcucugu

SEQ ID NO: 46206 - RNA, 20 nt, Artificial Sequence
  Synthetic oligonucleotide: CTLA4-148
gauccuugcagcaguuaguu

SEQ ID NO: 46207 - RNA, 20 nt, Artificial Sequence
  Synthetic oligonucleotide: CTLA4-185
uuucacauucuggcucuguu

SEQ ID NO: 46208 - RNA, 21 nt, Artificial Sequence
  Synthetic oligonucleotide: CTLA4-1383
cacuggaggugcccgugcaga

SEQ ID NO: 46209 - RNA, 22 nt, Artificial Sequence
  Synthetic oligonucleotide: CTLA4-1384
ccacuggaggugcccgugcaga

SEQ ID NO: 46210 - RNA, 23 nt, Artificial Sequence
  Synthetic oligonucleotide: CTLA4-1385
uccacuggaggugcccgugcaga

SEQ ID NO: 46211 - RNA, 24 nt, Artificial Sequence
  Synthetic oligonucleotide: CTLA4-1386
uuccacuggaggugcccgugcaga

SEQ ID NO: 46212 - RNA, 18 nt, Artificial Sequence
  Synthetic oligonucleotide: CTLA4-1387
cucaccuuugcagaagac

SEQ ID NO: 46213 - RNA, 19 nt, Artificial Sequence
  Synthetic oligonucleotide: CTLA4-1388
acucaccuuugcagaagac

SEQ ID NO: 46214 - RNA, 20 nt, Artificial Sequence
  Synthetic oligonucleotide: CTLA4-59
cacucaccuuugcagaagac

SEQ ID NO: 46215 - RNA, 21 nt, Artificial Sequence
  Synthetic oligonucleotide: CTLA4-1389
ucacucaccuuugcagaagac

SEQ ID NO: 46216 - RNA, 22 nt, Artificial Sequence
  Synthetic oligonucleotide: CTLA4-1390
cucacucaccuuugcagaagac

SEQ ID NO: 46217 - RNA, 23 nt, Artificial Sequence
  Synthetic oligonucleotide: CTLA4-1391
ucucacucaccuuugcagaagac

SEQ ID NO: 46218 - RNA, 24 nt, Artificial Sequence
  Synthetic oligonucleotide: CTLA4-1392
gucucacucaccuuugcagaagac

SEQ ID NO: 46219 - RNA, 21 nt, Artificial Sequence
  Synthetic oligonucleotide: CTLA4-1393
cguguccauggcccucagucc

SEQ ID NO: 46220 - RNA, 22 nt, Artificial Sequence
  Synthetic oligonucleotide: CTLA4-1394
ccguguccauggcccucagucc

SEQ ID NO: 46221 - RNA, 23 nt, Artificial Sequence
  Synthetic oligonucleotide: CTLA4-1395
cccguguccauggcccucagucc

SEQ ID NO: 46222 - RNA, 24 nt, Artificial Sequence
  Synthetic oligonucleotide: CTLA4-1396
ucccguguccauggcccucagucc

SEQ ID NO: 46223 - RNA, 18 nt, Artificial Sequence
  Synthetic oligonucleotide: CTLA4-1397
ugcccagguaguauggcg

SEQ ID NO: 46224 - RNA, 19 nt, Artificial Sequence
  Synthetic oligonucleotide: CTLA4-1398
augcccagguaguauggcg

SEQ ID NO: 46225 - RNA, 20 nt, Artificial Sequence
  Synthetic oligonucleotide: CTLA4-1399
uaugcccagguaguauggcg

SEQ ID NO: 46226 - RNA, 21 nt, Artificial Sequence
  Synthetic oligonucleotide: CTLA4-1400
cuaugcccagguaguauggcg

SEQ ID NO: 46227 - RNA, 22 nt, Artificial Sequence
  Synthetic oligonucleotide: CTLA4-1401
ccuaugcccagguaguauggcg

SEQ ID NO: 46228 - RNA, 23 nt, Artificial Sequence
  Synthetic oligonucleotide: CTLA4-1402
gccuaugcccagguaguauggcg

SEQ ID NO: 46229 - RNA, 24 nt, Artificial Sequence
  Synthetic oligonucleotide: CTLA4-1403
ugccuaugcccagguaguauggcg

SEQ ID NO: 46230 - RNA, 18 nt, Artificial Sequence
  Synthetic oligonucleotide: CTLA4-1404
cucaccaauuacauaaau

SEQ ID NO: 46231 - RNA, 19 nt, Artificial Sequence
  Synthetic oligonucleotide: CTLA4-1405
gcucaccaauuacauaaau

SEQ ID NO: 46232 - RNA, 20 nt, Artificial Sequence
  Synthetic oligonucleotide: CTLA4-394
ugcucaccaauuacauaaau

SEQ ID NO: 46233 - RNA, 21 nt, Artificial Sequence
  Synthetic oligonucleotide: CTLA4-1406
uugcucaccaauuacauaaau

SEQ ID NO: 46234 - RNA, 22 nt, Artificial Sequence
  Synthetic oligonucleotide: CTLA4-1407
uuugcucaccaauuacauaaau

SEQ ID NO: 46235 - RNA, 23 nt, Artificial Sequence
  Synthetic oligonucleotide: CTLA4-1408
cuuugcucaccaauuacauaaau

SEQ ID NO: 46236 - RNA, 24 nt, Artificial Sequence
  Synthetic oligonucleotide: CTLA4-1409
gcuuugcucaccaauuacauaaau

SEQ ID NO: 46237 - RNA, 21 nt, Artificial Sequence
  Synthetic oligonucleotide: CTLA4-1410
uuggugagcaaagccauuuca

SEQ ID NO: 46238 - RNA, 22 nt, Artificial Sequence
  Synthetic oligonucleotide: CTLA4-1411
auuggugagcaaagccauuuca

SEQ ID NO: 46239 - RNA, 23 nt, Artificial Sequence
  Synthetic oligonucleotide: CTLA4-1412
aauuggugagcaaagccauuuca

SEQ ID NO: 46240 - RNA, 24 nt, Artificial Sequence
  Synthetic oligonucleotide: CTLA4-1413
uaauuggugagcaaagccauuuca

SEQ ID NO: 46241 - RNA, 21 nt, Artificial Sequence
  Synthetic oligonucleotide: CTLA4-1414
cggcaaccuacaugaugggga

SEQ ID NO: 46242 - RNA, 22 nt, Artificial Sequence
  Synthetic oligonucleotide: CTLA4-1415
gcggcaaccuacaugaugggga

SEQ ID NO: 46243 - RNA, 23 nt, Artificial Sequence
  Synthetic oligonucleotide: CTLA4-1416
ugcggcaaccuacaugaugggga

SEQ ID NO: 46244 - RNA, 24 nt, Artificial Sequence
  Synthetic oligonucleotide: CTLA4-1417
gugcggcaaccuacaugaugggga

SEQ ID NO: 46245 - RNA, 18 nt, Artificial Sequence
  Synthetic oligonucleotide: CTLA4-1418
auaaagccauggcuugcc

SEQ ID NO: 46246 - RNA, 19 nt, Artificial Sequence
  Synthetic oligonucleotide: CTLA4-1419
cauaaagccauggcuugcc

SEQ ID NO: 46247 - RNA, 20 nt, Artificial Sequence
  Synthetic oligonucleotide: CTLA4-216
ccauaaagccauggcuugcc

SEQ ID NO: 46248 - RNA, 21 nt, Artificial Sequence
  Synthetic oligonucleotide: CTLA4-1420
cccauaaagccauggcuugcc

SEQ ID NO: 46249 - RNA, 22 nt, Artificial Sequence
  Synthetic oligonucleotide: CTLA4-1421
ucccauaaagccauggcuugcc

SEQ ID NO: 46250 - RNA, 23 nt, Artificial Sequence
  Synthetic oligonucleotide: CTLA4-1422
cucccauaaagccauggcuugcc

SEQ ID NO: 46251 - RNA, 24 nt, Artificial Sequence
  Synthetic oligonucleotide: CTLA4-1423
gcucccauaaagccauggcuugcc

SEQ ID NO: 46252 - RNA, 18 nt, Artificial Sequence
  Synthetic oligonucleotide: CTLA4-1424
gcggcaaccuacaugaug

SEQ ID NO: 46253 - RNA, 19 nt, Artificial Sequence
  Synthetic oligonucleotide: CTLA4-1425
ugcggcaaccuacaugaug

SEQ ID NO: 46254 - RNA, 20 nt, Artificial Sequence
  Synthetic oligonucleotide: CTLA4-25
gugcggcaaccuacaugaug

SEQ ID NO: 46255 - RNA, 21 nt, Artificial Sequence
  Synthetic oligonucleotide: CTLA4-1426
ugugcggcaaccuacaugaug

SEQ ID NO: 46256 - RNA, 22 nt, Artificial Sequence
  Synthetic oligonucleotide: CTLA4-1427
cugugcggcaaccuacaugaug

SEQ ID NO: 46257 - RNA, 23 nt, Artificial Sequence
  Synthetic oligonucleotide: CTLA4-1428
ucugugcggcaaccuacaugaug

SEQ ID NO: 46258 - RNA, 24 nt, Artificial Sequence
  Synthetic oligonucleotide: CTLA4-1429
gucugugcggcaaccuacaugaug

SEQ ID NO: 46259 - RNA, 21 nt, Artificial Sequence
  Synthetic oligonucleotide: CTLA4-1430
uccaggcaaagccacugaggu

SEQ ID NO: 46260 - RNA, 22 nt, Artificial Sequence
  Synthetic oligonucleotide: CTLA4-1431
cuccaggcaaagccacugaggu

SEQ ID NO: 46261 - RNA, 23 nt, Artificial Sequence
  Synthetic oligonucleotide: CTLA4-1432
ucuccaggcaaagccacugaggu

SEQ ID NO: 46262 - RNA, 24 nt, Artificial Sequence
  Synthetic oligonucleotide: CTLA4-1433
aucuccaggcaaagccacugaggu

SEQ ID NO: 46263 - RNA, 18 nt, Artificial Sequence
  Synthetic oligonucleotide: CTLA4-1434
gcaucgccagcuuugugu

SEQ ID NO: 46264 - RNA, 19 nt, Artificial Sequence
  Synthetic oligonucleotide: CTLA4-1435
ggcaucgccagcuuugugu

SEQ ID NO: 46265 - RNA, 20 nt, Artificial Sequence
  Synthetic oligonucleotide: CTLA4-225
aggcaucgccagcuuugugu

SEQ ID NO: 46266 - RNA, 21 nt, Artificial Sequence
  Synthetic oligonucleotide: CTLA4-1436
gaggcaucgccagcuuugugu

SEQ ID NO: 46267 - RNA, 22 nt, Artificial Sequence
  Synthetic oligonucleotide: CTLA4-1437
cgaggcaucgccagcuuugugu

SEQ ID NO: 46268 - RNA, 23 nt, Artificial Sequence
  Synthetic oligonucleotide: CTLA4-1438
ccgaggcaucgccagcuuugugu

SEQ ID NO: 46269 - RNA, 24 nt, Artificial Sequence
  Synthetic oligonucleotide: CTLA4-1439
gccgaggcaucgccagcuuugugu

SEQ ID NO: 46270 - RNA, 18 nt, Artificial Sequence
  Synthetic oligonucleotide: CTLA4-1440
uggaggugcccgugcaga

SEQ ID NO: 46271 - RNA, 19 nt, Artificial Sequence
  Synthetic oligonucleotide: CTLA4-1441
cuggaggugcccgugcaga

SEQ ID NO: 46272 - RNA, 20 nt, Artificial Sequence
  Synthetic oligonucleotide: CTLA4-42
acuggaggugcccgugcaga

SEQ ID NO: 46273 - RNA, 18 nt, Artificial Sequence
  Synthetic oligonucleotide: CTLA4-1442
guccauggcccucagucc

SEQ ID NO: 46274 - RNA, 19 nt, Artificial Sequence
  Synthetic oligonucleotide: CTLA4-1443
uguccauggcccucagucc

SEQ ID NO: 46275 - RNA, 20 nt, Artificial Sequence
  Synthetic oligonucleotide: CTLA4-309
guguccauggcccucagucc

SEQ ID NO: 46276 - RNA, 18 nt, Artificial Sequence
  Synthetic oligonucleotide: CTLA4-1444
gaagagaagaaaaaacag

SEQ ID NO: 46277 - RNA, 19 nt, Artificial Sequence
  Synthetic oligonucleotide: CTLA4-1445
ugaagagaagaaaaaacag

SEQ ID NO: 46278 - RNA, 20 nt, Artificial Sequence
  Synthetic oligonucleotide: CTLA4-282
augaagagaagaaaaaacag

SEQ ID NO: 46279 - RNA, 21 nt, Artificial Sequence
  Synthetic oligonucleotide: CTLA4-1446
gaugaagagaagaaaaaacag

SEQ ID NO: 46280 - RNA, 22 nt, Artificial Sequence
  Synthetic oligonucleotide: CTLA4-1447
ggaugaagagaagaaaaaacag

SEQ ID NO: 46281 - RNA, 23 nt, Artificial Sequence
  Synthetic oligonucleotide: CTLA4-1448
gggaugaagagaagaaaaaacag

SEQ ID NO: 46282 - RNA, 24 nt, Artificial Sequence
  Synthetic oligonucleotide: CTLA4-1449
agggaugaagagaagaaaaaacag

SEQ ID NO: 46283 - RNA, 18 nt, Artificial Sequence
  Synthetic oligonucleotide: CTLA4-1450
agcuccaccuugcagaug

SEQ ID NO: 46284 - RNA, 19 nt, Artificial Sequence
  Synthetic oligonucleotide: CTLA4-1451
gagcuccaccuugcagaug

SEQ ID NO: 46285 - RNA, 20 nt, Artificial Sequence
  Synthetic oligonucleotide: CTLA4-310
ugagcuccaccuugcagaug

SEQ ID NO: 46286 - RNA, 21 nt, Artificial Sequence
  Synthetic oligonucleotide: CTLA4-1452
augagcuccaccuugcagaug

SEQ ID NO: 46287 - RNA, 22 nt, Artificial Sequence
  Synthetic oligonucleotide: CTLA4-1453
caugagcuccaccuugcagaug

SEQ ID NO: 46288 - RNA, 23 nt, Artificial Sequence
  Synthetic oligonucleotide: CTLA4-1454
acaugagcuccaccuugcagaug

SEQ ID NO: 46289 - RNA, 24 nt, Artificial Sequence
  Synthetic oligonucleotide: CTLA4-1455
uacaugagcuccaccuugcagaug

SEQ ID NO: 46290 - RNA, 18 nt, Artificial Sequence
  Synthetic oligonucleotide: CTLA4-1456
gugagcaaagccauuuca

SEQ ID NO: 46291 - RNA, 19 nt, Artificial Sequence
  Synthetic oligonucleotide: CTLA4-1457
ggugagcaaagccauuuca

SEQ ID NO: 46292 - RNA, 20 nt, Artificial Sequence
  Synthetic oligonucleotide: CTLA4-349
uggugagcaaagccauuuca

SEQ ID NO: 46293 - RNA, 18 nt, Artificial Sequence
  Synthetic oligonucleotide: CTLA4-1458
caaccuacaugaugggga

SEQ ID NO: 46294 - RNA, 19 nt, Artificial Sequence
  Synthetic oligonucleotide: CTLA4-1459
gcaaccuacaugaugggga

SEQ ID NO: 46295 - RNA, 20 nt, Artificial Sequence
  Synthetic oligonucleotide: CTLA4-233
ggcaaccuacaugaugggga

SEQ ID NO: 46296 - RNA, 18 nt, Artificial Sequence
  Synthetic oligonucleotide: CTLA4-1460
ucccugucuucugcaaag

SEQ ID NO: 46297 - RNA, 19 nt, Artificial Sequence
  Synthetic oligonucleotide: CTLA4-1461
aucccugucuucugcaaag

SEQ ID NO: 46298 - RNA, 20 nt, Artificial Sequence
  Synthetic oligonucleotide: CTLA4-219
caucccugucuucugcaaag

SEQ ID NO: 46299 - RNA, 21 nt, Artificial Sequence
  Synthetic oligonucleotide: CTLA4-1462
ucaucccugucuucugcaaag

SEQ ID NO: 46300 - RNA, 22 nt, Artificial Sequence
  Synthetic oligonucleotide: CTLA4-1463
uucaucccugucuucugcaaag

SEQ ID NO: 46301 - RNA, 23 nt, Artificial Sequence
  Synthetic oligonucleotide: CTLA4-1464
cuucaucccugucuucugcaaag

SEQ ID NO: 46302 - RNA, 24 nt, Artificial Sequence
  Synthetic oligonucleotide: CTLA4-1465
ucuucaucccugucuucugcaaag

SEQ ID NO: 46303 - RNA, 18 nt, Artificial Sequence
  Synthetic oligonucleotide: CTLA4-1466
aggcaaagccacugaggu

SEQ ID NO: 46304 - RNA, 19 nt, Artificial Sequence
  Synthetic oligonucleotide: CTLA4-1467
caggcaaagccacugaggu

SEQ ID NO: 46305 - RNA, 20 nt, Artificial Sequence
  Synthetic oligonucleotide: CTLA4-227
ccaggcaaagccacugaggu

SEQ ID NO: 46306 - RNA, 18 nt, Artificial Sequence
  Synthetic oligonucleotide: CTLA4-1468
gaugaagagaagaaaaaa

SEQ ID NO: 46307 - RNA, 19 nt, Artificial Sequence
  Synthetic oligonucleotide: CTLA4-1469
ggaugaagagaagaaaaaa

SEQ ID NO: 46308 - RNA, 20 nt, Artificial Sequence
  Synthetic oligonucleotide: CTLA4-284
gggaugaagagaagaaaaaa

SEQ ID NO: 46309 - RNA, 21 nt, Artificial Sequence
  Synthetic oligonucleotide: CTLA4-1470
agggaugaagagaagaaaaaa

SEQ ID NO: 46310 - RNA, 22 nt, Artificial Sequence
  Synthetic oligonucleotide: CTLA4-1471
cagggaugaagagaagaaaaaa

SEQ ID NO: 46311 - RNA, 23 nt, Artificial Sequence
  Synthetic oligonucleotide: CTLA4-1472
acagggaugaagagaagaaaaaa

SEQ ID NO: 46312 - RNA, 24 nt, Artificial Sequence
  Synthetic oligonucleotide: CTLA4-1473
gacagggaugaagagaagaaaaaa

SEQ ID NO: 46313 - RNA, 18 nt, Artificial Sequence
  Synthetic oligonucleotide: CTLA4-1474
uagcauggaaaagccaaa

SEQ ID NO: 46314 - RNA, 19 nt, Artificial Sequence
  Synthetic oligonucleotide: CTLA4-1475
cuagcauggaaaagccaaa

SEQ ID NO: 46315 - RNA, 20 nt, Artificial Sequence
  Synthetic oligonucleotide: CTLA4-58
gcuagcauggaaaagccaaa

SEQ ID NO: 46316 - RNA, 21 nt, Artificial Sequence
  Synthetic oligonucleotide: CTLA4-1476
ugcuagcauggaaaagccaaa

SEQ ID NO: 46317 - RNA, 22 nt, Artificial Sequence
  Synthetic oligonucleotide: CTLA4-1477
uugcuagcauggaaaagccaaa

SEQ ID NO: 46318 - RNA, 23 nt, Artificial Sequence
  Synthetic oligonucleotide: CTLA4-1478
auugcuagcauggaaaagccaaa

SEQ ID NO: 46319 - RNA, 24 nt, Artificial Sequence
  Synthetic oligonucleotide: CTLA4-1479
cauugcuagcauggaaaagccaaa

SEQ ID NO: 46320 - RNA, 18 nt, Artificial Sequence
  Synthetic oligonucleotide: CTLA4-1480
cuagcauggaaaagccaa

SEQ ID NO: 46321 - RNA, 19 nt, Artificial Sequence
  Synthetic oligonucleotide: CTLA4-1481
gcuagcauggaaaagccaa

SEQ ID NO: 46322 - RNA, 20 nt, Artificial Sequence
  Synthetic oligonucleotide: CTLA4-57
ugcuagcauggaaaagccaa

SEQ ID NO: 46323 - RNA, 21 nt, Artificial Sequence
  Synthetic oligonucleotide: CTLA4-1482
uugcuagcauggaaaagccaa

SEQ ID NO: 46324 - RNA, 22 nt, Artificial Sequence
  Synthetic oligonucleotide: CTLA4-1483
auugcuagcauggaaaagccaa

SEQ ID NO: 46325 - RNA, 23 nt, Artificial Sequence
  Synthetic oligonucleotide: CTLA4-1484
cauugcuagcauggaaaagccaa

SEQ ID NO: 46326 - RNA, 24 nt, Artificial Sequence
  Synthetic oligonucleotide: CTLA4-1485
gcauugcuagcauggaaaagccaa

SEQ ID NO: 46327 - RNA, 18 nt, Artificial Sequence
  Synthetic oligonucleotide: CTLA4-1486
gcagaagacagggaugaa

SEQ ID NO: 46328 - RNA, 19 nt, Artificial Sequence
  Synthetic oligonucleotide: CTLA4-1487
ugcagaagacagggaugaa

SEQ ID NO: 46329 - RNA, 20 nt, Artificial Sequence
  Synthetic oligonucleotide: CTLA4-286
uugcagaagacagggaugaa

SEQ ID NO: 46330 - RNA, 21 nt, Artificial Sequence
  Synthetic oligonucleotide: CTLA4-1488
uuugcagaagacagggaugaa

SEQ ID NO: 46331 - RNA, 22 nt, Artificial Sequence
  Synthetic oligonucleotide: CTLA4-1489
cuuugcagaagacagggaugaa

SEQ ID NO: 46332 - RNA, 23 nt, Artificial Sequence
  Synthetic oligonucleotide: CTLA4-1490
ccuuugcagaagacagggaugaa

SEQ ID NO: 46333 - RNA, 24 nt, Artificial Sequence
  Synthetic oligonucleotide: CTLA4-1491
accuuugcagaagacagggaugaa

SEQ ID NO: 46334 - RNA, 18 nt, Artificial Sequence
  Synthetic oligonucleotide: CTLA4-1492
gcuagcauggaaaagcca

SEQ ID NO: 46335 - RNA, 19 nt, Artificial Sequence
  Synthetic oligonucleotide: CTLA4-1493
ugcuagcauggaaaagcca

SEQ ID NO: 46336 - RNA, 20 nt, Artificial Sequence
  Synthetic oligonucleotide: CTLA4-294
uugcuagcauggaaaagcca

SEQ ID NO: 46337 - RNA, 21 nt, Artificial Sequence
  Synthetic oligonucleotide: CTLA4-1494
auugcuagcauggaaaagcca

SEQ ID NO: 46338 - RNA, 22 nt, Artificial Sequence
  Synthetic oligonucleotide: CTLA4-1495
cauugcuagcauggaaaagcca

SEQ ID NO: 46339 - RNA, 23 nt, Artificial Sequence
  Synthetic oligonucleotide: CTLA4-1496
gcauugcuagcauggaaaagcca

SEQ ID NO: 46340 - RNA, 24 nt, Artificial Sequence
  Synthetic oligonucleotide: CTLA4-1497
ugcauugcuagcauggaaaagcca

SEQ ID NO: 46341 - RNA, 18 nt, Artificial Sequence
  Synthetic oligonucleotide: CTLA4-1498
agguucacuugauuucca

SEQ ID NO: 46342 - RNA, 19 nt, Artificial Sequence
  Synthetic oligonucleotide: CTLA4-1499
gagguucacuugauuucca

SEQ ID NO: 46343 - RNA, 20 nt, Artificial Sequence
  Synthetic oligonucleotide: CTLA4-307
ugagguucacuugauuucca

SEQ ID NO: 46344 - RNA, 21 nt, Artificial Sequence
  Synthetic oligonucleotide: CTLA4-1500
gugagguucacuugauuucca

SEQ ID NO: 46345 - RNA, 22 nt, Artificial Sequence
  Synthetic oligonucleotide: CTLA4-1501
agugagguucacuugauuucca

SEQ ID NO: 46346 - RNA, 23 nt, Artificial Sequence
  Synthetic oligonucleotide: CTLA4-1502
uagugagguucacuugauuucca

SEQ ID NO: 46347 - RNA, 24 nt, Artificial Sequence
  Synthetic oligonucleotide: CTLA4-1503
auagugagguucacuugauuucca

SEQ ID NO: 46348 - RNA, 18 nt, Artificial Sequence
  Synthetic oligonucleotide: CTLA4-1504
ccacgugcauugcuagca

SEQ ID NO: 46349 - RNA, 19 nt, Artificial Sequence
  Synthetic oligonucleotide: CTLA4-1505
gccacgugcauugcuagca

SEQ ID NO: 46350 - RNA, 20 nt, Artificial Sequence
  Synthetic oligonucleotide: CTLA4-56
ggccacgugcauugcuagca

SEQ ID NO: 46351 - RNA, 21 nt, Artificial Sequence
  Synthetic oligonucleotide: CTLA4-1506
gggccacgugcauugcuagca

SEQ ID NO: 46352 - RNA, 22 nt, Artificial Sequence
  Synthetic oligonucleotide: CTLA4-1507
ugggccacgugcauugcuagca

SEQ ID NO: 46353 - RNA, 23 nt, Artificial Sequence
  Synthetic oligonucleotide: CTLA4-1508
cugggccacgugcauugcuagca

SEQ ID NO: 46354 - RNA, 24 nt, Artificial Sequence
  Synthetic oligonucleotide: CTLA4-1509
gcugggccacgugcauugcuagca

SEQ ID NO: 46355 - RNA, 18 nt, Artificial Sequence
  Synthetic oligonucleotide: CTLA4-1510
acucaccuuugcagaaga

SEQ ID NO: 46356 - RNA, 19 nt, Artificial Sequence
  Synthetic oligonucleotide: CTLA4-1511
cacucaccuuugcagaaga

SEQ ID NO: 46357 - RNA, 20 nt, Artificial Sequence
  Synthetic oligonucleotide: CTLA4-290
ucacucaccuuugcagaaga

SEQ ID NO: 46358 - RNA, 21 nt, Artificial Sequence
  Synthetic oligonucleotide: CTLA4-1512
cucacucaccuuugcagaaga

SEQ ID NO: 46359 - RNA, 22 nt, Artificial Sequence
  Synthetic oligonucleotide: CTLA4-1513
ucucacucaccuuugcagaaga

SEQ ID NO: 46360 - RNA, 23 nt, Artificial Sequence
  Synthetic oligonucleotide: CTLA4-1514
gucucacucaccuuugcagaaga

SEQ ID NO: 46361 - RNA, 24 nt, Artificial Sequence
  Synthetic oligonucleotide: CTLA4-1515
agucucacucaccuuugcagaaga

SEQ ID NO: 46362 - RNA, 18 nt, Artificial Sequence
  Synthetic oligonucleotide: CTLA4-1516
gcccucaguccuuggaua

SEQ ID NO: 46363 - RNA, 19 nt, Artificial Sequence
  Synthetic oligonucleotide: CTLA4-1517
ggcccucaguccuuggaua

SEQ ID NO: 46364 - RNA, 20 nt, Artificial Sequence
  Synthetic oligonucleotide: CTLA4-308
uggcccucaguccuuggaua

SEQ ID NO: 46365 - RNA, 21 nt, Artificial Sequence
  Synthetic oligonucleotide: CTLA4-1518
auggcccucaguccuuggaua

SEQ ID NO: 46366 - RNA, 22 nt, Artificial Sequence
  Synthetic oligonucleotide: CTLA4-1519
cauggcccucaguccuuggaua

SEQ ID NO: 46367 - RNA, 23 nt, Artificial Sequence
  Synthetic oligonucleotide: CTLA4-1520
ccauggcccucaguccuuggaua

SEQ ID NO: 46368 - RNA, 24 nt, Artificial Sequence
  Synthetic oligonucleotide: CTLA4-1521
uccauggcccucaguccuuggaua

SEQ ID NO: 46369 - RNA, 18 nt, Artificial Sequence
  Synthetic oligonucleotide: CTLA4-1522
aggcaagccauggcuuua

SEQ ID NO: 46370 - RNA, 19 nt, Artificial Sequence
  Synthetic oligonucleotide: CTLA4-1523
aaggcaagccauggcuuua

SEQ ID NO: 46371 - RNA, 20 nt, Artificial Sequence
  Synthetic oligonucleotide: CTLA4-69
caaggcaagccauggcuuua

SEQ ID NO: 46372 - RNA, 21 nt, Artificial Sequence
  Synthetic oligonucleotide: CTLA4-1524
ccaaggcaagccauggcuuua

SEQ ID NO: 46373 - RNA, 22 nt, Artificial Sequence
  Synthetic oligonucleotide: CTLA4-1525
uccaaggcaagccauggcuuua

SEQ ID NO: 46374 - RNA, 23 nt, Artificial Sequence
  Synthetic oligonucleotide: CTLA4-1526
auccaaggcaagccauggcuuua

SEQ ID NO: 46375 - RNA, 24 nt, Artificial Sequence
  Synthetic oligonucleotide: CTLA4-1527
aauccaaggcaagccauggcuuua

SEQ ID NO: 46376 - RNA, 18 nt, Artificial Sequence
  Synthetic oligonucleotide: CTLA4-1528
augaagagaagaaaaaac

SEQ ID NO: 46377 - RNA, 19 nt, Artificial Sequence
  Synthetic oligonucleotide: CTLA4-1529
gaugaagagaagaaaaaac

SEQ ID NO: 46378 - RNA, 20 nt, Artificial Sequence
  Synthetic oligonucleotide: CTLA4-61
ggaugaagagaagaaaaaac

SEQ ID NO: 46379 - RNA, 21 nt, Artificial Sequence
  Synthetic oligonucleotide: CTLA4-1530
gggaugaagagaagaaaaaac

SEQ ID NO: 46380 - RNA, 22 nt, Artificial Sequence
  Synthetic oligonucleotide: CTLA4-1531
agggaugaagagaagaaaaaac

SEQ ID NO: 46381 - RNA, 23 nt, Artificial Sequence
  Synthetic oligonucleotide: CTLA4-1532
cagggaugaagagaagaaaaaac

SEQ ID NO: 46382 - RNA, 24 nt, Artificial Sequence
  Synthetic oligonucleotide: CTLA4-1533
acagggaugaagagaagaaaaaac

SEQ ID NO: 46383 - RNA, 18 nt, Artificial Sequence
  Synthetic oligonucleotide: CTLA4-1534
gguucacuugauuuccac

SEQ ID NO: 46384 - RNA, 19 nt, Artificial Sequence
  Synthetic oligonucleotide: CTLA4-1535
agguucacuugauuuccac

SEQ ID NO: 46385 - RNA, 20 nt, Artificial Sequence
  Synthetic oligonucleotide: CTLA4-40
gagguucacuugauuuccac

SEQ ID NO: 46386 - RNA, 21 nt, Artificial Sequence
  Synthetic oligonucleotide: CTLA4-1536
ugagguucacuugauuuccac

SEQ ID NO: 46387 - RNA, 22 nt, Artificial Sequence
  Synthetic oligonucleotide: CTLA4-1537
gugagguucacuugauuuccac

SEQ ID NO: 46388 - RNA, 23 nt, Artificial Sequence
  Synthetic oligonucleotide: CTLA4-1538
agugagguucacuugauuuccac

SEQ ID NO: 46389 - RNA, 24 nt, Artificial Sequence
  Synthetic oligonucleotide: CTLA4-1539
uagugagguucacuugauuuccac

SEQ ID NO: 46390 - RNA, 18 nt, Artificial Sequence
  Synthetic oligonucleotide: CTLA4-1540
cugccgaagcacugucac

SEQ ID NO: 46391 - RNA, 19 nt, Artificial Sequence
  Synthetic oligonucleotide: CTLA4-1541
ccugccgaagcacugucac

SEQ ID NO: 46392 - RNA, 20 nt, Artificial Sequence
  Synthetic oligonucleotide: CTLA4-300
gccugccgaagcacugucac

SEQ ID NO: 46393 - RNA, 21 nt, Artificial Sequence
  Synthetic oligonucleotide: CTLA4-1542
agccugccgaagcacugucac

SEQ ID NO: 46394 - RNA, 22 nt, Artificial Sequence
  Synthetic oligonucleotide: CTLA4-1543
cagccugccgaagcacugucac

SEQ ID NO: 46395 - RNA, 23 nt, Artificial Sequence
  Synthetic oligonucleotide: CTLA4-1544
ucagccugccgaagcacugucac

SEQ ID NO: 46396 - RNA, 24 nt, Artificial Sequence
  Synthetic oligonucleotide: CTLA4-1545
gucagccugccgaagcacugucac

SEQ ID NO: 46397 - RNA, 18 nt, Artificial Sequence
  Synthetic oligonucleotide: CTLA4-1546
uaguauggcgguggguac

SEQ ID NO: 46398 - RNA, 19 nt, Artificial Sequence
  Synthetic oligonucleotide: CTLA4-1547
guaguauggcgguggguac

SEQ ID NO: 46399 - RNA, 20 nt, Artificial Sequence
  Synthetic oligonucleotide: CTLA4-1548
gguaguauggcgguggguac

SEQ ID NO: 46400 - RNA, 21 nt, Artificial Sequence
  Synthetic oligonucleotide: CTLA4-1549
agguaguauggcgguggguac

SEQ ID NO: 46401 - RNA, 22 nt, Artificial Sequence
  Synthetic oligonucleotide: CTLA4-1550
cagguaguauggcgguggguac

SEQ ID NO: 46402 - RNA, 23 nt, Artificial Sequence
  Synthetic oligonucleotide: CTLA4-1551
ccagguaguauggcgguggguac

SEQ ID NO: 46403 - RNA, 24 nt, Artificial Sequence
  Synthetic oligonucleotide: CTLA4-1552
cccagguaguauggcgguggguac

SEQ ID NO: 46404 - RNA, 18 nt, Artificial Sequence
  Synthetic oligonucleotide: CTLA4-1553
gaccucaguggcuuugcc

SEQ ID NO: 46405 - RNA, 19 nt, Artificial Sequence
  Synthetic oligonucleotide: CTLA4-1554
ggaccucaguggcuuugcc

SEQ ID NO: 46406 - RNA, 20 nt, Artificial Sequence
  Synthetic oligonucleotide: CTLA4-49
cggaccucaguggcuuugcc

SEQ ID NO: 46407 - RNA, 21 nt, Artificial Sequence
  Synthetic oligonucleotide: CTLA4-1555
ccggaccucaguggcuuugcc

SEQ ID NO: 46408 - RNA, 22 nt, Artificial Sequence
  Synthetic oligonucleotide: CTLA4-1556
cccggaccucaguggcuuugcc

SEQ ID NO: 46409 - RNA, 23 nt, Artificial Sequence
  Synthetic oligonucleotide: CTLA4-1557
acccggaccucaguggcuuugcc

SEQ ID NO: 46410 - RNA, 24 nt, Artificial Sequence
  Synthetic oligonucleotide: CTLA4-1558
cacccggaccucaguggcuuugcc

SEQ ID NO: 46411 - RNA, 18 nt, Artificial Sequence
  Synthetic oligonucleotide: CTLA4-1559
gccacgugcauugcuagc

SEQ ID NO: 46412 - RNA, 19 nt, Artificial Sequence
  Synthetic oligonucleotide: CTLA4-1560
ggccacgugcauugcuagc

SEQ ID NO: 46413 - RNA, 20 nt, Artificial Sequence
  Synthetic oligonucleotide: CTLA4-296
gggccacgugcauugcuagc

SEQ ID NO: 46414 - RNA, 21 nt, Artificial Sequence
  Synthetic oligonucleotide: CTLA4-1561
ugggccacgugcauugcuagc

SEQ ID NO: 46415 - RNA, 22 nt, Artificial Sequence
  Synthetic oligonucleotide: CTLA4-1562
cugggccacgugcauugcuagc

SEQ ID NO: 46416 - RNA, 23 nt, Artificial Sequence
  Synthetic oligonucleotide: CTLA4-1563
gcugggccacgugcauugcuagc

SEQ ID NO: 46417 - RNA, 24 nt, Artificial Sequence
  Synthetic oligonucleotide: CTLA4-1564
ggcugggccacgugcauugcuagc

SEQ ID NO: 46418 - RNA, 18 nt, Artificial Sequence
  Synthetic oligonucleotide: CTLA4-1565
ggaccucaguggcuuugc

SEQ ID NO: 46419 - RNA, 19 nt, Artificial Sequence
  Synthetic oligonucleotide: CTLA4-1566
cggaccucaguggcuuugc

SEQ ID NO: 46420 - RNA, 20 nt, Artificial Sequence
  Synthetic oligonucleotide: CTLA4-299
ccggaccucaguggcuuugc

SEQ ID NO: 46421 - RNA, 21 nt, Artificial Sequence
  Synthetic oligonucleotide: CTLA4-1567
cccggaccucaguggcuuugc

SEQ ID NO: 46422 - RNA, 22 nt, Artificial Sequence
  Synthetic oligonucleotide: CTLA4-1568
acccggaccucaguggcuuugc

SEQ ID NO: 46423 - RNA, 23 nt, Artificial Sequence
  Synthetic oligonucleotide: CTLA4-1569
cacccggaccucaguggcuuugc

SEQ ID NO: 46424 - RNA, 24 nt, Artificial Sequence
  Synthetic oligonucleotide: CTLA4-1570
ucacccggaccucaguggcuuugc

SEQ ID NO: 46425 - RNA, 18 nt, Artificial Sequence
  Synthetic oligonucleotide: CTLA4-1571
cgugcagauggaaucauc

SEQ ID NO: 46426 - RNA, 19 nt, Artificial Sequence
  Synthetic oligonucleotide: CTLA4-1572
ccgugcagauggaaucauc

SEQ ID NO: 46427 - RNA, 20 nt, Artificial Sequence
  Synthetic oligonucleotide: CTLA4-303
cccgugcagauggaaucauc

SEQ ID NO: 46428 - RNA, 21 nt, Artificial Sequence
  Synthetic oligonucleotide: CTLA4-1573
gcccgugcagauggaaucauc

SEQ ID NO: 46429 - RNA, 22 nt, Artificial Sequence
  Synthetic oligonucleotide: CTLA4-1574
ugcccgugcagauggaaucauc

SEQ ID NO: 46430 - RNA, 23 nt, Artificial Sequence
  Synthetic oligonucleotide: CTLA4-1575
gugcccgugcagauggaaucauc

SEQ ID NO: 46431 - RNA, 24 nt, Artificial Sequence
  Synthetic oligonucleotide: CTLA4-1576
ggugcccgugcagauggaaucauc

SEQ ID NO: 46432 - RNA, 18 nt, Artificial Sequence
  Synthetic oligonucleotide: CTLA4-1577
cuggaggugcccgugcag

SEQ ID NO: 46433 - RNA, 19 nt, Artificial Sequence
  Synthetic oligonucleotide: CTLA4-1578
acuggaggugcccgugcag

SEQ ID NO: 46434 - RNA, 20 nt, Artificial Sequence
  Synthetic oligonucleotide: CTLA4-305
cacuggaggugcccgugcag

SEQ ID NO: 46435 - RNA, 21 nt, Artificial Sequence
  Synthetic oligonucleotide: CTLA4-1579
ccacuggaggugcccgugcag

SEQ ID NO: 46436 - RNA, 22 nt, Artificial Sequence
  Synthetic oligonucleotide: CTLA4-1580
uccacuggaggugcccgugcag

SEQ ID NO: 46437 - RNA, 23 nt, Artificial Sequence
  Synthetic oligonucleotide: CTLA4-1581
uuccacuggaggugcccgugcag

SEQ ID NO: 46438 - RNA, 24 nt, Artificial Sequence
  Synthetic oligonucleotide: CTLA4-1582
uuuccacuggaggugcccgugcag

SEQ ID NO: 46439 - RNA, 18 nt, Artificial Sequence
  Synthetic oligonucleotide: CTLA4-1583
ccugguagccagguucag

SEQ ID NO: 46440 - RNA, 19 nt, Artificial Sequence
  Synthetic oligonucleotide: CTLA4-1584
uccugguagccagguucag

SEQ ID NO: 46441 - RNA, 20 nt, Artificial Sequence
  Synthetic oligonucleotide: CTLA4-280
guccugguagccagguucag

SEQ ID NO: 46442 - RNA, 21 nt, Artificial Sequence
  Synthetic oligonucleotide: CTLA4-1585
gguccugguagccagguucag

SEQ ID NO: 46443 - RNA, 22 nt, Artificial Sequence
  Synthetic oligonucleotide: CTLA4-1586
agguccugguagccagguucag

SEQ ID NO: 46444 - RNA, 23 nt, Artificial Sequence
  Synthetic oligonucleotide: CTLA4-1587
cagguccugguagccagguucag

SEQ ID NO: 46445 - RNA, 24 nt, Artificial Sequence
  Synthetic oligonucleotide: CTLA4-1588
ccagguccugguagccagguucag

SEQ ID NO: 46446 - RNA, 18 nt, Artificial Sequence
  Synthetic oligonucleotide: CTLA4-1589
gaagacagggaugaagag

SEQ ID NO: 46447 - RNA, 19 nt, Artificial Sequence
  Synthetic oligonucleotide: CTLA4-1590
agaagacagggaugaagag

SEQ ID NO: 46448 - RNA, 20 nt, Artificial Sequence
  Synthetic oligonucleotide: CTLA4-285
cagaagacagggaugaagag

SEQ ID NO: 46449 - RNA, 21 nt, Artificial Sequence
  Synthetic oligonucleotide: CTLA4-1591
gcagaagacagggaugaagag

SEQ ID NO: 46450 - RNA, 22 nt, Artificial Sequence
  Synthetic oligonucleotide: CTLA4-1592
ugcagaagacagggaugaagag

SEQ ID NO: 46451 - RNA, 23 nt, Artificial Sequence
  Synthetic oligonucleotide: CTLA4-1593
uugcagaagacagggaugaagag

SEQ ID NO: 46452 - RNA, 24 nt, Artificial Sequence
  Synthetic oligonucleotide: CTLA4-1594
uuugcagaagacagggaugaagag

SEQ ID NO: 46453 - RNA, 18 nt, Artificial Sequence
  Synthetic oligonucleotide: CTLA4-1595
cagcugagccuugugccg

SEQ ID NO: 46454 - RNA, 19 nt, Artificial Sequence
  Synthetic oligonucleotide: CTLA4-1596
ucagcugagccuugugccg

SEQ ID NO: 46455 - RNA, 20 nt, Artificial Sequence
  Synthetic oligonucleotide: CTLA4-279
uucagcugagccuugugccg

SEQ ID NO: 46456 - RNA, 21 nt, Artificial Sequence
  Synthetic oligonucleotide: CTLA4-1597
guucagcugagccuugugccg

SEQ ID NO: 46457 - RNA, 22 nt, Artificial Sequence
  Synthetic oligonucleotide: CTLA4-1598
gguucagcugagccuugugccg

SEQ ID NO: 46458 - RNA, 23 nt, Artificial Sequence
  Synthetic oligonucleotide: CTLA4-1599
agguucagcugagccuugugccg

SEQ ID NO: 46459 - RNA, 24 nt, Artificial Sequence
  Synthetic oligonucleotide: CTLA4-1600
cagguucagcugagccuugugccg

SEQ ID NO: 46460 - RNA, 18 nt, Artificial Sequence
  Synthetic oligonucleotide: CTLA4-1601
ggccaguaccacagcagg

SEQ ID NO: 46461 - RNA, 19 nt, Artificial Sequence
  Synthetic oligonucleotide: CTLA4-1602
uggccaguaccacagcagg

SEQ ID NO: 46462 - RNA, 20 nt, Artificial Sequence
  Synthetic oligonucleotide: CTLA4-297
cuggccaguaccacagcagg

SEQ ID NO: 46463 - RNA, 21 nt, Artificial Sequence
  Synthetic oligonucleotide: CTLA4-1603
gcuggccaguaccacagcagg

SEQ ID NO: 46464 - RNA, 22 nt, Artificial Sequence
  Synthetic oligonucleotide: CTLA4-1604
ugcuggccaguaccacagcagg

SEQ ID NO: 46465 - RNA, 23 nt, Artificial Sequence
  Synthetic oligonucleotide: CTLA4-1605
cugcuggccaguaccacagcagg

SEQ ID NO: 46466 - RNA, 24 nt, Artificial Sequence
  Synthetic oligonucleotide: CTLA4-1606
gcugcuggccaguaccacagcagg

SEQ ID NO: 46467 - RNA, 18 nt, Artificial Sequence
  Synthetic oligonucleotide: CTLA4-1607
ccuuugcagaagacaggg

SEQ ID NO: 46468 - RNA, 19 nt, Artificial Sequence
  Synthetic oligonucleotide: CTLA4-1608
accuuugcagaagacaggg

SEQ ID NO: 46469 - RNA, 20 nt, Artificial Sequence
  Synthetic oligonucleotide: CTLA4-288
caccuuugcagaagacaggg

SEQ ID NO: 46470 - RNA, 21 nt, Artificial Sequence
  Synthetic oligonucleotide: CTLA4-1609
ucaccuuugcagaagacaggg

SEQ ID NO: 46471 - RNA, 22 nt, Artificial Sequence
  Synthetic oligonucleotide: CTLA4-1610
cucaccuuugcagaagacaggg

SEQ ID NO: 46472 - RNA, 23 nt, Artificial Sequence
  Synthetic oligonucleotide: CTLA4-1611
acucaccuuugcagaagacaggg

SEQ ID NO: 46473 - RNA, 24 nt, Artificial Sequence
  Synthetic oligonucleotide: CTLA4-1612
cacucaccuuugcagaagacaggg

SEQ ID NO: 46474 - RNA, 18 nt, Artificial Sequence
  Synthetic oligonucleotide: CTLA4-1613
uugcagaagacagggaug

SEQ ID NO: 46475 - RNA, 19 nt, Artificial Sequence
  Synthetic oligonucleotide: CTLA4-1614
uuugcagaagacagggaug

SEQ ID NO: 46476 - RNA, 20 nt, Artificial Sequence
  Synthetic oligonucleotide: CTLA4-287
cuuugcagaagacagggaug

SEQ ID NO: 46477 - RNA, 21 nt, Artificial Sequence
  Synthetic oligonucleotide: CTLA4-1615
ccuuugcagaagacagggaug

SEQ ID NO: 46478 - RNA, 22 nt, Artificial Sequence
  Synthetic oligonucleotide: CTLA4-1616
accuuugcagaagacagggaug

SEQ ID NO: 46479 - RNA, 23 nt, Artificial Sequence
  Synthetic oligonucleotide: CTLA4-1617
caccuuugcagaagacagggaug

SEQ ID NO: 46480 - RNA, 24 nt, Artificial Sequence
  Synthetic oligonucleotide: CTLA4-1618
ucaccuuugcagaagacagggaug

SEQ ID NO: 46481 - RNA, 18 nt, Artificial Sequence
  Synthetic oligonucleotide: CTLA4-1619
caccuggcugucagccug

SEQ ID NO: 46482 - RNA, 19 nt, Artificial Sequence
  Synthetic oligonucleotide: CTLA4-1620
ucaccuggcugucagccug

SEQ ID NO: 46483 - RNA, 20 nt, Artificial Sequence
  Synthetic oligonucleotide: CTLA4-301
gucaccuggcugucagccug

SEQ ID NO: 46484 - RNA, 21 nt, Artificial Sequence
  Synthetic oligonucleotide: CTLA4-1621
agucaccuggcugucagccug

SEQ ID NO: 46485 - RNA, 22 nt, Artificial Sequence
  Synthetic oligonucleotide: CTLA4-1622
cagucaccuggcugucagccug

SEQ ID NO: 46486 - RNA, 23 nt, Artificial Sequence
  Synthetic oligonucleotide: CTLA4-1623
ucagucaccuggcugucagccug

SEQ ID NO: 46487 - RNA, 24 nt, Artificial Sequence
  Synthetic oligonucleotide: CTLA4-1624
uucagucaccuggcugucagccug

SEQ ID NO: 46488 - RNA, 18 nt, Artificial Sequence
  Synthetic oligonucleotide: CTLA4-1625
agaaaaaacaggagagug

SEQ ID NO: 46489 - RNA, 19 nt, Artificial Sequence
  Synthetic oligonucleotide: CTLA4-1626
aagaaaaaacaggagagug

SEQ ID NO: 46490 - RNA, 20 nt, Artificial Sequence
  Synthetic oligonucleotide: CTLA4-281
gaagaaaaaacaggagagug

SEQ ID NO: 46491 - RNA, 21 nt, Artificial Sequence
  Synthetic oligonucleotide: CTLA4-1627
agaagaaaaaacaggagagug

SEQ ID NO: 46492 - RNA, 22 nt, Artificial Sequence
  Synthetic oligonucleotide: CTLA4-1628
gagaagaaaaaacaggagagug

SEQ ID NO: 46493 - RNA, 23 nt, Artificial Sequence
  Synthetic oligonucleotide: CTLA4-1629
agagaagaaaaaacaggagagug

SEQ ID NO: 46494 - RNA, 24 nt, Artificial Sequence
  Synthetic oligonucleotide: CTLA4-1630
aagagaagaaaaaacaggagagug

SEQ ID NO: 46495 - RNA, 18 nt, Artificial Sequence
  Synthetic oligonucleotide: CTLA4-1631
aagucucacucaccuuug

SEQ ID NO: 46496 - RNA, 19 nt, Artificial Sequence
  Synthetic oligonucleotide: CTLA4-1632
aaagucucacucaccuuug

SEQ ID NO: 46497 - RNA, 20 nt, Artificial Sequence
  Synthetic oligonucleotide: CTLA4-291
aaaagucucacucaccuuug

SEQ ID NO: 46498 - RNA, 21 nt, Artificial Sequence
  Synthetic oligonucleotide: CTLA4-1633
caaaagucucacucaccuuug

SEQ ID NO: 46499 - RNA, 22 nt, Artificial Sequence
  Synthetic oligonucleotide: CTLA4-1634
ccaaaagucucacucaccuuug

SEQ ID NO: 46500 - RNA, 23 nt, Artificial Sequence
  Synthetic oligonucleotide: CTLA4-1635
uccaaaagucucacucaccuuug

SEQ ID NO: 46501 - RNA, 24 nt, Artificial Sequence
  Synthetic oligonucleotide: CTLA4-1636
cuccaaaagucucacucaccuuug

SEQ ID NO: 46502 - RNA, 18 nt, Artificial Sequence
  Synthetic oligonucleotide: CTLA4-1637
ggcaagccauggcuuuau

SEQ ID NO: 46503 - RNA, 19 nt, Artificial Sequence
  Synthetic oligonucleotide: CTLA4-1638
aggcaagccauggcuuuau

SEQ ID NO: 46504 - RNA, 20 nt, Artificial Sequence
  Synthetic oligonucleotide: CTLA4-70
aaggcaagccauggcuuuau

SEQ ID NO: 46505 - RNA, 21 nt, Artificial Sequence
  Synthetic oligonucleotide: CTLA4-1639
caaggcaagccauggcuuuau

SEQ ID NO: 46506 - RNA, 22 nt, Artificial Sequence
  Synthetic oligonucleotide: CTLA4-1640
ccaaggcaagccauggcuuuau

SEQ ID NO: 46507 - RNA, 23 nt, Artificial Sequence
  Synthetic oligonucleotide: CTLA4-1641
uccaaggcaagccauggcuuuau

SEQ ID NO: 46508 - RNA, 24 nt, Artificial Sequence
  Synthetic oligonucleotide: CTLA4-1642
auccaaggcaagccauggcuuuau

SEQ ID NO: 46509 - RNA, 18 nt, Artificial Sequence
  Synthetic oligonucleotide: CTLA4-1643
gugcagauggaaucaucu

SEQ ID NO: 46510 - RNA, 19 nt, Artificial Sequence
  Synthetic oligonucleotide: CTLA4-1644
cgugcagauggaaucaucu

SEQ ID NO: 46511 - RNA, 20 nt, Artificial Sequence
  Synthetic oligonucleotide: CTLA4-43
ccgugcagauggaaucaucu

SEQ ID NO: 46512 - RNA, 21 nt, Artificial Sequence
  Synthetic oligonucleotide: CTLA4-1645
cccgugcagauggaaucaucu

SEQ ID NO: 46513 - RNA, 22 nt, Artificial Sequence
  Synthetic oligonucleotide: CTLA4-1646
gcccgugcagauggaaucaucu

SEQ ID NO: 46514 - RNA, 23 nt, Artificial Sequence
  Synthetic oligonucleotide: CTLA4-1647
ugcccgugcagauggaaucaucu

SEQ ID NO: 46515 - RNA, 24 nt, Artificial Sequence
  Synthetic oligonucleotide: CTLA4-1648
gugcccgugcagauggaaucaucu

SEQ ID NO: 46516 - RNA, 18 nt, Artificial Sequence
  Synthetic oligonucleotide: CTLA4-1649
aaggcaagccauggcuuu

SEQ ID NO: 46517 - RNA, 19 nt, Artificial Sequence
  Synthetic oligonucleotide: CTLA4-1650
caaggcaagccauggcuuu

SEQ ID NO: 46518 - RNA, 20 nt, Artificial Sequence
  Synthetic oligonucleotide: CTLA4-278
ccaaggcaagccauggcuuu

SEQ ID NO: 46519 - RNA, 21 nt, Artificial Sequence
  Synthetic oligonucleotide: CTLA4-1651
uccaaggcaagccauggcuuu

SEQ ID NO: 46520 - RNA, 22 nt, Artificial Sequence
  Synthetic oligonucleotide: CTLA4-1652
auccaaggcaagccauggcuuu

SEQ ID NO: 46521 - RNA, 23 nt, Artificial Sequence
  Synthetic oligonucleotide: CTLA4-1653
aauccaaggcaagccauggcuuu

SEQ ID NO: 46522 - RNA, 24 nt, Artificial Sequence
  Synthetic oligonucleotide: CTLA4-1654
aaauccaaggcaagccauggcuuu

SEQ ID NO: 46523 - RNA, 18 nt, Artificial Sequence
  Synthetic oligonucleotide: CTLA4-1655
cuaccugggcauaggcaa

SEQ ID NO: 46524 - RNA, 19 nt, Artificial Sequence
  Synthetic oligonucleotide: CTLA4-1656
acuaccugggcauaggcaa

SEQ ID NO: 46525 - RNA, 20 nt, Artificial Sequence
  Synthetic oligonucleotide: CTLA4-145
uacuaccugggcauaggcaa

SEQ ID NO: 46526 - RNA, 21 nt, Artificial Sequence
  Synthetic oligonucleotide: CTLA4-1657
auacuaccugggcauaggcaa

SEQ ID NO: 46527 - RNA, 22 nt, Artificial Sequence
  Synthetic oligonucleotide: CTLA4-1658
cauacuaccugggcauaggcaa

SEQ ID NO: 46528 - RNA, 23 nt, Artificial Sequence
  Synthetic oligonucleotide: CTLA4-1659
ccauacuaccugggcauaggcaa

SEQ ID NO: 46529 - RNA, 24 nt, Artificial Sequence
  Synthetic oligonucleotide: CTLA4-1660
gccauacuaccugggcauaggcaa

SEQ ID NO: 46530 - RNA, 18 nt, Artificial Sequence
  Synthetic oligonucleotide: CTLA4-1661
accuccaguggaaaucaa

SEQ ID NO: 46531 - RNA, 19 nt, Artificial Sequence
  Synthetic oligonucleotide: CTLA4-1662
caccuccaguggaaaucaa

SEQ ID NO: 46532 - RNA, 20 nt, Artificial Sequence
  Synthetic oligonucleotide: CTLA4-237
gcaccuccaguggaaaucaa

SEQ ID NO: 46533 - RNA, 21 nt, Artificial Sequence
  Synthetic oligonucleotide: CTLA4-1663
ggcaccuccaguggaaaucaa

SEQ ID NO: 46534 - RNA, 22 nt, Artificial Sequence
  Synthetic oligonucleotide: CTLA4-1664
gggcaccuccaguggaaaucaa

SEQ ID NO: 46535 - RNA, 23 nt, Artificial Sequence
  Synthetic oligonucleotide: CTLA4-1665
cgggcaccuccaguggaaaucaa

SEQ ID NO: 46536 - RNA, 24 nt, Artificial Sequence
  Synthetic oligonucleotide: CTLA4-1666
acgggcaccuccaguggaaaucaa

SEQ ID NO: 46537 - RNA, 18 nt, Artificial Sequence
  Synthetic oligonucleotide: CTLA4-1667
gacugagggccauggaca

SEQ ID NO: 46538 - RNA, 19 nt, Artificial Sequence
  Synthetic oligonucleotide: CTLA4-1668
ggacugagggccauggaca

SEQ ID NO: 46539 - RNA, 20 nt, Artificial Sequence
  Synthetic oligonucleotide: CTLA4-33
aggacugagggccauggaca

SEQ ID NO: 46540 - RNA, 21 nt, Artificial Sequence
  Synthetic oligonucleotide: CTLA4-1669
aaggacugagggccauggaca

SEQ ID NO: 46541 - RNA, 22 nt, Artificial Sequence
  Synthetic oligonucleotide: CTLA4-1670
caaggacugagggccauggaca

SEQ ID NO: 46542 - RNA, 23 nt, Artificial Sequence
  Synthetic oligonucleotide: CTLA4-1671
ccaaggacugagggccauggaca

SEQ ID NO: 46543 - RNA, 24 nt, Artificial Sequence
  Synthetic oligonucleotide: CTLA4-1672
uccaaggacugagggccauggaca

SEQ ID NO: 46544 - RNA, 18 nt, Artificial Sequence
  Synthetic oligonucleotide: CTLA4-1673
caucuccaggcaaagcca

SEQ ID NO: 46545 - RNA, 19 nt, Artificial Sequence
  Synthetic oligonucleotide: CTLA4-1674
gcaucuccaggcaaagcca

SEQ ID NO: 46546 - RNA, 20 nt, Artificial Sequence
  Synthetic oligonucleotide: CTLA4-226
ugcaucuccaggcaaagcca

SEQ ID NO: 46547 - RNA, 21 nt, Artificial Sequence
  Synthetic oligonucleotide: CTLA4-1675
augcaucuccaggcaaagcca

SEQ ID NO: 46548 - RNA, 22 nt, Artificial Sequence
  Synthetic oligonucleotide: CTLA4-1676
uaugcaucuccaggcaaagcca

SEQ ID NO: 46549 - RNA, 23 nt, Artificial Sequence
  Synthetic oligonucleotide: CTLA4-1677
guaugcaucuccaggcaaagcca

SEQ ID NO: 46550 - RNA, 24 nt, Artificial Sequence
  Synthetic oligonucleotide: CTLA4-1678
aguaugcaucuccaggcaaagcca

SEQ ID NO: 46551 - RNA, 18 nt, Artificial Sequence
  Synthetic oligonucleotide: CTLA4-1679
ucugcacgggcaccucca

SEQ ID NO: 46552 - RNA, 19 nt, Artificial Sequence
  Synthetic oligonucleotide: CTLA4-1680
aucugcacgggcaccucca

SEQ ID NO: 46553 - RNA, 20 nt, Artificial Sequence
  Synthetic oligonucleotide: CTLA4-235
caucugcacgggcaccucca

SEQ ID NO: 46554 - RNA, 21 nt, Artificial Sequence
  Synthetic oligonucleotide: CTLA4-1681
ccaucugcacgggcaccucca

SEQ ID NO: 46555 - RNA, 22 nt, Artificial Sequence
  Synthetic oligonucleotide: CTLA4-1682
uccaucugcacgggcaccucca

SEQ ID NO: 46556 - RNA, 23 nt, Artificial Sequence
  Synthetic oligonucleotide: CTLA4-1683
uuccaucugcacgggcaccucca

SEQ ID NO: 46557 - RNA, 24 nt, Artificial Sequence
  Synthetic oligonucleotide: CTLA4-1684
auuccaucugcacgggcaccucca

SEQ ID NO: 46558 - RNA, 18 nt, Artificial Sequence
  Synthetic oligonucleotide: CTLA4-1685
acuaccugggcauaggca

SEQ ID NO: 46559 - RNA, 19 nt, Artificial Sequence
  Synthetic oligonucleotide: CTLA4-1686
uacuaccugggcauaggca

SEQ ID NO: 46560 - RNA, 20 nt, Artificial Sequence
  Synthetic oligonucleotide: CTLA4-346
auacuaccugggcauaggca

SEQ ID NO: 46561 - RNA, 21 nt, Artificial Sequence
  Synthetic oligonucleotide: CTLA4-1687
cauacuaccugggcauaggca

SEQ ID NO: 46562 - RNA, 22 nt, Artificial Sequence
  Synthetic oligonucleotide: CTLA4-1688
ccauacuaccugggcauaggca

SEQ ID NO: 46563 - RNA, 23 nt, Artificial Sequence
  Synthetic oligonucleotide: CTLA4-1689
gccauacuaccugggcauaggca

SEQ ID NO: 46564 - RNA, 24 nt, Artificial Sequence
  Synthetic oligonucleotide: CTLA4-1690
cgccauacuaccugggcauaggca

SEQ ID NO: 46565 - RNA, 18 nt, Artificial Sequence
  Synthetic oligonucleotide: CTLA4-1691
aaccucacuauccaagga

SEQ ID NO: 46566 - RNA, 19 nt, Artificial Sequence
  Synthetic oligonucleotide: CTLA4-1692
gaaccucacuauccaagga

SEQ ID NO: 46567 - RNA, 20 nt, Artificial Sequence
  Synthetic oligonucleotide: CTLA4-239
ugaaccucacuauccaagga

SEQ ID NO: 46568 - RNA, 21 nt, Artificial Sequence
  Synthetic oligonucleotide: CTLA4-1693
gugaaccucacuauccaagga

SEQ ID NO: 46569 - RNA, 22 nt, Artificial Sequence
  Synthetic oligonucleotide: CTLA4-1694
agugaaccucacuauccaagga

SEQ ID NO: 46570 - RNA, 23 nt, Artificial Sequence
  Synthetic oligonucleotide: CTLA4-1695
aagugaaccucacuauccaagga

SEQ ID NO: 46571 - RNA, 24 nt, Artificial Sequence
  Synthetic oligonucleotide: CTLA4-1696
caagugaaccucacuauccaagga

SEQ ID NO: 46572 - RNA, 18 nt, Artificial Sequence
  Synthetic oligonucleotide: CTLA4-1697
gugcggcaaccuacauga

SEQ ID NO: 46573 - RNA, 19 nt, Artificial Sequence
  Synthetic oligonucleotide: CTLA4-1698
ugugcggcaaccuacauga

SEQ ID NO: 46574 - RNA, 20 nt, Artificial Sequence
  Synthetic oligonucleotide: CTLA4-23
cugugcggcaaccuacauga

SEQ ID NO: 46575 - RNA, 21 nt, Artificial Sequence
  Synthetic oligonucleotide: CTLA4-1699
ucugugcggcaaccuacauga

SEQ ID NO: 46576 - RNA, 22 nt, Artificial Sequence
  Synthetic oligonucleotide: CTLA4-1700
gucugugcggcaaccuacauga

SEQ ID NO: 46577 - RNA, 23 nt, Artificial Sequence
  Synthetic oligonucleotide: CTLA4-1701
agucugugcggcaaccuacauga

SEQ ID NO: 46578 - RNA, 24 nt, Artificial Sequence
  Synthetic oligonucleotide: CTLA4-1702
aagucugugcggcaaccuacauga

SEQ ID NO: 46579 - RNA, 18 nt, Artificial Sequence
  Synthetic oligonucleotide: CTLA4-1703
ugucuucugcaaagguga

SEQ ID NO: 46580 - RNA, 19 nt, Artificial Sequence
  Synthetic oligonucleotide: CTLA4-1704
cugucuucugcaaagguga

SEQ ID NO: 46581 - RNA, 20 nt, Artificial Sequence
  Synthetic oligonucleotide: CTLA4-220
ccugucuucugcaaagguga

SEQ ID NO: 46582 - RNA, 21 nt, Artificial Sequence
  Synthetic oligonucleotide: CTLA4-1705
cccugucuucugcaaagguga

SEQ ID NO: 46583 - RNA, 22 nt, Artificial Sequence
  Synthetic oligonucleotide: CTLA4-1706
ucccugucuucugcaaagguga

SEQ ID NO: 46584 - RNA, 23 nt, Artificial Sequence
  Synthetic oligonucleotide: CTLA4-1707
aucccugucuucugcaaagguga

SEQ ID NO: 46585 - RNA, 24 nt, Artificial Sequence
  Synthetic oligonucleotide: CTLA4-1708
caucccugucuucugcaaagguga

SEQ ID NO: 46586 - RNA, 18 nt, Artificial Sequence
  Synthetic oligonucleotide: CTLA4-1709
aggcugacagccagguga

SEQ ID NO: 46587 - RNA, 19 nt, Artificial Sequence
  Synthetic oligonucleotide: CTLA4-1710
caggcugacagccagguga

SEQ ID NO: 46588 - RNA, 20 nt, Artificial Sequence
  Synthetic oligonucleotide: CTLA4-228
gcaggcugacagccagguga

SEQ ID NO: 46589 - RNA, 21 nt, Artificial Sequence
  Synthetic oligonucleotide: CTLA4-1711
ggcaggcugacagccagguga

SEQ ID NO: 46590 - RNA, 22 nt, Artificial Sequence
  Synthetic oligonucleotide: CTLA4-1712
cggcaggcugacagccagguga

SEQ ID NO: 46591 - RNA, 23 nt, Artificial Sequence
  Synthetic oligonucleotide: CTLA4-1713
ucggcaggcugacagccagguga

SEQ ID NO: 46592 - RNA, 24 nt, Artificial Sequence
  Synthetic oligonucleotide: CTLA4-1714
uucggcaggcugacagccagguga

SEQ ID NO: 46593 - RNA, 18 nt, Artificial Sequence
  Synthetic oligonucleotide: CTLA4-1715
ggacugagggccauggac

SEQ ID NO: 46594 - RNA, 19 nt, Artificial Sequence
  Synthetic oligonucleotide: CTLA4-1716
aggacugagggccauggac

SEQ ID NO: 46595 - RNA, 20 nt, Artificial Sequence
  Synthetic oligonucleotide: CTLA4-242
aaggacugagggccauggac

SEQ ID NO: 46596 - RNA, 21 nt, Artificial Sequence
  Synthetic oligonucleotide: CTLA4-1717
caaggacugagggccauggac

SEQ ID NO: 46597 - RNA, 22 nt, Artificial Sequence
  Synthetic oligonucleotide: CTLA4-1718
ccaaggacugagggccauggac

SEQ ID NO: 46598 - RNA, 23 nt, Artificial Sequence
  Synthetic oligonucleotide: CTLA4-1719
uccaaggacugagggccauggac

SEQ ID NO: 46599 - RNA, 24 nt, Artificial Sequence
  Synthetic oligonucleotide: CTLA4-1720
auccaaggacugagggccauggac

SEQ ID NO: 46600 - RNA, 18 nt, Artificial Sequence
  Synthetic oligonucleotide: CTLA4-1721
uacccaccgccauacuac

SEQ ID NO: 46601 - RNA, 19 nt, Artificial Sequence
  Synthetic oligonucleotide: CTLA4-1722
guacccaccgccauacuac

SEQ ID NO: 46602 - RNA, 20 nt, Artificial Sequence
  Synthetic oligonucleotide: CTLA4-1723
uguacccaccgccauacuac

SEQ ID NO: 46603 - RNA, 21 nt, Artificial Sequence
  Synthetic oligonucleotide: CTLA4-1724
auguacccaccgccauacuac

SEQ ID NO: 46604 - RNA, 22 nt, Artificial Sequence
  Synthetic oligonucleotide: CTLA4-1725
cauguacccaccgccauacuac

SEQ ID NO: 46605 - RNA, 23 nt, Artificial Sequence
  Synthetic oligonucleotide: CTLA4-1726
ucauguacccaccgccauacuac

SEQ ID NO: 46606 - RNA, 24 nt, Artificial Sequence
  Synthetic oligonucleotide: CTLA4-1727
cucauguacccaccgccauacuac

SEQ ID NO: 46607 - RNA, 18 nt, Artificial Sequence
  Synthetic oligonucleotide: CTLA4-1728
ucagcugaaccuggcuac

SEQ ID NO: 46608 - RNA, 19 nt, Artificial Sequence
  Synthetic oligonucleotide: CTLA4-1729
cucagcugaaccuggcuac

SEQ ID NO: 46609 - RNA, 20 nt, Artificial Sequence
  Synthetic oligonucleotide: CTLA4-218
gcucagcugaaccuggcuac

SEQ ID NO: 46610 - RNA, 21 nt, Artificial Sequence
  Synthetic oligonucleotide: CTLA4-1730
ggcucagcugaaccuggcuac

SEQ ID NO: 46611 - RNA, 22 nt, Artificial Sequence
  Synthetic oligonucleotide: CTLA4-1731
aggcucagcugaaccuggcuac

SEQ ID NO: 46612 - RNA, 23 nt, Artificial Sequence
  Synthetic oligonucleotide: CTLA4-1732
aaggcucagcugaaccuggcuac

SEQ ID NO: 46613 - RNA, 24 nt, Artificial Sequence
  Synthetic oligonucleotide: CTLA4-1733
caaggcucagcugaaccuggcuac

SEQ ID NO: 46614 - RNA, 18 nt, Artificial Sequence
  Synthetic oligonucleotide: CTLA4-1734
auccaaggacugagggcc

SEQ ID NO: 46615 - RNA, 19 nt, Artificial Sequence
  Synthetic oligonucleotide: CTLA4-1735
uauccaaggacugagggcc

SEQ ID NO: 46616 - RNA, 20 nt, Artificial Sequence
  Synthetic oligonucleotide: CTLA4-241
cuauccaaggacugagggcc

SEQ ID NO: 46617 - RNA, 21 nt, Artificial Sequence
  Synthetic oligonucleotide: CTLA4-1736
acuauccaaggacugagggcc

SEQ ID NO: 46618 - RNA, 22 nt, Artificial Sequence
  Synthetic oligonucleotide: CTLA4-1737
cacuauccaaggacugagggcc

SEQ ID NO: 46619 - RNA, 23 nt, Artificial Sequence
  Synthetic oligonucleotide: CTLA4-1738
ucacuauccaaggacugagggcc

SEQ ID NO: 46620 - RNA, 24 nt, Artificial Sequence
  Synthetic oligonucleotide: CTLA4-1739
cucacuauccaaggacugagggcc

SEQ ID NO: 46621 - RNA, 18 nt, Artificial Sequence
  Synthetic oligonucleotide: CTLA4-1740
aagugaaccucacuaucc

SEQ ID NO: 46622 - RNA, 19 nt, Artificial Sequence
  Synthetic oligonucleotide: CTLA4-1741
caagugaaccucacuaucc

SEQ ID NO: 46623 - RNA, 20 nt, Artificial Sequence
  Synthetic oligonucleotide: CTLA4-238
ucaagugaaccucacuaucc

SEQ ID NO: 46624 - RNA, 21 nt, Artificial Sequence
  Synthetic oligonucleotide: CTLA4-1742
aucaagugaaccucacuaucc

SEQ ID NO: 46625 - RNA, 22 nt, Artificial Sequence
  Synthetic oligonucleotide: CTLA4-1743
aaucaagugaaccucacuaucc

SEQ ID NO: 46626 - RNA, 23 nt, Artificial Sequence
  Synthetic oligonucleotide: CTLA4-1744
aaaucaagugaaccucacuaucc

SEQ ID NO: 46627 - RNA, 24 nt, Artificial Sequence
  Synthetic oligonucleotide: CTLA4-1745
gaaaucaagugaaccucacuaucc

SEQ ID NO: 46628 - RNA, 18 nt, Artificial Sequence
  Synthetic oligonucleotide: CTLA4-1746
gagugagacuuuuggagc

SEQ ID NO: 46629 - RNA, 19 nt, Artificial Sequence
  Synthetic oligonucleotide: CTLA4-1747
ugagugagacuuuuggagc

SEQ ID NO: 46630 - RNA, 20 nt, Artificial Sequence
  Synthetic oligonucleotide: CTLA4-223
gugagugagacuuuuggagc

SEQ ID NO: 46631 - RNA, 21 nt, Artificial Sequence
  Synthetic oligonucleotide: CTLA4-1748
ggugagugagacuuuuggagc

SEQ ID NO: 46632 - RNA, 22 nt, Artificial Sequence
  Synthetic oligonucleotide: CTLA4-1749
aggugagugagacuuuuggagc

SEQ ID NO: 46633 - RNA, 23 nt, Artificial Sequence
  Synthetic oligonucleotide: CTLA4-1750
aaggugagugagacuuuuggagc

SEQ ID NO: 46634 - RNA, 24 nt, Artificial Sequence
  Synthetic oligonucleotide: CTLA4-1751
aaaggugagugagacuuuuggagc

SEQ ID NO: 46635 - RNA, 18 nt, Artificial Sequence
  Synthetic oligonucleotide: CTLA4-1752
cuagaugauuccaucugc

SEQ ID NO: 46636 - RNA, 19 nt, Artificial Sequence
  Synthetic oligonucleotide: CTLA4-1753
ccuagaugauuccaucugc

SEQ ID NO: 46637 - RNA, 20 nt, Artificial Sequence
  Synthetic oligonucleotide: CTLA4-234
uccuagaugauuccaucugc

SEQ ID NO: 46638 - RNA, 21 nt, Artificial Sequence
  Synthetic oligonucleotide: CTLA4-1754
uuccuagaugauuccaucugc

SEQ ID NO: 46639 - RNA, 22 nt, Artificial Sequence
  Synthetic oligonucleotide: CTLA4-1755
cuuccuagaugauuccaucugc

SEQ ID NO: 46640 - RNA, 23 nt, Artificial Sequence
  Synthetic oligonucleotide: CTLA4-1756
ccuuccuagaugauuccaucugc

SEQ ID NO: 46641 - RNA, 24 nt, Artificial Sequence
  Synthetic oligonucleotide: CTLA4-1757
accuuccuagaugauuccaucugc

SEQ ID NO: 46642 - RNA, 18 nt, Artificial Sequence
  Synthetic oligonucleotide: CTLA4-1758
ggacucuacaucugcaag

SEQ ID NO: 46643 - RNA, 19 nt, Artificial Sequence
  Synthetic oligonucleotide: CTLA4-1759
gggacucuacaucugcaag

SEQ ID NO: 46644 - RNA, 20 nt, Artificial Sequence
  Synthetic oligonucleotide: CTLA4-244
cgggacucuacaucugcaag

SEQ ID NO: 46645 - RNA, 21 nt, Artificial Sequence
  Synthetic oligonucleotide: CTLA4-1760
acgggacucuacaucugcaag

SEQ ID NO: 46646 - RNA, 22 nt, Artificial Sequence
  Synthetic oligonucleotide: CTLA4-1761
cacgggacucuacaucugcaag

SEQ ID NO: 46647 - RNA, 23 nt, Artificial Sequence
  Synthetic oligonucleotide: CTLA4-1762
acacgggacucuacaucugcaag

SEQ ID NO: 46648 - RNA, 24 nt, Artificial Sequence
  Synthetic oligonucleotide: CTLA4-1763
gacacgggacucuacaucugcaag

SEQ ID NO: 46649 - RNA, 18 nt, Artificial Sequence
  Synthetic oligonucleotide: CTLA4-1764
cugcacgggcaccuccag

SEQ ID NO: 46650 - RNA, 19 nt, Artificial Sequence
  Synthetic oligonucleotide: CTLA4-1765
ucugcacgggcaccuccag

SEQ ID NO: 46651 - RNA, 20 nt, Artificial Sequence
  Synthetic oligonucleotide: CTLA4-28
aucugcacgggcaccuccag

SEQ ID NO: 46652 - RNA, 21 nt, Artificial Sequence
  Synthetic oligonucleotide: CTLA4-1766
caucugcacgggcaccuccag

SEQ ID NO: 46653 - RNA, 22 nt, Artificial Sequence
  Synthetic oligonucleotide: CTLA4-1767
ccaucugcacgggcaccuccag

SEQ ID NO: 46654 - RNA, 23 nt, Artificial Sequence
  Synthetic oligonucleotide: CTLA4-1768
uccaucugcacgggcaccuccag

SEQ ID NO: 46655 - RNA, 24 nt, Artificial Sequence
  Synthetic oligonucleotide: CTLA4-1769
uuccaucugcacgggcaccuccag

SEQ ID NO: 46656 - RNA, 18 nt, Artificial Sequence
  Synthetic oligonucleotide: CTLA4-1770
ugugguacuggccagcag

SEQ ID NO: 46657 - RNA, 19 nt, Artificial Sequence
  Synthetic oligonucleotide: CTLA4-1771
cugugguacuggccagcag

SEQ ID NO: 46658 - RNA, 20 nt, Artificial Sequence
  Synthetic oligonucleotide: CTLA4-224
gcugugguacuggccagcag

SEQ ID NO: 46659 - RNA, 21 nt, Artificial Sequence
  Synthetic oligonucleotide: CTLA4-1772
ugcugugguacuggccagcag

SEQ ID NO: 46660 - RNA, 22 nt, Artificial Sequence
  Synthetic oligonucleotide: CTLA4-1773
cugcugugguacuggccagcag

SEQ ID NO: 46661 - RNA, 23 nt, Artificial Sequence
  Synthetic oligonucleotide: CTLA4-1774
ccugcugugguacuggccagcag

SEQ ID NO: 46662 - RNA, 24 nt, Artificial Sequence
  Synthetic oligonucleotide: CTLA4-1775
gccugcugugguacuggccagcag

SEQ ID NO: 46663 - RNA, 18 nt, Artificial Sequence
  Synthetic oligonucleotide: CTLA4-1776
cagcggcacaaggcucag

SEQ ID NO: 46664 - RNA, 19 nt, Artificial Sequence
  Synthetic oligonucleotide: CTLA4-1777
ucagcggcacaaggcucag

SEQ ID NO: 46665 - RNA, 20 nt, Artificial Sequence
  Synthetic oligonucleotide: CTLA4-217
uucagcggcacaaggcucag

SEQ ID NO: 46666 - RNA, 21 nt, Artificial Sequence
  Synthetic oligonucleotide: CTLA4-1778
uuucagcggcacaaggcucag

SEQ ID NO: 46667 - RNA, 22 nt, Artificial Sequence
  Synthetic oligonucleotide: CTLA4-1779
auuucagcggcacaaggcucag

SEQ ID NO: 46668 - RNA, 23 nt, Artificial Sequence
  Synthetic oligonucleotide: CTLA4-1780
gauuucagcggcacaaggcucag

SEQ ID NO: 46669 - RNA, 24 nt, Artificial Sequence
  Synthetic oligonucleotide: CTLA4-1781
ggauuucagcggcacaaggcucag

SEQ ID NO: 46670 - RNA, 18 nt, Artificial Sequence
  Synthetic oligonucleotide: CTLA4-1782
gacucuacaucugcaagg

SEQ ID NO: 46671 - RNA, 19 nt, Artificial Sequence
  Synthetic oligonucleotide: CTLA4-1783
ggacucuacaucugcaagg

SEQ ID NO: 46672 - RNA, 20 nt, Artificial Sequence
  Synthetic oligonucleotide: CTLA4-36
gggacucuacaucugcaagg

SEQ ID NO: 46673 - RNA, 21 nt, Artificial Sequence
  Synthetic oligonucleotide: CTLA4-1784
cgggacucuacaucugcaagg

SEQ ID NO: 46674 - RNA, 22 nt, Artificial Sequence
  Synthetic oligonucleotide: CTLA4-1785
acgggacucuacaucugcaagg

SEQ ID NO: 46675 - RNA, 23 nt, Artificial Sequence
  Synthetic oligonucleotide: CTLA4-1786
cacgggacucuacaucugcaagg

SEQ ID NO: 46676 - RNA, 24 nt, Artificial Sequence
  Synthetic oligonucleotide: CTLA4-1787
acacgggacucuacaucugcaagg

SEQ ID NO: 46677 - RNA, 18 nt, Artificial Sequence
  Synthetic oligonucleotide: CTLA4-1788
ugugcggcaaccuacaug

SEQ ID NO: 46678 - RNA, 19 nt, Artificial Sequence
  Synthetic oligonucleotide: CTLA4-1789
cugugcggcaaccuacaug

SEQ ID NO: 46679 - RNA, 20 nt, Artificial Sequence
  Synthetic oligonucleotide: CTLA4-229
ucugugcggcaaccuacaug

SEQ ID NO: 46680 - RNA, 21 nt, Artificial Sequence
  Synthetic oligonucleotide: CTLA4-1790
gucugugcggcaaccuacaug

SEQ ID NO: 46681 - RNA, 22 nt, Artificial Sequence
  Synthetic oligonucleotide: CTLA4-1791
agucugugcggcaaccuacaug

SEQ ID NO: 46682 - RNA, 23 nt, Artificial Sequence
  Synthetic oligonucleotide: CTLA4-1792
aagucugugcggcaaccuacaug

SEQ ID NO: 46683 - RNA, 24 nt, Artificial Sequence
  Synthetic oligonucleotide: CTLA4-1793
gaagucugugcggcaaccuacaug

SEQ ID NO: 46684 - RNA, 18 nt, Artificial Sequence
  Synthetic oligonucleotide: CTLA4-1794
cccagauuuauguaauug

SEQ ID NO: 46685 - RNA, 19 nt, Artificial Sequence
  Synthetic oligonucleotide: CTLA4-1795
acccagauuuauguaauug

SEQ ID NO: 46686 - RNA, 20 nt, Artificial Sequence
  Synthetic oligonucleotide: CTLA4-348
aacccagauuuauguaauug

SEQ ID NO: 46687 - RNA, 21 nt, Artificial Sequence
  Synthetic oligonucleotide: CTLA4-1796
gaacccagauuuauguaauug

SEQ ID NO: 46688 - RNA, 22 nt, Artificial Sequence
  Synthetic oligonucleotide: CTLA4-1797
ggaacccagauuuauguaauug

SEQ ID NO: 46689 - RNA, 23 nt, Artificial Sequence
  Synthetic oligonucleotide: CTLA4-1798
cggaacccagauuuauguaauug

SEQ ID NO: 46690 - RNA, 24 nt, Artificial Sequence
  Synthetic oligonucleotide: CTLA4-1799
acggaacccagauuuauguaauug

SEQ ID NO: 46691 - RNA, 18 nt, Artificial Sequence
  Synthetic oligonucleotide: CTLA4-1800
ugcggcaaccuacaugau

SEQ ID NO: 46692 - RNA, 19 nt, Artificial Sequence
  Synthetic oligonucleotide: CTLA4-1801
gugcggcaaccuacaugau

SEQ ID NO: 46693 - RNA, 20 nt, Artificial Sequence
  Synthetic oligonucleotide: CTLA4-24
ugugcggcaaccuacaugau

SEQ ID NO: 46694 - RNA, 21 nt, Artificial Sequence
  Synthetic oligonucleotide: CTLA4-1802
cugugcggcaaccuacaugau

SEQ ID NO: 46695 - RNA, 22 nt, Artificial Sequence
  Synthetic oligonucleotide: CTLA4-1803
ucugugcggcaaccuacaugau

SEQ ID NO: 46696 - RNA, 23 nt, Artificial Sequence
  Synthetic oligonucleotide: CTLA4-1804
gucugugcggcaaccuacaugau

SEQ ID NO: 46697 - RNA, 24 nt, Artificial Sequence
  Synthetic oligonucleotide: CTLA4-1805
agucugugcggcaaccuacaugau

SEQ ID NO: 46698 - RNA, 18 nt, Artificial Sequence
  Synthetic oligonucleotide: CTLA4-1806
ccucacuauccaaggacu

SEQ ID NO: 46699 - RNA, 19 nt, Artificial Sequence
  Synthetic oligonucleotide: CTLA4-1807
accucacuauccaaggacu

SEQ ID NO: 46700 - RNA, 20 nt, Artificial Sequence
  Synthetic oligonucleotide: CTLA4-240
aaccucacuauccaaggacu

SEQ ID NO: 46701 - RNA, 21 nt, Artificial Sequence
  Synthetic oligonucleotide: CTLA4-1808
gaaccucacuauccaaggacu

SEQ ID NO: 46702 - RNA, 22 nt, Artificial Sequence
  Synthetic oligonucleotide: CTLA4-1809
ugaaccucacuauccaaggacu

SEQ ID NO: 46703 - RNA, 23 nt, Artificial Sequence
  Synthetic oligonucleotide: CTLA4-1810
gugaaccucacuauccaaggacu

SEQ ID NO: 46704 - RNA, 24 nt, Artificial Sequence
  Synthetic oligonucleotide: CTLA4-1811
agugaaccucacuauccaaggacu

SEQ ID NO: 46705 - RNA, 18 nt, Artificial Sequence
  Synthetic oligonucleotide: CTLA4-1812
caaaggugagugagacuu

SEQ ID NO: 46706 - RNA, 19 nt, Artificial Sequence
  Synthetic oligonucleotide: CTLA4-1813
gcaaaggugagugagacuu

SEQ ID NO: 46707 - RNA, 20 nt, Artificial Sequence
  Synthetic oligonucleotide: CTLA4-221
ugcaaaggugagugagacuu

SEQ ID NO: 46708 - RNA, 21 nt, Artificial Sequence
  Synthetic oligonucleotide: CTLA4-1814
cugcaaaggugagugagacuu

SEQ ID NO: 46709 - RNA, 22 nt, Artificial Sequence
  Synthetic oligonucleotide: CTLA4-1815
ucugcaaaggugagugagacuu

SEQ ID NO: 46710 - RNA, 23 nt, Artificial Sequence
  Synthetic oligonucleotide: CTLA4-1816
uucugcaaaggugagugagacuu

SEQ ID NO: 46711 - RNA, 24 nt, Artificial Sequence
  Synthetic oligonucleotide: CTLA4-1817
cuucugcaaaggugagugagacuu

SEQ ID NO: 46712 - RNA, 18 nt, Artificial Sequence
  Synthetic oligonucleotide: CTLA4-1818
aaaggugagugagacuuu

SEQ ID NO: 46713 - RNA, 19 nt, Artificial Sequence
  Synthetic oligonucleotide: CTLA4-1819
caaaggugagugagacuuu

SEQ ID NO: 46714 - RNA, 20 nt, Artificial Sequence
  Synthetic oligonucleotide: CTLA4-9
gcaaaggugagugagacuuu

SEQ ID NO: 46715 - RNA, 21 nt, Artificial Sequence
  Synthetic oligonucleotide: CTLA4-1820
ugcaaaggugagugagacuuu

SEQ ID NO: 46716 - RNA, 22 nt, Artificial Sequence
  Synthetic oligonucleotide: CTLA4-1821
cugcaaaggugagugagacuuu

SEQ ID NO: 46717 - RNA, 23 nt, Artificial Sequence
  Synthetic oligonucleotide: CTLA4-1822
ucugcaaaggugagugagacuuu

SEQ ID NO: 46718 - RNA, 24 nt, Artificial Sequence
  Synthetic oligonucleotide: CTLA4-1823
uucugcaaaggugagugagacuuu

SEQ ID NO: 46719 - RNA, 18 nt, Artificial Sequence
  Synthetic oligonucleotide: CTLA4-1824
ccccgaacuaacugcugc

SEQ ID NO: 46720 - RNA, 19 nt, Artificial Sequence
  Synthetic oligonucleotide: CTLA4-1825
accccgaacuaacugcugc

SEQ ID NO: 46721 - RNA, 20 nt, Artificial Sequence
  Synthetic oligonucleotide: CTLA4-405
aaccccgaacuaacugcugc

SEQ ID NO: 46722 - RNA, 21 nt, Artificial Sequence
  Synthetic oligonucleotide: CTLA4-1826
caaccccgaacuaacugcugc

SEQ ID NO: 46723 - RNA, 22 nt, Artificial Sequence
  Synthetic oligonucleotide: CTLA4-1827
acaaccccgaacuaacugcugc

SEQ ID NO: 46724 - RNA, 23 nt, Artificial Sequence
  Synthetic oligonucleotide: CTLA4-1828
aacaaccccgaacuaacugcugc

SEQ ID NO: 46725 - RNA, 24 nt, Artificial Sequence
  Synthetic oligonucleotide: CTLA4-1829
aaacaaccccgaacuaacugcugc

SEQ ID NO: 46726 - RNA, 18 nt, Artificial Sequence
  Synthetic oligonucleotide: CTLA4-1830
aaugguuucucaauugau

SEQ ID NO: 46727 - RNA, 19 nt, Artificial Sequence
  Synthetic oligonucleotide: CTLA4-1831
uaaugguuucucaauugau

SEQ ID NO: 46728 - RNA, 20 nt, Artificial Sequence
  Synthetic oligonucleotide: CTLA4-189
auaaugguuucucaauugau

SEQ ID NO: 46729 - RNA, 21 nt, Artificial Sequence
  Synthetic oligonucleotide: CTLA4-1832
cauaaugguuucucaauugau

SEQ ID NO: 46730 - RNA, 22 nt, Artificial Sequence
  Synthetic oligonucleotide: CTLA4-1833
ucauaaugguuucucaauugau

SEQ ID NO: 46731 - RNA, 23 nt, Artificial Sequence
  Synthetic oligonucleotide: CTLA4-1834
uucauaaugguuucucaauugau

SEQ ID NO: 46732 - RNA, 24 nt, Artificial Sequence
  Synthetic oligonucleotide: CTLA4-1835
cuucauaaugguuucucaauugau

SEQ ID NO: 46733 - RNA, 18 nt, Artificial Sequence
  Synthetic oligonucleotide: CTLA4-1836
ggauccagaggaggaagu

SEQ ID NO: 46734 - RNA, 19 nt, Artificial Sequence
  Synthetic oligonucleotide: CTLA4-1837
aggauccagaggaggaagu

SEQ ID NO: 46735 - RNA, 20 nt, Artificial Sequence
  Synthetic oligonucleotide: CTLA4-399
aaggauccagaggaggaagu

SEQ ID NO: 46736 - RNA, 21 nt, Artificial Sequence
  Synthetic oligonucleotide: CTLA4-1838
caaggauccagaggaggaagu

SEQ ID NO: 46737 - RNA, 22 nt, Artificial Sequence
  Synthetic oligonucleotide: CTLA4-1839
gcaaggauccagaggaggaagu

SEQ ID NO: 46738 - RNA, 23 nt, Artificial Sequence
  Synthetic oligonucleotide: CTLA4-1840
ugcaaggauccagaggaggaagu

SEQ ID NO: 46739 - RNA, 24 nt, Artificial Sequence
  Synthetic oligonucleotide: CTLA4-1841
cugcaaggauccagaggaggaagu

SEQ ID NO: 46740 - RNA, 18 nt, Artificial Sequence
  Synthetic oligonucleotide: CTLA4-1842
cagaaucugggcacgguu

SEQ ID NO: 46741 - RNA, 19 nt, Artificial Sequence
  Synthetic oligonucleotide: CTLA4-1843
ucagaaucugggcacgguu

SEQ ID NO: 46742 - RNA, 20 nt, Artificial Sequence
  Synthetic oligonucleotide: CTLA4-397
gucagaaucugggcacgguu

SEQ ID NO: 46743 - RNA, 21 nt, Artificial Sequence
  Synthetic oligonucleotide: CTLA4-1844
agucagaaucugggcacgguu

SEQ ID NO: 46744 - RNA, 22 nt, Artificial Sequence
  Synthetic oligonucleotide: CTLA4-1845
aagucagaaucugggcacgguu

SEQ ID NO: 46745 - RNA, 23 nt, Artificial Sequence
  Synthetic oligonucleotide: CTLA4-1846
gaagucagaaucugggcacgguu

SEQ ID NO: 46746 - RNA, 24 nt, Artificial Sequence
  Synthetic oligonucleotide: CTLA4-1847
ggaagucagaaucugggcacgguu

SEQ ID NO: 46747 - RNA, 18 nt, Artificial Sequence
  Synthetic oligonucleotide: CTLA4-1848
agaaaccauuaugaagaa

SEQ ID NO: 46748 - RNA, 19 nt, Artificial Sequence
  Synthetic oligonucleotide: CTLA4-1849
gagaaaccauuaugaagaa

SEQ ID NO: 46749 - RNA, 20 nt, Artificial Sequence
  Synthetic oligonucleotide: CTLA4-369
ugagaaaccauuaugaagaa

SEQ ID NO: 46750 - RNA, 21 nt, Artificial Sequence
  Synthetic oligonucleotide: CTLA4-1850
uugagaaaccauuaugaagaa

SEQ ID NO: 46751 - RNA, 22 nt, Artificial Sequence
  Synthetic oligonucleotide: CTLA4-1851
auugagaaaccauuaugaagaa

SEQ ID NO: 46752 - RNA, 23 nt, Artificial Sequence
  Synthetic oligonucleotide: CTLA4-1852
aauugagaaaccauuaugaagaa

SEQ ID NO: 46753 - RNA, 24 nt, Artificial Sequence
  Synthetic oligonucleotide: CTLA4-1853
caauugagaaaccauuaugaagaa

SEQ ID NO: 46754 - RNA, 18 nt, Artificial Sequence
  Synthetic oligonucleotide: CTLA4-1854
aagaagcccucuuacaac

SEQ ID NO: 46755 - RNA, 19 nt, Artificial Sequence
  Synthetic oligonucleotide: CTLA4-1855
aaagaagcccucuuacaac

SEQ ID NO: 46756 - RNA, 20 nt, Artificial Sequence
  Synthetic oligonucleotide: CTLA4-154
aaaagaagcccucuuacaac

SEQ ID NO: 46757 - RNA, 21 nt, Artificial Sequence
  Synthetic oligonucleotide: CTLA4-1856
gaaaagaagcccucuuacaac

SEQ ID NO: 46758 - RNA, 22 nt, Artificial Sequence
  Synthetic oligonucleotide: CTLA4-1857
agaaaagaagcccucuuacaac

SEQ ID NO: 46759 - RNA, 23 nt, Artificial Sequence
  Synthetic oligonucleotide: CTLA4-1858
aagaaaagaagcccucuuacaac

SEQ ID NO: 46760 - RNA, 24 nt, Artificial Sequence
  Synthetic oligonucleotide: CTLA4-1859
aaagaaaagaagcccucuuacaac

SEQ ID NO: 46761 - RNA, 18 nt, Artificial Sequence
  Synthetic oligonucleotide: CTLA4-1860
aaaugcccccaacagagc

SEQ ID NO: 46762 - RNA, 19 nt, Artificial Sequence
  Synthetic oligonucleotide: CTLA4-1861
aaaaugcccccaacagagc

SEQ ID NO: 46763 - RNA, 20 nt, Artificial Sequence
  Synthetic oligonucleotide: CTLA4-362
gaaaaugcccccaacagagc

SEQ ID NO: 46764 - RNA, 21 nt, Artificial Sequence
  Synthetic oligonucleotide: CTLA4-1862
ugaaaaugcccccaacagagc

SEQ ID NO: 46765 - RNA, 22 nt, Artificial Sequence
  Synthetic oligonucleotide: CTLA4-1863
gugaaaaugcccccaacagagc

SEQ ID NO: 46766 - RNA, 23 nt, Artificial Sequence
  Synthetic oligonucleotide: CTLA4-1864
ugugaaaaugcccccaacagagc

SEQ ID NO: 46767 - RNA, 24 nt, Artificial Sequence
  Synthetic oligonucleotide: CTLA4-1865
augugaaaaugcccccaacagagc

SEQ ID NO: 46768 - RNA, 18 nt, Artificial Sequence
  Synthetic oligonucleotide: CTLA4-1866
guuucuuugagcaaaaug

SEQ ID NO: 46769 - RNA, 19 nt, Artificial Sequence
  Synthetic oligonucleotide: CTLA4-1867
uguuucuuugagcaaaaug

SEQ ID NO: 46770 - RNA, 20 nt, Artificial Sequence
  Synthetic oligonucleotide: CTLA4-355
cuguuucuuugagcaaaaug

SEQ ID NO: 46771 - RNA, 21 nt, Artificial Sequence
  Synthetic oligonucleotide: CTLA4-1868
gcuguuucuuugagcaaaaug

SEQ ID NO: 46772 - RNA, 22 nt, Artificial Sequence
  Synthetic oligonucleotide: CTLA4-1869
agcuguuucuuugagcaaaaug

SEQ ID NO: 46773 - RNA, 23 nt, Artificial Sequence
  Synthetic oligonucleotide: CTLA4-1870
cagcuguuucuuugagcaaaaug

SEQ ID NO: 46774 - RNA, 24 nt, Artificial Sequence
  Synthetic oligonucleotide: CTLA4-1871
acagcuguuucuuugagcaaaaug

SEQ ID NO: 46775 - RNA, 18 nt, Artificial Sequence
  Synthetic oligonucleotide: CTLA4-1872
agauucugacuuccuccu

SEQ ID NO: 46776 - RNA, 19 nt, Artificial Sequence
  Synthetic oligonucleotide: CTLA4-1873
cagauucugacuuccuccu

SEQ ID NO: 46777 - RNA, 20 nt, Artificial Sequence
  Synthetic oligonucleotide: CTLA4-351
ccagauucugacuuccuccu

SEQ ID NO: 46778 - RNA, 21 nt, Artificial Sequence
  Synthetic oligonucleotide: CTLA4-1874
cccagauucugacuuccuccu

SEQ ID NO: 46779 - RNA, 22 nt, Artificial Sequence
  Synthetic oligonucleotide: CTLA4-1875
gcccagauucugacuuccuccu

SEQ ID NO: 46780 - RNA, 23 nt, Artificial Sequence
  Synthetic oligonucleotide: CTLA4-1876
ugcccagauucugacuuccuccu

SEQ ID NO: 46781 - RNA, 24 nt, Artificial Sequence
  Synthetic oligonucleotide: CTLA4-1877
gugcccagauucugacuuccuccu

SEQ ID NO: 46782 - RNA, 18 nt, Artificial Sequence
  Synthetic oligonucleotide: CTLA4-1878
uccuugcagcaguuaguu

SEQ ID NO: 46783 - RNA, 19 nt, Artificial Sequence
  Synthetic oligonucleotide: CTLA4-1879
auccuugcagcaguuaguu

SEQ ID NO: 46784 - RNA, 20 nt, Artificial Sequence
  Synthetic oligonucleotide: CTLA4-148
gauccuugcagcaguuaguu

SEQ ID NO: 46785 - RNA, 21 nt, Artificial Sequence
  Synthetic oligonucleotide: CTLA4-1880
ggauccuugcagcaguuaguu

SEQ ID NO: 46786 - RNA, 22 nt, Artificial Sequence
  Synthetic oligonucleotide: CTLA4-1881
uggauccuugcagcaguuaguu

SEQ ID NO: 46787 - RNA, 23 nt, Artificial Sequence
  Synthetic oligonucleotide: CTLA4-1882
cuggauccuugcagcaguuaguu

SEQ ID NO: 46788 - RNA, 24 nt, Artificial Sequence
  Synthetic oligonucleotide: CTLA4-1883
ucuggauccuugcagcaguuaguu

SEQ ID NO: 46789 - RNA, 18 nt, Artificial Sequence
  Synthetic oligonucleotide: CTLA4-1884
uuagcugucaaacacaaa

SEQ ID NO: 46790 - RNA, 19 nt, Artificial Sequence
  Synthetic oligonucleotide: CTLA4-1885
uuuagcugucaaacacaaa

SEQ ID NO: 46791 - RNA, 20 nt, Artificial Sequence
  Synthetic oligonucleotide: CTLA4-412
cuuuagcugucaaacacaaa

SEQ ID NO: 46792 - RNA, 21 nt, Artificial Sequence
  Synthetic oligonucleotide: CTLA4-1886
ucuuuagcugucaaacacaaa

SEQ ID NO: 46793 - RNA, 22 nt, Artificial Sequence
  Synthetic oligonucleotide: CTLA4-1887
uucuuuagcugucaaacacaaa

SEQ ID NO: 46794 - RNA, 23 nt, Artificial Sequence
  Synthetic oligonucleotide: CTLA4-1888
uuucuuuagcugucaaacacaaa

SEQ ID NO: 46795 - RNA, 24 nt, Artificial Sequence
  Synthetic oligonucleotide: CTLA4-1889
uuuucuuuagcugucaaacacaaa

SEQ ID NO: 46796 - RNA, 18 nt, Artificial Sequence
  Synthetic oligonucleotide: CTLA4-1890
acgguucuggaucugcaa

SEQ ID NO: 46797 - RNA, 19 nt, Artificial Sequence
  Synthetic oligonucleotide: CTLA4-1891
cacgguucuggaucugcaa

SEQ ID NO: 46798 - RNA, 20 nt, Artificial Sequence
  Synthetic oligonucleotide: CTLA4-396
gcacgguucuggaucugcaa

SEQ ID NO: 46799 - RNA, 21 nt, Artificial Sequence
  Synthetic oligonucleotide: CTLA4-1892
ggcacgguucuggaucugcaa

SEQ ID NO: 46800 - RNA, 22 nt, Artificial Sequence
  Synthetic oligonucleotide: CTLA4-1893
gggcacgguucuggaucugcaa

SEQ ID NO: 46801 - RNA, 23 nt, Artificial Sequence
  Synthetic oligonucleotide: CTLA4-1894
ugggcacgguucuggaucugcaa

SEQ ID NO: 46802 - RNA, 24 nt, Artificial Sequence
  Synthetic oligonucleotide: CTLA4-1895
cugggcacgguucuggaucugcaa

SEQ ID NO: 46803 - RNA, 18 nt, Artificial Sequence
  Synthetic oligonucleotide: CTLA4-1896
cauagaccccuguuguaa

SEQ ID NO: 46804 - RNA, 19 nt, Artificial Sequence
  Synthetic oligonucleotide: CTLA4-1897
acauagaccccuguuguaa

SEQ ID NO: 46805 - RNA, 20 nt, Artificial Sequence
  Synthetic oligonucleotide: CTLA4-413
cacauagaccccuguuguaa

SEQ ID NO: 46806 - RNA, 21 nt, Artificial Sequence
  Synthetic oligonucleotide: CTLA4-1898
ucacauagaccccuguuguaa

SEQ ID NO: 46807 - RNA, 22 nt, Artificial Sequence
  Synthetic oligonucleotide: CTLA4-1899
uucacauagaccccuguuguaa

SEQ ID NO: 46808 - RNA, 23 nt, Artificial Sequence
  Synthetic oligonucleotide: CTLA4-1900
uuucacauagaccccuguuguaa

SEQ ID NO: 46809 - RNA, 24 nt, Artificial Sequence
  Synthetic oligonucleotide: CTLA4-1901
uuuucacauagaccccuguuguaa

SEQ ID NO: 46810 - RNA, 18 nt, Artificial Sequence
  Synthetic oligonucleotide: CTLA4-1902
aacugcugcaaggaucca

SEQ ID NO: 46811 - RNA, 19 nt, Artificial Sequence
  Synthetic oligonucleotide: CTLA4-1903
uaacugcugcaaggaucca

SEQ ID NO: 46812 - RNA, 20 nt, Artificial Sequence
  Synthetic oligonucleotide: CTLA4-403
cuaacugcugcaaggaucca

SEQ ID NO: 46813 - RNA, 21 nt, Artificial Sequence
  Synthetic oligonucleotide: CTLA4-1904
acuaacugcugcaaggaucca

SEQ ID NO: 46814 - RNA, 22 nt, Artificial Sequence
  Synthetic oligonucleotide: CTLA4-1905
aacuaacugcugcaaggaucca

SEQ ID NO: 46815 - RNA, 23 nt, Artificial Sequence
  Synthetic oligonucleotide: CTLA4-1906
gaacuaacugcugcaaggaucca

SEQ ID NO: 46816 - RNA, 24 nt, Artificial Sequence
  Synthetic oligonucleotide: CTLA4-1907
cgaacuaacugcugcaaggaucca

SEQ ID NO: 46817 - RNA, 18 nt, Artificial Sequence
  Synthetic oligonucleotide: CTLA4-1908
cacucaccauuuugcuca

SEQ ID NO: 46818 - RNA, 19 nt, Artificial Sequence
  Synthetic oligonucleotide: CTLA4-1909
acacucaccauuuugcuca

SEQ ID NO: 46819 - RNA, 20 nt, Artificial Sequence
  Synthetic oligonucleotide: CTLA4-411
cacacucaccauuuugcuca

SEQ ID NO: 46820 - RNA, 21 nt, Artificial Sequence
  Synthetic oligonucleotide: CTLA4-1910
ccacacucaccauuuugcuca

SEQ ID NO: 46821 - RNA, 22 nt, Artificial Sequence
  Synthetic oligonucleotide: CTLA4-1911
accacacucaccauuuugcuca

SEQ ID NO: 46822 - RNA, 23 nt, Artificial Sequence
  Synthetic oligonucleotide: CTLA4-1912
caccacacucaccauuuugcuca

SEQ ID NO: 46823 - RNA, 24 nt, Artificial Sequence
  Synthetic oligonucleotide: CTLA4-1913
gcaccacacucaccauuuugcuca

SEQ ID NO: 46824 - RNA, 18 nt, Artificial Sequence
  Synthetic oligonucleotide: CTLA4-1914
uaaugguuucucaauuga

SEQ ID NO: 46825 - RNA, 19 nt, Artificial Sequence
  Synthetic oligonucleotide: CTLA4-1915
auaaugguuucucaauuga

SEQ ID NO: 46826 - RNA, 20 nt, Artificial Sequence
  Synthetic oligonucleotide: CTLA4-190
cauaaugguuucucaauuga

SEQ ID NO: 46827 - RNA, 21 nt, Artificial Sequence
  Synthetic oligonucleotide: CTLA4-1916
ucauaaugguuucucaauuga

SEQ ID NO: 46828 - RNA, 22 nt, Artificial Sequence
  Synthetic oligonucleotide: CTLA4-1917
uucauaaugguuucucaauuga

SEQ ID NO: 46829 - RNA, 23 nt, Artificial Sequence
  Synthetic oligonucleotide: CTLA4-1918
cuucauaaugguuucucaauuga

SEQ ID NO: 46830 - RNA, 24 nt, Artificial Sequence
  Synthetic oligonucleotide: CTLA4-1919
ucuucauaaugguuucucaauuga

SEQ ID NO: 46831 - RNA, 18 nt, Artificial Sequence
  Synthetic oligonucleotide: CTLA4-1920
agcuauaaaaaaacaacc

SEQ ID NO: 46832 - RNA, 19 nt, Artificial Sequence
  Synthetic oligonucleotide: CTLA4-1921
aagcuauaaaaaaacaacc

SEQ ID NO: 46833 - RNA, 20 nt, Artificial Sequence
  Synthetic oligonucleotide: CTLA4-406
aaagcuauaaaaaaacaacc

SEQ ID NO: 46834 - RNA, 21 nt, Artificial Sequence
  Synthetic oligonucleotide: CTLA4-1922
gaaagcuauaaaaaaacaacc

SEQ ID NO: 46835 - RNA, 22 nt, Artificial Sequence
  Synthetic oligonucleotide: CTLA4-1923
agaaagcuauaaaaaaacaacc

SEQ ID NO: 46836 - RNA, 23 nt, Artificial Sequence
  Synthetic oligonucleotide: CTLA4-1924
gagaaagcuauaaaaaaacaacc

SEQ ID NO: 46837 - RNA, 24 nt, Artificial Sequence
  Synthetic oligonucleotide: CTLA4-1925
ggagaaagcuauaaaaaaacaacc

SEQ ID NO: 46838 - RNA, 18 nt, Artificial Sequence
  Synthetic oligonucleotide: CTLA4-1926
cuaacugcugcaaggauc

SEQ ID NO: 46839 - RNA, 19 nt, Artificial Sequence
  Synthetic oligonucleotide: CTLA4-1927
acuaacugcugcaaggauc

SEQ ID NO: 46840 - RNA, 20 nt, Artificial Sequence
  Synthetic oligonucleotide: CTLA4-404
aacuaacugcugcaaggauc

SEQ ID NO: 46841 - RNA, 21 nt, Artificial Sequence
  Synthetic oligonucleotide: CTLA4-1928
gaacuaacugcugcaaggauc

SEQ ID NO: 46842 - RNA, 22 nt, Artificial Sequence
  Synthetic oligonucleotide: CTLA4-1929
cgaacuaacugcugcaaggauc

SEQ ID NO: 46843 - RNA, 23 nt, Artificial Sequence
  Synthetic oligonucleotide: CTLA4-1930
ccgaacuaacugcugcaaggauc

SEQ ID NO: 46844 - RNA, 24 nt, Artificial Sequence
  Synthetic oligonucleotide: CTLA4-1931
cccgaacuaacugcugcaaggauc

SEQ ID NO: 46845 - RNA, 18 nt, Artificial Sequence
  Synthetic oligonucleotide: CTLA4-1932
cugcaacagaaaacaaag

SEQ ID NO: 46846 - RNA, 19 nt, Artificial Sequence
  Synthetic oligonucleotide: CTLA4-1933
ucugcaacagaaaacaaag

SEQ ID NO: 46847 - RNA, 20 nt, Artificial Sequence
  Synthetic oligonucleotide: CTLA4-395
aucugcaacagaaaacaaag

SEQ ID NO: 46848 - RNA, 21 nt, Artificial Sequence
  Synthetic oligonucleotide: CTLA4-1934
gaucugcaacagaaaacaaag

SEQ ID NO: 46849 - RNA, 22 nt, Artificial Sequence
  Synthetic oligonucleotide: CTLA4-1935
ggaucugcaacagaaaacaaag

SEQ ID NO: 46850 - RNA, 23 nt, Artificial Sequence
  Synthetic oligonucleotide: CTLA4-1936
uggaucugcaacagaaaacaaag

SEQ ID NO: 46851 - RNA, 24 nt, Artificial Sequence
  Synthetic oligonucleotide: CTLA4-1937
cuggaucugcaacagaaaacaaag

SEQ ID NO: 46852 - RNA, 18 nt, Artificial Sequence
  Synthetic oligonucleotide: CTLA4-1938
acugcugcaaggauccag

SEQ ID NO: 46853 - RNA, 19 nt, Artificial Sequence
  Synthetic oligonucleotide: CTLA4-1939
aacugcugcaaggauccag

SEQ ID NO: 46854 - RNA, 20 nt, Artificial Sequence
  Synthetic oligonucleotide: CTLA4-178
uaacugcugcaaggauccag

SEQ ID NO: 46855 - RNA, 21 nt, Artificial Sequence
  Synthetic oligonucleotide: CTLA4-1940
cuaacugcugcaaggauccag

SEQ ID NO: 46856 - RNA, 22 nt, Artificial Sequence
  Synthetic oligonucleotide: CTLA4-1941
acuaacugcugcaaggauccag

SEQ ID NO: 46857 - RNA, 23 nt, Artificial Sequence
  Synthetic oligonucleotide: CTLA4-1942
aacuaacugcugcaaggauccag

SEQ ID NO: 46858 - RNA, 24 nt, Artificial Sequence
  Synthetic oligonucleotide: CTLA4-1943
gaacuaacugcugcaaggauccag

SEQ ID NO: 46859 - RNA, 18 nt, Artificial Sequence
  Synthetic oligonucleotide: CTLA4-1944
ugcugcaaggauccagag

SEQ ID NO: 46860 - RNA, 19 nt, Artificial Sequence
  Synthetic oligonucleotide: CTLA4-1945
cugcugcaaggauccagag

SEQ ID NO: 46861 - RNA, 20 nt, Artificial Sequence
  Synthetic oligonucleotide: CTLA4-401
acugcugcaaggauccagag

SEQ ID NO: 46862 - RNA, 21 nt, Artificial Sequence
  Synthetic oligonucleotide: CTLA4-1946
aacugcugcaaggauccagag

SEQ ID NO: 46863 - RNA, 22 nt, Artificial Sequence
  Synthetic oligonucleotide: CTLA4-1947
uaacugcugcaaggauccagag

SEQ ID NO: 46864 - RNA, 23 nt, Artificial Sequence
  Synthetic oligonucleotide: CTLA4-1948
cuaacugcugcaaggauccagag

SEQ ID NO: 46865 - RNA, 24 nt, Artificial Sequence
  Synthetic oligonucleotide: CTLA4-1949
acuaacugcugcaaggauccagag

SEQ ID NO: 46866 - RNA, 18 nt, Artificial Sequence
  Synthetic oligonucleotide: CTLA4-1950
caaagaaacagcugugag

SEQ ID NO: 46867 - RNA, 19 nt, Artificial Sequence
  Synthetic oligonucleotide: CTLA4-1951
ucaaagaaacagcugugag

SEQ ID NO: 46868 - RNA, 20 nt, Artificial Sequence
  Synthetic oligonucleotide: CTLA4-407
cucaaagaaacagcugugag

SEQ ID NO: 46869 - RNA, 21 nt, Artificial Sequence
  Synthetic oligonucleotide: CTLA4-1952
gcucaaagaaacagcugugag

SEQ ID NO: 46870 - RNA, 22 nt, Artificial Sequence
  Synthetic oligonucleotide: CTLA4-1953
ugcucaaagaaacagcugugag

SEQ ID NO: 46871 - RNA, 23 nt, Artificial Sequence
  Synthetic oligonucleotide: CTLA4-1954
uugcucaaagaaacagcugugag

SEQ ID NO: 46872 - RNA, 24 nt, Artificial Sequence
  Synthetic oligonucleotide: CTLA4-1955
uuugcucaaagaaacagcugugag

SEQ ID NO: 46873 - RNA, 18 nt, Artificial Sequence
  Synthetic oligonucleotide: CTLA4-1956
gaugggaauaaaauaagg

SEQ ID NO: 46874 - RNA, 19 nt, Artificial Sequence
  Synthetic oligonucleotide: CTLA4-1957
ugaugggaauaaaauaagg

SEQ ID NO: 46875 - RNA, 20 nt, Artificial Sequence
  Synthetic oligonucleotide: CTLA4-418
uugaugggaauaaaauaagg

SEQ ID NO: 46876 - RNA, 21 nt, Artificial Sequence
  Synthetic oligonucleotide: CTLA4-1958
auugaugggaauaaaauaagg

SEQ ID NO: 46877 - RNA, 22 nt, Artificial Sequence
  Synthetic oligonucleotide: CTLA4-1959
aauugaugggaauaaaauaagg

SEQ ID NO: 46878 - RNA, 23 nt, Artificial Sequence
  Synthetic oligonucleotide: CTLA4-1960
caauugaugggaauaaaauaagg

SEQ ID NO: 46879 - RNA, 24 nt, Artificial Sequence
  Synthetic oligonucleotide: CTLA4-1961
ucaauugaugggaauaaaauaagg

SEQ ID NO: 46880 - RNA, 18 nt, Artificial Sequence
  Synthetic oligonucleotide: CTLA4-1962
gcugcaaggauccagagg

SEQ ID NO: 46881 - RNA, 19 nt, Artificial Sequence
  Synthetic oligonucleotide: CTLA4-1963
ugcugcaaggauccagagg

SEQ ID NO: 46882 - RNA, 20 nt, Artificial Sequence
  Synthetic oligonucleotide: CTLA4-177
cugcugcaaggauccagagg

SEQ ID NO: 46883 - RNA, 21 nt, Artificial Sequence
  Synthetic oligonucleotide: CTLA4-1964
acugcugcaaggauccagagg

SEQ ID NO: 46884 - RNA, 22 nt, Artificial Sequence
  Synthetic oligonucleotide: CTLA4-1965
aacugcugcaaggauccagagg

SEQ ID NO: 46885 - RNA, 23 nt, Artificial Sequence
  Synthetic oligonucleotide: CTLA4-1966
uaacugcugcaaggauccagagg

SEQ ID NO: 46886 - RNA, 24 nt, Artificial Sequence
  Synthetic oligonucleotide: CTLA4-1967
cuaacugcugcaaggauccagagg

SEQ ID NO: 46887 - RNA, 18 nt, Artificial Sequence
  Synthetic oligonucleotide: CTLA4-1968
uuucacauucuggcucug

SEQ ID NO: 46888 - RNA, 19 nt, Artificial Sequence
  Synthetic oligonucleotide: CTLA4-1969
uuuucacauucuggcucug

SEQ ID NO: 46889 - RNA, 20 nt, Artificial Sequence
  Synthetic oligonucleotide: CTLA4-417
cuuuucacauucuggcucug

SEQ ID NO: 46890 - RNA, 21 nt, Artificial Sequence
  Synthetic oligonucleotide: CTLA4-1970
gcuuuucacauucuggcucug

SEQ ID NO: 46891 - RNA, 22 nt, Artificial Sequence
  Synthetic oligonucleotide: CTLA4-1971
ugcuuuucacauucuggcucug

SEQ ID NO: 46892 - RNA, 23 nt, Artificial Sequence
  Synthetic oligonucleotide: CTLA4-1972
uugcuuuucacauucuggcucug

SEQ ID NO: 46893 - RNA, 24 nt, Artificial Sequence
  Synthetic oligonucleotide: CTLA4-1973
auugcuuuucacauucuggcucug

SEQ ID NO: 46894 - RNA, 18 nt, Artificial Sequence
  Synthetic oligonucleotide: CTLA4-1974
cucaaagaaacagcugug

SEQ ID NO: 46895 - RNA, 19 nt, Artificial Sequence
  Synthetic oligonucleotide: CTLA4-1975
gcucaaagaaacagcugug

SEQ ID NO: 46896 - RNA, 20 nt, Artificial Sequence
  Synthetic oligonucleotide: CTLA4-180
ugcucaaagaaacagcugug

SEQ ID NO: 46897 - RNA, 21 nt, Artificial Sequence
  Synthetic oligonucleotide: CTLA4-1976
uugcucaaagaaacagcugug

SEQ ID NO: 46898 - RNA, 22 nt, Artificial Sequence
  Synthetic oligonucleotide: CTLA4-1977
uuugcucaaagaaacagcugug

SEQ ID NO: 46899 - RNA, 23 nt, Artificial Sequence
  Synthetic oligonucleotide: CTLA4-1978
uuuugcucaaagaaacagcugug

SEQ ID NO: 46900 - RNA, 24 nt, Artificial Sequence
  Synthetic oligonucleotide: CTLA4-1979
auuuugcucaaagaaacagcugug

SEQ ID NO: 46901 - RNA, 18 nt, Artificial Sequence
  Synthetic oligonucleotide: CTLA4-1980
auaaugguuucucaauug

SEQ ID NO: 46902 - RNA, 19 nt, Artificial Sequence
  Synthetic oligonucleotide: CTLA4-1981
cauaaugguuucucaauug

SEQ ID NO: 46903 - RNA, 20 nt, Artificial Sequence
  Synthetic oligonucleotide: CTLA4-421
ucauaaugguuucucaauug

SEQ ID NO: 46904 - RNA, 21 nt, Artificial Sequence
  Synthetic oligonucleotide: CTLA4-1982
uucauaaugguuucucaauug

SEQ ID NO: 46905 - RNA, 22 nt, Artificial Sequence
  Synthetic oligonucleotide: CTLA4-1983
cuucauaaugguuucucaauug

SEQ ID NO: 46906 - RNA, 23 nt, Artificial Sequence
  Synthetic oligonucleotide: CTLA4-1984
ucuucauaaugguuucucaauug

SEQ ID NO: 46907 - RNA, 24 nt, Artificial Sequence
  Synthetic oligonucleotide: CTLA4-1985
uucuucauaaugguuucucaauug

SEQ ID NO: 46908 - RNA, 18 nt, Artificial Sequence
  Synthetic oligonucleotide: CTLA4-1986
agaggaggaagucagaau

SEQ ID NO: 46909 - RNA, 19 nt, Artificial Sequence
  Synthetic oligonucleotide: CTLA4-1987
cagaggaggaagucagaau

SEQ ID NO: 46910 - RNA, 20 nt, Artificial Sequence
  Synthetic oligonucleotide: CTLA4-398
ccagaggaggaagucagaau

SEQ ID NO: 46911 - RNA, 21 nt, Artificial Sequence
  Synthetic oligonucleotide: CTLA4-1988
uccagaggaggaagucagaau

SEQ ID NO: 46912 - RNA, 22 nt, Artificial Sequence
  Synthetic oligonucleotide: CTLA4-1989
auccagaggaggaagucagaau

SEQ ID NO: 46913 - RNA, 23 nt, Artificial Sequence
  Synthetic oligonucleotide: CTLA4-1990
gauccagaggaggaagucagaau

SEQ ID NO: 46914 - RNA, 24 nt, Artificial Sequence
  Synthetic oligonucleotide: CTLA4-1991
ggauccagaggaggaagucagaau

SEQ ID NO: 46915 - RNA, 18 nt, Artificial Sequence
  Synthetic oligonucleotide: CTLA4-1992
uugcucaaagaaacagcu

SEQ ID NO: 46916 - RNA, 19 nt, Artificial Sequence
  Synthetic oligonucleotide: CTLA4-1993
uuugcucaaagaaacagcu

SEQ ID NO: 46917 - RNA, 20 nt, Artificial Sequence
  Synthetic oligonucleotide: CTLA4-410
uuuugcucaaagaaacagcu

SEQ ID NO: 46918 - RNA, 21 nt, Artificial Sequence
  Synthetic oligonucleotide: CTLA4-1994
auuuugcucaaagaaacagcu

SEQ ID NO: 46919 - RNA, 22 nt, Artificial Sequence
  Synthetic oligonucleotide: CTLA4-1995
cauuuugcucaaagaaacagcu

SEQ ID NO: 46920 - RNA, 23 nt, Artificial Sequence
  Synthetic oligonucleotide: CTLA4-1996
ccauuuugcucaaagaaacagcu

SEQ ID NO: 46921 - RNA, 24 nt, Artificial Sequence
  Synthetic oligonucleotide: CTLA4-1997
accauuuugcucaaagaaacagcu

SEQ ID NO: 46922 - RNA, 18 nt, Artificial Sequence
  Synthetic oligonucleotide: CTLA4-1998
gcucaaagaaacagcugu

SEQ ID NO: 46923 - RNA, 19 nt, Artificial Sequence
  Synthetic oligonucleotide: CTLA4-1999
ugcucaaagaaacagcugu

SEQ ID NO: 46924 - RNA, 20 nt, Artificial Sequence
  Synthetic oligonucleotide: CTLA4-409
uugcucaaagaaacagcugu

SEQ ID NO: 46925 - RNA, 21 nt, Artificial Sequence
  Synthetic oligonucleotide: CTLA4-2000
uuugcucaaagaaacagcugu

SEQ ID NO: 46926 - RNA, 22 nt, Artificial Sequence
  Synthetic oligonucleotide: CTLA4-2001
uuuugcucaaagaaacagcugu

SEQ ID NO: 46927 - RNA, 23 nt, Artificial Sequence
  Synthetic oligonucleotide: CTLA4-2002
auuuugcucaaagaaacagcugu

SEQ ID NO: 46928 - RNA, 24 nt, Artificial Sequence
  Synthetic oligonucleotide: CTLA4-2003
cauuuugcucaaagaaacagcugu

SEQ ID NO: 46929 - RNA, 18 nt, Artificial Sequence
  Synthetic oligonucleotide: CTLA4-2004
uucacauucuggcucugu

SEQ ID NO: 46930 - RNA, 19 nt, Artificial Sequence
  Synthetic oligonucleotide: CTLA4-2005
uuucacauucuggcucugu

SEQ ID NO: 46931 - RNA, 20 nt, Artificial Sequence
  Synthetic oligonucleotide: CTLA4-186
uuuucacauucuggcucugu

SEQ ID NO: 46932 - RNA, 21 nt, Artificial Sequence
  Synthetic oligonucleotide: CTLA4-2006
cuuuucacauucuggcucugu

SEQ ID NO: 46933 - RNA, 22 nt, Artificial Sequence
  Synthetic oligonucleotide: CTLA4-2007
gcuuuucacauucuggcucugu

SEQ ID NO: 46934 - RNA, 23 nt, Artificial Sequence
  Synthetic oligonucleotide: CTLA4-2008
ugcuuuucacauucuggcucugu

SEQ ID NO: 46935 - RNA, 24 nt, Artificial Sequence
  Synthetic oligonucleotide: CTLA4-2009
uugcuuuucacauucuggcucugu

SEQ ID NO: 46936 - RNA, 18 nt, Artificial Sequence
  Synthetic oligonucleotide: CTLA4-2010
cacauagaccccuguugu

SEQ ID NO: 46937 - RNA, 19 nt, Artificial Sequence
  Synthetic oligonucleotide: CTLA4-2011
ucacauagaccccuguugu

SEQ ID NO: 46938 - RNA, 20 nt, Artificial Sequence
  Synthetic oligonucleotide: CTLA4-414
uucacauagaccccuguugu

SEQ ID NO: 46939 - RNA, 21 nt, Artificial Sequence
  Synthetic oligonucleotide: CTLA4-2012
uuucacauagaccccuguugu

SEQ ID NO: 46940 - RNA, 22 nt, Artificial Sequence
  Synthetic oligonucleotide: CTLA4-2013
uuuucacauagaccccuguugu

SEQ ID NO: 46941 - RNA, 23 nt, Artificial Sequence
  Synthetic oligonucleotide: CTLA4-2014
auuuucacauagaccccuguugu

SEQ ID NO: 46942 - RNA, 24 nt, Artificial Sequence
  Synthetic oligonucleotide: CTLA4-2015
cauuuucacauagaccccuguugu

SEQ ID NO: 46943 - RNA, 18 nt, Artificial Sequence
  Synthetic oligonucleotide: CTLA4-2016
ucacauucuggcucuguu

SEQ ID NO: 46944 - RNA, 19 nt, Artificial Sequence
  Synthetic oligonucleotide: CTLA4-2017
uucacauucuggcucuguu

SEQ ID NO: 46945 - RNA, 20 nt, Artificial Sequence
  Synthetic oligonucleotide: CTLA4-185
uuucacauucuggcucuguu

SEQ ID NO: 46946 - RNA, 21 nt, Artificial Sequence
  Synthetic oligonucleotide: CTLA4-2018
uuuucacauucuggcucuguu

SEQ ID NO: 46947 - RNA, 22 nt, Artificial Sequence
  Synthetic oligonucleotide: CTLA4-2019
cuuuucacauucuggcucuguu

SEQ ID NO: 46948 - RNA, 23 nt, Artificial Sequence
  Synthetic oligonucleotide: CTLA4-2020
gcuuuucacauucuggcucuguu

SEQ ID NO: 46949 - RNA, 24 nt, Artificial Sequence
  Synthetic oligonucleotide: CTLA4-2021
ugcuuuucacauucuggcucuguu

SEQ ID NO: 46950 - RNA, 18 nt, Artificial Sequence
  Synthetic oligonucleotide: CTLA4-2022
aaagaagcccucuuacaa

SEQ ID NO: 46951 - RNA, 19 nt, Artificial Sequence
  Synthetic oligonucleotide: CTLA4-2023
aaaagaagcccucuuacaa

SEQ ID NO: 46952 - RNA, 20 nt, Artificial Sequence
  Synthetic oligonucleotide: CTLA4-358
gaaaagaagcccucuuacaa

SEQ ID NO: 46953 - RNA, 21 nt, Artificial Sequence
  Synthetic oligonucleotide: CTLA4-2024
agaaaagaagcccucuuacaa

SEQ ID NO: 46954 - RNA, 22 nt, Artificial Sequence
  Synthetic oligonucleotide: CTLA4-2025
aagaaaagaagcccucuuacaa

SEQ ID NO: 46955 - RNA, 23 nt, Artificial Sequence
  Synthetic oligonucleotide: CTLA4-2026
aaagaaaagaagcccucuuacaa

SEQ ID NO: 46956 - RNA, 24 nt, Artificial Sequence
  Synthetic oligonucleotide: CTLA4-2027
uaaagaaaagaagcccucuuacaa

SEQ ID NO: 46957 - RNA, 18 nt, Artificial Sequence
  Synthetic oligonucleotide: CTLA4-2028
augugaaaaugcccccaa

SEQ ID NO: 46958 - RNA, 19 nt, Artificial Sequence
  Synthetic oligonucleotide: CTLA4-2029
uaugugaaaaugcccccaa

SEQ ID NO: 46959 - RNA, 20 nt, Artificial Sequence
  Synthetic oligonucleotide: CTLA4-361
cuaugugaaaaugcccccaa

SEQ ID NO: 46960 - RNA, 21 nt, Artificial Sequence
  Synthetic oligonucleotide: CTLA4-2030
ucuaugugaaaaugcccccaa

SEQ ID NO: 46961 - RNA, 22 nt, Artificial Sequence
  Synthetic oligonucleotide: CTLA4-2031
gucuaugugaaaaugcccccaa

SEQ ID NO: 46962 - RNA, 23 nt, Artificial Sequence
  Synthetic oligonucleotide: CTLA4-2032
ggucuaugugaaaaugcccccaa

SEQ ID NO: 46963 - RNA, 24 nt, Artificial Sequence
  Synthetic oligonucleotide: CTLA4-2033
gggucuaugugaaaaugcccccaa

SEQ ID NO: 46964 - RNA, 18 nt, Artificial Sequence
  Synthetic oligonucleotide: CTLA4-2034
uuauuuuauucccaucaa

SEQ ID NO: 46965 - RNA, 19 nt, Artificial Sequence
  Synthetic oligonucleotide: CTLA4-2035
cuuauuuuauucccaucaa

SEQ ID NO: 46966 - RNA, 20 nt, Artificial Sequence
  Synthetic oligonucleotide: CTLA4-364
ccuuauuuuauucccaucaa

SEQ ID NO: 46967 - RNA, 21 nt, Artificial Sequence
  Synthetic oligonucleotide: CTLA4-2036
gccuuauuuuauucccaucaa

SEQ ID NO: 46968 - RNA, 22 nt, Artificial Sequence
  Synthetic oligonucleotide: CTLA4-2037
agccuuauuuuauucccaucaa

SEQ ID NO: 46969 - RNA, 23 nt, Artificial Sequence
  Synthetic oligonucleotide: CTLA4-2038
cagccuuauuuuauucccaucaa

SEQ ID NO: 46970 - RNA, 24 nt, Artificial Sequence
  Synthetic oligonucleotide: CTLA4-2039
ucagccuuauuuuauucccaucaa

SEQ ID NO: 46971 - RNA, 18 nt, Artificial Sequence
  Synthetic oligonucleotide: CTLA4-2040
uguuugacagcuaaagaa

SEQ ID NO: 46972 - RNA, 19 nt, Artificial Sequence
  Synthetic oligonucleotide: CTLA4-2041
guguuugacagcuaaagaa

SEQ ID NO: 46973 - RNA, 20 nt, Artificial Sequence
  Synthetic oligonucleotide: CTLA4-357
uguguuugacagcuaaagaa

SEQ ID NO: 46974 - RNA, 21 nt, Artificial Sequence
  Synthetic oligonucleotide: CTLA4-2042
uuguguuugacagcuaaagaa

SEQ ID NO: 46975 - RNA, 22 nt, Artificial Sequence
  Synthetic oligonucleotide: CTLA4-2043
uuuguguuugacagcuaaagaa

SEQ ID NO: 46976 - RNA, 23 nt, Artificial Sequence
  Synthetic oligonucleotide: CTLA4-2044
uuuuguguuugacagcuaaagaa

SEQ ID NO: 46977 - RNA, 24 nt, Artificial Sequence
  Synthetic oligonucleotide: CTLA4-2045
uuuuuguguuugacagcuaaagaa

SEQ ID NO: 46978 - RNA, 18 nt, Artificial Sequence
  Synthetic oligonucleotide: CTLA4-2046
uuuuguguuugacagcua

SEQ ID NO: 46979 - RNA, 19 nt, Artificial Sequence
  Synthetic oligonucleotide: CTLA4-2047
uuuuuguguuugacagcua

SEQ ID NO: 46980 - RNA, 20 nt, Artificial Sequence
  Synthetic oligonucleotide: CTLA4-356
cuuuuuguguuugacagcua

SEQ ID NO: 46981 - RNA, 21 nt, Artificial Sequence
  Synthetic oligonucleotide: CTLA4-2048
ucuuuuuguguuugacagcua

SEQ ID NO: 46982 - RNA, 22 nt, Artificial Sequence
  Synthetic oligonucleotide: CTLA4-2049
uucuuuuuguguuugacagcua

SEQ ID NO: 46983 - RNA, 23 nt, Artificial Sequence
  Synthetic oligonucleotide: CTLA4-2050
uuucuuuuuguguuugacagcua

SEQ ID NO: 46984 - RNA, 24 nt, Artificial Sequence
  Synthetic oligonucleotide: CTLA4-2051
guuucuuuuuguguuugacagcua

SEQ ID NO: 46985 - RNA, 18 nt, Artificial Sequence
  Synthetic oligonucleotide: CTLA4-2052
uguuuucuguugcagauc

SEQ ID NO: 46986 - RNA, 19 nt, Artificial Sequence
  Synthetic oligonucleotide: CTLA4-2053
uuguuuucuguugcagauc

SEQ ID NO: 46987 - RNA, 20 nt, Artificial Sequence
  Synthetic oligonucleotide: CTLA4-350
uuuguuuucuguugcagauc

SEQ ID NO: 46988 - RNA, 21 nt, Artificial Sequence
  Synthetic oligonucleotide: CTLA4-2054
cuuuguuuucuguugcagauc

SEQ ID NO: 46989 - RNA, 22 nt, Artificial Sequence
  Synthetic oligonucleotide: CTLA4-2055
gcuuuguuuucuguugcagauc

SEQ ID NO: 46990 - RNA, 23 nt, Artificial Sequence
  Synthetic oligonucleotide: CTLA4-2056
ugcuuuguuuucuguugcagauc

SEQ ID NO: 46991 - RNA, 24 nt, Artificial Sequence
  Synthetic oligonucleotide: CTLA4-2057
cugcuuuguuuucuguugcagauc

SEQ ID NO: 46992 - RNA, 18 nt, Artificial Sequence
  Synthetic oligonucleotide: CTLA4-2058
ugagaaaccauuaugaag

SEQ ID NO: 46993 - RNA, 19 nt, Artificial Sequence
  Synthetic oligonucleotide: CTLA4-2059
uugagaaaccauuaugaag

SEQ ID NO: 46994 - RNA, 20 nt, Artificial Sequence
  Synthetic oligonucleotide: CTLA4-368
auugagaaaccauuaugaag

SEQ ID NO: 46995 - RNA, 21 nt, Artificial Sequence
  Synthetic oligonucleotide: CTLA4-2060
aauugagaaaccauuaugaag

SEQ ID NO: 46996 - RNA, 22 nt, Artificial Sequence
  Synthetic oligonucleotide: CTLA4-2061
caauugagaaaccauuaugaag

SEQ ID NO: 46997 - RNA, 23 nt, Artificial Sequence
  Synthetic oligonucleotide: CTLA4-2062
ucaauugagaaaccauuaugaag

SEQ ID NO: 46998 - RNA, 24 nt, Artificial Sequence
  Synthetic oligonucleotide: CTLA4-2063
aucaauugagaaaccauuaugaag

SEQ ID NO: 46999 - RNA, 18 nt, Artificial Sequence
  Synthetic oligonucleotide: CTLA4-2064
aauugagaaaccauuaug

SEQ ID NO: 47000 - RNA, 19 nt, Artificial Sequence
  Synthetic oligonucleotide: CTLA4-2065
caauugagaaaccauuaug

SEQ ID NO: 47001 - RNA, 20 nt, Artificial Sequence
  Synthetic oligonucleotide: CTLA4-367
ucaauugagaaaccauuaug

SEQ ID NO: 47002 - RNA, 21 nt, Artificial Sequence
  Synthetic oligonucleotide: CTLA4-2066
aucaauugagaaaccauuaug

SEQ ID NO: 47003 - RNA, 22 nt, Artificial Sequence
  Synthetic oligonucleotide: CTLA4-2067
caucaauugagaaaccauuaug

SEQ ID NO: 47004 - RNA, 23 nt, Artificial Sequence
  Synthetic oligonucleotide: CTLA4-2068
ccaucaauugagaaaccauuaug

SEQ ID NO: 47005 - RNA, 24 nt, Artificial Sequence
  Synthetic oligonucleotide: CTLA4-2069
cccaucaauugagaaaccauuaug

SEQ ID NO: 47006 - RNA, 18 nt, Artificial Sequence
  Synthetic oligonucleotide: CTLA4-2070
ccccaacagagccagaau

SEQ ID NO: 47007 - RNA, 19 nt, Artificial Sequence
  Synthetic oligonucleotide: CTLA4-2071
cccccaacagagccagaau

SEQ ID NO: 47008 - RNA, 20 nt, Artificial Sequence
  Synthetic oligonucleotide: CTLA4-363
gcccccaacagagccagaau

SEQ ID NO: 47009 - RNA, 21 nt, Artificial Sequence
  Synthetic oligonucleotide: CTLA4-2072
ugcccccaacagagccagaau

SEQ ID NO: 47010 - RNA, 22 nt, Artificial Sequence
  Synthetic oligonucleotide: CTLA4-2073
augcccccaacagagccagaau

SEQ ID NO: 47011 - RNA, 23 nt, Artificial Sequence
  Synthetic oligonucleotide: CTLA4-2074
aaugcccccaacagagccagaau

SEQ ID NO: 47012 - RNA, 24 nt, Artificial Sequence
  Synthetic oligonucleotide: CTLA4-2075
aaaugcccccaacagagccagaau

SEQ ID NO: 47013 - RNA, 18 nt, Artificial Sequence
  Synthetic oligonucleotide: CTLA4-2076
cuuacaacaggggucuau

SEQ ID NO: 47014 - RNA, 19 nt, Artificial Sequence
  Synthetic oligonucleotide: CTLA4-2077
ucuuacaacaggggucuau

SEQ ID NO: 47015 - RNA, 20 nt, Artificial Sequence
  Synthetic oligonucleotide: CTLA4-360
cucuuacaacaggggucuau

SEQ ID NO: 47016 - RNA, 21 nt, Artificial Sequence
  Synthetic oligonucleotide: CTLA4-2078
ccucuuacaacaggggucuau

SEQ ID NO: 47017 - RNA, 22 nt, Artificial Sequence
  Synthetic oligonucleotide: CTLA4-2079
cccucuuacaacaggggucuau

SEQ ID NO: 47018 - RNA, 23 nt, Artificial Sequence
  Synthetic oligonucleotide: CTLA4-2080
gcccucuuacaacaggggucuau

SEQ ID NO: 47019 - RNA, 24 nt, Artificial Sequence
  Synthetic oligonucleotide: CTLA4-2081
agcccucuuacaacaggggucuau

SEQ ID NO: 47020 - RNA, 18 nt, Artificial Sequence
  Synthetic oligonucleotide: CTLA4-2082
cuccucacagcuguuucu

SEQ ID NO: 47021 - RNA, 19 nt, Artificial Sequence
  Synthetic oligonucleotide: CTLA4-2083
ucuccucacagcuguuucu

SEQ ID NO: 47022 - RNA, 20 nt, Artificial Sequence
  Synthetic oligonucleotide: CTLA4-354
uucuccucacagcuguuucu

SEQ ID NO: 47023 - RNA, 21 nt, Artificial Sequence
  Synthetic oligonucleotide: CTLA4-2084
uuucuccucacagcuguuucu

SEQ ID NO: 47024 - RNA, 22 nt, Artificial Sequence
  Synthetic oligonucleotide: CTLA4-2085
cuuucuccucacagcuguuucu

SEQ ID NO: 47025 - RNA, 23 nt, Artificial Sequence
  Synthetic oligonucleotide: CTLA4-2086
gcuuucuccucacagcuguuucu

SEQ ID NO: 47026 - RNA, 24 nt, Artificial Sequence
  Synthetic oligonucleotide: CTLA4-2087
agcuuucuccucacagcuguuucu

SEQ ID NO: 47027 - RNA, 18 nt, Artificial Sequence
  Synthetic oligonucleotide: CTLA4-2088
auccuugcagcaguuagu

SEQ ID NO: 47028 - RNA, 19 nt, Artificial Sequence
  Synthetic oligonucleotide: CTLA4-2089
gauccuugcagcaguuagu

SEQ ID NO: 47029 - RNA, 20 nt, Artificial Sequence
  Synthetic oligonucleotide: CTLA4-352
ggauccuugcagcaguuagu

SEQ ID NO: 47030 - RNA, 21 nt, Artificial Sequence
  Synthetic oligonucleotide: CTLA4-2090
uggauccuugcagcaguuagu

SEQ ID NO: 47031 - RNA, 22 nt, Artificial Sequence
  Synthetic oligonucleotide: CTLA4-2091
cuggauccuugcagcaguuagu

SEQ ID NO: 47032 - RNA, 23 nt, Artificial Sequence
  Synthetic oligonucleotide: CTLA4-2092
ucuggauccuugcagcaguuagu

SEQ ID NO: 47033 - RNA, 24 nt, Artificial Sequence
  Synthetic oligonucleotide: CTLA4-2093
cucuggauccuugcagcaguuagu

SEQ ID NO: 47034 - RNA, 18 nt, Artificial Sequence
  Synthetic oligonucleotide: CTLA4-2094
auuuuauucccaucaauu

SEQ ID NO: 47035 - RNA, 19 nt, Artificial Sequence
  Synthetic oligonucleotide: CTLA4-2095
uauuuuauucccaucaauu

SEQ ID NO: 47036 - RNA, 20 nt, Artificial Sequence
  Synthetic oligonucleotide: CTLA4-365
uuauuuuauucccaucaauu

SEQ ID NO: 47037 - RNA, 21 nt, Artificial Sequence
  Synthetic oligonucleotide: CTLA4-2096
cuuauuuuauucccaucaauu

SEQ ID NO: 47038 - RNA, 22 nt, Artificial Sequence
  Synthetic oligonucleotide: CTLA4-2097
ccuuauuuuauucccaucaauu

SEQ ID NO: 47039 - RNA, 23 nt, Artificial Sequence
  Synthetic oligonucleotide: CTLA4-2098
gccuuauuuuauucccaucaauu

SEQ ID NO: 47040 - RNA, 24 nt, Artificial Sequence
  Synthetic oligonucleotide: CTLA4-2099
agccuuauuuuauucccaucaauu

SEQ ID NO: 47041 - RNA, 18 nt, Artificial Sequence
  Synthetic oligonucleotide: CTLA4-2100
aucaauugagaaaccauu

SEQ ID NO: 47042 - RNA, 19 nt, Artificial Sequence
  Synthetic oligonucleotide: CTLA4-2101
caucaauugagaaaccauu

SEQ ID NO: 47043 - RNA, 20 nt, Artificial Sequence
  Synthetic oligonucleotide: CTLA4-366
ccaucaauugagaaaccauu

SEQ ID NO: 47044 - RNA, 21 nt, Artificial Sequence
  Synthetic oligonucleotide: CTLA4-2102
cccaucaauugagaaaccauu

SEQ ID NO: 47045 - RNA, 22 nt, Artificial Sequence
  Synthetic oligonucleotide: CTLA4-2103
ucccaucaauugagaaaccauu

SEQ ID NO: 47046 - RNA, 23 nt, Artificial Sequence
  Synthetic oligonucleotide: CTLA4-2104
uucccaucaauugagaaaccauu

SEQ ID NO: 47047 - RNA, 24 nt, Artificial Sequence
  Synthetic oligonucleotide: CTLA4-2105
auucccaucaauugagaaaccauu

SEQ ID NO: 47048 - RNA, 17 nt, Artificial Sequence
  Synthetic oligonucleotide: CTLA4-458
gggcauaggcaacggaa

SEQ ID NO: 47049 - RNA, 17 nt, Artificial Sequence
  Synthetic oligonucleotide: CTLA4-2106
cacugagguccggguga

SEQ ID NO: 47050 - RNA, 17 nt, Artificial Sequence
  Synthetic oligonucleotide: CTLA4-2107
caccgcucccauaaagc

SEQ ID NO: 47051 - RNA, 17 nt, Artificial Sequence
  Synthetic oligonucleotide: CTLA4-2108
ugaaauccaaggcaagc

SEQ ID NO: 47052 - RNA, 17 nt, Artificial Sequence
  Synthetic oligonucleotide: CTLA4-452
auaaagccauggcuugc

SEQ ID NO: 47053 - RNA, 17 nt, Artificial Sequence
  Synthetic oligonucleotide: CTLA4-2109
ccagcagccgaggcauc

SEQ ID NO: 47054 - RNA, 17 nt, Artificial Sequence
  Synthetic oligonucleotide: CTLA4-2110
acugucacccggaccuc

SEQ ID NO: 47055 - RNA, 17 nt, Artificial Sequence
  Synthetic oligonucleotide: CTLA4-455
cuuggauagugagguuc

SEQ ID NO: 47056 - RNA, 17 nt, Artificial Sequence
  Synthetic oligonucleotide: CTLA4-453
aaugaguugaccuuccu

SEQ ID NO: 47057 - RNA, 20 nt, Artificial Sequence
  Synthetic oligonucleotide: CTLA4-456
ccugggcauaggcaacggaa

SEQ ID NO: 47058 - RNA, 20 nt, Artificial Sequence
  Synthetic oligonucleotide: CTLA4-2111
agccacugagguccggguga

SEQ ID NO: 47059 - RNA, 20 nt, Artificial Sequence
  Synthetic oligonucleotide: CTLA4-2112
gaacaccgcucccauaaagc

SEQ ID NO: 47060 - RNA, 20 nt, Artificial Sequence
  Synthetic oligonucleotide: CTLA4-2113
cgcugaaauccaaggcaagc

SEQ ID NO: 47061 - RNA, 20 nt, Artificial Sequence
  Synthetic oligonucleotide: CTLA4-1370
cccauaaagccauggcuugc

SEQ ID NO: 47062 - RNA, 20 nt, Artificial Sequence
  Synthetic oligonucleotide: CTLA4-2114
uggccagcagccgaggcauc

SEQ ID NO: 47063 - RNA, 20 nt, Artificial Sequence
  Synthetic oligonucleotide: CTLA4-2115
agcacugucacccggaccuc

SEQ ID NO: 47064 - RNA, 20 nt, Artificial Sequence
  Synthetic oligonucleotide: CTLA4-454
guccuuggauagugagguuc

SEQ ID NO: 47065 - RNA, 20 nt, Artificial Sequence
  Synthetic oligonucleotide: CTLA4-451
gggaaugaguugaccuuccu

SEQ ID NO: 47066 - RNA, 17 nt, Artificial Sequence
  Synthetic oligonucleotide: CTLA4-442
auagaccccuguuguaa

SEQ ID NO: 47067 - RNA, 17 nt, Artificial Sequence
  Synthetic oligonucleotide: CTLA4-2116
gaauaaaauaaggcuga

SEQ ID NO: 47068 - RNA, 17 nt, Artificial Sequence
  Synthetic oligonucleotide: CTLA4-459
gcagauccagaaccgug

SEQ ID NO: 47069 - RNA, 17 nt, Artificial Sequence
  Synthetic oligonucleotide: CTLA4-2117
guucgggguuguuuuuu

SEQ ID NO: 47070 - RNA, 20 nt, Artificial Sequence
  Synthetic oligonucleotide: CTLA4-413
cacauagaccccuguuguaa

SEQ ID NO: 47071 - RNA, 20 nt, Artificial Sequence
  Synthetic oligonucleotide: CTLA4-2118
ugggaauaaaauaaggcuga

SEQ ID NO: 47072 - RNA, 20 nt, Artificial Sequence
  Synthetic oligonucleotide: CTLA4-457
guugcagauccagaaccgug

SEQ ID NO: 47073 - RNA, 20 nt, Artificial Sequence
  Synthetic oligonucleotide: CTLA4-2119
uuaguucgggguuguuuuuu

SEQ ID NO: 47074 - RNA, 17 nt, Artificial Sequence
  Synthetic oligonucleotide: CTLA4-73
ccgcucccauaaagcca

SEQ ID NO: 47075 - RNA, 17 nt, Artificial Sequence
  Synthetic oligonucleotide: CTLA4-621
uugggcggcagcaaaua

SEQ ID NO: 47076 - RNA, 17 nt, Artificial Sequence
  Synthetic oligonucleotide: CTLA4-624
gcgccagguauuuagua

SEQ ID NO: 47077 - RNA, 17 nt, Artificial Sequence
  Synthetic oligonucleotide: CTLA4-660
gcgguguucaggucuuc

SEQ ID NO: 47078 - RNA, 17 nt, Artificial Sequence
  Synthetic oligonucleotide: CTLA4-144
uuaugggagcgguguuc

SEQ ID NO: 47079 - RNA, 17 nt, Artificial Sequence
  Synthetic oligonucleotide: CTLA4-672
ggaucuggauaacuaag

SEQ ID NO: 47080 - RNA, 17 nt, Artificial Sequence
  Synthetic oligonucleotide: CTLA4-625
cgccagguauuuaguag

SEQ ID NO: 47081 - RNA, 17 nt, Artificial Sequence
  Synthetic oligonucleotide: CTLA4-666
uacgagaaaggaagccg

SEQ ID NO: 47082 - RNA, 17 nt, Artificial Sequence
  Synthetic oligonucleotide: CTLA4-142
gcaagccauggcuuuau

SEQ ID NO: 47083 - RNA, 20 nt, Artificial Sequence
  Synthetic oligonucleotide: CTLA4-774
gugaagcaccauccuucuaa

SEQ ID NO: 47084 - RNA, 20 nt, Artificial Sequence
  Synthetic oligonucleotide: CTLA4-4
ccuuggauuucagcggcaca

SEQ ID NO: 47085 - RNA, 20 nt, Artificial Sequence
  Synthetic oligonucleotide: CTLA4-475
cgacguaacagcuaaaccca

SEQ ID NO: 47086 - RNA, 20 nt, Artificial Sequence
  Synthetic oligonucleotide: CTLA4-1
acaccgcucccauaaagcca

SEQ ID NO: 47087 - RNA, 20 nt, Artificial Sequence
  Synthetic oligonucleotide: CTLA4-67
ccuugugccgcugaaaucca

SEQ ID NO: 47088 - RNA, 20 nt, Artificial Sequence
  Synthetic oligonucleotide: CTLA4-701
gcugucaagggaccauuaga

SEQ ID NO: 47089 - RNA, 20 nt, Artificial Sequence
  Synthetic oligonucleotide: CTLA4-702
ucaagggaccauuagaagga

SEQ ID NO: 47090 - RNA, 20 nt, Artificial Sequence
  Synthetic oligonucleotide: CTLA4-512
agagcgccagguauuuagua

SEQ ID NO: 47091 - RNA, 20 nt, Artificial Sequence
  Synthetic oligonucleotide: CTLA4-466
ugaauuggacuggaugguua

SEQ ID NO: 47092 - RNA, 20 nt, Artificial Sequence
  Synthetic oligonucleotide: CTLA4-59
cacucaccuuugcagaagac

SEQ ID NO: 47093 - RNA, 20 nt, Artificial Sequence
  Synthetic oligonucleotide: CTLA4-571
ugagcccuugggcuaauggc

SEQ ID NO: 47094 - RNA, 20 nt, Artificial Sequence
  Synthetic oligonucleotide: CTLA4-559
ucauguucacuuugaggauc

SEQ ID NO: 47095 - RNA, 20 nt, Artificial Sequence
  Synthetic oligonucleotide: CTLA4-531
ggaguuuuaccuuuaacuuc

SEQ ID NO: 47096 - RNA, 20 nt, Artificial Sequence
  Synthetic oligonucleotide: CTLA4-548
ggagcgguguucaggucuuc

SEQ ID NO: 47097 - RNA, 20 nt, Artificial Sequence
  Synthetic oligonucleotide: CTLA4-72
gcuuuaugggagcgguguuc

SEQ ID NO: 47098 - RNA, 20 nt, Artificial Sequence
  Synthetic oligonucleotide: CTLA4-71
aagccauggcuuuaugggag

SEQ ID NO: 47099 - RNA, 20 nt, Artificial Sequence
  Synthetic oligonucleotide: CTLA4-513
gagcgccagguauuuaguag

SEQ ID NO: 47100 - RNA, 20 nt, Artificial Sequence
  Synthetic oligonucleotide: CTLA4-474
uuuguucaguugagugcuug

SEQ ID NO: 47101 - RNA, 20 nt, Artificial Sequence
  Synthetic oligonucleotide: CTLA4-558
gaagcuucauguucacuuug

SEQ ID NO: 47102 - RNA, 20 nt, Artificial Sequence
  Synthetic oligonucleotide: CTLA4-2
cauaaagccauggcuugccu

SEQ ID NO: 47103 - RNA, 20 nt, Artificial Sequence
  Synthetic oligonucleotide: CTLA4-511
cagagcgccagguauuuagu

SEQ ID NO: 47104 - RNA, 20 nt, Artificial Sequence
  Synthetic oligonucleotide: CTLA4-462
aguuagcagccuaguaguuu

SEQ ID NO: 47105 - RNA, 17 nt, Artificial Sequence
  Synthetic oligonucleotide: CTLA4-588
guaaaaccaaaacaaaa

SEQ ID NO: 47106 - RNA, 17 nt, Artificial Sequence
  Synthetic oligonucleotide: CTLA4-735
cuuaaccaaaugcuaaa

SEQ ID NO: 47107 - RNA, 17 nt, Artificial Sequence
  Synthetic oligonucleotide: CTLA4-676
aauuuccuggaguacaa

SEQ ID NO: 47108 - RNA, 17 nt, Artificial Sequence
  Synthetic oligonucleotide: CTLA4-573
uccugccauuagcccaa

SEQ ID NO: 47109 - RNA, 17 nt, Artificial Sequence
  Synthetic oligonucleotide: CTLA4-80
aucccugucuucugcaa

SEQ ID NO: 47110 - RNA, 17 nt, Artificial Sequence
  Synthetic oligonucleotide: CTLA4-609
uuuguuucagcagucaa

SEQ ID NO: 47111 - RNA, 17 nt, Artificial Sequence
  Synthetic oligonucleotide: CTLA4-738
auuuguaaagcugucaa

SEQ ID NO: 47112 - RNA, 17 nt, Artificial Sequence
  Synthetic oligonucleotide: CTLA4-665
uuuugguuuuacgagaa

SEQ ID NO: 47113 - RNA, 17 nt, Artificial Sequence
  Synthetic oligonucleotide: CTLA4-594
agcuucaggauccugaa

SEQ ID NO: 47114 - RNA, 17 nt, Artificial Sequence
  Synthetic oligonucleotide: CTLA4-682
cugagcccuugggcuaa

SEQ ID NO: 47115 - RNA, 17 nt, Artificial Sequence
  Synthetic oligonucleotide: CTLA4-805
aagcaccauccuucuaa

SEQ ID NO: 47116 - RNA, 17 nt, Artificial Sequence
  Synthetic oligonucleotide: CTLA4-610
gcaaagccagaaguuaa

SEQ ID NO: 47117 - RNA, 17 nt, Artificial Sequence
  Synthetic oligonucleotide: CTLA4-76
uggauuucagcggcaca

SEQ ID NO: 47118 - RNA, 17 nt, Artificial Sequence
  Synthetic oligonucleotide: CTLA4-132
caccuuugcagaagaca

SEQ ID NO: 47119 - RNA, 17 nt, Artificial Sequence
  Synthetic oligonucleotide: CTLA4-675
gaauuuccuggaguaca

SEQ ID NO: 47120 - RNA, 17 nt, Artificial Sequence
  Synthetic oligonucleotide: CTLA4-587
cguaacagcuaaaccca

SEQ ID NO: 47121 - RNA, 17 nt, Artificial Sequence
  Synthetic oligonucleotide: CTLA4-572
auccugccauuagccca

SEQ ID NO: 47122 - RNA, 17 nt, Artificial Sequence
  Synthetic oligonucleotide: CTLA4-140
aaauccaaggcaagcca

SEQ ID NO: 47123 - RNA, 17 nt, Artificial Sequence
  Synthetic oligonucleotide: CTLA4-139
ugugccgcugaaaucca

SEQ ID NO: 47124 - RNA, 17 nt, Artificial Sequence
  Synthetic oligonucleotide: CTLA4-668
caaaacaagccaaucca

SEQ ID NO: 47125 - RNA, 17 nt, Artificial Sequence
  Synthetic oligonucleotide: CTLA4-584
aauacauuuuccaucca

SEQ ID NO: 47126 - RNA, 17 nt, Artificial Sequence
  Synthetic oligonucleotide: CTLA4-615
gcuggcucuguauucca

SEQ ID NO: 47127 - RNA, 17 nt, Artificial Sequence
  Synthetic oligonucleotide: CTLA4-617
guauuccagggccagca

SEQ ID NO: 47128 - RNA, 17 nt, Artificial Sequence
  Synthetic oligonucleotide: CTLA4-135
aaaaacaggagagugca

SEQ ID NO: 47129 - RNA, 17 nt, Artificial Sequence
  Synthetic oligonucleotide: CTLA4-662
gaacccacacagaauca

SEQ ID NO: 47130 - RNA, 17 nt, Artificial Sequence
  Synthetic oligonucleotide: CTLA4-737
uauuuguaaagcuguca

SEQ ID NO: 47131 - RNA, 17 nt, Artificial Sequence
  Synthetic oligonucleotide: CTLA4-82
cuuuuggagcaugaaga

SEQ ID NO: 47132 - RNA, 17 nt, Artificial Sequence
  Synthetic oligonucleotide: CTLA4-663
acaugugcacacacaga

SEQ ID NO: 47133 - RNA, 17 nt, Artificial Sequence
  Synthetic oligonucleotide: CTLA4-739
gucaagggaccauuaga

SEQ ID NO: 47134 - RNA, 17 nt, Artificial Sequence
  Synthetic oligonucleotide: CTLA4-740
agggaccauuagaagga

SEQ ID NO: 47135 - RNA, 17 nt, Artificial Sequence
  Synthetic oligonucleotide: CTLA4-669
acaagccaauccaugga

SEQ ID NO: 47136 - RNA, 17 nt, Artificial Sequence
  Synthetic oligonucleotide: CTLA4-577
aaaugaauuggacugga

SEQ ID NO: 47137 - RNA, 17 nt, Artificial Sequence
  Synthetic oligonucleotide: CTLA4-578
auuggacuggaugguua

SEQ ID NO: 47138 - RNA, 17 nt, Artificial Sequence
  Synthetic oligonucleotide: CTLA4-141
ggcaagccauggcuuua

SEQ ID NO: 47139 - RNA, 17 nt, Artificial Sequence
  Synthetic oligonucleotide: CTLA4-133
ugaagagaagaaaaaac

SEQ ID NO: 47140 - RNA, 17 nt, Artificial Sequence
  Synthetic oligonucleotide: CTLA4-131
ucaccuuugcagaagac

SEQ ID NO: 47141 - RNA, 17 nt, Artificial Sequence
  Synthetic oligonucleotide: CTLA4-576
aaugaaaugaauuggac

SEQ ID NO: 47142 - RNA, 17 nt, Artificial Sequence
  Synthetic oligonucleotide: CTLA4-77
caaggcucagcugaacc

SEQ ID NO: 47143 - RNA, 17 nt, Artificial Sequence
  Synthetic oligonucleotide: CTLA4-79
accuggcuaccaggacc

SEQ ID NO: 47144 - RNA, 17 nt, Artificial Sequence
  Synthetic oligonucleotide: CTLA4-639
agccccuacuaaauacc

SEQ ID NO: 47145 - RNA, 17 nt, Artificial Sequence
  Synthetic oligonucleotide: CTLA4-607
gagguguuucuccuacc

SEQ ID NO: 47146 - RNA, 17 nt, Artificial Sequence
  Synthetic oligonucleotide: CTLA4-78
agcugaaccuggcuacc

SEQ ID NO: 47147 - RNA, 17 nt, Artificial Sequence
  Synthetic oligonucleotide: CTLA4-644
ugaaacaaaugaaaccc

SEQ ID NO: 47148 - RNA, 17 nt, Artificial Sequence
  Synthetic oligonucleotide: CTLA4-641
cugcucccugcuggccc

SEQ ID NO: 47149 - RNA, 17 nt, Artificial Sequence
  Synthetic oligonucleotide: CTLA4-138
gccagguccugguagcc

SEQ ID NO: 47150 - RNA, 17 nt, Artificial Sequence
  Synthetic oligonucleotide: CTLA4-622
gcucagaacagagcgcc

SEQ ID NO: 47151 - RNA, 17 nt, Artificial Sequence
  Synthetic oligonucleotide: CTLA4-136
caggagagugcagggcc

SEQ ID NO: 47152 - RNA, 17 nt, Artificial Sequence
  Synthetic oligonucleotide: CTLA4-583
gaggacccuuguacucc

SEQ ID NO: 47153 - RNA, 17 nt, Artificial Sequence
  Synthetic oligonucleotide: CTLA4-137
agugcagggccaggucc

SEQ ID NO: 47154 - RNA, 17 nt, Artificial Sequence
  Synthetic oligonucleotide: CTLA4-614
ggcuggcucuguauucc

SEQ ID NO: 47155 - RNA, 17 nt, Artificial Sequence
  Synthetic oligonucleotide: CTLA4-674
agacuuggagaauuucc

SEQ ID NO: 47156 - RNA, 17 nt, Artificial Sequence
  Synthetic oligonucleotide: CTLA4-616
uguauuccagggccagc

SEQ ID NO: 47157 - RNA, 17 nt, Artificial Sequence
  Synthetic oligonucleotide: CTLA4-683
gcccuugggcuaauggc

SEQ ID NO: 47158 - RNA, 17 nt, Artificial Sequence
  Synthetic oligonucleotide: CTLA4-613
cuccaaucuggcuuggc

SEQ ID NO: 47159 - RNA, 17 nt, Artificial Sequence
  Synthetic oligonucleotide: CTLA4-640
gcccaacugcucccugc

SEQ ID NO: 47160 - RNA, 17 nt, Artificial Sequence
  Synthetic oligonucleotide: CTLA4-134
aaaaaacaggagagugc

SEQ ID NO: 47161 - RNA, 17 nt, Artificial Sequence
  Synthetic oligonucleotide: CTLA4-611
aagguaaaacuccaauc

SEQ ID NO: 47162 - RNA, 17 nt, Artificial Sequence
  Synthetic oligonucleotide: CTLA4-671
uguucacuuugaggauc

SEQ ID NO: 47163 - RNA, 17 nt, Artificial Sequence
  Synthetic oligonucleotide: CTLA4-589
cauguguaauacauauc

SEQ ID NO: 47164 - RNA, 17 nt, Artificial Sequence
  Synthetic oligonucleotide: CTLA4-643
guuuuaccuuuaacuuc

SEQ ID NO: 47165 - RNA, 17 nt, Artificial Sequence
  Synthetic oligonucleotide: CTLA4-593
acacauuucaaagcuuc

SEQ ID NO: 47166 - RNA, 17 nt, Artificial Sequence
  Synthetic oligonucleotide: CTLA4-677
aauuuuauucaaucuuc

SEQ ID NO: 47167 - RNA, 17 nt, Artificial Sequence
  Synthetic oligonucleotide: CTLA4-661
guagagcaaaaccuuuc

SEQ ID NO: 47168 - RNA, 17 nt, Artificial Sequence
  Synthetic oligonucleotide: CTLA4-75
cuugccuuggauuucag

SEQ ID NO: 47169 - RNA, 17 nt, Artificial Sequence
  Synthetic oligonucleotide: CTLA4-143
ccauggcuuuaugggag

SEQ ID NO: 47170 - RNA, 17 nt, Artificial Sequence
  Synthetic oligonucleotide: CTLA4-606
gagcaugaagauggagg

SEQ ID NO: 47171 - RNA, 17 nt, Artificial Sequence
  Synthetic oligonucleotide: CTLA4-582
uaaaauugggauuuagg

SEQ ID NO: 47172 - RNA, 17 nt, Artificial Sequence
  Synthetic oligonucleotide: CTLA4-620
agcagggagcaguuggg

SEQ ID NO: 47173 - RNA, 17 nt, Artificial Sequence
  Synthetic oligonucleotide: CTLA4-605
uuggagcaugaagaugg

SEQ ID NO: 47174 - RNA, 17 nt, Artificial Sequence
  Synthetic oligonucleotide: CTLA4-591
aaguccuugauucugug

SEQ ID NO: 47175 - RNA, 17 nt, Artificial Sequence
  Synthetic oligonucleotide: CTLA4-586
guucaguugagugcuug

SEQ ID NO: 47176 - RNA, 17 nt, Artificial Sequence
  Synthetic oligonucleotide: CTLA4-670
gcuucauguucacuuug

SEQ ID NO: 47177 - RNA, 17 nt, Artificial Sequence
  Synthetic oligonucleotide: CTLA4-803
agaaauaaacugaaaau

SEQ ID NO: 47178 - RNA, 17 nt, Artificial Sequence
  Synthetic oligonucleotide: CTLA4-579
agaagauugaauaaaau

SEQ ID NO: 47179 - RNA, 17 nt, Artificial Sequence
  Synthetic oligonucleotide: CTLA4-575
uugucaaugaaaugaau

SEQ ID NO: 47180 - RNA, 17 nt, Artificial Sequence
  Synthetic oligonucleotide: CTLA4-642
agccagccaagccagau

SEQ ID NO: 47181 - RNA, 17 nt, Artificial Sequence
  Synthetic oligonucleotide: CTLA4-585
auuuuccauccauggau

SEQ ID NO: 47182 - RNA, 17 nt, Artificial Sequence
  Synthetic oligonucleotide: CTLA4-673
auaacuaaguggagacu

SEQ ID NO: 47183 - RNA, 17 nt, Artificial Sequence
  Synthetic oligonucleotide: CTLA4-679
acaacuccaaaacuacu

SEQ ID NO: 47184 - RNA, 17 nt, Artificial Sequence
  Synthetic oligonucleotide: CTLA4-608
agguguuucuccuaccu

SEQ ID NO: 47185 - RNA, 17 nt, Artificial Sequence
  Synthetic oligonucleotide: CTLA4-680
cuaacuuucugagcccu

SEQ ID NO: 47186 - RNA, 17 nt, Artificial Sequence
  Synthetic oligonucleotide: CTLA4-74
aaagccauggcuugccu

SEQ ID NO: 47187 - RNA, 17 nt, Artificial Sequence
  Synthetic oligonucleotide: CTLA4-612
aaaacuccaaucuggcu

SEQ ID NO: 47188 - RNA, 17 nt, Artificial Sequence
  Synthetic oligonucleotide: CTLA4-590
auguguaauacauaucu

SEQ ID NO: 47189 - RNA, 17 nt, Artificial Sequence
  Synthetic oligonucleotide: CTLA4-2120
aauggcaggauuugucu

SEQ ID NO: 47190 - RNA, 17 nt, Artificial Sequence
  Synthetic oligonucleotide: CTLA4-678
auuuuauucaaucuucu

SEQ ID NO: 47191 - RNA, 17 nt, Artificial Sequence
  Synthetic oligonucleotide: CTLA4-618
ggccagcagggagcagu

SEQ ID NO: 47192 - RNA, 17 nt, Artificial Sequence
  Synthetic oligonucleotide: CTLA4-623
agcgccagguauuuagu

SEQ ID NO: 47193 - RNA, 17 nt, Artificial Sequence
  Synthetic oligonucleotide: CTLA4-667
acgagaaaggaagccgu

SEQ ID NO: 47194 - RNA, 17 nt, Artificial Sequence
  Synthetic oligonucleotide: CTLA4-645
acaaaugaaacccaggu

SEQ ID NO: 47195 - RNA, 17 nt, Artificial Sequence
  Synthetic oligonucleotide: CTLA4-592
aguccuugauucugugu

SEQ ID NO: 47196 - RNA, 17 nt, Artificial Sequence
  Synthetic oligonucleotide: CTLA4-580
gaagauugaauaaaauu

SEQ ID NO: 47197 - RNA, 17 nt, Artificial Sequence
  Synthetic oligonucleotide: CTLA4-804
uaaauccauuuagcauu

SEQ ID NO: 47198 - RNA, 17 nt, Artificial Sequence
  Synthetic oligonucleotide: CTLA4-681
uaacuuucugagcccuu

SEQ ID NO: 47199 - RNA, 17 nt, Artificial Sequence
  Synthetic oligonucleotide: CTLA4-619
gccagcagggagcaguu

SEQ ID NO: 47200 - RNA, 17 nt, Artificial Sequence
  Synthetic oligonucleotide: CTLA4-581
gaauaaaauugggauuu

SEQ ID NO: 47201 - RNA, 17 nt, Artificial Sequence
  Synthetic oligonucleotide: CTLA4-736
aaaugcuaaauggauuu

SEQ ID NO: 47202 - RNA, 17 nt, Artificial Sequence
  Synthetic oligonucleotide: CTLA4-81
aaggugagugagacuuu

SEQ ID NO: 47203 - RNA, 17 nt, Artificial Sequence
  Synthetic oligonucleotide: CTLA4-574
uagcagccuaguaguuu

SEQ ID NO: 47204 - RNA, 17 nt, Artificial Sequence
  Synthetic oligonucleotide: CTLA4-664
agaaagccuuuuuguuu

SEQ ID NO: 47205 - RNA, 20 nt, Artificial Sequence
  Synthetic oligonucleotide: CTLA4-476
cucguaaaaccaaaacaaaa

SEQ ID NO: 47206 - RNA, 20 nt, Artificial Sequence
  Synthetic oligonucleotide: CTLA4-697
ucucuuaaccaaaugcuaaa

SEQ ID NO: 47207 - RNA, 20 nt, Artificial Sequence
  Synthetic oligonucleotide: CTLA4-564
gagaauuuccuggaguacaa

SEQ ID NO: 47208 - RNA, 20 nt, Artificial Sequence
  Synthetic oligonucleotide: CTLA4-461
aaauccugccauuagcccaa

SEQ ID NO: 47209 - RNA, 20 nt, Artificial Sequence
  Synthetic oligonucleotide: CTLA4-8
uucaucccugucuucugcaa

SEQ ID NO: 47210 - RNA, 20 nt, Artificial Sequence
  Synthetic oligonucleotide: CTLA4-497
ucauuuguuucagcagucaa

SEQ ID NO: 47211 - RNA, 20 nt, Artificial Sequence
  Synthetic oligonucleotide: CTLA4-700
cuuauuuguaaagcugucaa

SEQ ID NO: 47212 - RNA, 20 nt, Artificial Sequence
  Synthetic oligonucleotide: CTLA4-553
uuguuuugguuuuacgagaa

SEQ ID NO: 47213 - RNA, 20 nt, Artificial Sequence
  Synthetic oligonucleotide: CTLA4-482
caaagcuucaggauccugaa

SEQ ID NO: 47214 - RNA, 20 nt, Artificial Sequence
  Synthetic oligonucleotide: CTLA4-570
uuucugagcccuugggcuaa

SEQ ID NO: 47215 - RNA, 20 nt, Artificial Sequence
  Synthetic oligonucleotide: CTLA4-498
auagcaaagccagaaguuaa

SEQ ID NO: 47216 - RNA, 20 nt, Artificial Sequence
  Synthetic oligonucleotide: CTLA4-60
acucaccuuugcagaagaca

SEQ ID NO: 47217 - RNA, 20 nt, Artificial Sequence
  Synthetic oligonucleotide: CTLA4-563
ggagaauuuccuggaguaca

SEQ ID NO: 47218 - RNA, 20 nt, Artificial Sequence
  Synthetic oligonucleotide: CTLA4-460
caaauccugccauuagccca

SEQ ID NO: 47219 - RNA, 20 nt, Artificial Sequence
  Synthetic oligonucleotide: CTLA4-68
cugaaauccaaggcaagcca

SEQ ID NO: 47220 - RNA, 20 nt, Artificial Sequence
  Synthetic oligonucleotide: CTLA4-556
gaacaaaacaagccaaucca

SEQ ID NO: 47221 - RNA, 20 nt, Artificial Sequence
  Synthetic oligonucleotide: CTLA4-472
uugaauacauuuuccaucca

SEQ ID NO: 47222 - RNA, 20 nt, Artificial Sequence
  Synthetic oligonucleotide: CTLA4-503
uuggcuggcucuguauucca

SEQ ID NO: 47223 - RNA, 20 nt, Artificial Sequence
  Synthetic oligonucleotide: CTLA4-505
ucuguauuccagggccagca

SEQ ID NO: 47224 - RNA, 20 nt, Artificial Sequence
  Synthetic oligonucleotide: CTLA4-63
agaaaaaacaggagagugca

SEQ ID NO: 47225 - RNA, 20 nt, Artificial Sequence
  Synthetic oligonucleotide: CTLA4-550
uuugaacccacacagaauca

SEQ ID NO: 47226 - RNA, 20 nt, Artificial Sequence
  Synthetic oligonucleotide: CTLA4-699
acuuauuuguaaagcuguca

SEQ ID NO: 47227 - RNA, 20 nt, Artificial Sequence
  Synthetic oligonucleotide: CTLA4-10
agacuuuuggagcaugaaga

SEQ ID NO: 47228 - RNA, 20 nt, Artificial Sequence
  Synthetic oligonucleotide: CTLA4-551
uacacaugugcacacacaga

SEQ ID NO: 47229 - RNA, 20 nt, Artificial Sequence
  Synthetic oligonucleotide: CTLA4-557
aaaacaagccaauccaugga

SEQ ID NO: 47230 - RNA, 20 nt, Artificial Sequence
  Synthetic oligonucleotide: CTLA4-465
augaaaugaauuggacugga

SEQ ID NO: 47231 - RNA, 20 nt, Artificial Sequence
  Synthetic oligonucleotide: CTLA4-509
caguugggcggcagcaaaua

SEQ ID NO: 47232 - RNA, 20 nt, Artificial Sequence
  Synthetic oligonucleotide: CTLA4-69
caaggcaagccauggcuuua

SEQ ID NO: 47233 - RNA, 20 nt, Artificial Sequence
  Synthetic oligonucleotide: CTLA4-61
ggaugaagagaagaaaaaac

SEQ ID NO: 47234 - RNA, 20 nt, Artificial Sequence
  Synthetic oligonucleotide: CTLA4-464
gucaaugaaaugaauuggac

SEQ ID NO: 47235 - RNA, 20 nt, Artificial Sequence
  Synthetic oligonucleotide: CTLA4-5
gcacaaggcucagcugaacc

SEQ ID NO: 47236 - RNA, 20 nt, Artificial Sequence
  Synthetic oligonucleotide: CTLA4-7
ugaaccuggcuaccaggacc

SEQ ID NO: 47237 - RNA, 20 nt, Artificial Sequence
  Synthetic oligonucleotide: CTLA4-527
ugaagccccuacuaaauacc

SEQ ID NO: 47238 - RNA, 20 nt, Artificial Sequence
  Synthetic oligonucleotide: CTLA4-495
gaggagguguuucuccuacc

SEQ ID NO: 47239 - RNA, 20 nt, Artificial Sequence
  Synthetic oligonucleotide: CTLA4-6
cucagcugaaccuggcuacc

SEQ ID NO: 47240 - RNA, 20 nt, Artificial Sequence
  Synthetic oligonucleotide: CTLA4-532
ugcugaaacaaaugaaaccc

SEQ ID NO: 47241 - RNA, 20 nt, Artificial Sequence
  Synthetic oligonucleotide: CTLA4-529
caacugcucccugcuggccc

SEQ ID NO: 47242 - RNA, 20 nt, Artificial Sequence
  Synthetic oligonucleotide: CTLA4-66
agggccagguccugguagcc

SEQ ID NO: 47243 - RNA, 20 nt, Artificial Sequence
  Synthetic oligonucleotide: CTLA4-510
auagcucagaacagagcgcc

SEQ ID NO: 47244 - RNA, 20 nt, Artificial Sequence
  Synthetic oligonucleotide: CTLA4-64
aaacaggagagugcagggcc

SEQ ID NO: 47245 - RNA, 20 nt, Artificial Sequence
  Synthetic oligonucleotide: CTLA4-471
uaggaggacccuuguacucc

SEQ ID NO: 47246 - RNA, 20 nt, Artificial Sequence
  Synthetic oligonucleotide: CTLA4-65
gagagugcagggccaggucc

SEQ ID NO: 47247 - RNA, 20 nt, Artificial Sequence
  Synthetic oligonucleotide: CTLA4-502
cuuggcuggcucuguauucc

SEQ ID NO: 47248 - RNA, 20 nt, Artificial Sequence
  Synthetic oligonucleotide: CTLA4-562
uggagacuuggagaauuucc

SEQ ID NO: 47249 - RNA, 20 nt, Artificial Sequence
  Synthetic oligonucleotide: CTLA4-504
cucuguauuccagggccagc

SEQ ID NO: 47250 - RNA, 20 nt, Artificial Sequence
  Synthetic oligonucleotide: CTLA4-501
aaacuccaaucuggcuuggc

SEQ ID NO: 47251 - RNA, 20 nt, Artificial Sequence
  Synthetic oligonucleotide: CTLA4-528
gccgcccaacugcucccugc

SEQ ID NO: 47252 - RNA, 20 nt, Artificial Sequence
  Synthetic oligonucleotide: CTLA4-62
aagaaaaaacaggagagugc

SEQ ID NO: 47253 - RNA, 20 nt, Artificial Sequence
  Synthetic oligonucleotide: CTLA4-499
uuaaagguaaaacuccaauc

SEQ ID NO: 47254 - RNA, 20 nt, Artificial Sequence
  Synthetic oligonucleotide: CTLA4-477
gcacauguguaauacauauc

SEQ ID NO: 47255 - RNA, 20 nt, Artificial Sequence
  Synthetic oligonucleotide: CTLA4-481
caaacacauuucaaagcuuc

SEQ ID NO: 47256 - RNA, 20 nt, Artificial Sequence
  Synthetic oligonucleotide: CTLA4-565
cccaauuuuauucaaucuuc

SEQ ID NO: 47257 - RNA, 20 nt, Artificial Sequence
  Synthetic oligonucleotide: CTLA4-549
gaaguagagcaaaaccuuuc

SEQ ID NO: 47258 - RNA, 20 nt, Artificial Sequence
  Synthetic oligonucleotide: CTLA4-560
ugaggaucuggauaacuaag

SEQ ID NO: 47259 - RNA, 20 nt, Artificial Sequence
  Synthetic oligonucleotide: CTLA4-3
uggcuugccuuggauuucag

SEQ ID NO: 47260 - RNA, 20 nt, Artificial Sequence
  Synthetic oligonucleotide: CTLA4-554
uuuuacgagaaaggaagccg

SEQ ID NO: 47261 - RNA, 20 nt, Artificial Sequence
  Synthetic oligonucleotide: CTLA4-494
uuggagcaugaagauggagg

SEQ ID NO: 47262 - RNA, 20 nt, Artificial Sequence
  Synthetic oligonucleotide: CTLA4-470
gaauaaaauugggauuuagg

SEQ ID NO: 47263 - RNA, 20 nt, Artificial Sequence
  Synthetic oligonucleotide: CTLA4-508
gccagcagggagcaguuggg

SEQ ID NO: 47264 - RNA, 20 nt, Artificial Sequence
  Synthetic oligonucleotide: CTLA4-493
cuuuuggagcaugaagaugg

SEQ ID NO: 47265 - RNA, 20 nt, Artificial Sequence
  Synthetic oligonucleotide: CTLA4-479
auaaaguccuugauucugug

SEQ ID NO: 47266 - RNA, 20 nt, Artificial Sequence
  Synthetic oligonucleotide: CTLA4-772
acaagaaauaaacugaaaau

SEQ ID NO: 47267 - RNA, 20 nt, Artificial Sequence
  Synthetic oligonucleotide: CTLA4-467
cccagaagauugaauaaaau

SEQ ID NO: 47268 - RNA, 20 nt, Artificial Sequence
  Synthetic oligonucleotide: CTLA4-463
gaguugucaaugaaaugaau

SEQ ID NO: 47269 - RNA, 20 nt, Artificial Sequence
  Synthetic oligonucleotide: CTLA4-530
cagagccagccaagccagau

SEQ ID NO: 47270 - RNA, 20 nt, Artificial Sequence
  Synthetic oligonucleotide: CTLA4-473
uacauuuuccauccauggau

SEQ ID NO: 47271 - RNA, 20 nt, Artificial Sequence
  Synthetic oligonucleotide: CTLA4-70
aaggcaagccauggcuuuau

SEQ ID NO: 47272 - RNA, 20 nt, Artificial Sequence
  Synthetic oligonucleotide: CTLA4-561
uggauaacuaaguggagacu

SEQ ID NO: 47273 - RNA, 20 nt, Artificial Sequence
  Synthetic oligonucleotide: CTLA4-567
uugacaacuccaaaacuacu

SEQ ID NO: 47274 - RNA, 20 nt, Artificial Sequence
  Synthetic oligonucleotide: CTLA4-496
aggagguguuucuccuaccu

SEQ ID NO: 47275 - RNA, 20 nt, Artificial Sequence
  Synthetic oligonucleotide: CTLA4-568
cugcuaacuuucugagcccu

SEQ ID NO: 47276 - RNA, 20 nt, Artificial Sequence
  Synthetic oligonucleotide: CTLA4-500
gguaaaacuccaaucuggcu

SEQ ID NO: 47277 - RNA, 20 nt, Artificial Sequence
  Synthetic oligonucleotide: CTLA4-478
cacauguguaauacauaucu

SEQ ID NO: 47278 - RNA, 20 nt, Artificial Sequence
  Synthetic oligonucleotide: CTLA4-2121
gcuaauggcaggauuugucu

SEQ ID NO: 47279 - RNA, 20 nt, Artificial Sequence
  Synthetic oligonucleotide: CTLA4-566
ccaauuuuauucaaucuucu

SEQ ID NO: 47280 - RNA, 20 nt, Artificial Sequence
  Synthetic oligonucleotide: CTLA4-506
cagggccagcagggagcagu

SEQ ID NO: 47281 - RNA, 20 nt, Artificial Sequence
  Synthetic oligonucleotide: CTLA4-555
uuuacgagaaaggaagccgu

SEQ ID NO: 47282 - RNA, 20 nt, Artificial Sequence
  Synthetic oligonucleotide: CTLA4-533
gaaacaaaugaaacccaggu

SEQ ID NO: 47283 - RNA, 20 nt, Artificial Sequence
  Synthetic oligonucleotide: CTLA4-480
uaaaguccuugauucugugu

SEQ ID NO: 47284 - RNA, 20 nt, Artificial Sequence
  Synthetic oligonucleotide: CTLA4-468
ccagaagauugaauaaaauu

SEQ ID NO: 47285 - RNA, 20 nt, Artificial Sequence
  Synthetic oligonucleotide: CTLA4-773
uccuaaauccauuuagcauu

SEQ ID NO: 47286 - RNA, 20 nt, Artificial Sequence
  Synthetic oligonucleotide: CTLA4-569
ugcuaacuuucugagcccuu

SEQ ID NO: 47287 - RNA, 20 nt, Artificial Sequence
  Synthetic oligonucleotide: CTLA4-507
agggccagcagggagcaguu

SEQ ID NO: 47288 - RNA, 20 nt, Artificial Sequence
  Synthetic oligonucleotide: CTLA4-469
auugaauaaaauugggauuu

SEQ ID NO: 47289 - RNA, 20 nt, Artificial Sequence
  Synthetic oligonucleotide: CTLA4-698
accaaaugcuaaauggauuu

SEQ ID NO: 47290 - RNA, 20 nt, Artificial Sequence
  Synthetic oligonucleotide: CTLA4-9
gcaaaggugagugagacuuu

SEQ ID NO: 47291 - RNA, 20 nt, Artificial Sequence
  Synthetic oligonucleotide: CTLA4-552
aauagaaagccuuuuuguuu

SEQ ID NO: 47292 - RNA, 17 nt, Artificial Sequence
  Synthetic oligonucleotide: CTLA4-751
aaaaaaagacaaggaaa

SEQ ID NO: 47293 - RNA, 17 nt, Artificial Sequence
  Synthetic oligonucleotide: CTLA4-797
uuagagccguccauaaa

SEQ ID NO: 47294 - RNA, 17 nt, Artificial Sequence
  Synthetic oligonucleotide: CTLA4-638
cuuccagucucauagaa

SEQ ID NO: 47295 - RNA, 17 nt, Artificial Sequence
  Synthetic oligonucleotide: CTLA4-631
agugauuuaagagggaa

SEQ ID NO: 47296 - RNA, 17 nt, Artificial Sequence
  Synthetic oligonucleotide: CTLA4-2122
cauaguugauaccuuaa

SEQ ID NO: 47297 - RNA, 17 nt, Artificial Sequence
  Synthetic oligonucleotide: CTLA4-1114
aagucaauuuuuuuuaa

SEQ ID NO: 47298 - RNA, 17 nt, Artificial Sequence
  Synthetic oligonucleotide: CTLA4-2123
aacagacaguuguaaca

SEQ ID NO: 47299 - RNA, 17 nt, Artificial Sequence
  Synthetic oligonucleotide: CTLA4-750
gccaaaaaaaaaagaca

SEQ ID NO: 47300 - RNA, 17 nt, Artificial Sequence
  Synthetic oligonucleotide: CTLA4-2124
cuacuccaguccgucca

SEQ ID NO: 47301 - RNA, 17 nt, Artificial Sequence
  Synthetic oligonucleotide: CTLA4-741
uuuugcuauacaauuca

SEQ ID NO: 47302 - RNA, 17 nt, Artificial Sequence
  Synthetic oligonucleotide: CTLA4-748
cuucuuuacuuaauuca

SEQ ID NO: 47303 - RNA, 17 nt, Artificial Sequence
  Synthetic oligonucleotide: CTLA4-793
aaagaaagaaacauuca

SEQ ID NO: 47304 - RNA, 17 nt, Artificial Sequence
  Synthetic oligonucleotide: CTLA4-809
cuugaauuaaguaaaga

SEQ ID NO: 47305 - RNA, 17 nt, Artificial Sequence
  Synthetic oligonucleotide: CTLA4-798
caaaacagaguugaaga

SEQ ID NO: 47306 - RNA, 17 nt, Artificial Sequence
  Synthetic oligonucleotide: CTLA4-630
cuggaagugauuuaaga

SEQ ID NO: 47307 - RNA, 17 nt, Artificial Sequence
  Synthetic oligonucleotide: CTLA4-800
gccucugguuuugcaga

SEQ ID NO: 47308 - RNA, 17 nt, Artificial Sequence
  Synthetic oligonucleotide: CTLA4-637
acuuccagucucauaga

SEQ ID NO: 47309 - RNA, 17 nt, Artificial Sequence
  Synthetic oligonucleotide: CTLA4-2125
cuuaaggggcuucuaga

SEQ ID NO: 47310 - RNA, 17 nt, Artificial Sequence
  Synthetic oligonucleotide: CTLA4-723
cucuccagauuuaagga

SEQ ID NO: 47311 - RNA, 17 nt, Artificial Sequence
  Synthetic oligonucleotide: CTLA4-728
gucuauccuuuuaugga

SEQ ID NO: 47312 - RNA, 17 nt, Artificial Sequence
  Synthetic oligonucleotide: CTLA4-636
aaauguauucaggacua

SEQ ID NO: 47313 - RNA, 17 nt, Artificial Sequence
  Synthetic oligonucleotide: CTLA4-745
agcuuguuuaaaaugua

SEQ ID NO: 47314 - RNA, 17 nt, Artificial Sequence
  Synthetic oligonucleotide: CTLA4-2126
acauaguugauaccuua

SEQ ID NO: 47315 - RNA, 17 nt, Artificial Sequence
  Synthetic oligonucleotide: CTLA4-2127
cuucuagaagccccuua

SEQ ID NO: 47316 - RNA, 17 nt, Artificial Sequence
  Synthetic oligonucleotide: CTLA4-733
uugucucuguugaguua

SEQ ID NO: 47317 - RNA, 17 nt, Artificial Sequence
  Synthetic oligonucleotide: CTLA4-725
cagcugucacaaauuua

SEQ ID NO: 47318 - RNA, 17 nt, Artificial Sequence
  Synthetic oligonucleotide: CTLA4-722
aaaacucuccagauuua

SEQ ID NO: 47319 - RNA, 17 nt, Artificial Sequence
  Synthetic oligonucleotide: CTLA4-727
aaaagucuauccuuuua

SEQ ID NO: 47320 - RNA, 17 nt, Artificial Sequence
  Synthetic oligonucleotide: CTLA4-742
uacaauucaagguuuua

SEQ ID NO: 47321 - RNA, 17 nt, Artificial Sequence
  Synthetic oligonucleotide: CTLA4-749
cuuaauucaagguuuua

SEQ ID NO: 47322 - RNA, 17 nt, Artificial Sequence
  Synthetic oligonucleotide: CTLA4-2128
aaacagacaguuguaac

SEQ ID NO: 47323 - RNA, 17 nt, Artificial Sequence
  Synthetic oligonucleotide: CTLA4-627
guuuaguagagagacac

SEQ ID NO: 47324 - RNA, 17 nt, Artificial Sequence
  Synthetic oligonucleotide: CTLA4-813
uuguaugccaaacagac

SEQ ID NO: 47325 - RNA, 17 nt, Artificial Sequence
  Synthetic oligonucleotide: CTLA4-628
agacccuucuaugagac

SEQ ID NO: 47326 - RNA, 17 nt, Artificial Sequence
  Synthetic oligonucleotide: CTLA4-796
uugugacagcuguagac

SEQ ID NO: 47327 - RNA, 17 nt, Artificial Sequence
  Synthetic oligonucleotide: CTLA4-2129
aauuccgggcauauuac

SEQ ID NO: 47328 - RNA, 17 nt, Artificial Sequence
  Synthetic oligonucleotide: CTLA4-806
gcaaaaaaacucuuccc

SEQ ID NO: 47329 - RNA, 17 nt, Artificial Sequence
  Synthetic oligonucleotide: CTLA4-2130
ggaaccuguaauaugcc

SEQ ID NO: 47330 - RNA, 17 nt, Artificial Sequence
  Synthetic oligonucleotide: CTLA4-2131
uugacuuaagcaaaucc

SEQ ID NO: 47331 - RNA, 17 nt, Artificial Sequence
  Synthetic oligonucleotide: CTLA4-2132
uaagugcacagaauucc

SEQ ID NO: 47332 - RNA, 17 nt, Artificial Sequence
  Synthetic oligonucleotide: CTLA4-808
cuacauuuuaaacaagc

SEQ ID NO: 47333 - RNA, 17 nt, Artificial Sequence
  Synthetic oligonucleotide: CTLA4-632
ccugaauacauuugagc

SEQ ID NO: 47334 - RNA, 17 nt, Artificial Sequence
  Synthetic oligonucleotide: CTLA4-794
aggaccuuccuuaaauc

SEQ ID NO: 47335 - RNA, 17 nt, Artificial Sequence
  Synthetic oligonucleotide: CTLA4-726
cacaaauuuaaggacuc

SEQ ID NO: 47336 - RNA, 17 nt, Artificial Sequence
  Synthetic oligonucleotide: CTLA4-801
ggaaaagaagcugccuc

SEQ ID NO: 47337 - RNA, 17 nt, Artificial Sequence
  Synthetic oligonucleotide: CTLA4-814
aaacccacacguagguc

SEQ ID NO: 47338 - RNA, 17 nt, Artificial Sequence
  Synthetic oligonucleotide: CTLA4-799
gcagaaggaaagaauuc

SEQ ID NO: 47339 - RNA, 17 nt, Artificial Sequence
  Synthetic oligonucleotide: CTLA4-2133
cuaagugcacagaauuc

SEQ ID NO: 47340 - RNA, 17 nt, Artificial Sequence
  Synthetic oligonucleotide: CTLA4-635
ccagcucaaauguauuc

SEQ ID NO: 47341 - RNA, 17 nt, Artificial Sequence
  Synthetic oligonucleotide: CTLA4-634
cauuugagcuggguuuc

SEQ ID NO: 47342 - RNA, 17 nt, Artificial Sequence
  Synthetic oligonucleotide: CTLA4-2134
auaguugauaccuuaag

SEQ ID NO: 47343 - RNA, 17 nt, Artificial Sequence
  Synthetic oligonucleotide: CTLA4-629
acuggaagugauuuaag

SEQ ID NO: 47344 - RNA, 17 nt, Artificial Sequence
  Synthetic oligonucleotide: CTLA4-734
uccuucugcaaaaccag

SEQ ID NO: 47345 - RNA, 17 nt, Artificial Sequence
  Synthetic oligonucleotide: CTLA4-807
uaaaguauaugaauccg

SEQ ID NO: 47346 - RNA, 17 nt, Artificial Sequence
  Synthetic oligonucleotide: CTLA4-812
uaugccaaacagacugg

SEQ ID NO: 47347 - RNA, 17 nt, Artificial Sequence
  Synthetic oligonucleotide: CTLA4-791
agaaagaaacauucaug

SEQ ID NO: 47348 - RNA, 17 nt, Artificial Sequence
  Synthetic oligonucleotide: CTLA4-816
ugaagagcugaaaacug

SEQ ID NO: 47349 - RNA, 17 nt, Artificial Sequence
  Synthetic oligonucleotide: CTLA4-753
guugccugaccuacgug

SEQ ID NO: 47350 - RNA, 17 nt, Artificial Sequence
  Synthetic oligonucleotide: CTLA4-746
aaaauguagggaaauug

SEQ ID NO: 47351 - RNA, 17 nt, Artificial Sequence
  Synthetic oligonucleotide: CTLA4-795
aagaauuugaaacauug

SEQ ID NO: 47352 - RNA, 17 nt, Artificial Sequence
  Synthetic oligonucleotide: CTLA4-810
uuuuauuuuuaaauaau

SEQ ID NO: 47353 - RNA, 17 nt, Artificial Sequence
  Synthetic oligonucleotide: CTLA4-724
ucuuuuuguuagaucau

SEQ ID NO: 47354 - RNA, 17 nt, Artificial Sequence
  Synthetic oligonucleotide: CTLA4-792
aagaaagaaacauucau

SEQ ID NO: 47355 - RNA, 17 nt, Artificial Sequence
  Synthetic oligonucleotide: CTLA4-2135
ugacuuaagcaaauccu

SEQ ID NO: 47356 - RNA, 17 nt, Artificial Sequence
  Synthetic oligonucleotide: CTLA4-743
caagguuuuaagguccu

SEQ ID NO: 47357 - RNA, 17 nt, Artificial Sequence
  Synthetic oligonucleotide: CTLA4-633
cugaauacauuugagcu

SEQ ID NO: 47358 - RNA, 17 nt, Artificial Sequence
  Synthetic oligonucleotide: CTLA4-2136
cauggacggacuggagu

SEQ ID NO: 47359 - RNA, 17 nt, Artificial Sequence
  Synthetic oligonucleotide: CTLA4-815
aucugaaacccacacgu

SEQ ID NO: 47360 - RNA, 17 nt, Artificial Sequence
  Synthetic oligonucleotide: CTLA4-731
ucuugaaucauuugggu

SEQ ID NO: 47361 - RNA, 17 nt, Artificial Sequence
  Synthetic oligonucleotide: CTLA4-744
cagcuuguuuaaaaugu

SEQ ID NO: 47362 - RNA, 17 nt, Artificial Sequence
  Synthetic oligonucleotide: CTLA4-754
uugccugaccuacgugu

SEQ ID NO: 47363 - RNA, 17 nt, Artificial Sequence
  Synthetic oligonucleotide: CTLA4-747
aaauguagggaaauugu

SEQ ID NO: 47364 - RNA, 17 nt, Artificial Sequence
  Synthetic oligonucleotide: CTLA4-729
uaaucucuugaaucauu

SEQ ID NO: 47365 - RNA, 17 nt, Artificial Sequence
  Synthetic oligonucleotide: CTLA4-2137
cggaauucugugcacuu

SEQ ID NO: 47366 - RNA, 17 nt, Artificial Sequence
  Synthetic oligonucleotide: CTLA4-732
uuggguuggcuuuucuu

SEQ ID NO: 47367 - RNA, 17 nt, Artificial Sequence
  Synthetic oligonucleotide: CTLA4-752
aaagccaccagucuguu

SEQ ID NO: 47368 - RNA, 17 nt, Artificial Sequence
  Synthetic oligonucleotide: CTLA4-730
aaucucuugaaucauuu

SEQ ID NO: 47369 - RNA, 17 nt, Artificial Sequence
  Synthetic oligonucleotide: CTLA4-811
uccuugucuuuuuuuuu

SEQ ID NO: 47370 - RNA, 20 nt, Artificial Sequence
  Synthetic oligonucleotide: CTLA4-713
aaaaaaaaaagacaaggaaa

SEQ ID NO: 47371 - RNA, 20 nt, Artificial Sequence
  Synthetic oligonucleotide: CTLA4-766
agauuagagccguccauaaa

SEQ ID NO: 47372 - RNA, 20 nt, Artificial Sequence
  Synthetic oligonucleotide: CTLA4-526
ucacuuccagucucauagaa

SEQ ID NO: 47373 - RNA, 20 nt, Artificial Sequence
  Synthetic oligonucleotide: CTLA4-519
ggaagugauuuaagagggaa

SEQ ID NO: 47374 - RNA, 20 nt, Artificial Sequence
  Synthetic oligonucleotide: CTLA4-2138
aaacauaguugauaccuuaa

SEQ ID NO: 47375 - RNA, 20 nt, Artificial Sequence
  Synthetic oligonucleotide: CTLA4-2139
cuuaagucaauuuuuuuuaa

SEQ ID NO: 47376 - RNA, 20 nt, Artificial Sequence
  Synthetic oligonucleotide: CTLA4-2140
gcaaacagacaguuguaaca

SEQ ID NO: 47377 - RNA, 20 nt, Artificial Sequence
  Synthetic oligonucleotide: CTLA4-712
auugccaaaaaaaaaagaca

SEQ ID NO: 47378 - RNA, 20 nt, Artificial Sequence
  Synthetic oligonucleotide: CTLA4-2141
ugccuacuccaguccgucca

SEQ ID NO: 47379 - RNA, 20 nt, Artificial Sequence
  Synthetic oligonucleotide: CTLA4-703
uuuuuuugcuauacaauuca

SEQ ID NO: 47380 - RNA, 20 nt, Artificial Sequence
  Synthetic oligonucleotide: CTLA4-710
ugccuucuuuacuuaauuca

SEQ ID NO: 47381 - RNA, 20 nt, Artificial Sequence
  Synthetic oligonucleotide: CTLA4-762
aauaaagaaagaaacauuca

SEQ ID NO: 47382 - RNA, 20 nt, Artificial Sequence
  Synthetic oligonucleotide: CTLA4-778
aaccuugaauuaaguaaaga

SEQ ID NO: 47383 - RNA, 20 nt, Artificial Sequence
  Synthetic oligonucleotide: CTLA4-767
agacaaaacagaguugaaga

SEQ ID NO: 47384 - RNA, 20 nt, Artificial Sequence
  Synthetic oligonucleotide: CTLA4-518
agacuggaagugauuuaaga

SEQ ID NO: 47385 - RNA, 20 nt, Artificial Sequence
  Synthetic oligonucleotide: CTLA4-769
gcugccucugguuuugcaga

SEQ ID NO: 47386 - RNA, 20 nt, Artificial Sequence
  Synthetic oligonucleotide: CTLA4-525
aucacuuccagucucauaga

SEQ ID NO: 47387 - RNA, 20 nt, Artificial Sequence
  Synthetic oligonucleotide: CTLA4-2142
uaccuuaaggggcuucuaga

SEQ ID NO: 47388 - RNA, 20 nt, Artificial Sequence
  Synthetic oligonucleotide: CTLA4-685
aaacucuccagauuuaagga

SEQ ID NO: 47389 - RNA, 20 nt, Artificial Sequence
  Synthetic oligonucleotide: CTLA4-690
aaagucuauccuuuuaugga

SEQ ID NO: 47390 - RNA, 20 nt, Artificial Sequence
  Synthetic oligonucleotide: CTLA4-524
cucaaauguauucaggacua

SEQ ID NO: 47391 - RNA, 20 nt, Artificial Sequence
  Synthetic oligonucleotide: CTLA4-707
gccagcuuguuuaaaaugua

SEQ ID NO: 47392 - RNA, 20 nt, Artificial Sequence
  Synthetic oligonucleotide: CTLA4-2143
aaaacauaguugauaccuua

SEQ ID NO: 47393 - RNA, 20 nt, Artificial Sequence
  Synthetic oligonucleotide: CTLA4-2144
agccuucuagaagccccuua

SEQ ID NO: 47394 - RNA, 20 nt, Artificial Sequence
  Synthetic oligonucleotide: CTLA4-695
guuuugucucuguugaguua

SEQ ID NO: 47395 - RNA, 20 nt, Artificial Sequence
  Synthetic oligonucleotide: CTLA4-687
cuacagcugucacaaauuua

SEQ ID NO: 47396 - RNA, 20 nt, Artificial Sequence
  Synthetic oligonucleotide: CTLA4-684
augaaaacucuccagauuua

SEQ ID NO: 47397 - RNA, 20 nt, Artificial Sequence
  Synthetic oligonucleotide: CTLA4-689
aaaaaaagucuauccuuuua

SEQ ID NO: 47398 - RNA, 20 nt, Artificial Sequence
  Synthetic oligonucleotide: CTLA4-704
cuauacaauucaagguuuua

SEQ ID NO: 47399 - RNA, 20 nt, Artificial Sequence
  Synthetic oligonucleotide: CTLA4-711
uuacuuaauucaagguuuua

SEQ ID NO: 47400 - RNA, 20 nt, Artificial Sequence
  Synthetic oligonucleotide: CTLA4-2145
ugcaaacagacaguuguaac

SEQ ID NO: 47401 - RNA, 20 nt, Artificial Sequence
  Synthetic oligonucleotide: CTLA4-515
uugguuuaguagagagacac

SEQ ID NO: 47402 - RNA, 20 nt, Artificial Sequence
  Synthetic oligonucleotide: CTLA4-782
guauuguaugccaaacagac

SEQ ID NO: 47403 - RNA, 20 nt, Artificial Sequence
  Synthetic oligonucleotide: CTLA4-516
uucagacccuucuaugagac

SEQ ID NO: 47404 - RNA, 20 nt, Artificial Sequence
  Synthetic oligonucleotide: CTLA4-765
aauuugugacagcuguagac

SEQ ID NO: 47405 - RNA, 20 nt, Artificial Sequence
  Synthetic oligonucleotide: CTLA4-2146
cagaauuccgggcauauuac

SEQ ID NO: 47406 - RNA, 20 nt, Artificial Sequence
  Synthetic oligonucleotide: CTLA4-775
auagcaaaaaaacucuuccc

SEQ ID NO: 47407 - RNA, 20 nt, Artificial Sequence
  Synthetic oligonucleotide: CTLA4-2147
uggggaaccuguaauaugcc

SEQ ID NO: 47408 - RNA, 20 nt, Artificial Sequence
  Synthetic oligonucleotide: CTLA4-2148
aaauugacuuaagcaaaucc

SEQ ID NO: 47409 - RNA, 20 nt, Artificial Sequence
  Synthetic oligonucleotide: CTLA4-2149
uccuaagugcacagaauucc

SEQ ID NO: 47410 - RNA, 20 nt, Artificial Sequence
  Synthetic oligonucleotide: CTLA4-777
ucccuacauuuuaaacaagc

SEQ ID NO: 47411 - RNA, 20 nt, Artificial Sequence
  Synthetic oligonucleotide: CTLA4-520
aguccugaauacauuugagc

SEQ ID NO: 47412 - RNA, 20 nt, Artificial Sequence
  Synthetic oligonucleotide: CTLA4-763
uugaggaccuuccuuaaauc

SEQ ID NO: 47413 - RNA, 20 nt, Artificial Sequence
  Synthetic oligonucleotide: CTLA4-688
ugucacaaauuuaaggacuc

SEQ ID NO: 47414 - RNA, 20 nt, Artificial Sequence
  Synthetic oligonucleotide: CTLA4-783
cugaaacccacacguagguc

SEQ ID NO: 47415 - RNA, 20 nt, Artificial Sequence
  Synthetic oligonucleotide: CTLA4-768
uuugcagaaggaaagaauuc

SEQ ID NO: 47416 - RNA, 20 nt, Artificial Sequence
  Synthetic oligonucleotide: CTLA4-2150
auccuaagugcacagaauuc

SEQ ID NO: 47417 - RNA, 20 nt, Artificial Sequence
  Synthetic oligonucleotide: CTLA4-523
aacccagcucaaauguauuc

SEQ ID NO: 47418 - RNA, 20 nt, Artificial Sequence
  Synthetic oligonucleotide: CTLA4-522
auacauuugagcuggguuuc

SEQ ID NO: 47419 - RNA, 20 nt, Artificial Sequence
  Synthetic oligonucleotide: CTLA4-2151
aacauaguugauaccuuaag

SEQ ID NO: 47420 - RNA, 20 nt, Artificial Sequence
  Synthetic oligonucleotide: CTLA4-517
gagacuggaagugauuuaag

SEQ ID NO: 47421 - RNA, 20 nt, Artificial Sequence
  Synthetic oligonucleotide: CTLA4-696
cuuuccuucugcaaaaccag

SEQ ID NO: 47422 - RNA, 20 nt, Artificial Sequence
  Synthetic oligonucleotide: CTLA4-776
uuauaaaguauaugaauccg

SEQ ID NO: 47423 - RNA, 20 nt, Artificial Sequence
  Synthetic oligonucleotide: CTLA4-781
uuguaugccaaacagacugg

SEQ ID NO: 47424 - RNA, 20 nt, Artificial Sequence
  Synthetic oligonucleotide: CTLA4-760
uaaagaaagaaacauucaug

SEQ ID NO: 47425 - RNA, 20 nt, Artificial Sequence
  Synthetic oligonucleotide: CTLA4-785
cucugaagagcugaaaacug

SEQ ID NO: 47426 - RNA, 20 nt, Artificial Sequence
  Synthetic oligonucleotide: CTLA4-715
auuguugccugaccuacgug

SEQ ID NO: 47427 - RNA, 20 nt, Artificial Sequence
  Synthetic oligonucleotide: CTLA4-708
uuuaaaauguagggaaauug

SEQ ID NO: 47428 - RNA, 20 nt, Artificial Sequence
  Synthetic oligonucleotide: CTLA4-764
aaaaagaauuugaaacauug

SEQ ID NO: 47429 - RNA, 20 nt, Artificial Sequence
  Synthetic oligonucleotide: CTLA4-779
aacuuuuauuuuuaaauaau

SEQ ID NO: 47430 - RNA, 20 nt, Artificial Sequence
  Synthetic oligonucleotide: CTLA4-686
aauucuuuuuguuagaucau

SEQ ID NO: 47431 - RNA, 20 nt, Artificial Sequence
  Synthetic oligonucleotide: CTLA4-761
auaaagaaagaaacauucau

SEQ ID NO: 47432 - RNA, 20 nt, Artificial Sequence
  Synthetic oligonucleotide: CTLA4-2152
aauugacuuaagcaaauccu

SEQ ID NO: 47433 - RNA, 20 nt, Artificial Sequence
  Synthetic oligonucleotide: CTLA4-705
auucaagguuuuaagguccu

SEQ ID NO: 47434 - RNA, 20 nt, Artificial Sequence
  Synthetic oligonucleotide: CTLA4-521
guccugaauacauuugagcu

SEQ ID NO: 47435 - RNA, 20 nt, Artificial Sequence
  Synthetic oligonucleotide: CTLA4-2153
aaccauggacggacuggagu

SEQ ID NO: 47436 - RNA, 20 nt, Artificial Sequence
  Synthetic oligonucleotide: CTLA4-784
ugcaucugaaacccacacgu

SEQ ID NO: 47437 - RNA, 20 nt, Artificial Sequence
  Synthetic oligonucleotide: CTLA4-693
aucucuugaaucauuugggu

SEQ ID NO: 47438 - RNA, 20 nt, Artificial Sequence
  Synthetic oligonucleotide: CTLA4-706
agccagcuuguuuaaaaugu

SEQ ID NO: 47439 - RNA, 20 nt, Artificial Sequence
  Synthetic oligonucleotide: CTLA4-716
uuguugccugaccuacgugu

SEQ ID NO: 47440 - RNA, 20 nt, Artificial Sequence
  Synthetic oligonucleotide: CTLA4-709
uuaaaauguagggaaauugu

SEQ ID NO: 47441 - RNA, 20 nt, Artificial Sequence
  Synthetic oligonucleotide: CTLA4-691
cucuaaucucuugaaucauu

SEQ ID NO: 47442 - RNA, 20 nt, Artificial Sequence
  Synthetic oligonucleotide: CTLA4-2154
gcccggaauucugugcacuu

SEQ ID NO: 47443 - RNA, 20 nt, Artificial Sequence
  Synthetic oligonucleotide: CTLA4-694
cauuuggguuggcuuuucuu

SEQ ID NO: 47444 - RNA, 20 nt, Artificial Sequence
  Synthetic oligonucleotide: CTLA4-714
aagaaagccaccagucuguu

SEQ ID NO: 47445 - RNA, 20 nt, Artificial Sequence
  Synthetic oligonucleotide: CTLA4-692
ucuaaucucuugaaucauuu

SEQ ID NO: 47446 - RNA, 20 nt, Artificial Sequence
  Synthetic oligonucleotide: CTLA4-780
uuuuccuugucuuuuuuuuu

SEQ ID NO: 47447 - RNA, 21 nt, Artificial Sequence
  Synthetic oligonucleotide: CTLA4-2155
ugaaauguguuugaacccaca

SEQ ID NO: 47448 - RNA, 22 nt, Artificial Sequence
  Synthetic oligonucleotide: CTLA4-2156
uugaaauguguuugaacccaca

SEQ ID NO: 47449 - RNA, 23 nt, Artificial Sequence
  Synthetic oligonucleotide: CTLA4-2157
uuugaaauguguuugaacccaca

SEQ ID NO: 47450 - RNA, 24 nt, Artificial Sequence
  Synthetic oligonucleotide: CTLA4-2158
cuuugaaauguguuugaacccaca

SEQ ID NO: 47451 - RNA, 18 nt, Artificial Sequence
  Synthetic oligonucleotide: CTLA4-1387
cucaccuuugcagaagac

SEQ ID NO: 47452 - RNA, 19 nt, Artificial Sequence
  Synthetic oligonucleotide: CTLA4-1388
acucaccuuugcagaagac

SEQ ID NO: 47453 - RNA, 20 nt, Artificial Sequence
  Synthetic oligonucleotide: CTLA4-59
cacucaccuuugcagaagac

SEQ ID NO: 47454 - RNA, 21 nt, Artificial Sequence
  Synthetic oligonucleotide: CTLA4-1389
ucacucaccuuugcagaagac

SEQ ID NO: 47455 - RNA, 22 nt, Artificial Sequence
  Synthetic oligonucleotide: CTLA4-1390
cucacucaccuuugcagaagac

SEQ ID NO: 47456 - RNA, 23 nt, Artificial Sequence
  Synthetic oligonucleotide: CTLA4-1391
ucucacucaccuuugcagaagac

SEQ ID NO: 47457 - RNA, 24 nt, Artificial Sequence
  Synthetic oligonucleotide: CTLA4-1392
gucucacucaccuuugcagaagac

SEQ ID NO: 47458 - RNA, 21 nt, Artificial Sequence
  Synthetic oligonucleotide: CTLA4-2159
uuggagaauuuccuggaguac

SEQ ID NO: 47459 - RNA, 22 nt, Artificial Sequence
  Synthetic oligonucleotide: CTLA4-2160
cuuggagaauuuccuggaguac

SEQ ID NO: 47460 - RNA, 23 nt, Artificial Sequence
  Synthetic oligonucleotide: CTLA4-2161
acuuggagaauuuccuggaguac

SEQ ID NO: 47461 - RNA, 24 nt, Artificial Sequence
  Synthetic oligonucleotide: CTLA4-2162
gacuuggagaauuuccuggaguac

SEQ ID NO: 47462 - RNA, 21 nt, Artificial Sequence
  Synthetic oligonucleotide: CTLA4-2163
ccaacugcucccugcuggccc

SEQ ID NO: 47463 - RNA, 22 nt, Artificial Sequence
  Synthetic oligonucleotide: CTLA4-2164
cccaacugcucccugcuggccc

SEQ ID NO: 47464 - RNA, 23 nt, Artificial Sequence
  Synthetic oligonucleotide: CTLA4-2165
gcccaacugcucccugcuggccc

SEQ ID NO: 47465 - RNA, 24 nt, Artificial Sequence
  Synthetic oligonucleotide: CTLA4-2166
cgcccaacugcucccugcuggccc

SEQ ID NO: 47466 - RNA, 21 nt, Artificial Sequence
  Synthetic oligonucleotide: CTLA4-2167
gguuuuacgagaaaggaagcc

SEQ ID NO: 47467 - RNA, 22 nt, Artificial Sequence
  Synthetic oligonucleotide: CTLA4-2168
ugguuuuacgagaaaggaagcc

SEQ ID NO: 47468 - RNA, 23 nt, Artificial Sequence
  Synthetic oligonucleotide: CTLA4-2169
uugguuuuacgagaaaggaagcc

SEQ ID NO: 47469 - RNA, 24 nt, Artificial Sequence
  Synthetic oligonucleotide: CTLA4-2170
uuugguuuuacgagaaaggaagcc

SEQ ID NO: 47470 - RNA, 21 nt, Artificial Sequence
  Synthetic oligonucleotide: CTLA4-2171
guggagacuuggagaauuucc

SEQ ID NO: 47471 - RNA, 22 nt, Artificial Sequence
  Synthetic oligonucleotide: CTLA4-2172
aguggagacuuggagaauuucc

SEQ ID NO: 47472 - RNA, 23 nt, Artificial Sequence
  Synthetic oligonucleotide: CTLA4-2173
aaguggagacuuggagaauuucc

SEQ ID NO: 47473 - RNA, 24 nt, Artificial Sequence
  Synthetic oligonucleotide: CTLA4-2174
uaaguggagacuuggagaauuucc

SEQ ID NO: 47474 - RNA, 18 nt, Artificial Sequence
  Synthetic oligonucleotide: CTLA4-2175
gagcccuugggcuaaugg

SEQ ID NO: 47475 - RNA, 19 nt, Artificial Sequence
  Synthetic oligonucleotide: CTLA4-2176
ugagcccuugggcuaaugg

SEQ ID NO: 47476 - RNA, 20 nt, Artificial Sequence
  Synthetic oligonucleotide: CTLA4-966
cugagcccuugggcuaaugg

SEQ ID NO: 47477 - RNA, 21 nt, Artificial Sequence
  Synthetic oligonucleotide: CTLA4-2177
ucugagcccuugggcuaaugg

SEQ ID NO: 47478 - RNA, 22 nt, Artificial Sequence
  Synthetic oligonucleotide: CTLA4-2178
uucugagcccuugggcuaaugg

SEQ ID NO: 47479 - RNA, 23 nt, Artificial Sequence
  Synthetic oligonucleotide: CTLA4-2179
uuucugagcccuugggcuaaugg

SEQ ID NO: 47480 - RNA, 24 nt, Artificial Sequence
  Synthetic oligonucleotide: CTLA4-2180
cuuucugagcccuugggcuaaugg

SEQ ID NO: 47481 - RNA, 21 nt, Artificial Sequence
  Synthetic oligonucleotide: CTLA4-2181
ggauaacuaaguggagacuug

SEQ ID NO: 47482 - RNA, 22 nt, Artificial Sequence
  Synthetic oligonucleotide: CTLA4-2182
uggauaacuaaguggagacuug

SEQ ID NO: 47483 - RNA, 23 nt, Artificial Sequence
  Synthetic oligonucleotide: CTLA4-2183
cuggauaacuaaguggagacuug

SEQ ID NO: 47484 - RNA, 24 nt, Artificial Sequence
  Synthetic oligonucleotide: CTLA4-2184
ucuggauaacuaaguggagacuug

SEQ ID NO: 47485 - RNA, 21 nt, Artificial Sequence
  Synthetic oligonucleotide: CTLA4-2185
acagagccagccaagccagau

SEQ ID NO: 47486 - RNA, 22 nt, Artificial Sequence
  Synthetic oligonucleotide: CTLA4-2186
uacagagccagccaagccagau

SEQ ID NO: 47487 - RNA, 23 nt, Artificial Sequence
  Synthetic oligonucleotide: CTLA4-2187
auacagagccagccaagccagau

SEQ ID NO: 47488 - RNA, 24 nt, Artificial Sequence
  Synthetic oligonucleotide: CTLA4-2188
aauacagagccagccaagccagau

SEQ ID NO: 47489 - RNA, 21 nt, Artificial Sequence
  Synthetic oligonucleotide: CTLA4-2189
cuucauguucacuuugaggau

SEQ ID NO: 47490 - RNA, 22 nt, Artificial Sequence
  Synthetic oligonucleotide: CTLA4-2190
gcuucauguucacuuugaggau

SEQ ID NO: 47491 - RNA, 23 nt, Artificial Sequence
  Synthetic oligonucleotide: CTLA4-2191
agcuucauguucacuuugaggau

SEQ ID NO: 47492 - RNA, 24 nt, Artificial Sequence
  Synthetic oligonucleotide: CTLA4-2192
aagcuucauguucacuuugaggau

SEQ ID NO: 47493 - RNA, 18 nt, Artificial Sequence
  Synthetic oligonucleotide: CTLA4-2193
aagcuucauguucacuuu

SEQ ID NO: 47494 - RNA, 19 nt, Artificial Sequence
  Synthetic oligonucleotide: CTLA4-2194
gaagcuucauguucacuuu

SEQ ID NO: 47495 - RNA, 20 nt, Artificial Sequence
  Synthetic oligonucleotide: CTLA4-979
ugaagcuucauguucacuuu

SEQ ID NO: 47496 - RNA, 21 nt, Artificial Sequence
  Synthetic oligonucleotide: CTLA4-2195
cugaagcuucauguucacuuu

SEQ ID NO: 47497 - RNA, 22 nt, Artificial Sequence
  Synthetic oligonucleotide: CTLA4-2196
acugaagcuucauguucacuuu

SEQ ID NO: 47498 - RNA, 23 nt, Artificial Sequence
  Synthetic oligonucleotide: CTLA4-2197
aacugaagcuucauguucacuuu

SEQ ID NO: 47499 - RNA, 24 nt, Artificial Sequence
  Synthetic oligonucleotide: CTLA4-2198
aaacugaagcuucauguucacuuu

SEQ ID NO: 47500 - RNA, 21 nt, Artificial Sequence
  Synthetic oligonucleotide: CTLA4-2199
aggaaguagagcaaaaccuuu

SEQ ID NO: 47501 - RNA, 22 nt, Artificial Sequence
  Synthetic oligonucleotide: CTLA4-2200
caggaaguagagcaaaaccuuu

SEQ ID NO: 47502 - RNA, 23 nt, Artificial Sequence
  Synthetic oligonucleotide: CTLA4-2201
ucaggaaguagagcaaaaccuuu

SEQ ID NO: 47503 - RNA, 24 nt, Artificial Sequence
  Synthetic oligonucleotide: CTLA4-2202
uucaggaaguagagcaaaaccuuu

SEQ ID NO: 47504 - RNA, 21 nt, Artificial Sequence
  Synthetic oligonucleotide: CTLA4-2203
acaugaagcuucaguuucaaa

SEQ ID NO: 47505 - RNA, 22 nt, Artificial Sequence
  Synthetic oligonucleotide: CTLA4-2204
aacaugaagcuucaguuucaaa

SEQ ID NO: 47506 - RNA, 23 nt, Artificial Sequence
  Synthetic oligonucleotide: CTLA4-2205
gaacaugaagcuucaguuucaaa

SEQ ID NO: 47507 - RNA, 24 nt, Artificial Sequence
  Synthetic oligonucleotide: CTLA4-2206
ugaacaugaagcuucaguuucaaa

SEQ ID NO: 47508 - RNA, 21 nt, Artificial Sequence
  Synthetic oligonucleotide: CTLA4-2207
aguuuuggaguugucaaugaa

SEQ ID NO: 47509 - RNA, 22 nt, Artificial Sequence
  Synthetic oligonucleotide: CTLA4-2208
uaguuuuggaguugucaaugaa

SEQ ID NO: 47510 - RNA, 23 nt, Artificial Sequence
  Synthetic oligonucleotide: CTLA4-2209
guaguuuuggaguugucaaugaa

SEQ ID NO: 47511 - RNA, 24 nt, Artificial Sequence
  Synthetic oligonucleotide: CTLA4-2210
aguaguuuuggaguugucaaugaa

SEQ ID NO: 47512 - RNA, 18 nt, Artificial Sequence
  Synthetic oligonucleotide: CTLA4-2211
uuaaggaugcccagaaga

SEQ ID NO: 47513 - RNA, 19 nt, Artificial Sequence
  Synthetic oligonucleotide: CTLA4-2212
guuaaggaugcccagaaga

SEQ ID NO: 47514 - RNA, 20 nt, Artificial Sequence
  Synthetic oligonucleotide: CTLA4-832
gguuaaggaugcccagaaga

SEQ ID NO: 47515 - RNA, 21 nt, Artificial Sequence
  Synthetic oligonucleotide: CTLA4-2213
ugguuaaggaugcccagaaga

SEQ ID NO: 47516 - RNA, 22 nt, Artificial Sequence
  Synthetic oligonucleotide: CTLA4-2214
augguuaaggaugcccagaaga

SEQ ID NO: 47517 - RNA, 23 nt, Artificial Sequence
  Synthetic oligonucleotide: CTLA4-2215
gaugguuaaggaugcccagaaga

SEQ ID NO: 47518 - RNA, 24 nt, Artificial Sequence
  Synthetic oligonucleotide: CTLA4-2216
ggaugguuaaggaugcccagaaga

SEQ ID NO: 47519 - RNA, 21 nt, Artificial Sequence
  Synthetic oligonucleotide: CTLA4-2217
agaaggauggugcuucacaga

SEQ ID NO: 47520 - RNA, 22 nt, Artificial Sequence
  Synthetic oligonucleotide: CTLA4-2218
uagaaggauggugcuucacaga

SEQ ID NO: 47521 - RNA, 23 nt, Artificial Sequence
  Synthetic oligonucleotide: CTLA4-2219
uuagaaggauggugcuucacaga

SEQ ID NO: 47522 - RNA, 24 nt, Artificial Sequence
  Synthetic oligonucleotide: CTLA4-2220
auuagaaggauggugcuucacaga

SEQ ID NO: 47523 - RNA, 21 nt, Artificial Sequence
  Synthetic oligonucleotide: CTLA4-2221
uugucaaugaaaugaauugga

SEQ ID NO: 47524 - RNA, 22 nt, Artificial Sequence
  Synthetic oligonucleotide: CTLA4-2222
guugucaaugaaaugaauugga

SEQ ID NO: 47525 - RNA, 23 nt, Artificial Sequence
  Synthetic oligonucleotide: CTLA4-2223
aguugucaaugaaaugaauugga

SEQ ID NO: 47526 - RNA, 24 nt, Artificial Sequence
  Synthetic oligonucleotide: CTLA4-2224
gaguugucaaugaaaugaauugga

SEQ ID NO: 47527 - RNA, 21 nt, Artificial Sequence
  Synthetic oligonucleotide: CTLA4-2225
uggaggagguguuucuccuac

SEQ ID NO: 47528 - RNA, 22 nt, Artificial Sequence
  Synthetic oligonucleotide: CTLA4-2226
auggaggagguguuucuccuac

SEQ ID NO: 47529 - RNA, 23 nt, Artificial Sequence
  Synthetic oligonucleotide: CTLA4-2227
gauggaggagguguuucuccuac

SEQ ID NO: 47530 - RNA, 24 nt, Artificial Sequence
  Synthetic oligonucleotide: CTLA4-2228
agauggaggagguguuucuccuac

SEQ ID NO: 47531 - RNA, 18 nt, Artificial Sequence
  Synthetic oligonucleotide: CTLA4-1418
auaaagccauggcuugcc

SEQ ID NO: 47532 - RNA, 19 nt, Artificial Sequence
  Synthetic oligonucleotide: CTLA4-1419
cauaaagccauggcuugcc

SEQ ID NO: 47533 - RNA, 20 nt, Artificial Sequence
  Synthetic oligonucleotide: CTLA4-216
ccauaaagccauggcuugcc

SEQ ID NO: 47534 - RNA, 21 nt, Artificial Sequence
  Synthetic oligonucleotide: CTLA4-1420
cccauaaagccauggcuugcc

SEQ ID NO: 47535 - RNA, 22 nt, Artificial Sequence
  Synthetic oligonucleotide: CTLA4-1421
ucccauaaagccauggcuugcc

SEQ ID NO: 47536 - RNA, 23 nt, Artificial Sequence
  Synthetic oligonucleotide: CTLA4-1422
cucccauaaagccauggcuugcc

SEQ ID NO: 47537 - RNA, 24 nt, Artificial Sequence
  Synthetic oligonucleotide: CTLA4-1423
gcucccauaaagccauggcuugcc

SEQ ID NO: 47538 - RNA, 21 nt, Artificial Sequence
  Synthetic oligonucleotide: CTLA4-2229
aauugaauacauuuuccaucc

SEQ ID NO: 47539 - RNA, 22 nt, Artificial Sequence
  Synthetic oligonucleotide: CTLA4-2230
aaauugaauacauuuuccaucc

SEQ ID NO: 47540 - RNA, 23 nt, Artificial Sequence
  Synthetic oligonucleotide: CTLA4-2231
caaauugaauacauuuuccaucc

SEQ ID NO: 47541 - RNA, 24 nt, Artificial Sequence
  Synthetic oligonucleotide: CTLA4-2232
ucaaauugaauacauuuuccaucc

SEQ ID NO: 47542 - RNA, 21 nt, Artificial Sequence
  Synthetic oligonucleotide: CTLA4-2233
ggauuggcuuguuuuguucag

SEQ ID NO: 47543 - RNA, 22 nt, Artificial Sequence
  Synthetic oligonucleotide: CTLA4-2234
uggauuggcuuguuuuguucag

SEQ ID NO: 47544 - RNA, 23 nt, Artificial Sequence
  Synthetic oligonucleotide: CTLA4-2235
auggauuggcuuguuuuguucag

SEQ ID NO: 47545 - RNA, 24 nt, Artificial Sequence
  Synthetic oligonucleotide: CTLA4-2236
cauggauuggcuuguuuuguucag

SEQ ID NO: 47546 - RNA, 18 nt, Artificial Sequence
  Synthetic oligonucleotide: CTLA4-2237
cugucaagggaccauuag

SEQ ID NO: 47547 - RNA, 19 nt, Artificial Sequence
  Synthetic oligonucleotide: CTLA4-2238
gcugucaagggaccauuag

SEQ ID NO: 47548 - RNA, 20 nt, Artificial Sequence
  Synthetic oligonucleotide: CTLA4-1137
agcugucaagggaccauuag

SEQ ID NO: 47549 - RNA, 21 nt, Artificial Sequence
  Synthetic oligonucleotide: CTLA4-2239
aagcugucaagggaccauuag

SEQ ID NO: 47550 - RNA, 22 nt, Artificial Sequence
  Synthetic oligonucleotide: CTLA4-2240
aaagcugucaagggaccauuag

SEQ ID NO: 47551 - RNA, 23 nt, Artificial Sequence
  Synthetic oligonucleotide: CTLA4-2241
uaaagcugucaagggaccauuag

SEQ ID NO: 47552 - RNA, 24 nt, Artificial Sequence
  Synthetic oligonucleotide: CTLA4-2242
guaaagcugucaagggaccauuag

SEQ ID NO: 47553 - RNA, 21 nt, Artificial Sequence
  Synthetic oligonucleotide: CTLA4-2243
gcccagaagauugaauaaaau

SEQ ID NO: 47554 - RNA, 22 nt, Artificial Sequence
  Synthetic oligonucleotide: CTLA4-2244
ugcccagaagauugaauaaaau

SEQ ID NO: 47555 - RNA, 23 nt, Artificial Sequence
  Synthetic oligonucleotide: CTLA4-2245
augcccagaagauugaauaaaau

SEQ ID NO: 47556 - RNA, 24 nt, Artificial Sequence
  Synthetic oligonucleotide: CTLA4-2246
gaugcccagaagauugaauaaaau

SEQ ID NO: 47557 - RNA, 18 nt, Artificial Sequence
  Synthetic oligonucleotide: CTLA4-2247
uaaaguccuugauucugu

SEQ ID NO: 47558 - RNA, 19 nt, Artificial Sequence
  Synthetic oligonucleotide: CTLA4-2248
auaaaguccuugauucugu

SEQ ID NO: 47559 - RNA, 20 nt, Artificial Sequence
  Synthetic oligonucleotide: CTLA4-848
uauaaaguccuugauucugu

SEQ ID NO: 47560 - RNA, 21 nt, Artificial Sequence
  Synthetic oligonucleotide: CTLA4-2249
auauaaaguccuugauucugu

SEQ ID NO: 47561 - RNA, 22 nt, Artificial Sequence
  Synthetic oligonucleotide: CTLA4-2250
uauauaaaguccuugauucugu

SEQ ID NO: 47562 - RNA, 23 nt, Artificial Sequence
  Synthetic oligonucleotide: CTLA4-2251
cuauauaaaguccuugauucugu

SEQ ID NO: 47563 - RNA, 24 nt, Artificial Sequence
  Synthetic oligonucleotide: CTLA4-2252
ucuauauaaaguccuugauucugu

SEQ ID NO: 47564 - RNA, 21 nt, Artificial Sequence
  Synthetic oligonucleotide: CTLA4-2253
aaugaauuggacuggaugguu

SEQ ID NO: 47565 - RNA, 22 nt, Artificial Sequence
  Synthetic oligonucleotide: CTLA4-2254
aaaugaauuggacuggaugguu

SEQ ID NO: 47566 - RNA, 23 nt, Artificial Sequence
  Synthetic oligonucleotide: CTLA4-2255
gaaaugaauuggacuggaugguu

SEQ ID NO: 47567 - RNA, 24 nt, Artificial Sequence
  Synthetic oligonucleotide: CTLA4-2256
ugaaaugaauuggacuggaugguu

SEQ ID NO: 47568 - RNA, 18 nt, Artificial Sequence
  Synthetic oligonucleotide: CTLA4-2257
uuagcagccuaguaguuu

SEQ ID NO: 47569 - RNA, 19 nt, Artificial Sequence
  Synthetic oligonucleotide: CTLA4-2258
guuagcagccuaguaguuu

SEQ ID NO: 47570 - RNA, 20 nt, Artificial Sequence
  Synthetic oligonucleotide: CTLA4-462
aguuagcagccuaguaguuu

SEQ ID NO: 47571 - RNA, 21 nt, Artificial Sequence
  Synthetic oligonucleotide: CTLA4-2259
aaguuagcagccuaguaguuu

SEQ ID NO: 47572 - RNA, 22 nt, Artificial Sequence
  Synthetic oligonucleotide: CTLA4-2260
aaaguuagcagccuaguaguuu

SEQ ID NO: 47573 - RNA, 23 nt, Artificial Sequence
  Synthetic oligonucleotide: CTLA4-2261
gaaaguuagcagccuaguaguuu

SEQ ID NO: 47574 - RNA, 24 nt, Artificial Sequence
  Synthetic oligonucleotide: CTLA4-2262
agaaaguuagcagccuaguaguuu

SEQ ID NO: 47575 - RNA, 18 nt, Artificial Sequence
  Synthetic oligonucleotide: CTLA4-2263
aauguguuugaacccaca

SEQ ID NO: 47576 - RNA, 19 nt, Artificial Sequence
  Synthetic oligonucleotide: CTLA4-2264
aaauguguuugaacccaca

SEQ ID NO: 47577 - RNA, 20 nt, Artificial Sequence
  Synthetic oligonucleotide: CTLA4-997
gaaauguguuugaacccaca

SEQ ID NO: 47578 - RNA, 18 nt, Artificial Sequence
  Synthetic oligonucleotide: CTLA4-2265
ugcacacacagaaggcac

SEQ ID NO: 47579 - RNA, 19 nt, Artificial Sequence
  Synthetic oligonucleotide: CTLA4-2266
gugcacacacagaaggcac

SEQ ID NO: 47580 - RNA, 20 nt, Artificial Sequence
  Synthetic oligonucleotide: CTLA4-994
ugugcacacacagaaggcac

SEQ ID NO: 47581 - RNA, 21 nt, Artificial Sequence
  Synthetic oligonucleotide: CTLA4-2267
augugcacacacagaaggcac

SEQ ID NO: 47582 - RNA, 22 nt, Artificial Sequence
  Synthetic oligonucleotide: CTLA4-2268
caugugcacacacagaaggcac

SEQ ID NO: 47583 - RNA, 23 nt, Artificial Sequence
  Synthetic oligonucleotide: CTLA4-2269
acaugugcacacacagaaggcac

SEQ ID NO: 47584 - RNA, 24 nt, Artificial Sequence
  Synthetic oligonucleotide: CTLA4-2270
cacaugugcacacacagaaggcac

SEQ ID NO: 47585 - RNA, 18 nt, Artificial Sequence
  Synthetic oligonucleotide: CTLA4-2271
gagaauuuccuggaguac

SEQ ID NO: 47586 - RNA, 19 nt, Artificial Sequence
  Synthetic oligonucleotide: CTLA4-2272
ggagaauuuccuggaguac

SEQ ID NO: 47587 - RNA, 20 nt, Artificial Sequence
  Synthetic oligonucleotide: CTLA4-970
uggagaauuuccuggaguac

SEQ ID NO: 47588 - RNA, 18 nt, Artificial Sequence
  Synthetic oligonucleotide: CTLA4-2273
acugcucccugcuggccc

SEQ ID NO: 47589 - RNA, 19 nt, Artificial Sequence
  Synthetic oligonucleotide: CTLA4-2274
aacugcucccugcuggccc

SEQ ID NO: 47590 - RNA, 20 nt, Artificial Sequence
  Synthetic oligonucleotide: CTLA4-529
caacugcucccugcuggccc

SEQ ID NO: 47591 - RNA, 18 nt, Artificial Sequence
  Synthetic oligonucleotide: CTLA4-2275
uuuacgagaaaggaagcc

SEQ ID NO: 47592 - RNA, 19 nt, Artificial Sequence
  Synthetic oligonucleotide: CTLA4-2276
uuuuacgagaaaggaagcc

SEQ ID NO: 47593 - RNA, 20 nt, Artificial Sequence
  Synthetic oligonucleotide: CTLA4-988
guuuuacgagaaaggaagcc

SEQ ID NO: 47594 - RNA, 18 nt, Artificial Sequence
  Synthetic oligonucleotide: CTLA4-2277
aacaaaacaagccaaucc

SEQ ID NO: 47595 - RNA, 19 nt, Artificial Sequence
  Synthetic oligonucleotide: CTLA4-2278
gaacaaaacaagccaaucc

SEQ ID NO: 47596 - RNA, 20 nt, Artificial Sequence
  Synthetic oligonucleotide: CTLA4-985
ugaacaaaacaagccaaucc

SEQ ID NO: 47597 - RNA, 21 nt, Artificial Sequence
  Synthetic oligonucleotide: CTLA4-2279
cugaacaaaacaagccaaucc

SEQ ID NO: 47598 - RNA, 22 nt, Artificial Sequence
  Synthetic oligonucleotide: CTLA4-2280
acugaacaaaacaagccaaucc

SEQ ID NO: 47599 - RNA, 23 nt, Artificial Sequence
  Synthetic oligonucleotide: CTLA4-2281
aacugaacaaaacaagccaaucc

SEQ ID NO: 47600 - RNA, 24 nt, Artificial Sequence
  Synthetic oligonucleotide: CTLA4-2282
caacugaacaaaacaagccaaucc

SEQ ID NO: 47601 - RNA, 18 nt, Artificial Sequence
  Synthetic oligonucleotide: CTLA4-2283
gagacuuggagaauuucc

SEQ ID NO: 47602 - RNA, 19 nt, Artificial Sequence
  Synthetic oligonucleotide: CTLA4-2284
ggagacuuggagaauuucc

SEQ ID NO: 47603 - RNA, 20 nt, Artificial Sequence
  Synthetic oligonucleotide: CTLA4-562
uggagacuuggagaauuucc

SEQ ID NO: 47604 - RNA, 18 nt, Artificial Sequence
  Synthetic oligonucleotide: CTLA4-1444
gaagagaagaaaaaacag

SEQ ID NO: 47605 - RNA, 19 nt, Artificial Sequence
  Synthetic oligonucleotide: CTLA4-1445
ugaagagaagaaaaaacag

SEQ ID NO: 47606 - RNA, 20 nt, Artificial Sequence
  Synthetic oligonucleotide: CTLA4-282
augaagagaagaaaaaacag

SEQ ID NO: 47607 - RNA, 21 nt, Artificial Sequence
  Synthetic oligonucleotide: CTLA4-1446
gaugaagagaagaaaaaacag

SEQ ID NO: 47608 - RNA, 22 nt, Artificial Sequence
  Synthetic oligonucleotide: CTLA4-1447
ggaugaagagaagaaaaaacag

SEQ ID NO: 47609 - RNA, 23 nt, Artificial Sequence
  Synthetic oligonucleotide: CTLA4-1448
gggaugaagagaagaaaaaacag

SEQ ID NO: 47610 - RNA, 24 nt, Artificial Sequence
  Synthetic oligonucleotide: CTLA4-1449
agggaugaagagaagaaaaaacag

SEQ ID NO: 47611 - RNA, 18 nt, Artificial Sequence
  Synthetic oligonucleotide: CTLA4-2285
uaacuaaguggagacuug

SEQ ID NO: 47612 - RNA, 19 nt, Artificial Sequence
  Synthetic oligonucleotide: CTLA4-2286
auaacuaaguggagacuug

SEQ ID NO: 47613 - RNA, 20 nt, Artificial Sequence
  Synthetic oligonucleotide: CTLA4-973
gauaacuaaguggagacuug

SEQ ID NO: 47614 - RNA, 18 nt, Artificial Sequence
  Synthetic oligonucleotide: CTLA4-2287
gagccagccaagccagau

SEQ ID NO: 47615 - RNA, 19 nt, Artificial Sequence
  Synthetic oligonucleotide: CTLA4-2288
agagccagccaagccagau

SEQ ID NO: 47616 - RNA, 20 nt, Artificial Sequence
  Synthetic oligonucleotide: CTLA4-530
cagagccagccaagccagau

SEQ ID NO: 47617 - RNA, 18 nt, Artificial Sequence
  Synthetic oligonucleotide: CTLA4-2289
cauguucacuuugaggau

SEQ ID NO: 47618 - RNA, 19 nt, Artificial Sequence
  Synthetic oligonucleotide: CTLA4-2290
ucauguucacuuugaggau

SEQ ID NO: 47619 - RNA, 20 nt, Artificial Sequence
  Synthetic oligonucleotide: CTLA4-978
uucauguucacuuugaggau

SEQ ID NO: 47620 - RNA, 18 nt, Artificial Sequence
  Synthetic oligonucleotide: CTLA4-2291
aaguagagcaaaaccuuu

SEQ ID NO: 47621 - RNA, 19 nt, Artificial Sequence
  Synthetic oligonucleotide: CTLA4-2292
gaaguagagcaaaaccuuu

SEQ ID NO: 47622 - RNA, 20 nt, Artificial Sequence
  Synthetic oligonucleotide: CTLA4-1001
ggaaguagagcaaaaccuuu

SEQ ID NO: 47623 - RNA, 18 nt, Artificial Sequence
  Synthetic oligonucleotide: CTLA4-2293
ugaagcuucaguuucaaa

SEQ ID NO: 47624 - RNA, 19 nt, Artificial Sequence
  Synthetic oligonucleotide: CTLA4-2294
augaagcuucaguuucaaa

SEQ ID NO: 47625 - RNA, 20 nt, Artificial Sequence
  Synthetic oligonucleotide: CTLA4-842
caugaagcuucaguuucaaa

SEQ ID NO: 47626 - RNA, 18 nt, Artificial Sequence
  Synthetic oligonucleotide: CTLA4-2295
uuuggaguugucaaugaa

SEQ ID NO: 47627 - RNA, 19 nt, Artificial Sequence
  Synthetic oligonucleotide: CTLA4-2296
uuuuggaguugucaaugaa

SEQ ID NO: 47628 - RNA, 20 nt, Artificial Sequence
  Synthetic oligonucleotide: CTLA4-827
guuuuggaguugucaaugaa

SEQ ID NO: 47629 - RNA, 18 nt, Artificial Sequence
  Synthetic oligonucleotide: CTLA4-2297
cucuuaaccaaaugcuaa

SEQ ID NO: 47630 - RNA, 19 nt, Artificial Sequence
  Synthetic oligonucleotide: CTLA4-2298
ucucuuaaccaaaugcuaa

SEQ ID NO: 47631 - RNA, 20 nt, Artificial Sequence
  Synthetic oligonucleotide: CTLA4-1130
uucucuuaaccaaaugcuaa

SEQ ID NO: 47632 - RNA, 21 nt, Artificial Sequence
  Synthetic oligonucleotide: CTLA4-2299
uuucucuuaaccaaaugcuaa

SEQ ID NO: 47633 - RNA, 22 nt, Artificial Sequence
  Synthetic oligonucleotide: CTLA4-2300
uuuucucuuaaccaaaugcuaa

SEQ ID NO: 47634 - RNA, 23 nt, Artificial Sequence
  Synthetic oligonucleotide: CTLA4-2301
uuuuucucuuaaccaaaugcuaa

SEQ ID NO: 47635 - RNA, 24 nt, Artificial Sequence
  Synthetic oligonucleotide: CTLA4-2302
uuuuuucucuuaaccaaaugcuaa

SEQ ID NO: 47636 - RNA, 18 nt, Artificial Sequence
  Synthetic oligonucleotide: CTLA4-2303
aggauggugcuucacaga

SEQ ID NO: 47637 - RNA, 19 nt, Artificial Sequence
  Synthetic oligonucleotide: CTLA4-2304
aaggauggugcuucacaga

SEQ ID NO: 47638 - RNA, 20 nt, Artificial Sequence
  Synthetic oligonucleotide: CTLA4-1138
gaaggauggugcuucacaga

SEQ ID NO: 47639 - RNA, 18 nt, Artificial Sequence
  Synthetic oligonucleotide: CTLA4-2305
ucaaugaaaugaauugga

SEQ ID NO: 47640 - RNA, 19 nt, Artificial Sequence
  Synthetic oligonucleotide: CTLA4-2306
gucaaugaaaugaauugga

SEQ ID NO: 47641 - RNA, 20 nt, Artificial Sequence
  Synthetic oligonucleotide: CTLA4-829
ugucaaugaaaugaauugga

SEQ ID NO: 47642 - RNA, 18 nt, Artificial Sequence
  Synthetic oligonucleotide: CTLA4-2307
aggagguguuucuccuac

SEQ ID NO: 47643 - RNA, 19 nt, Artificial Sequence
  Synthetic oligonucleotide: CTLA4-2308
gaggagguguuucuccuac

SEQ ID NO: 47644 - RNA, 20 nt, Artificial Sequence
  Synthetic oligonucleotide: CTLA4-865
ggaggagguguuucuccuac

SEQ ID NO: 47645 - RNA, 18 nt, Artificial Sequence
  Synthetic oligonucleotide: CTLA4-2309
ugaauacauuuuccaucc

SEQ ID NO: 47646 - RNA, 19 nt, Artificial Sequence
  Synthetic oligonucleotide: CTLA4-2310
uugaauacauuuuccaucc

SEQ ID NO: 47647 - RNA, 20 nt, Artificial Sequence
  Synthetic oligonucleotide: CTLA4-843
auugaauacauuuuccaucc

SEQ ID NO: 47648 - RNA, 18 nt, Artificial Sequence
  Synthetic oligonucleotide: CTLA4-2311
acauguguaauacauauc

SEQ ID NO: 47649 - RNA, 19 nt, Artificial Sequence
  Synthetic oligonucleotide: CTLA4-2312
cacauguguaauacauauc

SEQ ID NO: 47650 - RNA, 20 nt, Artificial Sequence
  Synthetic oligonucleotide: CTLA4-477
gcacauguguaauacauauc

SEQ ID NO: 47651 - RNA, 21 nt, Artificial Sequence
  Synthetic oligonucleotide: CTLA4-2313
ugcacauguguaauacauauc

SEQ ID NO: 47652 - RNA, 22 nt, Artificial Sequence
  Synthetic oligonucleotide: CTLA4-2314
gugcacauguguaauacauauc

SEQ ID NO: 47653 - RNA, 23 nt, Artificial Sequence
  Synthetic oligonucleotide: CTLA4-2315
ugugcacauguguaauacauauc

SEQ ID NO: 47654 - RNA, 24 nt, Artificial Sequence
  Synthetic oligonucleotide: CTLA4-2316
gugugcacauguguaauacauauc

SEQ ID NO: 47655 - RNA, 18 nt, Artificial Sequence
  Synthetic oligonucleotide: CTLA4-1460
ucccugucuucugcaaag

SEQ ID NO: 47656 - RNA, 19 nt, Artificial Sequence
  Synthetic oligonucleotide: CTLA4-1461
aucccugucuucugcaaag

SEQ ID NO: 47657 - RNA, 20 nt, Artificial Sequence
  Synthetic oligonucleotide: CTLA4-219
caucccugucuucugcaaag

SEQ ID NO: 47658 - RNA, 21 nt, Artificial Sequence
  Synthetic oligonucleotide: CTLA4-1462
ucaucccugucuucugcaaag

SEQ ID NO: 47659 - RNA, 22 nt, Artificial Sequence
  Synthetic oligonucleotide: CTLA4-1463
uucaucccugucuucugcaaag

SEQ ID NO: 47660 - RNA, 23 nt, Artificial Sequence
  Synthetic oligonucleotide: CTLA4-1464
cuucaucccugucuucugcaaag

SEQ ID NO: 47661 - RNA, 24 nt, Artificial Sequence
  Synthetic oligonucleotide: CTLA4-1465
ucuucaucccugucuucugcaaag

SEQ ID NO: 47662 - RNA, 18 nt, Artificial Sequence
  Synthetic oligonucleotide: CTLA4-2317
uuggcuuguuuuguucag

SEQ ID NO: 47663 - RNA, 19 nt, Artificial Sequence
  Synthetic oligonucleotide: CTLA4-2318
auuggcuuguuuuguucag

SEQ ID NO: 47664 - RNA, 20 nt, Artificial Sequence
  Synthetic oligonucleotide: CTLA4-844
gauuggcuuguuuuguucag

SEQ ID NO: 47665 - RNA, 18 nt, Artificial Sequence
  Synthetic oligonucleotide: CTLA4-2319
cagaagauugaauaaaau

SEQ ID NO: 47666 - RNA, 19 nt, Artificial Sequence
  Synthetic oligonucleotide: CTLA4-2320
ccagaagauugaauaaaau

SEQ ID NO: 47667 - RNA, 20 nt, Artificial Sequence
  Synthetic oligonucleotide: CTLA4-467
cccagaagauugaauaaaau

SEQ ID NO: 47668 - RNA, 18 nt, Artificial Sequence
  Synthetic oligonucleotide: CTLA4-2321
aaacacauuucaaagcuu

SEQ ID NO: 47669 - RNA, 19 nt, Artificial Sequence
  Synthetic oligonucleotide: CTLA4-2322
caaacacauuucaaagcuu

SEQ ID NO: 47670 - RNA, 20 nt, Artificial Sequence
  Synthetic oligonucleotide: CTLA4-849
ucaaacacauuucaaagcuu

SEQ ID NO: 47671 - RNA, 21 nt, Artificial Sequence
  Synthetic oligonucleotide: CTLA4-2323
uucaaacacauuucaaagcuu

SEQ ID NO: 47672 - RNA, 22 nt, Artificial Sequence
  Synthetic oligonucleotide: CTLA4-2324
guucaaacacauuucaaagcuu

SEQ ID NO: 47673 - RNA, 23 nt, Artificial Sequence
  Synthetic oligonucleotide: CTLA4-2325
gguucaaacacauuucaaagcuu

SEQ ID NO: 47674 - RNA, 24 nt, Artificial Sequence
  Synthetic oligonucleotide: CTLA4-2326
ggguucaaacacauuucaaagcuu

SEQ ID NO: 47675 - RNA, 18 nt, Artificial Sequence
  Synthetic oligonucleotide: CTLA4-2327
gaauuggacuggaugguu

SEQ ID NO: 47676 - RNA, 19 nt, Artificial Sequence
  Synthetic oligonucleotide: CTLA4-2328
ugaauuggacuggaugguu

SEQ ID NO: 47677 - RNA, 20 nt, Artificial Sequence
  Synthetic oligonucleotide: CTLA4-830
augaauuggacuggaugguu

SEQ ID NO: 47678 - RNA, 18 nt, Artificial Sequence
  Synthetic oligonucleotide: CTLA4-1468
gaugaagagaagaaaaaa

SEQ ID NO: 47679 - RNA, 19 nt, Artificial Sequence
  Synthetic oligonucleotide: CTLA4-1469
ggaugaagagaagaaaaaa

SEQ ID NO: 47680 - RNA, 20 nt, Artificial Sequence
  Synthetic oligonucleotide: CTLA4-284
gggaugaagagaagaaaaaa

SEQ ID NO: 47681 - RNA, 21 nt, Artificial Sequence
  Synthetic oligonucleotide: CTLA4-1470
agggaugaagagaagaaaaaa

SEQ ID NO: 47682 - RNA, 22 nt, Artificial Sequence
  Synthetic oligonucleotide: CTLA4-1471
cagggaugaagagaagaaaaaa

SEQ ID NO: 47683 - RNA, 23 nt, Artificial Sequence
  Synthetic oligonucleotide: CTLA4-1472
acagggaugaagagaagaaaaaa

SEQ ID NO: 47684 - RNA, 24 nt, Artificial Sequence
  Synthetic oligonucleotide: CTLA4-1473
gacagggaugaagagaagaaaaaa

SEQ ID NO: 47685 - RNA, 18 nt, Artificial Sequence
  Synthetic oligonucleotide: CTLA4-2329
aauguauucaauuugaaa

SEQ ID NO: 47686 - RNA, 19 nt, Artificial Sequence
  Synthetic oligonucleotide: CTLA4-2330
aaauguauucaauuugaaa

SEQ ID NO: 47687 - RNA, 20 nt, Artificial Sequence
  Synthetic oligonucleotide: CTLA4-981
aaaauguauucaauuugaaa

SEQ ID NO: 47688 - RNA, 21 nt, Artificial Sequence
  Synthetic oligonucleotide: CTLA4-2331
gaaaauguauucaauuugaaa

SEQ ID NO: 47689 - RNA, 22 nt, Artificial Sequence
  Synthetic oligonucleotide: CTLA4-2332
ggaaaauguauucaauuugaaa

SEQ ID NO: 47690 - RNA, 23 nt, Artificial Sequence
  Synthetic oligonucleotide: CTLA4-2333
uggaaaauguauucaauuugaaa
